United States Patent Application Publication US 2007/0083945 A1 - sequence listing, part 20

SEQ ID NO: 134560 - DNA, 460 bp, Glycine max
  unsure (1)..(460): unsure at all n locations
tggatgctgcttatggnggcaacctcatgttaatgttctatgttgatgccatcaaatcattgaagacatgtgctttaacccctacaacaactcaacagataggacgattatgaaaagaggcatcaactaggtggagacaaataaattttaccttaaaacaaataaaaagagagaaggaaaaagggatcaaaagtttaagtgaaataaggtgcaaaaataggttaaagttcccctactttttgagtgttntcatatgattgagcggagccctttattagcctatttccttcaatacctaccttacattacatgcttgtccccattacaaccaaatatgcatcacttgttatgaatntttgggatttatctaagttgagttgatggatctacaaagttgcgaacttgttcgttgaattgtgatcttgagtgtgacttcctatttgtataacattgggagatg

SEQ ID NO: 134561 - DNA, 453 bp, Glycine max
agcttctcaaggaatgtttctcaagaaagcttcttttgaagctaccgagtctataaatagaagcatgtgtaacacttgttgcaactttgatgaatgagagtcttgtgagacacaactcaaagttcaacttctctccctttttcttccttcaatttcgtgctcccccctctctctttctctacctctttcttttcctccattgaagcatcctctccaagcttcttatccaaggctcatcttggtggagaagctccttcttccatggcttattccctagtggatggcgcctcctctcacctcttctcctttgtcttccactgcatctccatggtggaaaatcaccattaaaggacctcattgaagctcaaagatccagcctccatagaagccccacaaggaagcttccatcaatctagccctcaacaacaacaatagcaacctactccttccttc

SEQ ID NO: 134562 - DNA, 503 bp, Glycine max
  unsure (1)..(503): unsure at all n locations
atactcaagcttgtatgccctctnccctcggcggggatttcttcttcggttaatgcgagatagttgttagcagtgatattattgaccagccctccgaaaccttctaccgagatgtcttgggccacatgagcctcgttcaaaaccttcactagcagagcccgatgaggctcggagcttatgagtaactccaacagcgagaccctggccggggttttgttgagctgttcgataaccttgaattcgctctgctgaattatacggaggaactcactggcttcctctagtgacacctcctttntaccatcctttttctccggaagacctttcgccggaatatctttattcgaagtgaggggtgcttcgtcatcttgttcctccaccacctttgctttccccttgacgttcgcgggttggactggtaggtccgggggtgcaaacacacgaccgctacgggtcacaccactcggtcccgtgatatttggtaccttagccgacaacgagct

SEQ ID NO: 134563 - DNA, 432 bp, Glycine max
agcttgttgcagatgtgataaacccaatattatactattgttgttccagttgtgtggatgcaccagataaacacggctagtaaacaatgaagatatccacccatgaataacgagcaaagagggtcccaaaagctgcacgtgggcttgagcttaactcaaccccaaaagctaactcataagatgaaggttgcctctaacttatatattctatgttgatctttatctctagctgatgtgagacttgagtttttttcaatacaccccctcacgcccaacactaaggacttgatgcgtggatgacatggtgggtggtccgtttaatggatctatgagactctgattccaagcaaatttcagaagcacctagtcctataaatgatctccatggacctgattcaaaccacatgaaatactcttatatataatgaatga

SEQ ID NO: 134564 - DNA, 483 bp, Glycine max
  unsure (1)..(483): unsure at all n locations
ttattctntcctgacactagaggcactcgcacatactttctttctttagatccncatggagaaatgcgttattgacatccaattggtgaatgaacccattgttgatagataccatagccaaaaggtcgaactcggattatggttaactctgccattggagagaaagtattaaagtaatcacacccttaatatggaagcaattaacctttggtcaccaaccgagccttgaacctagctcttaatagatccatccagtttcctcttaattttgtacacccattggcagacaatgggcacaacattggcagagggacggatccacgaatgcattaaagggggtggngggtcgattctttttacataattatgtaacttctaataaataattatttgataaataaaagacttagatatcgttttggtccctgatcaatacccantttttacattnnggccttaataaatatttcctttggatcaagt

SEQ ID NO: 134565 - DNA, 466 bp, Glycine max
  unsure (1)..(466): unsure at all n locations
agcttgcaatgaaagatattgagtatatatgtattccagtgtcaatctagacacacaaaccaaggccataattcaaaataggtaagatagaaatgatgatagttattggcacaaacattgagttctcaaactgctactaaacttgcaatcaaagatattgtatatatagtaatgaactttccatccagcaacacaaatttgttttatttgtacacttaaatctgttagattgcatgttcaacttaaatgtcaaatttctatcttacatcttttatttggacaatatctaacaaaagatgcaacaaagaagttaagtaaaccttgtatcagagatgggcatcaattctttatatattgcttgtctagcgcaccacanattcttttttgatttcttttgtccatggattagacttgttttatatagctctcattntctctagttaaaatcggtattatacttgcatga

SEQ ID NO: 134566 - DNA, 502 bp, Glycine max
  unsure (1)..(502): unsure at all n locations
ctatatcgatcctttaaagggtttatgtaaaattaatatagtcatttgttactntctttntgtattaacagtattagttntggctatcacatgataaatgtctatctagcataacatctctcatacctaatcacatgttataacaacaattaacaacaacaaaatccttatcctcctaggtaaggttggcaacttgaatcatccgacaccattttgtttggtaaaagactaattattctaaaatactatttaccatgagatccatgaccaattcctccggtgtctatcttagctccagtttcttcttcttcattgggcaaaaaaaaaaaaataaaatcatataacctattattttcactagtgtcttcctacttgattctttttatctgtacaaaccacctctataatgacgtggctcctntacatgaaactaataactaaatntaatagaatattttattttaatacacacacacacacacactcacacacacacacacac

SEQ ID NO: 134567 - DNA, 480 bp, Glycine max
acctgaggcgtgcaagcttaatactcctaacatagtgactgttagtgtattttataccataatgatcacaaatcacaagctagtacataaacattataattaatgtcatcaaaaacgcaagccgataagtgagcataattatttgactgaagagatggatcccattaatgcaaatgactctctattggtacagtctatatagatcttagaggaagcctgcaacaatccaaggatcactggtgagactgtagtgtggagatgcatacagatatcagtaagaaaccaatcacatttcttctatatcaatagtccatcagccagaaattcataatatatttggtaccagtaaacgtttcttgtatatatcattaaattcttgaggatgcgtttttgtctgtgtataagcatcaatattcttcacctcatctgaaacaaacgatttctatcacagatgagatctctttagaactagtatatgcg

SEQ ID NO: 134568 - DNA, 449 bp, Glycine max
  unsure (1)..(449): unsure at all n locations
gtaacaagagaacaagaacagaagttaatatgctaatgagacagtgaaaaagttaaggtggaaaactaaattcacatttatataaaccacacatacagaaactgaaacttttatccaagttattaaggaccaaaagcataagatatagcacatgacaagaagactttgttcaaaagaattcaagatgcaaagttatgtctggtgaaacccaaatattaccaggaaattgagctttaaagcttatgacggatcaacatagaaacacaatagtataaaatatcctcatgttccaccaatacaatattacaccatatacatggcaacaatatgagtntccatgtgcaagtggatgggcatgcagttgcgccattgtactgcaggaaaagaaaatgcaagctgacctctatcgctacagctgatttaagtgaaattacaaaatttccatcttc

SEQ ID NO: 134569 - DNA, 462 bp, Glycine max
  unsure (1)..(462): unsure at all n locations
agcttcgagactccacctgatggcaccaactgctgttttggattgctaggcttcattgtcggggcagcactagcgtgggattttcgacctccaacgtgagaagtcgtggcgacaatgcacttccttgccgccgccagatccaaaagaccttcaacaacatcaagatcaccattctctatggcttcgtcaccatccgcggcactagtctgagaaaagcgacacgacacaacacaagctttatgctttttcttcacttcttctgtacagcacccaaggtgagttattagtgagtgaacaaggaacaccttcttcttcttcttcttcttactactactagataacacgttttcaacattggtcaaaatggtgatccanagacgatggttaactattttcgattgtgacgttgttgaaactacaaatcttcaacatcggtcagtaattcaccgatgtagaattaca

SEQ ID NO: 134570 - DNA, 432 bp, Glycine max
  unsure (1)..(432): unsure at all n locations
tcctcatgcagncaaagcacaaaggctgtttaatttgtttcacacacagaaaacaaggattatgacccatccaatcacctagaaacccatcaaatacatcacataagacatatntacacgtttccgtccacaaacctgcgtatgtgtcgtggcaatctcaaatgctcgagtcaggacagcaatagtataattaaacccagagttatgaggcggcatatggccaccagaatcagcccctgtgcccaacaaatgcgccccgtttccatcaatccccgattcatacttgtacacaaccacaaatgactcctccatcgccttcccaagctgtgcaacggcatcaccgagtggccgaagagcatttgcctgaaccagaagtctctgcttgtgccacaccacatatgaactgttcactttagtcgtactcagcacact

SEQ ID NO: 134571 - DNA, 457 bp, Glycine max
  unsure (1)..(457): unsure at all n locations
agctnggttcataacaaacttagccctatattttgtggaagttatatgttaaagcaaatatgtcccacatttgggggagatactgggtaagaattgaaatggtcaaagtaaatagcatacacacactatttctgtatatacacacactgtgttatgtgttaaaaaaaactgtaagtataaataaaaatgtataaaagtatgtgtgctgcatatcaatgaaataaagctaagtgcttcaataaaaggcaagtattggggtgaaaatgaatgaaaagtaaaggtttatctatggatgaatgctctcctagaatctaagcttttgaatcctataaaaaccacgatttgttggcagcataacctcattacaagcctagaaagtccttcggattcatnttctgtatgggatgagatgaaatgcanagaatatgacttgtttagttgtttatgatgcaatgag

SEQ ID NO: 134572 - DNA, 442 bp, Glycine max
  unsure (1)..(442): unsure at all n locations
tgatgccttaccttagtgctattctcttcctttaaccccttgaggaacacttccaccagaaatggctcctccaaccctttcaccattgcaacgcacttctcaaattggtctatgaatccttgcactgtctcttcttgtttgagtgccaacaatgcttgaaaaggatttcccaggatagaagcttgaaacccttgggtgacagctttggattccaagattcccaccattggaaccaacctagagctcccccatccatcgtgaccattacaacctccagcttgtcctcttcccttacgatgtgcaaccgaaaatattgttcgatctttntcaaccaacccataggatcctcactgtcgaatatgggcattttcaaatttctccaccgattgtcgtcatgcgccacagtgcccttatctcctncgctcgcaccaacgtgtgaacg

SEQ ID NO: 134573 - DNA, 459 bp, Glycine max
agcttgcaccagatcatataagatatatgcattcttgcaatctgcagatatatcctcctaaacgtcaaattctccgcctatatattcaacctttccatcactggcacgtggagtgagtcttcctccatggtgcaatactaaagttatattgtcattcattctacacaatcagaaaccacaaacattgtcatatattaggaaataaaaagcctaccgcaaactcaaacataggcacatcacacaacaacatgcaatgtcatctataaaaacaaagcatcatacacgaaaataataaaggatcataaacctccctacgaagcgcgaagacaatgcagatgaaaccccttgaacatataaaaccccaactcaaaccaccaaaacaatgcaaacaaaatgaacgcacaataaccaccaacctgacaaataacgcgaaccctcacaatcacgagaatgcagggg

SEQ ID NO: 134574 - DNA, 479 bp, Glycine max
  unsure (1)..(479): unsure at all n locations
cgcactgattaatattcacgaaantgngataactggtgaatgtataactgccaggaaaccacattacaagcgaaacctcaaagagagttgggcttcgtcctcaaaaggaaacaacaccagaaaatctagccttccatggattcaaacagaaaacgcaaatgaaacatgaagcagaaacgtaaatgaacagaaacgtaaatgagacagaaacataaatgaaagtagaagaagaagcaagaatgaactcgtaattagaagcagaaaacggaaatttgcattaagaatgaaaaccgtaacaagggaacagaaaaacgtgaaaacctaaaaccaaagctctgaataatgaaaatagcagaaatagaatgccttgcatgaatcccaaggctgctatttaaaaagagtcactcanagtcactgggccatatntacaatactctggcccaaaacgaaataaacactgaacaacatanaataaaatt

SEQ ID NO: 134575 - DNA, 462 bp, Glycine max
  unsure (1)..(462): unsure at all n locations
agctntacaacaaggtgatgctagatattataacagttgcaaggaagccttcctaagcatagagaaattaaaggaacatagcttcctccctattacatgacacactagcagcaaataaccaaagtttgatgtgacaaaatgagaaattgataagaaatatactccctgtatgttctataccacccagcaataagtgacacaagttccccttaattacaaggtgccatactccctgtatgttctatacaaaacgagaaataagtgacataagttccccttaattataacgtgccataaaccaagaccaagatcttatattaattagctaatataactattttttattttctgtgatttggctattggcagctgtatgttggtaaactagtcactgactctaaataccgtgtaccattggtagtcaaattaggattgggactcaagagccaaaagtttctatag

SEQ ID NO: 134576 - DNA, 464 bp, Glycine max
  unsure (1)..(464): unsure at all n locations
atggttattctggagtaaattttgttataaatcttgttttatggttaatgttgtctctagaacatttccattggatttaatgatgaaatctgtgcatttttagatgaaaaaatggctaagtttgaattgcaaaaactagtagttaggctaagctcaatagttgggctaagcgcataaccaccgctaagcgcagcttcagcacgcttagcgcanaggagaatctggcatagcatcagtatcaaagttgagcactaagtgcgagatcagtacgctaagcgcagtaggtgccttcagccaggctaagctcgagaccgaacccacttacacacgctaagcgcgagggtggcgctaagcgcaacatcacaatttcaaagcctatttaaagcctgttntgtgtagaattagggtacaaaaacttgaataattccagggcacagaattccacaacagccacagtgcctatt

SEQ ID NO: 134577 - DNA, 446 bp, Glycine max
  unsure (1)..(446): unsure at all n locations
agctngaagaaagagtcatagatgcttgtattatatctataattaatagnctgtaattgcaataggtattattgagctcatcacctcacgaacgaattctattaattattttaatacggctaattctctggacataaaacataataacttgcattttacatgcattggaaggatcaaatcagtataaagtgaaataaaggaggtaaacaaggagaaattgtttatctttgaaggacataatgagaaattgttaagaaaataatcaaatactactgcccagttagatactttgacttggtgcccaacagcaattagagtgcatcaacaatctctattttgacttagtgtgcatgtgcaacagcaattatagctttcaacggtcaaggttctcactgccacattaactattgttgccaagtggacttatatatctcaatagtttacac

SEQ ID NO: 134578 - DNA, 364 bp, Glycine max
  unsure (1)..(364): unsure at all n locations
tctttcttctgatgagtntaactactttcaaatgtcttattatggtatatattcggcatactcagattgtaatcaattcttgctacgagattcatcttgtctaagagagctaaatcagtggtttgctaagcaactggacacagtaagtggcacacgtgtttttctttactttcttctcaatctatggggtgcttttgataggataaatattgtcttcatgtgacaaatactatttttctattaattctaataaattgataatatacttagcttacaaggatgaataggttcccttttgagcgcaagccgtantgcaatggcaaaggttgctaccttttgagttggactacgggtctgtttggat

SEQ ID NO: 134579 - DNA, 424 bp, Glycine max
  unsure (1)..(424): unsure at all n locations
agctttatatacctaagacaatagtttctttattatccaaaatataatcgntcctttattatttggctccttcatacaaaagtcaataatacaaaataaaaaactttgtaacaactacttcaattctgtgtatggaccacataacagttatatgctaacattctcccacttgactcatatattactaatataatctttattttgacaaacaaatatgactataacttgtcaatttaaacttgatattgtcactaaaaattaattacacatgaatcacgacggttatattatagattaaacattttcttccatgaattacaatatgtaaccttttcttagtgaaatatagggtcttaacattattgattcaaattgaatcctttcatgactaacttaatgtgcacaagtcatagaatgaaaaaaa

SEQ ID NO: 134580 - DNA, 381 bp, Glycine max
  unsure (1)..(381): unsure at all n locations
gccgaccgcgcggcatgctagctataacctatacacacgttgtgttgaaatctatctggggacggaaatatnccctactagatcggaccactacaactcgtcattataatcatggtgtagtatatgtcgcctaggacgtgtgccagggatacagggtgttacaatctagtaggcatctacgttataacatacacattctgatagcacataacattgtgtatgtgatcatatgggaaaacggccactgaacaatgataaatggatcgctggtagccctacgaaagcaggtgagacaaattatacttgagtgcttttcaaataggtgatctctattaacagtacaattggtgtagagtgtgtttacgtatcgctatgtacaca

SEQ ID NO: 134581 - DNA, 317 bp, Glycine max
  unsure (1)..(317): unsure at all n locations
acgactatcatccaagaagagattactattattctatgactcttgagcgctactagattaagcataggtgattaacaatttgcatgagaaatgagttctagaacaattaggtcacgttggtaatcacacaggtaacaccaactttcttaggcttttcatatttgagctattnttttattgcctatgctattgagcattgagattctcttaaactggctatgctattcttatttgaatacctttcctcggaacaatattaattcatactccacactcaaatattgtctaatgattaagggaagggagatcttctactt

SEQ ID NO: 134582 - DNA, 442 bp, Glycine max
agcttgagatgaggaagtgttgtatgttgtatcttcctgctctaattggcgaccacagagtggtacctggagatatcgtccgggggtcacgagaccttggggacgtcaggaggggtgctatcgcccaaaaccaagcttgaccaatcccgacccagcccgggcataggcggtcagtgagaacctgtgatgtacctaaacaggcgaactcctggcagtcagcagataaaaggaacatagaccactcagcaaggaggcttgtggtggctggccacctgtgaattttgtgtaatatgaggattatggcctctggtaatcgatcaccaagggcgggtaaccgattacaaggcttataattgaagacaggaggctcagatggtctctggtaatcgattaccaacgggtgtaatctattaccaggcttaaaaacgaagtcatgaaactt

SEQ ID NO: 134583 - DNA, 489 bp, Glycine max
  unsure (1)..(489): unsure at all n locations
tcagctaatattagaaagatgtttatttctaatgtatgtatcttaaacaagttatctaaggagcttataaggggaaaaaaactgcaaaggtagtgctcatgccttctttttggaatagtgtggtttacactcttaaagtcatggcttcacttgtcatagtgattcgtcttgtggatggtgaaaggaaaccagccatggggtatatttatgaagcaatggacaaggcaaaagaaacaattatcaagtctttcaacaacaatgaaagcaagtacaaagatgtgtttgcaatcattgataaaagatggaattgtcagcttcataggccattgcatgcagcttcctacttcttaaatccagagttcttttatgacaacactgatttggagttcgattatgaggtcatcaatggattgttcgactgcattaagaagtcggctccataatttgatggcaacaganaatttaactgagttgatctttacagaatgg

SEQ ID NO: 134584 - DNA, 455 bp, Glycine max
  unsure (1)..(455): unsure at all n locations
agctngtacgagagaatctaaagttattcttgtttcttgagtggtgaaaaatgtgtcttacaaataactagaaaaaaaatcttatattaattctttcaattttttagttgctctttatattcatttttctaacatttttcataatgattaaaactcttttttatttgaatatcaattggattctataattttcatatgtttgtatcttatagtacaagtttcatggctcgaatgattataaaaaaacatcaaagttattgtgtcctttaatataaaactatcattattttggcaaaatatataaagatttaaattaaactttttaacagataaagattaaactaaatataaattaaaaataaaatactaaaaatatattctactcgtccatataattagataaagtttttccaaatttatgaaaattctaaattcttattcttatatagtttatg

SEQ ID NO: 134585 - DNA, 341 bp, Glycine max
  unsure (1)..(341): unsure at all n locations
aaactacatagtgaagtctttttcttataggngactaaaatcatagatactgttaagaaatgggggatgaaatatctcaattaaaaaaataaaaaaactaaaattataaattcttgaaaaatgagggacaaaatgtcttaattaaaaaaatagagggattataattgtgcatttgaaaaaaacttgaggatgaacaatgcttttaatcttcttttgattataccatcttattgccataaaatacttaccaatttttntatgattaatctgggaaatctaactattcacttttattgagtctctctccccaattatgttgtcatattatccataatactcta

SEQ ID NO: 134586 - DNA, 461 bp, Glycine max
  unsure (1)..(461): unsure at all n locations
agcttcttgaggagaactcgttcaggcggtgtactgtttatttcttttacatgctcttatttggtgccactgtattgactggaattgttcttcttgggggcatgataccttatttatcagagtcgttcgcaaaaataatattccttagcaactcattgacatttatgatggtaagtcacatttttatttttcactcctcgtgttcgaatctgtcacaattcacaaacgtgaaagcttaattcttcttttttcaggtttacgtgtggagcaaacaaaatcccttcattcacatgagcttcctgngtctctttactttcactgctgcctaccttccatgggtgcgtaagctctataggataggataacatctaattgggttatacttaattgatctttgattttgtctcttgcctaagttcatacttatggtcaacgcaacctaaccttgaagttatgcttgg

SEQ ID NO: 134587 - DNA, 446 bp, Glycine max
taacgacttctggcagcacagcgcgattgtttctttatgaccactaatttcaagactcacagcttgtccttgtcgaggattaacaacatcattgagaccgacaaggatgtaaagatgatatctgctgagactcccgtggcgtttgccaaagcctgtgaaatgttcatgaaggagctcacaataagggcttgggctaatactgaggctcgcaaagggaagatactttcccagcgtgaccttgtatccgccatctcccagactgctttttttgattttctcgatgatattatgcccaaggatgcaggcttaccaagaacaagcattgcttcaacagagaatgcttatctaaacatgccacctcagcagaatgttgcacgcccttcatatgatgctccaaccatggcctttcctaatctacaccatcatgctcccaattaggatgagtg

SEQ ID NO: 134588 - DNA, 476 bp, Glycine max
  unsure (1)..(476): unsure at all n locations
tctaagtcacctgcggcatgcaagctaggaagaagaatgaatatggtgttgtcttttttcatgaccagctcatgaaagagaggaagaatgacanaagtttgtgagcttttagagtttaaatgaaacttatagaagaagcttacagcatggtccattggattattgtgtaggacttaatggccaaatttgacacactaaatgaccttgatgggctatgtgtagttgtgccatccaataccaagtgtggcgtgcttcacttttaaattttttactcaaaaaggttaaagtagagtttcgcaaaaatggatattcttgctttatactaaaactagtaaattctattctaaacaccttgattggtgtgctaatctccatatgattacatgtaatcagagtaaacctcacattgagattactctctccagggccatgtacagacattntggagcctaaggcgaaaatgttaaaggggtctt

SEQ ID NO: 134589 - DNA, 466 bp, Glycine max
tatatatgtatgtttatgtttgtaaaaaccttagatatgcatgtatgtaacaaaaaaatacttcacgaaatatatatatgtatgtttaggtagaaagataccttggatatgcatgtatgtagcacaaatacttcacaaaatatatatatgtatgtttatgtagcaatataccctggatatgcatgtatgtagcacaaagatatctcacaatatatatatatatatatgtatgtttaggtagcaagataccttggacacgcatgtatatagcacaatacctcacaaaaatatacatatgtttacgagcaatatacctcatggaaaaagaataatatagagagaggttatgaacaaatgatgaataacttataaaataaaaaagaggaagaggagaagagagcatgtctggaaagaataagatggacggaaaaagatataattagaataagagtgtctagctaaaaca

SEQ ID NO: 134590 - DNA, 394 bp, Glycine max
tgattctttgagaccctgcactgagacacactctgataaccaaagcacacacattgagactgtgacaggccgacacaggcacaaacacactgacactcggtagctcgcactcacacactcacagagttacgcacactttatgacatagacatacgacacgcacactctgagtcattaacacacgcagagactcacactcagagacgcgcacactgagtggtaaagacacacatacagcaagcactctctgtcacatggacagacacacacacactcacgtatagagacattcacgcactcacactgatgaggagacgaccactaacacacagataaagagacatagacaggctgacacacaggtgcacacatatagagagactgacatacacac

SEQ ID NO: 134591 - DNA, 424 bp, Glycine max
  unsure (1)..(424): unsure at all n locations
ctaagcttcataattctttccttatatttctcgtacaatcttttttatgaaagaacgtgggattttggttccagtcctcactatgtgctttaaaatatgtgcagtatttgataacctaagccttttcgctcagtccatgagatgccccaagcgcttaattaaaactgaacctgaccagctttcgctaaaaagattatcgcattngaaaacgctcatgcatgcgcatacacatgcatatnttgttatcttatgacaggagcagaatcgtcttaggcgatggtcaaataccgggccaaatccaaagacagagaccaatcaaggttaacgggaacgcggtcacaggttgttgcgcaatgtcatttcctactttaaagtacttagggacggacgcgagtagagcctaggaccatgatcgatggattgt

SEQ ID NO: 134592 - DNA, 466 bp, Glycine max
agctatgagtaccccatgtgattccttcgattattattctttctttgaataaatgttcgaggatacattagataatttctatgtgaccgcccatgatatactcgggatagtcgctatatcagttacaataaatcacctcctaattgtcgctatccaattgaatgcgattaaatgaatataatcaaatacttgactcaaacttaaatgctttagagtaggcatttttctatgtaggaaaaaacctatttgagagttattctaaacaatgaatcaaaattggttgatttgattgatgtaattgagaaatagtatagggattgatttattgaatttaaaaacaaaatcaaagtattttagaacaacttaaactgatccaaaattacaaaattggtaaaaacataagaagggttgtattgatattttaagaagtattcttaacatttaaactaatatatatatatatata

SEQ ID NO: 134593 - DNA, 496 bp, Glycine max
  unsure (1)..(496): unsure at all n locations
atactaagctntcgccactcatgactcatgtcaacgtgcgagcgacttgttttgttgtattaaactaaaataattaaatgagaaggtgcttccttctcagccattaccgcaacttctgcttttcctctctgtctcacacaagatagagagaattgcttagtgcgttctgctgtttgaaaactttctgataaactacattcgatttcactggaatcagtgcgtctaagacctttccaattcagtcatataaagaggttagtgcggaattaaaataagaaatcatctatttgaaaatcataattttaaaacattgttttatagtattttacatgattaactaatcataatctattattaatataaacctttcacattaatattttaaaaatcaatagatttaattatcatattattcattattatgcataataaaatcaccgtctaaatcttgaactataacttttacgcaatacgtcttgttcactataaactctat

SEQ ID NO: 134594 - DNA, 415 bp, Glycine max
agcttgtgcagcactatccactgctttagtatattatattgcaggtggaagttgttgtgctcaaagtctctggatgaaataacaacttgaagacgttggagtaatccttgatcacattcccttgaaatgtgacaacacaagggctatcaatctatctaaaaatcctatcatgcattctagaaccaaactcatagagataagacatcattttcttagagatcatatatcaaagggtgattgttgtattgagtttactgatagtgagcatcaactagctgacatcttcactaaacctcttgctagagataggtttttcttcattatgaatgaactatgaggtatcttagatgggtctagtattgaatgacaattaagcttagtacatgtagcttggtatatatgctctctatgtcta

SEQ ID NO: 134595 - DNA, 484 bp, Glycine max
  unsure (1)..(484): unsure at all n locations
actcagcttaagtacccaaacaacatcctaacttaatgttgtatgttgaagtgtgtcagggttagatagggtatggttatgacacgaatgagctaaggttatggctactataagctataagataggtcaaggttcttgtctatgactagggttagggttagcatcanggtaaagaacgcgtagtgatttcaaaatttaaaataaaaacaaatacttagcataaataataatagtaataataataaacatcattatatgttcttaaccgcatacatgagtttaattatgatttgaggtttgagcaacatataaggtttaactaggttgagtgataatgtcagacaagtaccgatgtcatggtcgaacgccaaagttttgaagctacctaaaacaaacatccattgatggattagatccgatctttttattaaatggatcagatccattaaatattctttaatggatcaaaatggagtaatgaatt

SEQ ID NO: 134596 - DNA, 336 bp, Glycine max
  unsure (1)..(336): unsure at all n locations
agcttgttcttggattttcctcagttctttatcaatcnatgaacaatatacttggccttcatttaactgtctttgcgcttggcggccacgctcaacaaagtactttcgacacctactgtacgttgatttgaccaatgctgttatgggaatgttgcgacaatccttcaaaaccttattgatacattctgaaaggctggttgtcatgtggtcatatcgacgtccttctctatcataagccatcgttcatttttccttcgaaattcgatcaatccatgtggctatggctggactcagttcacgaaattcttctaaattcttgatcacaaatgtgcctgc

SEQ ID NO: 134597 - DNA, 331 bp, Glycine max
  unsure (1)..(331): unsure at all n locations
acatcttgacttgctgtccaatctgacattcttattatatttgccttcttctattttcagaatgggaatgcctctaacagcaccttcgtcaatgattntcttcatgcctcttaagtgcagatgtccaaatctttgatgccatattctgacttcatcttctttggaggatagacatgtggaggagtaactggtttcttgaggtgtccatatgtaacagttgtcctctgatctgctgcccttcattagaacttcactcttctcatttgtcaccaagcattctgactctgtgaagtttacattgaatgcttcatcacacaactgactgatgctg

SEQ ID NO: 134598 - DNA, 464 bp, Glycine max
  unsure (1)..(464): unsure at all n locations
atctctatagagccgacctcgcggcatgcaagctntgagataattcaaaccacaatatcttcttactcgaatgtccgattgagtcctgtattatatcgagacgctcaaaattgaatacgtaatctcctagcaaattcaaaccacaataactttttaccgggatgtctgatggagtcacataatatatcgcgacgctcgaaatttaaaacggaagctcctaaaaaactcaaaaaccaataactttttactcggatgtctgattgagtcccgtgatataccgagacgctcgaaattgaatacagaagctttgagaaaattcaaacgacaataactttttactcgactgtccgattgagtcctgtaatatatggagacactcggaattgaattcgtaagctcctagcaaattcaaaccacaataactttttactgggatgtctgatngagtcgcataatatatcgag

SEQ ID NO: 134599 - DNA, 466 bp, Glycine max
  unsure (1)..(466): unsure at all n locations
cgcctcanagaggtccaggaaggacaaggcggccgaatgatctatttccgccccggagtatgacagtcaccgctttaggagcgttgtacaccagcagcgcttcgaagccatcaagggatggtcgtttctccgggagcgacgcgtccagctcagggacgacgagtatactgattttcatgaggaaatagggcgccggcggtgggcaccactggttactcctatggccaagtttgatccagaaatagtccttgaattntatgccaatgcttggccaatagaggagggcgtgcgtgacatgagatcctgngttaggggtcagtggatcccgttcgatgccgacgctatcagccagctcctgggatatccgatggtgttggaagagggccaggaatgcgagtatggccagaggaggaaccggtctgatgggttcgatgaggaggccatcgcccagctgctatgtataccg

SEQ ID NO: 134600 - DNA, 456 bp, Glycine max
  unsure (1)..(456): unsure at all n locations
agcttactatcaacacctcatatcttgttattctcaccattacctttgtttctgattgatttcttcttctaaatttgctcttcataacaccctttaatcacagtactcttgttacacactntgttctagaattaaattatgtatctatctaaaaaatattgcgttccaaaaattaaattctggaattcaactggcatactttcggaaatataatgtgttccggaattatatctttggaagtaccaatctatattaccaacatccttttcccatgaaaggattgctgaaaaattagctgtcactcatcatatcatttttggcgatgatgatattgctcttatatattcgacgtattgtttatttttgctttagtattacttaattattcaaatttaaacatacacttttgaataacaaatacattgattatnggaattacttgaagagtaaagtcta

SEQ ID NO: 134601 - DNA, 311 bp, Glycine max
  unsure (1)..(311): unsure at all n locations
tctaagctgctcggttatgttccttttaacaacactgtgtgttttttatgttctgcngttattatttgggggaatggaaaggtggactaacgaaccattgaattatcaattgcatttcaactatatggactatggacatataacagcagtagtagtagtctcttacacgttgcttgtgattattgttatttgagatgacatggacagatgatgacgcaatgctgaatttggtaaacttaatttccaatgatgagtatcacgaatgaatttgtgactagggcataaatctgtttatttggtggagtcataac

SEQ ID NO: 134602 - DNA, 439 bp, Glycine max
agctcgaagacatgactatacgatgtatcttccttgggtatagcaatatctctaagggctgccgtgtctacaacttgcagactaagaaactcgtcattagtcgagatgttgaagttgatgagtacgcttcttggaattgggatgaagaaaaagtggagaagaacgttcttatacccgctcaactacctcaagaagaagctgaggaagaaaacccaggtgaaccaccttcgcctccaccacaacaacaagatcaagaactatcatcaccagagtctactccaagacgagtaagatctttggtggacatatatgaaacctgcaacttggccatactcaaacctggaagctttgaagaagctgtaaagcacgaagtatgggttaaggcaatggaagaagagatatagatgatcgagaaaaacaacacatgggagttagtaaa

SEQ ID NO: 134603 - DNA, 451 bp, Glycine max
  unsure (1)..(451): unsure at all n locations
caaactgcnaaaagatttccgatgaaatgaatctttgtttcaattcaattttccaaatgcatgggcaaaatgtcttcttcatggtgctagtcacctactcggttgaactgcatagatatccgagactccaggtcacgaagcaaatcacgtacaaatcctgctgcatcagctttctgaccagagagatagcgttctgttattccatgcattgatatacagcgtaaagggtcaatcttatatgcccaatccacaacagcatagaagtcttcctgaaatcatataaagcagtttggtagctgtaaatgctggattttaaatatactaaatcgctgccaacaacacaacaaaacctgaccaattataatgaacagattaatgttcagtcatagtccctaacatcaaatagattatattcatattatataaacaaatccaacaatgttggccttct

SEQ ID NO: 134604 - DNA, 449 bp, Glycine max
gcatgcagcttcttataagctgaactctttatattattcacaagctgagttttattcagaaaattagagtttatctcttttatcttagagagagtgattctcctaaattcttgagtgattcaagaacaccctggctgtatcaaaggactttcacaacctttgtgtgttgccctcgctggaaagagtgattctttccttcctatcatctccacccttgttctttcaaaccacaattccagaaaatccacctctgcccaaaattatctcgtgaccataactcccatttcacacactcaaattaagtgattcttgagcctaaattgaatttcaaaacgagacctttcacctcgttttggaatcacctcatttggaagctctgtagcttcgttattgccatttctatatttctgtccagccaccacttaacctacagtttaccatcccattca

SEQ ID NO: 134605 - DNA, 428 bp, Glycine max
agcttatatacagaaaaggatttctattgtttcttttataaatatgacagacatgtcatgaaagtaggacactaaagctaatgatcactgtattcgttttaatgcatgctagcaggaacaggtcagaatctttgccaaggtcttacaaagaaaaataagagtatcgctactctcaagggaatgataaatgttgtttgcatacacatggctgcaaattttgaagagactggtggcaaaaggaaggagcaattctgagttgtagttgtggtttgatgttggtacgtatgctacaactctatgccaggagaaatatggtgattttgagggtgggtggcttgtagttctgggtattgttgaagtggtaaggaaaatctcattgtatgcataaatatgtgcattagaagtgagatatactgtcctgatccact

SEQ ID NO: 134606 - DNA, 379 bp, Glycine max
atcatcatctgaagcagcgcggcgagttattatatatacttgccactagacaagtaattaaataagagtcctcctcctcctccgtatttcctcttcattgccaccagcaacttcatcacacacacacacacacactgtttataaaaaaacatgtcttgctgcataaaccgaaagcgcattggagatgcatcgattgctccccaaagaagaataccttcaacatcaacacgagcagctagcactagttcattacctttggctgccctgcaccttcctcgcttctgcatcataagtccatcggaaactcctgcaatctatgaaccagaattctcaagtgcttgattatagaagactgtagcccgtcttcttctaccctgtg

SEQ ID NO: 134607 - DNA, 463 bp, Glycine max
  unsure (1)..(463): unsure at all n locations
agcttgaagacccatagttaagggaagcttattctttcttttgaatcctatgattgtgtaaatgcttgaatatgacttgtggattgtatggaagttgtgctttattattattatttttgatttcaaagttaatgttttggtgtgcttggggatgattgggaaccaaaagttgcattataaggaattgtttatactaaactcgaaaaactacaaaattgcaatgggcaacttaagcacgagtaaaagtaagcttaagcacgacgagcttaagtgcgatttcactcatgcctaagcaccaaaaccaaagaagaagaaattgaactctagatttcgcacttaaacaagaatagcggcacttaagcgtcagacctactataacttgaataaaatggntttcanatgaatntaaattagaattcttcctattgcataatctaaaatggaatgaatagagttgacttca

SEQ ID NO: 134608 - DNA, 361 bp, Glycine max
  unsure (1)..(361): unsure at all n locations
gatttattttagcagattttttttacccctcctcatgttggttttaggaaaaaccataactaacgcgctgcatccctaatttcgccggggaccttgtcgatgacgtgcgaccatttttggtctcggaggtgctggccccatcattangaatttggaaattcaggacatgccgaaaaccaaaaaatatgatgccaatccgaagtttcgtgacacaccgaaataaatggacatcgtgataattaaggggttcgtacattcgtagtcaaaagggagatatgtatccgcaggttcgtacattcggaagaaacagatcgtacaaattgtagtttcgaacttacaaaaaaataccaaaaacgcgagg

SEQ ID NO: 134609 - DNA, 471 bp, Glycine max
  unsure (1)..(471): unsure at all n locations
acctcgcggcatgcaagcttataagaacaagattgcctcaatcatatccatatatgcatcacaattaagagacctcatcctgaatcgagccnatgctgttgtgccagcaatcaatggggctcaacacaccagatgattgtgatgaccgatggcttccaatgtgacagaggtaaactcatggctctcaaagagagctttctaaactatcgtgacatgtttaggagaatcgcgatttcagtctcaaaatgtcctaaacttttattttcaaaacaattacccatttactgaacatatcctatgattcatagaaaaacatgctaagtcgcacatgcgcacagaattgacgcaaaatataaaactgaatatccgacgaaactaacaacattaaccaattaacacggcttacggattcacataacccaccaaaccgacaaaagcctatgaacactccttcgatacttaaacaacaca

SEQ ID NO: 134610 - DNA, 345 bp, Glycine max
taagctcgcagaggaggataaagctctcttgcttctgaattccttactcttatccttagaacatttcaaggatgcaattctttatggcaaagataaaggagatgcaaaaacaacaagactccaaatctgaggataatggtgaaagcctgaatatttcaaggggaaggagtgaaaagaacggaacaagatgaaagaagtccacatcaacgttaagggattcaaagaatggccagaaaacaaagttcaaatgctctaattgtcacaaaactggtcatttcaagaaagactgcctatacaagatcaagagaggatctctggactatgcagacatagttgaagcctctg

SEQ ID NO: 134611 - DNA, 477 bp, Glycine max
  unsure (1)..(477): unsure at all n locations
tcatcgcggcttctntgagaagttntctcaagaagcttcttttatatattatacccttatctacccacacctctctattaattaaactcacctccttgaaaataattacggataaaaataacacaacgaatataatcaaacatcaaacatatttactaacaatatatagatatatattagggtgttacaactggtcccttcctagggagaattgcatcacacctcatgtggatgacatttaaccccttagctatccccctaggacctccttagagcctaggatagtttgcctctaagatctttaggatatagtctaggcttaacattatgttttctgctatgattactatgctttggntattctgcgatatgattaatcatgcttgtaagatttcttttaatcaatgaaatatgctatcgctctattatcctaccttgtgtgncatgatattatttgttattctctctttatacaca

SEQ ID NO: 134612 - DNA, 381 bp, Glycine max
atagtagaccacagagtggtgcctgcagatatgtcgcgagggtcaggagaccttggggacgtaaggcggggcgctattgcccaaaacctagctagaccaatcccgaaccaacccgggcttagactgacagtgagaacctgagatcgacctaaacaggcaagctcctggcagatcacatataaaaggaacgaagaccacacaacatggaggcttgaggtggctggccacctgtgaactacgattgatatgtgggatataggctatggaactgttgccagtggtaggaatcccatacaaagtcatggttaaacatccgcgatctcgcaatgggaatggatatcaatcatgacgttggcctagaccttcctcttactacaatgc

SEQ ID NO: 134613 - DNA, 438 bp, Glycine max
  unsure (1)..(438): unsure at all n locations
tcctataacaacttccgttgcccatcggtttgtgggtgacaagtggctgaaaataacaatntattgcccaacttgctccacaaagtccttcaaaaatgacttatgaacttagagtccctatcactaacaatgcttcttggcagaccatggagtctcacaatcgtcttgtagaacgaatcagccacatgggaagcatcatcaacttttttacatggaataaaatgagccattttagaaaacctattaacaaccacaaaaatggaatctctaccattgctttggttttggcagccccaaaacataattcatggataaatcaatccaacgatacttccgaaatggcaatggagtatacaattcatgaggcttaccctatacttggcttttacatcaatgaatgtcacaaaattttgacatctttttatataagcataaaaa

SEQ ID NO: 134614 - DNA, 464 bp, Glycine max
  unsure (1)..(464): unsure at all n locations
agctgcagctagcgcaataaaactacagcgaattcttttgctttcttacgttgagagagtctgacaggtcaacaatacccttgtaatgtaactatgggtttgagtcaatgattgggaaattgccttctctttatcttgattcgcgttgaaattgaaaaactatgatttttgttaaaccatgaagacttgaacttacatcggtatcataaattttcttatattagataccaatcatctatatgattagatatcatgtgaataggcccggcaaaaatcttgtatagcttcttcaaattctcgataaaaagaaatatgactaacattggtttgaatgtatatataacgaattagctntttttgtacttcttactattagatgatgctcataaatttcatgataggtacctaaagattcatatcaaatgtaattcttatttctattgattcttttgtgctcttcatct

SEQ ID NO: 134615 - DNA, 473 bp, Glycine max
  unsure (1)..(473): unsure at all n locations
tactaagctaaatataatggtattnttaatatataatatattacaaaatattttatttataataataacctttttttcaatttaaccaaccatagaaatatatagaacattctctcaaaaataaaaaatgtatagaacacaagtattttataattaacactcataattnttgcctttgcatctacctcatgaagtatgattgtgtaaaacaaatccaaatatataaataaatctatattcaattcaattcaattcaatccactctaaatccatttaaatggattggtttcatatccaaattcaatattntggattttgaattcaatccaattaattggatatagataccatatntgtaattttcaaaacaaagtcaattctctggacaatgatgattgagattttttttggcaattttgaaagggcttttcttttctaatgtcctcaaagttttcggcaacgtagcatatgat

SEQ ID NO: 134616 - DNA, 459 bp, Glycine max
  unsure (1)..(459): unsure at all n locations
agcttgtgtcaaggttntcatcttgttttatattcctcaatctacaatgatcccttgtgaatgttgtgaaacttgtgatttgagtttcagtcatggtgttaaacaacaaccaaagttgttgatcatcggtttatcattcttcataagcaagattgctcttgttggaaccgtcagtcataattgcctaaaacaattcattgtcccgagattgaagccatcatcaaatttactccctctagtcagcaacaaaatagggcttccagtaggtagttgtgtctgtccaacttgacagaaatggttgaaggaaatttgataggatatcattacaaaaaatctgattcttaacataagcttgtagagtgtagactcattccttaactaggaaacatgaacaaaacagattacaatgatggttatctttggagttctaattctacttatgctatatcacaaatctta

SEQ ID NO: 134617 - DNA, 493 bp, Glycine max
  unsure (1)..(493): unsure at all n locations
nacacctcattgtctctcacagtctttagatttgggatctcttctcttccttgtgttcggactctcagccacttatgatagccaccgatgatcccattactgcttcccctaagctctctgtcctttcttcatgccgcatcccatgccttgcgaactccttggagtaccctcgcgttgtggtcactgaaaccccgtgcgatgaaaggcgtgatgctttcgtctgatggcactcctctcatggggtagccaagctgtcttatggcgaggacgggattataactaatacaaccccttgttcccatcaaaggaacatttggacatctttcgcatgaagatagaatcctgattcttccttccttctagcgagggaaccaattaacagacacccctccatgctagccaagaagtggtcccaatttgcctttcctttngaaattctgataccaatgacagatgtcgtaccggatgtcacgacatcatgcttcaaaacatg

SEQ ID NO: 134618 - DNA, 447 bp, Glycine max
ctgcaagctgacatatcttatcaggtgatgctttctttatccaattacgtctgaaacacaaaaaagcaataatgaataatgacaatcatgagccgtatgaaactgctccctctccattctaattcttctttatttttatttaaaaggatgacaatatggtccaaataatgtatgactggtgcatcataatacaaaagaatgaaacttaaaatgagcatcatagatattctcagtctcatactccaatcaaaatcgacatttcatttcagtcaccaatgtgcttgtctctgtgacttaaatcaaccgcaattttcaagagtgaaatgtatgattagagaacagcattagaatactgtatcttagtttagtcaaataaaaaaaagcttcttttacacaccacatataagaggcatgtcttaagcactctaagggacatacaactaactg

SEQ ID NO: 134619 - DNA, 489 bp, Glycine max
  unsure (1)..(489): unsure at all n locations
ngagtagttaatcttcanatctcttctttaaggggtttattgtgtgcatgataaactaatgctaagtacgctaaattattttaattgaagtctttgtttggttgttagataaaatgatctacaggtgtttgggattttatttattttccatgagaaatgaggccattattgatactttaattctttgcacatctcaatgtatactaaatgatgattatatcattgctattatttgcaggttcttcccagagaaagccacaattcttgctgttgatattcttaatgaacttgttgaggtaaaatttttgctgtaatctcngatttgtaggttagtcagaatgactttatgttagttgaaaacctcctttaacttatgaattaattctgaggtgatctacatttctctgatcttgattaagatttgcaacanaatgagtctggatgagataaagagcattcttgtaacacccattgttcttttatattcca

SEQ ID NO: 134620 - DNA, 459 bp, Glycine max
agcttggtgtgatttatacaaggaattatcttattacttgcaattgtaacttacctcttcatctcttttatgttaaagatgttgacattgtgcatggcacaataaacaaggaaataattgttgcctgctcgtacaaagatgctgcttccaaggattctgcagacgaatttgtgatgtccccagcacaaactggtagacatgaatttttagcatgctaaaaattgtcctaccccaccccagcaactgcaagatttaagttctattggaacagtaaatacaaggctgaaaactgtaaataagactgataaacttctgcaccctatgaagattttagtttctaacattctgttcaatactaaatttcatataccagaagttaggtttgactaatctttctggattctatatggtgaggatgaccaagtaactggtaaatcaatcagcaagcaactccatgat

SEQ ID NO: 134621 - DNA, 338 bp, Glycine max
actcagctgctaccattcttggtgccatttcttcttctgtatggtgtacaaattgttgaacgcctccatgaagtcgtcgttgtccactacaacgacaacaacgtcctcttcatcgaaacccaaaccaactctaaactttgacacctacctttaacaagcaaataaaagggaaagagagatgtgcggaaagaagggatggcagtgtgagtggtggcatgagtggtagagatgttgctacaagcaagagagagagagaaggggggagggaggaaaaggaaaagaacaggggccatgactataacgcccctgattggcgataataatacttcactcaatat

SEQ ID NO: 134622 - DNA, 445 bp, Glycine max
agctatgagcaaattgaaatgacaataactttatatcactgatgtccgggagagacccgtagtatatcgagacgctcaaaattaacagcccaagctgcgagaaaatggaatcgacaataactttatacacggatgcccggttgagtcccggaatatatcgagacgctcgaaatagaaaacggacactctgagaaaatgcagacgactataacattctactcggatgcccgacagagtgtgggcatttatcgagggatgctacatattgagaatgacagctggtatcaaattcaaacgacaataactgtacacgtcgatatcagagagagtccgcgaatatatcggagacgctcaaattatagatccgaagctctgagaaaattgactcgacaataactttatacacggatgtctaggtgagtcctgtaatatatcgagacactcc

SEQ ID NO: 134623 - DNA, 421 bp, Glycine max
  unsure (1)..(421): unsure at all n locations
atgatgatacatgatttaggtcttgtttgattcaatttgggaaaaattggatgagggcaaatgtgatttcgaaaatctgcactttatgcacgaatttgctgtcaaatatgtgcagcagaattttggctttgtgcataaaatgttgtgtatttgctggttgtggaaagagtagtacagattgggttctggatgttttctagcagatcccaacggtcacaatgtagacttatgtgctagagacttcccagtaaaatttcgagtcgatccaatggttaacgaattggaacgaagagaatgttactggggtatttaagtgagaaaagttgtgatattggtctgtggtgggcagaagtttctgcctctgccctatnttccttgngtttgatatttcatgatgctcgggatgtngaattgcttggat

SEQ ID NO: 134624 - DNA, 177 bp, Glycine max
ttcatgccactgttgtgcgaaatgaatcataactattatttccttctacttcacataatctttacttttcgaagttattattatttgttcacggaaggactggaatttgcataatcaattaaaggggatctaaaataaattatcatgaaaaggacctataattgtatcccaaattga

SEQ ID NO: 134625 - DNA, 308 bp, Glycine max
  unsure (1)..(308): unsure at all n locations
agaggaagcttcatggaggaagagatgagagattgtgttctttggaattgaaggagattacggagagaagttgacctttgaagtgtgtctcacaagtttctcattcgtcaaagttatgataagtgttacacatgtttctatttgttgcctagcacatgggaagcgtccttgagaagcaagatagcttctagaggggggctactcacacncctccaatagctaagctcaccccatgccanaatacatataaatacaaaaagtcccaactatgaagcttacaccctatactactagggtaccctatactt

SEQ ID NO: 134626 - DNA, 433 bp, Glycine max
agcttgaagaggaagacgacctgagagctttatatgaggtagtgagagattgtgagatcctataggcggaggagacatccccactacttgtatttctgcaatctttcatctttctattctctttgttgaaaaggaagcttcccagttatgggaagctaaatcctctgttggatcttccttgtgggtacttgatgaaaatatctttctatctatgaaatgatgttatgtgtgttcactgtgcgatcagaacatcgttctaccatgcatttgcctatatcacgtaaatgcatgtgtagttcggatcattcaacaatggaaactggtctgattcttagaacttgatacgacgacgctggcttatcatattatcacaacgaatcaagatacgcgaacctatttgttgtatgtatgtcttaatgcgatcctggccgag

SEQ ID NO: 134627 - DNA, 470 bp, Glycine max
  unsure (1)..(470): unsure at all n locations
aagaaagagtcatagatgcttgtataaaagctattatttatagttngaattgcagtaggtatatattattgaactcatcacctcacgaacgaattctattaattattntagtacggctaattctttggacataaagcataataacatgcatttgaaggatcaaatcagtataaagtaaaataaaggcggtaaataaggagaaattgtttttctttgaaggacataatgagaaattgttaagaaaataatcaaatactactgcccagttagatactttgacttggtgcccaacagcaattagagtgcaacgacaatttctattttgacttagtgcgcatgtgcaaggttctcactaccacattaactattgctgcccaaggggcacttatatatctacaatagtattacacaatataaaaggagtaacgatcacatnctaatgaagtaaatatattccatgtaaaataact

SEQ ID NO: 134628 - DNA, 460 bp, Glycine max
  unsure (1)..(460): unsure at all n locations
agcttctgcaagccctgttctatatgctagtttgattagtgnggagcttgttcttcgactcggtgctgatcatcctgctggagatatgacattgttggaaactggcgagcctgtgtattctccaatcactcaggtttgataaatatttttttttctgtataatcactatttaaaaatactcttgtacttgagaactttgggactgtttcatgtaggaaggacctttgcttacagaagatctaatcagggaaacagaggagtttgtgctgcggacagggaggtctgtatgctaactgagattcatccatgacacaatctgttatcttaaatctaaatgcactttccgttttccttatatatagcatatgaatcccaattgactctttcatataatgaacttctttattaaaataatcaaggtcatcttgcttcttgggctcttcatagcttgttagatgtg

SEQ ID NO: 134629 - DNA, 365 bp, Glycine max
  unsure (1)..(365): unsure at all n locations
tcttgttcgtgtggaagtgtggaactgataactcaagagactaatattnntattgatttaggggtgcacccatgtcagcaacagaagtggaaaaacaatgatttagagttaatatttggtatttatttcactcatttataatgcactctgttatatgagcttatttgctaagtataatatttagggaatactatctgaaaagcaagtgacttattgaccgtggtactatgatagtaattgaggaaataataagatcaactatactcacagtttataaaactaatttaaactctatttttntttctattcaattaagaatcttacaaatttatgctaatgcatacataaatcaatggtaataaatt

SEQ ID NO: 134630 - DNA, 462 bp, Glycine max
  unsure (1)..(462): unsure at all n locations
agctggagacttaattgctttgatcttcctattgtcgtattcagcagtgcactctcacccatctccattacaagcctttcttcttcctgaacacacatggtcattaattcattgatagaccatttatctttatgtgtgttgtaggaaatcttaaatggcccatattcatgcggaagggtgttcaaaatgaaatgcactacgaaggactcagacatatcaacctctagtttcttaagttgagctgaaatatttcgcattttcatgatgtactcacgcacaccttttacactggtgagccgaagagaagataacttcatgatcaaggtgcttgctaaagtcttatctgaagtgatgaactggtcatcaatggccttaaccaagtctcggaccttttcatgctggtcaacagaaccacgtatcccagccgagattntagtcttaatgaacatcacgctgagccgg

SEQ ID NO: 134631 - DNA, 457 bp, Glycine max
  unsure (1)..(457): unsure at all n locations
cgacacactcattgttggacaatggcaaactgaagccacaattgttttattgtgatgtcccacatcggaaatataatattccttttctttattcccaaatttcctaactgattttaaacagttttgattgttattcttttaacaaatatttccttttttaatgctcttgattagctataaaccaaatagcataacctccactttattagcaattctctaacggtcaatntgttgaatgtgtagctaataattatgatttgtggacaggaaaagaaaaagacgcttttcattgttttgctattaaaaagaggactgtcatagtcttgaaaagtcttgcacaggcagaaacaataatttcaattcttttcttattatctacttctaaaattatgggcaattgttctgtgatntccatagcctaaggccacgagtgcacgtgttcatatgctcattgtgt

SEQ ID NO: 134632 - DNA, 487 bp, Glycine max
  unsure (1)..(487): unsure at all n locations
ctctagagtcaactgcgccatgcaagcttaggacaccatccgcattcaaatcatattgtttgatcatagattggcactcatcaatggattnggactcacccatcttcttaagcatctttttcaagatctcaggggttataaacccacagctttcagtgtcacacatgtcaaaagttaccttcaagtcattcaacttctgctcctctcccccaaattccatgttatagtgcaatgaacctcaaatcaactagatgtccttaatacaagtgatttgacacttgagttcctaactaaaatctgagattcgattcttaagcttaggaacaaaattgcgattaaagatatcactttatctcanaataggccgaccagaggagtaattgagtatcaaatagaaggattagatatctcttgattatgatgataaacgtcacacaaattgggtaggaccataggtaaaactttgattattattatggattacttg

SEQ ID NO: 134633 - DNA, 448 bp, Glycine max
  unsure (1)..(448): unsure at all n locations
ggccacccagctcgcccaggcgagcagggttgcttcctccatatgcttcagccttctggaggaatcttctggagggcccaagtgggcctggttgctatttgcacccccatttttactaagtacaccccctgccttttttttttggtgattcttttttcgtaaagttacggaaacttacaaatttcgtaacgatacttgttttctttccgtaatgttacggaaccttgtggattacataatcatccnccttttgacttacggaatgttacggaacctcactaattgtgcaacgatgcttccatttgatttccggggtgtcacggaaccttacggattgtgcatgaatattttcttttgttttctggcacgtcccggaatntcacaaattgcctaatgatgggtgccaagcaccttacaaggaccaaacaaaggtcgcatgtcatcaagc

SEQ ID NO: 134634 - DNA, 446 bp, Glycine max
  unsure (1)..(446): unsure at all n locations
gagcttggagcatttaatatatatgctccatttttgatgngttattgttaaacatatatattggnagagagttgtattgtgtagacagctgtgtacgtacaaggttgttttgagtgtgtgtgtgaggttgagtgtgtattaagttttatgtgttgtcatgttgagtgtgagggaagctgagtatctaatccttatccaaaggcagcttatctcccctctctctctttctgttttatatataaatatacaagcagtggttgagaaataaaaaatataactcagcacttctctattgtattgtgtaactcaaatttctcagcaatgtaggcacttcattgtcaacaataatcaagtctagtaataatacatcactactagacaataacttgtagaggttatagtagtggtagatcattatcatcgacggtttgatgttattagggaac

SEQ ID NO: 134635 - DNA, 488 bp, Glycine max
ggggcgtggtggaagatcatcttagaatcatttttattatcttatatgttcttgacactaagattcaaaatttttaattgtttggctattatctttaggggaatttgcagtagtggatattcttgattggtatttggtattgatagaattctgtttttttttttttaattagtttggttgtcttctgaactactacaagttgttactaagactgttctattttatagtggcttttctctatctttggctttgttggtgggtggcggctctggtattgcttcagcttgaggatccacataataaggcaggatctaatgctgactttcacttctccaacctcttgtctgaccacccaaacatgaaggtatgaacatttattaacctttttacttttagttctatgagtatatataattgatatttgaaccaatattcgacagttatctttgaatcgatagtttgatatatactcgaaggaacactacacg

SEQ ID NO: 134636 - DNA, 448 bp, Glycine max
  unsure (1)..(448): unsure at all n locations
agcttcagtcactttcactggttcttttgattctcgaataatatgncaagccctgtgccagaatacttggcaaatctctcaagtttgaccaccctacaactaagtagttgtggattgactgatgtttttccaaagggtatcttccaaatacaaaagctcaatgttcttgatgtatcaaataatcaaaatctttgtggttcattgccaaacttctcacaagatggatatcttcaagccttgaatgttagcaatacaaatttctctgggcagttaccaggtacaatttccaatttgaagcaattgtctacattggatctatctacctgccaattcaatgggacactccctacttcattatcaagactcacccgacttgttcacttggacttgtcattcaataacttcagcggtcctcttccatctctcaataagaccaagaatctcaaat

SEQ ID NO: 134637 - DNA, 419 bp, Glycine max
  unsure (1)..(419): unsure at all n locations
gtctanactttcgtaagctatttattctttgtctagtcttaaatgagggatctgcggacgaagcttagtttaagttagtctaaacctacgagggctgtctaaattaagcctagtacaacaagagggatctgaggatgaagcttggattgattcagcctaactagggatcgaggtttagtaatttaggctacaacatagaacacaaaaacatgattgattagagaaacatctttatatacatcagcttatttgttagaaagatccaacacttttacctactgctgtcaatcttacttacttgctttntttttttttactgtttttagcctagacttagtttaattatgttctaaaccatcaattatcaatgtttctttcaacaatgtcttatnttttaatttagccctgtttaatactag

SEQ ID NO: 134638 - DNA, 384 bp, Glycine max
agcttcatggttgagctaatgatattatcttcatttgtttaaacttaggaggggcgcggatactttatccgtaagcacttccatgagaagagaataagaaggtgaaatgaattgagtttctctcacaaattgaaatgaacttatgctctttaacttaatagaagccctctcctttaacttctctaaatgttgatgtgataagttgattttagcttatgaagttctgttcattttaccttcttattttcttctcatataagtatttatggagaagtttgtccaaaccagaccttacgagataaacacttaaactctttagtaaagggaatcaggtatataaaagccttacctaaggtctattaaatagatggggtataattcttt

SEQ ID NO: 134639 - DNA, 482 bp, Glycine max
  unsure (1)..(482): unsure at all n locations
actcagcttacatggagctacatcaaccttccgcgtgcataaatgtcttcttaaccctcattntcaaaatacgcagaccctcgaccttttccattatgattnttccgacgttttccttggataaacgttggtggggactccgctcattttccttcaatggaagacgcatctttggtggggactccgctcgatttccaccggagggcaggttgcaacaattggcgactccactggggactgttagagagttaggtcattcagtcagtttgcaatgtttttatcatgacttcctatttatttatgttcccttttccttttatctttggtttggccatatttgtacataaactttgctatgttgttgtgtttggtgtatgtttgtctatcgattacatttctagctagaaatattggttctacgcacatggcacctacacctcacacacacattgagatatangccctatgcccgggtctatctg

SEQ ID NO: 134640 - DNA, 452 bp, Glycine max
  unsure (1)..(452): unsure at all n locations
agcttctagagaaaactacatgcattgttcttgtaaaatgctgcccagccttcggtaaccgttggatcttctctaaatatggtttgcaacttcataagacaattgtacatgatctgaccgttgggatctttgataagatttctggagtgtgctagaggcttccgttcccgagagcatctcttatttaagcatttcagcctttgctttcgtgtagcttacgaaaaacgtcatttcttcttctttctttcttccaaagccatttctaaagttccaagaactttctccatcacccacatccaccattagccaccacaaaccatcattgttctccattgaaaacccacactgagaggaacccttcaaccgaagcggaatcttccaacttggcttgcggtttcagtagagaacgaanaccttaatctgacctttcgttttccttcgaggtaaccatg

SEQ ID NO: 134641 - DNA, 462 bp, Glycine max
  unsure (1)..(462): unsure at all n locations
cgagatgaggaagtgttgaagggtgaaacttcctgcttttatcgntgaccacagagtggtacctggagatatgtcgcggtggtcangagaccttggggacgtcatgtggggtgctattgcccaaaaccaancttgaccaatcccgacccaacccgggcatagtcggtcagtgagaacctgtgatgtacctaagcaggcgagctcctggcagtcaacagataaaaggaaaacaagaccacaaagcaaggaggcttgtggtggctggccagctgtgaaacttgattgatatgtggattgtggcctctggtaatcgattaccaagggtgagtaatcgattacaaggcttaaaattgatgacaggaggctaagatggtctctggtaatccgataccaacgggtgtaatcgattaccangcttgaanacgaagtcatgaaacttatggagcctctggtaatcgatta

SEQ ID NO: 134642 - DNA, 418 bp, Glycine max
gcatgcaagcttgtgggcataccgacaccttatttacttttgagaccatgatcaggccggaaacctagtgctctgttggacttctttgggtccactagatgtctgggaggtacggtccctgcaaattggtaaatggcgtccgagattagctaggccacatgaacactaacctgagtcaagatggcgtagaccagctggtactttggcaagggaagatcaaaattatgatagctagggaggatgttgctgagaagcagtgtcatccagatctgtgtcagggtggtcacgctagtgcgcataatccgcacccgtcttcccatcacccttcgagcaaagacctgcccaggaacacacagcagctggcatatggcctcttcatcaaatcccaaagcctagctcctcctctcactgaactcac

SEQ ID NO: 134643 - DNA, 246 bp, Glycine max
taacattgaacttacagaagccttgggtaggggcctcccaaccaatagattgaacccttttaacaataacattctggttccaacttacatgattgaaaatgttatcattccttgcataccaaggttactccaataaccgttctccacttcaaggtgctcgagcacatattatgcatcacccaatccttaattggaaaattaaaaaacctcctcatactgactctgcaatggctccccaatgccaac

SEQ ID NO: 134644 - DNA, 460 bp, Glycine max
  unsure (1)..(460): unsure at all n locations
agcttagggaagattgaggattcttcttatctgttataaagagaaagtttttttacctttcctaccttagacaacctctaatggggataactgcagagccactgtaatcttctttctgagattaaaatatataatacctattatataattatgtatactataaaagttaatttaacaattgactaaaacaccaatcataggtatgaaatgagaacgtagttaacatctctttaaaaaggcatttactaatcgatggttattcttagtaaatatcatcatgagtgtagagaaaatgaaatcttagagttgagggagagaagcaacaacataccataaccctgacaaaaactacttacaaagtctgctntagatagagntaaaccgtgaagcagatataaaccatgtgacacatatcagaaaacaaanactcataaggaagcaaaaacatgaaacagacaac

SEQ ID NO: 134645 - DNA, 398 bp, Glycine max
tcgcgtgtatgatatccactcgacaaggtttgaagtaaaggagaccttcaatcctataacgcaacgtggcggacaaaaatgggcagttaacttgaatggccattattgtcaatgcggaaggtattctgtgcttcactatccatgttcacacattattgcagcttgtggttacgtgagcatgaactactaccaatatatagatgttgtttacaccaatgagcacatcttataagcatactccacatagcgatggcctcttgggaatcaagcggcaattcttccttctgatgaggcatggacactaatccctaacccaactacaattcgtgcgaaaggtcggctaaaatcaacaaggataaggaatgagatggattgggtcgaaccatctgaccaccgac

SEQ ID NO: 134646 - DNA, 423 bp, Glycine max
  unsure (1)..(423): unsure at all n locations
agctactaccgatgtggcaggatggggcccttactgctnttngncccaatcacgagcgttggccttagttcttccttttcgagatacttttccttatgtcagcttgtgtaggtttatagcctaacccaaacttcccgcggtttcctctggtgcttaccaggctggttctgtcatcgttgttcttgcccaaacccattccggtctcgtagccgtaccccaacatcacccgggccaccatcattgtcctatgagacaggcaaggctgcccagagagggaatctacggaggcaatgcttactacctcaaaagattggaaagtcatttccaatgactcctctgtggctctcacatatggcatagaggaagggcaacttaccatgacgtcttcctcactcgatactatgaccaaatgtccctccacca

SEQ ID NO: 134647 - DNA, 492 bp, Glycine max
  unsure (1)..(492): unsure at all n locations
ctgcgattcattctatgtacccatggtggtccacattgtgttttgtgtatttttattctcattccatttactttttatacccnctttcgacgtgcttaagccattttacttaagtcatttctcgcttaacttaaaaataaaataaatttccaccgaacgtttgaattgtattatccgttaacttcggttaagataaattctgaccgttcggtcgtgccgtaatcacattggaaatcaaaaagaggcaaaaaataatataataatcaaaaaaacatcttttagtaaaatatagcggaaaatcaatctgatattttctctttgagatttctcattcttaattgaattgactaataactaatgtgaaactaaggctaaaatcaactcgcctaatcaagctcgtccacgaaaataggctcttgaagttcgtcatctcaatctctcactaaataaaatggatcattctcaaggtccaacgccttataatgatcacct

SEQ ID NO: 134648 - DNA, 438 bp, Glycine max
  unsure (1)..(438): unsure at all n locations
agcttcatttacaagatatgccgctctaattatagccaaatcctattcatcgatagcaatctaaatgtatgattgaaattgcaatcatatatatctctaaaatcagttaagaactaccagcgaataaagctcattgaatcaataattgtatgtacctaaatgatctactacgccggataatgaaaagaaaaatacaacctataaaatatgaaggagttgtgattttcattctagcatccacaaaataaaggacattatattccctaggacttgctgagcattcggttnttaattttaattcgaattgttggtgcaccagatgtgccttcagatggctccggcttggtatctatctttattatttctactgtagaattatatccactgggttcaacagatntaacctgtctagcaacgtccactacgggttccactttc

SEQ ID NO: 134649 - DNA, 418 bp, Glycine max
  unsure (1)..(418): unsure at all n locations
actaaaggctntacccccacagttcatatgataatgcatggatgcttctttaaattaaaggtttaattatttatttgaacttataattaccaaaactttaattnttagtctctaatcttaaaaatatctaattttagtttttatactattttttagtctttattgtagagataaatgattgaaaattatatgtgtgagaattaagagattaataatgatagcgtaggaactaaaatagatctataagaattaaaagataaattttttgtatctatatagatcaaatgatgaattaaatctaaacggaaaaataaatagattaaggttcttggtggttatagtaaaaatcattacgagtgaactatagaaatttgagctaaaaaacttacattcacttttcgtattcttaaaatggaaa

SEQ ID NO: 134650 - DNA, 427 bp, Glycine max
cttcattcctggacctcaagcacctgagctgcagcttggaagccgtactcagcagcggcttatgttgctctaaactggtgaatgctgcaaactacgtcagtgtcatgttcggagggaataatcacgtgaacgaacagagtgtcagtgacctccaagacctgatgaactcgttcgctgttggaggaaactctgccattttcgaagatgggtttgttgcttatgaccatagtaacaataacagtaatagggacccaaaagtgcacgcaatgagtggaagtagcagcagcattggagggtctgataggctcacccgcgattttctgggtgttggtcagatagcgaggggaatgactgggagtggaggagttgcgcatagagaacaacagcctcggcatagctttcacttgagttctttggatgcacaaag

SEQ ID NO: 134651 - DNA, 433 bp, Glycine max
  unsure (1)..(433): unsure at all n locations
ttcgcaattaggctcattntccatataatgaacaattgatttgagatcatttgcataatctctttgatactctattaggctcatcattatatcttacacggaatgagttcaggccttacattcgtctctctttagttttgctatcaattcaatgcgatgttcaaacaaattgcattggaattctttctttctgaatctgaaatgctgattgctgatacgattctggtctttaatatatatttttttgcatttgtgcattnttntggcgtatcaaactcaattactgtgaaccacaggggaatctttaacgatgagtgctaccatatgccacacatgtgcatagccgtggtggtggngtggttatctaccatgatttgcatttacttaataacactaaccccctggggctggggcaattggaatactccatcaa

SEQ ID NO: 134652 - DNA, 457 bp, Glycine max
  unsure (1)..(457): unsure at all n locations
agctgttctgacatctgctgaagaaggagatagattatttggctcttatttataaaacaaagattttctctttcctttgtctaaaagcaatgccacatatctcattttgagtggagcaaaaggggcccaccttttccccttgatgtgacttcatactcagccacaaggagagaaaaatttgacctttttaatgctaaaatcctgcctcggcttgcatgccgcttctctggttccagttcctcgcgtttctctgcacccatcggggcctgttttcaaaagtaggcaatatatatatcaaaacgctcagaatgagaccctgagcgtggttcagaggttggttttgttaaatattaagttgcacgcaaaatgataattnttagactaattaattgaggattaatctataactggccagttatggattactcttcgctaattagtctaacccgcgtatctt

SEQ ID NO: 134653 - DNA, 388 bp, Glycine max
  unsure (1)..(388): unsure at all n locations
ggcatgaccctntgtaggtcccaactggctctgtacttagtctactttgtttacactaagctattacacacaaatagaggtttgggtggtctcttggagacttcccatacacccctgaagaatgtccaaatacaataaatcgcaatagaaaaagttcagcactcaattattctattacaacaaatttaacagagcaattaaggtattcaaatttgtctccaatgcttgtttgttttctcaagtgtttcactcaaaaattggtgaggctgtggttgcttcaaatccaatggtgctcttgtgaatgtatgtatacatgatcttgatgatgccaaagaagaatcaaacaagggttgcttcaaaggataagcatttgcttcaagaataatac

SEQ ID NO: 134654 - DNA, 461 bp, Glycine max
agctttaatcaccatccttgtatgaattattttatttctaaaaaacacattagataacctgcacagtgtagttctttgtatgtgaaatgatccggaagcaaaacctcatatctgattggtcagcatctactttaattgttgatgtaagcaagttcacagtgtgatgagcaacagatttctcatcatgtactccaccgcgatgatgagaagacagccatcgacttaaaagtccagaaccaagctcagaactattcctctggccagaatgttgactactagacccctacacatgataaataaccacaaaaatgaggtgaaatttgttataaagatgcaattattttttacagtacacttcttacagatgatttgctgcactgtttacggtagtaatacagcattccccgactatcaagaacaaaaaatctccttttccagtccccccttaagtttgaggaacg

SEQ ID NO: 134655 - DNA, 436 bp, Glycine max
ctcttgcatatgaaaatttctacagcccctcttgaaacataaacttcaaccatgtttggatttggcatccacagccaaaagaactagaacatttctcgtcttaaggttagcgttggtacttatgtgctccaagcattagcagctttattaatgtgactagatcattgggtttccaaaggttagcacccactaaaattaatgacatggaagaagagagaaagatggcttccttagtctgagtccaatgaatgactatctccatcagatgagagcttacagtttgcaaaatatggcagatttccttgcaggatatcctcctgagtatagtgtctcactcttccaactttgttgcgaatggtaatgccaactgggaaaggaacctgcgttgctagcaaagttagtacccatattgtagcttcatctctctgttaaaaga

SEQ ID NO: 134656 - DNA, 466 bp, Glycine max
  unsure (1)..(466): unsure at all n locations
agctngcacgaaattggtaaggaaaacaagtagagtattatgattaagagccccttaccaaagctttgatggaagaaacctcaagaacaccttgtatgaagcttagaagaagaaagaaattgactcctctccctcttggtgaactcatgcaaaaatggtgaaggaagggttccaaattgatttttaaagaaacaagaagataaggcttaaggctttacattgacaagcttaattgaaaacataaatgacccatgaccagccatggtgaacgtgccaagccatgtcatttagggttagtgttgcttctgaaattttaaccaaaaatggccaaagtaggtttaaaccaaaaatggtaaatcctatcccaatcccctagatagacgtgttaaccttccttggattctatgtaatcaaagtggaccttgcacatagtccactctcacaaagctaaattacattgtcactt

SEQ ID NO: 134657 - DNA, 436 bp, Glycine max
  unsure (1)..(436): unsure at all n locations
ctatctacanaaaaaaaaaaaaaaatcacccaccatcaagtatttatcattatcttattgacttgtgtaaaacattcaaaatctcaaattttccgcaagcaattatgcaaatgccaagcttctcagtcatcctctcttccaaccatcttatatttgctgtacaatgaatattactgacactcctctcctctcttttcgtctctgaagctttcactaatctctacaaacttaacttgaaagaagaataaaaatgagaagtgataagaagcgaacgttttctttgagggcggtgttgagggtggagtcggattggtgggaagcgcgggtgagggaggagaggcggtcttcgaggtcgaggatgattcggtccttttcgagaagcttctggcggaggcgagatgcattggattctagagaagagacacgggaggcaatg

SEQ ID NO: 134658 - DNA, 464 bp, Glycine max
  unsure (1)..(464): unsure at all n locations
agctntgtggagtagaaacatgggaccaactcattntatttcaaaaaggaagtcgtatctagtcaaggtcttagagaccatacaagtttcctaacgatttctaattatgtgggccattaagtctatcatatgctgacaatagccgagaagcccatgaatctcttcgggggcggagtaggtgtctgccatcgccttggccttggctaacaatcggggaagttcttgactcccgttcaaggtaagagcaaaccgatccatccacatggttgcctcttggtgtaaagagtcgatcacccttcctctagcctctttttccgcgtatacttgggcatattcatccgcaatcctatgctcgtgggccgcggctagacctaactcttcttggtactnggcgatgatagctagcatgttggtctccgtctcgcataaacgctgagacaagcttcttttggaccttgaacagg

SEQ ID NO: 134659 - DNA, 488 bp, Glycine max
aagcttcgagaaatacaaaggtcatacttttacactgagctccattctatcttacaatatattgagacgctcgaaattaaacatcgaaagctctcgagaaattcaaatggtcataactgttcacacggatgtccgattcaggcgcatcacatatacagacgctcgaaaatgaacaacggaagctcccgagaaattcaaatggtcataacttttcacactgaggtccgattcatgcttataatatatcgaggcgctcaaaattgaacaacggaagctcttgagaaattcaaatggtcataactttttacactaaggtccgattcaggctcataatatatcgagacgctcgaaattaaacatcggaagctctcgagaaattcatatagtcataacttttcacacggatggtctgatcacgcgcataatatgtcgagaggctcgaactcacaacggaagctcttagaaatcaaatggtcatactttcacac

SEQ ID NO: 134660 - DNA, 458 bp, Glycine max
agcttatgcatggtgtctgtcattttcctttgtagggttcacaggtatatgttgatgtcgtttgtcatgaccttgtagcaagaagaaatgaaagaaactatacaggttcttgaaaaagaaatttcaaggacaagaaatatttaaaggattttcaattgacaaattaagtcgaatgactcttcttgacaactcacttttctctcaaaaagaaaacttttaagaatgataaaatgaggtcacatgaatgcttgtacttatttttgatttgaaacacagtcaatcaaacattcttttactcgtcgtttacggtaacctcaccaaacgtgtagaacgagcaatttctgattgaacagacttggagaacaactcaggagtgcaagtcacttgagcaaacaagccaatgacatacattcacattccagtgaatattaaataaatacgcaaagatgtaattgtga

SEQ ID NO: 134661 - DNA, 417 bp, Glycine max
  unsure (1)..(417): unsure at all n locations
tacccactatttccgtaatagaacactggttacatgtctactatcattgggataatctntgtctctgttattgggggcgctacttgagctgccaagtctctccatctttgggcatatcctttgaaagatctgtgccctctttttgcacatgttctgtagttgcatcctatccaaagccattatactgacacagcctaacgaaggcaaccattaggttcttccaagaatggactcgggaaggttccaagttagtgtaccangtaacagctacctcagtaagacattcttggaaggaatgtatcagcaattcctcaatttttgtgtatgcccccatcttccgacaatacatctttagatgggtcttggggcaagtagtccccttgtactcgtcaaagtctggcaccttgaacttgggag

SEQ ID NO: 134662 - DNA, 364 bp, Glycine max
  unsure (1)..(364): unsure at all n locations
agcttgaaataaacatcgaaagctctcgagantttattatgggcataacttttcacacggatgtgacattcgggcgcataatatgtccagacgctggaaattgaacagcgaaagctctcgtgaaatctaaatggtcataactattcactcggatgtccgattgaggcgctatatatatgctgacgctgcaaacttaacatcggaagctctcgagaaattaaaagggtcataacttttcacactgaggtccgtgtctggcgcattatatatggagacgctcgtatttaaacctcagcagctatcgagacattcaactggtcattacttctgacacggctgtcaaattcacgcacattacatgtcg

SEQ ID NO: 134663 - DNA, 441 bp, Glycine max
  unsure (1)..(441): unsure at all n locations
agattggtcttcgccagtgaaaggatcgatgtgtgtcttattaanagcaaatttgatcatcctactaggacgactgagaaaactggggcaaataaagagggtgaggataagggagaaacccatgctgtgactgccattcctgtacgaccaagtttcccaccaacccaacaatatctttactcagccaataacaaaccttctccttacccaccacccaggtatccacaaaggccatccctaaatctaccacaaagtctgtctaccgcacttccaatgacgaacaccacctttagcacaaaccaaaaacaccaaccaagaagtgaattttgcagcgagaaagcctgtagaattcaccccaattccagtgtcctatgctgacttgctcccatatctacttgataattcaatggtagccataaccctagccaaggttcatcaacc

SEQ ID NO: 134664 - DNA, 460 bp, Glycine max
  unsure (1)..(460): unsure at all n locations
agcttcctctataagcttcttatccattgcttctctttnggtggagaagcttctccttccatggcttatcctctagtagatggcgcctcctctcacctcttatcctttatctttcgctgcaactccatggccgaaaatcaccattgaaggacctttttgaagctcaaagacccatcctccatagaagcttcacaagaaagcttccatcaatattatacttagactatcctaaaaaatgatagctttttcaattggaaacccaagattgctaaccagacctttaagttagatcccatcctttattgcttctattagagcatgcactctacccttgtagtggataaaaccacaatgggctaaagagtttccttccaactatcaagagagttgccagtcatgaatgcgcaccttgtcacagttctccttgcatgcaaatctacagcatagtcaaaatctaaat

SEQ ID NO: 134665 - DNA, 431 bp, Glycine max
  unsure (1)..(431): unsure at all n locations
actctaacctaataaaagcatacctgccagcatcttttttttcatctaactcanaagcatgcaactcaaatctttctggtatagtaacaggcatacacaacgttttcacacatactaagccttctttgttgacgacaaatttgttgattttgacgagaacctcattacaatctttaagcacatattcaacctttntatagaatattctgatagtgccaaaaagaagttagccaagcactctataggatacaacatcaatttcttgccaaatcttgtctgcagaaggtaaaaatgaaatgaaaataatggcaaaaaaatagcatatatcataaatcttaaaatgatctcacagaagaataaactctctaaataacatcattttgttggcagctaattggctattcacaatgactggtagacgtctcaacaat

SEQ ID NO: 134666 - DNA, 449 bp, Glycine max
  unsure (1)..(449): unsure at all n locations
agcttctccaccctgtgtgcaggttcccttttttgtttggctagttattattctgtgtgattaatttatttaatgtatataaattnttatattttaatatatatatatatatatatatatatatatttatttttttttgcagataggccgtttatatttttttaatggatttatttgtagaggtaattattattagtttgatagtgcgttacattattagtgctttgttatatatttttttggaggtagataagcagtttaaattgatatatatttttagtgctatgtttttgattttataataatataaaattgttaattattgttaaagataattatagataataatattgttatttaaatactatataaagtggtatattttaatatatatatatatatatatatatatatatatatatatatntgcatataggcgagttatattt

SEQ ID NO: 134667 - DNA, 379 bp, Glycine max
  unsure (1)..(379): unsure at all n locations
cngatgtgagaaagcgtgtaagagtcagtcttcctacttttgtttgttgaccacagaatggtacttggagatatgtcgcatgggtcaagagaccttatggacctcaggtggggtcctattgcccaaaaccaagcttggctaatcccgacccaacccgggcataatcagtcagtgagaacctgtgacgtacctaaataagcgagctcctggcagtcaaccaataaaagaacaaagtccacgaagcaaggaggcttgtgtggcggctggccaactatgtatcttgggtggtatctggaaattagcctctggtaatcgattaccattcgtgggtaatcgattatagggcttaaaaatggagacaggatgttaaatggcctct

SEQ ID NO: 134668 - DNA, 456 bp, Glycine max
agcttctgtccctgagaaactggttctcttatttttcagggagtgaagattgctgaaaaccctagccttgcaacaagttctagggaagtagacacggagatggacaagaaaatccgcggtattgtgagtagcattttgaaagaagcttctgtgcctgatgctgagaaagatgttccaacatcttccaccccgaatgtttctgtgcctgatgttgagaaagatgttccaacatcttccggcccaaatgctgaagccctcccttcacccagtgaagaggaatcaacagaagaagaggatcaagcctcaaaggagactcctgcaccacgggcaccagaacctgctccaggtgacctcattgacctggaagaagtagaatctgatgaagaacccattgccaacaggttggcacctggcattgcggacagacttcaaaacagagagggaaaaactcccctt

SEQ ID NO: 134669 - DNA, 467 bp, Glycine max
  unsure (1)..(467): unsure at all n locations
aacaggacanaagtntaaggactaagactaataaaacttttgtttaatgactaaaaactaaactttaaaaaagttcaaggactaaaaatataattaacctttaaaaaatgactgcaaaatgagaggaacagtgccttgactcaatctgaaacaaaaagttcaatgaacttaaatggttaatttaggttgttgatattcatacttcccaatttactaagtatacccccattcctttntatttgatatataaagatacctaattatccttcccttntatttaatttttaaataacaccttcatttggtcgaaccccctttgtcctttggtactcattggtattcctctctattcctttgcaccctctctctttnttttagataccaattgcaccctccaatgctgtaaaaaaacgcgaataaactcacttgtacatgttacaagttttgagggctccattgagctaaca

SEQ ID NO: 134670 - DNA, 415 bp, Glycine max
gctaaacattaattccgagcgttttgtttattacgagactcaatcagacatccgagtaaaaagttattgtcgtatgaattggctcacagcttaaacattcaactttgagcgtctcggtatattacaggactcaatcatacatccgagttaaaagttattggtgtttgaattggctcagaggttcaacattcaattttgagcgtctcgatatattacgggactcaatcatacatccgagtaaaaagttattgtcgtttgaattggctcacaggttcaacattcaattttgagcgtctcgatatattatgggacccaatcatacatccgagttaaaagttattggcgtttgacatggctcataggttcaaaattcaatttcgagcgtctcgatatatgacggagctcaatcatacat

SEQ ID NO: 134671 - DNA, 290 bp, Glycine max
  unsure (1)..(290): unsure at all n locations
gaatatatcgagacgctcgaaattgaatgctcaacctctgagccaattcaaacgacaataactttttactcggatgtctgagtgagtcccgtaatatatcgagacgctcgaacatgaatgtttaacctatgagccaattcaaacgacaataaatttttactcggatgtctgattgagtgccgtactatatcgagacgctcgaaattgaatgttgaacctatgagctcattcanacgacaataactttttactcggatgtctgattgagtcccgtattatatcgagacgct

SEQ ID NO: 134672 - DNA, 429 bp, Glycine max
  unsure (1)..(429): unsure at all n locations
agctnggagggcaacatgactctatatgttttgtttatttgaggaaacaatagacactgatctttttattaaaaataaactgaaaataacaaacatgagaccagatatctctcttaattggtatttatttctgagcattctctttgcaatacagatttcaagctcttctcacatcttttattataaattaacttttttttgtatctaatcaatcacagccttaatgatctaggctcaatctgaattaatattattgcaatgtacatcgagataaaaaataagttaatatatctataaaatacagttagaagacgaaaataataaaaacttttttataagttaaaattagttatgcatagagtaactctgtgagatttctgataataatttgtttgaaaaattttatctcgtactaaactaattacttat

SEQ ID NO: 134673 - DNA, 473 bp, Glycine max
gaggaaattgaagcatggatatgtttttttctttctccaccgacaacaaaagcacacagaaaacatcgactaaaacaaataaaaacaaactaacacccagaaaacacacgtttttggtttcgatctataagctcctccacaatcagaaggcacgaaggccttgggttcttcgtagacgaagagtgagcttctacggtggcgggcgccagaccaatttgttcttagaagagagtgcagatcaaccaaagagtgtgatggtggtggtggagataacattgatagaaattataaaaaatacggagaattttcatctctacaaacttgttatttcattcttctttgtttgttcacagtgatgagcacagtggtggcgcctgtcggcggtggtggcggcgatgaattgatgaataataaaacagtgtttttaattcagaaataaatgtcattctacaaataacacattctaacactat

SEQ ID NO: 134674 - DNA, 476 bp, Glycine max
  unsure (1)..(476): unsure at all n locations
acctgcggcatgcaagctttntggagtagaaacatgggaccaactcatttttatttttaaaggaagtcatgtctagtcaaggtcggagggaccatacaagtttcctaacgatttctaattatgtgggccattaagtctatcatatgctaacaatagccgagaagcccatgaatctcttcgggggcggagtaggtgtctgccatcgccttggccttggctaacaatcggggaagttcttgactcccgttcaaggtaagagcaaaccgatccatccacatggttgcctcttggtgtaaagagtagatcacccttcctctagcctctttttccgcatatacttgagcatactcatccgcgattctatgctcgtgggccgtggctagacccaactcttcttggtacttggcgatgatagctaacatgtgggtttctggctcgcatagacgctgagacacgcttcttttggacctcgaaca

SEQ ID NO: 134675 - DNA, 486 bp, Glycine max
  unsure (1)..(486): unsure at all n locations
ggaagacgatgctntaatggagganaagaaagagagaggtgttgagtttgttattgaaggagtaaaagaggaagagaagttgaactttgagttgtgtctcacaagactctcattcatcaaagttaacaaaagtgttacacatgcttctatttatagactaggtagcttcctttagaagctttcttgagaaaacttccttgagaagcttctttgaggaaacttccttgagaagctagagcttagctacacacacccctctaataactaagctctcctcttttagaatctttctagtgaagattccaaaagaagctagagcgtagctacacacacctctctaatagttaagctcacatccttgagatgagaagctagagcttagctacgcacccnctataatagctaagccaacccccattccataaatacatganaaacanaaaaaagtccctactacaaagaccattcaaaatgccctgagataca

SEQ ID NO: 134676 - DNA, 475 bp, Glycine max
ttaagcacctgcagctgcagctctataaatacattaagaatgttcttctttaattattgaacaatcattgttattacgggcccacttttgttccatcttgaacaatcacaaactatgcgagcatcaaaaaggctaatgaatagggcctaattttgtcatgggctctaagcccaactaataattaagaacaaaaatgttttgacaaattgttccatttgtggtccattgacccaaaaaccctgtgtgggtaccacggttagaattgaagggatgttggttagaacaaaaaaaatgtctactacttttgcatttttaataacccattctcaattttatccttcatattctcatttcttttttggtgacagatgtgattgctaataaaataataaaaagtaataacgatttcattgctgtattatggaagaatatatttaactgagtgtctatagtgcaattatgtaagcagaatatt

SEQ ID NO: 134677 - DNA, 472 bp, Glycine max
tatcctaagcacttctaggagaaacataactaacaaggagttgttgctttggttgtgtttgaaaatggtggagcaatgatgaatggcgcttggtggagatagcgcgataaaagtgtggcaatgggccaagtatcttttatcttccattcattggattataggagtgatcaagaacgagattataatgttaaagttaaggagataggtgaaagttgaaatttagtgaaaggtcacaattgcaattgcttggtaaacaaaacacaacataacacaaccgctgggtgggctgggtggagatgcacttcaaaagttgctcctaccctaacccagtcaatcattacatgctaagatagtgccttgtaatttgcaaaacgattctttttgtagtttagtttaactctctagtgatggctgtaatatttttgattttcacttctagtgactctcacatatagatattcacgtaatgata

SEQ ID NO: 134678 - DNA, 481 bp, Glycine max
ggatctctaagcacctgcagctgcagctacaatcattgaactccagcccttttcaatatattataaaatttggacaagataagataagattgaatgaaataaaatctggacgaaataaaatctagatgaaataaaatctggataagataagatttgatagaataaaattgtctgctctcttcaagtccaagcccaattccggattcaagcccaattgcttataaatctcctgaaattaaattaaaaacacaaaattagtcaagtcggcccaaatgataaaactgcataattaatttgacaattaaggctcatcagtaattaaaatggtcacaaaaagggttaagaaataggagaaaataatgtgatgcaatcctaccccgcaagggcattgagtagaagactccaagtagatggtgctagagatccaaaggaaggccctatggttctcatgagccttagggtagattccgagcccatgggc

SEQ ID NO: 134679 - DNA, 483 bp, Glycine max
  unsure (1)..(483): unsure at all n locations
tctagtaacattaagaaggataaagttttaattatttttacacgttcataattaattcaacccccctttntaattattccgagaccacttgatccaacaccaaagatatttcctaacatacccctttcctcatctatcaggcattgtttcatttatggttggttcaaagttaaccagcaaaacatttttggttgactcttaagctgacaaattgcataatatatatgccaagtataggttattaccagcgcgggctgtagatgcccatttgaataaactgaaagacacagcaaaatagttagcaaactagaatatatagtaaaaagaaagtaattccaagtctagttctaccagagttgtcacgaggagaagaattgcgggcttccaacaattcttttagccttttcgcaccattggtgcttctctgtcttctttgaaaacctgcagataatagtaaccacctactcacttcattctcattcc

SEQ ID NO: 134680 - DNA, 465 bp, Glycine max
  unsure (1)..(465): unsure at all n locations
agcttgtaaagttatatctgcatctaccttttcttattttgtaggagagcattgtggttcaaagcatatttgtcccacatttgggggagattattgggtgaagataagaatggtaagacaaataacagccacacaaaaaattgtaaagaagcagcatataaaagcttctaaaataaaataaaataaaaagaaagaagaagaaagttcaagaataaaggttgcgtgggttgttatttgaagcaaagtgctgtaaatattgataggcaagtaaatgaagttggaataaaaaggaaaagagttgatctaaggatgaatgctctcctagaacttaagcttttgcatcctataaaaaccatgaattgtttgcagcccagcctcattacaaaccaagaaaagtccttcagattcaattngtgtgtttgtgactgtatggcatgagatgaaatgcacaagttgagacttatg

SEQ ID NO: 134681 - DNA, 485 bp, Glycine max
  unsure (1)..(485): unsure at all n locations
ctggtctcttttagatatacttggacaatgcgtttaaacttgttgttacttgcagcccatactcactactagaaaatatggttttaccgtcgtcattttaacatcggttttataaaagccgatattaaaaaaacacggtggcataattgtaaataatttgagttcattaacatcggtttttaaaaaatcgattttgtgtcgatattaacatcagttnttattaaaaccatganttttatatataaaaaaaacaatgttgtatttttacccaaaattaaaactccaattatttcccttctcttttcgtgctcactctcttcaccactctgcactttccaaacccttcaaacacttttgctctcaccactctcactcacgacggtcctcatcttcaccactcttgctcgcgacagnggctcagttatgttcttctttacttagctataattcatggcaatgtgtgtagttgaagatcagcgtttctg

SEQ ID NO: 134682 - DNA, 451 bp, Glycine max
agctgtgcaactggaatgttaggaagatatctttttttcctagaatggaacattggaaagctgtaaagaatgttctgagatacttacagggaacaaaaaatcacatgcttacatatagaaggtctgatcaccttgaggtgattgggtattcagactcagactttgctagatgtgtggatacaagaaaactcactattggctttgtatttcttttagccaaaggagcagtatcatggaagagtgcaaaacaatcagttgttggtgcatctatcatggaagctgaatttttagcatgttttgaggctacaattcaagctaattagttgtgaaactttatttcaaggcttggaattgtcgatagtattgctaagccgctgaaaatgtattgtgataactctgcaacagtattgttctctaagaacgaacagtactctaagggtgctaagcatat

SEQ ID NO: 134683 - DNA, 490 bp, Glycine max
  unsure (1)..(490): unsure at all n locations
taagctacccgcagtttctgttngngcttctattttctgggataatattttgttataagccaaatatgcatcttgggtggtgagttctagaaagcttctctttgttggcatgtatgctcgatcacaaaggatgacgtgatcactagtcgccatattttctattagctccattgcctcctcctgtgtctttaacttgatcttcccctctgtggatgcatcaaggagttgctttgattgtggtcgcaagccatctataaagatatttagctgcaccaattcattgtacccatgtgtaggcatcttcctgagtagtcagtggaaacggtcgagcgcctcgttgagggattcatcacgaaattgatggaatgaagaattttccatcttcccttcaacagtctttgactctaggaaatatttctttatgaacttctctatgaattcttcccaagtctgcaagctattacccttagaggagtgtagccaccttttt

SEQ ID NO: 134684 - DNA, 456 bp, Glycine max
agtctttgatggaggaataatggatgatgtttctaaatgcatccaaatccgtctacacatctcgagtatctttctctctcagaagtgtggaaccctatactagggcagaaatttcttatttaaagctttgggataaaatctagcccagaatacaataaaatgaaactttgaaataaaaatcttgcaagtcacagtcataggcaagaccggttccatgcccccctatgaattgttctgactattaaaatcaatttgtttagcttctaatcatgggtccatgatctttttttattcctttagcatggatcactcttttcttcttagctttaaggcttctaaaaatctcctaatgtagttaattgaggactctcctttacttgattcaggcttaaacaaagttcctacaaacataagcaaacaacccaaagatcaaacataatagatataaacacaaat

SEQ ID NO: 134685 - DNA, 470 bp, Glycine max
  unsure (1)..(470): unsure at all n locations
tatagtcaccatttcagattataagaacaataatgatttattatatctntcttttatagntctatttcacaaggaacagagtgctgatatgaatgagaatgtggcatgatatcaaaggtaagatgacgagagtgaaatcaagcaattcgttaagttgttttaaaatcaaaaaattagttaattataaaaccagaaaaaaattgatattcgcaaagtctaattcaataaatggcattaataacgttgtatgaaagggcatgcaactaaatcataagcacacaaaagcaccgaagttagctaacatatttcttatatataagcgttgagggagtagtatattacttagaggtattattattgtcacatagaaatgaatgtgttggcaaatggcatagcataacaagcacaaggcgagtggagtggagtacctcctcttagtgtaataagcactggccaagtagcaataataa

SEQ ID NO: 134686 - DNA, 450 bp, Glycine max
ttaagcgacgcggctgcagcttaggtgaagaggcacatttgatttatatgttcatctctaacgcaccccctcatacaagagtcctttggacttgaaagcacgaataatgcacaagtccacctaccttgggctaaaattcaaccttttataggaagaatgaacacaccaaggagtgaaattcagactacttggttatagaggatgtaataccatgccatgaaacaacaattccaaaaacttaagataaatgcacatgaatgattttatattaaatttctcatgtactatttatgttcataatcatgaatattcttatctgtgtgatagctttcttttttcccccacaacataaattcatacaccagaaccaaatcacaaaagatctctacagactgaacaacaaaataaaaactccagtataaactctatataataaatcttttgtacaaa

SEQ ID NO: 134687 - DNA, 489 bp, Glycine max
  unsure (1)..(489): unsure at all n locations
ggcgaatttcacgccctgacactgataatggtgggatgttattatttctgtagctcgaacacccttctttcctttggaatggtcttcccagtcacaagggccaatcagaatctgaaatcaaaccaaaacaaaccagttttttggaaagctccattctgtaaatagaggcacagcttcatttttaaagtaactcttcaaaaattataattaattttggtcaatagatataaggatatacaatgtgaatttaacatgatttatttcatatttaaggtcaagatttgaatcttaaactatttgattaaaagatacaatatcactctctttaattatctttatcattttaatccttgatattatatgtactattataacctttcactatattaaaattttacttaagtcttcaattcgaanataaaacgtacaacttataagtgcatgctctatataataagacacatgaaggaagattgatatatagtgtaa

SEQ ID NO: 134688 - DNA, 405 bp, Glycine max
agctatggttatcaattacgagtgtttctgttatcttacgggacacaatatgacatccgagtcaaaagttattacgtttgactcttcctagagctcccgttttcaatttctagcgtctcgatatattgaagggctcaatcggacatccgagctaaaagttattgtcgtttgacttttcttagagcttcccgattaaatattgagcgtctcgatatattacagggctcaataagacatccgagttaaaagttattgtcggttgacttttcttagagcttgcattttcaatttcgagcgtcttgatatattacagggctcgattagacatccgagctaaaagttattatcgttagatctgttcagagcttccgttttcaattaccaacgtctctatatcctaccgga

SEQ ID NO: 134689 - DNA, 480 bp, Glycine max
  unsure (1)..(480): unsure at all n locations
ctgagcanattcaaacgacaataacgtttaactcgggtgtcttattgtgtctcgtagtatatcgagaccctcgtaattgaaaacagaagctctgagcaaattcaaacgacaataacttttgactcggatgtccgattgagtcccgtagtatatcgagacgctcgtaattgaaaatagaagctctgagcaaattcaaacgacaataacttttaactcgggtgtccgattgtgtcccgtagtatatcgagacgctcgaaattgaaaacagaagctctgagcaaattcaaacgacaataactttttactcggatgtccgattgagtcccgtaatatatcgagacgctcggaattgaaaacagaagctctgagcaaattcaaaagacaataacttttaactcgggtgtccgattgtgtcccgtagtatatcgagacgctcgaaatngaaaacagaagctctgagcatattcaaacgacaataac

SEQ ID NO: 134690 - DNA, 424 bp, Glycine max
  unsure (1)..(424): unsure at all n locations
agcttgtggnggatgacacgcataaggcctttctggatctgcgtcgagaacccgatgattatgttccgcatccatcaaccacctccatatttgacctcctagggactccttcaactaacaccatcatgggcaacaaccattgtcgtcatcactccatgccacattggacctcatgcctctgtacaaacattaactccctaaaagcactctacacctccttcctcatccacgacccccttactacaacatcctcttcttcgtcattttcaaatcctacaccaaattgtgctaaaggaagtagccgacgatgggagagatgtgctagatccaaatgaaacgttaccgaaggccctcaaataacaccatatgcttgactatgctgtagtggcccaaagagaaagttttaatattttttaaggtatta

SEQ ID NO: 134691 - DNA, 462 bp, Glycine max
  unsure (1)..(462): unsure at all n locations
atttcctttagtagggaatntatccttcctaagttgtttcttaacccagnttccctcattaagaactagctcatttcttcctctattgcctttagatgaatacacctttgtttggttctctatttggttcttaaccctctcatgcaacttctttacaaactctgacctagattccccttctttatgtataaaagaagtgtcaagtgggaggagaatgaggtctaacggtgttaagggattgaacccataggcaacctcaaaaggggattgcttggtggttctatgaacccccctgttgtaggcaaattctacataaggaagatactcattccaagacttatggttgcctttcataagagcccttataagggtggataaagacctattcactacctctgtttgccatcagnttgtgatgacaagggtagataaaagagcttattcctactttacccataagtt

SEQ ID NO: 134692 - DNA, 410 bp, Glycine max
  unsure (1)..(410): unsure at all n locations
agctngcttgaggagctgctatgtttgcttatcttttagctacaacggggtcctttaatggtgattttccaccatggagatgcagcggaagacaaaggaaaatacgtgagaggaggcgccatccattaaggaataagccatggaagaaggagcttcaccaccaagatgagccttggataagaagcttggagaagatgcttcaatggaggaaaagaaagagggagagaaagagagaggggggagcacaaaattgaaggaataaaagaggtatagaagtggaactttgaagtatgtctcacaagactctcattcatcaaagttacaacaagtgttacacatgcttctatgtatagactaggtagcctccttgagaaactttcttgagaacacttccttgagaagcttctttg

SEQ ID NO: 134693 - DNA, 463 bp, Glycine max
  unsure (1)..(463): unsure at all n locations
cccatcacatgtggtactatgtgttgttcgtgcgatggngcacaataagttttccacatccacaatgcacgcataaacccaccatcccctgttgcccacctccaactgagctcacgtactcccacgtagctcatatcctcgtttctctcaacaccaggtccccatcaatcctcccaagcttgcccaacatcaaagtaatacaacattcacacagcacaagctatcacagctaagcaaaacagggcacatgcagaaaactctgcccaaaacaccaaccaaaatcacagctnttcacatacaaataccccagaaacatttccttcgttccaattcgttaaccggtggatcgactcgaaaattatactggaagactctagtacttaagcctaagatgtgaccgttgtgatctactagcaaacatccacaactcattcttcactacaatgttcacagccaatcacac

SEQ ID NO: 134694 - DNA, 451 bp, Glycine max
  unsure (1)..(451): unsure at all n locations
agcgtgacaaacaaagctaatatattcttttcttaaataaaatcaattattggcacagaaatcaatcatgcaaaaggcatttgaaatggtcacatcttttaatattttatattcattttcttataagctatataataataactctttttttttgttattgttcttatatgatatatgaaagtttggtgaaatttatataaaagcatcatgcattagattatactgtttttatattatttaatttgtcttttactatatttaattntaataaaaagaagattcaaaatctggtgaatggcctgatgttgtggaagtttggaagaccagacacatgagatctaattgaatttagcacattccagaaggagaagacatgatggtcaagaaaanaattcattttanagtcttgatgtcaatattagaattaaagacattaattggactatgatat

SEQ ID NO: 134695 - DNA, 463 bp, Glycine max
  unsure (1)..(463): unsure at all n locations
gctgttagcatttattatgtattataagaaccttacaactaaagaggattttgaatacataaagagagaaaagaaagtccaatctgaaattggtaactttgaggtctttcatcaaacccgactcaatctgttcactttaccagttagatagcgaattctattttttntatcttttatttttgaatccaaccaaacccataacataattaaatttattattatataaaaattaattattaattacaaaacacatttatttttagctaccatagtctttaatttattaaattaaattattcatgattttttttttggttcttaagntgcttttattttattctagagtttaatgagtaaataaccttcttactctntagtttatctctcttaatgttgttatatntttcaatagaattataccgatccgacacaatataacctgcagaagttattcagataagat

SEQ ID NO: 134696 - DNA, 337 bp, Glycine max
agcttgaaagagcccgggtagtcatatagttgttcatgtccatagccatcaaagtctgaagagagtatgatgaactaatggacgtcaatatggccaccgatgaagccttggaatgagaaaccaagaatgcccgaaaggaagaacacgaccaaaacaagttttgaggggctttatagggcaacaatagtgagctcaaactccgaagaggtgaaaggaatcatcacgggtcacaggcatgatctggaaggatgagctaaaggcttgccttaggtcgaaaagaaatttgtcccaacagttaaagtgagactgaagggaatatgtgggccatcatcgatga

SEQ ID NO: 134697 - DNA, 471 bp, Glycine max
  unsure (1)..(471): unsure at all n locations
tccaatctacaccaccatcgcacgagactttatctattgatgtatttgaacgatgctcanaaagacatgcagtcaatgtttcttccattcagagaaatttgatgtcatcttatgacaatcaanaaaatataacaactacttctacatcaacataccaagcctatgcttattccaatataacacagttagacattcacagaggtaatttttattcttaagctattatcaaatatctacatgcacacattttatttattattacattcttttcagattgtgttctacagtcaacttatatatagaatgccaaattggatgttattatccagataacatcagagaccagctgacactacacagcatgatcaatgtgtcggctatgacagctcagattccagtgatgatgatgtanatatgacacaggaaaacattgatatagggatntatccatcatttatatntcttatattc

SEQ ID NO: 134698 - DNA, 487 bp, Glycine max
  unsure (1)..(487): unsure at all n locations
tctagagacgaccccgacgcatgcaagctngacgaaatctagaatgcaatgcctctgcatttgtttttacttctttctcgggcacagcaaagcatacagaatgctcactactagcctacacaaatactgttactgaataatgatgtatatatcaacgagaacaactagaaaaattgaaaaaagttataagtgcacctgagatatcatgataacattagctccaacatcttttactgcaccaaaaatagcactggcagtacctggaacaccagccattccagttctgcaaaaaagcatcagagaaaaattcattggaatctacaacttggacaattaatattggttaaagaaaaccttaaattaaatagaaatcctcatgcagcaaaaaatgccaactattcatcatgtaacacaactgcaattcatgactcacccctcaacgtgtacaagtgccaagttgtctatgagtgcaaatcctttgacaaaa

SEQ ID NO: 134699 - DNA, 439 bp, Glycine max
  unsure (1)..(439): unsure at all n locations
ctaagctgacctctccctcccctctcacaacctgacaaatctctgttgtctaaatgaattactacgacgcacaaggtgagagctgcacccccaatctggcagtaccaacagatgttccccttccaatcagtaaaaaatcaagacaatcagttgcagcaagagtcaccatccaaacagtttaagatcaaggcaaccaatgagtcactcattactcgctgccagtgtgcaattaacaaaagaatgcatcaagaaaataggaatcattttccagcccatgcttcagtcctccggcacggaaagtcaaaggagggttccttgtgcacacatcataattgtttgaagcatcgtgtgacaattaaataattaatcagtacggaatgacatatggaagagcatanacatctgctggctctatgtgcagagcttctgtccatacctg

SEQ ID NO: 134700 - DNA, 355 bp, Glycine max
cgcagcccactcggagctttgcttaaataaaaaagccacacctcaagaaagagtccataattgactctaagcctataacattataatatgaagcacaaggactgataccaagaacctttcttgcactaacatactcataggctcaaggccaaggccatatcgattgcacattcaatttgctgtaacttcctgatcattggagctctgaactggaatattttctttcctccccaagtgaaggagtccatattaaatggaggctttaataaaagtccatatcacacgaatagaaagacacaggcccaataagagccgaatgtgtgaaaaggtattggaagaacaaaactagaggaat

SEQ ID NO: 134701 - DNA, 449 bp, Glycine max
  unsure (1)..(449): unsure at all n locations
tcaagcacccgagctgcagctgaaatttgtgtaattgcccactctgttttttttttattaatctccaacgaagcaagccacctaagttttagggctagcctgacacatgcattgatagcctatcctagctaattcctttgaatcattacttctctttaaatttatcttgtttgattatccttagaaggatgaataatgtcttgatcttcatctcactgaagtcaacgccgtatggcaatttcatgatcctatttattaatgcgatatcccgataacgtaaacttgtgttatggatgtcaaaatgttttaacagtgtatataaattaagagaaatcatactaaaagactccttaacatactaatntgaacacaccctctactattagctgagacttattgaacatctcacaattgcgcgatctcacttcaaattcaatgatccccactta

SEQ ID NO: 134702 - DNA, 387 bp, Glycine max
tggacaccagcacattataatgtgatatctgtaggcgcactttattattttggtgtatactaacgctgaagataaaatattttgggtaattatattcacctttatacttattacatgtaaaccctttcgtctggaaatttacactaatttatcggattaatatgtaagttgggcgttgggttgtatatgatatgggtttaaaggagggtaaaccaatatttactacaatttaattttatacttgtatgatatttaccctttcttagagattaggacaaggtttactatgtccttataaagaaacttaattccaactcgattataattcgataatattcgggacaagtcaactctattccaactttatgagtgtagactagaaaatca

SEQ ID NO: 134703 - DNA, 458 bp, Glycine max
agctagagacattcttgcaaggatatgtttggttatataggttgaagagagtcaacatgcaaaccttgaagcaacaattcgagctactacagatgaatgagaaagaaggtataacaaaatacctaaatcgtgtgctgggcctgtcaaatcagatgatggcttgtggtgaaaacatgaaggattaagatcttgtagaaaaggttttaagaaccttgagctcaagatttgattatgtggttgctgcaatagaagaatctaaggatttcatagaaatgaaattgaatgagcttcaatgctctcttgaagcacatgagctaagaatcaaagaaaaggaaacagataggtcatctgaacaggccttactcactcagagtggtagaagatacaaaattggctcacgcagtagtaaagggaaggtcaaatcgaaaagccacaaatcgaaaggaacaagagatgat

SEQ ID NO: 134704 - DNA, 479 bp, Glycine max
  unsure (1)..(479): unsure at all n locations
gtatatntaatccaagctctgtgatggatttgtttgttgttatcccctcttgtgatgggtcaacatccattccctgtcatcacctaaaccatgccacgttaagattcctttctacttatagttatagaaatctgtttgcagagcaacatggtgcaaagggtaatctcgaattactggcaacttgatttcattttaatttgataattagtacaataaacccatcactccaacgtaatttgtatttgaccatccttcctaactctcacatcttgtatagtaagcttaactgctaatctttcgaaattctaactaccctagatagagaggtgttacgacatagactgctgatgtnaaataaagtgtacatagcaaggcaaaaggggttntatttccacaatttctaagtctatatcgtataatagttgggaccaacattatcgaacacataaataattaatgttatatatctacggagagaa

SEQ ID NO: 134705 - DNA, 433 bp, Glycine max
agctttacactaaagacaaagattgtttattatttttaaataacaagctgaaactgttattattgttcgtattcttactgtttttattgataagattataggccgactctggacatttcaggccatgattctatggtttggaggtatgttaacaatgggggttacaatgtaaagagtgcctacaatcttatcatggaaaaatttgttgatcaagctagcttgtgcaaggaaggagattggagtttaataaggaaaatagatattcctcctcgggataaactattcctttggaggttatgctatgattgtcttcctaccaagaccaaactgagaactcgaggggtggagtgttctttgatgtgcgcactatgtgagaatcaaagtgaacatgtgtttcatgctctttgtcacttgtcaaaagagtgacagttga

SEQ ID NO: 134706 - DNA, 495 bp, Glycine max
  unsure (1)..(495): unsure at all n locations
taagctgccctcaaaggatctccttcaatcatagtgtagttgcattttttgttgtccttatcaacctcatcaatcctgtgtgtcacatacttgaaggggaaagctgcacaaaaaaaataaaagacacatacaagaaaattgtcaaccaacagatagagatatattcatatatataacctcataatcaattaatttcactctagtttgtcaaagtattggtgctaaccttcagcaaagttaacttgctcaatgcttccagcttccccatctccttggatcagattgacctcttttatgatctgtggtaagagctttggcagcaaagttctagagtcagtgatcaaggccttgaacatgcgtgatggagcaacaggggatgaataatcatgtgtaaaaagtgtggctcccatggtgaatactgaatattgtgagattgcanagatcacagaaaattcaaggttgtgagagttggatcctatgggatagcactatata

SEQ ID NO: 134707 - DNA, 411 bp, Glycine max
  unsure (1)..(411): unsure at all n locations
tctcgtcatcatttgaaaaatttgtaacacgacacactgtggcataagagtaacgatatctatcttcccaaagtcttggagggcaattaggcctttgccctggattttatgtcatgatcctgacatgtaagtgtatcgtgtctgagctccaattataagctcaacaagctttgctgtaacatacattggacaaacagatcagatgcttaaagtagtctatcaagctgaaatgatgatgacaagaaagtccggcactaaaagggaaacaaagcaaacaaataagtatgaagctcacctgtgagacatcccatgacaggtataggtcccacaactttctcagtgctttcaagtctttgcctacaacattntataacaatttagaataattttctctccaactcagaatgagca

SEQ ID NO: 134708 - DNA, 441 bp, Glycine max
  unsure (1)..(441): unsure at all n locations
ctatgaaactcagctactcaacaggccctgccagtatacattccccaagtcattgtctatccattagaaagagngctcatatatcctcctaaacgttctagccaccctctcctttgtgatttccttcatcattacattacaattctccaattctcttcccccaataccctcttgccagcagcccattatgttcagcatttccgttcatttccaacggatttctccacttcctgactcccttcttacattatnattccatgctttccccttttatctgttcttctttcatacaccaacagacatttgcttcccttaagcccattnttctgttcttatctctctcctgtctggagaatagagacattgtctcctacaatcgaattcattctaaataccagatgaaatcaaattctttgtgagctctgttattaatatagcata

SEQ ID NO: 134709 - DNA, 412 bp, Glycine max
  unsure (1)..(412): unsure at all n locations
agctngatattgcttagtggggatttatatatactttataagtatatggctatggacctttaacaaatttatgcatatgacgctgcagtctttaaattaggaatttaagatatctagagattgtaaaaagaaattcattcgtttgataaagatgtagtacatctttcactgggattcaaacttggttcgctacattacgagagactagcctctttcgctagaataaactctagttaggatttcctcttctatattccaaaatcaaatgtggaagaatatatatatgtgtgcgttgcttcacatgaatggtggccagggagaaaggagttatgcacacaactgcttactgcaagtactatctctattatcactaaatttgttacttttcttgacattgatccactttatttaa

SEQ ID NO: 134710 - DNA, 481 bp, Glycine max
  unsure (1)..(481): unsure at all n locations
tctaacctacatcggcaaagcttctctgatggctggttgtgttcttngtgatagnggagatgagcgaacaatgaagtttgttgttgctcgatgttgacatcgcaacaaactacacaactgtattgggagcagtaggggcaaagatccattctattttctaaatcatagtggcgtccaactacacaccctcgagtgtctaacaacaaactatcgagtgtaataaatcctaaacacatgagatcagtgtaatttgctcaaatatataagatacataattcctatagtggtttagggccaacctcactacctacaattaaattccatactcatgagggagaactctaactctcccttacctaaagaacatgaatatgcagcacaaggttgaagatgtcttcacgacagtcctttgatatatctattcacatttaatccaataatccttgtgaatgttccccctatggctctaagcaatgacaca

SEQ ID NO: 134711 - DNA, 457 bp, Glycine max
  unsure (1)..(457): unsure at all n locations
agctntccctataaaagccatcggtttgttttttgaaaagcctggcaggaaatgaaaatttagagaaacttagcaaaaatattgttgattattaacagcttataagctggtacctattcaaataaagtgaaacgacatatttattactttttgttataaaaaaaatcaaaactccacaattatcaactccaacgtttgcaatttcactggcaggaagtgagcatgaattattctttgaaacgaaaaagctgcaaaacattgagatgggaatattcgttacctgtttgttgcaaattggtggatgaatgagtgttgtctctcttgccatctttttccatctcttctctttctcttacgatttttcaaaagaaagagaactgaacccgtacaggtaagtagcatttggttttctaccgaagatcttaggacctttanagcccaatactattgngcctac

SEQ ID NO: 134712 - DNA, 455 bp, Glycine max
  unsure (1)..(455): unsure at all n locations
ttgaaccagctttgcgagcgaaaaggttgtccagtgtttatttatatngtcccgtgttgagggagattgtttgatgtcgagggtagtagccttaacaaataggagggtgatgagtctgtcaagaccccaagcacaaacaaatgtcgtccgatgtctagagtggtggccttaacaagagtgggagttgtaagtctatcaagcttgtcaagccccttatcctggagaagtgttgtctgagctgcttctatcaagttatctggggtggacatactttnggttttacaggcgacctctgacatatcaagtgagggaagcctatgtatttgacaactctacctatttttcttgttgtagtagacgtgtgatgcgcatgcgtagtactcttgtatatgtgtcactcgtggagtacgcatgtactggagatgtggtgtgtgggtgagtggngctgcattgtg

SEQ ID NO: 134713 - DNA, 454 bp, Glycine max
  unsure (1)..(454): unsure at all n locations
agctntactactcagacaaaatatgtattgttctcacacacccactgacacattctttctcagtcatgccctaaacccaaataactttntttaattactcaagttggccatacacatgttcacaccttccatataaaacccaagtaccattttatattgacatgaaataattgtaattacttaatatgcatactagaaactagaaaatatctcatccattacatggatattttaaaattcaggtgaaatctataattgtaagaaaatatttatagaaaaatgtttaaaataatgagaatggtattcattgttaattcaagtagaatctaacaagtatagattaaaagaaaaaatgctaaagattataaagaagatatgaataattaatcaaaagacattatatctaanaattaaaagaagacaagttaaaataagatgtcttttttaaagggga

SEQ ID NO: 134714 - DNA, 479 bp, Glycine max
  unsure (1)..(479): unsure at all n locations
gcctctcatagacaacgtatgagatattatatttatagaaataatcgacccacgactaatatcgtgaaaaaactaatcaaaacattaatccggtactttaatatatacaatagcttatggatcntaaatttatggtttttttccactcatctcccatttctctaattgatcgaatataaggttttatctaaaaattaagtagccattaactaaaaaacaagtttttttatatcattaaactatcgttcattttgagggacgaaacaagttaatcgtcttagtggtttaagtggcgaaaagaaaaatgaaggtcataagcttaaatcccgtctcattcttcaatatactttgtttaatacaaaagaaaagtggttaactctcatttctcttgacatcacgtatttctcatgcttctccctcccagctaaaccattatataaactagagacggataacaatctacataccataaatcaata

SEQ ID NO: 134715 - DNA, 384 bp, Glycine max
agcttgaaatgaggaagcgtttaatggtgtatcttcctgcttttattcgtagaccacagagtggtacctggagatatgtcgcgggggtcaggagaccttggggacgtcaggtggggtgctattgcccaaaaccaagcttgaccaatcccgacccaacccgggcatagtcagtcagtgagaacctgtgatgtacctaagcaggcgagctcctggcagtcaacagataaaaggaacaaagaccacaaagcaaggaggcttgtgtggtggctggccagctgtgaactttgattgatatatgggatatggcctctggtaatcgattaccaagggtgggtaatccattacaaggcttataaatgaagacaggaggctaagatggtctct

SEQ ID NO: 134716 - DNA, 409 bp, Glycine max
  unsure (1)..(409): unsure at all n locations
ctttcanaagtcaagttgaataccatgcaggggttattttttaattaagcttcagctaagacctcattagctatcattacaccatggaggatatgtctgcctttgaggaaagcaatttgcctttcatcaattaagtgaggcagcacaagagccagcctattagccaggactctggacattattctgtagacacaccctatgagagagatgggtctatagtcattaagagattgggggctcattcgtttaaggatgagggctatgaaggatgcattacttcctttggggaatctgccattaatgaagaattcatcaaagaatatgataaaatcaggctctagagtctcccacaactgttcgatgaaattgaaattcaaccattcaggccaggacttttatctnccccgca

SEQ ID NO: 134717 - DNA, 433 bp, Glycine max
  unsure (1)..(433): unsure at all n locations
agacttgactttattaggagtttatttttatgtatatacttaatngaggggattctcctctatcttatgttgttcaggagctcgttaggtatagacaagacttcctttctccagattttcttagtttatttagtctcggcatgatttggccctcccaaattattctgtatgtctcattcattgatatattcggagggggtctttttggtaaagcaggggatgaagggttaacatagttaggatctcaatctctatttttcctttgccccactccatcttcattttgactaacaaataggcaccaaaaaagcatattttatccaataaaaacttgaacaaaagtattgtttttatataacataggtatttgagtttttttaccgcaactatatatctaaggttggaacttgacattattagataatttggaata

SEQ ID NO: 134718 - DNA, 499 bp, Glycine max
  unsure (1)..(499): unsure at all n locations
tataaaactcagctaagaaactatgaataatacaataaggtgtatcgttattacaaagagtcttaaccttttgaagaaaatttctaactntagaaattntcttctcactcacacatgatgatgtatgatgcacaaaagatatgatatggactaagatgcaacattcaatataacaaccaatacaaatatcactcaagagagggcatgcaaaagacaacttcttcaagctcttcactactagaaatattgttttcaacatcgctagcttaatatcagttttagaaaacaccgatgttaacaaaaatgcatcggcatactcgtaagtaacatgaggtaattaacaccagtttttttaaaaaaccaatgttgtgtttaagttaattaaaaacccaaaactcttcacgctccgtgctcactatcccaaaccnccatttcaccagatcatctaagcactctcactattatcgctcgcgaatatcaccattggcactctcgtcac

SEQ ID NO: 134719 - DNA, 456 bp, Glycine max
  unsure (1)..(456): unsure at all n locations
gagccacctgcggcatgcaagctattataggagaaganattgaataattcgtttcagactacactcgtaagctataatcaagttattgtactttagcttttaaaaaagctaaggagcataaactaatcagtttccattacagagagtactgtttacacagacagtagtcagaaatacagagcgtgcatgtatcctgttcgctttaatcgcaaagtgcataggtgcaaccagcggacaaattcgaaatagatcaatctattggattcagccaatgttctcacatcaaattgagtatgaaaactgctagtcccaattgtgatcattacttgatgatccacattccacttgctgcaatctttgtcaaagacacatcctacacataagcaggcacatgtcgatattgacctgccagcccatttaaaagagaaaatccggtgaaaactcttctaaatgcta

SEQ ID NO: 134720 - DNA, 309 bp, Glycine max
  unsure (1)..(309): unsure at all n locations
ggctagctngcttaacgcggacgctggagatggtatatgctactcaagtcacaagaacaagaccctttgaaattaatcaagcttaattgcaaaacgacgcttaacaaaacacatgaacaagaccctttaaaattaataaagctcgagtgctagaagatgcttaaccactaaacataaaaataagcaacacattctttatcattacatccaactccaaatgcttatcgaaatatatgaggtaagatatgatatgggcgaaaacatgcttaacaaaaaatcatagaaacatatgtgttatcgctacatcta

SEQ ID NO: 134721 - DNA, 368 bp, Glycine max
  unsure (1)..(368): unsure at all n locations
agctnggttgtttattacttgcaggtacttatgatctgtttcttgtggggatggagtcacgaccgactgatcgttgccccttctctgcgctaaacaaacagagaacgtcgctgcaagacagccccgtatcctttgtattcgcagttttcttttactatttgtttgtcttaaaaagaaaataataataaataataagtcgacgcctaaattctaacttaagtaagttcaagttaggcaagacgctaacccatgagaaaggaggggacatggttaatgttcccctcaagaaaaaaaaatgcaggttagctcgcctgggcaagctgagctcgcccgggcgagccacccctgcaccaaaatataagaatgac

SEQ ID NO: 134722 - DNA, 132 bp, Glycine max
  unsure (1)..(132): unsure at all n locations
atcacacgtgctgggggggggggggtcncttctttccttacagatccccctctcaccacactcgatgaggtaggatgctccccagatgtgatctgtctctatatgcctccttcactccgtcgacctgttgtt

SEQ ID NO: 134723 - DNA, 458 bp, Glycine max
agctcgatgatcggagagagaaacatgtgtttattgtctatgatgcaagctcaaaaggctacaaattgtacaatccaaacaatggaaagacaattgtgagccgagatgttgagttctacgaagaaggcacatggaattgggaggagaaagaagacacttatgattttttcctgtactttgaagaaatagatgaagaagccttgactccagatgattcaactccagcactttcaccaactccttcaaccaatgaagcctcatcatcttccgaagagagttcaagtgaaaggccaagaagaatgagaaatattcaagaattatatgatgaaactgaagttataaatgatttggtttgtctttttgttgacagtgaacccttaaactttgatgaagcaatgaaagacaaaaggtggagacaagccatggaagaagaaatcaaagccattgagaagaacaca

SEQ ID NO: 134724 - DNA, 492 bp, Glycine max
  unsure (1)..(492): unsure at all n locations
cttcgacatttggatcattctnttaaattagagagtgttcttctttcttcaatcaagcaaaatagaatgggtttccgtttacctgctgttcgacgggcatcgttcacggctagccaagcagcttcaaaatctgtacaagttccaaagggctatcttgcagtgtatgttggggagaaacaaaagcggtttgtggttcccgtatcatacttgaatcagccttcattccaagatcttttgtatcaagctgaggaagagtttggatatgatcatccctcgggtggcctcacaattccttgcagtgaagatgttntccaacatataacttctcacttgaattgagaccacaaatctcactgtgggagactcacatagattagtagacattctacactataggcatcttctcaacttgtaaagattaccaattcttgagtaatgacaacanattcaacttctatgcatttctttttatcacgtacattaatgttcact

SEQ ID NO: 134725 - DNA, 462 bp, Glycine max
agcttcttgaagatgtttaaagcctcattaatctctttttcttcttacacaaagaacccatgatcttgttgtagttgacaatattacgttcccaaccaacaaatatcatataatctaaaaatttaaatatgtttttaatctctaataaatattcgatttttgtgtttattctttaataattttttattttgtgttgaatttttaataaaataatatgtttattttttatttttgatattttgttttaattcttaataaattaaaaaaatttatatttattttattataaattaacaaattttattttaatctgtattaataacaaatgaaaaatatttattataaaataaacacaaaatttattaatttattaacggctaaaaataagtgtcaagaataacaaataaaattattattttattaaaatctcgttatagaacagaaatgtattaaataataaat

SEQ ID NO: 134726 - DNA, 483 bp, Glycine max
  unsure (1)..(483): unsure at all n locations
actcagcttatgtgtaacactctntgagtgattagaatactttntctatcttcttatattgnttgngaaagccaagagtggctcagtgacaaagaatacttgggtcttaatctcaggggaagattaagggtagtgctaggagtagcctagagagtgctcattgtagccagaagtggcatagagaatacttagttgtaaccaaagaattgattagtgggacccttcaaggtttgaaggagaattggacgtagccctatagttggggtgaactagtataaaaccttctatgttctctttactgcttttatataaactcagtttttctataagtttcttctacacaactatatccaagtttcgtgaactggttttctaagcacaatgtgatttcgaaccccttagacaaaacctatcatccattgatatctgtttgagaaaagcttttannagtnttcgaaagaccaagttctatccatcacacta

SEQ ID NO: 134727 - DNA, 461 bp, Glycine max
ctgcaagctagagcactagattgagaccattgcgttgtgtttggttctcacgaaaaccattattgtggtgcactactctaggcagatgaactgcctaccctactgatgcgatattcatgaatggttgcacccttcgcatcgaaaagcttacccttcgcatcgggcagtaatcattgctatttttatttgcctgtgatgagatttgtagttagtgagagtcttttgaaaaatggattttttttttttttgcataaggtagaaaacttaaattagtgctgaacctggacccaatgattatggaacatatcactatcccccacgtgaagttgttaccacttggggaaaaagttggaatcgcgctatttcctgtggctcatacaaggcaagtatatttggatatatgtgaatgtctcttcttcctttctaagtgtcaagttaagagacatgctagtaatactaca

SEQ ID NO: 134728 - DNA, 461 bp, Glycine max
  unsure (1)..(461): unsure at all n locations
tgtatgagctagagagagagagagagagaggcacatgcttttgctcttgtgctgagcgtgtgatggattgggtagaggggttcaatggaacctgtatttatagtaattgaggatgactgttggcctttgtttgtaggggctattgcagcctttctagataattctaggcttctagataatagccaggagcttacatataatgttagagataaacatttacttatagataaaaggtagaagataattgtaccttgtagataatgtgtgagcttatagataattaattatctgctaatagataagatattcaaatacatttgaatattcataagttagagatataacctgcttgttggagagcccgactactaagggtcaatcgtctgtgctcctgtagtanggctaacattgagggtggacacgtgtctctgcgtgtcatatatgatgtcacgtgtatttat

SEQ ID NO: 134729 - DNA, 400 bp, Glycine max
  unsure (1)..(400): unsure at all n locations
taagcaccgcggcatgcagctgagacctcttattatatatttttgncagnnacggggattgtgaaggtgacaagagtcccatcccaaatggttataatttctcattcatcaaacacttctgggatttactaaaaggagacattgttgctatgatgcatgactttcactcttgtgggaaacttcctagaggtgttaatgcatctttcattgctttgattcggaaagttgacaacccacaaggccttggggaatataggccaatttcccttataggatgtatttataagatcattgccaaagaaatatagaaaagaatgtccaaagttctaaacaagcttaatccacttttgtggtggggggatgttagatggaatggtcattactaatgaaaccattgatg

SEQ ID NO: 134730 - DNA, 459 bp, Glycine max
  unsure (1)..(459): unsure at all n locations
gcctgagaagagaganactccgaggtacttggagatgttttactttctcaagttcagggatttggtaagccatatttccctcaacaattattgtgttcaacctttatgcctttcactntattagaatcaaggttttaaaaaatggttttcagctgcaacgtcaatgtttttagggtgtctacaaccctaacatgactgcaattgtagtcctatcagtcgcatttgtccacaatttttcgcactacatatcaaggaacttaacaaaaccgcaaccacaatttaaattcatcatgagaaattttatgtgccattttcttcttcttccttctattgtagcctccttggccaataatatatatatatatatatatatatatatctggctatgcacctgtntangattatgtcttatgccttcatgcatttttcatctgaagttatgacttaatgaaatggctg

SEQ ID NO: 134731 - DNA, 459 bp, Glycine max
  unsure (1)..(459): unsure at all n locations
agcttgtaagcactgcttaagccttatctctattcaacgttggactatattcatcactccctcacacctatcacaatgaaggagcatgaggccgcacattaaggtgggccaagggtgtcacaaattaaggcagcttaatacacgccctcaccctaaggctactagtctagggcgtgcccatgtaggcggcccaacagaaatggatataagataagctctgatacaatattagaatttgagcttatagcgtaactcaactccaaaaaattagcttgtaaggtgaggattgcccaagctatatatgcatcacttgagccttatccctagtcaatgtgggattatatccacccnctaacacctatcacaattaaggtgcataagtctacaaattaagggtgcctacagtaaggcaagttaacactaaaaccttaacctaatacatggacatgcaggcttgtc

SEQ ID NO: 134732 - DNA, 490 bp, Glycine max
  unsure (1)..(490): unsure at all n locations
actcagcttctaagggaagtttctcaagaaagcttctcaaggaatctatcttttctataaatagaagcatgtgtaacacttgttgtaactttgatgaatgaaagtcttatgagacacacttcaaagttccacttctctccctcttttattccttcaatttcgtgctccccccgccccttctgtctttcttttcctccattgaagcatcatctccaagcttcttatccaaggctcatcttggtggtgaagctccttcttccatggcttattccttaatggatggcgccttctcttacctcttttcctttgtcttccgctgcatctncatagtggaaaatcaccattaaaggaccccattgaagctcaaagatccagtctccatagaagccccacaagcaagcttccatcaagtggtatcagagcacaagagcttcaagtaggtgctccttaaacctccattaattatttttgctttaccttctcttccata

SEQ ID NO: 134733 - DNA, 253 bp, Glycine max
  unsure (1)..(253): unsure at all n locations
ctctgaaggctacaaatngtgctgacactctatcgagggagcaatggagactctaactgttggatcttgcaaagatagcacttggtgcatgcaagccttccacaccgctcaaggaaaaggtgctggcttatcatgactagatgatgataacgagagactttatgacacgcctacacgctctattatcaaactcatgatccaaggatgcctcatactatttcaaatacagaccgtgtggaccgtccaccataat

SEQ ID NO: 134734 - DNA, 428 bp, Glycine max
  unsure (1)..(428): unsure at all n locations
aaagcttangttctacgagagcattcattccccattttcttgacaaaccataactcattttttcacagccccaaccttattgttttgctacacttaataacacacatacttttctttgcacatggatgcttctagctctcattccacaaaataaacaaacactttcttttacaagaatgaacaatcaacaataatactggactggagcaatttactgtatactacaactcacattagcttgtgttgttattaatgtttcagcaacaaaagtttatcgaaaacactcccccaaatttgggacaaatttgtcttgatccatgagtgctctcctacaacctaagatagggtagttactcagtatcaatttcattcggctcggatttaaattacgcttaatagggtgcaatggacattcactagtaacaagg

SEQ ID NO: 134735 - DNA, 480 bp, Glycine max
ggatctctaagcgacgcggctgcagctgctttactatctaaagtcagtatctcacgtctagccaaaagaatttgattagtaagtggggcaggaagattaaactggtagtgttgatgagatgtggggatgatgcatgccttatgtttacaaaaacttactgcagtatatgcgcttcctcatctggaaactataatctctaactgacaatagatgccgaaggataatcccatattcagactgaaagcttggaacattgctcacaacatcccaaacatgattgaaaagtggtttaactacagatgacaatggtaacatttttcctaataataaaagagaatacaaataattaagagaagtaggaaagttcacaacataaaatatataagactaaaccatatttttctttgtagaattttaagagagtaattacaaaaatatcaaataaaacgctcaaagtatacaaccactaattaagtgatg

SEQ ID NO: 134736 - DNA, 484 bp, Glycine max
  unsure (1)..(484): unsure at all n locations
nttaattatttcctttctttaagagacatgatgtaacttattatcatcataccaagttataaaattaacttggtaataaagagagaaaggagcgacagacaggtcgtgacttcgaattttcctactcacagataacataacattgaccgataaattatttttggataaaataacacaggtctgaagttctttatcatctaaattaattagtaaatgctccctttcatacatgcagactagtgggacttccacaaacgagaagtccaaacaagataggaagcacacagccataaaccacaatattcacaaaaaagatcccttatggtactttcagagttcctatcacactattttgttggtcagccaaatttatatacacaagatgacagatagcaaagagattggtataaggaacaacacataatgaactcatagaagggctaataaaatatcaagtgcctgcctgctgggtaaactaccactc

SEQ ID NO: 134737 - DNA, 392 bp, Glycine max
  unsure (1)..(392): unsure at all n locations
agcttaagctccataagtataacttatatttgtatgctctccaacaaggaaaacataagcatttacacactatccaaaacaacacaaacgttaggaaaacataaagacatcttaaataacccagtaggtgaaaggaacacgaactttaactagttacttatgtagaaaacacccaagttccacaaaagaccaaattaagagctataaacgaatacctacaaaagctaagtaaagaaaaacaacttcagctaagtagtgaagcataaaagactcaaccttggattccaagaagaaaggaagagaattcaaaaagacatagacaagagaaataagaagaaaggaacaaaatntagaagatgggtcgaaagttgagatctcttacggaccatatg

SEQ ID NO: 134738 - DNA, 472 bp, Glycine max
  unsure (1)..(472): unsure at all n locations
tgtanatatctgccccatttgtgganagaacctgttctgtcttcatgtgttcctggtttatccgcgggcacgacccctttggtttggatgtgatttctagtggtgcattgattccaatacagttcaaatcttccaactttggctttggcagaaactcgtggagattcaaagggtatgtccagaaaatgccaaccaagtatctgctcatgtgggaagtatctgctgagctatttggaaaggaagcaatgaatttattcttgaaggaaaacctgtcaatccgttgattttaaggcagggcatatgtgtatatgatgtgaatgaagagggctgtgattcttaatttttaacaagatatgtagcttaaacattggggtggtaaaagatgtcatatcacncttgattttttatttattatttgaatgacttctttctaatgatagagtgggagtattcttaaagatactccaataat

SEQ ID NO: 134739 - DNA, 444 bp, Glycine max
  unsure (1)..(444): unsure at all n locations
catgcaagcttcaccggatgacgcctatcttcantttctaaccgacgncatgcaaatttcgttcagggattgaattgaaaactcgttacgcgacatctgtcgtgaagtagcgaccgatatttttcagccgacattgcacaattctttttagaaaagctcgctggtcgataatggtctttttacggcagagtaagttttcttgttttggtgttgcataaaaaagttacaatgtacttcggctaggtttttcgtgcgagttcaaccgacattttgtttcggccaggaaaacattagcccacctctgcaaaaaaaatatttgctaaccgccttcatgcatatttcattcaacgattgaatagaaaactcaatagccgacaacggtcgtgaaatagttccgactgatattattcagccggcattgcgcattttttttataaaaacgct

SEQ ID NO: 134740 - DNA, 264 bp, Glycine max
actcagcttacaggatgatgctgatcgaacatatcctaaccgacatcatgcttatttcattcacggattgaataaaaaaactcattagccgacatcagtcgtgaagtagccccgactgatattttccaaccgacattgagcaattttttttaaaatctctcgctggcagataatggcttttttttactgtagaggaagaattcttgttttggtgttgcataaaaaactttacatgcatgtcggtttggttttccctcgtactcc

SEQ ID NO: 134741 - DNA, 461 bp, Glycine max
gtcacctgcggcatgcaagcttccatcatgcttctgtacagactttgttcaacactggtgccagcttcatcctttgacagcttcaagtgagtaggtgcaggtgttcttttatggctggcattttccatcccaaacttcttgacaatgttctttgcatacttgctttgtgagaggaacatgaagtcttccatctgcttcacttggagtcccagaaaataagtcagctctccaacaagactcatttcaaattcagattgcatctgttgaacaaaatgtcgaagcatctcattcgacatccctccaaacacaatgtcatcaacatatatctgtgctatcatcaagattttagcatcttgtttgacaaagagagtcttgtcaattcctcccttcctatacccttgctgagtaaggaactctcgtagcctttcataccaagctcttggagcttgcttcaatccata

SEQ ID NO: 134742 - DNA, 377 bp, Glycine max
  unsure (1)..(377): unsure at all n locations
ggtgtgaagagatagacagaanagactccaganatttttttgttttgtctatcaactaagcgctcagtcttcatgcgctaagccaagcttgctcgcgctaagcacaaagacccctgattggttggctgaatagttcagctaggcgcacatcactacgctaagtcccacatcttcatggtaattgaactntaaccagcgggcttagcatggatgatgcgctaagcaccacttcttctctggaagaattttactggagcagcgctaagtgcgctatcctgtgctaagccccagatcctttctataactntagtttntaagctgggcttagcggggcaggaagcgctaagcgccgatctcttacggggtttgaattcttg

SEQ ID NO: 134743 - DNA, 400 bp, Glycine max
agcttctagcacactccaatttcttctatagatcccacggtcagatcatggaccagtgtcttgcaaagtctcagaacacatctcgagaggatccaacggttcaagaaggctgggcagcattcttatcgaggcagcttcatgtagctttctctagaagcttcattaagaggcttcatccagaagctccctcgaggcttctttgagaagctctctcaaaaggcttctttgagaagctagatccttatctatccacacccctctattaactaaattagacttccttaaaaataactacggatgaaaataacgcaacacataagtcaacatcaaacataatgactaataatatatagatatatatatcacggcgctacaatgatgccatgaagagatgcatgat

SEQ ID NO: 134744 - DNA, 454 bp, Glycine max
ggaaattgcatttgggcacttattgagaaactcctattctgtctctacatacataaaacagggccaccatcccaattttgcaaaaccatatatatatatcattggggcatttcaccgagcacttggtgggcgcacgtttggacataaattgcaagagaatgggggcaatgtgggatgccccaatgcttaagaatacaacataggctaaggccttctcagtcaaatccttaactcaagaaatcaagcatagaaacaaaccacaactggcccatatatataagcaccgtctaacaatttagagcatccaaagatgaagaaaatactccaatgcgaagcaaaacactcaaggattgaatacttactacttggagtgagtagaaacaccaaacatgaaagcaaaatgccaccaaaagtggcttaggggagcaaaaaccgcaagccttcgtgagttctc

SEQ ID NO: 134745 - DNA, 428 bp, Glycine max
  unsure (1)..(428): unsure at all n locations
agctntctctcacaaaaatcgggttcaacttgtcttggctctgtggcggttttaaaccactgcatttttattattttaaaatgatttcttacaattttaaatcatcaagatattttactcatatggtttgatgactgcttttacatattcttacgatcttaaagaagaaaaatacaaacatgaatgtggaattattgggattnttttatatattttggtggttttaaactgtcataaattattttaaagaaattaaatttaaaaaaatatatttgtgatagtgtaaaatcgccataaattgtgacactgttaacacaaaaaatgagagaggctaataacaactttttaaaanattgagagtgaacatcccatttnttttcataaataattaagaattttttagtaaaataataaataaataatagagt

SEQ ID NO: 134746 - DNA, 424 bp, Glycine max
  unsure (1)..(424): unsure at all n locations
atctataccatttttatggaattataaatgacaggatgaagtggcataaagtgcttagagagttcacttgcatgtgaaaaattttcaaaaagaaaaagactcaagttaaaagaataatgcaaccagattaatacttccaaagaaaagaatattttgtaaagacattttcagacaatttaaatatttttatttggctatattagtataaaacatctctaatccatatatttttttaatattatgctctttttttcattttcttttgatatactntgtgttttaacaacttgaattcaatatgattttgtttatcaattatttttggatttgtacattacttatacgacaatttataagtttctttttttagttagatntcactagggttaaaacaattattggttaagacgttttagcagacttt

SEQ ID NO: 134747 - DNA, 402 bp, Glycine max
  unsure (1)..(402): unsure at all n locations
tttttctttaccttctcttncattggtggttcttcatttttctccatggatctcctcacatggcttggtctaaattgtggtaacatgattctttaaaagttccacccgataaacttgctatagaagttagaattgattttctatgggtcaaatttcttgttcttagttcttgaaccatgaattgtgttgagtttaggttcctttgagttttggcttgttattttttgtggctgaaacctaaaccataaaattcttacaaaaatattaaagtggaagaaaacctcaaaaatctagagtgacttgttcacctattatagttttgtcatagaagtcatgtctagtcatgaaacttgtcacataagatttcttatgttgggctgaattntattttcttggttcttt

SEQ ID NO: 134748 - DNA, 384 bp, Glycine max
  unsure (1)..(384): unsure at all n locations
gtgcgaatgtgaaacaataagttctgaatgtgatgccgaatttcaagatgatccaacggttaacaattctaggatcgtagttttattggggtaggtttgggtgtatgttggaaaaaaagagcattttggaagaggaaaaagggagaacgaatttgggagatagagagagcgtaaaaacatattgtgaatattaaaattgacctcatatgtctctatttagagctatgatactntgagcctattatttactctacttcctctgtattttattattatatgaaaaggaactctatttcactatttaatttaataaatcaccaattaaagcctccctttgtcatctaaaacatcatattactctatttattgtctgatactatgaaa

SEQ ID NO: 134749 - DNA, 457 bp, Glycine max
gtcgcatatcttaaaggaaacgaatcataatttatgatgtacataggagactaatttggtggttcataaaatatctagctgccaaacataagttttactaactagaaatgaatgctgggtagagcattactatcaatatgatatcaacatgataaattacctggaatagtgggtggggaaccctgatctccatagccaagtttcgctggtattttcagcttccgcttctcaccaagacacattcccaataatccctggtcccaacctgcaaagagaggtagtgatcatggaatactctatcttgaaagatttcccatcaatcataaaccagtaatttgtaacaaaattacatcatacatactagtatgattatgtaaatacacgcatgcatgtatgtgagcataaattatagctcaatatgtttggtgggtatgtaaattaaataatatgaagcaca

SEQ ID NO: 134750 - DNA, 316 bp, Glycine max
  unsure (1)..(316): unsure at all n locations
tatgtntattatgtgggttagcatggttgcttctttccatggtggttaagcattatgtcattgttctgcttctaccttggatggttagccatttgtcattagtttgcttctacctttgtaggtggttaagcttgttttacttttgttgagtggttaggccttgtgttatggcattttcttaatggttaagcctattccatttatctttgaatatttttagtcgttgtctatctgtcgccaatgtgttcctgacatgttctttgtttttcacttttgttgggtactgatattgttatcccaagctagaagtgttgag

SEQ ID NO: 134751 - DNA, 456 bp, Glycine max
  unsure (1)..(456): unsure at all n locations
agctntcattccttagcatctttcaaggcttctccacatttttcttcataccgagtcacatgccttaaagnttcttagtttatcccgagtgttatatcttttctcagcttttctttggtatgttttagctctaacttggacctcattaagagtctctttggctaagttaagtgaatgcttcgacaattcctcattttccttctccatgtaatttgacatcctaaaagagggttctcccacttctactggtaaacattcgatccatatgagagtcaaaaaggggtttcacctgttgttgattacgaagtgcaacggtaagcccaaaggatggctcagagctctttggccaaactacctttagcttatctgactcgcattttcagttctcagagtatngaattgttngtagttgcagtctgcccgttgctttgtaggtgctctatcgaagtaactcag

SEQ ID NO: 134752 - DNA, 455 bp, Glycine max
  unsure (1)..(455): unsure at all n locations
aatctgactattanggtattcatcctttactgattttttcttcaagttgatcctggttaagttaccaagcatagagttgataaggtttcaactcttatggttctccagttttaaggttcaagtttgaagggagtttttgaatttctttaggtatgtattgtgtttgtagtacattgaaattcatagtggaaatatccaactaaggttgttggatataattggatgtaggtcctcttgaggactgaattagtataaatattgtctttgactctccttttctttatccttagttttgtaatccatgttgacaatngaaattgaaattcattcttgattcaaactttgattttcaggggttttgtgtaattgatttccttgttcataactttgtgtgagaatcaattcntgaaaatttataaggaaatatattatcaaaattatcatttataacatca

SEQ ID NO: 134753 - DNA, 460 bp, Glycine max
  unsure (1)..(460): unsure at all n locations
agctntgaagtctatataaagttgaaagatgtttgtgttttgttcttgcttaacaagagaataatatgagacaaaacgaacaaagtgttgtgacgcggccagtcttgctggttgaaagaaacttgagcgaaataagtgaatcttagttgttctaagttagcaagttccattgtatcagaactaattgggtaaccactctttgagtgattaaaatacattttctatcaaacatctgttgtttgtgaaagccatgagtgacttgatgacaaataatatttgacttttaatctcagggaaagattaagggtagtgtcaagagtgacctagaaagtactcgttgtaactagaagtggcatagagaatacttggttgtaatcaaagaattgattagtggaatccttcaaggtttgacggggaattagatgtagcccaagagttggggtgaaccagtataaaacgc

SEQ ID NO: 134754 - DNA, 483 bp, Glycine max
  unsure (1)..(483): unsure at all n locations
tcagcctgattgctaagcgacagcttatccatggctaagtgtgacctattgtcaccaagcacaattccttacggccataattgaggtccatgacgctaagtgccagtcatgccagctaagcgagattcattgcagcaatatgagtgccaagcgagtccctctcagctaagcgcatgctcctctgtacttaagatgcatcattttagctatgctggctagagcctggcttatcgagagttgcagcttttctgatttgtagaccacactaagcggacataccctcgcgctaagccaagtctctattcaaaaaaaaaaaaaaaaactgattttgaatttgaaacgtcggctaagcgcacgagtccgctaagcaagccttggtgagaaaccaaacatttctcttgctcgcttagcgcagcggtccgctaagcgaaagtatcgaanaactgcttaagtgagtgtaacaacagttacactcacatcagt

SEQ ID NO: 134755 - DNA, 414 bp, Glycine max
ctcaaacggcacgtggacgctcgagaagcgagtcgctatataaccgtagtgaagtaataaaaaaatgtgaggccgctgtgttatggtgtactacattgtacaactaaagaaacaggcgacagttcattactagtatcgggttcatccggtatgattagttcttaaaagagttaaatgtgttgttcgctttcataaaattgaaaatagtgatatgtctttcaataaaaatttagtattttgtttttgtttgtgtgagagagaaatctattatttttcttatctaaaattatacagaatttaatactcatacctaggcaacattctttttcttacatgacatcctcttaaagatccatcagtgaccactctccttcttacatggacttgaacgtccattaggttataataaccaca

SEQ ID NO: 134756 - DNA, 325 bp, Glycine max
  unsure (1)..(325): unsure at all n locations
cttgctccagccttgattataagggagaggaattaaggcccttgttatgcaattcatgcccaaaggtaactttgacgtgagtttatacccagaagatgttgagtcgggatcctctctaaccttgttgcaaagattgaacattcccattgatgttgcttcagcaatgaactacttgcaccatgactgtgatccatcagtagtgcattgtgatctgaaacctgccaatgtccttctagatgaaattatgattgcagatgttgcagaatttggattggcaagtgatgcaatcctactccgcaagggcattggatagaanaactccaag

SEQ ID NO: 134757 - DNA, 391 bp, Glycine max
  unsure (1)..(391): unsure at all n locations
gatctccatttttaacatagaatacattagtcaaggcaacggtgcttggctttgtctatatcgggtacccaaaagggggnngagcgaggagtgggttgtagctaattccgccacgcatacccaagagaggtacgttgggatattcaccacaactcacaataatctctccaacatcactagctgcttgtgaccaaacaatgtcagatgggtcaagagtcatgattcggcgaggccaggaaagcttgtcatcattggtcttgaaggcacgggattgaggtaagtggaaggtaaaccattgatagagtaaaggtgcacaacaagaaatggttccccggccagcctgtgtacggtcatggatagaatggtaggtatcggcgagtatagtgggtac

SEQ ID NO: 134758 - DNA, 464 bp, Glycine max
  unsure (1)..(464): unsure at all n locations
tatcttaacatttctaacttcccatttattatctctctaagctctcttagcagagccattagtgagtttgagtatccattcaatcactgaccagtgagattggaattggcattgaacatgcgtaggaaagtgagaaacatgaaaaacaaacaaagaaaaccatttgcaaaaagcatggatcgtgacatcgactcttgaatatgcttagtgagcacatcatttgaataataataataataataataataataataatatgcacctgagaaatggttttgtggtgggaacagataactgaaaatgcaacagatttagaacctcactctccattntcaatacctatcacatgccaatgattaggtggtttatatatcaccagcagctgtaataaaataaaatttgaaaagatgaaggttgcaacagaactaccaaatggtatacctctgctttgtgtacgtatatct

SEQ ID NO: 134759 - DNA, 447 bp, Glycine max
  unsure (1)..(447): unsure at all n locations
agcttaactaatcagatgggacaattggctctctgttaaatcaacaacagtcccagaattctaacagattaccttctcaatctgtctagaatctcaaaaatgtgagtgccattacattgaggtcgggaaagcagtgtcaaggacctcaaccagtagcatcttcctcatccgcaaatgaacctgcccaacctcactctactccagaaaaagatgatgacaaaaatttaaagagtaagttacctaacaatttctatgcaggtgaatcttccactagtaattctgatttacagaagcagcatatccctcttccattccctccaagagaaatttccaacaaaaaaaatggaagaggcagagaaggagatattggaaacatttagaanagtagaggtaaacatacctctgctggatgcaataaagcaaattccaagatatgctaaattcttg

SEQ ID NO: 134760 - DNA, 460 bp, Glycine max
  unsure (1)..(460): unsure at all n locations
agcttataagaacannaatgcctcaatcatttttctatatgcatgtgaattangacgcatcaacaagagtcaagccaaggctattgtgcaagcaatcaatggggcaaaacacaccaaatgattatgatgatggatggctcaaattctcaccaaggtaaactcatcactttcaaattgagctttcaaaactatcatgacatgtagagaagaatcaaggatttcaagtcacaaaatgtcaagaacttttattttcaaaacaattacccatttcttgaacatatcctataattcaaagaaaaacatgcaaagtcgtacgtgcacacaaaattgacccaaaatattaaactaaaaatccgacgaaactaacaacattaacaaattaacacaactaacaaattaacaaaaccaacaaaactagcaaaactaaagaacactcccccccatacttaaacaacacatt

SEQ ID NO: 134761 - DNA, 390 bp, Glycine max
  unsure (1)..(390): unsure at all n locations
tctaaactntatacaagaatgaagctctgataccacttgttatactagtggcctcagatatcttaagaaggggggggggggtgaattaanatattccaaactacttcccctaattaaaaatctatttcactttttatctaagttatgaattcacttaatgacaatcttcttaaatattaattcaaataaaacaatttgaatatgaatataaagcaataataaataaaggagattaagggaagagaaaatgcaaactcagttttatactgcttcggcacaccctcgtgcctacgttcaatccccaagcaacccgcttgagagtatcactatctttgtaattccttttacaagttctaaacacacaaggacaatcctttctttgtgttagaa

SEQ ID NO: 134762 - DNA, 462 bp, Glycine max
  unsure (1)..(462): unsure at all n locations
agcttgtattgcttanataaggctagaatatatggaacaattcctttgtcaggtgttcagctatagatctttctagacaacgcanagatattttcaggccaaactttccataattagaattcaaatcaacctcaagcttcctttgtcgaatatacattagacacctttgaaactattacacaaagtcagtaagatttgtccttaaatcaacacatttggcaacatggatggggaaggcttcgcatcgtgaggcgatttgtattcctacaaaaatatttccctttatgtaagttatggttcatatttgctttctttcatacaattttctcacccagttattatcttccaaaccaaatcttacaatcatgtcattccatttatcatcaaactcaagaatcttaaggtctcctaacatacatgtgttcaatgctggcaaaaaatgctttaatttttacatgactc

SEQ ID NO: 134763 - DNA, 454 bp, Glycine max
  unsure (1)..(454): unsure at all n locations
agcttagctattatgttaagactgagcgcttggcgcaaggactgtgcttagcggataaacaattgcaaaaaaatttcttagtctttttctgtctatctcttcacacaagcttaaaaccccttggtcattactaaacaaactaaaattaatcacaatcacaagcaaggtatcctaatcacatgcaagagataagaatgaaaaatagaaaagggaaagaaaagctgggttgcctcccagtaagtgctcttttaacatcactagcttgacgcatcgtcctgttatccaggatcaaacagagttcctacttcaaggaccttcttcttaggtctcttttcctccatcacatgcactntaagacaaacattntggctagggggatctttgtcctcatggaacaaatcanagttgatcttctgatcttctatacccatttgcagtatcttctttcctatgt

SEQ ID NO: 134764 - DNA, 459 bp, Glycine max
  unsure (1)..(459): unsure at all n locations
ctatatcgatgtatgttgggataatttttcctagatcttttgtgttaataaactgaattaatattaatgaggacaaacattgcagggagattatgcatgccatgtggcagccccgaaagttcaaatccatctactttctggccactttgtacgttttcactctaacgatcccttctgccgtcgccgtttattggtctttcggtgatcagctccttgaccactcaaatgcattctctctgctccccaagaatgtcttccgtgacgccgccgtcatcctcatgctcattcaccaggtaaaacccaagtcaaacactttcattttgtgtgctntgttcattaaaatcataaaatacaattagtaattggtagaagcttctcaaaaataaagtgtaagactattattttatattctcccttntataacaaataatttcatctcactttatggattacctaatt

SEQ ID NO: 134765 - DNA, 301 bp, Glycine max
gaatacaggggaattacttcgtgggatgtcctgttgatgacccctctgctcgttgggctacatacattgaaatatgctacattgctgatgagtgccggtgtgccagatgaagctcttatactcaacttattctcattctcataggcacgagacgccaaaaggaggcttcactgattaagggtaacattgtactaacctgtgaagacgttgttgcatagctcctagtgaaatacttcccagagtccaagactgcacatgggaaagctacaatctcttcatttcgtcactgacctgttgaatc

SEQ ID NO: 134766 - DNA, 462 bp, Glycine max
  unsure (1)..(462): unsure at all n locations
tcaagctgctcaatagctctagggtgctgcatggtagggctaaggtctcttctctccctctcccatcattcatctccttcttcctccaagctcttatccatggcctcctatggtggtgagcttcttctagactcatcttctccttgaagtggcgnttcctctctctcttccttctccattccgcttccattcatcttccaagaagcaaaataatccattgatgaagaagatcctaggcctacaagctccaatggagcttacatcacagaaagtagatgccgatttactacacctgtaacgacccgcctcgtcgcgagaaatttcaatttttaaatgaaaacttcgttaatttgcttatgaaaaatgaaagtaattntttttctcgatatacattcaccaaacaatgcaccatatcttangtgaatacacacttnnacacacacacacacacacacacacaca

SEQ ID NO: 134767 - DNA, 425 bp, Glycine max
ctgcagttttgaaaacttctgagagcttatttatctccctttcttatacaactacactggacttctagaaatctagagctgagctctacctccttctatagctaagtcacctctgagagagaactagagttagctatacacactctataatagctgagctcacccccatgacaaaaaacatgaaaatacaaaaaaaaatagtcttactacaaagactactcaaaatgccccgaaatacaaggctaaaacactatactactagaatggccaaaatacaaggcccagacgaaggaaaaacctattctaatatttacaaagataagcaggctcatacttagcccatgggctcgaaatctaccctaaagctcatgagaaccctagggcgcttccttggatctctagcccaatctacttggagtcttcta

SEQ ID NO: 134768 - DNA, 335 bp, Glycine max
atatcacatattgacgcacacctttacaacctttgttcccacattcgagcagagcaatcatctccttccgtggacaatcactggcactactggtatctctcttccatcccaaaccgagaataaacgctcatagacaatatgcactcttcttggggggcaactgaaccctactacaactaacgttctcattattaaagaatggacacgacttataataaacaactcacacaaacggacaccggtctatcctcaattcttaccctttgctgagacaatgaagtccctacaaaaaccacttttcttgaaagaataatgactacacttcatagataata

SEQ ID NO: 134769 - DNA, 471 bp, Glycine max
tctcacagtcacctgaagctgcagcttacatggagctacatcatgtggatatatcatctttatctacgcgacgtccttttgcttcctttatctttgtgatcggccaattcactctaattccttgctcttcatcttattctccatgtatatcctccattttcttgtggtttggtgctgtttaaagtagatgcaaaaatataaaccgattaaatctcacatctacactcgaaataaaccgattatagtgcaaattttataggtctactctcccatcatgtttttgtgttgattttaggttctatcatttttcagtcataatttttgtgcgctgaacctttagatctaaattttcttccaaaatattgtctaagtttcctatatgatgcctatgaagaaattgagttttggtgttgagtcgcggctgaattagtgaatcacaataagtcttaagttctgttgaattgtgttatt

SEQ ID NO: 134770 - DNA, 510 bp, Glycine max
  unsure (1)..(510): unsure at all n locations
actatcaaactcagcttaaggaagttctntccttaactattnttgcaagttcaactagaagaggatctatccaacactaaaataagctctaatcaaatttggatctaccactcaaaactttgtcatacccatctgctagcctcttggtggaaagagagaaatgaaataagagatcaaaagagaaaaataaaggtgttcgcctagcaataattagttaaaatgctcttggagggagaaaacaagtctcctattgtgtagaacttcaagcctctagctcaagagatgagagaaacttggagagaaagaaggaaagaggaaatggggaaagaagactatgtttcaagcttttgaagcttgtggngtgtgtttttgggaggtttcttgggctttttctaacatgcctaanggtttctccaacttcacccacttctacatgatcataagctcattaatgaagcctaaagctcacacaaatcactaacaacacaatatcacataactttcatgcta

SEQ ID NO: 134771 - DNA, 411 bp, Glycine max
gatctccaagggttgagaagtgaaaatgagaatggggtaaatttggagcaaactttcaccttacacaagtctataaccttaatctaaacttgctcaaactggttttacgcctaaaattccaccacatcaaagattgactcctcaacacccaaattttaccctagaaatggctcttgccttcactatggtcttttgtttttctcctttgcacatcccaagctttcccacagtcctaaatgacatttcaaactaggattaactcactttaacctccaatttctactgaatccagatttagcctttcaaaccctcaaagcatcacacttttccactcataacactacattctcactttctaaccctaagttaactatacccttcatccctagcagttttccatcagcaatgtca

SEQ ID NO: 134772 - DNA, 371 bp, Glycine max
  unsure (1)..(371): unsure at all n locations
tttataatnngagacgctcaannatgaatgcaggagctcttaccaaattcaaatgccaataactttttactcggatgtccgattgagtcccgtaatatatctagatgctcaaaattgaaaacagaagctctgagcaaattcaaacgacaatagcttttgactcggatatccgattgagtcatttaataattcgagacgctcaaaattgaatacagaagctctcaccaaatttaaatgacaataactttntactcagaagtctgattgtgtcctgtaatatatctagaacgctcaaaatgaaaacaaaagctcttatgaaattcaaacgaatgtaacttttgactcagatgtccgattgagtcatttaataa

SEQ ID NO: 134773 - DNA, 470 bp, Glycine max
  unsure (1)..(470): unsure at all n locations
agcttcctcatacctgttacctgctatcgactttcaacttatttttttaaaacgtaattatatagttatagtcatgcagattaccatgttttgttttaaaatggaaaaaacaactcagaattgtaagtagggataaaaaaaaattaaattaactacaaagagtttatgatttaactcacattcattactgcaacctaagataggcttatttaagttacggtaaatatttatgaaaacctatttaattaaaaaaaagttgtgttttaattaagatatttggaaaatcatttaggcttaataggccattctatctaaataaatataataatttattaataatattattatgtaagcctagctataacattttaactaatattgtattataccattcaataattgttaattagacaattntatctcgaaattcaccccataaattaaaatntcttttcacatatcatatttat

SEQ ID NO: 134774 - DNA, 369 bp, Glycine max
  unsure (1)..(369): unsure at all n locations
tttttattttaatttctataaatacatttttttttcaattttaagttgtgtcatatatttaatttatttttagtggatataagttctgtaagctataaatacatatttatggtgtatccaggatacatataagaagtcaccatcccacttatatagtagacattattcttcgcttgtaattagtatacatttaactaggtttagttaaagtaaaaaatgtttaattcaaaatgtatatatgctaggcagttaattaataaatttcaaggagaagtgtttaataaaaataaagaagatgcatatatgctangcagttagatgatcactanngtgtagtcatgtctgcgtgtaaaacacgatattcatttt

SEQ ID NO: 134775 - DNA, 469 bp, Glycine max
  unsure (1)..(469): unsure at all n locations
agctntatatgtaccggatatccccggatatcttaccatagtgcattctcggcataaaaataagatgagcaacatataacaagtattgtgaaaaccttagaagaagtcttttttatttttgttagaacggataagacacaaaaacaaaacaattatagactactataatctatggaaacaataacaaactcccttcccatcagcttgtaaacacgtactcataatataatgtagtaaaaaagaacacgtactcataacaattagtgctttttgtagcagaaccaatgactccactgcatagcttccatcttacccaaaaaacttgttaaacatcaatattttgtttgggaatgagtgttnttccaccaatggtatcttaactagcttaaaaactgatatcttccaagttccaacgctattttccccctctattcaatatggttcatgaagatcttagaatataaatgta

SEQ ID NO: 134776 - DNA, 464 bp, Glycine max
  unsure (1)..(464): unsure at all n locations
atctattaatatttatcattngattntatttcaggccctttgttattgttctcttgccataacaagcattattcgtcaccatgaaacagagtaccttgcttctcttgaggttctgaatttgtctttgtgtagctagggtctttcgttctttctattgtaatgatgtgcacatgatttactaatgatcacaacttgacaggcatcatatctaaaccttcctgattctactttcaaggtaaccattgttatatcatcctgcatttttttatattctaagcttcagatgtggcatttctaagaaatccatggctcttctcgatttccattcaagcaattccttgtacctaaccttttctcattaagcatccatgtgatgactgagaccaaactcatctagatngttttcttttatccttctactaacttgattaattcattntattgntccatcatgttaagtgaca

SEQ ID NO: 134777 - DNA, 382 bp, Glycine max
  unsure (1)..(382): unsure at all n locations
gatgccccacattattttcctgacacaaatgctaaaaatgatgattcggaaactttatgcaaaactggtgatgcatgcacctatgcggacacataaatgctaaacatttattggcatgtgacgctagggcgtaggattcattncctctattataatcaacacaaaggaccaaaaagtgttctattatcaatatgagcattcatccgagtacattatgggcgactgggaaaatcttcacagcattcacccttcaggtgtatacacattattatcaaagactagttatgatcagagaatctttccaaagatnagatggaaggcatctcgtttcacatgcatgttggaattacagtangaagactcatctttcttatttctcctt

SEQ ID NO: 134778 - DNA, 416 bp, Glycine max
gatattattacacatagtgataatttttaccctatcattatattaaattaattgtttgaaaatttaaaagaccgatggtgttaacaaacaatcaaagaaagaacaaaaacttaacatttgaaacataaaggactaaaaatgatatttaacaaaaaaaaaaaaaattcttaagaaattgttcttattatcttaaatttcaactacttatatctttttacttaattggtaatttgattatatacatttctccaatgatttttttaattgtaaaatacgcttataataatagagatgataattagttaaatatataaataaacttaaatctgaaagacacagaacaacatattaaatcttataaatttagaagttagacataaatatttttctctctatttatatgattacaactttgc

SEQ ID NO: 134779 - DNA, 470 bp, Glycine max
  unsure (1)..(470): unsure at all n locations
tgcaagcttattgattttgaaattntcatgcaacgttactaacgccaacaacagttgttccccaccattgctaactttgttggccgctcttaaggttcttaccatgggaagaaattcaccctctctcataaggcctccttcaactgcaataacctatttcctcatgacaacaatcaaggtgccaaatgctccatgcctgtgtgccaatattgtgttacacggngtcacatgataggttaggaaaaccactcatggctaggttcaagaaatgattggccaagcaatgaagtcctttgccgaatgccaacggtaagagaatgagcaattttgcctctctttgcaaaatgccataaacacaattctccaaccttggtgtcgtccttttacagaacatccaacaggctcaaataacaatagctggaagttgtgctgcacctgcccctacacttgcacttgtacttcaaccactc

SEQ ID NO: 134780 - DNA, 472 bp, Glycine max
  unsure (1)..(472): unsure at all n locations
tcactccatcactntccttgattttaattcttgaataatgtgtcttactagacagcttggcaagcactcattgtagctggaacatacttagcttcacatgttgataaagccactatggattgcttcttagaactccatgatattggtgttgcaccatacatgaatatgtaacctatagtactctttctgtcatctgtgtctcctccccaatccgcatcagtatatcccactaattcctctgagttgttgttgtctttatttggaaatagaattccagtattgatggtcccttttatgaaccttagaatcctcttagcagttaggagatgaggaattctgggtcttttcgtatatgtacttaccagtccaatagcaaattccaaatcaggtcttgaatgacacaagtacctgagagaaccaacaatatgttngaactcagtttcatcgactntatcttccttgccctcctttc

SEQ ID NO: 134781 - DNA, 458 bp, Glycine max
  unsure (1)..(458): unsure at all n locations
agctgtngctgcattaaagggttatctcactattaatatatactaaaagagttggagtatagatgtgaaataatcaaatatttaatttagatgtcaataaacaagaatattattgtatcggatattacttatattagatttgattttcttacataaaggcttaaatctgagtattgtggataaaaaaatataattcaaatgagagatctcattaaagataatgactcaaatacttcaacaaaaattaatcatagataaaacttattagtacttcacaccaatgtttaatgttttggtgataaaaaaaataaaatactattgaaaaaaaaggaattagtctttctatttaatagattctatatgattatatccaataataaagaatatattctctcacataatagtaataaagaatatatcgaagagaagtaataatgtcaaataatgtattgatagca

SEQ ID NO: 134782 - DNA, 274 bp, Glycine max
  unsure (1)..(274): unsure at all n locations
ccactcattggggtaaatagtagatccaagagtgtaaaaaatggaaagagatgatgaagataatttggttattttttcattcagaatcatagagacaatatatacacaaatacatatctctaattagatgattctgcttttataactcagcgatctattcctacaatcaagtcattctaatatgactaactattatcatatttaaaacaagaatcatgagatacaattaactctcataataataagaatcataagatattgactnttttaacac

SEQ ID NO: 134783 - DNA, 376 bp, Glycine max
  unsure (1)..(376): unsure at all n locations
actataaaaaacagcttgttaagcttggtaagccggctcgtttaactaacaataatgataataactttattttatcaaatcttatcgtcatccagatgttattctatctaaagtttattgtatctagattntagtttatctcgattttattccgtctatattttatttcatccaatcttatcttatcttgtccagattttattttatttcgtttatgggcttggacttaaaatagatttgtgagctttggggctgaggatctatataacaacactaaggttttagttaatggagatttttttcggagaggagaataagtataggaatttagaatttcaacttttattactgttcatgcacactgttcacgtagaat

SEQ ID NO: 134784 - DNA, 432 bp, Glycine max
  unsure (1)..(432): unsure at all n locations
tgaagagggtggcctccttggagggcagagaagcgcccattgctgttgttatgtgagtgnngcacagagattcgataggaagagaatgaaatgaaattaaatgatagggtcacgagaaagagaaagagaaaagcctggtggcgttttgtgagctgcaaagcaaagcgaggcaaccctacaaggaaagagtgcgcttatgtactgtgtctaaccatcaaattaccatttactaccacacaagacccaaaatctaatgtgtacaaatatttatatttattcgaaaacacttttaatgtaattgtaaaataactattgcatgaggtagtaattttatcataataatttatttataatttaaattttaaaataagtatagacattgtcattattatcttctaaattaatttnaattacatcttacacatncctcac

SEQ ID NO: 134785 - DNA, 412 bp, Glycine max
gcttagtgcacacggtgcgcttatccgtactacaaaaacttaaaaaatagtgatgcagttgagcttagcgcaacaaggcgcttatctcaacacacaacaagggcttagcgcataaacgcacttagccttatcaatggaaaacttatagaagcaaagtagcacttagctatacaagtcaggcttagcactgaacaaaaaaattctcaaaccttaatgtctaaacactagtcccgcttaacgagctcatcacttacattcatcagcagggatgaatgcgcttagcactacaaggtccgcttagcgcactcatctggaaatccaaaattttgatagctgcgatgaacaagctaagcgcacaggcgcgcttagcgctttcatcacaatttctagactgaaccataggggtcttcac

SEQ ID NO: 134786 - DNA, 437 bp, Glycine max
  unsure (1)..(437): unsure at all n locations
tatgcgcatatttccttacgaacgttcgcttgtacaagatattcttttaactaagaaaaatgcacccatatacaatcaaggcagcttcgttacctagattatttacatgtacttccaaggtgtatttgttacttacatcacacacatctccttggctaaatttacatacatgtatactcaaagcattntggggtaccaaaaattgcacatgtgcacatcttggtatttctaatacctatacatacacaaacttcatgatgaatattgactatctacacaataaagtgctacatttcatgctcttttcaagtttttgctacctaaagccgcatgcaaattcaagtatattttcctttgctgactaannatgtattaaaaggggatatattcttttgtaatgattntctttacataacatgcaacatatttatatatac

SEQ ID NO: 134787 - DNA, 425 bp, Glycine max
  unsure (1)..(425): unsure at all n locations
agctntatgctttttaaactgttattatacattacaactaccagcaacactgaaataagttaacaacagtgccacggatagctgacagtattacactaactagttttgaccagatacaagatatttaaggaaaatgttatgaatatatgatatttgatcaagttgagcatcattctattggtctgcaaagtaattgacagtagatagacccaaatcaaatttgaaatgaaaaacttgaggaactgcaaaataactgacaataacaacaaatacttgaggaacttcattcacaatatttgtgtagcaaaacaatacttataatatcagaagatgctactacaaatttttcctaagatatattcctcctaaaactaacattataattaacattgaaaaacctaacaacacaatgtttggtaaatttc

SEQ ID NO: 134788 - DNA, 423 bp, Glycine max
  unsure (1)..(423): unsure at all n locations
tagctacacaccccctataatagctaagctcacccttctgtcttataacataaaaatacaaaaaaaagtctttattacaaagactactcaaaatgctccgagatacaaggctaaaaccctatactactagaatggccagaatacaaggcccagacaaaggaaaaacctattctaatatttacaaagataagcgggctcatacttagcccatgggctcgaaatctaccctaaggctcatgagaaccctagggccttcccttggatctctagcccaatctacttggagtcatctacccaatgcccttgcggngtaggattgcatcattccctccaccttggaaaggattngacctcaaatcccgaggttcttcatactctgggctccttccctcaacacctgtaaaaagaacaaaaacatatgta

SEQ ID NO: 134789 - DNA, 467 bp, Glycine max
accttaagtcacctgcggcatgcaagcttgttgcttatgctgacatgtcaattttctttgaaacctggcaagtctgagaggggagatctcttatatggactgtagattcattgttttgttgtggactctcttctaaaactaaactttattacatgctcaaattcatgtagttatggactcaataaattgcttatagcatgacaatgatgaggagattgaataactatttgatgattctccctgtaccttagttattttttcattttgttgcaacaacaaaatccaaaaaaaaaaatcaaaacaaaacaaaatcacttatcaactcctttcacacttcacaggaaaaagagcctgaaaccttctttttttttttttggaagagaaagagcctgaaacttgcaaattagatcttctccagtcaattttgtgggcataaaaaattcaaccaaaatctcaactgatgatca

SEQ ID NO: 134790 - DNA, 252 bp, Glycine max
  unsure (1)..(252): unsure at all n locations
tgagtaaaggttaaatntcatctgattntcatattattncattttatcattttccgcatcaaactgaagtatgctatcaagacttgaatttatacatgtattatagnttttatatttaaatgtcacggtgaaagggagcacataatatagggcgcatagttgctgtatttatgtagtttaactgctcattacctaatctgtatacttctcattttccatctatatatatatatatatatatatatatatatg

SEQ ID NO: 134791 - DNA, 419 bp, Glycine max
  unsure (1)..(419): unsure at all n locations
agctntacagtctatttcatcgaggagatcctcagcatctatcacagcttgtttgacctcaagaagccactctctcacccgtgaatagctgtactgcttttgttctgcatcatcaaccacagcatcgatggaccgaagcgttgccttcaacttgtacagcaacttctgatcgagctttcgtccacgaaagtagtccaaaacatgacaagaatccaacttgtccaacagcacctgaaggacagcaccgaaaagagcaccaccaagggtttctagtactggcatggttggaaagaaatggcctgatcaagaagaagaaaggattgtgaaaattgaaagtgaagctaaattatgtgaatgactggctcgacatcaatgcagatagagcagagttaacagtaaggactaatgagtaaggactg

SEQ ID NO: 134792 - DNA, 388 bp, Glycine max
  unsure (1)..(388): unsure at all n locations
gtgtttcatactgaatatacatagnctaagggaatcaaattctctgttgttacgatactcgatcttaccattttatattacttgtgcgaatcaatacacttgtcgattgtccaataataataagaatgctcaaccttttgtataaataggctggtcaaaagcgaggaaggatgcttatcaatctggaagaagatgagcaacctaagaagaaagtgtgattggggagtcctgctactcaatggatatcaatgtataaagtatgtcatcccatgaaacaaaggtaattaatacatcatcctctgtctagcttgttcttaataacgttctgaattatttgtaaatcataaaatcttcttgcattgatgctagaatagttgagtgttgttac

SEQ ID NO: 134793 - DNA, 463 bp, Glycine max
gcttcattgtctaacaagccaacttacaacagtaagccctcagagaatcagcataaggatgcacaggccaaagttgagtatgtgaaaagattgcatgaccaagtaaaggtgaaaattgctaagaagaatgatagctataccaagcaagccaacaagaaaaggaaggaagcggtacttgaactcggtgatgatcctggacatttgagggtaaatgttttccaagaaggagggaatgatgagaatcctgaaactggccaaatacaggctaaaagcccaagtggagaaggacaaagccctcaagtggagaaggatgaaggcccaaaggcagagacattatcaagactattaattggtgctgaaggtccagattaatttgaaggcccataataaatatgttctatctttattaatacattttatttattggaagtttggcccaaactatttagaaggcccatgtcta

SEQ ID NO: 134794 - DNA, 402 bp, Glycine max
  unsure (1)..(402): unsure at all n locations
tttctcttattttcttttggggagctctagcatcttaactgtttaattggttgttggaacaaggatcaaacgaacttgttcttctttccaaggtgtgtaataaactaaaatttgaatgcattctctctctatctccccctctctttcttttgtgctttattaattatatantaattgagtctaatgtttcccattgattcatggcagattatggcagttactgtccgattcattataaaagatgcagaggagaagaatgccttgtttaatccaaggccagttttcagattattcatcaactggcttctagatcttgngttgctagagcctgttactgatggtgcacatctccaggtgtttgtcactttcagttacttcttcaataagatttgattagtttaa

SEQ ID NO: 134795 - DNA, 473 bp, Glycine max
catgcagcttataatagggcaattacatatgtaagctctctcttatgtctaaagaaaaaaaaaaagagaattaccttgtgacacatcaggataagtacacatgggaggaaggagaatcaactaaattccgaagaccagctgatatatatacacatactacatcgtatgaggaagatagactgattgctcttctcttattagggaaagcgacgcccctcaaaaaccctgtcaaaggagcattgcctcccactgtatatcacaaagtgcaatgcacgcccgcgaaagacatatatatatggatatgaaatataaatattactgcattttcttaacattaatttcaaaaagaatgttataaataaaaaattgtattcgtaggaattgaatattagaaatttaaaacactcatatattctcaaatattatgttctaccaaatgaattatacctcttagtaataacttcgaattattt

SEQ ID NO: 134796 - DNA, 257 bp, Glycine max
ctttgcttgctctagaaaagcttcttaggcacccgtctacccttcccgactttctaaaccttgagctgaatgtgatcctttgaggggagttgagctgtttgtacagggggcccctatgctttttagtgaaacttctagtgcgccctcacacccaccttgataagacttatgctaatagagcctccaactgggacatacttgttccacgatttgcttcaaggacatcatacttatacatagaggcaagcagtaacaaa

SEQ ID NO: 134797 - DNA, 377 bp, Glycine max
  unsure (1)..(377): unsure at all n locations
agcttctattgatgagccaagcgagtcttctgctgcagtaattgatgacagcgaccaaggaggagtaaggaaatcacaaaaagctagacaaccctctagcagggtacaggattatgaattgatacatgattcaccaataggggacgagcgttntctgtcactgataacctgttatgttcctaaacatgcgagcttctggcaggcaacatataatatgaacaaagaccccttatcaagggggcttgaggtggctggctctctgtgaaacttgactgagaagtgagatatcgcctttggtaataaatacccacggtgggtcattgagttcatagggtaaaattataacattacgctaaaattgtctctgttaagccatt

SEQ ID NO: 134798 - DNA, 228 bp, Glycine max
tgagatgaggaagtgtagaaaggtgaacttcctgcttttatttttgaccacatagtggtacctggagatatgtctcgggggtcatgagaccattgggacgtcaagtggggtgctatagcccaaaaccaaacttgaccagtcccgacccaaccacggcttattccgtcaatgagaacctttgatgtatcttaacaagcgagctcctggcagtcacacataaatggacaa

SEQ ID NO: 134799 - DNA, 401 bp, Glycine max
agctgtggatatcagaggctaaagttcctgagttgtgcttttcattatacaagacttacgggacaaccatggccggtctcaaagtaggataaataattaattgaactttcattatattttaaaaggcccaattttgtttgtttatttagatgtgacggcgaacgaatcaatctcaatcattgtctctttccctctcaccaggctattggctatgactttgactatgatgactttcatgggtaattgactctacatatttgagatttgttctatcttttttccatttattttaatcgctagaaatcatgttaaatataatggaatccacaaagtatttagtgtgtgttgagcagctttgttcatgggagattgccatatgatatgctgaaacctgaccctgt

SEQ ID NO: 134800 - DNA, 394 bp, Glycine max
  unsure (1)..(394): unsure at all n locations
ttataagaagtgtggcaataaacgaagcaatattcactctttttattgtgacaaaaacggatgtccagcaatctgtggttgaagaggcttctttactggttccacctaactcgaacaggtcattatttaaactctaaaaaaaagtcaatttatgacacatgaaatcacacatgttactacgtgagttntattggacaaatgtaactcattgaacgtagtggtcaactacgaataggaacatcgggacattgggtggtttcattaataataaacaaaaagtggaatcctaaaatcaccaatcagaagaatgaaaaccatgtcttgatgctcttctttctttaacagagccatgtcttgatgctcgagaaagctctaatctcttatgtctctatta

SEQ ID NO: 134801 - DNA, 424 bp, Glycine max
  unsure (1)..(424): unsure at all n locations
ataagatcttatatcttatatgagctcacaggagataattcctccaaatcatgattctgagggtcgtaagatactctagagaggtaaacactcgctaactctagagtggataaacataactgatctgattaagaatcctgaataacatcctcaaacccataatggttggaacttgtgggcaggagggtggataatcaactgagtgtgttaacgtgacagcactggcactcgctcagaatgtaataaatgaatgtctgcaatgcgattgaatggcttactaataaaatagaataaatgtttttgtnactctgagtgacgaacatttgaatctaagatgaccttgaacagagagagacatatatatgtatatatatatatatatataattatatgtctaccttaacatgacaggggggagaagagt

SEQ ID NO: 134802 - DNA, 242 bp, Glycine max
catgaagctagaggcaactggcgcatcggtgtactgggaccacactggacttgaaccaaaaatctgtgcgctgaataagaggctgtggtttccgcttactatgttgacacacatacatactattgaccttaatgcacactcctgtatctattgatcagggcgatcttatgctgacttattaacttgtcacctacttacctaagatcataatcgacctcagtagaacaattttatctctaaac

SEQ ID NO: 134803 - DNA, 383 bp, Glycine max
  unsure (1)..(383): unsure at all n locations
acacaacaatctaagctgctacccaggagctctaaatcttctcatcttntgggtgggccacnnccggatggcctcgattatctcagggtcgaattggaccccatctctaccaactacaaatcctaagaaaactatactatctacacaaaaggtacacttctctatatttgcatagagggtcgttttaataacgactgtaagaacttgcctaatatgtccttagtgatcatctatgctcttactgtacactaaaatatcatcataataaacaacttcaaatttacctatttaaatccttaagacatcatgcataagcctcataaaagtgcttggtgcattagtgagccccaaatgcattactagcctttcatacaaaccaaact

SEQ ID NO: 134804 - DNA, 299 bp, Glycine max
  unsure (1)..(299): unsure at all n locations
acatggctaagtccctagcaggtggcgccttcnttcacctactactcacttaggtcatgctgcatctccaaggcagcataatcccaataaatgacgctatagatgctcaaagatgctcccctcatagaatctacacgagcatgcttccattatctggttatcatagcacaagatcatgacgaatgaactcccatatcctccaattattttcagctcaacatcatcctccattgctggtactgcctttaaatacatgaatcaacactcatacgtgtgtgttaattgctggaacatgattc

SEQ ID NO: 134805 - DNA, 435 bp, Glycine max
tatgtcagcccaaactgatgaacatcaagatgttgtttttcttatttgtggggaaggtcaaggcccctagcaaagctgtgttctttgcgtggagactaatcatggacagattaccaacaaaaatgaacttgcgcatgagaaatatggaaataaatgatcccacatgtccattctgcaaatctaaagatgaggatgcaacacatctcttcttagtggcagcaaaataatgcttagtaaactgacgtgtcggttcacttctttaaatgaacacatcttttctttgtggattggcaaaaaatcagaataaaactttgacatgtcgtttattactggtccgcaatatgatgtagctttatggactacggtggacttttttgttattgggagcagtggcccagaaatgaaaaatatagtttctcattacttaaaacttgt

SEQ ID NO: 134806 - DNA, 404 bp, Glycine max
gagcgtgcgctaagcgcaatattcatgggctaagcacgaggaagattctagaagaagatgagctgttcaggttcgtaaagtgcaccgcttcatctcactaatcgcaccactttagttcatccgctaaacgagaaaggcacgtgctaagccaaaattcactaatgtgcgctaagcggtccataattgcgctaagtgcacgagcacgaacaacgccacctatttaagcctgagatcagattttagagggggagttcgcactgatatccacagctttgctttttagagattctatagagagagaggtctcagctctagagagttatgaaagatattgctatgtgaagatctgcacacaccagagcttgatacacgagtcaatgtgagagcttgagatgagtttgtga

SEQ ID NO: 134807 - DNA, 298 bp, Glycine max
  unsure (1)..(298): unsure at all n locations
gctgtgaatggccagacatgatacatgtcaatgtttggttttgttcaaggattaaagggaggccgcacattattttcacgacacaaatgcaaaaatgatgatntggaaattatatgcaaaactggtcatgcatgcacctatgtggacgctcaagtgtcaaatttttatggtcatgtgatgctagggctcatgattcatttcctctattttaaatcaacccaatgtttccaaaataatgttctttatcaatttgtgcattcatccgagtacatttcgggcgtccggggaatatttacag

SEQ ID NO: 134808 - DNA, 298 bp, Glycine max
tgcaagctccttattctggcacattctggtggtgatgctccttcatacaaggcttattccctagtggatggtgcctctccacatctcttgacgttgacttctctgtatctcatggtggaaaatcaccatcgctatgacctaatggcgctgaaagatccagtctgcatataatctccacaagcaagcctccatgaagccccttctgcgacctctcaaatgaaatatgcctactgccacgacccatctgtttgctgctatatcaacactctaatgatggtttaggagaagttttatcaaa

SEQ ID NO: 134809 - DNA, 443 bp, Glycine max
gtctaaacaatctgggtatagactaacatttctagttgcaagcttacattcttgatctttctttgtctagcatacacacttgctcaaactcatgataaaacacaagcttcatttcactcatgcattcaatccacaatcaccatgttaaaactatactaaaactgcattttcaaggagtcaagttaaactgttctatctacatcaggactttcaaaatctttccaaaacaaaaaagtatactggaaaccattttaatataccacaaaaccataacaattcatatgtactaaaaacagtacaaccaatataccacacaaacataataattaaaatgtactaagaacaagataattataataataataataggaggacagggaatcagatcttgtcattcattctgatcctactccttatcatccaaatgtagcactagagtcccc

SEQ ID NO: 134810 - DNA, 414 bp, Glycine max
  unsure (1)..(414): unsure at all n locations
tttgcatgtntagagatttctagagagaaaagggctaacttctatgagagtttgagagctcttgctgtgcgaagactggaagagaactgagtttgaagaggaagccatcctgagagcatgagatgagtctgtgagtgattgtgaggttctagaggtggaggagacatccccactacttgtatttcttcaatccttcatatttcttttctctttgttggaaaggaagcttctcagatatggagaattaaatcctctattggttcttccttgtacgtacttgatgtaaatacttgtatatatatntaatgatgtnttatgtgttctttgtgctatcaatacgtcatttcagtgtgtttttgccttgatcacgtagatgcatgctttgtttggatcattcaacagtggaatctagtc

SEQ ID NO: 134811 - DNA, 271 bp, Glycine max
agtattcttaaacataatgaaagatatcatgtgtggggaaaaaacactgcactatgagcaatccgcaccctatgggaacattatgattgtatgaaaaaaaaatccaccaacaaagttttctatgaaagataccagtttatttgtttctttttctcaatctcagccatggacaagcataagacactgatggcgttgaatctcgttgtgttgttgttcgctacagatgtgagtgttatgactggagacatccatggaagaataagttgtgaca

SEQ ID NO: 134812 - DNA, 402 bp, Glycine max
aaccccaaccaaaacgccatcacgattgaatattttcataaccctggtcgcgaatattttgtttgcagaaacataagcctgtcacaacgagcggtcaaaccgatcaccatgatcatggaacataggtagcatgtaatgaaagagaggccaaaactgctgtttgcaaaagccataataaaacttcttctggacatcatggggtagaaaggtacgtatgcaattaaagtcctccagtaatttctgagcaacttcttcctgctcatgagcatctatttcaaccttgagggatcccacatagatcacctcagtgtcacatgaaagaccatcttttaattgtacagaatagaatctcatctaactgaacacctttaccgtttgaaatctttttggctgcatggcaca

SEQ ID NO: 134813 - DNA, 464 bp, Glycine max
  unsure (1)..(464): unsure at all n locations
agcttgacataccgacaagtaaaatgagatgctatcttcatatcacaaatatccatttgtgctacatacataatagcatagtctgaatgtcaaactgtctaatattaacaagaagattatacatatatcatcttctgcataaaaaccaccacttcttacacatctaatactatcaaaatcataatcctctttcaccttatactcaatcgactcctcatcttccttattgacattgtcatcatctccaactttatcctctccatcttcatccataaatacattaccatacccatcacccaacacataataagaagctnccaaatcgccgcataacccttctactactattatgccctccaaactctacaaaatatcacatttcatacaataaataaatacatagctcgcataagacataaagccataacaccaacaatgatgctggtaaattaccgaagcagctg

SEQ ID NO: 134814 - DNA, 463 bp, Glycine max
  unsure (1)..(463): unsure at all n locations
agctctctggaganaacttacttgagaggttctttgagaaaacttccttgagaagctagagcttatgtacacacacccctctcataactaagctcacctccttgagaagcttccttaagaagattcctaaagaagctagagcttagctacacatacctctctaatagctaagctcaccttcttgagatgagaagctagaacttagctatacaccccctataatagctaagctcacccccatgacaaaaaaaacatgaaaatacgaaaaaaaaagtccttactacaaagactactcgaaatgccccgaaatacaaggctaaaaccctatactactagaatggccaaaatacaaggcccaaacgaaggaaaaacctattctaatatttacaaagatgagcgggctcatacttagccgatgggctcgaaatctaccctaaggctcatgagaaccctagggcctacc

SEQ ID NO: 134815 - DNA, 471 bp, Glycine max
  unsure (1)..(471): unsure at all n locations
cttcaaactcagcttttatccaggcactctcttggtggcaagctctntcttttctggcttattccctaatagaaggcgcctcccctgtcctcttctcctttgacttttgttgcatctccatggtggaaaatcaccattgaaggacctcatcgaagctcaaagatccagcctccatagaagctccacaagcaaacttccatcaagtggtaatcagagcacaagagcttcatgtaggtgctccttaaacctctattaatttgcaactttactttttcctccatttcatttttctccatgtatctcctcacatgtcttgtgctaaatagttgtaacattattctttagaatttccacttattaatcttgctatagaagctagatttgatttctatggttcnaattcttgtcatgttcttaaccatgaagtgtgtgagttaagttctttgagtttgcttgtattntttttgctga

SEQ ID NO: 134816 - DNA, 408 bp, Glycine max
ctaagtcttcatgttgctcatgttgcttccctatctctaacaggccatcatcaatcactttcaagatcccttggatttataaaggtgcataataatatcatggacccttccttattataacatcgcctgatttatgtctgtttctctcccaacgcccttaatggaagctctaatgacgactccaatgacacctccaacatgagcaattcccaactgccaccgcacacttattctttctcctccgtccaaaaacaaagttaacacaaaagcgtagtgacattgctaaactcaccaaaccaacaaatccacaatgcatgatgacaaatagaatatattaaatttccaaacgcatgaacacatgaaggttgggcattaatggagtacaaagttgttcacaataccataaac

SEQ ID NO: 134817 - DNA, 288 bp, Glycine max
  unsure (1)..(288): unsure at all n locations
agacactcgggtccaatgatgcccaacctcacaagtcaagtgtttcactcaaggcatgatttattaagggtatcacttccactcattcacacatttaagtccctcaaatgaactctgtttttaatcccatttttcattcaaaaaatcacataaagcatgaatcactaaggtcttttaggcttataacttgattgggcttgctacagatctttgctnttctagacaattaaaatcatccaaggatcaatgagagcaatanatatgcaatttgacataagcagtcactta

SEQ ID NO: 134818 - DNA, 380 bp, Glycine max
cgcaagataaatatatctatcaccactcttatgattctacccaaactgagagagaagataaaatcagattagatatttggattgatgataataaccaaatgagggatacatttatgttgagtaagatttgtgttgagttacttgagtgcaaaagaagtgtggacagcaaggtcaatgtctggagctaacaataagatgattgaggcactatctgttactagaaaggaacagtatctgaagaaggaagagtacttgcaacaatttaagatgaattgccatatgttccattttcatagcttccatccaatatatgcatgtctgtcatattgcacttagtataccaatgacacaaaccaatgtagtatcgatagatcttcaat

SEQ ID NO: 134819 - DNA, 344 bp, Glycine max
  unsure (1)..(344): unsure at all n locations
aagnatcaacaagaatcaagccaaggctattgtgctagcaatcaatggggcaaaacacaccaaaagattatgttgatggatgattcaaattctcacaaaggtaaacttatcacttttaaattgagctttcaaaactatcatgacatgcagaggaaaaacaaggatgtcaaatcacaaaatgtcaagagactnttattttcagaacaattacccatttcttgaacatatcctataattcaaagaaaaatatgcaaagttgtacatgcaaacagaaatgacctataacattaaactagaaacccacacaactaaccaaactgacaatttaacacaaactaacttaa

SEQ ID NO: 134820 - DNA, 444 bp, Glycine max
  unsure (1)..(444): unsure at all n locations
cgacaatcacttttttactcggatgtctgaatgagtcccgtaatatgtcgagacgctcgaaattgaagaccgaagctctgagcaaattcgaacgacaataactctttactcggatgtctgactgagtcccgtaatatatcaagacgctcgaaattgattatcgaagctctgagcaaattcaaacgacaataactttntactcggatgtctgattgagtcccgtaatatatcgagacgctcgaaatggaataccgaagctctgagcaaattcaaacgacaataacttttttctcggatgtgcgattgagtcccgtaatatatcgaaacgctcgaaattgaatgtcgaaactctgagcaaattcacacgacaacaactgtttactcggatgtatgaatgagtcatcgaatatatcgagatgctagaaattgaatgtcgaagctctc

SEQ ID NO: 134821 - DNA, 365 bp, Glycine max
  unsure (1)..(365): unsure at all n locations
tcgataatcaattcgagcgtctcgaatattttggacttattcttacaaccaagngagaagttattgtcgtttgaatatgctcagagcttcgatattccatttcgagcgtctcgatatattacgagactcaatcagaccaccgagtaaaaagttattgtctgttgaatttgctcagagcttcngcattcaagtccgagcgtctcgatatattacgggactaaatcagacatctggagaaaaagttattgttggttgaatttgctcagaggttcgggattccattttgagcgtcttgatatattacgggactcaatcagacatccgagttaaaagttattggcgtttgaatttgcttagaacctcga

SEQ ID NO: 134822 - DNA, 435 bp, Glycine max
agcttcttagcttcagatgatgcatatgagtttgtacctacctcatgcacccctctaatgactataacatcatttctagcgctatactgctaggagttggaagccatcttctcaatcaagtttctggcttcagcaggagtcatgtctccaagggctctaccactgacaacatctatcatacttctctccatattactgagtccttcataataattaggagaagaagctgctccgaaatctgatggtgagggcaactggcacatagttttttaaatctctcccagtattcatataagctctctccactgagatagctaatacctgagatgtccttcctgatggtcgaggtcctggaagcagggtgaatcttttctaaaaatactctcttaaggtcatcccagctcgtgatggaccttggagcaaagtaatacaact

SEQ ID NO: 134823 - DNA, 359 bp, Glycine max
atatggatggtattgacgcttcttctcatagtacctgttctacaacatgcttcacaaacatgttagtaacatgttttcaatacaagttatttggtacaatctatttaatttcaatcaataatcaaaagcatcaatctttctgccccttttggcatcacacagccaaaaagagtatgtatcacaaagaaataaaccacataataacacatgatagagaatagaaagagaaatatcaaatatcatctattaataaaaatgaaattaccactgattaagaacatatcaccaaatgtttaaaagccgtattaagaaacacaacatagaatataagtccagcctatactatatgtttatgatat

SEQ ID NO: 134824 - DNA, 388 bp, Glycine max
gagaaaccttctatgaatcttcagtaatatcctattaagcccataaaacttctaatctcaaaaatagacttaggactctaccactcaagaacgacttctatcttcaaggggtctatagctatccccttgagatatcacatggcctaggaaactaactttctctatccaaaactcactcttggacaacttagcataaagttgtcaaaccctaatggtatgctacacaatcctcaagctctctacatgttcctgcctagtcttggaatataccaaaatatcatttatgaatactaccacaaaactatcgaggtaagggtgaacgactttatttatgtattccataaacccacctggagcattaatctcaccaaacggcatgactagatac

SEQ ID NO: 134825 - DNA, 311 bp, Glycine max
  unsure (1)..(311): unsure at all n locations
ggaanggaaacttgatgccttggtcaacctgtttactcattttgttatgaatcagaaacctacacctgttgcaagagtctatggtctatgttcttctgcagatcaccatacagatctctgtccttctttgcagaaatctggagtcaatgagcaacctgaagcttatgctgcaaacatttataatagacctcctcagcagcaaaaccaacaatagcagaataattatgacctttcgagcaataaatacaatctatgttagaggaatcatccatatctaagatggacaagtcctccacaacaacaacaacatg

SEQ ID NO: 134826 - DNA, 329 bp, Glycine max
tgctccgtacacctctattaatattgtgctctaccttctcttacattgtcgaatctttatatcttctcatgtatctcctcacaagtctagtgctaaatgtttgtaacatgaatctctagaatcttcactgattaaactcgctatagaagctacactttgtagaagcaaagcttcatgatgaaacaataatgattcacatatgttttgatgataacatatgtgatgacataaagctcaaatgtcaatccaagaatgagttcagatgttcatatagaatcagaaaaatgattcaagatgttcattatagatcagaacctccatatcaagat

SEQ ID NO: 134827 - DNA, 426 bp, Glycine max
actcagctttgaatgggtgtcgttgtcagtgacaaaggtgtatgggatttcttacctgcacaagaggcgcttccaagtgaatttttccacctcggtgggcgtaatttcacaaaatggtctttcttctatccacttagtaaaatagttgatggcaactagtaagtacttgacagctcctagagcctttggcagtggttccagtatgttctcttcccacctgtggaagggtaaagtggagctaacactgtgaaagttgtcaggaggagtgtgtggcacgtctgcaaactcttgacatcagctgcatctcctactaaagtcgagggtggttgccttgagttgtggccagtaataaccaactcgtaccgctttggtggctaaggagcatcctctagtatggagactgcacatcccttcgtgagttctctc

SEQ ID NO: 134828 - DNA, 442 bp, Glycine max
  unsure (1)..(442): unsure at all n locations
gcaagcttatgaaaatcacatagtgtacattctctatcaacaacaatcaactctaacttnacgaataccatcataagtgcatacatggcccttaaaaggaagtatccccttccctccccattgacctctaaatgaaggtttcgaaaactcactttctgaggcattcatctggaaatccgtatacttgagtgatctgcgcaaacatatatatatatatatatatatctatatatataaagaataaagaacggaactattaggtcagcaactaacacatgagtcttaaaatcatagcctgaacactgaacagggacaaacagcacattatacaactagaaagcctccaagacaagttaattttggcgtgattaaagaatacaagttaataacttcatatagaagtgtgatgaaagagcctcaagaacataatacatattcttga

SEQ ID NO: 134829 - DNA, 366 bp, Glycine max
  unsure (1)..(366): unsure at all n locations
actaagcttacagagatttagtaatgacccactaacctataattttattaacttaatgccattaacctacggaattaaaacaaacttaatggctgagtgtaactgaaattgtggcaaccaaaagtcacccccaacagccaacaagtcaaccaccatttggtctcccaaaaggctgatgcctaggttgccaattgggcccttattacaacttgaactaaagcccttttagttgattaacccaaaacatatttttggtcagccaactttacaaggattgngccattatttagacaaactaaacactctaaaattgaaacaaagtggtgtcatttagtccttcttcatttgggccatgatacaactcac

SEQ ID NO: 134830 - DNA, 374 bp, Glycine max
ggcgagcatgctgtgaacgtgcatattccaccattgttcttagtagaatactggtaccgtgtctactatcattgtcatcgaattttgcgtcatcgacgcgccacttgagttgccacgttctccacctttgggcgtattcattgaaagatccgcgcccctatttttgcacatattctgtagctgcatactatctgaagccattataccgacacagtctaatgaaggcgaccattatgtccttccaagaatggactcgagaaggttcctagttagtgtaccaggtatcagctaccctagtaagactttcttggaaggaatgcatcagcaacttcttctttttttgtgtatgcccacatcttgcgacaatacatatt

SEQ ID NO: 134831 - DNA, 341 bp, Glycine max
  unsure (1)..(341): unsure at all n locations
ataaaactaagctgaggatatggggacccatgaatgtggactatgtgtattctggcganggngcacaacaaggtttncacatccacaaatcgtgcataaacccaccatcgcctgttgcccacctccaactgagctcacgtactcccacgtagcccatatcctcgtttctctcaacaccgggtccccatcaatccacccaagattccacaacatccaagtaattcaacatccaaatcatcacaaactaacaaaccaagaagaatagggcagagacataaaactctggccaatactcaaaccaaaatcacaactttttctgacttatagaccccagtaacatt

SEQ ID NO: 134832 - DNA, 441 bp, Glycine max
  unsure (1)..(441): unsure at all n locations
agcttnctagatatggagagctaatcctatttggttctttctacaangtacttgatgtaaatactcttatatctatctaatgatgttgcatgtgttttctgcgctatcagtacttcatatttagtatgcttttgccttaatcacatagatgcatgctcagttagggtctttcaacattggaaaatggtttgatccttacaacttgataggacggcgctagtttatcgtattttcacgagggatcggctnacggagtcgtgcacccacataatgaagctcataaggcactataggattagcatggtcagacatgagggatcattgagaggaaaatgtcttcctaacattcttgacatacgtgaggactcacggtctatctgtataccttacattattggcacaataaagttgcgaggtcatgatatattacgagcatcagta

SEQ ID NO: 134833 - DNA, 459 bp, Glycine max
  unsure (1)..(459): unsure at all n locations
tcattctacacctgananagaggatgagatagttgcacaaaagagaaagcttcctaacaaaaattntcatgcaggtggaccttcttctagtaattctgacttaccgtagcctcctatcccttttccattcctacctagagcaattccaaacaaaaaaatggaagaagcggaaaaggagatcttagagaccttcaggaaagtagaggtgaacatacctctgctagatgccatcaagcagattccaagatatgccaagtttctaaaggagttgtgcacccacaaaaggaagctcacaggcaatgaaaggattagcatgggcagaaatgtgtcaacattgataggtaaatttcttcctcacattcctgagaaatgtaaggacccaggtactttctgtataccttgcattattgngagacaataaattgagaatgtcatgctagatctangagcatcagttag

SEQ ID NO: 134834 - DNA, 436 bp, Glycine max
  unsure (1)..(436): unsure at all n locations
agcttatgaagcctaattagtcgatgaaactgatctttaattaaaggataaatgtgtccttagatnttatatttttgggaagcttcattacaggctatgtattctatagctgatgaatcggccccccagatctcagacgttaataaatatgatgaatttttagaaagaagaaactaaattcacatgtcatttaattattagggcgttaatttttactaagtaaaagaatcagatgtgtaatttatctcttattttttaatgactcaattgatcttatatctctcatatcattgagatatgaaagtatagagaatttaaacgcatttagctaaacatttaaaaactaaaagcacattcttcccattaatgaaattccatttttcgagattgacgttggtattgcgtgtaaagtgaattctctctgaatgggacactc

SEQ ID NO: 134835 - DNA, 344 bp, Glycine max
tggtaatgactccttactacgaaataatactctaactattgttcacataaatcaccacaatcattatttgccaagtatacgagacatgcaatgaaaacgggtatttttcaaccattccataatgatgaagcttgactatatgaagcaaacatatgccaccaaatcatagtagtttggccgcatagattagtcattggataaatacttagttaggtataaaccaaatgggaccaaaactaccatttgttttcaaggaatttctaggctctcaagttttgcaatggagggtgagagctcatatattcttgatattccacgaagataaaatacttcaatcgattatg

SEQ ID NO: 134836 - DNA, 454 bp, Glycine max
agcttctaatactagagcatgttgatattgctattcttggtagtgagatctttctttccatgctgggacctgtctcgcatatgtagttgagatgaataagtcgagattaggcaaatgcaagccggcattaagaaaaaaacaaaagtagagaataagtacttgttatatcaaaaaacaaatttattttattgaaagcatttcatagtaaattcagtactgtttaatgttatgtgttcattcgaccttttctttacacattcgatatttacgtttgaaattagagtaaaatttatgtagatgaattacttcttaacggtgttaaattttagaatttaacaatcatgtttaaagttaaattatgtgagtatgtctaaattttaaatgttaatatgcataaaaggagaatgtactaaattaaatgctgaatatcaagttgtgtaatttaatgaagaag

SEQ ID NO: 134837 - DNA, 396 bp, Glycine max
  unsure (1)..(396): unsure at all n locations
ctgtaagctctacccactcttgactactcttctgattcttgtaatatttgagttgaggaaatgatgctaatgtgtctcagtcccactatatgtatgcattttctattttaatgcaaattttgtcttccaagtctttccaacattaaaaaaattaagaatcaatatttactcggatttctaaatttaacattccatttttcagataatgatcctacttgagatagcattgtttgtgacaatttggctttttttaaatctttttctgatcttgttatactgcagtctgttgcaactttcttcaatcaagttatggctaagaatggnggaaacactgctggcccacgtacataataaacttcaacgaattgtgtgccaccagtttcttgacattgtaat

SEQ ID NO: 134838 - DNA, 467 bp, Glycine max
  unsure (1)..(467): unsure at all n locations
gcttatgatgatcaattgcttcagattgttgcatagttttatcaangnctgngnggnggtcagcagaggagcataaaccacagagtctagcgacaggtgcagatttttgattcatggccagtggggttaccatgataaccatggcatctagtttgccatgcatagcataagtatgccctagccattcatctctatgagatgttgtcgaagtattgacaatcaagatttctattccttggattatggggttgaaccaagcacatgcttttaaggaaaggtttatcaagtcaaggtcaagtatggaagtaaccatcatgcaaaagttggggcagaagatggatcgaggtacatcgtttctttgtctactgccaacacatgattgagctaaataatttacaaaaaatttaatgactattgacgtncatgttttatttccaatttcactttgacaagatgtgatggaccat

SEQ ID NO: 134839 - DNA, 496 bp, Glycine max
  unsure (1)..(496): unsure at all n locations
actcaagcttccatcagagaggccctgacagactcctcanagtctaggtcttctgtgtttatacactcaatntgagtgctcctttaagtctatgtctatccacatgggtggagcattctcacaaaatagagagacctcgattggtctccctataatttcacttaatgagagtgacctgacttacccattgtgaggccagtcttgtcatgtactcctaggtgtccaacgagatttttccactgaaaatgataccacattgcatgtaggcttgagtctagtatatcaattgcataacgcttgtgtttgattttcattgaaatacaaattgagacttggtgttgtttatgaagtgtgtggtcttgaatgagtgtgaacgtttgtgtatgattnttgtgaagtgatgatgatgtatatgtaagtttggccttatattgcttacatgtctcatatgctcttagtggnttactatatangaatgtgataactcactcctagt

SEQ ID NO: 134840 - DNA, 460 bp, Glycine max
accttaagtcacctgcggcatgcaagcttacttaagaagatacctatagaagctttagcttagctacacatacctctctaatagctaagctcacctccttatgatgagaagctagagcttaactacacaccccctataataactaagttcacccccatggcaaaatacatgaaaatacaaaaaaaaaaatccctactacaaagactactcaaaatacctcgaaatacaaggctaaaaccctacactactagaatggccaaaatacaaggcccaaacgaaggaaaaacctattctaatatttacaaagataagcgggctcatacttagtccatgggctcaaaatctaccctaaggctcatgagaaccctagggccttcccttggatctctggcccaatctacttggagtcttctatccaatgcccttgtggggtaggattgcatcattccctccaccttgg

SEQ ID NO: 134841 - DNA, 385 bp, Glycine max
atgagcctacatcaaacaattggattattgatggttctatcacaatcaagtgatagttgatatcttcatatgtgcgtacactatgattatgtttttggttctagaattcatttggaatgtctattgttgattctaaatgagtgatctctcttgatttaaaagttaccatctcctaatcatttaagtgttcattttggtatgggttgctcatattccaatcatgtctagttaaactgcttgataatctatctttgttacttctactacaaataaagagagacttcacccatgacaatcacgttaagatgttttaagaggaaatactcgagtaggcatgatccttgttacctgtagatgaaagtcaaacttagtaagacgtgtacct

SEQ ID NO: 134842 - DNA, 482 bp, Glycine max
  unsure (1)..(482): unsure at all n locations
ggaccttaagcacctgggctgcagctgtngctttaatcngctattgagatttctgctacttactatgggctcgagaaatgtttagtttgagatatcgcaagacgatagtgagataaaaaaaaaaaaccgacggaagacatataagcttggtgcaattatagttgattgtcagttctcattttttaatcataaagatttagttttcattttttaacgagggtggctccatctatattacttatttacaaatttgtttccataaaaatcaataatagaactaacattattcaatgaataaaaagtatggcccgtgtatttattggttcaagctaagataaagtatagaatatatccttaaataaatttatttacgaaaagctctggtaatgttccgacatttaaggcaataaaaacattaaaaatgcgtggaactatatatgcaagcatactttnttatgaatgaattcttctatagaatacac

SEQ ID NO: 134843 - DNA, 288 bp, Glycine max
  unsure (1)..(288): unsure at all n locations
acctggagatgtttaattnnttggctaagcttcatttggtagaattgtaggttgaagaatctcttctttcattgctttccctttacgagggtgagaggtttctcctcttcaataacattccttcttttaataattagaacagaaaaaaaagaatacaggccaacgaatatgcagcggccaacactaccgacgaacaacttgtcctaacaaagtagaatttggttcgcttttcatcaacaaagaaagtaaaatcttggcaaattgccctaatgggactccttttagaaa

SEQ ID NO: 134844 - DNA, 450 bp, Glycine max
agcttgaactctggagaggcagactctggatacaaagggttttcttttaagagtaggatagagtatatgcactccaatgttagcaagttagagaggatttcagctcagaagtaaaattgagagatgtcatatcacaagtttctaattttaaagatctagaatcaatcatacaagatgatggtcaaattaatgagaatgtcacacataggatacaagccggatgacttaaatggagaaaagtattaaatttttgtgatcacaaagtgcctaccaaaactcaaaagcaagttttatgtaccactatatgtccaattatactatattacagtgaatgttgggcttttaagggacatgggagacaaatatgagtaatgaacatgttaagatggatgtaatcatacaagataagatagaatatgaaatgacactttacaaagattggtctaatat

SEQ ID NO: 134845 - DNA, 452 bp, Glycine max
  unsure (1)..(452): unsure at all n locations
actcagcttctagcgacccgtattgggctcagaaaatccaaaattttatccctcttattactagctattntgaattctttagttcctgaatgtacaaccttcaaattgttgctcgttcccgtatttgttttttgcaaaaaagaaaattaatctgaaacaattcaggctgaattgttatcgttattattactcgaaccataaggaataacagctaaacaagtaatttaaaatgtaacttttaaattatgtggtatttttttaattacaattttacttcacatatctaatttgttaatctacttaggtcgttttttaaatataaatatgaatntaaaggtgatctactgataatataaagtacttgctaatcacaaattatgatacgtatcattttaaattntaacttaattttataaatattaataaagttataataacacaanttttaacat

SEQ ID NO: 134846 - DNA, 295 bp, Glycine max
agcttaggggcattgatgagatcatactatatgtcgtcagggttgttatgcaactaactgcgtgtataatagccgagaacgaacctatgagagaataaagaatgatgaataataatactcctccttgctcacctagactctctctctctctctctttgtatatctctccccccctcacttcttcttctcgagtagttggtcctctttcgggaaagcttaccctaacattaagcttataaacaaaaataagattcttaattgaatatttaaaataagataaccgtgtaaatataat

SEQ ID NO: 134847 - DNA, 347 bp, Glycine max
  unsure (1)..(347): unsure at all n locations
ttaatagtgacatgcatcatggtgcccattgaagacaaacaacttatggtgggctcttatagggaaggccggttccatgtgtaccgtatattggtcttcagcatcacaccatatgatacatctttaatatagaattaaaattataagagattcacaaaactttctcttacaacctacgaaatatgaattttttagtggctaagcatgcagagcggcattttttgcatagntgcatcatattgtatattgatgttttctaagtgtcatatgttggaatcagcaaatttttggtgtgggtactatatcagattcaaccacttccatatcagctatctanggactgaact

SEQ ID NO: 134848 - DNA, 418 bp, Glycine max
agcttctcccccaattttctatgaataggggtagaagtgaaatagaaaagggttcagccccttaggcacttctctctctctcgaaatagctgaggaaaattagttccgtgaagaaaatcaaagccgaggtgcttccgtaacgtttccgtgagtaattacgcgcagatgctcgaccgttcttcaagattcatcgttccttcttcgttttcttcagtcttcaacgggtaagtacctcaaaccaagctttataattcattctatgtacccgtggtggtccacattttgtttcatgtatttttattctcattttcatttactttttatacccccttttgacgtgcttaagccatttatttaagtcattcctcgcttaatctaaaaataaaataaatatccaccgatcgtttgaattgtatca

SEQ ID NO: 134849 - DNA, 462 bp, Glycine max
  unsure (1)..(462): unsure at all n locations
ntcanattcattctcaatagnngggatttgtgatagtactttttatgtcaaaaaaatattgtcttccattattgaagattgttggtgtgaattcaacatacatgattttctctattgcattttattatttacaatatgagagaataaacaattttgaatggcattaactaaggtgaaatgattgtttgtgaaaaatgatgtcttgcctcaagttattgtcaatgatagagatcttgctttgatgaatgcatttgagagtatctttccttcttcaactaactagctatgtcaattccacattgctaagaatgtgagagaaaaatgcaagatgcatgtgagcaagttagaagatgngacaaggtattggatgcttgggatgggttgatgcaatctcgtgatgaacaattatatgactaacacttgacaagctttgcaaatatgtgctcanntgtattcgtattt

SEQ ID NO: 134850 - DNA, 456 bp, Glycine max
  unsure (1)..(456): unsure at all n locations
agcataggtgaatnaagtgaatgtagttctacaatattgctcaacaaaatggagccattcatgttggatgaaacctgtgaacaaaccttcttagcctgcgagaaggccattgctacactctcggtcttgagtcggcccaggctaggagtactcctactcctatatctcggaggacctgaaaaaatagatagctcaacctttgacaagaggaagggaagtactagctccttatctacttcaccaggtgtatactccatgaccccaagaagtgctaccaaatgatagagaaggtggcgctagcactcattacctcggcctaatgattcaggccttacttttagagtctccaagtggtactcaagatgaactaccccatcaagcagggtttggtaaaagcctgaaccggtagggaggataatggcctactctgtagaactctcagagctcaatattcag

SEQ ID NO: 134851 - DNA, 343 bp, Glycine max
  unsure (1)..(343): unsure at all n locations
tctacaaaatacatatgggtcttttctatgtttggttattctaatataagggagttgcctggcactatatgcagtcttaaacatattcgttatattgatctttctcatactagcataaaaaaactacatgattcaatatgttttccctacaatttacaagtcctgaagttgaggaaatgtcaatttttggaagagttgcccatggatttgcatgaacttattaatttgcattatcttgattntagtggaactagggtgagaaagactccaatggttggaagaattaacaatcttcaaccgatgagttcattctatgtgggataggatagggagtctaatattc

SEQ ID NO: 134852 - DNA, 380 bp, Glycine max
  unsure (1)..(380): unsure at all n locations
agcttgctcgtggagcttctatggaggctggtatcttgagcttcaatgagggactttaatggtgattatccaccatggagatgcagcgaaagacataggataagaggtgagaggacgtgccatccactaaggaataagccatggaagaaggagcttcaccaccaagatgagccttggataacaagcttggagaggatgctccaatggaggaaaagaaagagggacatatagagagaggggggagcacgaaatngatggaagaacatgggagacaagtcgaactttgagatgtgtctcacatgactctcattcatcaaagctacaacaagtgttacacatgctattatttatagactacgtagctttcttgagaagctttc

SEQ ID NO: 134853 - DNA, 340 bp, Glycine max
  unsure (1)..(340): unsure at all n locations
tctatagaaagatcgttcctaatttctctacaattgcatctcctctcaatgagccggtgaagaagaatgtggcatttacctggggtgaaaaacaagagcaagcctttgctttgctcaaagaanagcttactaaggcacctggtctagctcttcctgacttttctaaaacttttgagctagaatgtgatgcctctggagtgggagttggagctgtattgttacaacgtgggcaccctattgcttattttagtgaaaaacttcatagtgccaccctcaactaccccacctatgataaagagctgtatgccttaataagagccctccanacttgggaacatta

SEQ ID NO: 134854 - DNA, 293 bp, Glycine max
ctttacgagaagaacaatgttattgggtctgcaaaataagctgcagcttggtgcatatgggtggagcataacttcggatttataactaggtccctttctctcggaactgactcgggataacattagcgatcagcttgtatttggctaccccatgactacttatatgtgccctatgcattctcttccccttatgagtttttgggtgggtgaccaacttttacttggatagcacatgaacttggtaaggctacccctacgctctcccttttccgttgttttataggggggggggg

SEQ ID NO: 134855 - DNA, 382 bp, Glycine max
catatgtagctataattgtttttgggatctagaaaatgaggacaggaaaatggatacaatgaaacttaagtattggtgtgatggataacaaaagtcgtatgctttatacaacttcacttaccctgtcccatcgtattatgctagtctaagggttcccacccaaggtgtgattatgctaaatttcacaacatatgagttaattgtgaggtgaacagaatatacctaaaatagagaatcacattttgatttacaataatcacataatacaacgtttgagtatttaacatatataagatctaaatctgagatcattagtgattaaattgaattagtaagttaataaataattaacttaacataatttgatgtaaattatttatgc

SEQ ID NO: 134856 - DNA, 417 bp, Glycine max
caaactggtcaagtctaacagatattatttgtacctaaagctgataattaataattcttcactagaaaacaacgctataagttataactaggctaataagtctcctcataataattggcaaaatcttatatccttcggtcaaatatcataaaattatccgctgacacctgtactttctaccttggatgtattagttaattctagtataagcgaggcagaaagtatatactataattccaattctaataatcaaaagaagaatgaacttatgattgacgtgataagctgtctaaacagaaaatactctcatatcgtataacataagataaaaggacacggtgaagataaaattaaatggaagggtccatacatgtttcactcagagacacctagcggattcttaagatcgagtcaatt

SEQ ID NO: 134857 - DNA, 365 bp, Glycine max
aaagtacacattgagacaatcgctctatctgtcattgctctttatccatcaagatataacttccttcctcttttttgatgctttcatgttgagcgagaataaaaggaaatggcattcatattccctagaatagcgtctatctgatgccccatgcatgagtttcctcgcatttcgatacttctatattaacatttctgctcgcgcctgccgtggccagaagtatctcatctaagtcgcattcccttctgcatgagtgcaatggaacttagtagttaatacagatcgttccagtcatttcacacaagcttttccaaaaaatgacagcggactactgttctgagcttctgggtccgatcacgttttgc

SEQ ID NO: 134858 - DNA, 459 bp, Glycine max
agctcgactaggcgagttgatattagccttagtttcactttagttattagtcaattcaattaagaatgagaaattccaaagagaaaacgtccgattgattcttcgctttattttactaaaggtatttttttgattattatattattatcttacctctcttttgatttccaacgtagttacagcacgatcgaacggtcagaattcattttaaccgaaattaacggatgatacaattcaaatgattggtggaaatttattttatttttagattaggcgagaaatgacttaaataaatgactgaagcacgtcaaaagggggtatagaaagtgaatgataacgagaataataatacatgaaacataatgtggaccaccacgggtacatagaatgaattgaaaagctcggtttgaggtacttacccgttgaagactgaagaaaacgaagaacgaactatgaatg

SEQ ID NO: 134859 - DNA, 452 bp, Glycine max
  unsure (1)..(452): unsure at all n locations
ccttccatgacaggttatcacctttcagttacaatagggggttntttgttctaaattcagattacacagtggtgggtgttcgaacccggcaagtgcaccggatcgcgtaagtagtataaaatggtaagaatcgagtatcgaactctcagggaacttgtgttacttggtaaagctatattcagtgaataggtgtctagtacgaaaagatatgtgtggactatgaatagatatgtcaactactattaaaaaggaaaatcacatgagtaataatgtgtaaagacaactagacaacgtgctggtcttcctagtaggtgcctgatgttataaggatattctctacttaacaatgctcatgtgttctatgggtgtctcttgaaatgctaaacacccgatccttcgtgatagtctagcctaatcctgacaagcatcgtcctcagattctcttgtggact

SEQ ID NO: 134860 - DNA, 447 bp, Glycine max
  unsure (1)..(447): unsure at all n locations
agctngtaaactgaaatagatctcagataatagtgtgatattataattacctgagtggaaaccctattgtgaggagaaatcaatctttgttcagttcaaacatagaaatccttggccgttgaaagtccagcagacggttggcaaagattgtagccaatggtgttgttggtctagcagaagctaggtgggaagtccattatgttgttggcaagttgtataaatctcgtggttggctggtccaacagtgactgctgttgttagtgaaatcccatcttatagggtgaagactggacgtacatatcctaagtttggggtcaaccagtacaaaaatcattgtgcatcatcttccttctctctctctctctttacactatttttatattgtaaactatttactatttttactctcactaagtttgaaaactccttatcaaaatacacttaaaa

SEQ ID NO: 134861 - DNA, 334 bp, Glycine max
catgataaaaaggtatagagttccaaaagggaaatacaaatgggttcctaaggggactaacaagggtactaaccaaaaaggacccaacacaaaatgggtacctaaatctaccttctaaatatgtttgtatgtgtgcctatcaacggataaacaactatggtatcttaatagtggctgctcaaggcatatgacatgaaacaagtcaaagttcatgtctctaaaagtagaggaatgaggaattgtaacctatggtgacaacaataaagagaaaatactcagtgatgtaatatcagagagtgctcatatcatatggatcaactaaatagctagtctc

SEQ ID NO: 134862 - DNA, 484 bp, Glycine max
acctgaggcatgcaagcttgatctaaacaaagtctatacattccagtccacttatttatacaactctgattcatttcaaacacaaccattcatttcaaacaaaacacaccactgaaacatgattcaatcatttcactgttcaaacaagctttttgtacaagcaatcaacactaaaacaacagaaatttaaatgatcgaaatttaaataactgataaagcataaactaaataactagcatgaactaaataacggataaaataaattgttcataatttgcaaaattttaaaaactatgcagaatttaaaactcctaatcatcttgctgctaatcttctgcatgctcattcacatccaacaccggagcagctggtatgtcctgaagaataggttactctaactgatcgaggccgtacccgaatcaaataaacattaaaatatagtaactaggaaatgatcctaggtcgtttcccaacgagcaatgat

SEQ ID NO: 134863 - DNA, 500 bp, Glycine max
  unsure (1)..(500): unsure at all n locations
cagctcatttctaccaaagggatttctcattaagaagctaanacttattgttctatatatgcactcgnccaaaagctaaaactaacttatgataaagctaatacgtagaaattctgtcattaacttggtcaaaagctggttttaatttatgaataagctaattttaacttagggacaaacttcatttttccttccttaatttatgaagaagcttgttgttttcttttcctgtgagtgattactgacaaaaccagttttattatacggaaatgagttttggtaagtaagaaggataactcaatcaaatttggaaaactctgaacacagattaattagaagtaatggacacaatggtggtaaaattgataaataaatacctaatagttatcacagagcacactataactntaggaaacaaagacagaggagnaaacanagcttacaagatgagaaggctanggttcagtttggccttcaaggatgattacaacatgaacaac

SEQ ID NO: 134864 - DNA, 403 bp, Glycine max
agcttgcctcaaagagatccatgatggatatatcggctgaaggaaccagttccgctcccgaatatgacagccaccgctttaggagcgctgagcaccaacagcgcttcgaggccatcaagggatggtcatttctccgggagcgacgcgtgcatcttagggacgacgagtataccgacttccaagaggagatagttcgccggcagagggcatcactggttacccccatggccaagttcgacccagacatagtccttgagttttatgccaatgcttggcctacagaggagggcgtgcgagatatgcgatcctgggtgaggggttagaggatcccgttcgatgcggatgctctcagtcagctcctgagatatcctttagtgctggaggagggccatgaatgctagta

SEQ ID NO: 134865 - DNA, 395 bp, Glycine max
  unsure (1)..(395): unsure at all n locations
gctggcggagacatcaactaatctacaaaggctaccgattgtgggcaatgacagcttcaaccttatctaccagaagctcttggtagtgctcacctttccaccggtgccctcgttggtggcaagaagctctctatggatgccctccgtggtgtcaagaagagggggtcattttttttttttaaaaaaaaatctagcgtaaccattcttatacccacacttatntcaataaaatatacatcctacggctaanatgttttcccatttgagagacctagtaaaaatatcatattnnattttatgaaaatatataacctgacaaataattaannaaaatcagtaaaatatgtatagtcctttaatttctaagaaacatatctaaaaattctcgatgttta

SEQ ID NO: 134866 - DNA, 454 bp, Glycine max
agctttagtttaatatgcagaattacgagtctagtgtcgacaaattatccataacgttttaatttttaaaagtacaaaaaaaaagaactcaaataatagacgtctaatgaattaaaaaaatatataatttcataaaataattttatgtataattacataacatagaatagtaaaatagtgaaatagtgaaatagatgaaactcaacttcttataatgctttttatttccagcaatgaagctaataattattcgaaagatacattgcttgttttgcagctttacttatgcttaataataaatagacgacgtacctcttagcaagttatctaggtgtacttcttgaaatatcatcccatgaatattgttgcagttgcatttaatcttggttaagaataactaccttaatattccatggttggatgacattatgaatattatctttcctcttcttat

SEQ ID NO: 134867 - DNA, 473 bp, Glycine max
tctagttataaggcttctgagccttgtggattatctagttctctttgaaggtaacacaggagggttatctgaatttgacggggacctatggtgtgttgccattagcttgcgaaaaaaaaactaattaagttagcacaaagtaagtaatgtatggagcaataagttgttgattgaatgataaagttatgcattattgttaaaacacatggaagaattatatatcgtactttaaccagacgcagttacaaaggaaagttctcccataaaccctcctcatgatcagtacaatttgcatatacatcattttctagttcttcatcagtaatcaaaggcatgtcttttgagaaaggtggtatgtcactgacatcaactgttaaactgtcaatatggtcaccgatagaaattgttctacctttgcaaaccacaaaccatctacagttgtgtggatcttctacataaaacacctaacgagc

SEQ ID NO: 134868 - DNA, 409 bp, Glycine max
  unsure (1)..(409): unsure at all n locations
agcttcagacttctgaaatgatatatagaatgataatgtgacacgtgtccagtaaaaaggcaatgtttataaacactagtttaattggttgtagtgactcaactaagctgcaccaaagactaagaaactacaataatccagtctataggattatctttcatttataatctggagtgatattacggttcaatttaatagccaacattttatcttttcatattatctattaggtcgtgtgaaagaaagaaactagttttatagtattcttgaaaccgttatagcagatgaagcacttgcttttgatgntatacgtgtagtattacaactcttggccaagaagtagtgatagaaaaaggaacttagcatagggtctggatatatgaataaagctaggtggtttatgagtaat

SEQ ID NO: 134869 - DNA, 358 bp, Glycine max
  unsure (1)..(358): unsure at all n locations
ctttaagagtaatattngtcatgtnttctctgaacaaattttctatcttcacttaatttatttaccaaacaaaaaaagcatcctcacttaattagataatcgagttattgtattgtatcattctgccgaggagaaaatcagataggacgggcctttttaggtccaaataggatatttttaaggatagataattttgatattatctttctaacattagttttattctatatattttttaaatattatattatgtcacttgtatgttgatattatttgcaatttcctatttaatagagcatgctgtacaagaaattatcaaaatgaagaaatcataantntatcttggttatctttttat

SEQ ID NO: 134870 - DNA, 445 bp, Glycine max
agcttagacccagacatgacctctacatattgttgtgaaattgcaagcatttggaagctaactgtggtgtgcataaatagacacttatttgtcacatttggacaacagttcttttcctgtgtgggtgcaatatatgcacttttaatagcactgagatcgtccccacacaaccataaaccggatcctctatccatgcctcggcttcataggccagagagttcactgcatcctccctctggtagggctgcacctcattttgaagcttgctcacgtagcatgctccaaatatgttgtgcatattggcgaacttctgacgctcttttggagggaaatatagggagaaaatgcaatccatcatgcattttcttaagaacttgcaggcatcacaaggagagctagagtagctagatgacgccatgatctttactgcaattataccaactat

SEQ ID NO: 134871 - DNA, 263 bp, Glycine max
actaagcttacgaatataaattagcctgacaacaataaatatgttttttgctagaaatataaatgtggcgtaaaagaaaagaaagagaaaactaaatcctgaaatccttcatatcgaaccttctgagcgcagggacttccttccagtctcgtatgcacatcgaccttatcacgagcgacaatctccaaaatgttcttaagttcttcttgtagggactgtcgaccttctcagtcgcaggatcgacgtggactactggtctctct

SEQ ID NO: 134872 - DNA, 309 bp, Glycine max
actaactgcgtgtataaaagcgcggagcgagcctctgagagaataagatagtgagtagtatactcctccttcctcacctagactctctctctctctctctctctatctctctcccactctcactttttcttgtcgagaagttggtcctctatcgggaaagctaaccgctacattatgcttgtagacaagaataatattctaaatagaatattaaaaataagcaaacagctagaatatcatttgagtgtaatgtctaaataattatagtgcaaaaatatcttatgctggcgtttgaacgtatcatatatg

SEQ ID NO: 134873 - DNA, 344 bp, Glycine max
  unsure (1)..(344): unsure at all n locations
aagacaaacaacttatggtgggctcttatatggaaagccggttccatgtgtaccgtatattggtcttcagcatcacaccatatgatacatctttaatatagaattaaaattataagagattcacaaaactttctcttacaacctatgaaatatgaattttntagtggctaagcatgcagagcggcattttttgcatagttgcatcatattgtatattgatgttttctaagtgtcatatgttgtaatcagcaaatttttgttgtggttactatatcagatttcaaccacttccaatatcagctatctcanggactggaactgcagagcttatttgaccttgttat

SEQ ID NO: 134874 - DNA, 403 bp, Glycine max
  unsure (1)..(403): unsure at all n locations
agctnngagaatggccagacttgatacatgtcttggtctcggtttggttcagaggtaaaagggatgccccacattatttgcatgacacaaatgcaaaaatgatgatttggaaactttatgcataactggtcatgcatgcacctatgtggacactcaagtgtcaaatttttatgggcatgagatgctacggctcaagattcatatcctctatttttagtcaacccaatgtatccaaaatatgttcttttatcaattagtgcattgatccgagtccattttgggtactccggaaaagatcacagcattcacccttcatgtgtacacacattttttcaaaaactagttacgatcagtgaatttttttcaaagaatagctggaagtcatctcatttcataagcatgt

SEQ ID NO: 134875 - DNA, 305 bp, Glycine max
  unsure (1)..(305): unsure at all n locations
tattcaacatggcacatcacatgacatacttttaataattctggnctcactcagaggtgtgtctaaagcaataatgtatgcttgcatgctagaacgcgaaataataagttgatcagtagatttccatgatactgcaccaccaactaaagtagagacaaccacttgtcgaatgtgtttcattagaatcataaatacaatttgcatcactatacccctgcattacattctaatctaccaactgcatatgcaatgtcagacccagagaagtttgtcaaatgcaacacagaaccaataatttgaggata

SEQ ID NO: 134876 - DNA, 375 bp, Glycine max
  unsure (1)..(375): unsure at all n locations
agcttatacatcaatgatgatctttctggttctgtggcgcggnggcgcggtaaaggacgaaccatcccgtgatgaagggctggcacgcattcccagaggaagaacacctactaaaaagaataggacgtttntgtccatttaacttgtttcgaaagatgtaacattcaaatgagaggtattacattcatataccacaatatcaatgtaacatggacatcggatagagcctatcccgacgattgaacagctaccaccgactgctattaggtgtttgggatctacagtgcataattattatttctatcctcttattttgtagaaactaaattatttatgggaagtaactctagtccagtaggatgaacggttcaaaaa

SEQ ID NO: 134877 - DNA, 459 bp, Glycine max
gcttctgtagagttatgcctctgtctatttttaattctctatctctagggcccttgcagacaactgatgtggtaattcatttagctaatagaagtgctgcctatcctgttggtttcatagaggatgtcttagttagagttggagaactgattttccctgctgatttttatattttgaatatggaggatggattttctcacggatcagttcccatcattctaggcagaccctttatgaaaactgctagaactaaaatagatgtttatgcaggcacactatccacggagttgggagatataattgttcattttaatattctggatgctatgaaatacccatctaaagatatttctatatttcgtgctaaaataattgaccatgttgttgatgaatacatgactgatctttattctaatatgcatgcctctcactcttcatgcattgagtctgaaattgtac

SEQ ID NO: 134878 - DNA, 309 bp, Glycine max
  unsure (1)..(309): unsure at all n locations
ctgaactcatcatgttatcaaaaaaccttggggtggatccaagtgctctgatcattcatttgcatattcatggtttggtggcatactcaccattggttatttctttaggaatttcatcataactaagaaaacaccaaggcacccctataacactcgatctaaaaaaatggataatgaagagggcgtgcaggaacaaatgaaggccgatctatcggctntaaaagatcaaatggcttccatcttggaggtcatgttaaaactctagaaaactatagaggataaagccacggcaaccgccttcagtacagt

SEQ ID NO: 134879 - DNA, 407 bp, Glycine max
agcaccccggctgcagctttggaaattcagcgaaaaacttcttttctttataattaccaaattgctggtggggaaagagtcttgtggagaatgtggagactcattatcagagacatacaaatcactcgtttgtgctgcacaaaatcgtcattcattgcagataatagctgaattctaccgtcctctatctgcacaatactgtttatctcctgccgattatctaatcttgacatcaattttcagacggaggactgcatcttaaggggtcaactaatccaactgcattcatttcgcgacacgaataagaatgatgaatatcacaccagcaactgatataagtcgattgctagttattcattgcggaacactacacacctctctaatgttgatagtgatgagggaacatc

SEQ ID NO: 134880 - DNA, 503 bp, Glycine max
  unsure (1)..(503): unsure at all n locations
ctatacacaactcaagcttcttacatggcattcaaggagccaggcaagcacatcacttctccaatcatatttgataacaacatccaccaacgagcatcagctngaacttgacaagtatctgcatcatcaaaacaatgaagtaaatcaaaacccaactccaaaaggcataaagttgtatgatatacaattaaactcgcatacacaagctagacaagactgacaaatattatcaagagctagcaatatactctcactcacgtgtgtgtgatgagttgagacagaagagaaaatggtcccatttgacagcataatcaagagctacatacccttatatatacatcagagggacaaaaagagtaagaggaggggaataattatctgcttctttcgctcgacacacaatgacttttctctatgggagcttcaagtgagtctccctaagttttgcttctctagccaatgatccttatgggtatttaaagagacagaagtgaggggaaata

SEQ ID NO: 134881 - DNA, 493 bp, Glycine max
  unsure (1)..(493): unsure at all n locations
gatactctaagtcacctgcggcatgctagcttggaaagagacagacgactcgcttagcgagttgataactcgctatgcgcgtgcttgcggagcagaggcctatctagattcccctttactcgctaagtgcgtnggtggtgggcttaaccattgatgcgcgctaagcgcattacttgcttaatgcgatgactcctttggcacatcttacaaataactcctttttgcctggagctaaagaaaatttaatactaattccatgtaaataggtttctactgagcagagatcaaaacaaagaaaatttatttacaatcctaccgaaaagaaccataaattgtgatatttatatacattttggaaaacttttctatacaaaagttagtcgtaaacgacgactaacatatactaattgggaaagcaggagtgcttaataactaaagagatcagaataattaaggaaatcaaactaattcataagcctactaatctgcacct

SEQ ID NO: 134882 - DNA, 310 bp, Glycine max
aatatgtattctctgtcaattgtgttacgttctctctttaaatctgaatccttgcaaatataatatttacatggaatattacattaaaaagaatagacaggatagattgattaccggtaaagataagcagttatgtttttattgggccgaaataataacaggagccccgaaggtttataggtggccaccaacgtgcataataatagaacatgctatgcttgctaatgttacggcgcccaagtccaacacatccgtgattttgataaataccaacgacgggtgcgcgagctcacagttactaattctaccg

SEQ ID NO: 134883 - DNA, 466 bp, Glycine max
agcttctatagaaggttcgttcctaatttctctacaattgcatcacctctcaatgagctggtgaagaagaatgtggcatttacctgtggtgaaaaacaagagcaatcctttgctttgctcaaagaaaagcttactaaggcacctgttctagctcttcctgacttttctaaaacttttgagctaaaatgtgatgcctctggagtgggagttggagctgtattgttacaaggtgggcaccctattgcttattttagtgaaaaactccatagtgccaccctcaactaccccacctatgataaagagctttatgccttaataaaagccctccaaacatgggaacattaccttgtttccaaggaatgtgtcattcatagtgatcatcaatcacttaagtacattagagggcaaagcaagttaaacaagagggcatgcaaatgggtagagtacctagagcaatttccatatg

SEQ ID NO: 134884 - DNA, 293 bp, Glycine max
tgtggtggttttttggtttgttctaaatgtggtcttcgtcattggaagagcggtagacaggctttgtggttgatttatggatggcctttgtggataattgggtggtggggtaaagaggaggtttgttattggctgagtaatgacattgttgggttggtgggaaacttggccgtataagaatgatagtcacaacatgggtttctccctctttctcaccctcttcatttgccccagttttctcagtcgtcctagtaagatgatcaaatttgcctcttttcggatccacttcgatc

SEQ ID NO: 134885 - DNA, 418 bp, Glycine max
cctgcggcatgcgagcttgcacctcgtgaatctactcacgcattattttcttttgctcattcacacactctagcttatggagccgagttatcccttgtgatctagatgcaaccatatgtgatgaccgcctatgacaccattgttgcttcgcgctaaatgtttataatctgcttccacttagttccatgcgttaaagatcctcttaagaatattcacataatctctattgaaaccatacgtgatgaagggaacgatggcctctttcgatggcgcgcctcgtatagggtatactagctgtgttactgccagcacgagataataattaacacatcccctcatccctatcaaagggacatatggaaatccttcacatgagcataacactgctacccctacgtctttccaccatgggaaccaa

SEQ ID NO: 134886 - DNA, 439 bp, Glycine max
  unsure (1)..(439): unsure at all n locations
agcttaaggatagcctctctctaatacaatatctagcacatttcacaccatangagtggactaaaattaatttaactttagccttagcaaaactaacaagtgacttgttcttacccatatgaaccttcttcatgggatctgcaattacaaaggatgggttaccatcactttgttgagtcaagtggactaagtctcattcccctcaatgacttctatatcaatatcttccctaggggtttcatccaaggatctgacaaattttcttctaacttcacatagtcaatggaaattgctccatactatagcatctgaattaccacattatgtctcaattgtctatgtctattttttccattaaaggttttgtttttcactatggctatcgctaattggttataattatgcattgacactaatggngtagttcattctcaacaaa

SEQ ID NO: 134887 - DNA, 410 bp, Glycine max
  unsure (1)..(410): unsure at all n locations
actcagaagcacgagttataactgaatatgagagaatgctgacttggagatctcgctcggaggatgaagggagaagcttgaatagactataataaagggaagcttaccccaaactaagaagaacctctagagacatcgccatactacagaataatgcttcttgacttgaagagctngctggaaaagtcatcccaaggatctataacgcgacacatttgaaaccatacttcagttaaaaccatgtgtcatactcttattctacttcactcatatttcccgagtgaaaaataatggattatgggtgacgagatttttacaaggcgcactgaggtccaatataaaatgacaccacatcataatatttaatgaaacctctaaaactatgcttgcattctattcttgaatttatg

SEQ ID NO: 134888 - DNA, 396 bp, Glycine max
  unsure (1)..(396): unsure at all n locations
gcatgcagcttatggaaaagataagtatgtcgacttgaangaattattgttcactcctatgaaagattcatggacctatccattttccctttcccctcttacttgagattctcaatcatttattgaattcatcttatgacaggaggggttttatgcctataacatttcatgtttgtgtgttctttgggtgaacggactctggagctatccatgtttaagattcatgtcatgaaagtttagggttttcatttgtgggggtcgggatatctataggatcaattcactttcctgtggagttacctaagggagtttggtttgaacacactagaacatggattttgtgagttattactaattgaacacttgcttcaaattgaggattgactctatgtatct

SEQ ID NO: 134889 - DNA, 438 bp, Glycine max
tcaagagtttcgatctggcaagaagattaatgagtagaactattattctttatattcaactactaaagaaataatgcaagagttgaaaggccctcttgagaagtgcaggcaactcgagcatgctcaaaaggagtcaatgaatgcactgtatggttcaaagcattcaatgaactgaaatgaagtcattttattcgacccaccgaatcttcttttgttgtatattcttgaacagaatttcaatttgttgatatatttcggcattcatgtaatttccttttgaaaaatttgcactttaattatctaaactatgggaatggttatttcagatatcatcggtctatatatatttaaatattatccatttatcgaaccaatgtaattagtttgtgtttactcctcgatttgataagcattttccaataaaacctttcaatacat

SEQ ID NO: 134890 - DNA, 411 bp, Glycine max
  unsure (1)..(411): unsure at all n locations
tgcaagctagaaggattgaacacacttttttcttatattaaaacaccgggagcgtgtctactatcagtgttatcatctccctttccgccgttgggggcgccacttgagctgccatatccctccacctttaggcatatcctttgaaagattcgggctctnttttgcacatgttctgtagctgcattctatctggagtcatatcataattgtactgatactgcgtaatgaaagcaatcattatgtccttccaagaatggactcgggaaggttccagattagcgtaccacgtgacggctgccccagtaagactttctttgaataagtgcatcaataatttgtcatctttcgcagatatgctcccattttcctgcacaacacccttaggtgattcttggggccaagtatcccatt

SEQ ID NO: 134891 - DNA, 305 bp, Glycine max
catgattggtgcatgttttttgacttgtatgattcaatatgggcaaaactggatgagggaaatagtggttttcgaaatctgcactttatgcagaattttgctgttgaaatgtgcaacagaattttgcataagtgctaaaaaatgctatgtaattgctggttgtggaaagagtactacaaaatgagttatggatggttgctagtagatcccaacagtcaaaatgtatacttatgtactagagacttccagtaaaattttcgagtcgattcaacggttaacgaattggaacgaatgatatgttactg

SEQ ID NO: 134892 - DNA, 440 bp, Glycine max
  unsure (1)..(440): unsure at all n locations
gcttanacagcttgtatattaaattactatgaggctgtaaatgataagaacagagagttcttgcctctgaagaaatttctctaactttgaaatttttcttcacacatactatgatgatgcataatgccaaacatatatcaaatgcactaagatgctacaacctagagtaaaaccaatacaactgtcactcactggagttgggcatgtaaaagccaaaacttcttcaaaacctcttcaagcttttccttgagcttcaagctttacccttaggttgttcactatattgcttatgttgcccccctatctctaacaactttggcacaaagactcggaaaactcatattctttgggaagcatgtcaacaagggaaacaaatcataacgtctttcaaatccaactataacattgaatctggaacgagagaggtatgactttatcat

SEQ ID NO: 134893 - DNA, 170 bp, Glycine max
aaaaatattagagagaatagccatggtaaccggtgtaaaaaatatagtagtttagtatgaaggttaattattttaccgtgtgaactcttataaaaggaattgatcttttcttgaccagctgaaacctatctatactttgtgactctcgaaaaaaaaaatataaaaaatga

SEQ ID NO: 134894 - DNA, 347 bp, Glycine max
  unsure (1)..(347): unsure at all n locations
agcttcatgatgtatcacgatcgattcacagtagttgtggcgataacacagatgatgacataaagctcaaaagtcaagaacacttcatgattacaaagatgatgatctcaagagtcatagaatgagttcaagattgaatcaagaatcaagttgtaagattcaagttccaagaatcaagatcagtattcaagactaaagattcaagaatcaagagaagactcaatcaagataagtattaaagagtttttgtacaaactgagtagcacatgaattttctctcanaaaccttgtaccagagagctgttactctctggtaatcgattaccagattgttgtcatcgattact

SEQ ID NO: 134895 - DNA, 331 bp, Glycine max
  unsure (1)..(331): unsure at all n locations
tggagggttaaagtctcacgaatgtctcgtgctctttcttcttttgnnagncgtggctatacgagacatcttgccaaacaaagtcaagttagccataactcacctgtgctttttcttccatgctatatgtagcaaagtcattgatcctgtcaagtttgatgagttggaaaatgaggccgcaattatattgtgtcagttggagatgtatttcccccctgctttctatgacatcatgattcacttgattgtgcatctggtcagagaaatcaaatgttgtggtcctgtttatctattgtggatgtacccggttaagcgatacatgaagatctta

SEQ ID NO: 134896 - DNA, 393 bp, Glycine max
agcttgagataaggcctttgtcttatacgctagttgtcgcatatatttatggattatgacagtggttcaacttttagccctgacgatcttgatctgactcaagatgaactcattcataactattttgtggtgcctacatggacacttcattgtatttctattttacaatttttaattgccatattgtatgattcttataattttcactgccatgagcgaacatgatcccactcagccgcaatttggtaggattgggtgagatcacacagcaactcgcgtaagattgctgggatcttgcaatctcaccacacctgacatatagtccaatgtgaggtttttgacctgcaacctattctgcacatgaatatgcagttagttctgaatctgaaattg

SEQ ID NO: 134897 - DNA, 268 bp, Glycine max
  unsure (1)..(268): unsure at all n locations
tcacatttccacaattattaanaataggcctaacttccttatagtccccagtggagtcgccaactgtcgcaacgtgcccttttgcgggcgagcgaggcgacgctcacgggtgcgctntccaaaggaggaaaaatgcgcggagtcgccaccaacgtttatttgtggaaaacgtcggagtaaccaaaggaaaccaatcgaaacgaatattctaagttcgggagttgtatttacgtttgaggaaggtattagcacctctcacgtttgtctc

SEQ ID NO: 134898 - DNA, 412 bp, Glycine max
gacccgagacctcagagtcacctgctgcatgcagctaaacattaactttgacgtcttgttttttacgggactcaatcagacatccgagtaaaaagttattggcgtctgaatacgctcataggttcaacatctaatttcgagcgtgttgatatattacgggactcaatcatacatccaagtaaaaagttatttggcgttgaataggctcataggtatcaacattaacatttagcgcctttgtatgttacgggactcaatcagacatccaagttataagttattggcgtttgaattggctcacaggtataaaattcaatttcgagagtcttgttttattacggtagtcgattatacatccgacgtaaaagttatagtggttagaattggctcagaggttcaacattcaatttct

SEQ ID NO: 134899 - DNA, 329 bp, Glycine max
  unsure (1)..(329): unsure at all n locations
cgacaataaccttttactccgatgtttgtattgagcccgcaatatatcgagacgctcgaaattgaatggtgtagctcagagccaattcanacgaccataacttttttctcggatgtttgattgagtcccgcaatatatcgagacgctggaaaatgaatggtgaagctttgagcacattcaaacgacaataactttttattcggatgtctgattgagtccagttatatatcgagacgctcgaaattgaatgttgaaactctgagccaattcacacgacaataactctttactcggatgtccgattcagtgacgtcatataatcggacgct

SEQ ID NO: 134900 - DNA, 472 bp, Glycine max
cctgaggcatgcaagctataaaactattgagaacaaaatatgctaatggtgttattgctatagcgctgctattgcatgaaacattattcattaccatagaagagatagtgactaatgaagccaactaacagactaactaaagtaaccaaatagtaaaggcaggaaccactatatgcatggaagaaatggaccatacctgcacaggtggaaaactaacttttccaatatgatcttccccagcgaaaccaaagatgccaacagcctggttataagtcacacgctttccaacctcacacatgttcttgtagaaggaactggaaaggaaaactattctcagaaaacagaagatttgcttttctatatataaataaaaaaagagtaaaacagtacaagagattgtgatatttctcaagtgacatcttatttcagaagtgaacagcaacaattgaacagaatatttactctaacattt

SEQ ID NO: 134901 - DNA, 182 bp, Glycine max
  unsure (1)..(182): unsure at all n locations
ctcagctttagtaaatggacttacctngaatgaattcctttgattgtccctttgagcctatgctcccctttctgtgttttgaagctcattacaagccttaagtganaaaccatgatatcaccttacccttaaggaattttggagctttggaattgatttgggaataaatgtgtgtgtgtggg

SEQ ID NO: 134902 - DNA, 362 bp, Glycine max
atgtgaattattacgtattctctatgactccatcaataacagagaacatgtttagttctcatatgcaggtgaacaagtttgaatactcccatgacaaccctatataatactgcatccaaatgatattgcacaaaggaaatcagtatgcaaacaaaattccccaaaagcactggttcttttatcaattataaacacaagtaaaaccaactctctataatcaaaacttgaaagaataaccataatcccaattgcaagatagcgcctataaacacacctcagaagtccatagataaatgccttgaccttgccacataagtatctagcaaaagtatctaacgaagatagatcaatgaacatatcta

SEQ ID NO: 134903 - DNA, 345 bp, Glycine max
  unsure (1)..(345): unsure at all n locations
actcagcttnttggatgtgactttgagatgtgcataaagtnggagcttctaagagagtggcattctcactctcaacgcagattaaggagaaggcattgcagttagttttgaggcactactggcaagatatgtgagtcattgaagaggaaaggagggttgatcctgcattatctaatatcatggaggaattggaataagatcctaatttccaacccaatacaccctggaacatgaatagctccattataatggacgattgctgttggcagcatcctcaacctgtataggagaatatttactccatagactgtttttccttcttaagcttctacgtatagaataaac

SEQ ID NO: 134904 - DNA, 464 bp, Glycine max
agcttgaacaaaacttgacacagatatgacttaataaacacggggatatgcaaatataaaaaatcatatgatatgccatggccataatataatgcatacaattaatgtaaaattaacataaaatacaaactaaataaagacatgcttgatgtatgagttattgtgaaaataggaaaatgctacatttatctaattgttgtaatattctcatttgaattggtatgaaagtttaaaaaacaaatgtaaaataacagtattagtgagagttattgtaaaatgtagtgtcaaacttaaatatgcatccacagatattattttgaagagtccatgcttactttgcatcaatcatcaccaaaggaacgaaaaagtttatttggataacaacaccatactgtttatgatcgattttaagagaaaacagaaaaattactaccaccggaacataaggactcatgtaacctaca

SEQ ID NO: 134905 - DNA, 362 bp, Glycine max
  unsure (1)..(362): unsure at all n locations
catcaaactcagcttgcatagatgaatttgcaattgcatctcttctttcagttgtctgaacaaataatgtgagaaagataaacatacatgaaagtacatcaagtgagaatgtaagatgagctaaatctgattcttgagtcgtgaccaatgaccatacaaccaaaatggaagggtttagattagatntaacattaaaaaaaaaaaaatcaaccatcaatatatggatgtatggtcaagattaacccctttcacttctcacactctcacttaataccattccccacccacgcatatatatggaaaatagagcattctgagtcatagagaatagaacgatgaaatgttcatataataaacacacc

SEQ ID NO: 134906 - DNA, 441 bp, Glycine max
  unsure (1)..(441): unsure at all n locations
agctgtgttctttttataaatgagaaattctgaactcatcacgttatctaaaaaaccttgtggtggatccaagtgctccgatcattcatntttatattcatgttttggtggcatgctcaccgctgtttgttcctttagggaattcaccataactaggaaagcacaaaggctcccctataacactcgatccagaaaaatggataatgaagagggcgtgcaagagcagatgaaggccgatctatcggccttaaaagatcaaatggcttctatcacggaggccatgctaaaactccagagaactctagaggataatgccacgacaaccgcctccaatgcagttaatgaagcgggaccagtgttgcagcccacgataaacttgcgccgagatagaaacccgacggtgtttcggtggaggtacagtccgcaagcttacccttatgg

SEQ ID NO: 134907 - DNA, 413 bp, Glycine max
  unsure (1)..(413): unsure at all n locations
tagaatacctgctgccaattcagttctcaagtctatcatctatntcatnnccattaaatctgtattgtcttgtaataaagaagtcattgatatttggcatttccgtttgggtcatccttcatatgataggatgcaagtgttgaaacaaacttatcctatgttgacttgtgataaaacctttgtttgtgatacttgccataaagcaaaacagagaaaacttccatttcccaatagtgactcctatgcttctagtcctttctctttgatacatgtagatatntggggtccttgtaccacaactactttgaatggacataagtattttcttacaattatggatgatcatactagattcgtgtggagttttataatgacttcanaagctcagactcatactcatttacaagcctttg

SEQ ID NO: 134908 - DNA, 305 bp, Glycine max
  unsure (1)..(305): unsure at all n locations
agccggcctcagcctnctgtaggaaggcatcgtcaaatataggccctaaattatcataggaccccactctagataagacaattgtaaaggtcataacaacaatcaccacatcagattgctcatatcgagaacgaggatgtgtgcgcaccgatcagcctgttcactactgaggatgaaattgataacctcagacggggggcgttacgagacagattgaggcgaagaagttctgttgcacatgttactctaatgagaaccatatatagaatctgaccaaaaactctttggatccttgttgacgaacc

SEQ ID NO: 134909 - DNA, 450 bp, Glycine max
  unsure (1)..(450): unsure at all n locations
agctgacaaatctggtataggtccaagcctctttttaaaatataatcctgacgagatcagatacgatttgataaaataaaatctagatgagataaaatctacatgaaataatatctatacgagataaaatctggataagaaaagatttggtagaataaaattgtctgctctcttcaagtccaagctcaattccggattcaagcccaattgcttataattnttctgagattaaattaaaaacacaaaactagtccagtagccccaaatgataaaactacataattaatttgacaattaaggctaataagtaattaaaatggtgacaaaaagggttaagacataagagataatgatgacacatcactccacatggagctacatcatgatatctatctctatttgtagacttgatttttcccttggatcatcattccttacattctntaagct

SEQ ID NO: 134910 - DNA, 416 bp, Glycine max
  unsure (1)..(416): unsure at all n locations
agctataagcaacataaacactacttttgatttctaggttgaaatcgctggtgttcgcagcttgaacatatgaatntgtataaattactgggaattgatcactatgtgttttgagctgaaagttttactgaattttctagacatctggaccaaaattatagaaaacgaaccaagctatttgggttaaaggaaaaaataagaaaaatcacacaaattggaagaaaaatcattgtccagtaaaaaaaaaagtgaaagggaactgtgcttgttgttttggctcaaaatttgttctataattggcgtcaattatataccaatcctagctatgaaagttaaattgaaaattattgtgaaaacaagttccataactagatgtgtcatgagcctttgttttttaagttttctactctactctt

SEQ ID NO: 134911 - DNA, 426 bp, Glycine max
  unsure (1)..(426): unsure at all n locations
taagcttgtgtagctggtatacctttctaatcataaccttttttnaaaaaaattcccttcaggggggagaatgataatgtgagtgaagacaatgttttacatttgcatgaaccattgcctatccctgttgtgcatactgaaaatacaaattttattgatcaaacaaatgataacaaaggaaatcctatgccagacttatgtggagcccaagtaggaaaagacataccacagctaaataaagagtgtcgtgtttatactcggaaatattctaaaaggataaaagaacagtctatcatctcatcacccaaccaagcagaatttttggaggaacactactagaagatacactttcaacatcggttatttagaacattctacatcggttcttacaccgatgttgaaagtgaccatgttgaatgtttgaat

SEQ ID NO: 134912 - DNA, 406 bp, Glycine max
  unsure (1)..(406): unsure at all n locations
gcatgcaagactgactaggcgagctggtgctcgccctatcatgtggtttgctcacggcgagaaaaatgtaatggcgcacgcgagccatatactatcctgngcgagactatgttcagaaaataataggagaaaaccattttgcccctacctctggctattgtttctggaactgacaaacaaccatcaaaaccctgcgcgactccctgggcttgtgctataaccggtgccaaacaccataattcgatgagcaatgatcagagcatcatatccgaatgataaaaatatgatacccggatgaaagtagggtctgacaatggtccctctttagcttatctttattgaaaataaaagataagataatgacactaatttcattctagcactctgactattctaaattggacgc

SEQ ID NO: 134913 - DNA, 425 bp, Glycine max
gcttaacctcaatgagtctaacatactccttatttgtggatgtatatagtcttatatagcacgagctctctgatcaactgcatcctcaacatcataattcacttctttaattattagttgcacatgatgggtgaagatgaatttggagtgaggtcgacgcacaacataagagaagttgtgagtagacataacatcaaactccctctttcacagatagaccatgttgtaatgattcttaatagtgaagagggtatgatttagagtctcatagcaacgttccactttatgatgcacgtcttctactggaggcttctatttggtttcaactagaacaataactctgatttataaacctttgatggatcaaatcaaattgaacctatctttgcttaagcctctttctgttgaaaactttagggagtttt

SEQ ID NO: 134914 - DNA, 442 bp, Glycine max
  unsure (1)..(442): unsure at all n locations
agcgtgagggataactagatgtcttgtgcattctagaaactgagctagccatatattagaaatctgcatctgcacctattactggggcaggagcctgaggtctatgttcttctgctaatcaccatgcagaactatgtccttcttagagcaatgaggagtcaatgagcaacctgaagcctatgctgcaaacatttataatagaccccctcaacaacagatccgacaacagcagaataattatgagtctttcaagcaatagatacaatccaggttggaggaatcatccaaatttgagatgggcaaatgctccacaacaacaatagcagcaacaatagcctgtccctcctttccagaatgtngctggtccaagcatgccatatgttcctccttcgatgcataaacaacaacaaagactacaagcaactgaagccccttctcacct

SEQ ID NO: 134915 - DNA, 392 bp, Glycine max
  unsure (1)..(392): unsure at all n locations
aagcttncacttattagtgcacaactccttttagaatttttatatcttggaacnngctctattgcatccaatagaggtatgtttacctctactttgctaaatgtatccaagatctccttctctgcctcttccattttattgttgaaaatctctcttggagggaatggaagagggatatgctgcttctgtaaatcagaattaccagcggaagattcacctgcatagaaattgttacgtcacttactctctaaatttgtgtcatcatcttcttctggagtacagtgaatttgggcaggttcatttgccgatgaggaggatgttgttggttgacgtccttgacactgtnttcccgacctcaatgtaatgacactcacatttctgggattctggat

SEQ ID NO: 134916 - DNA, 417 bp, Glycine max
accggaccctaagcacgcagctgcagctgaaacattctttttttttatcatatgcgaccggctacggaaatcttattcgtctgaccatccacaccacctaaatatatctctctcattggttgcctgacattccacagatcataatggcatcgagctctatttccatcagctgagagaacattatagagccatcaacaccacaccctcatgtgtgactgcgtcggacatgactctaaatctcagaataatacaatgcagctggaaaatagattcccacctgacatggtcctatggacatgaaacatagtttgtggacacgaacatatatatctctcatgttccaagtcaccctccactaaagacagcgtgaacattactcacgcttgactacactgagccacctctctcctttcatat

SEQ ID NO: 134917 - DNA, 461 bp, Glycine max
tctagagacgacctcgcaagcgtgcaagctttctctataatgagtagtccatcttattcttcaataaagatcttttgctttagacattgccaagtgatgaaccccttagaggctgagctctgatactaaactgtacaggcgaatccacttcaacagattgtacaaaacacaagatcacatctcagagcagttagtgtattaagaaaacagccaggaatacgaatattttatattaattcgtctgtacctttgagattatgtcaagtttttggcaacctactaaatttccactagatgtacgtctacatatgtttagaactccttaggtagagatgagtactagatgcaggactacattagttaagaccatacttagatagtgtttctgattaattaagacgctcgcctaggcaagtcttttgtattaattgtttacgaacagaggaatgaatctttcatgg

SEQ ID NO: 134918 - DNA, 182 bp, Glycine max
cacatgggaacttgttcatctgcctcttgacaagaaacccatatctctgaggtgggtttatcaagtgaaggtgaaatccaaatgacgccagacttgtggccaaaaggatcttatgataacctgcagttgactatagcgaggtctatgcacctgtggccataatagaaacagtgagattggtg

SEQ ID NO: 134919 - DNA, 483 bp, Glycine max
  unsure (1)..(483): unsure at all n locations
gacctattatactcagctgttggtcaattgtggatcgagtggcctcagaataatttataatggggggttgaattaattattcctaaacctttactaattaaaaaattactcttttaaggcttttacttttgttgttaagagaatatggagtagaagagaaacttaacagaaagtaaaagcggaaattaaaatgtacaacggaaagtataagagtatggaagaaggaaacaaacacacaagagtttttatactggttcggcaacaacccgtgcctacctccaatccccaagcgacctgcggtccttgggatttctttcaaccttgtaaaaatccttttacaagaaaagatccacaagggatgtaccctcccttgttctctttgaaaccctagtggatgtccctccactagaacttatccacaagagatgtaccctctcttgttctcagtcaaacctaagtagatgtacnctctacttgtaccac

SEQ ID NO: 134920 - DNA, 440 bp, Glycine max
  unsure (1)..(440): unsure at all n locations
attcaatattgagattattagttcaattcattagtttgcatgtaattctgatgttggcaggttaaatctattaaattatcaaaattgagttttgtctctatcaatcatatagtgtctattcttgaaaataccgaatctaataacatgcccaaaattgattctctctctctctcagtaaaaactgattatctcctcagcataccccatttntgtttttctttttttttttttttaaagaaaaagatatatttcagttgttagatcaatatcttgcatgctgcccaaagatacttaacagattatgaggggcctagaaacttgctcaataaaaaaagggggtggaggagctaaaaaattgtttcatcacaatctatgacgcttgaaattgacactcaagatagatcctaagcagtgatctacttatagggaagttttggatc

SEQ ID NO: 134921 - DNA, 417 bp, Glycine max
tgatgtgattcataacacactatgtatttctaaatgaagactaaacattcattgtatatttattcgattcattatgcgatataattcagtgtaacccgtcactaaccaattaaaattatcaactactcgtatggttaagcaaggaaattgtcggtccaacaaaaatcatttacgcgtacagcatacatcattgtcataattgacaacacataatgacatgcatgcgtgttacagtttgagcatgacaacacattggttgacttcagtacacactttgaaactagcagtcgctcaacaacacattggttgacttgactacacattatcgacaacacattggctgacttgactacacatttacgcgcgtctatatatttgtaaacaaagttaaacaattgttggatgaaattcactact

SEQ ID NO: 134922 - DNA, 449 bp, Glycine max
ctgtacggttaggacattgtgtagtttaagtgtgaacagtcaatagtgaagagtgatgtatcatagcaaaaagagtggagggagagtcgttggaatcaaaggtttgtttctcaccagcttgagttgtttaggtttgtgcaaagaacaaaactttggtcacttttccattttcttttaacctttcaatcttctttttactttcaattatatttctatgtaagattctggcatatatattatacgaaaagagaaatataccagcaagttcataccaccaagtatgaatgacatcattccaaattaaaatggatatttatttttacttgctttttttactttaacttgcttgtatagctagttcacaagttccagattaacctatggataataaattggattttatattgttttgcaactgtcccaactcttgaaactttcattttcatatg

SEQ ID NO: 134923 - DNA, 444 bp, Glycine max
  unsure (1)..(444): unsure at all n locations
gcttgacttttctcttcaggacaacaatttatttacaggaattatgaatnttaattctgcgaaggacatttgggactacctcagatcagagtattagggtagtgagcgaaccaaaggtatgaaagcacttaacttggctcaagaatttatgatgcagagcatgaaggagacagcaactatcaaaagttatgttgacaaaccattgagcattgcaaacaaggtacgtctcctcggtaagaattttcctgacaaaaggatagtgcaaaaaataattgttactagactccgagagaaatgcacttcttattgcagtgaaaaacatcgacaccaaacagctcttctattcctagactcgagagaaatgctcaaaaaggtgcccatctattaaaaagaacaatattgaactggaataatgacgaaggcatgtattacattgctgtaaaa

SEQ ID NO: 134924 - DNA, 442 bp, Glycine max
  unsure (1)..(442): unsure at all n locations
ccactatgagaacccgatgagtttaatcactttgaggcgagatgagataaaattatattgaaaacaattgaggagtcgatgtgttttgtacaattcatagattgagcctgattgcaaaactgttttctgggttggacctgaatcacgagggagaggccctaacgaactcttcagagtctatgtctagggggtaaatacacctggtttgagtgctcctttaagcttgtgttgatcccacatggttggagcattcttgcaaaacaacatgactctgactgtctccctatggttntacctagtgagagtgacctgatttatcagtgtgtggtctgtcttgtcatgtactcctatgcgctcgatgaggtttttcactaactttataccacattgaatataagaatgagtcttagtgtatctgtcgcataacacctgtgtaatgact

SEQ ID NO: 134925 - DNA, 433 bp, Glycine max
cttctgcagttaatctaacctccttctgtttaccattgtaatgcttctacttctaaacaggtgtgctcattcaacactgctggtccttcatcatcagataccaagggtatgaaaatatcccattttctttattcttctatttgtaataatattgctctagatacctggatcataaattcaggtgctatccatcacatatgtgcctcactgcactggtttcactcttatagtgaaatcaatcccatgattataaaactaccaaatggtaatcatgtcaccactaaatatgcaggcacacgtgtgttttcctcttcttctagtatcaccaatgtcctatatgtacctacctttacagccaatttgatttctgtctctcaattatgacaccacacaccttatacactcaatttcactgacactatttgttccatac

SEQ ID NO: 134926 - DNA, 336 bp, Glycine max
  unsure (1)..(336): unsure at all n locations
ctgattgacacctattatcctttgtcctaccaagccactaccatctctaaacaattaaaaaaagattgtgtttgaagttcgcttatagactaaatctagaatcatcttatggacgactatacaaattagtgcttagtccctttctctcaaggtgttcacggtgttttgagagttttnttttctaatttttcaaaagtatacacaaagcttgttggagaaaaagagaggaaacaaaatgcacaaaatccttttcttcagtctttaaagcttctagtttatataggtctaatcttcaagtatttgatggttcgcaacggataaaacttcacttgatct

SEQ ID NO: 134927 - DNA, 297 bp, Glycine max
agcttatgctgcaatattacaaataccttctcaagctcagcagcaaaatcaaccacagcagaacaattatgacctctccagcaacagatacgaccctggatggaggaatcaccataacctcagatggtcacaccctcagcaacaacaacagcagcctgctccttccttccaaaatgctgctggcccaagcagaccatacattcctccaccaatccaacaaaagcaacaaccccagaaacagccaccagttgaggcccctcaacaaccttccctggaataacttgtgaggcaaatgac

SEQ ID NO: 134928 - DNA, 398 bp, Glycine max
  unsure (1)..(398): unsure at all n locations
attacgtgcatatataacctttattggggtctagccacttttggaaaattatattaaaggctaatggtcatacgttaaataatgctaatatatggtaagataaatgtaataataatttcgcacacatcatanaaaaactatcaattgactatgacttgttaaccgtagcctgttgcacaaatcaatatacttatcattaataatctaaccactttttttactgttgaatactttccaaatttaacgtgatgttttttttttgtacacactcttaaatcttgtgaacctagcacactttcattacgccaatcctttggaaaacttggggatatacttagtctacattgtaaacatgtagtgttaaaggacattgaatatattgagttaatataaaattc

SEQ ID NO: 134929 - DNA, 413 bp, Glycine max
agcttgtatgattatggggtacccatcacatgtggtactatgtggcggtcgggcgatggtgcacaacatgttttccacatccacaatgcgcgcataaacccaccatccgctattgcccacctccaactgagctcacgtactaccacgtagcccatatcctcgtttgtctcaacaccgggtccccatcaatcctcccaagcttccccaacatcatagtaatacaacattcacacagcacaagctatcacagccaagcaaaacacggcaaaggtagaaaactctgctcaaaacaccaaccaaaatcacagctgttctcacttatagaccccaataacaattccttcgatccaattcgctaaccgttggatcgactccaaaattatactggaagtctatagcacataagcctacat

SEQ ID NO: 134930 - DNA, 415 bp, Glycine max
  unsure (1)..(415): unsure at all n locations
atttcgcaaacattaatcttaatttagatcagtatcaatgaataattcatcttgtgttaatccgtgtattgcaattcacatggatatattattgataaaaaggggaaacaaaatacacacttttcaaaatacatgtgttttagtgagacagaacgatcgtaaaaagattattaatatgaaaatatcatctttaatatttcttttgaattattgcatgtgtaagagtttatctcttagaaaccaaccgcttttaaaatattccatgcataaataaatattaattatatgttatcttaaatataaaaaaataacatanactaaatataggttgactcgtctgagtacttatccgaaggaaaattattactacagtatatcatagttaaatgaccaatcagaaggcatgataagagat

SEQ ID NO: 134931 - DNA, 392 bp, Glycine max
tatgtggaaattttcttgtagaagatagagaaccaactaaacctttgcctaggaaacattagtccaaattccaaatcattggtgaacctaaggaccaagttcttacaaaggactctgtcttgcatacaacactacttccataaattgagcccaatcacataaatgatgatatgtctgatgaatactgggtcaaggcgatgtaagaagagttgaacccgatttaagagaatgatgtctggaagcttgtcaacctcccaaaggaatatatgttgttggagctaaatggatgttcaaaaataaacttgacaaaataagtcacgttatgaacaacaaggctagacttgtgagaggtattgacaactaagatgtaagactatagtcagaatttactc

SEQ ID NO: 134932 - DNA, 283 bp, Glycine max
taatgatggtgaacaatctttccaggtgttctagagtcaaattatttggcagtgtgaagaggaatatatattcggtgttagttttgggagctactatgtgctgatgacaactactacaatgttcaaaaatggatgagtgtttggtgggaagcaatggcaaaacttttggtagggatgtgcacaatttaggtgttttatttatttaaaaattaacctgcacacaactgaattgtttaaaatagtgggttacttaattcaaataagcaaattggtttaaagaata

SEQ ID NO: 134933 - DNA, 420 bp, Glycine max
tgcagtgcgttgcaagcccttcacccatgttgggaatatgaagtgtgtgatcgactaccttatatcttgggaatttaagaaagtacattttgaccattcttaaccttctaaaagttatcaaaaacattattatgattttttcaagcaaactggcacaaaggatatttgtgaataacttatatttattgtcacattattatctaatagagaaatataatggtgggatcaaaatcacattacaacattaattatagatgaaaaacactctaataaaaatttagaaataaaaacataatctatccatagaataatatatattttccgtcttgatcgcatgtatcttttaagttaaataatcaataccaatcataagtggttgtggccataaatatactatatcagtagctatatattaaaaaa

SEQ ID NO: 134934 - DNA, 178 bp, Glycine max
ttggaaccaactgaatatcttgttttctcgaaaaatagccatcaaatttgttttcttatgcccacttattttcctcaatgtaagaaccaacaaacatggtatcacttgccgcttgtttctagcttgtaccatcttaattcctcggagtgcccttattctatcggcagccatcggaata

SEQ ID NO: 134935 - DNA, 264 bp, Glycine max
agaacatagagaacaacgttcgtgtggggacataaccctgtgccttcatctcatgtgacaatttaactagcgaagcatgaatttctttaatctgtgggttatgctcctcaacaaagaccaatgaggataccttcctttttacttcaatccagctgcaacctggtagctattgcatgccacgagctttcaatagcttcatcacactcctttgcttcactccacatcttagcctctgcataaatatctgcgtaaagcacataatta

SEQ ID NO: 134936 - DNA, 370 bp, Glycine max
acggaatttggcatcgaacatgctcttccttgcgagccctcttggattcttgtaaaaaggctcttgcgatagctgcatcttcttctcgtaactctggacactctgttcggacatctgtagcgactaagttgaatttttctttggcgagtcttgcctttcctagctctgattttagagctcggacttcttcatcctcttccggagcttcgaagttcttctcgatgataattatcaacttggagagccaatctaaccctcgagtatgaactaatagccattcatgataaccatcgatgatgccattacggatgcacctaaggtctttatcttatattaacaggctctaccacaccttgaggactctttgtac

SEQ ID NO: 134937 - DNA, 198 bp, Glycine max
  unsure (1)..(198): unsure at all n locations
tgcaactttcgtatgaccacttcgaggtacttggcacccatcgatacgcaactcttgaagttccgcgacatgttggaaatcaaaagaaagcatcattgcacaattcgtggagntctgtgatatgtctgaaattacaaagaaagcatctgttgcacaatttatgaggctctgtaacaatccggaagtaaaaatgggatg

SEQ ID NO: 134938 - DNA, 434 bp, Glycine max
tgcaagctcgcccgtccaatgctgcagtgatgatgtgtccgagtgatgctggggagtggttatgagcccggactgggtgtaggaaaggacaacgactgcataactagcctgatgaatgccaaatgaaatcgtgggaagtatgggttacgctatgaacccactcacgcagatgtaaagagaatcattgcggaaaggaagggcggaagtcaaagctcgcggctgaaacaagaaggtgactgaagctcaacctgccacataagtaggagctttataatcgcgggtctatgggacgaatgttaagtcttcgcaatatacgaagatgatgttccaagtgcattaaatttaggacgaccatgccctcctgatttccaacttggaaattggcgagtggaggaacgcccggacatgtacgcgacgagcataatgtgaacctt

SEQ ID NO: 134939 - DNA, 418 bp, Glycine max
tgatgaccaaaagctcagaagtcaagaacacttcatgttaacaaagatgatgacttcaagaatcaaagagtgagttcgcgattgaatccagaacacttcaaggttcaaaaggaaatttgatttcgagaatcaataatcaattttcaagattcaagttccaaaaatcctgatcaagattcatgaatcgagagaagactcaatcaagataagtattaaaaagttttttcagaaactgagtagcacatgaatatttctcagaaccttctaccaaagagtttttactctctggtaattgattaccacattatcgtaatcgattactagtagcaaaatggttctcagaaagctttcaactgaatgtacaatgttccaattgatttcagaatgttgtgatcgactacaatgatttggtgatcga

SEQ ID NO: 134940 - DNA, 391 bp, Glycine max
agctggctcaatcaccaccatggctatacatatctccgtatgaactgcggactttataccaataaataatgagaagcaaccgcggaatactccagagctatccctaagaataccaccgctggctgcatgacctggagaccctctagatgcccccatcagtgttacatttgatataaccactgggaaggctgtgccaatctacctgtttaatctggacaacttttggaggggtgaaattcaccatgaaattctacaaaagagaaaaatcataaattgaatttgaagctactccctttgatagatatcccgtcaaagatgaggcagttacaatcatagatgtaacttggtgcgtggaaactttaacatttctaaacctcaaactatttctaca

SEQ ID NO: 134941 - DNA, 443 bp, Glycine max
  unsure (1)..(443): unsure at all n locations
aaccactaacaacccaagtgttgtcttcaatagatgcttgtactgcaaaagattccattttgaacaaatagagtcaacttaaaatgttgaaataaattgtatactaaaattatcaccaattaatattacctttggggtttaaaaactggataactatttcatccttaaagatgttgacttcttcaattgcagggatagcattcactcctatcctcnttcagggtgcttgaagccttttgtcatctgtagtagtagtcttgtggacagctttcttcttcctgtgagcaacagaaaacaaatcatcaataaaataattaactcaacagatgcaatctacatatcaaacaaaaaatatagcatagaaacctcactcaaataaaaaaactattacatcatataagaggtcaagtaattaaaccttatagtaatacaaaattgaattg

SEQ ID NO: 134942 - DNA, 134 bp, Glycine max
tcaaaaagttttttttttccactagagaaggaacccggccagaaaggggaaagggggaaacctctggactgcttttatagggaagttcacaaccacatgttttattttcataagaactctcttaaccaccaggg

SEQ ID NO: 134943 - DNA, 415 bp, Glycine max
atcaacatggataagacctccatcatttttaatgaggagattgtctaaatgcctgccacagaaaacacaatcactccaaatatggacaaaatataaattcaatgaaattatttttgtaaaattgactttggttaaaattggttgagtgaagtaatttatgtttaaatgtttttattctaaaattagtagtaaaatttaatataattattttttatcaaaacacacactatctatatgttttttaacatggaaccaaacatgcaaatattaatctaaaatcacgttagtttgtatgtcaacataatccaacatgtgagttatatgtctagtccatgtctgtaagtatatgcacgataaattaaattttcaaacagttaattcacaatgtcatcaagacacacacttgatacaaata

SEQ ID NO: 134944 - DNA, 263 bp, Glycine max
cttaatgcgggcctggacaagcctaacccaacaggaagaatctgaggatgatacctgaacaggactaagcttaacatgcacgagacatcggggtctaacatttcacgacactacataaaacacatgaccgttgtcaggtagagaaacacctttataacatcagggacccgcgatgaagacgtcataccccaatttcgaccggggattataacttcacgagatgcaacctttgattggccgactaaagatactcggcacccttt

SEQ ID NO: 134945 - DNA, 443 bp, Glycine max
gaccaccgacgcagtaacaactactgttgacacatgaccagcgactatgaggatcacgactgatggccagcgatgacgatgtgactgagggctttcaaagcaaaacaacgacggtgagtatcttatctctatcacagcacaaagtcgcgactagcgagtaaagtggtagcttatcttcaaaatgacgccgttcaaaaattacgtaaacctgcgaacttgtcgcagacttgcgagtctacctaaactcacccgactttgcgctaaatcggacgagtctactctgcgtttgattctacttccgcgtttagttggtagtttcaacaaaattttaccactgattctacacaacaattatcaatggataagctgtggtggaaaatctgtggaaaatatgagcactttacactaactgctgaaaatggctcaatattagcaaaaattct

SEQ ID NO: 134946 - DNA, 343 bp, Glycine max
  unsure (1)..(343): unsure at all n locations
cactttgctgtgtattctcatgaagataacgaagggccgcagcctcgcctaacgctaccttgtacctgttacataaattgagaagagaagagatcattgtttactgttgtggaaacggtgtaattaaactgcctttatatgacaagaaataatctaaagacaaaatgntcgatcaattgaatagctattttaagtgctgctcctctcatcataattgaaatttcctaggtgtaaacaacctattaaaagtttggattaattaacacgaaacgtagattagtaacgtgaaattatcattctgaatgaagaattgcacacaaaacacctatgaattgctcatgat

SEQ ID NO: 134947 - DNA, 420 bp, Glycine max
  unsure (1)..(420): unsure at all n locations
ttcttccatcaagtggtcatcagagcacaagagcttcaagtatgtgcttcttaaacctccattaattatttgctttaccttctcttccattgatgattcttcattattctccatgtatctcctcacatttcttgtcctaaacgttgttaacattgatctttatagtttccaccgattaaactngctataaaagctagaattgattttctatggttcaaatctcttgttcttgctctcgaaccatgaattatgttgagtttaggtttctttgagctatgtctagttattttttgtggttgaaacctaaaccataaaattcttacaaaatatctaagtgaagagacctcacaatctaagtgattgtcactatcgagtttttcataaatcatgctatcatgaacttgcacataattctatgtg

SEQ ID NO: 134948 - DNA, 455 bp, Glycine max
  unsure (1)..(455): unsure at all n locations
acactatagatactttgacttccctgtaacatcacataacatacttatgagataataatttttatatagtatacatatgagtggacgcctgcttataacatactaaattccaaaatatgaaaggaaggatngatagcgtattatatataatataatataaaaagcgtggaaaaattttaataaaactgctttaacactattaatagttagacatcaatatattttaactgagaaaataatctcattatagtataatctgaccctataaaataaggaatgctaaacgccaagaacaaagttatgtaacaaaataacacacaaaactgaatcatgccatctccagacacaaaccatatatacgccagctggcttctaaaggcactagaaaacctcctagctagtgtctcacatgaatgacgaacccatatacacacactgcacctaatcatctcaag

SEQ ID NO: 134949 - DNA, 302 bp, Glycine max
ctacctccctggcatagagcattggaacaacgtgaagcctacgtttgagcttaatatcatagtattacaattaacaagtcacaagaattggattggtgttgaataaaaaaactcacacaaattagattagtccttaatttaatatctgatataagtcctcttatttctgcaaaaaggattcaatacattttaccgacatcatggacaaaaatgtatatttgagattagtttcgatatcaaacaattttaaattggtcgcccccttttaatataagtgactttagcacacgataaaaagttca

SEQ ID NO: 134950 - DNA, 331 bp, Glycine max
  unsure (1)..(331): unsure at all n locations
gacccgccgcatgcaagctagtgattgattacactcatacngtattctattgccacgacacattttcaaagaatattctctactgtcacatctttatatgaggttctcgaaggctatcaaaggcctatatatgtatgtgacatgagacacgaattttagaagagtttttggcgaacataaaggtgttatcctatcaaaagcaaatcgcgatgtcctcttacaaattcctgggccggatatcttgtgattcactaaggaattatttgactgctcaacatggtcagtctatctctttcaagagagagttcttcttttcttcttcttcattctg

SEQ ID NO: 134951 - DNA, 200 bp, Glycine max
atggcactatgccggggtattatgtactgttatgctgacggcctgctcttgaagatgtgcctcttaccaaatgggaagtactggatgcacggtgaagtgaatcatagagacttaccatagctggaccttgggtttgtgagccacttggagaaccgaccagtgaattgcttacctgtgtttgggcacgtgctctgtataca

SEQ ID NO: 134952 - DNA, 366 bp, Glycine max
  unsure (1)..(366): unsure at all n locations
tttacgcaagaataactgcattttggttcacaaccttactggtatctaggcattagtttgtaacacataggttttctactatgacatagtgcatagatcctaccaataattatcaagtactaattaattatataattgagagttgaaactacactatcgatatacattgattagctttcacaacttgctaaacactataacactgaaacattcttcattttacagaaaaaatactaattagaaatataaagacggtgtggtgttggaagaaccaaaaggtagcaaactagactataactcattgcttaaagtatgaacaatcttaacctgaggaanacaatttagtgcacaacactggcttacaat

SEQ ID NO: 134953 - DNA, 200 bp, Glycine max
ggctcaacaaggcacactcatccttgatgatcgttatgtagacacgttcaccgcgactttgcctacatatatctgatatgggaatactcttcagactctgataacacttgcgaaatttctttatgggcccattcctgagttatggggacttgggaatctttacacggattataagtgagaaaacttttgaatgggtcatt

SEQ ID NO: 134954 - DNA, 430 bp, Glycine max
  unsure (1)..(430): unsure at all n locations
cctctaattgatgctgttgctgctcatgacaaaagcaatgtgaggcagtttctggttcttatatgacgttgaatgcccttttaacgtcaaagttcttgcataacagtttgccttttaaccactgcagcttatgaaggttactgatagggttatgcctcacattgcaccgaaggtagatgaaagagattctttactataacagataagaacaaaggttagtgcttgcaactattgtttctttatgctgatcatacccttttgtatccaaatcattattttatttaanaatgttttcggttctctcagtccttcaacttgaagcctgctgtgactacacgaccgagcattctatgtccaaaaacagatttgaagctcgctggcatcttggagaaagcaaatgcaattcgtcacgtctttctcactctctatc

SEQ ID NO: 134955 - DNA, 198 bp, Glycine max
taagcttcttcaattgcacaccgctcttaatatttgaattgtatccttgtggaaccttcacccaacaaagacattgaccaaaacttatctttctccttatggacaaagtatgacaagcttggggcaagtaaattttctttccatcaaaccttggatgcaactgtgatcgtattcccatctcagctagatcttgatggg

SEQ ID NO: 134956 - DNA, 415 bp, Glycine max
  unsure (1)..(415): unsure at all n locations
agctgtgaggatatggtctttgccancgttttgatcaatgcgggtcctgaaaaaggaatatatactcatccttcttggatgaatgataaaactgcggccaatgataaaagtgagatagacgggaaaacccttgctgagactgctattcctatacggccaagcttcccaccatcccaaatatgtcattactcagtcaataacaaacctccttacccaccacccaagttattcacaaaggtcattcctaaatcaaccacaaagcctgtctaccgcacttccaatgacgaagaccacctttatcacataccaaaatataaacacccacaaaaaggaattttgcagcaaaaagcctgtacggttcaccccaaatctcgttgtgatatgctaaacttgatcccatatttactcgataatt

SEQ ID NO: 134957 - DNA, 402 bp, Glycine max
  unsure (1)..(402): unsure at all n locations
tgcctgtgtcaacatgttaagttgttctagntgagagctaagagatcgtttttgcgtttgagactaatgcgagagaacgaatattctctctctccttgggggttgttccacaaagttctttacaaaggcaatcgagtccagggattgttgatatgatattagcataggtggtgcctcgtcaggagaacttctactataagggaattaaaaggttccaacatctctttttattgtttaagcaaatataaagacatcagttctattntatagataagtgaaattacatattttgttaattttacaaataagatagattatataatctatgattgggatatctactagtaactattattatatcagtgtttttgtacctaaattcactaccatatatcactttga

SEQ ID NO: 134958 - DNA, 423 bp, Glycine max
gttgaacggtgaaacttcctgcttttattgttgaccacacagtggtacctggagatatgtcgcgttggtcaagagaccttggggacgtcaggtggggtgctattgcccaaaaccaagcttgaccaatcccgacccaacccgggcatagtcggtcagtgagaacctgtgatgtacctaaacaggcgagctcctggcagtcaacagatgaaaggaacaaagaccacaaagcaaggaggcttgtggtggttggccagctgtgaaacttgattgatatgtgggttatggcctctggtaatcgattaccaagggtgggtaatcgattacaaggcttaataatgaagacagggggctaagatggtctctggtaatcgattaccacgggatgtaatcgattaccaggcttgaaaacgaggtcaggaagct

SEQ ID NO: 134959 - DNA, 325 bp, Glycine max
atgaagccatatactgaacctcattgttagtccgcatctattctcgcaaacaagacttcatactaaatagcatggcttacaagaaataacggctttgttactcataacataagccctgatgattctatgaatcatcaaaattaggaaacgcgatataaccttgtcatataatatgtcgaaccgtatttgcactaactgcagttgctcttaaaaaaaaggaaggatattttctagaaaagcaactaattaaatattgtcctatcgttctcctgcctatacaattgcgcaatcaagcctttttccacctttgattactcatcactaa

SEQ ID NO: 134960 - DNA, 367 bp, Glycine max
  unsure (1)..(367): unsure at all n locations
aatcatcattggttgtcacggattattaaatgaaacataatactcattctcaaagttgcatactccaacatccaccacttatgatttcctaaacgaaggactttcacctcatgtgatccatcatctccacaatcaagtcactcctcaaagaaatatgatggtccaaacagctcaaccatcacctcaattatccaatcagttcacctatctcttctaccaacccagtcagatcagacttttcctcatgcagcccagtcattaccctcatgccccgcatcttcttcttcaacaatgtatcactcatttactggtccanacacaacaattacccctctcttgcattttccagcacaccttaagttcagac

SEQ ID NO: 134961 - DNA, 93 bp, Glycine max
ctaagcctcggttcgaaaagaacggtgagcgtaatgctcttgttgctctgaaacccacttaacggaagtgccccacaataatgttggatcaac

SEQ ID NO: 134962 - DNA, 320 bp, Glycine max
  unsure (1)..(320): unsure at all n locations
tctcgtgaagttaaacagttgttcaaacaattaacttgaaatcaaatcatgattgaaagctcaaaataaatcaaaataaagaaaagtcttgtttctttcgaataatggataaagattatggaatatttgttcttctcatttaagaagatcttatcctggcgctattggtgtccataattgcttgatctacaattgctgcatagtatgtgtaggagccttttaattcaatggcgatattatgcgatgcaaagcttcatgagctacttggatgcgaacgcatctcttgcttatgaataccacagatgatacnccgtcatcat

SEQ ID NO: 134963 - DNA, 318 bp, Glycine max
cggaaaaagcgaagaacctttattgttaacagccacacaaaatgtgaaggcctcataaggcctaagattcatctttcatatatacggcacgtggcaagcacttaatgcgataatttctaacgagatatcacatccatgactatactcaaatatgaaaggtgagaaagattatgttgaataattaaccctctaaagacactcgactgattaaaggaattaataccactcatacactacgcagataccgatgaacaagactcacgaaatcacattagtaaacccacagatgtaaggcatgtggggcatattggataggat

SEQ ID NO: 134964 - DNA, 320 bp, Glycine max
gattatacacgctataatctgtggctgccttcatgctcatagcaacaacgtcttcacacgaagacccataattcacgaacaaactaatgaccttctgcatgttcacacacgttgtactaattcagaccaatcgccattgccaagtcctttgacctatacctatagccaatctctaccagccacaccagcttataagcgatgttctcattgtatgatatgctcagatacgtcggccctttaatcaagaaactgtagatgtcatcataattcaacccacatttcttgtgaaactgtcttttatgacgcaacttttctctctc

SEQ ID NO: 134965 - DNA, 344 bp, Glycine max
agctttcaaatttactaaataaataaacttatacatagaaccaaaactaaaagcgttaactgaacatataatatatcaaaagccgacaaataaattaagatactgccatggctcctcctgagctactgaaagctcgtcctgaggtgaggaagaatcatcctgtgctggctgaagagtgtccttaattgatacgcgccatggatcctaagtgctatgagctgctgacaatgctgctgcataatcagtgtctgcatcgccatcctccttctatgagacctacaagaccggtgtagtgactagtgaaccttggagtattctctggagtggactgcggcttgggctga

SEQ ID NO: 134966 - DNA, 390 bp, Glycine max
acccgagacctctaagttaactgcggctgctgctttacttaggggcggttgggctttcttcacttacatgacaccaacgccagccttgaccactgttcttcctcccgcgagcttttttatgttccctgatgggctatagctaaccgtacttccacgattccttgggttattatcacgcttagttatgcctgccattcgtctttgcctacaaccctatcccagggatcataacacgttccctaacatagcttgggtcattattaccgtcggattggacaaacaatgttgcctcacgagggagtcctcggaagaaatgctgaccacctcacaagactggaaagcgtgttctaacgattcttttgcggcttccacataacgaatggaggatgg

SEQ ID NO: 134967 - DNA, 421 bp, Glycine max
agatgacttttcagtccttcgaggtagtgagcaacgcttctgtggtatccttctcgatgctgccccacatgtctgatgctgccatgatggtatcttgtgtgatgttagggcacagatcttagaccgtaatgggcttatggaataacaaagatggtgtggctcccttggtcgaattcaaggaaaatcgaaggaggtttgggctaagctataggcccacgtgtgccgatgtaagaaaaggcaccctatacagaataagattgggcatggtccaactacaaaggctgctagtgatagaagcccttccatgccacatcaacgaatgtttcatgagtactggctggacgtgtgaaaggcaattctccttgatacactatgaagcccgccaagagcgttcaagcttgcgacaattgtgccttcctga

SEQ ID NO: 134968 - DNA, 478 bp, Glycine max
  unsure (1)..(478): unsure at all n locations
ngcttgtggagcttctatggacgctggatcttgagcttaatggtgattttacaccatggagatgcaatggaaggctatgagaagaggagaggggaagcaccatccactatggaatcagccaaggaagaaggagcttcaccaccaagaattgccttggataagaagcttgaagaggatgctttaatggaggaaaagaaagagggaaggggagagcacgaaattgaaggaataaaagagggagagaagtggaactttgaagtgtatctcataagactttcattcatcaaagttacaacaagtgttacacatgcttctatttatagactaggtagcttccttgagaagctttcttaataaaacttccttgagaagcttctttgagaaaacttctttgagaagctagagcttagctacacacacccatctaaaaactaagctcacctccttgagaagctagagctttgctacatacacccct

SEQ ID NO: 134969 - DNA, 422 bp, Glycine max
accaaattaccactgctctagccaagctatcttggataaaatgcattaacaacttttcatacctaaaatgcgcccccatcttgcgacaatacatcttgagatggttcttaggacaaatcatccctttatatttgtccaaatcaggtaccttgaattttggggggatgatgacgtccggtaccaagcaaagatctgtcatgttcgcgaacggatagtcaccaaagccttcaacagctctcaatctctcctcgatgagatcgagtttccttctttcttccgccgccaggggtggtccttctgtaacaataatattggttgagctgtgaggctgtgctgacgcaatatgttgggcgccggcccctcgacagagatcggagggtagatatcaacatccgcttaggcatactctcgatgatcttcgt

SEQ ID NO: 134970 - DNA, 479 bp, Glycine max
  unsure (1)..(479): unsure at all n locations
gacactataaaactaagctgtttgnaacctatgaanactcaagaacaagcttgttttacatcgttcgcgtgtatgatatccactggacaaggttttaagtagaggagaccttcaatcctataatgcaacgtggcggacaaaaatgggcagttaacttgaatggccattattgtcaatgcggaaggtattctgtgcttcactatccatgttcacacattattgcagcttctggttacgtgagcatgaactactaccaatgtatagatgttgtttacaccaatgagcacatcttataagcatactccgcacagtggtggcctcttgggaatgaagcggcaattcctccttctgatgaggcatggacactaatccctgacccaactacaattcgtgcgaatggtcggccaaaatcaacaaggataagaaatgatatggattgggtcgaaccatctgaccatcgacaaaaatgtagtagatgt

SEQ ID NO: 134971 - DNA, 456 bp, Glycine max
cttaaccatctgagctgcaacttgagccatatccgactcccattttcttgcccagggagaagttatcctaccctcgaagctataaaaatgacgaaaagttaatctcccttcaaaggaaaaacgagaaggagaatttcctatctgagaggaaacacagtaaggtaagaaaggaactttccaatcttcggaaaaaagagaggaaaggaaattcccaatcaaagagtgggagaaagcacaaagaaaagaaagaaaattcccaatcatagaatgggagaaagactaaaagagaagcaaaaaagaagaaagctactggttcaaaaaaccagaaaacatgtgcctagacgtccttgcaccggacaatatcttaacaatacaaaattgtcaccatatgaacaagaagaaggaaacgaagccacgaccttaaatggtcttccccctttaatagccaaccaaaat

SEQ ID NO: 134972 - DNA, 470 bp, Glycine max
  unsure (1)..(470): unsure at all n locations
catgaatcatctacgtgagattattgtatgttctttctcgcaagctttctgtagagacttgtttaagatactaagctctcaaaagatctggtataccttgagagaaatgactataagcgctaagtgtacctgtaaatagagagtgtcagttaatagaagaacaattgagcatcccagaataagagagagaggaatacaacaactgagagtgagcgaatgaaagaaaataattcacacgaaacgaagaagagaaaattaagaaagtgactgaatttgctaagattagagagggtgataatgctntgatggctagagagcagatacttgtactcatgtacaacgatggttattatactaacgatcttaactcttcttttccttgtgaggatgtttccttggtactcgaatatggtgatgttattcctgaagacatatcatatggattacctcctgttacaggtactgagcat

SEQ ID NO: 134973 - DNA, 397 bp, Glycine max
cttgaaggacttaatgacccaagacatttttacaccggaacaacaagtctatatttcaaaggtactcgggtatgattataccattcaatataaatcatggtcttccaatatggctgcaaatgctttattaaagataccggcaacaccgaccttgtaactattactctccatccccaattctatttttatggaacaatttcatcaagcatgtcaagcgaatacctcatatcaagaacttttccaccagatacatctgcaccccgaagctcaccccatcttcactattaaatatgacctccttttcttcaatgataagatttggcttacttccagccatgatttcactaatttactcatggacgaatttcattaaaccactcttggaggtcatatgggt

SEQ ID NO: 134974 - DNA, 92 bp, Glycine max
gatgatgacaaagggtgatgatcaaatagctcaaaagttcaaagaacaactcaagtgaatcaaagaacatctcaagtgaatcaagaacaagt

SEQ ID NO: 134975 - DNA, 381 bp, Glycine max
gccccataaacatgacactgaagcatatcctttctccactccacagataggtgcattagcctattgagacccaatcattattaaggaaggcacactcatatttcatgggaatggtggcacctattaatgcaacctcatggcaaaggcttttgaacaaaaagagtgtcaagcctacaatcttttttttatccaagagcaatcatctgttggggtgctcattgtgataatctcttgaactgccttatgttgttcttttaggtggcggagagatcttgcaccctctgttcatttgagatatgaacactttttgtaatctgcaccccttgatagctcttacccttatcaacagaaatcatgatcacattacctcatgaactttaa

SEQ ID NO: 134976 - DNA, 297 bp, Glycine max
tatttgcatggtatgaatgaagcttttcatttattatcaagatatgctcggggttcataatttctcttggaaacggtatatagggtgtgaatctcccatacctaataattcatgtggacaccatgagtaacaagtacttctgcttaaacagaccacattacattattcccatctgaacccatattttataattaatacatacgtgcggttgaatgtttagtttgaaattttattttaaaagggttattggaagaattccaattttaattatgaagataaatatcctctagaatctct

SEQ ID NO: 134977 - DNA, 373 bp, Glycine max
  unsure (1)..(373): unsure at all n locations
caaattttcgtagtcagagggaattattatntatgcccctaaagaattgtgtagttcgtatgcattgaacttgattttctttatcccctttaggcatttgcataccattctcattcttttaaaagcttctatcgcatgttttatctctttttaaaaatgaatgtagaatttccactgctagttggactgatgaaaagaactttgatcaatttcttaatggactgctcttttgggatttcattnttcaaatacgtcaatgtcttagatgtgatgaagggttcgaaaaatattgttcacatgtttccagctgaagttgttgagtcatgagtgggccagctgggccctgctatggtagtcatacgaaaatgatgat

SEQ ID NO: 134978 - DNA, 295 bp, Glycine max
taggacattgaacatgcaagacctacttttattctgatctgaagcattctatgtatccccacaatatcaaaagaacaatatcttcttacagatagataatatcgccagctgatcatgcctatagattaggactaaaacaactttatgctattaggcaacatgactttgatttttggtaaaagacacacgggacagttgatctactaatgtttgttagacagatcctacagtcacattttcaacactcctccttgactttggaattgcaaactccaagcttctgactcaagtattc

SEQ ID NO: 134979 - DNA, 306 bp, Glycine max
  unsure (1)..(306): unsure at all n locations
caaatatcacacatgcaaaatgatgacatcttatagataatagccttagaagttgattatcatgactcaaaattaaggggttcaccattacactatcatatcatttaaccacaacagagaatttaatacatagtcacactaaacttgagttacatcacatctacttatggcactaaatataaacattgcatgaagtatacatgcattcgatggaaaaatgaaacccttanggtgataagcattgatgccatcaaatatcagttgatttacttatcatataattaatcaatgagtacatcaactctt

SEQ ID NO: 134980 - DNA, 416 bp, Glycine max
agcttattatttgacatcctactaatgcttcttttaccaagttgactcattttaaaataaaatgaaacctctagactcaaattgtgacttcataccgaagtccacaatcaaatgaaatctcatatcttacttaaatcattaagtataaaataatctggaccaacaatattttatttatttaaatcttttaagattacagaaaactagacatgattttttaaaaagtattacagattaaaaagtggaagggaatatttgaaaatattatttgctactaactatattattttgtcagtagttattatagacaattaatgatgcattacaatatcaattaatatttgtgtaaaactgtttatactcgtaatatatattatatatagcagctcaaatatttactaaaaatttaaattgat

SEQ ID NO: 134981 - DNA, 312 bp, Glycine max
cggttcagggataaaagaatatcccacattatttccatgacacgcgcgctacattgatgattcacacaatttattcctaatctgtcctgcatgcacctattgggacactcaaacattaagttttgtgggcatgtgacacttaggctcacgattcattcttcctatataagtcaatccagtgtttacaaaacatgctcttttattaattcatgccttcattcgactcccttttgggtgttctggacaaatttcacagcgttcacccttcacgtgtatacatatttctataacacaacacttttgttgtttgat

SEQ ID NO: 134982 - DNA, 396 bp, Glycine max
  unsure (1)..(396): unsure at all n locations
aaatatggtagaggcagaaaactctgcccaaaacacagtcaaataccacagctttccctactcaattaccccagtaacattctcttcgttcctgttcgttaaccattggatcgacttaaaaaaattactggaggttcctagtacataaatctacatttttaccattgggatctgctagaaaatgtccagaacccactatgtactaccttttccataaccagcaatgcacaagcattntctgcacatgaacaaaattctgttgcacaaaatttgacagctttttgctgcacaatttggcagatttcaaaatccatcttacccacctncaattttgctctaattggatcctacaagtccttaatcatgtataaatcatatctaaaccaaaaacaagct

SEQ ID NO: 134983 - DNA, 240 bp, Glycine max
ccccacacggatactcttcatatataacagccttctgcagtcgtagagctcaagtgggtgcgcttaagtctcacgacttccacgttttgatgcaccaattgattggcatggtcatacgagacatttagcctaacaaaagcaagcttgccataactcgactgtgcttattcttgaatgccatatgctgcaaagtccatgatcttgtgaagttaaacgagctctgaaacaaggatgctttta

SEQ ID NO: 134984 - DNA, 434 bp, Glycine max
  unsure (1)..(434): unsure at all n locations
attccacgaaggtcagcaagtgtccacccttttatcttnttgttgcctctcaaaacatgcaacaacttatcctcatgctcaagtgaaaggctgctagatatgatgactgggagcttctaagcatcatctaaataggcatacttaaggtgctcangtaatggtttcagatccaaggaaggtgattgaacggtggaaggaaaaggaaggttgacaaccgatggaagagaaataggaggatcagaacctgcgtctgcatcacaatcggaatgaattgcagaagacatctcttcacaaatactacatagagtagtagactatcagaatcatcataggattagttaaaagaaccaatattaaagtcataanaattagaaanatcagaaagtaaatttgtacaaatatctacactatctactacatcatcaatgatatct

SEQ ID NO: 134985 - DNA, 422 bp, Glycine max
  unsure (1)..(422): unsure at all n locations
tgatgacaaaggtgatgacggataccttattgatcaatcaaataacaactcaagtaatttcatgagctcatgataagaatcaagaagaattcaagactcaagaagaaagttaagagtcaagaattaagattcatgactcatgattcaagaatcaagagaaggcgttaattaaaaatcaggttcaagattcatgaatcaagagaaggcttaatcaagataagtataaaaaggttttctctaaaattgagtagcacatgatttntctcataacatgtttaccaaagagtatttactctctggtgatcanttaccagattgctgtattgattaccagtagctaaattgttttgaaagagtttcacatcgatttacaacgtccaattaattcaaaagctgaatagacacaatgtttggtatcgata

SEQ ID NO: 134986 - DNA, 383 bp, Glycine max
atgttcaatcctcctgttatcgtgagaatcacttattattagtgagaaaaattgtctctgtgaagaaaatccaagccaagacgctttcgtaacgcttccgagacgtttctcgaggtgaattcgtgaagaatttccaccgttcttcatcgttcttcgttcatttttcgacgatcttcggtcttcaactggtaagttcccgaaatcgaacttttcaattcattctatgtaccctcagtggtcctcatttgttacgcgtgcttatatttttatttcatttgctttccgtacccccttatgacgagctttagtcatatatttaggtcatctttccgcctaataaaaaaaatagatttccaccgatcattcgtattgtgacatgcttt

SEQ ID NO: 134987 - DNA, 447 bp, Glycine max
acctcaccgttctattctaatttggatccttcagaagtagtatattccatcaagcatatgatcgcctcttcatcatctttatcagatggggtgtcatctacgtcttcccacgtgctcataagcctcttatcaactttagtcttaatgaatatcctcctatcctggcctattcactagaactggacattcccacttgtaaggtcctgacttttcgcactcatagtccattatagaacctatttctttgaccatcttgtctcgaggcattcttcttgaagagcttatgcacttggacccacttttgtttctccatatctagtcgattttgccagagatgaatgctaactcatattcatatgagtcctattcagattcatcatcagatgaatcattgactctaagctctctggaggagcatctctaaccttgttctttggacgatgattc

SEQ ID NO: 134988 - DNA, 332 bp, Glycine max
tttttaattatgcatcttgtctcggcatatgctctctgtctaaacacatactcgtggtgaagagagggtgaccctgcttgcgatgcaaatatatgagccggcataatcattccctccattcttattcagcaattgataaaccctttcttcgataagtaaatcgaaggaatactgcaaaagaatggtgttattgacgtattgaatactttctctactgagagacactgatggcataattattgtggggagagactttattttctcgaacaatccttgtctcatactcgcattgcctcattatatcaaagatgaaacagcgatatgaccaaatt

SEQ ID NO: 134989 - DNA, 314 bp, Glycine max
attatttgatttgacctttaaacttgaaactctgagactcagagagagagagagagaatgcgcacacaagcaacacaattcaatgcaccggtccattcccggcctccacttgatctcatcaaagcaaatattcaaggaaactttgaagagaagtttccaacccttttgttacccaatcagtctcatgatatatctcacctctctcttgacattgaaggataacaacaaattcagattcttaattccgctttctcgctccttttgtctttataaatattcctaggcggtggaacatgacactgcttaaccttctt

SEQ ID NO: 134990 - DNA, 348 bp, Glycine max
tactcatcataatttaacttggtgcgctatataaaccactgcataagctcgatcgcaagattaaaaagattcgatcactacatatgtggctcctatttgtgttgggaccaattccgcgacccaaattgtgagtcactattaaactataaaactctgcatttaacataaattcaaataacactcgttcactattgcataattaagtttaaacataaaattattctcaaataatattaggtcggtatttcgggtgctaaagaataactcattttaaaataaactttttcaaaaattgtcttcagttgctagactactcgctagttaatatgtatctaataatgaaacgta

SEQ ID NO: 134991 - DNA, 264 bp, Glycine max
gttgatatcatgcgacttagtaaatacccatctgccgtaaataatcagcgacctgattaggaagcgagacatggactactgatgtcatatttaagatggcaattccgcaagactgccgttaccctaaatgtttctttcaaatcatagtcactctagctgggtgcatactaacgtgatacgcaaagctttttgtgcgccgatatggtgacttgaacgcctccactcttaagcttaagttaaacaaaaacttgtcttgcgatttga

SEQ ID NO: 134992 - DNA, 301 bp, Glycine max
attatggggtacccatcacatgtggaactatgtttctgtcgggcgatggtgcacaacaagtttttcacattcacaatgcgcgcataaacccaccatactctgttgtccacctccaaatgagctcacgtactcccacgtagcccatattctctgttctctcaacaacgggtcctcatcaatcctcccaagctttcacaacatgcaaactaaacaacatttccacagtacaagctattacagtcaagctaaacatagcaaaggccgggaactctgtcaaaacaccaaccaaaaatacagcttt

SEQ ID NO: 134993 - DNA, 325 bp, Glycine max
aatattctgtcaaaaatgttcacaacttcatcccaatggcttaagctataacctatgaatgaatgcgaccacctctttgcttcttcacataatgaatatgaaataagctgagccgaatagcatcttctggacaccgaccatctcgacagtgttgcgtaactcaatatatgttgacagggtgcatatgggtattcaatgcgtagaccatggaacaaaccgtcatgtattaaccgaatcaaagaatgtggatatgtgatattgcgggcctgcacatctgactctgcaatgcttgtatagaactgtggcacaacggtgctagaataat

SEQ ID NO: 134994 - DNA, 261 bp, Glycine max
ttctgaagcgcgcccgcttagattttcttcacggaaacgatcttctccaagcaaattctaaagagagagaagtgcctaaggggctgaaccctcctctatttcacggtctcccctatttatagcaaaataggggagatgattgacgcccagctcgcccaggcgagctcagctagcccaagcgagccatgatgcttgcgccagagaaacagcactttggaggaagataatggagggcccaagttggcctgggtgctacttgca

SEQ ID NO: 134995 - DNA, 292 bp, Glycine max
gagacctgcattacacacatttcgtcttcctgttggagaatgcacaatgcccttgaaagatggggatctacatctaggtttaagcattgatgatcgaccaattactggccccacatatttctattgggaacaaacctgcacaaaatatataggtgttgttccaacaaataatgctctaaagggattaacacttatactaaagtggttaaaataacacatgttgactgttccagtaaaacccacacaacaacaactaacatgtcattgtatggcatacattttaaaggtgaat

SEQ ID NO: 134996 - DNA, 125 bp, Glycine max
taatttctgaaatctatgggattaagatggtcagtgaccaatccctatttatgattaacaacatgcctaatgaatggcaccttttgatggtgcacttgactgataatggaaaatctaattctttg

SEQ ID NO: 134997 - DNA, 319 bp, Glycine max
tgatgtcagtagaatcttcatgagtgacattctcccactttatgatgatgacaaccacctgtatgttagaagcaacgacaaaaaagaatgtctatttgcatataggttactcccctttggttttacaatgattgcttatatgaggcaattgaagatcttatatttatcatatataaaacgttaatagataattgttctcttattaatatatctttaatatttctctccccctgtgtgaacatcaaaaacgaatcatgaagtgagaggagaaagatgttatcacttgttgcaatgtttgagaatcaagtgatttctacta

SEQ ID NO: 134998 - DNA, 490 bp, Glycine max
cctattatactcagctactattccgtttagggatcattgatgatgcttgttatgtctatgtgctgcaattgctgatggaagaccgctagttatgaagggtagagttaacctacggttataaagtgagaatgttgtgttatgagtagaaaaagagtgaggctttgagagttggaaggctaaaacgggattcatgggtaaatggaggttaaagtgagtaattcctactttgaaatgtcatctaggacttatgagaaagcttgggctgtgcaagagagaaaaacaaatgaccaaagtgaaggcaagagccatttctagggtaaaattgtgtgttgaggagtcaaattatgattcggtagagttttcgtcgtaaaaccagtttgagcaagtttagattaaggttatagacttgtgtgaggtgagagtttgctctatatataccccattctcattttccttctcaaccttgaaagtcattaaattgagggtttta

SEQ ID NO: 134999 - DNA, 343 bp, Glycine max
ttcgagctctctttgctatcacgctaacgcttccgacatggtcatgttgacatctgtaacaacctactctctcgcgggaggacaacacggggcttgctggtgcgtcatccatgaaagaaaatgcgcgggtactccccatcgtttattcgacgataacgctaataaaaggggaaaggtgtgagctactaacattattgtgaaaggtatgcgtagtatatttaggcacggtgaacgtattaacacgctacgtgtgcttttcagcggacaacaacgtttaattatgtgtgcttagataactccaaatagtttatttcgcttccttacggtacatgacagaatttgc

SEQ ID NO: 135000 - DNA, 389 bp, Glycine max
tgacatctcaacaaacagatcgaaggtactatgacattatagctgctgatagaatacctcacccgctcaagtgtatcacacaatgatggcttttctctaatgaaacaatcttgccttttaccactctaattccccttgagttcttagacaattcaagagattatggccacaacaaagaacaattcaccaatatgcgtaaggtaaggctagagagacatggaaaaggttaaccaagaaaaacgctaacaatgttattatgcgcaaatgaaggacataaaattcagaatttaggaattcaattaacaatccttcatgcatccaatatattaccttaaagagatttttttaaaagttctttaagcatgaaccattcagcctcaatttttttt

SEQ ID NO: 135001 - DNA, 426 bp, Glycine max
caagtgtatcggtctctctctagtagcattaaacggtttttctcggtttcgaactcttcgagaacttgtgttatctggcaagctatctccataaataggtggctggtatgaaaatatgattgtggttatgaacaggtatttaaactatctaggaaaaaagaaagaaaatcactcaagagaaatactgtgtaaaaaaaagtagagaatgcattgggcttcctcatagattcctgattctaaaaaggatattctctatctaacagtgttcatgtgatcctatgttgtctcctggaatgctagacccggattcttcatgatagcctatcctagtcctgttcaagcctcatccgcagattcctcttgttagactaaactcaaccaagaccgcattaagacacacattcacaactaagttcttgtacccga

SEQ ID NO: 135002 - DNA, 411 bp, Glycine max
  unsure (1)..(411): unsure at all n locations
cttgaagccctgattccctttccgtgctttgaagctcactacaagccttaagtgaaaaaccgtgatatcaccatatccttaaggattnttggagctttggaattgttttgggaataagtgtggggggggttttgtttcattggataacttgttctgttggctatacttcatgatgtattttgggccatactatatgtacattgtatatcggttaaatgttggacatgctgaatgaaatgctgtttctcaaaggatatagagtaaaaaaaaaaaataataaaaaagagcacttaagttgagtgaataagatcttaaatggcaaaagaatgatgagactcttggttctactctttacntgttaaaattaatcttacttctctttatattcttattttttgtcttattatgcac

SEQ ID NO: 135003 - DNA, 419 bp, Glycine max
  unsure (1)..(419): unsure at all n locations
accttgaaactactcttagataggcttaccgacaaggagatagttttctaaaagaggcaaatctgattcatctactttgatatatgcctataaaaaactatggcatatgaagagggtgagaatgagggacaagcccatgctgtgaccgccattcctatacagctaagtttcccaccaacccaacaatgtcataactcaaccaattacaaaccttcttcttacccaccgcccagttatccacataggccattcctaatatcaaccacaaagcctacctactgcacttccaatgacaaacaccacctttagcgttaacctaaacaccaaccaagaaatgaattttgcagcgagaaagccttataattcaccccaattccagtgtcctatgctgacttgctctcatatctacntgataattc

SEQ ID NO: 135004 - DNA, 378 bp, Glycine max
  unsure (1)..(378): unsure at all n locations
atctttattgccgatagtcctgcatcatctggcttgcactcctctcatatccatttttggatcagtgtatagggcgcctctgcgcttcttattattgtgaagttcctaaagaatcaaacaatggtgagtatgctcacaaaacatgaataatgctatgaatgatctgagcacttggatccacctcaagattattagataacgtgatgagtttcataacttctcattgtataaataggaacaaagcttttatctagccaagatcatacaaaatngttactacagaacctaacggtttctaattatatgngccatctaatctatcatggggtgacagtaaatgattattccgcgaatttcttatgggcttacacacttaac

SEQ ID NO: 135005 - DNA, 271 bp, Glycine max
aatatacacctctgaattgtatagacagacacatactcctaaatcgtaagccggatgaattaacccaaggcctaataatatgctattatgcccccaatgacaaaaaccttgaactctgcaacaaggaacaaatagtgccctcatcttatgcgctcaagcactcgctgaaaataaagtatttcaaaatgtaaccctgtctcatataatgtacacatgaacagtaaacacatagatccaacgaataagatggtaaacgaaaatactttaaaaa

SEQ ID NO: 135006 - DNA, 213 bp, Glycine max
gagtgagtagagagagagatttgactcgtgagaaaactgccattggacacccttcaatgtatagtgagcctcatatttatataacatgcgtttagagagttgtgcataagagcacttcccctcacgctggagccttaatataaaagaaaccacactctctctattaatttgtgtcgtgcaaattacatttcttaatcatgctggggacattga

SEQ ID NO: 135007 - DNA, 409 bp, Glycine max
agcttgagataaggccttcgtcttatacgctagttgtcgcttatatttatggattatgacagaggttcaacttttagccctgacgatgttgatctgactcaagatgaactcattcataactttattcgggggcctacatggtcacttcattgtatttctattttacaatttttaattgccatattgtatgattcttataattttcactgccatgagcgaacatgatcccactcagccgcaatttggtaggattgggtgagatcacacagcaactcgcgtaagattgctgggatcttgcaatctcaccacacctgaaatataatccaatgtgaggattttgacctgcaacctattttgcaacatgaatatgcagttaggtctgaatctgaaattggaaaaatctaccccc

SEQ ID NO: 135008 - DNA, 190 bp, Glycine max
  unsure (1)..(190): unsure at all n locations
cccagtggagtcgccaactgtcgcaacgtgcccttttgcgggcgagcgaggcgacgctcacgggtgcgctnttcaaaggaggaaaaatgcgcggagtccccaccaacgtttatttgtggaaaacgtcggaataaccaaaggaaaccaatcgaaacgaaaaatctaagttcgggagttgtatttacgtttg

SEQ ID NO: 135009 - DNA, 337 bp, Glycine max
gtgaccacagagtggtacctggagatatgtctcgggggtcaagagaccctggtgaccacatgtggtgtgctattgcccaaaaccaagcttgaccaattccgacccaaactgtgtataatccgtcattgagaacctgtgatgtacctaaacaggcgagctcctggcatgctacagattacaggaatacatcaccaccaagcaacgatgctttgggtggctggccaactgtgaattctgtgtaatatgtggatggtggcctctggtgatcgattacccacggtgggtcatccaatacaaggcttaatatttagggcaggaggcttatatggtctcttgt

SEQ ID NO: 135010 - DNA, 384 bp, Glycine max
  unsure (1)..(384): unsure at all n locations
tggttttgggcaatagcaccccacctgacgtctccaatgtcttctgtaccccgcgacatatcttcaggtaccactctgtggtcgacaatacaagcaggaaagntttacccttcaacaacttcctcatctcaagcttgtaggagtatggggtacctcatccccctggttatgcatatcagtgggggttggttgaaaaaaatggtttccgtgagaaaaatccaagccgaggtgtttccgcacgcttccatatgtttctggagcaatccggaaggtttccgtgttttcacggtcttattcgttttttttctaagtgggaagtttaaacccgaacttaaacaaatttggttgtaagctcaaattttactgaaatgcgggttatttttc

SEQ ID NO: 135011 - DNA, 412 bp, Glycine max
gcaagctctacaaactattgtgatgcaaatatgcttatggtgaaagtgctataccgctgttattgcatgaaacattatccattgcctaagaagagatactgactaaggaacccaacttacagactaactaaagtatccaaaaaggataggcaggaaccactatatgcagggaagaaatggaccatacctgcacaggtggaaaactaacttttccaatatgatcttcctcagcgaaaccaaagatgccaacagcctggttataagtaacacgctttacaacctcacacatgttcttgtagaaggaactggataggaaaactattctcagaaacaaaagagtgcctttctatcaataaattaaacaagagtataacagcgtcagagattgtgaaatttttcaagagacatttta

SEQ ID NO: 135012 - DNA, 132 bp, Glycine max
cttgagcctatgctcccctttctttgttttgattctcattacaagccttaagtgaaaaaccatgatatcaccttacccttaaggaattttggagctttggaattgttatgggaataagtgtgtgtgtgtggg

SEQ ID NO: 135013 - DNA, 286 bp, Glycine max
  unsure (1)..(286): unsure at all n locations
caaaaannaaaaaacaaggagaggaggaagaaaaatatatatataaagaaagaaaagaaaaaaagaaggaagggaaaaggaagaagcaaagtaagacgaaaaagcagagaaggaaagaaggcggaggaatgaaaagagaagcaaagaaggcgggtgaataaaaaagggaagaaggggaaatgagggatgcgaagagagggggaagaacagagagaggaagaaaaggaaaagaagggaaagagaagggaaaagagaagagagcaagaaaatgaaaaaaggggggggg

SEQ ID NO: 135014 - DNA, 239 bp, Glycine max
  unsure (1)..(239): unsure at all n locations
atcttgagattgagacacatgcttcagaaaaagcttctcctctcaagaactctcatgagtttgnatataaactaacagatccctcaaattatttgtaggagcttgatgaacggtatgattattataacggaaaaagaatttatctatggagagagtgtgctcattacaccatgattataagatctcaaaatgtgtaacataaactttggtggaatgggaaaacacaaaaaactgtgaaa

SEQ ID NO: 135015 - DNA, 355 bp, Glycine max
taaatgatattgagggcttgcccaatccaaacaatagtgaggggagaaattatttttctatctatggcggtagaaacaccatcacaactatcatcttgttagatagatacatgagtatatacccgaatattggtattgatccatacaaaagttctcttcattaagttcactgcatttgacatggtttttaaatagaatcattagttaccgaagacacggcctactaaaaaatcggttctacaatggctataaggacttccacatcggcattaaccgaagatgagagtcccacggtgaaggaacaccgttccttatacatttccaaaccggatctatatggttaccagatccggta

SEQ ID NO: 135016 - DNA, 446 bp, Glycine max
ctcacatcgaatattatatatttcattattcaacagtgtcattcatgtattcaagaaatagttcagatggggcaagacgaaaattgtatccaaccacttgtgcattgttataattataataataaccctaatcagtgtgaagaagaaaactagtacagttacgtagattccttttgtcatttgaatccaacatgttatgcatatcttataatggaggaaaataatccaaaccacaaatgcatatgttattaatccaacaagctatgctcaaagtgcaccattcctgattcaaaaaatgaaaccaataccaccaataacattaactttcttagttctgtgacttaagttaaccacttggccttcaaatcactttggcatattcaacgatgacattgttatggcaactcaacaagtcgataatcacattttaaaagtcctacttaagt

SEQ ID NO: 135017 - DNA, 214 bp, Glycine max
agttttttttctattgtcaaaagttcagaaacctgtgggtaaaatattagaaacattatgcacaaaatccttttctccagtccttttagcctctagtgtatatatgtctcatcttcaagtatgtgatggttcgcaacggataaaacttcacttgatcgttttctgataagaaaagaatgtcattgggtgcatttaatgcacgtactgttctcat

SEQ ID NO: 135018 - DNA, 445 bp, Glycine max
agatgggagaaacttcaagcttaacataggatcatcattgtgacaattagaaggcaatcaaataaaaatgaactctaatcaggaataattatggacagctttcagaatctaaatcagcagaacaaccttccagaaaaaacttcaaaattccattgaaaacctgagaagttgaaagatttcctttgctgaattggttctggacaccatccttataagtaataacaaaaacatgacaagtttcttgattaaaagtgaaagctttccttttcaaccattcatatatcataaactgtagccagtggctgtgggtaagttagtattacatcactctgttttcctttataagagaaggtgtcaaatccttatctatgatcgttttaactaaaaaaaatggtttttgttatgctcacattgaaactgaaaaccttaaaaatatgctattttg

SEQ ID NO: 135019 - DNA, 401 bp, Glycine max
ccttcttgttgtttcatattaacctcttgctctaaatcaccattaagaaaggttgttttcacattcatgtgttgcaactcaaggtcaaaatgatcatcttatgcttagataatacaaagagaatctgtcttaaatataggagaaaaagtctctgtgtagtcgattccctctttcctagtaaatcccttagcaacgagtctttccttgtatctgtcaatgttgcctaatgaatcccttgtagtctcaaatgtaacatgccatttgtcgtgatttaatttaaaaggtttagagtttagaaaataaatgatgacgcttttgtattaatttatatataaattcacatttataatatggtttgaagaaataatatgatattgatttttcattgatgaaattaaata

SEQ ID NO: 135020 - DNA, 390 bp, Glycine max
  unsure (1)..(390): unsure at all n locations
ntaaaaagttaatatagtgaagcaagtcatgcaaccaattcttgactcagactttaccctatactgatcaatttcagaagatgctaatgagatcactccagcaagtgcttcaagtgctaatcctgtgaaatgcatgaaaagtttacagtataattatagataaacagcaatatttccaagaatgtcataattctagtttcaactttcaatgcagaaaacaaaaaatcttatcacattgccatatatatcattaccagcagcatatgtactagactctggattattagaactataacgccaccttccatcactttggctcatagcctgccaattaatgcatgacatgaaatcacattgcacatgacagttcaaattgcaattacagcaaca

SEQ ID NO: 135021 - DNA, 326 bp, Glycine max
  unsure (1)..(326): unsure at all n locations
acactttgatactaacctttcgcttgtaccattaaaaacttgtttctcgactttgtcttgatcatagagaacaacgtccgttggcgggtcttaaccctgtgccttcatctcatttgacaattaactagcgaagcatgaacctttacaattgtgggttatgctcatcaacagagacagatgagtataccgtgcttttcactttattgcaactgcaacctgctatcttnttcatgccacgagcttccaattgcttgatcacacttgtgcttcactccacatcgtagcctgtgcattatatctgctgatagcacataatttccaacatt

SEQ ID NO: 135022 - DNA, 253 bp, Glycine max
gaattcttgcatgcttggtgcatacacaggaatgttgaaactgtctcttttctcaccgctaattaatccctgtgattaatgtatgatttttacatgttccttatactatcacttcataatattacaagatacttttgctgtgattgttgaaaagcttaaagagacaatgactgccattctataccaattgtaactgacactattgacgctatcccctctttcttttctttattttatctgaaaatggacacac

SEQ ID NO: 135023 - DNA, 380 bp, Glycine max
ctggtagagatgcctctgtcactaccgaactacacacgtgagtctgcttataggtaagggatgtgtttattgcaattgtagtttgaatgaacatgtgtagagatccttagaagatcaaattagaatttattttgggatgttcactatattgtgattcttcctttatgattacaattatgagattgttgtgtttgacgggccaattgatgcccatatgcaatttggttgataaaattgagtgctcttggtgttttcatgtttttgacctatgattttgattcctttgattttgatatgattatcgtgaaatgtttgaggggtttaatcatatgaacataacatattaatattattattgtgtgacatgtatataattcatg

SEQ ID NO: 135024 - DNA, 421 bp, Glycine max
acacaaaatggatgtactaagtatttattacccatacttcacagaatatacttattacactgcaaaataatcattaattggaagagtttcataaaacttacacaagttttatacacaaaatttagtcattatcaccgactaacaactacctcaagtttacagttttgctcgtcctcaagcataaagagaacaactcacttgtcctcaagtgacaatgacatgcattgactatgtacaaaagtgtatgcgacataaagtactcgatgcatgataagagaatggagtaaaatgccctcatcacttgtctttcacaatgtatgcagttattcatagagaagaatataatgtaacctgaacaattagatggagctaatcatgagacatatattcatgaaagtagcttaaaccacagtctcacgac

SEQ ID NO: 135025 - DNA, 346 bp, Glycine max
  unsure (1)..(346): unsure at all n locations
cacccgacgaagacactgacaaaaacttatcttctcatttttggacaaagtatggcaagctgggggcaagtaatatttcttcccatcaaaccttggatgcaactgtgatcgtatccccatatcagctatatcttgacgggtattcaagccatccttcgtcttgccttgaatgttaatgagcgtcccaatcacactgtctcatacatgtttctccacatgcataacatcaatacaatgtctaacgtctagatcaaaccagtacggaagatcaaagaanatggacctcttcttccatatgcaagtcttactgttatacttcttttgggtatttacaagtacagtattc

SEQ ID NO: 135026 - DNA, 449 bp, Glycine max
  unsure (1)..(449): unsure at all n locations
gctgggaaagagtanaaagcagagaaagaaaggagcacacacgtgacacaactttgttgatggcgtatttgctataaaaccgcaactgagtgggcaatttccaaaagtcttcaaacaattagattgttttcaaacaacatgtagttaactatggataacgaagcatgagtagtgttaatccaactgttcattccatacccatcaataatgctgcaccacaattttattttcaaactatcgatgtgtgctaatccatgccaaatatattgtgtgcctcttactgcatacaagagacgcagtaaagctaagtggtgatgtgagataaggcaattgtcccattcaattcaagtgggtttcattgaaaatgaattaccttcaatccctgtacattttgcaacgaaatatgttatacattgtccaatattaattaactggtacatgtggattca

SEQ ID NO: 135027 - DNA, 343 bp, Glycine max
  unsure (1)..(343): unsure at all n locations
ctctactatcgagttgatccaattgtcgactaagaatcgacctacaccatgatcttatatgtccaagtaccgtcgatatcatcgagttactagtcacaacattgaaaattgtagtacccttaaggataaaatagaaaaattgatccaaaaggggcatctacaaaagttcatcaaagacccatcacgtgataaggatcgtgaaataaagcaagatagaagtcgagaacataacagaactcatgatgcaacgaaaacacaatgttatggtgagaatacccaacttgaaacttggcttcaatgtgtaatcaacacaatggctagaggattcgtggngggggggggg

SEQ ID NO: 135028 - DNA, 399 bp, Glycine max
  unsure (1)..(399): unsure at all n locations
tttcttagtgggttgatgaactctgtcgcgcacaatggcatgattgttggttgacatattctcaattaggtcagttgcctcttcangggtcttcagctttatttttccccctgctgaagcatctatcagttgctnggtttgtggtttcagtccatcaataaatatgttaaggtgggttggctcagagagtccatggatgggggtctttcttaacaaacccttccaatgcttcacttatggattcatcanggaactgatgaaatgctgaaattgtatctntcccttccttaatctttgactcgaggtcttcagactgtcacccttaaatgaatggatccacctcttggcttttcctgccaaggaaaatgaaaatangctgagtctgatggcgtcatctat

SEQ ID NO: 135029 - DNA, 340 bp, Glycine max
  unsure (1)..(340): unsure at all n locations
aaaaggttcagccccttatgcacttttctctctttcgaatttgcttggaaaaattgtttccgtgaagaaaattcaagccaatgcgctttcgaaacgtttccgtaacatttccgtgaggaattacgcgaagattctcgaccgttcttcaagattcatcgttcgttcttcgttttcttcagtcttcaacgggtaagtacctcaaaccatgctttgtaattcattctatgaacccgtggtggtccacattnntgttcatgtatttttcttctcgttntcatttactttntatacccacttttgacgtgcttaagccatttattcaagtcatttctcgcttaat

SEQ ID NO: 135030 - DNA, 403 bp, Glycine max
  unsure (1)..(403): unsure at all n locations
ntaccttatcatattcttctgtatataaatcacgcctttgtttatattaaaacaaaagaaaaaaatcaatatcatcatttacgagagagaatgcacacaaatctcccactcgatcttaagaagcattatatatagttatcaattagattactaaaaatcactttatctcgtttcctttntattcctttaattataaaaatgagttagattaacaattaattaaagacagtggccattgctggtctgaataaaggccaacattggttggttataagtggatgtaaatcanttgctctccgttttttgtcttttcaaattaaaaagcaacatatgtgattagaaagtattaatattttcttttttgattttaagttttttattaaagaaatgtctagtttttaat

SEQ ID NO: 135031 - DNA, 387 bp, Glycine max
  unsure (1)..(387): unsure at all n locations
ntacatttctaaaggggcttaacatggagaaacttctttatattggaaatttagaatggtgattgaggaggatatgcacacacacatcatcagcagaagagtccaaacacttcaaaaaggagacataatggtttcatttatatctctaacaagctctcacacacaagccatttgggttttgaaatgtaataaaagcacaacacaaagaaattgaatgcaaactggtttcattttgtgctaaaatttactttattaatgcgaactgggcttataatatgaggatcgattaaaggggtgcaagatagaaattaaatatgattacatacacagttctaaaaagtaagggtaaatctaacatatagtaaacctttgcttgacgaagttcat

SEQ ID NO: 135032 - DNA, 388 bp, Glycine max
  unsure (1)..(388): unsure at all n locations
gggatatttctcatacacaattttcaagtattttgctatgttcatatatttnttaaatttctctttcagtgccacacttggttttaatttttccatgctatctcattgtagattaaatatccaattattagaaaaccattaatcgtgtagtttatagtagcattccacaacaatagagtaatcttatatacccactgattnttttttgttctttcattcatgtagtttcattttctttttcctactatgtttttttgcatgacaccatataagtgcctttttttttttaccacgaacaatgggcaccggaatatcctgaattggtccagttcagatatgatggagcgacgtaccaaatacgagttaacaacatcanggaaaagtcttc

SEQ ID NO: 135033 - DNA, 433 bp, Glycine max
acttaaccgatcagttaagctgttatctcgcctaataagtgataaaatgaatttcaaccgatcatttgcgttgtaatctcatttaatcactgttaaaacaaaatctaactgatcgttcacactgttaccacgattaaaccaaaaaaaggcaaaataataataaaataatgaaaatatcttgaaaaaataataataaaataataaaaatatctttgaataaaataatcaaacaaatcaatcggacgtttttcattggaagtttccttgaatgaattgactaataaccaaagtgaaattaaggctgatatcaactcacaaatcaagctgtgtccgtaaaaaatcactaataaccattgtaggtccaacgccttaaaacggtcctctttgcttttatcggttaacatggaccgttcaaaagcataaaatcaacatg

SEQ ID NO: 135034 - DNA, 458 bp, Glycine max
  unsure (1)..(458): unsure at all n locations
ctcttatctaaggctcatcttggtggtgaagctccttcttccatggcttattccttaatggatggcgcctgctctcacctctttttctttgtcttccgctgcatctccatggtggaaaatcaccattaaaggatcccattgtagctcaaagatccatcctccatataagtcccacaagcaagcttccatcaagaaatatgagaaaataatggcacatcacacgctgaatgaattaattcaaaaagaagaaacatatagtaagattaatgtactcggtgcgataaagactngaccagatgtgtctgccaagcaaggaatgtctaaattgcctaccccacttatgaaacctcatgagtgggtacatgaactgaagcatctgcatctataacctcctccacaactacctttacttggccaggcaacaaatgagtgttatgaacaatagtggatccctcata

SEQ ID NO: 135035 - DNA, 315 bp, Glycine max
tacctaacttggcttactataagctgtatcgaattttgctaaattatatagaaaactgttcctaaatggacactatctgtcgacttttagaaacagatgagggtgtgtataagccctatcccactggatttcttgttatcctgatatgcctctttatcttctgacatttgatttatagtgtaattactattagctataatgctaactgggttcgcagccaaataattagagccaagttggtcatttacagaagaaattcccaccattttagagacatctgggttaacattggagccagcgattattttgccattt

SEQ ID NO: 135036 - DNA, 321 bp, Glycine max
cggtgattgcacaaatcaactatcccattttcacaagtttggcattatcacaccatccccagttgcccaccttttaattgatctcacgcactcctacgtatcccttattctcgttcctctcagcaccgggtccccatcaacccctccaagctttcacaatatccaaaacaattcaatttcatatggcatgaaacttcccttaaccaagataaacagagtggatgcagaaaactctgctcaaaactcattcaaattccaacagttttgctactcacatacctcattaacattctttttgttcccattcgttagccattggat

SEQ ID NO: 135037 - DNA, 379 bp, Glycine max
ggacgaatgagaaaactggggaaaatgaaaagggtgagaatgatggagaaacccattgtgtgactatcattcctatacagccaaatttcccaccaacccaacaatgtcatttctcatccaataatcacccttctccttacccaccacccatttttccacatatgccatcccttaatcaactattaaaacccacctaccacacatcctatgcttaacaccacctttagctagaacctatactccatccaataaaggtatttggcatcaaataaacctatatatatcacccttattccggtgtcctattatgacgtgctcccatatccactcgattattaatggttgccatacccctgcttggttcctcaacctcattttc

SEQ ID NO: 135038 - DNA, 461 bp, Glycine max
  unsure (1)..(461): unsure at all n locations
aaactatactatgtnntcagcagatatgaaatattattgctcaacaaaatatggcatatagcacaccacatcattacaaaatgtatgaggatatgtaaatacatccttcaaatctatatcaattcatttcangggttatttggtcaaggctcttttgttccacaatttcaccatgaaaatatttacaaaacaaaatagaagtaattacttaattgttgaatcaattcacaacgttcttagaattaaacaataaaactcttaaggatggtaacaggtctaacatgatctaatgaccctgtctatccaaatcaaaccaaagaaaaataaatcatggttgattaagtcggtttagttcaaaatttaaaattacaaactctaccttggttaaatattggatttgagcaggtgtgattcgaatcaatctatagtcattattttagaaaaaaaattaatctcttatg

SEQ ID NO: 135039 - DNA, 274 bp, Glycine max
atactttttctatttatcttgcttatatgagatgagtatggtctttactacagtcatatgcattaatgattacttcacacaattttttactgcattgccataggaaaatatgcttaattactttattacttaggtttgaaccgtatcagacacctattggatgagagacattgattagaaaaatttatgttctttttgacagtaagtatattacaacttttctcttaaatattgcaattaagggttaattatttgtcaactctaggaaaatgta

SEQ ID NO: 135040 - DNA, 322 bp, Glycine max
tgaatattcagaagtctttgactgattattttttcctgttaaggtgccatcatttactatctttgtacactattttttgtgagcggatgatattattacaccttaaatgcacaccttccagttataaatcgaaaagctacggttcaatcaacttatgatccatgaaacacttatggagcagatgcgacatatttacctctgctgattttgcacgtcttcttgtaattaccattctagatgtttcagcatgaatcttgtactaacctatggatgaaacagtgtgcgtctatacattatttatccgtttacatttatgtctcat

SEQ ID NO: 135041 - DNA, 322 bp, Glycine max
  unsure (1)..(322): unsure at all n locations
gacactttatactcagctngatgattggtctcaccgatgatgatcgagtgggtctataagagcaaatgtagtcatgcttgctggatgaatgataaaactggggcatatgaaaatggtgacgatgaatgaaaaacccgtgctgtgactggcattcctatacagcctattttcccaccttcccaaccatgttgtgtctcagccaataacaaaccttctccttacccaccgtccagttattcacatatgtcatccctattataaccacaaagcctacctaccgcacttgcaatgacgaactccacctttagcatattccaattct

SEQ ID NO: 135042 - DNA, 423 bp, Glycine max
accttgtgaatgaatggcatatcctttgcacccatgatttgtctgaaaatctgatttgttgattgaacctcgatcctatggattacatctccatctaccttgtcttatgttgtaggagagcattatggttcaaagcaatattctcccaaatttgggggagtttattgggtgatagctttttatggtaagaaaatatcagcacacacagttagtcaataagcagcaagtaaagagctgctgttcaaaataaataaactgtaagtattcaaaataaaagtgtgtgtgctgttatctaataagaattgaagccaagtgctttaaggcaagttattgaagctggaaattaataggaaaaacagttatctaacgatggatgctcttctataacttaatgccttgcatcctattaataccatgatttat

SEQ ID NO: 135043 - DNA, 407 bp, Glycine max
  unsure (1)..(407): unsure at all n locations
ccgtttttattctataactttgataagttgataaaaacttgatgattgtcaagaattgaacatatatagttttaaggctaanaacgattcaatattaattttttgtgtgctttcttgtgtgattgacaaagagttttaaatttgtttttagatgttacatcttctttctaagaaaaatatctttcttatcgtctaatactttatattcatataacgataaacatgttttacaatatttaaaaaaattattctgggaagactcatgatcacaataatattttaccatctatcctgtgtaaatcatcattacacaaaacatatgctaagacgcaaaatatttaagcttttgtgtgcaaggatgaacattttatccactacctattattcatgacacaataaataatctt

SEQ ID NO: 135044 - DNA, 275 bp, Glycine max
  unsure (1)..(275): unsure at all n locations
agaagtgtttgataatgtgatcganatcatgactgaaaatgttagttagtntgtcagattgattgttaaagaattcattgaccgtatcccgatgagagtgtgatccttaaattttgagagaaacggctatcatttagtactgagttttacatgaatatctgaagtatggactgaatgcatgaaattgacgatgatgaatgccatgtttgagctgaatgaattattgattgattgaaccctgagcctatacagtgttatctcctactaccttgact

SEQ ID NO: 135045 - DNA, 340 bp, Glycine max
  unsure (1)..(340): unsure at all n locations
tatttatttttggatgattgaatnttaaaaagtaatacagatgattttatttgatttattcaattactagataaaattgtatgttactattgtaagtacaatctgcatgttgtagttgatgcttcaatttagctcatcttgtgtatggtgtaagccatccttttaattattgaatgtgtaaaattgcacataatatccaagccaaataacaattaaattaattagaatttacttttgtgtaagaattttttaatgtcatttatttaagatgatatataattaaaacatcaatattgtgttaaagttatatttaagtgttaaatattatacctatgttaaa

SEQ ID NO: 135046 - DNA, 431 bp, Glycine max
ctgcttatcctcgtgtaaatgaattatccaccgcttcgttagaagatcctgctgtttgaatacttgtaacagtttaatttcagtttggggatctaaagtcatagatgaaaatattgcagtcattggcattaaaaattgtgtatgtactttaatcgaaagatatttgttgaaattgatatccatttcctagtagatagctcttccgttggttttatactcttgtacaaagagatttgtgaatacagtcaccaattcttttcttggaccgattgttaaggtattctgttgcatattaaggtttaccatgccatgatgatagtagtataagttagccctagtctgacgaccctatcattattttcgattaccaccaaccgttacaacaatattgtctttgctgctctgcttcattgatgagaaacattattctc

SEQ ID NO: 135047 - DNA, 422 bp, Glycine max
  unsure (1)..(422): unsure at all n locations
gctgaactttatcgaattgggctgtttttnattaagaatgttttcttatttagatctgagatcacactctaattcaaaatcttaagattcatgttcatggatcttctccttaacttatatgatgtttaatcccttatacctgatgttatggtggttaatctcttctaatcgatgtaaaatttcacttcacacttgtattagaaatatgattaagcagaagtctcaattatacatcagaagaggaagtcgaaaatctaatcctttaaaatggttgaattgtaagttattcgaacatcggaagtgaatgtcttgcttaatctgttatgatttttcttttaacttgtttccttcaaatttgcatgttcccatgtttatctctatcatagtcagagcttccttcaatactgaattcaatagttaat

SEQ ID NO: 135048 - DNA, 286 bp, Glycine max
taacaatggcctcttccatactatacataaaactctcttctttatggtgcctaaagtggacaagttcctttaccatcctgctaaagctatatatacgcctattacaagtcacgaatcatctttcaacgtgtgcattgcctacttagttttggtcctaacacgagtgtcattcattgatgactggacacatccaatatcaattaattgggttctcaatattggtcaaaataactgagagcacaaaagctaagttgggctcatctgcgtatgcattctaaacagcaca

SEQ ID NO: 135049 - DNA, 387 bp, Glycine max
  unsure (1)..(387): unsure at all n locations
atcatgttgaagttagtctccagatctttttgttgtttctacctcctgcctcgactttttgtttgggcattcccctttcgcattctatctacccctcttgtgacaagaatatgccctaaatcctctaccctcatacttcaataacaactccccttcctgcttattctatatcctccctcttctacacttctcacacaagttgaaattattnttctcctatcctaatcctaccaccaccttcaccaaacccaatgccccatttatgtgttcaaaccccttttcaccctctcgcaagtcatcatgctgttctcatgtgctcaaatccctcattcttcttgcaaaatacccatatctgcatttcaatcaaggacctatgttatgctcaat

SEQ ID NO: 135050 - DNA, 276 bp, Glycine max
ttaatcctataacgcaacatggcagacaacgtggctgacaaaagggatagttaacctgaatgatcattattgtcaatgcgcgaagtattctgcgcttcactatccatgttcacacattattgcagcttgtggtttcttgagcatgaactactaccaatatatatattgtgtttacacaaatgatcgcatcttaaaagtttactccgcacaatggtggcctcttgggaatgaagcggcaattcctccttctgatgacgcatggacacttatccctga

SEQ ID NO: 135051 - DNA, 450 bp, Glycine max
  unsure (1)..(450): unsure at all n locations
ntatgcatattcatgattccttcaccaccccttccttctatgatatgattttcaatnntacaaatcaatatcccatcccataaattgggttcagtaataagatttgactcaatatgggcaataaacaacattctatctacccagcgctcttttagatgatcttgatgtatcaacaacattaacctcactcaactgatgtcgctttagtacttcctgtctctgtgcctcctgcattttataagaaatcgcaactcatgacttgcaaaataaggcttgttaaataatcataaaacagaaacagttgcccaatctctatacttcatgcttaaggtcatgtctggataaacttctncataaacacttacgagacaaggaaaaaacanaaggaaaatgaattgaattttctataagtaaaatcaantatgcatctcattttagataagaaatata

SEQ ID NO: 135052 - DNA, 428 bp, Glycine max
  unsure (1)..(428): unsure at all n locations
taccttgaagagaagttgtatggcacgacaactctgaaatggaaactccgtggcttgcgtggtggcacgaatagacgatacgccggacgcacgacattgtactacgcccttctgncgatgtcacaagggtgcgacaatgtatgcaaacgacagagatcacgatgaggtgatagcagatcgaaattttagacaaacggtgaagtgggagctcgagctatggcgagggtggagtgttcatgaattatcgtgcaatagcttataaacctcaatgttaacgacagtgggtcaagataaacgtcgttgacattcaaaatttctacgacagtggtttcaaatacactgtcttaacttacctgctgcataacctacatagacatgctacccaatgaacgttgttgaatgtgtcacgcatcgtgcacatggcacat

SEQ ID NO: 135053 - DNA, 385 bp, Glycine max
tcctctgctctcccctaagttttgggacatcatttcaccatcacccaatgcatgtgtaagtataaatatttccttcctcttgcatgtggttgactcaaaattactctaatggccacttgttgctttatcatatgttttagttattagagagaaacttgctgagctttatgaatctgtgaaacaatggtcataagcagctcatatgcatagtggtattgacctcgattcatgaatgaggtctcatatatttttacctcccatatttatttcttgtgtaaacgattatgattataattcacccaatatgtaaaatgtctctcttctacattattgtactttcactcattttatcatggtgatggatgatgcattcaggttgtcaaag

SEQ ID NO: 135054 - DNA, 441 bp, Glycine max
atatatggttggaaaatctggtttgttattcacaattatgaaggtattgtagattcaacaattatgaagtctaagaacctaaaagttacacaaaaataattgagatataagtcatgagataatggattttgttataattaaacatgaagaaagcatagttagaaatacatgcaaatatcaataattgctccgtaaattcaataaaatgcatatacatagaaatttaatgggttttatacactatactcattcattcaaaactatattttttatcacaacaaatttcaataagactattccactatgaggtgtagcacatgtccttcaatatatttctctttgtgagaattcttatctagtcttaatgtagaactagactatttcactgtgtgagactcctcacctatcctatgattatttcactagccttctcacatagtc

SEQ ID NO: 135055 - DNA, 397 bp, Glycine max
  unsure (1)..(397): unsure at all n locations
gcattcacactgttatcattctctggccatnggataaagatcatatgattcatactttatgtttataaatcagatataaaacaaatttaagatctgaaccattcaatcttcatcaaaaaattataaagcagtacctgcatgaatgtgtgtgatatgcaagtgcaccgaatctatgtccccttcaacacaatcaacctaccaataacaataacaagtccaacaacataagttgcaaaaccaagccttcctttccttactcacctcaacaacatcacaattcccaacacaacacaatctctgaacccttccttcagtggtccctactattcccaacaccccatcaacacgttgcttgcataatactcactttcaagatactcactctttatctcttttc

SEQ ID NO: 135056 - DNA, 331 bp, Glycine max
ttgagcatcagtttttggaaacaaacttttcatgtgcagcgtatataatctactatcaggtatatataaaatacggggtatctcatacgacgacaacaataatgcattattccatcttgataatctactataaaataaaaacagtgtgtggcaataatataatataatggcttcactatgctcaaaatttagccgcaagcataggcagcttatattgcatagaagacatcggatctgataggcacaatgatctgcatcacttatatgttcagtccgtacaaggaataaccactccaacttacaccacctacaacagtaatggcatttctaa

SEQ ID NO: 135057 - DNA, 348 bp, Glycine max
  unsure (1)..(348): unsure at all n locations
caaatacccatgcgagaatgcttgtttaacatctaactactccacgggaagatttgctacaacaactatactcagaataacttgatggtagtcatctttacaactagagagaaaatctttgtgaaattaattccttggttctgctgaaacccttcaccacaagtctcgccttgatcttcttttaccgacagattcttcctttatcctatagacccacctattttgtaacgctttatttacttctggcaattttgtaaagaccacgtcttattcttctgaanggatgtcatctcatttttcaatgctagtctctactcaatagtgtcattcccctacgtagcctcactg

SEQ ID NO: 135058 - DNA, 326 bp, Glycine max
ataggccgaaacatctttctttcatcaatgtgcacaccggtaatgttctctgggatgtacatgcgcctacacatgatttatgtctggatgataccttagcttatcatccacccattttgccacccatttcatttgtagcctatttatggttgaagacccttccacatatgtgctcctccaaaaaagtcttgattttgaagctgtttgtaacctcagaccatgaacaaaaactttcccatgaaacatcaacttgtttcaatgtgctctatctcgattggtgtctactcttatacatttcatcatggataatatgatattctctcatg

SEQ ID NO: 135059 - DNA, 370 bp, Glycine max
  unsure (1)..(370): unsure at all n locations
ctatcttacctatctatctcccagatgtctttgcaaagattctatagataaaaaacatggaagtctaattcaagatgttttacttgttgcatgggcattatgcaatcactctatgtctagcaatgattgtattaatatgtccctacctttgagttctactaaaaattatcctctctcgagcgactaatcccttaaactgatgcatataaaaccttcaatgtatgtctactaatgattaccctctttcaagcgccatacccctaaagatgatgcaaggatgaaacatataatacatttgttggcattttatgcctgccaagccctaactaaaggggtntatgccttcattgtcattgagagacctttacac

SEQ ID NO: 135060 - DNA, 415 bp, Glycine max
  unsure (1)..(415): unsure at all n locations
ngagtataattcattctttgtgttatgagtctgcatcaaacatttggattattgatgtttctgtcacaatcaagggattattgatgtctccatatgtgtgtacactgtgatcatgttttcatttctagaattcatttgaaatgtctattgttaattctgaatgaatgatccttcttgatttaaaaattatcgtctcctaatcaattgagtgttcatcttgttattggtagctcatcttccaatcatgtcttgtcaaactacttgatatattgtcatgtttttacttctgttacaaatagagagagacttcactcttgttaatcacgttaaggtgttttgagaggaaaatacttgagtaggcatgatccttgttacctatatatggaagtcaacttagtaagtcatgtacctgtgt

SEQ ID NO: 135061 - DNA, 434 bp, Glycine max
  unsure (1)..(434): unsure at all n locations
cttgcggatntggtctttgccggtgaaaggatcaaagtgggtttggaanaaggaaaatctgatcatcctgctttgatgaatgcgaaaactggggcaaatgatgaggatgagaatgaggaagaaacccttgctatgactgccattcccacacggtcatatttcccatcatcccaacaatgtcattactcagccaataatagtccctctcacccaatcatccacaaagcctgcccgccgcacattctgtgccaaaacaccaaccaataaggaattgtgtaacaaaaagcctgtatgattcaccccatattccggtgtcatatgctaacttgctcccatatctacttgataatgcaatggtagccataacccctgccatggttcctcaaccttcatttttctgatgatacaactcgaacgcaacatgtgcatatcat

SEQ ID NO: 135062 - DNA, 271 bp, Glycine max
  unsure (1)..(271): unsure at all n locations
aatacggacatggctcccgatcggaaccagcttcaaaatatgacttaacgagagcatgagtccattattgaatatgcccaaagatggagagatctcgcagcccaagtcgtaccgcccatgacggaaagggagatgatcacaattatggtagatacgttacccacgttctactatngaaagtgataggctacatgccagctaactttgcggatctcgtcttcgccggagaaaggatngaatccggactacgaataggcaagttcgaatatgc

SEQ ID NO: 135063 - DNA, 444 bp, Glycine max
  unsure (1)..(444): unsure at all n locations
gtatttgctgggtagaatcaaagaacttgcctaatagagggttagtccatagaggagatcaagcaatgatttctaaataactcttaaaatggattcagttcttcctttgtttgaagcatggtattcttctttttaagtttgaaaacttctcacttgtcttttttcctagtcctagattagatattttatgtgagaaaggtgttcccaccatctgaagctatatagtagtttacaaaaatataatttattcataaaagagaacaaaaatgagaattatcaatcattggttccataatattatatagtaggctgatttaatttgaccgtgtatttcgtccttgctgaaattccagaagagtntatcatcatatgaatnggctattataaattagtttcactcacaaaactaagttctctaaaattttgagaaataaaataataaac

SEQ ID NO: 135064 - DNA, 282 bp, Glycine max
tcaactgctcttggactgctttgtttcatatatccggattgtgcagagtgactgatttatgaaccttgattcttttttctgaccgaatgaagtgatatctaacatctatatgctgggttctatcaagatgaacctgatccttggccaagcatataacactaaggctgtcacaatagatgttagcaaattcttgattaattccgagatcatttatcagacctcttatccaaattccttcttttgcaacttcagtaagagccatatattcagcctcagtagttg

SEQ ID NO: 135065 - DNA, 408 bp, Glycine max
tcaacaaacgataacaaatcttaacttatctgaatccttatccgtactagaatttgacttttgtcttcttattgaagctcatttcgaaatgctcacatacacatgcgtacatattttcatgccgatgaagatcatgatgatggagatgggccatgggatccagattctgacatggacattgatgtcgaacggtattctgctgtatactcaatttctgtcttatgagattaaatatcacatgatcatgtcctcaatttgtggcctcagttatcagtgagctcgtctcgagcaaagtaaagaaagaaatttctgaacatcagcccaatgatctggtatgtgtctcttggttttgaatcattaattaaatataagaattcattcatgcgagactctaatagggtaaacatg

SEQ ID NO: 135066 - DNA, 288 bp, Glycine max
cagatatcaacgtcggggatgggcggtgccatgttatattcgatggtgacaatccgaatgctaaaaatctctgaattggactgtgaatctgacatgcttttgtttctcaaacttttggtttcttcggtgaaagaagagtgaaagcaagagaaaatgaaagcggagaaagctttggtttatttattttggcgctaggtggttggagaagttttcaacttaaaagcttctctccaactcttagtgtttttttttttttggcgctacgaggtaatggcatgaatggaatgg

SEQ ID NO: 135067 - DNA, 330 bp, Glycine max
cagcttagttgaatacataaaaactaacatgtgtaaattgtgtaaatatagagaccaaatgagttccctaataaaatagacgtcttattaataatctcaccaaatcataaataataccactaacttttatataaagagttaggctttatgatcaataaatgtttggttgttgctgcacaaatcaaatttgatgtaccaccccatattatggtcccaacatgagtactaccgaaaagtattataaccaacaatcggctctaatgggaaaaggctgatatattaaatgaaagagcattgtcaaccagtgggaatcgtttgaaaaatatttta

SEQ ID NO: 135068 - DNA, 299 bp, Glycine max
taatgtcaatcactaccctcggaagcaaaaaaagaatagatgggaaatttccaatcaaagaaaaagagaatgaaaatttccaatgaaagcaaaaaaagaaaagaaggaatattccccaatcaaagagtgtgagaaagcaaataaagataagaaggaaaattccccaatcatagagtgtgagaaagcaaaaatgaatagataggataattcccaatcaaagaatgggagaaagttaaaacgaagaagaatatgaaagaaagctcctgatcaatgatcgaaagaaaacagaagaaatgtgc

SEQ ID NO: 135069 - DNA, 354 bp, Glycine max
  unsure (1)..(354): unsure at all n locations
tcataaatccatcactgttaataatatcttcactaaacttttattatgntaatttaaccccaaaatatactcataattagcagttatcaaactcccccaaatttaaatctttgcttgtccttaagcaaaaagaaaaagttcagagtttaccgatcacagtcataagataatttcatacattccaaaaagcttcattggccaattctcaagttcacagttgtcataagttcatgaaaggagcataacaagatgcacttcanatgaaatagttagtaagaatgacagatcataatgaataatcaccaaactttagttctcgcaaggctagtgtttctctcaatcccacaagtatct

SEQ ID NO: 135070 - DNA, 206 bp, Glycine max
tgcacacagtttcacatcacatgcgccataacccacatccctgttgccactcaactgactacgtctccactacccatatcctctttctcaacacggtcccatcatctccaagcttcactcattcagcaaaacattacacgacaagcttacagcagcaaactagcaagcaaaaactctgcaaacacaacaaaatacagttttccatc

SEQ ID NO: 135071 - DNA, 356 bp, Glycine max
  unsure (1)..(356): unsure at all n locations
atttgttatactcttaatcttacccaaggagagccagtgatcctacaagaagatcatgggttcatggtgtcccagtgagatatgatgttttcaacatcaacaaatatttggaaaacacctttaaaaagtcatccagccaagactgtggctacttccttatgtgtgtgctaagaggagtggttntaacaacatcgacaaagcgctttggtttaagcattcatctttgaagactcttgctcaaatttgggtcaacttcctcttttccaacattactctcaccacacacacctctgagcttnctatattgattattgcatagtgagcaatatatgagtgaacattggacgggtgatctc

SEQ ID NO: 135072 - DNA, 312 bp, Glycine max
ctaagcttctgagtacagagctatctcacaccccttaattctaagcttttctatgccaaaatactgaaatgcttagctcacacaccctctatagctaagtcatccctatgcaaaatatatgaaaatataaaagtcatactacaaagactactcaaatgccctaaatataggctaaatatatactactagatgaccaaagaataaaaacctatttatatttacaagatattacccaccttacttagggtaaaaatctaccagaggtatggaatctaggtcttttaccgtctatcccaactgactttgagctga

SEQ ID NO: 135073 - DNA, 283 bp, Glycine max
ataatgttgctaggtatggactctattacacttcaaatgaggaatacaaatgtatgaacttgatatcttacaactagtaatagaaatgaaacaataatcatgactcacaccacttaaattgtgattgaagtcttacttgattatatgaatggagagtacgaagaatgagtgtggaatgcaaaggtggcagtttaaataaacattaattataccatatgttctgtgcaatgcaatgacaacatatatattggtaccacacaaataatataagtatatatacata

SEQ ID NO: 135074 - DNA, 291 bp, Glycine max
cttcacccctatatacactacaatcactcaaactctcatccaatactctgcatgataaactcctcttcaatctctactgtgcctcatgatcttcacaccaaaagttctctccaccactcggacactcatatgaatgctttctagatcagagataacgccaaaaattgagaactctcttccatttctgatttcaagctttaaatagagatgactgattttgtgtcgtcgctcagccacattatggttcgcttaaccgaataaagtgacatttggcttatcacgcactctctt

SEQ ID NO: 135075 - DNA, 327 bp, Glycine max
tacctggagatatgtcgcggtggtcaagagaccttggggacgtcatgtggggtgctattgcccaaaaccaatcttgaccaatcccgacccaacccggtcatattcggtcagtgagaacctgtgatgtacctaaacaggcgagctcctggcagtcaacagataaaaggaacaaagaccacatagcaaggaggcttgtggtggctggccagctgtgaaacttgattgatatgtgagatatggtctctggtaatcgattaccaagggtgggtaatcgattacaaggcttaaaaatgaagacaggaggctaagatggtctctggtaatcga

SEQ ID NO: 135076 - DNA, 376 bp, Glycine max
tgcaatctaaagtggccatgtaacattctctggtcggcctcttgtaagcatgtgcggttataataatcccgacatttgactggaatttcaacacgaagtgaggggttgacataattgtgttgacggcattgagtgagatgtggccaaacaagtatgttatacgacgtgtgggcatccactattatgtatcatatctttaaccttgtctgcaatggcccctcatccccatacattgtgtatagccagatgcatcccttcgttcctacctattcttcaacaaaaccaaacaaagggtcatcatgggggaggatctcaaatcgagtttgccatctatttgaaagttttccaaaacaagatgcagtcgaaacacaattac

SEQ ID NO: 135077 - DNA, 435 bp, Glycine max
  unsure (1)..(435): unsure at all n locations
gcttattccctaaaggatggtgcctactctcaccttttctcctttatcttccgctgcatctccatggtagaaaatcaccattgaaggacctcattgaagctcaaagttccatcctccatataagcttctcaagcaagctttcaccagtatatcacttgggaagataatgacatggattcatcaagtgattcagatnatgaaattgcaaatctaagcctcatggccattgactatgaaaccgaagaagaggtaacatcttctaactatgatgtatctatttcttttgatgaacttcaagatgcattcaatgatttgcataaagaatctatcanacttgccaaattagtttcatttctaagataacacgttcgaaattagaaaacgaaatgttgaaattaaatgtagagttagaaaatcttcaatctgaagttaaac

SEQ ID NO: 135078 - DNA, 428 bp, Glycine max
  unsure (1)..(428): unsure at all n locations
tcttatcctctttttgtgctctagccttcaaaatttccctgctattttggggaaaatggataacctcaaatccgtttctataaatagcactggtataagagaattgcctccttccattggaaaccttgttggacttcaagaattaagcatgacatcttgcttaagcctcaatgagctacctgacaactttgatatgttgcaaaatcttataaaccttgatattgaaggttgtccgcaacttcgaagttttttgacaaagttgagagacatgggacaatctactcttacctttggtaacattcagtcactgaatctagaatactgtggccttatagatgaagatcttcccataattttccattgcttcccanaagtatcatcattagtcctttcaaaanatgattttgtagctcttccaatctgcatac

SEQ ID NO: 135079 - DNA, 280 bp, Glycine max
acctagccatgctgacgccgtgtttttctactattatatataatatggagtgaactcgagttctttctcacaaattcaactgatattgcgaactaattatactcgttagacttatctcacctactctaaataaaagtccttcacaactgaaacaaatgactgtgacgaaataatatgcattaaataaggaaagaagtactagtattttttgaaagtcattaataaatctaataaattaacgaacaacaactaatggtgcgcatttaatgcaaagaagata

SEQ ID NO: 135080 - DNA, 325 bp, Glycine max
  unsure (1)..(325): unsure at all n locations
taacacctatcgccacaagttccatgatgtttttgaatgattatatcgaataacacaaaaagcggaaaagggggtgaacttattaataaaggggatgcatcaaaaaacttcctgatgaaaccaccatttctcctatgtgatctgggtggcatgcacctacacccaatttgttgaaaacaggtatctatggcttccgtaacattttcgtaaccctgngaaagcatatgtcacttaagattaatgaagaggaagagaaagaggaggataatcaatgtcgatacacttccgcaatgctttcgtaataaggggtgaacttatcaaatta

SEQ ID NO: 135081 - DNA, 211 bp, Glycine max
  unsure (1)..(211): unsure at all n locations
ctctcgctgcttttctgcattttattgttcngaggccatgattgtgcctaacaacggcctttacataagtgacatcactttcagattaacagatgtggttcatgctgacgccagcatgttttgataattaggtgtctgggccacacggattcatatactattgcatgctgtaacacacagtatcaatactgttgacaattagatatgaata

SEQ ID NO: 135082 - DNA, 288 bp, Glycine max
gagcaattctgcgttaattctcatatatatagaccattggtggttatgaataaaacctttgaaaagttgtgactctcgaaattatctttctgaaaatcctgtctggtaatcgatgtcagtaattgtgtaatcgactacagctcttaaaatttgtaataaaacgtttactaactgctggttattgattaccaaaattgtgttatcgattacacagtccaaaatttcgaattcatatttttgtagctgttataaaacgtatttggccactggttatcgatgacatcctct

SEQ ID NO: 135083 - DNA, 424 bp, Glycine max
  unsure (1)..(424): unsure at all n locations
aaaaaaaaaattgatnctttgctttacgtgaccttaaatactaagcttagaccttggcttggaatactgccttgacggcggatgtttatattctttaacaaccacggcatgaggatcaactccagatcttacatgataatacacttccttaatgactggtggctaatgatgagcgaacatgaatccagaatatgattgatgcacaacttataagaagttgcggccagacacaacactgaactcccttctccactgtcggaccatgatgaattgatctgcttgagtgaagggagtataggtcacatgctattaacatcatttaactgcatgacgcacttagactagtggaggcttctcatcttgctctaaccatactttattgtgacatacatcaatagtttggtagactacccatacttaaatg

SEQ ID NO: 135084 - DNA, 249 bp, Glycine max
gtcacccttcaatgtattgtgatcctcatattcttataacaaggttgagagagtagtgcataataacacttcccctctagctggagccttaatatagttgaaacgacactctttttatttatttgtgttgggcaaattacattctctaagtatgctggggacattgacggcgtctcccaacggaagtatcgatctagagtgtctaacgccggaactgacctgctctgatacatcttaagatatatgcac

SEQ ID NO: 135085 - DNA, 352 bp, Glycine max
  unsure (1)..(352): unsure at all n locations
tgaatcanaaatctgtacctgtcgcaagagtttgtggtttgtgctcctctgctgaccaccatacagacctctgcccttccatgcagcaacctggagcaattgagcagcctgaagcttatgctgcaaatatttacaatagacctgctcaacctcagtagcaaaatcaaccacagcagaacaattatgacctttccagcaacagatacaaccctggatggaggaatcaccctaacctcagatggtccagccctcatcaacaacagcagcctgctccttccttccaaaatgctgctggcccaagcagaccatacattcctccaccaatccaacaacagctacaaccccataaaca

SEQ ID NO: 135086 - DNA, 113 bp, Glycine max
attgaactcacttgacaatttaagaatactttcacgagcggtgaggcgattacgtgactccatgaaaggatctttgtaataacacatactttccgagccgagatgcttttaca

SEQ ID NO: 135087 - DNA, 360 bp, Glycine max
  unsure (1)..(360): unsure at all n locations
atgagaatgggataaatttgaagcaaactctcaccttacacaagtctataacatcaatttaagcttgttcaaactggatttacacctaaaatttcagcgaatcaaaatttgactcctcaacacccaaatttaccctagaaatggctttttgttcactttggtcattngtttttctctctagcacagcccatactgtctcattagtcctaaatggcatttcaagctatgattgactcactctaacctncaaataccactaaatccagatgtggccttccaactctcatagtctcactcttttgttccactcacaacaccatactctcaccttctaaccatatgttaactctacccttcatc

SEQ ID NO: 135088 - DNA, 453 bp, Glycine max
  unsure (1)..(453): unsure at all n locations
ctaagcttcgcctgaactggatgccttcttatctcatctgcgttttatatagtcttcttactttccacccatattcacaaaccatatattcaaactgctgcttaagctttccgctgctaccattctcaatctgcaacctcacatcctgatcagttgtgctgctgcattgcaacaccaaaccacatcgtcttttccttcccactctataacacgcactcgtggttctggatcctcttctacttctaacaccatagtactccaagtgtgagcatataagtttctgtgaagcattgnggttgctcgccaataaatgagccattcatgcataaaccaaaccaaggctaggcttcctcacttcacattttgtattcggtgtgggaccagatggtacttatttgtgtggcctttctggcttctggtattgtggctgccatttatattttgatccatatg

SEQ ID NO: 135089 - DNA, 286 bp, Glycine max
tatagacacatatatatatatatatatatatatatatatatggggagggagaaagataccctgtatatgcatgtgtggtacaaaaaaaatttcacaacatatatatatgtatgtgtaggtagcaagatacctcggatatgcatgtatatagcaaatatatctcacaatacatatatacgtgtgtttatgtagcaagatacctgtgacacacatgtatatagcaaaatacctcacaaaaatatacgtgtgtgtaagtagaaaaatacctcgtggaaaataagagagc

SEQ ID NO: 135090 - DNA, 306 bp, Glycine max
aaattataggagagcacgaatcctaaaattaaccatttttttcttttccatttacattcttctcaactcaactcacttgccctttgtacttaactttatttaaaacttacaatgtttttttttattacaatctatttactgcctggaatacatcctcaatctgcaaaatcttgaatatatggggatggtctcttaaggctacaataccattggggtccccataaatgtgttgagggtgtccacatcgaactttatcaagtgccctctcactttcacctgacttggtgagttatcttcaaggtcata

SEQ ID NO: 135091 - DNA, 393 bp, Glycine max
  unsure (1)..(393): unsure at all n locations
ctgataccttggtcaacctattaactcttcttgccatgaatcanaaatctacacctgttgcaagagtttgtggtatatgttcttctgcatatcaccattcagatctttgtccttctttgcagcatattggagtcaatgagcaacctgatgcttatgctgcaaacatttataatagacctcctcatctgcataaccaacaacaacataataattatgacctttcaagcaatatatacaatccaggttggaggaatcatccaaatctgagatggacaagtccttcacaaatacaacatcctgtccctccttttcataatgtcgctggtccaagcaagccatatgttcctcctccaatgtagcacaacaacagcagatctatcacacaaagacacc

SEQ ID NO: 135092 - DNA, 415 bp, Glycine max
ttcggacctttaatctcagctagctcctgaacctgtacatgatataatcctattctcccccgaaataagacgctaatctctctggaatcgatacaatgtaaactgattccatcaagataaaaaaaaggagagaagaaatgaaaaaaaaatagaaggaggaatgaaagaaagatagaaaaggaaaataatgattcccgatcgaagatcggaagatagtaaaaaggaaaagatcggaggaaaacagaataattcctgatcaatatatgataccaggaaagagaacatagatcttctgaccagataaattgtggccgatgtatatgaccaccggtcaatggaatacccacttttgaatggttcttcccttgtgattgccattcaatgtcgctcccgactggcaatgtcccgccccaca

SEQ ID NO: 135093 - DNA, 187 bp, Glycine max
tttatacaattaatggagaagcaattccattttaaatcttttcaaacgtcttacagacccaagtctttaaactcgttgtcatcgtgagggacagataaaaatactatacccttcccatagcctcaaatggtagactgagccatatacatgtctggatctaatttacattttgaaacatcgcctatac

SEQ ID NO: 135094 - DNA, 176 bp, Glycine max
  unsure (1)..(176): unsure at all n locations
gacaaaacaccgcgacacccagagaaggaggacgaaaggaagggaaagcacacaacacaccccnagaacgccacaagccccccaagggacaagccaagcaccacagggacaccgacaacacggaagacgccnaaagcagagcggcagaagngccgccccgaaccgcaagagaaaca

SEQ ID NO: 135095 - DNA, 355 bp, Glycine max
  unsure (1)..(355): unsure at all n locations
gagcacagaaganagattaaacatttgtgtacaaaagctgacaagcaagatgtcacagtagatatatggccactttgtgccaaaggagttcgcctagctcctgatcaagatccaaacataacttgggagaatcatgtcaacaccgagtgcgacccatcgaattacgagaaaggcacaaagaagaaaaaatgccctcgccctggatgcagagagatattaatattctcaaacacaattaagtgcagggactgcacagtgcagcattgttttaagcatcgggttggacctgatcataaatgtcctggccccaaaaatgtggaaacaagtttttcattcatgaatcttttgaatggga

SEQ ID NO: 135096 - DNA, 272 bp, Glycine max
tacttcaggcgtgtattatagagcaacaaggtagctggatggattggttgccattgattgagtttacttacaacaatagttaccaagccagcattggtatggctccttttgaagctctatatggacgaaagtgcaaaactcctatttgttggtatgatgatggagaagcagtacttcttggacctgaaatgctacaacagattaacgaacaagtgaagttgattcgagagaagataaaagcatctcaggataggcagaagagctattatgat

SEQ ID NO: 135097 - DNA, 242 bp, Glycine max
  unsure (1)..(242): unsure at all n locations
agagaacccgaggcgaaaaacacggaggagggcacccacgcaagcgnccaaaaccaccaacatcaaaaccgtggcgacggtgagcaagagcacggccacaggaatgcgcaccccggaggccccccaaagcctgcgagggagaaaacactctctagcaaaagcgccggagaaagacacggcttctagctaagactggcagcaaccgcacccatagagccacacagaggcgaatcaaccacctc

SEQ ID NO: 135098 - DNA, 422 bp, Glycine max
gatgatatggacttcaccgaagaaaggatcacagtgtttctataatgagcttatctgatcatcatgcttggatgaatgcaaagaaatgaaaactatggcaaacgaagacggtgagaataaaggagaagcccatgctgtgactgccattcctatacagccaagtttcccaccaacccaacattgttattactcagccaataacaaatattcttcttacccaccgcccaattatccacaaaggtcatgcctattataaccacaaatgctgtctaccgcactttcaatgacatacatcacctgtagcacaatccaaagacaccaacctagaattgaatgtgcagcaagaagcctgtaaattcaccccaattcagtgcctatctgacttgttcctatctacttgataatcaaggtggcttacccta

SEQ ID NO: 135099 - DNA, 366 bp, Glycine max
gaagcattcgtttatatactggctatatgtcacaggatgatataaagaaggcacaattcattcagaaacaaaacactgcccctcatgtgttgtctcgagggggttatgagtttcttgaacaaaaagctaatggagaaaaacaacaaaatgattgtagcaagcagcccaatccggaagcactgaaacatatgtgaatcatccatctcccatcaaacaacacgtgaagtggaagatggctcgcacataaaaaatgagtcagatgacatctcatgtggcacgccaaattactgataggattgtaagataaattctagtttcaatgggcattatatataataacaacaatagtctatacacaatttcata

SEQ ID NO: 135100 - DNA, 110 bp, Glycine max
accacagagtggtacctggagatatgtcgcggcggtcaggagaccttggggacgtcaggtggggtgctattgcctcaaaccaagcatgaccaatcccgacccaacccggg

SEQ ID NO: 135101 - DNA, 439 bp, Glycine max
  unsure (1)..(439): unsure at all n locations
actaagctggccatggggtgatatcttancacgaggactctatcantttcttatttggtgaaaaccaagaagcngatctttggccaagatttgtggcaacaaatagcctataacttagcagaaaatgggcgaccgttcaaaaccttatcatggggcaaaccaagctcctgaacatggtatgggctcatatcttggcatgggtgacctatccaaggaataacacggtgaaaaccaagaagtcaatattttgccaaaatttgtgccaacaactagccaaaaactaatgcgaaaataggcgaccgatcaaaacctaagcataggaaagaccaagctaataaatattgttaatttcaatgacggaattctttaaggacgggagaaatgtaacatctaaaatatattcgataattattagaataagataatccaagttatcttt

SEQ ID NO: 135102 - DNA, 453 bp, Glycine max
  unsure (1)..(453): unsure at all n locations
tactaagctaagtgggacctctagggctctagagttcttctatctttctcgctnaacacataacatgtcacacttgagcaagcttaacttcttcaacaacttctaagtcctcttgctcaagtgtctaagaaagcttgcttgaacgagacatgtcaatggctcctccaagctcaattgtattcactggttgagtcaaggagttcatagaccctcttcggtatgtctacagagtaattgcaattatatcaaacctatgggtttatagatcctcttctgtctaccgagtaattgcaattataccaagcctaatgatttgtagaccctttctggtctaccaagtaatttaagtcttcaatcggtttagttgggagtctggtaagccgaataatcatggactctcttcaacctttcttatttggtcatttaactccacggaactcggtgtgtctagtc

SEQ ID NO: 135103 - DNA, 223 bp, Glycine max
cttcaatccatcagtgggctttccttctgtgtccagcatcttgagatgttcccagcctttgatgacagctttccaggttctgctatccagagatttgaggaaggccaccatccttgctttccagtattcatagttggttccatccagaattgagggtctgttcactgagcctccttctttctccatgttcatcagaatgtatctccctaggtctcactcagcg

SEQ ID NO: 135104 - DNA, 493 bp, Glycine max
  unsure (1)..(493): unsure at all n locations
ctaagcttcaatgggttagcgcacaaaatgttgtatcttttcattttttagcgcaaccnnttaatatattatttacactcaagaaattatgtgaattttttttattaaaaacatccagacataattacataaatcttagtaatgttaataaattaaaaacatatgttattaatatctgcatttaatagaataaaacaaaaaataaaataaaaactcgttccttttggcacaagcaaccaaaaaaagtatttgtaacgctaatatttaaaatattattttaactcaagaaattatgtgacatttattttttatctaagaattcgcatacgaaatctcagaaatattagagaatgttcataattaatagagaacatattattgatatctatctgtgatagaatggtaatattaggaaatactnttatataaccattattttattatgacatnttttattgtggcttataaatgtatattaacctatactaatatt

SEQ ID NO: 135105 - DNA, 301 bp, Glycine max
  unsure (1)..(301): unsure at all n locations
ggcgcggcgaccacgcacaacaaagaacnnncgacaccaacngnacgnngaatacaccaangnngcnacgggaangcngcgacaacccannaaaaccccaaagaaacatactgagagggnggnngncatgtggccatatcgacgtccttctctatcataagtcatcgaccatttttcctttgaaatgctatcaatccatgttgctatggctggactcagttgacgaaatattctaaattttgatcacaaatgtgcttgcaatgagtgtttgctgcataaaactagttatgaataacaattt

SEQ ID NO: 135106 - DNA, 312 bp, Glycine max
aaaacgatcgccgcaggagacacaacaaaaaaagagaatgactgacctgaccgaacccgggaaaagaaaagaaaagagaagattggcatcccttctataaacacgccacacaggaacaaaaagagggcagaaggagaaaaaacggcggaaacacttaacgaggagaaaacaacacgaggaaacacaacagaccagcggaccaaaaagacaaccggagaaacccagggaacggaacccgacagacagaaaggagagaagagacggaagggaaaaggcgctaaagcgaaagggaaaaacggcgaagaaaacaaa

SEQ ID NO: 135107 - DNA, 311 bp, Glycine max
atcatattttctccgtcattgaggagccactagagctgccaggtctctccacctttgggcgtgatctttgaaagatctgtgcccctttttgcacatgtactgttgttgcatcctatctggaaccatatcaaaactgtactgatactgcctaatgaaggcaaccattaggtccttccaagagtggactcgagaaggttccaggttagtgtaccacgtaacagctaccccagtaagaatttcttgcaaggaatgtatcaacatgtcctcatcgtttgcgtatgcctccatcttccgataatacatctttagat

SEQ ID NO: 135108 - DNA, 379 bp, Glycine max
gcctctccctgacaacattattgtttcctcctcatatttagattagttgcacatggatatatggggctcttatgctcatccttcattacttggtcataaatattttcttaccattgttgatgacaaaagcatatatacatggattatttctctataattaaaaccataagttccaaatcatattaaacactctatatctatggttgaaactcaattttctgtctaagttaaaagcattatatcaaactatggcccttaatttttcctgaaaatttctatactcccaacgatttttctcatacttcttgtgggagacacccacaaattgggttgtgagataaacacaacacctcttgtatgctgagcttacttttcatgc

SEQ ID NO: 135109 - DNA, 342 bp, Glycine max
cagaaacaagtcatttgaagaattgtgacttttggaaatgtatttttcaaaatcaatcactggtaatcgattaccattaacgtgtaatcgattacacatcaacaaatgtgactctttattttgaattttgaaaattaaaacatttagaaactctggtaatcgattgcaagtattgtgtaatcaattacataagtttaaaatactctaatactgtttaaacataagctataactcttgaaatatgaaatcttaacgcattaaaacactcggtatcaattactaccttctggtaatcgattaccagagagtaatactctcttgttatgattgtgtgaaaacttc

SEQ ID NO: 135110 - DNA, 301 bp, Glycine max
tactcttcgctcaatctctgatattcataatgaaatgcatgaatgatgacatgatgatagccaatattgttatactaccacatgccaataagcttatcttgaagtatacttgtatactttgcaccctttgtgagaagacatacattttcataattgaaccctgaacttaattaatatctcccacaccttgtttaattctatgagagcagatagttcaatgtaattactccatattctgtgaagttgattgtgatgtaaagtgaaatgtaaagcatcagcacacatatcaaagtaaattgtg

SEQ ID NO: 135111 - DNA, 307 bp, Glycine max
atattattatttgacatgaaaaaatatttagaatccactaggattagtctaataataaagatatgtaatatgcatgagattttgtattcaaaccttgttatcactatttattttttattaaagcaacaacaaaatttaaacctagtaccttatttaaattacttaagcctctcactacaaagcaaagatattgttgctaccatttaaaaaacgtttaatacattgatattggtagggtcttgaaccttatagaaaattttattcttttaattaaatacccatattccatgtatggtagctcaaaatc

SEQ ID NO: 135112 - DNA, 372 bp, Glycine max
  unsure (1)..(372): unsure at all n locations
caacttgagttcactattgctaccccatagagctccacgaaatttggtccggccatactcttccttgcgagccctcttggtctcttgttcaagggctcttgcggtaattgcattctcttcccgtaacccggcacactccttccgaacgtgtgtagcggccaacttgaacttctccttggcaagttttgcctttcctaactcgcttttgagagcttggacttcttcgtcctcttccggtgcttcanaactctcttcgttgatgactcttaacttggcgagccaatctaaacctcttatatgaactttcagccatttcttgtacccaccaatgatgccattacgattgcctcttagctctcgatcttttcttaa

SEQ ID NO: 135113 - DNA, 248 bp, Glycine max
cgaaacacaataatagatattgaggatttctctaaatctgatttgcagatcgcaatatgcagttgatgcagtatcgtctacgtaatgccccttcacgtaccaaatcacaaaatggtttgtttgcttctatagaagcagcggagggtgatatcaacttgggtatgaaagccaagtctgctggatagtgaggcaccctattaccactcacatatacgtcatatagacacctacatataactatatgattg

SEQ ID NO: 135114 - DNA, 192 bp, Glycine max
aaaccattgtccgtacaaaccacggggggacggagaaccgcgccacccgccggggcaaccaaaatagacgacccgacgaagagccgaccacccagaaaggagaaaaggcaggcaacaacagagaaacccggaacacccccgaaaggccgaaaagccagcccagaaaagacgcccgcgggaacaaaaaaccga

SEQ ID NO: 135115 - DNA, 365 bp, Glycine max
ggccctggatttggcacaatagtatgtatgaattacacaaacattggatgcgaggataccataaatagtacttactgattcaaataagctcctatgtacacctctcgtagggattccttaacccatcattcgatgtaatcttgacattgcccacgtctatcctttgtgtcacaacctacctcatgacgggacgacgaatgcaaaatatataagccaaagtattcacctccaagggagaaaatgagcagattcatcaccaatgtttattcgaggaaaatgttagaaaaaccaataagatgtctaccaactttgaaaataaaggttctggggttgttatgcatacgaatgtataacaccccacaagt

SEQ ID NO: 135116 - DNA, 223 bp, Glycine max
ggagcttacggcccatgcgaacgaggggggacaaacgcccaaccaaagacgggaaaaccacaccacaaacccaaaacacgcggacaacaagaaggcaaagagacggagcaaagcgcacagctgagccgagagaaggagaaccacagaagccaagaaggccgcacggcgcagaaagagacgcaaaggacggcagaaaagaaggtgacaaagcaaggaaaagcaa

SEQ ID NO: 135117 - DNA, 249 bp, Glycine max
cttgtgttttgaattcgatcagcttgacatattacaggactcaattagaaatccgatttagatggtattcattctgacttctcgagaaaaagtaatgtgtcctattgaatattgctacgatccttacggttttaattacctgcatctcgatatactatgagacacaatcggacatgcgagtaaaaagatatcatcgtttgaatttgctcagagccttcgtagtcaattcctagcgtctcgatatattat

SEQ ID NO: 135118 - DNA, 448 bp, Glycine max
  unsure (1)..(448): unsure at all n locations
tactaagcttacagagatttagaaagaccccatctcnatattttattaccnaacgccacgaacccatggaattanaacaaactaaatggctgagtgtaactgaaattgttggcaaccaaaagtcacccccaacagccaacaagtcagccaccatttggtctcccaaaaggctgatgcctangttgccaattgggcccttattacaacttgaactaaagcccttttagttgattaacccaaaacatatttttggtcagccaactttacaaggattgggccattatttagacaaactatacactctaaaatngaaataaagtggtgtcatttagtcctccatttgggccatgatacaactcacaaccttggacttttctcctgaaacttggcttgtttcaaaagtatggacagacttgttgagagcgtcttggcttccttgctctaccct

SEQ ID NO: 135119 - DNA, 338 bp, Glycine max
cctaagcaggcgaactcctggcagtcaacagataataggaaaacaagaccactaaacaaggaggcttgtggtggctgtccagctgtgaaaaatgattgatatgtgagatatggtctctggtaatcgatcaccaatggtgggtaatcgattacaaggcttaaaaatgaaaacagggagctaagatggtctctggtaatcgattaccatgggatgtaatcgattaccaggcttaaaaacgagggcaagaagctcaggaagactctggtaattcgatactaaggggtggtatcgatcaccacgctaaaaagggaattggagttgtggaagccactggaatc

SEQ ID NO: 135120 - DNA, 442 bp, Glycine max
  unsure (1)..(442): unsure at all n locations
tccttcaattctagaatcaatntccaattcgggtgagatatatccatcataatngatctggaaagagagttaacaactacattctctttttctggcttatacttaattgtgaaatcataacccatcaacttatgtatctagttctgttgcttaagagtgtgcacaacttgattagttagtgatctgaggctcttcggatcagtcctaatgataaatttgtggccaagtaagtagtgtttgaatttagttatggttgccataatagcaaagaattcacttgcatatgctgactgttttcacattcttagtcaatttttttcaaaaaataagcaataggatggtgcatttgactcanaacagcacctacaccaattccagaagcattcatttctaaggtgaatggctgtgaaaaatctgtgaagccaaaaatgagcctgtggat

SEQ ID NO: 135121 - DNA, 356 bp, Glycine max
  unsure (1)..(356): unsure at all n locations
ttcaagcaagcaaaatagaatgcgtttccgtttacttgctgggcgacgggcatcattcactgctagcccagcaggctcaaaaactgnacaagatccaaagggctatctngcagtgtatgttgtggagaaacattcccgaacaccaagagaacattcccgatcctagtgagaaagcatagctagaggtactcttcatgtcatctgccgaacctgcccaatcattatcggtgtagccaagtaattttgagtttggttgtgtagtataccatataccgaactcttttgttccttgtagataccttcaaattctttcccctgctccacagtgtatttgactagcgctctgcatgaatctt

SEQ ID NO: 135122 - DNA, 369 bp, Glycine max
  unsure (1)..(369): unsure at all n locations
ttggcgaaccgcatagtctgactccccccacccttcctgctgagctgcttcgtgtcggggttgtcgccggacattcgccgcgaggtccangcccaccaaccactgacactcgttcaggcggcgggtctggctcgtctttatgaggaaaagttcctcgatggccgcaccctctctcgtactcgtcacccccaacccatacacactcaccctcaacccacacacactcattctcaacccaaccccacccaccttgaacctctttcccccaaccagaaccctaattcacccatgccccttcgcctcaatcctaccccacctatgctaccaacagccctgcgtccaaccctttacttgataaccacctacccc

SEQ ID NO: 135123 - DNA, 412 bp, Glycine max
tggagaccccccaagagaagaatatgagagacaaaggatgacacatcaaagaatcacaacaacccagtatatctaataagcttattgactcctatgaaattattttaaaaatcatattaataaattgaacaataatatataaaagtattgtacatcatcattatcattaatgtatcaccgctaaactcataatattatatgcctatataaatgggatagataacaatgcatcttcgcatcagaatataattccggcaaataatccaatggaattttgaacgaaggcagggtcggttggacttgagagtgcggtcatgaattgttgataaaactttatgtcaaacctcgttagcgtgtgtgaataggcggcaagtctgtctatatcttcggcaccatagcatgctatggagct

SEQ ID NO: 135124 - DNA, 345 bp, Glycine max
aaataaactatatcattcattattcgaagtgatacttgacaattcgatcaaggtcagactaaattacttttaaaattcaagcgaaatatagttaaattatattatctctactcttgactttaattatctttaaaatgacattaagtcattgacctacaaaaattgtgcttttagttgtattgtgattaattccattataaactaaactagtcccaaaatgactagttcatcgattatctgtcgtgaataaatatcataagagacaaaattttattaaaataaataaataaataaatatattcgacggttaaatttcgaccaagtactcactaaaggatatatttt

SEQ ID NO: 135125 - DNA, 408 bp, Glycine max
atctaccaacacccgctgcccactaaaatcaacggagaaagaagtccacccagacctgaaattgagaagtcccactcgtgcacacgcactttacgagcccgtaaatgctctgcgatcacgatttgaggcataaatgatggccaaagcgtaaagcttcgattggagctacactggacaatgaagaagaagagaatggcatccggagggagagagagagctgtctgataagtgtggtgctgagtgaagagagagatagttgtcttttaattttaaaaaggctgttgtcccagttcctataagtgtattatatactatgccacatgtcttcaatggagagtatcaaagaggggccactttccctatcgacagtgaccatactcagtcacaaattgaggaaaattatgactc

SEQ ID NO: 135126 - DNA, 479 bp, Glycine max
  unsure (1)..(479): unsure at all n locations
ctggcctatatatgctcaggttgatgggctatngcatatttatacttttaatgtagaaaaaaaataaataatatatatattatattattgtaattaatttttatcatttataaatattaaataacaaatacttattaaaaattgaatgtattacattaaatttcgaataattatttatttagagaacaaattaataaaataaaaattaataatatatgtgtaaaatatcaaaatagatattaaaaaaaatgttaacaagttggtccgtccgactttttgatgagtaaaaaatggagtggattaaagtgggttgacaggttgaacatctccggataactcataaacaaaagatgattgacggattgactggttcggataaatacattttgtcactcttactccacacttatatagaagatgngattaagattatccaactatctaaataacggagtaaacttcatttaacattatctaat

SEQ ID NO: 135127 - DNA, 438 bp, Glycine max
  unsure (1)..(438): unsure at all n locations
agcccaannaaccacggcaagggaggagatcatgactcatgaggctgctgaaatatggatctaattgaaggaataagatatgctttaaggttacactttggggcatacatttgccacaacctcatttttggaggctttcatgcccaataatctgctaagatcccaatttgtgttagcaaaagctcaacatcccatgtccccccattttgtgtacctaaaacagagctctagaattccagcctactatacaaggttgaatttcaagagggtgatgtttctgttaccaaagaaagattttattattcaaccaataggagaaagaatactcctccaacgatttctacttcacacaacatttctcattatgtaaatagctagtgttcaacttacaagctaaanacataaatanacttttccctccatgactactaactagta

SEQ ID NO: 135128 - DNA, 234 bp, Glycine max
  unsure (1)..(234): unsure at all n locations
gagctcagagcacacctggtagaactggagctgctcttgcctgatggaagggataggttgaatgagctcacatatggggagctgaagtatatagggccccagatttctagcctcggaatttggggttccccgacaagtgaccgangggcattcatgttccggtagcttcttttacatatgccaaattaatggcttggctcacggtctctaaagactaagagtcagaggtgactc

SEQ ID NO: 135129 - DNA, 228 bp, Glycine max
aaaaaaaaggagagagggtagaaggaggaaaaaagagggaagaggggggaaaggagaaagagaggaggaaagagaggaaaagaggaaaaagagaaggaaaggggggaagagggggaaggagagaaaaaaaggggaaaagaaaagaaggagaaaaaggaaggaaagagaggaaaagaagagaaaagggaaataggaagaagggaaaaagaaaaggaaaggggggaaagg

SEQ ID NO: 135130 - DNA, 447 bp, Glycine max
  unsure (1)..(447): unsure at all n locations
tccttctctaagttacgaagccaagtccataataaaaatagtgcatcatttatgatntcggnagcattgaatatgtcgttagacaagataatgttgttccgctgctgccaaatagaccatgtcaacgctagccaccaacacttccacctgttgacctttacagcctcagccaccccaaatatatgttgaaggaaatgatgtnttgggttctgcgggagaggacccacgcaattcacccaagacatcgattcccaccacagcggactgattttgctgcaatgaaaaaacgcatgacctgtattctcctccagattactgcaaaacacgcaactcgtatcatttaattccacctgtcgtctgtgaaggtttgcccttgtacgtagtcgatctctaaagtacactcatgcgaaagctaatactttattnggtgcctatgttcttcatagt

SEQ ID NO: 135131 - DNA, 297 bp, Glycine max
catcattgcttttctctgtcattgaggtgctacttgagctggcaagtctcttcacctttgggcgtatcctatgaaagatacttgccctctctttgcacatgttctgtatttgcatcctatccgaagacattatactgacactgcctaacgaaggcaaccactatgtccttccaagaatggactcgggaaggttccaagttagtgtaccaggtaacagctaccccagtaagactttcttggaaggaatgtattcagaattcctcatcttttgcgcatgcgcccatctgtcgatataca

SEQ ID NO: 135132 - DNA, 199 bp, Glycine max
  unsure (1)..(199): unsure at all n locations
cacaaaccacgcaagaggaagntctccaagaactatggctggcaactgaaatcaccaaacctccacaaaagttgagtattagatgagatatctaggtcacatgctgaggtatataatttgagtgtaactgatgggagaagctcaagcgaggccaccttcgaagcgccgcctacaatggagaaggcaaccaacagaactc

SEQ ID NO: 135133 - DNA, 292 bp, Glycine max
  unsure (1)..(292): unsure at all n locations
catagatactaagcttaatgttgcttggtgaaagggcttttagtcttatcactttctctncctggcggagaatgcacaattacctttgaagatgttgttattcaactggggttacatgttgatataagaccagttattggatatataggtgagatcgctccaaagaatgcactagtgtgatcaacacttattctaaaatggttaatagaagatatgttgactgttctagcataacccacaccacgactattagcaacctatggtcgagcacacattttaaggactatatgtg

SEQ ID NO: 135134 - DNA, 365 bp, Glycine max
  unsure (1)..(365): unsure at all n locations
cacttaaaactcagctgctgtgatgctaacttgaaaggagtttttagttctctccttncntttaaaccacctctgcaagttgttgcttgtctacaggatcaatttcagttagatcagccaaaacataattccagcacaggatcatacatgaaaattcacaagaagtgcacataatgataaataaaatggcaaagaacaacaacgttggtttgctgtcatttacatggtctcaatacaattttatntaagctgggcaagttttcaaatccgccatcaaaaaaaaaacgaaacccgctggtgtaaaaccggtgtgggggtgggggaccggaaactatgctaaagattttcactaggtacattcacat

SEQ ID NO: 135135 - DNA, 326 bp, Glycine max
aaacaaaacggaggtctgaaacgaaaccccacaaaacaagcccagattcaagcgcaagaacctcaaatcatcataaaacaagaaaaggggtaaacgttcctaaccttaagagatctctacaagggtctgagaaaaagagaaaaggatctggagctccacctaggagagcctccaaggactgccttcaactatcagctccaccacatcatactcatggaaaacaacccaacaacaacacttaagaaatgggtgcacacaaacataccacggtgggtcactccaaggaaggaagacgagcgaacaaacaaccaagagaataacggagg

SEQ ID NO: 135136 - DNA, 340 bp, Glycine max
  unsure (1)..(340): unsure at all n locations
ggtaggattatggngtatccaccacatgtggtactatgttgcggtcttgcgaaggngcaaaacaagttctccacatcctcaaatcacgttcaaacccaccatcccctgttgcccacctccaacttgagctcacgtactcccacgtagcccttatcctcgttcctctcaacgccaagtcctcatcaatccttccaagctgtcacaacatccaagttattcaacatccaatcatcatgaactaactcatccgagataatacggcagatgcagaatactctgctcataacacaaaccaacatcacagctttgtcacactcaaataccccagtaatattctctt

SEQ ID NO: 135137 - DNA, 485 bp, Glycine max
  unsure (1)..(485): unsure at all n locations
acctgcngctgcagctaagaaagccttttttctgcatttcctnnacnagggggggccaatcggaagntncagcctttctatgcgggagccggaagcaacatccacaatgaaatcaataagggccactgcaatatttgggccataacttttacaacttaggccttaaataaaagggcatctcccgtaattcttttgaaattgttgttcagctagtaatatggataacctggcaaaaacaagtaatttgaataaaaaagttaaaaaaaatgttgtgatacactgatatttttttttattgattgagcactgataagttatcaagccaaaacaattatttattcacttgcacactgtacttttgttgcaaatnttcgtcatgatataaaatctctcagtatatgacattttgttntaatanaattaagacccaatctagattaacttcttacttgtgagagataattttcacttataaagcctatata

SEQ ID NO: 135138 - DNA, 450 bp, Glycine max
  unsure (1)..(450): unsure at all n locations
tntcatgacaatgagaggctatttctccttattatggttctgccagcctaaaatgccaaaagatgtattgtatgcttcatatctatcaatgcaaacaaatgtattctttcctattatcctttcttatcttaatttcatgtatcaatcatccttgcatcagcttttgggattagtcgctctggagagggtaatttctaatagaactcaaaggaagagatatcttaataaaattattgctagacatggagtgattgcattatgcagatgcatcaaagcaaacatctagaattagaacttcatgcatttcatctaatgagtctttgctaagacattcacgagatagatatgtaagataggcttgtcatcctgagacattatgggcaagtattctaatagatgtgggtacgaaaattcaccacactgatagagaaatatataaagtattcatct

SEQ ID NO: 135139 - DNA, 393 bp, Glycine max
  unsure (1)..(393): unsure at all n locations
agcttcatggagaancaatggtgatnaatggtgtttngnganaacaaaagatgatgccaaatgtgatgacaaaaagctcaaagatcaatcaaagaacaactcaagtgaattaagaacaattcaagagttctaggatagaatcaagaagaattcacgacttcagaagaaagtttagaatcaagaatcaagattcaaggttcaagatctcaagaatcaagatcaagattcaagaatcaagagaaggcttaatcaagataagtatgaaaagggttttctaagaaatggaatagcacatggttttctcaaaacatgtntaccaaagagtttttactctctggtaatcacataccattttggttgtatcgattaccagtagcanaatggatttgaaaa

SEQ ID NO: 135140 - DNA, 427 bp, Glycine max
taactccttgagataagaagctttatcttatctacacttcctctataatagctaagctcacccccattccaaaatacatgaaaatacaaacaaaaagtccctactacaaagactactcaaaatgccctgaaatacaaggctaataccctatactactacaatggccaaaatacaaggcccaacaaaagggaaaatctattctaaaatttacaaagaagagtggatcaaaccttgacccatgggctcaaaaatataccttaaggttcatgagaaccctagggccttctttagtagctctagcacaatcctcttggagcctcttgctcatggctttggtaactggtccctctctacagaggattgcatcatcccctcccccttgaagaggaattgacctcaaatctatttggtcctcttcctcaatatc

SEQ ID NO: 135141 - DNA, 319 bp, Glycine max
  unsure (1)..(319): unsure at all n locations
acgcatgcaagctgggnnttgggcaatagcaccccacttgaataccnattgtctccngacccccgcgactgatctacagggaccactacgtggtcaacgaataagagcaggaagtttcacccttcaacacttcctcatctcaagcttgtatgattatggggtacccatcacacgtggtactacgtggcggtcgggcgatggtgcacaacaagctattccacatgcacgaatcgcgcatagacccaccattcgctgttgaccacctccaactgaactcacatactcccacatattccatatcctcgttttctcaacaccg

SEQ ID NO: 135142 - DNA, 291 bp, Glycine max
  unsure (1)..(291): unsure at all n locations
aaatctaggggaaacttgacacaacacacctttgactttgttttgatgggtccaacactaactccctgcaataaaagcacatgtgagggaaacaatccatcatgcgtctagattaaacacataaaacattgcaaagaatgtttgctctgattgcctaattgatattccgtagcttgacagaaccatcatcacttactaacaatgctgggtntgatgatgagaaatccccttcgctcatgctcccctcatttagactacactcgactttcttgcacaccccataactgaaac

SEQ ID NO: 135143 - DNA, 360 bp, Glycine max
  unsure (1)..(360): unsure at all n locations
gctgaaaggacctcagtgtgaatagttatgaccanannaattttcttttatctttctttgacagtngcgagggtctttatatgtgatgcgccttaatctaacatcccggggaaaaggtatgaccatttgaatttctcaagagcttttgttggtcaattacgagcctcttgacatattctgcgcccgaatcggatatccgtgtgaaaatttatggccatttgaatttctcgagaggttctgatgttgtattatgagcgtatcaattattataagcctgaatcagacatccgcgtgaaaagtatgaccatacgaatttctaagagcttccgtgtcagtttgagcctcttacatatatagcgc

SEQ ID NO: 135144 - DNA, 248 bp, Glycine max
aattctggctctgggttatattctacttcaacaccgacttcgatatgttcgccaagcatgaccactttcaaagctctgcgaggacaagaacctcccttgttagtaaaaggagctgacatgccttcctaataggaacacgcatatcgattgagctggccatggatgacttataacacgcaatcgcgaacactctgctccatgctcaacatcagagtaaaagaattgtaaacacgcttatatgggagcta

SEQ ID NO: 135145 - DNA, 410 bp, Glycine max
ctaagctggctaacccatggaagctcctaatatctcctacactttttgtggtgttccattcttggacggccttgattttctcaaggtccacttggacccatttcgaccaactacaaatcctaagaaaactatattatctacacaaaaggtatatttctttatattggtatagagagtggttttcctaagaactgaaagaactctccttatatgtcctaagtgatcatctaggctcctactctacactaaaataccatcaaaataaacaactacaaatctacctatgaaatcccttaagacatgatgcataagccttataaaggtgcttaatgcattagtgagcccaaaaggcatcagtagccattcatacaaaccaaacttggtcttgaaagcggtttccactcatcacc

SEQ ID NO: 135146 - DNA, 205 bp, Glycine max
acacacgcccgatgaacctacgaaccagcaaaagagcaccggccaagggttgtacatcacaaccacgtgcactctcacgagaagagaaagaagaagacgcactagtgataaccccaggacccaacagaaccataggtcatcggggaggacatcgggaggcgatatgaccccttcccaaacacggaaaacaaggaagagaacacac

SEQ ID NO: 135147 - DNA, 407 bp, Glycine max
  unsure (1)..(407): unsure at all n locations
ctattntatgacttaacaaaatngcctagtgaaggtgtaccttttgagggtgcactgattgatgaatggaaattcgatttctctgtgcatgatgcccgccggttggtttgtaccaaccaagcggatatgaccggaaggcttcttgccggttcattggcttttgagagccgcatcctccattaccttatagttcgcattttgcttcctagatcttcaaaccttgcccaggtttctgaagaagatctcattgtcatgtggacctttcttaaagggttacaaattgattgggcacatctntgtagatatcgcatgcacaaggcattgtgattgaatgccccatttccttatcctcatctntgtacccttttccttctacacttcaacattcctcttgattccaaccttat

SEQ ID NO: 135148 - DNA, 366 bp, Glycine max
accttaaaactaagcttggatagtgaagtgcaagacaatttttctgtacttgctcgccatggcggggagtgtagtgatgttccaccatgctaaggcgcagatggattgctacctttcttggaggtgtcttgtctagtcgaaaaactgagaggacgaatggacggatgattacgaagataaacaaaaacaacgctatattttgcggtggtttttagctaccaatttttaaaaatcattaacgatgttaattcaaaatagatggaacgaccatgtttgtcctatctctatacatacaggattaaaacgaaagttctaaaacactaagtaccatatctaatcgagagataacaataatcgatcacatac

SEQ ID NO: 135149 - DNA, 181 bp, Glycine max
cttcatttttcttcgaatgattggattttctggatcttaacaaattggcattgggccctttttagtcccacactttgtctttgcacttgcagcagcattacaagaagccaccaactcatcttcttcactttcatcacatcccaatggttcaccaaattaaaaatctcttatatttgtcata

SEQ ID NO: 135150 - DNA, 240 bp, Glycine max
ttgataatgctaaccactagcagaaaacaactacttctcgatgattagctaacacgattatttctagttatcacactttacttcgatgttgatacatcggctaaaggtcatgctaccatatggcttaatgatagattgttccacaaaaaagtcaattttggacaggacaaaatgatgacaatagacaatacccacggacagagtgcatgaaataataacgtactatatcgtatgaatgca

SEQ ID NO: 135151 - DNA, 295 bp, Glycine max
  unsure (1)..(295): unsure at all n locations
ctggagaaaatcgtggctccatagtgnttattctagagctcttcaatggngggaataggaaaacgaactttcaccgtgatgttgttaagggcgcggtaatcaacacaaaaacgccatgttccatcctttttgcgtaccaacaaaaccggtgatgaataatggctagtgctatggcgtgtaaccacttctgccagcatatctcggatcatcgaagtcatgatttccttttggaattgagggtaccgatatggtcgaacgttgactggtttggcttgtggtaagaggtgtatatggt

SEQ ID NO: 135152 - DNA, 458 bp, Glycine max
  unsure (1)..(458): unsure at all n locations
ctgcagctgcttctcgngaatggtttattttctatggatnanncagatacggaaacaacccacaatgccatgtgtctttgaagaaagtacatcttggtgttcaaaaagtcgtgatcttgtttggaaagattgttccctctctgacttgggaaatgaaagcatgggaaacaactcaagatgaaatgttgattactggtggtttgcatgttgtggtttttaacataatggttgtgttcaggttgttcaatcattttaaaattgacactttttgaagcttcatgtcttatactatggcaggctatggtgaaatggttatactactaagtttaatttgaaatccacaagatgtcaacctactaagngaagttatcttaatcctatataagtcgaagtgaatagatggtatggtattagactcgattattttgatatctccttttgttttgaagtctactttc

SEQ ID NO: 135153 - DNA, 487 bp, Glycine max
  unsure (1)..(487): unsure at all n locations
tcacctccgtttcaaatttccattaatgacaaataagttatagacttgaggaatgaggagctagcattactcaagtagtcgtacattaaggatgataaggtagcaataacagaaaatataaaattaagagaattgtgcgattcaaccttggagagcctttagagaagaaaaatcaagattttgctactaaagtagcggcacaacctgcaatatataaaagttcttacttttacaagtagaatttacttgcttaaaactaacatagaccttccatttttctttgagtgtttaatgcatctatntttttgcacctaaataaggttcaccttaagtttactcatgcagtcataaaagtgtttgactttccttctttgtttacaaacctttataaatgtgcataaactattgataatgatactaatacatagtaagtcattatatcactaatnntttgtcatggaaactctaaccattcgactctctattg

SEQ ID NO: 135154 - DNA, 196 bp, Glycine max
  unsure (1)..(196): unsure at all n locations
caagaaaaccgccggcaggacggggaccnaagcacccaagaagcgcaaaacaagcagacaaccgcccagcaaacaagaggannaagggaggacagcnancaggggcaacagagaaagagaaaaaaaaaaaaaaaagagcgcacgagaaagagcanaaagcaacacgggaagaccacaagcagaanacccagaccag

SEQ ID NO: 135155 - DNA, 340 bp, Glycine max
  unsure (1)..(340): unsure at all n locations
aacatcatcaacatcaaatcattgacatattntgtcaatataggcaatataatctcaagagactaattaaatttgatactatggattcacctgtagcagaaactatgtaattggatactgtgttagagaaaatctttcatacaaaccacaatactaataacatagatatataaaatngatatggagccaacctccaatgaatctacatagtttctttcagcctcagatatccgatgttgtgcttcagtggctaacctttcaatctcatcctcaaatgtcttatgttgccttccatgttccacaatgagtntatctaattctatatctaacctcctatata

SEQ ID NO: 135156 - DNA, 257 bp, Glycine max
  unsure (1)..(257): unsure at all n locations
atggtcattcacaaatctaatgaaaagatgtgacttgtggcagatnttctaaaaactttccactggtaatcgattacaatggttgtgtaatcgattacacagttataatttgaagggttatgacttttgaatttgaattttcaaagtttcgttgctggtaatcgattaccgacatatggtaatcgattacatgttgaaaattcaaattcacaacagttttcaacggccttttctcaaccatggtggtaatcgattac

SEQ ID NO: 135157 - DNA, 340 bp, Glycine max
tcatatctttctggattattatcaatatgagaacctcatttgatgtgttattttggaccataaagtttaatctctcatgtgcacagtgcactctagttaattctttagaaggctcatgcactgggttcatatatcgtgaattagctccaagatagattcattaacctgatcttgaacccaaccattggatgtgatgaccttcgcggtaactttagaacattaaacaaatgtatctcagattccatctcatattcctaaggcgcttaatagagtaactggatctcatcaagctcaatttcttatgataacttcgttttgcgaggaattcattcctaaaaaa

SEQ ID NO: 135158 - DNA, 393 bp, Glycine max
cagctgcagcttaactgagctcacattactatttgagcagaaacaacaaactacccatcatatctccaaaccccataccccgaaatataggaaaagaagccaccaacctgaaattcaaagccactcgtagccacgcactcatgactcaaaagctctctttgcgattggacagaaagatggccaaggttgaagcttgttggagctcatggagaatgaaaaaaagaaggcacgtgagggagagagaggtgctaaaatttgggggctgaggaaagagagagaagtgcttttggttaaataaaggttctctttttctatatttattaagctatgcacatgctcattgaggggaagaaggcacttctcttgatggacctctagcacaaggaaaaaact

SEQ ID NO: 135159 - DNA, 272 bp, Glycine max
ttgtattgacataatattcactctggctcttggaaattcttctagagcttgaatgagtttagccccatcatgctctgttgaagattcaatattagtaatgttagtagcatgttggtcaaagttggtggccctcataagcattgttgaagacattggggaataatttcatttcctcacaaagctcatcgactactagatcgtgaaatgtaagaaccttatcaattgcttgtccaagttgttatctgtaatctacatctgaaaaaacatcttca

SEQ ID NO: 135160 - DNA, 158 bp, Glycine max
  unsure (1)..(158): unsure at all n locations
acgcagagcagcngcatgggcccccatcaatagtgctgcgcgcccaagcacgaaagcanaaaacnccgagggaacaccaacaaaaggcccaagcacaaagcagaacgaacaccaccnnggccccgggagaggggaacaaccaagacaggaacacgacc

SEQ ID NO: 135161 - DNA, 442 bp, Glycine max
  unsure (1)..(442): unsure at all n locations
agctggccccaaaanatttctactatcatttacttatgtaaaaatatctcttttctttgaggaatggttaaactacataaactttgccaattgttggtttaactaaaactagacaaagcattcttatttaaataaggagagttcgagcagctgtgtgaataaaaaaaaaaatattagaaaggaaaaactttattaaagataataatcttaagaaaaatattaaaaatacaatttctatcacatttatttaaatttaaatttttttattggttaaaatttattaaaagtgataaaatttagtaggtctcatatgatatttagttagaattctcctgtaaaaatttattgacgaaattgataaatatttggtacttgtaaaanaaattacataaactnttgttggccgagctntcaatttggtagtcaaatttacaactcattg

SEQ ID NO: 135162 - DNA, 423 bp, Glycine max
taaactctcctatactccttagatttgttaattgtcaggtcaaaagaaagaagataaaagagtgcgaataagagagatgctattttaaaatagaatgtaatgtcaaaaatatatcagaattatttcttatagcagctaaactatctgaagagctagtatactctctttagagagattataatagaatgatgaattcctcggttctcttggttatataatgatatatacacataatatcatataccatttttctagtaataaaacatagaaaatgcagatttcatattttcattacatactttccatctgtctcaaataaaaagtataatacttttgctaaccaatgtcttttaagtattgattgaagaactaataagaaaaaatattattatgaaattcatatgagagcctactaaagtcatg

SEQ ID NO: 135163 - DNA, 386 bp, Glycine max
  unsure (1)..(386): unsure at all n locations
tactaagcttgaatgaggaagtgnggaagtttatactttctacttttattccncgaccacagagtggtacctgnagatatgtcgtgggggtcaagagaccttggggacgtcatgttgggtgctattgcccacaaccaatcttgaccaatcccgacccaacccgggcatattcagtcagtgagaacctgtgatgtacctatacaggcgagctcctatcagtcaaccgataaaagaacaaagaccacatagcaaggaggcttgtatggtggctggccagctgtgaatcttgagtgatatatgggataaggcctctggtaatcgattacccagggtgggtagtcgattacaacgcttataagtgaagacacgaagctaagattgcctct

SEQ ID NO: 135164 - DNA, 492 bp, Glycine max
  unsure (1)..(492): unsure at all n locations
accgcggcatgcaagctatagncaaattattcatttncattttttagnggncacacactcagtagggcttacaactcaaaacataacaatttttcataatttctacatcatgtctcattaatcatatagtaggcaaaaaatcgtgaaagtcataatttagtgcctatcatcacaagcttgcaccaacttctcatttatgcataacatacaagttcgtattttaattttatgtttagtaacaagactaaacttcataataatatgaaagataaattttttatttaatacttgttagtatatattgaaaagaacactgttgaaattagtaatttttgattatttttgcaacatataagaaaggtgttatgtgtgctttctttagtgatacgatgttacgtgtttaatagactcataatgtaatgtacantgaaacatcaaactataaatattttgtataanaactaatgggatatttttgttgatgtatcattc

SEQ ID NO: 135165 - DNA, 412 bp, Glycine max
  unsure (1)..(412): unsure at all n locations
actaagctcagctaactatgaggctatcttattactgttgttcaagacatacaagcgagcttgtaacaaatcttctacacttggagtgatcacatgcaatcctcttgaacccttaccacccactctgtcatcatgccgagacttaagaaggccaacaggtttagccttctctaagtattctaaacaaaattcaatggcttcttctgcaatgtacctctcaacaatagatgcttctggatgatatagattctttgtatacccttttaagatcttcatgtatcgctcaaccgggtacatccaccgtagataaacaggaccacaacatttgatttctctgaccagatgcacaatcaagagaatcatgatgtcaaagaaagcanggggaaaatacatctccaactggcacagtata

SEQ ID NO: 135166 - DNA, 459 bp, Glycine max
  unsure (1)..(459): unsure at all n locations
gctngcttgtggagcttctatggaggctggatcnngagcttcttgaggttcttctttggngacnnacaccatggagatgcagcggaaggcaaatgagaagaggagaggggaggcaccatccactatggaataagccaaggaagaaggagcttcaccaccaagatgagccttggataagaagcttggagaggatgcttcaatggaggaaaagaaagagggagagaaagagagaggggggagcacgaaattgaaggaagaaaaagggagagaagttgaactttgagttgtgtctcacaagactctcattcatcaaagttacaacaagtgttacacatgtttctatttatagactacgtagcttccttgagaagttttcttgagaaaacttccttgagaagcttctttgagaaaactttcttgagaagctatagcttagctacacacacccctctaataact

SEQ ID NO: 135167 - DNA, 85 bp, Glycine max
cccccctcggggccacacccgacgaaaaaccagccgagcgaagaaagccagacagagcaccacgaacggaccggcacagagacgg

SEQ ID NO: 135168 - DNA, 252 bp, Glycine max
aattattctgacggatacactccgtacaaacaaaaacattaacccatcttgcataaattcacattgctaactaaacccttagatattaagaaattaaaagaagttaatgccgtgtaaataaagatgatattgttacctctaccgttcttcgaaacattatatgctttctgtgtcaccaaattaaccttcccagccatgtagctataacactaaaagactggaagctcacaatgccagtcttctgctttatgc

SEQ ID NO: 135169 - DNA, 366 bp, Glycine max
  unsure (1)..(366): unsure at all n locations
agcttataaggcactntgaaaccatgcagggggacgtttgttntattttaactaagaccncagtagctatcattacaccatggaggatatgtctgcctttgagaaaagaagtntgcctttcatcaattaagtgaggcagcacaagagccagcctattatccaggactttggacattattttgtatacacaccctatgagagagatgggtctatagtcattaagagattgggggctattggttctggggatgagggctatgaaggatgcattacttcctttggggaatctgccattaatgaagaattcatcaaagaatctgataaaatcacgttttagagattcccaaaactggttgatgaaattga

SEQ ID NO: 135170 - DNA, 257 bp, Glycine max
  unsure (1)..(257): unsure at all n locations
aaaccaccgagngcagctgaaagacccnttatttgacacacaccaaaggggccagacgngaacccccccccagagccacaaaaagacaggacaaacgagcacgccggaaggccccaggagacaaacacgaaaaaaaaacagaacaagagacaggcccgagaacaccaggcggaaacacgaacgaaaaggaacaacaggcgcccgacaaggacaaggggaagcaaccaccagacccagaagggcaccaccaccaagag

SEQ ID NO: 135171 - DNA, 387 bp, Glycine max
  unsure (1)..(387): unsure at all n locations
gatatacgaacttgtggtaatnactgagaattggtcactccagtgtttgagatgaaatatttactgaattttctagacatctggaaaaaaattatgaaagaagaaccaagcgatttggataaaaggaaaaaataagagaaatcacacaagttggttgagaaatcagtgtgcaggataaaaaaaggtgaaagggaagtgcgcttgttgttctggctcaaacattggtctataattggtgcctattgtaacaccctgatatatatatctatatattattagcaattatgtctgatgtttgattatttgttgcgttattttcatccgtcatattttttagggaagttatttatgtaatagaggggtctggatagattatgatctagcttc

SEQ ID NO: 135172 - DNA, 331 bp, Glycine max
atgagggaaatagtggctatccaaatctgcactttatgcacaatcttgctggtgaaatgtgcagcacaatcttggataggcgcacaaaaatgcctgtatatggctggttgtgaaacgggtagaacatatggggttctggacatttgatatcagatcccaccggtcaaaatgtagatttatgtactacagacttccagtacacattttgagtcgatccaacggttaacaaattggaacgaaagaaatgatactggggtatttgtatatgaaaagatgtggttatagtcgtgttttggcagagtttctgcctttgcctggtttgctggtctgg

SEQ ID NO: 135173 - DNA, 247 bp, Glycine max
  unsure (1)..(247): unsure at all n locations
agcttgcacttgttcacccaaccttacatttggtttcaatnanggagnatatcttacatgatgtcgaagagttntgtgtagctcatgttatgcataatgccagtcgtaaagctgttttagttaaccacagttagttatataaggttctaacttctaaggttctggaatttgttgaacagacttcagacacttacaaatctgacaaatgtctctgtagctatatgtggaacttatgtagtcagatacc

SEQ ID NO: 135174 - DNA, 408 bp, Glycine max
ccttcacccgacgaagacactgactaaaacttatcttctccttcttggacaaagtatggtaggctggaggcaagtaaattttcttcccatcataccttggatgcaactgtgatcgtatacccatatcagctaaatcttgacgggtattcaagccatccttcgtcttgccttgaatgttaaagagcgtgccaatcacactgtcacaaacatttgtctccacatgcataacatcaatacaatgtctaacgtcaatatcacaccagtactgaagatcaaagaaaatggatcttttcttccatatgcaactctgactgttattcttcgtttgggtctttccaaatataggattcaggtgttgacgccgtcatatacctctcaccagtcattggatacgcgcaatatcatgct

SEQ ID NO: 135175 - DNA, 353 bp, Glycine max
  unsure (1)..(353): unsure at all n locations
actcagctttaaggagagatcttaccactcttgcacatacatggattgtnctctccgacaacaacctgactnccacttcccacacctctgatcttaatatggacagagccaagctggtttacagcttattcacaggcatggacatgaatatcggagccctaatctcaggtcatatttctaccattgctcagagtaactcctataggctcagattcctagccttgatcactgctctatgtagagctagaggagttacctctgacagtctaacctatgagagcctgagcccgaccattaacttggcttacattaagaataactggtggaatgtggatgatctgacagttaacttc

SEQ ID NO: 135176 - DNA, 273 bp, Glycine max
aaagaaaagaaaaaaagaggagaaaaggaaagaaagaggaggggaaagaaggaaaaaaggagaggaagggggaggaaagggaaagagagaaaaagtggggaaaggggaaaagagagaaggaggggaaaggaagaaggggagaaaaaaaaaaagaggagggaggagaagaagggaggaaggagaaaagagagtagggaaaggaaaggaggggaagagaggaaaagagaggggaaaggagggaaaaggggaaaggggagggaaagaagaggaaaa

SEQ ID NO: 135177 - DNA, 419 bp, Glycine max
  unsure (1)..(419): unsure at all n locations
gatattacatttgagggaaccaacatctggcttactacatgaaacatgctggatatcgtgttgggagtgactcgaagtgatctgttcacgagagctacgtttgtcatgcaaagacctgtgaatgtatgtatacatgattctgatgatgtcaaagaagaatctaacaaggctgcttcaaatgataagcatttgcttcaagaataattcaagattgcttcaacaaacaaagcccttggttcaagattcactaaagaccaagccttgccttaaaacatagtgctttcaagacatgcaatgctctggtaatcgattaccacgaagtgtaatcgattaccataagacagggttgagaaatagctgttgaaaacggcttgaactggatnttcaacatgaatcgataccatatgtctggaatcgat

SEQ ID NO: 135178 - DNA, 455 bp, Glycine max
  unsure (1)..(455): unsure at all n locations
cttgactaaccaaggctggcactggaaagacaaatatctttttaaaattttctaaccgnnaacactgtctcaaggagttatgccacggaccaagggtacaggtggcttccgtttctttatattattcaccacaatagcttgagtagctagaatgacaccagcaacataaactgcgctttgaatagcacatcttgcaacacgactatgatccgctactccagcattcaaaagatcttcatacgtgcctgtcattgcattatatccagttctccaatcatgtgttctagtcttccggacaacaatgtctacatcaactccggcattagttgcaattgatattcaggttcaaagagtgtctgcaacgatacatgtgcaaccgcttacatatgttataagcacttcagagtgcagacaaagtcatacttcatatgggaaaaccctttttatgtgctgac

SEQ ID NO: 135179 - DNA, 439 bp, Glycine max
  unsure (1)..(439): unsure at all n locations
aaactagctaagacgccagtattatcctatgagagtttgtatattgttatcagaanngcactccttggattatatggttgaaccaagctcatgcttttataaaaaggttcatcaagtcaagttgaaatatggaagtaaccgtcttgcaaaattggtgcacaagatgaatcgagtcacatcactgcttcgtctactgccaaacatatttaggattattgatgtccttgttacttccagtttcaccttgacaaagatgtcatggaccatgttgaaaatctaaattgagtcaaccccatatcctgcatatatattcgcaatacttcgactgtacatcattcgcatgcatccatgcttttcattggttgcattgctcatggcattctcttcttcgaaaataaaataagataaataatatgaactatctaaagaagaaaaaaca

SEQ ID NO: 135180 - DNA, 458 bp, Glycine max
  unsure (1)..(458): unsure at all n locations
tagaatacctgctgccaanncagttcccaagtctaacaataatttcatttccattaaatctgtattgtcttgtaataaagaagtcattgatatttggcatttccgtttgggtcatccttcatatgataggatgcaagtgttgaaacaaacttatcctatgttgacttgtgataaaaccttngtttgtgatacttgccatanagcaaaacagagaaaacttccatttcccaatagtgactcctatgcttctagtcctttctctttgatacatgtagatatttgtggtccttgtaccacaactactttgaatggacataagtatnttcttacaattatggatgatcatactagatttgtgtggattnttataatgacttcaaaagctcagactcaaagctcattacaagcctttggttcctatgttgagaggccatttaatacacaagtgaaagctattc

SEQ ID NO: 135181 - DNA, 373 bp, Glycine max
  unsure (1)..(373): unsure at all n locations
gaacaccctatttttatctgcctttcgtaggggatagaaaaataatctttaatattaaggaatataagtgaacacaaaatgaaggtaagacaccaacaagagaaatgatacaaggagaaattatatcctgggtcgagactattacgtcaattgaggtagcagattcattacgtttattatataaagtcctgtgtatacaacttgtctatcataaaagaatctgcataccagataccgctggaacatgaggcataatntggaggtcatgatattatcaactgtatcaaatcataataaaatggcgtgtgcgctattgatttacattgcgacacctaacacaatataaacatgtcatcatgctagagcatcagcc

SEQ ID NO: 135182 - DNA, 428 bp, Glycine max
  unsure (1)..(428): unsure at all n locations
ttcttcacaaataactatcatgaagcagaaacctagccaaactacccatcatatctgccaaaaatccaatacccacgaaatataagtgagatagaagtctacccaaacctgaaatttcgaggtcccacacgtagagatgcgcttcacgactccgaaaatgccttcctttcgcgatttggagcagaaatgggcaccaaaggttggagctttaatggagtttcaatggaggatgaagaagaaagaaaaagcaacgtgagggagagggagaaagcttctgatatgtgggctgagtgacgagagagagagtcntcttttggttacaaggcttcttttctctttctattatttatttaagcatgcccatgtctcatcgagtggacaaacggccacttttctctgatgtgactcatgctcagccatgaaagaaa

SEQ ID NO: 135183 - DNA, 448 bp, Glycine max
  unsure (1)..(448): unsure at all n locations
agcttgatataatgaanatactatancaattgcttcttanaaagaaaggatgcactattggaaggcttatatgtgtcccactaacgacaggagaatttgtttatttaaggatgatgcttactgcctgcaaagaagctacttcatttgaggatattagaattgttacaaatattcaataccctacatatagagaagcatgctttgccgtggggtttttacaagatgatagagaattcattgaagcaatcaaagaggcaaaggactagggcacaactaattatttgaggaaattatttgtgttgatgcttttaacaggtaccatcaataaacctgaagaagtttggaatcaaacatggcattggctagctgatgacattgcatatcattatagcaaatcaacaataaatacaggttagttttgattaatcttacattcactcccatgaca

SEQ ID NO: 135184 - DNA, 329 bp, Glycine max
  unsure (1)..(329): unsure at all n locations
caagcacctgcggcatgcaagctggcttgagcgcgactcggcgaataagtatcgaacccagacgcaggcncggctncctgcggattcgtcaacggcgtgcagcacggagcctccgacaccgggcaacagcaaaacggagtccagatcatggttcacgtaaggctgaggctgcgggctcctgatcagcttcagccacagctccagcgattgaagaattaccgccagcaagatcgccagcgcgagttacggcttcgatcgggaaccgcgagttaggcgaccgaagcaacgatgtggggaaagtgctgcgtgctgacgggaaaccacgcacg

SEQ ID NO: 135185 - DNA, 414 bp, Glycine max
  unsure (1)..(414): unsure at all n locations
gggagaatgcgaatgtatgtatacatgatnttgatgatgtcaaaagaagaatcatacaaggctcattttgttaaagattaatacaagattgtttcaacaaacaaagccttgattcaagatttcttcaagatcaagccttgcctcacaatgaaagggttcaagtcattcaaggcacatgtaatcgattaccaatacatgtaatcgattactaatggtttgaaagtgtgtaatcaattacacatcatatgtaatcgattaccaaagacaatgatacgtgggaattcaaattttatatgaaggttcacaattggtcatgaaaaacaactgtgtcatcgattacactaattctgtaatcgactactagagaggatgttcangggatatcgcaacagcacatcttatcatttggatttg

SEQ ID NO: 135186 - DNA, 382 bp, Glycine max
  unsure (1)..(382): unsure at all n locations
caattggggcaaaattggatgagggaaagagtggttttcgaaatctgcactttatgcangaatttgctgttgaaatgtgcagcagaattttgtataagtgcagaaaaatgcttgtgtatggttggctgtggaaagggtagtgcacatggggttctggacattggatagtagatcccaacggtcaaaatgtaggcttatgtactatagacttccagtaaaattttcgagtcgatccaatggttaacgacttggaacgaagaanagggtactgggatatctgtatgtgaaaagatgtgatttcgattgtgttttgggcaaaatcttttgcttagcctgatatgcttgttctcgcactccacgcacaattcatttggatctatct

SEQ ID NO: 135187 - DNA, 415 bp, Glycine max
  unsure (1)..(415): unsure at all n locations
tcccagtgcaagaatgcctaatgatcatcatctccttttaatggacgaatgatgaggncatatccatcaaataggatgtgtctaggaacaccatcgatgcctcttgttctactttcttcttcattatgatcactattgctccattgagacaacctatcaaggagcgcatgatctcgtagtttcactagcctctccaaatgaagcatcaaaggtttgcatttggaattgccaaagccccactccatcattaagatgagtacctgtcattataaactgacaaattaccgggacaagacaattatagctgttgtatgatagctcacccactcaagtgtatcacacaattattgcgtctctgtaatgaacactcttgcctttacactctatctccttgagtcttaggccttaagagata

SEQ ID NO: 135188 - DNA, 260 bp, Glycine max
ccaacgactctggatgtaattcatcttcctatctatccatgaatatacaatttgcatgatcttttcttgcgctcaatattatcgtttgtcgctggatcacccacttgcatggcaagtcataatggtagcattgggaaacgttattctctaatagaaatgagacactatatctaaataaagtcatcactaaggatatgttgattactggcagcttgcatatattctatctctaaggaataactatttgactctgaaacgga

SEQ ID NO: 135189 - DNA, 400 bp, Glycine max
  unsure (1)..(400): unsure at all n locations
acacactcccncanatntacagttttgcttgtcctcaagcaaagaaagaacagttcacttgtcctcaagagacaaagatagtggccaatcacaagaaaatggtgttggaatcattaatgacatcatccatatgaactgaatatcatggaatgcttaaatcaattgcctctcacaagcatgctatttctcaaagataacagaacaaagattagagtcaccactgagatctactcgtaagcatgactaatatcatagaatgatcatctaccacaacctcacagtcgtcggttcactcacactctacccgttatgcctatatcatcgtaaacaaccaagacaagtgtcaaccgatgcatttcatctactatatacaccaatgaacacgtaaatattaatctga

SEQ ID NO: 135190 - DNA, 223 bp, Glycine max
gccagtaccaaacaattatgacctttatcataagatcaaactccaattacacaaaacttaaggtgtttgacccatcaagtgccttgctttttgttaaattaagctactggttattgccactaatggcacgcttattatttgataagattgagaacaaggatgttgtttcttggaagcatatgattaggagctatgatagaagtggattgcttcatgaagcatt

SEQ ID NO: 135191 - DNA, 381 bp, Glycine max
  unsure (1)..(381): unsure at all n locations
cctgactcacnggtcggggtgacaaaaggggtgagactaaaatagtctcgatcaacaggctcgcttgcctctactttaaaaaagtgcggataacccttgcgtaatctcccacttccatctaaattgctacatttgaatgacaaagggtgagactaaaatagtttcctataatatgcttgcttgcctcagttgacaaaggtgtggataacccttgggtatctacacatgtcatcggacttgccgtctctggatgacaaaggggtgagactaatatagtctcgatcaacaggctcgcttgcttctatttgacaaaggtgtggataaccattgggtatctctgcatgccacctgactcacgggttgtggtgacaaaactgtggg

SEQ ID NO: 135192 - DNA, 266 bp, Glycine max
caatagataaaaaacatgaaggtcttattcaagatgttttctttggtgcatgggcataatgccatcactctatggctaacaatgaatttattaagaagccctacctttgagttcaactcaaaattatcttctctcgagcgactaatctctaaaactgatgcatataaaaccttcaatgtatttctactaaggattaccctctttcaagcgcccaacccctaaagatgatgccaggatgaagcatataatacatttggtggcatttt

SEQ ID NO: 135193 - DNA, 405 bp, Glycine max
  unsure (1)..(405): unsure at all n locations
ctcaagcctttacatgcatgtgcacaccatatttactatagctggatcttctgattcaatctatntgattgaaaagataatgtatactactcttctaatgtagtggacaactaaaattaaaataatataatagaaaatactgctgaagccattcaaatcaagtaattttgaatctcaccattactatcacgcatgtcaaagagaatgagaatcatacatcgttatgcatatcacaacgaaacattaaaagaaaacatgcttccttatgccaaccaagggaaaaatgtattcatattactgtgaactgtttcaaaattataagacacatataaccatacttaaaaacatggtggtacaatctgaccacatgcacaacacataccacacattatgttagaaaatgag

SEQ ID NO: 135194 - DNA, 256 bp, Glycine max
ggggagaagaaaaagaagaaggaaaaactcgaaaaaaaagagaagagagaagtaaagaaggaggaaaaagaaaaaaaaagaaacaaaagagaaaaaaggacgtaacaaaaaaaaggaagatgaggaacaaaaaaaagacgaaagggggaaaagaaaaaagacaagaagcagagaggagagggaaaaagggaagaagagaaaggacaggaaaaaaaagagagaagagagagagaaaagaggtaagaagagaaaaaaa

SEQ ID NO: 135195 - DNA, 416 bp, Glycine max
  unsure (1)..(416): unsure at all n locations
nttacttaatctaatntgacttagaaataacattaatattctgtatccttccagcaatcaagtatgagattacgtaactcttttctttttttacattaatgggaggtaattcgtccccaccacgatttatggattctgagtgcctctntttaatacttatcattcattttatgttaagattcaagttatatatacttaaagttaactttgtttcttgttgtgattaaaaggtgacaggtacttgaaaccgttggttatttcagagccagaagtgaagtgtcccaatttgacaataacgacgaatgccttattctggccagtgatggtttatgggatgtcatgacacacgaagaatcctgtgacattgcacgaaagcgaatccttctttcgcataagaagaatgttcacaactcatc

SEQ ID NO: 135196 - DNA, 262 bp, Glycine max
  unsure (1)..(262): unsure at all n locations
atatgcttcgtgtggaggattcttaagaatagaaaagcaacaccggataatcttaaaaaaaagggggcattatacttgataatcaagaagttttatgttccctttgtcatggtgaggtagaaacttgntcacatactcttttctcatgttcaaaggtggacttggtttggaaacattactttcttggataaatattgacactggtntaccaagaaacctggaggatcatttttttgaacatgtgactaacatcaagaacaaa

SEQ ID NO: 135197 - DNA, 383 bp, Glycine max
agaaactaagcccgccagtgtcccattgaaaaacttatatcaacctctcttattttgtgagaaggctaatcgaaaaattagggtacttagaaaaactaaatccttaattgaaggcgtcggtgacaatcatagcgaattactaaacaagattggttgtttgcttaaagtcattccacattctccccaagcttccgaaaatacttccaaaatggttacaagatagtcctccaaattaattaatgttattaatgaagatagtgaccgaaattcagattacacaactgagatatgatctgtgtctgaaaagaatataatcctattaactccaacactggaaaccccctccacaattattattacgttcgactgcccctgacctttat

SEQ ID NO: 135198 - DNA, 264 bp, Glycine max
catattgaggcttaataacagtatcatctttcttaacagccacaagaattagcttcccattggattacagggctagatgaattggtgctacctggaataactaaatggctaactaatagcttgttatactttgagtttcaagcctaggtatagtcaatgatcttttgcttctctgtacccacggtttttaataagaaaagtagtatattattaattcaaatttataataaatatataatatttttatatagtatacacatttga

SEQ ID NO: 135199 - DNA, 430 bp, Glycine max
  unsure (1)..(430): unsure at all n locations
tgtacagttaaatataccaaggtgctgtgctgaaataagactaaaatattgtgcataagcttagacgagcccttgcagttcataatcagtattttgtagatgtctacttgcgcatgcatatactatagttaaactattatacagatgatgggcataaacttattgaagcctaaagataaagagtatactgggtgcctgggtggtgatgtgctatgctaaaagcacggaatttggtacccttggccaagttgttttagttcacttaacctggttgtacagtgcaaatacaagtctntactcatttaagaaattattacaatgtgtatatgctagttaatatcttgaggttttcgggcttcccaatacaagaataaagaatcaagctgtaaacttgatttagaatcagctgaagaccttggagctcactaaa

SEQ ID NO: 135200 - DNA, 373 bp, Glycine max
tatgaatactcagctgagcttagatgccttatcttgagaggcacaattgttatactgaaccagaggtgtatttaacagttcactaactctggtttttatgaactggtacgcggcggagatatatattatgccggcttgaatatcattatttcgcacttatgtcaacttcctattgatcagatgtgtggcacctatgccaactcctgccttatgttctagcacagacatcttcatggctattaaatttagttggcgggccatacgttcgagagatggcggacttgtagatcgagtgaactgtctttctagaaatggaaaatccacttgttataaccttgcttggatacgccttatcattgtgataaaatgctat

SEQ ID NO: 135201 - DNA, 297 bp, Glycine max
  unsure (1)..(297): unsure at all n locations
attccattgtgaagaagcacatctttttcataaaatgctctgccgaaaccactacatggttntgggaatcgattacccgggacaagttctgaataaaaatccagagatgtcactcttccaatgggtntctcaagattatcttcaggctataactcttccaatcggtttctcgaccagacataaagagtctataagagcaagaccttgacttgcttttatgcacttgatataacttttacacacacttttgacatcttcttgaacttcttcttttttgccaaagctttctagtttttt

SEQ ID NO: 135202 - DNA, 293 bp, Glycine max
ataaaaccaagctggagttcaggccaatgcactttttttcattctctcttgctcagcatatgggcttcttctggtccacatctggatgtccaccttgatgacacttcctgttctgcttcatgattgtggaagcaccatctgcttttccttaatagttggtccatccagaatggtgttgccatgggccccccccttccagtcatcaaattattcctagtctcactattgattcttgccgcctgatccatgaatttgatccatgccgattctcacgattacacatcactcttaaa

SEQ ID NO: 135203 - DNA, 268 bp, Glycine max
ggagattatttttttcactcataagagataaacaagaaaacccatcaaaaacatatatcgaaacatgaagaataacaaaagaaagatgcaaaaaaaattaaataaagacatgacgaaaaatagttataagtaaaaagatgaaaaaaacaaggagaacaaacgaaaaacgatagacatgaaaagaaatatagaaacaaaataacacagaaaaagaaaaaaaaaaaaactagaacaaaaaaagaaaaaaaaaaaaaaaaatattaaaaaa

SEQ ID NO: 135204 - DNA, 255 bp, Glycine max
  unsure (1)..(255): unsure at all n locations
aaattatgaaccccncccttttttcttcttcatgggaagaacatttagaagctctatttggatcaatcatgaccgaaataatggaattggtcaagttaccgagtgaatgaagtaggaatcaagtatgcaatgtctccagttttttttatcaatcttcttacttatgtgaacttatttcaattctttgtttagatgcatgcacatgagtgatcaaccttgcttctatgaagtgagttgtgtggaaacaagttcata

SEQ ID NO: 135205 - DNA, 378 bp, Glycine max
  unsure (1)..(378): unsure at all n locations
aaacttttttaaatactaacccaaaaaagaaacttataaaaattcgtataagtaatggacaaatgcaaaaatagttgattaagcaaatcatattgaattcagggtattgaaacacaaagtatattaaaagacaatgaataaaagagaacataatattaaaaaaatatgtggattagagatgatgtatactaatatagccaaacaaaaatatttaatatagtccgaaagagcctgtacaaagaaatttattctttgcgaagaaacatccgcgatcattatccttttaacttaagtctttttctttttgaaaatttttcacatacaagtgaactctctaaacactntatggcacttcatcctgtcattcgtaatatcata

SEQ ID NO: 135206 - DNA, 287 bp, Glycine max
  unsure (1)..(287): unsure at all n locations
agaannactaaggcttgcttcagaagattccctaagaagctagagctgagctacacatactttttttatagctaagctcacctcgttgagatgagaagctagagcttagctacacaccccctataatagctaagctcacccccatgacttataacatgaagataacataaaaaagtccttattacgaagacaactcaaaatgccccgaaatacaagacttaaatcctatgctactagaatggccaaatataagcctggacaaagaaaacctattttatattacaaag

SEQ ID NO: 135207 - DNA, 399 bp, Glycine max
  unsure (1)..(399): unsure at all n locations
acctttattttggtcctgcataagcttttgctttgttattttttattcatacatattttggtttgttgactaccaatcttgggtattatgtgtggcaccaattttttttttatatatatatatatatatatctcaagatttaaccttttctgtatccttggtgaatattggatatgatataactgcaatttaatttaaaggctgaaagaagtgactcaattaggctttgagcatcatctaaattaaaaacttggtgtgtgtttgaattaatttatttttgtatctggaaatgctgtcagtcaaactgctcgagaacttctacctganaagctattttgtgaaaaaaaaaatatgcaaattcaacaatgtcttactctaaaattgttgccatctaaatta

SEQ ID NO: 135208 - DNA, 426 bp, Glycine max
ccttagaaactcagcttaaacctctcactaggagaagacaagtataaaggtgtgtctcctaactctaagaggtgagtttgaatccttacatatgaaagagtgcgagtccatttccgattatatttcaagaattcttgctgtttcaaatcaactaaaaagaaatggtgagaagttagaagatgtaagaattatggagaagatactatgctcgttagatcccaaatttgagcagattgttgtgacaattaaggaaaccaaagatttagaaaccatgacgatacaacaacttcaaggatcattgcaagcttatgaggagaagcacaagaagaagcaataaatcactgagcaactcttcaagatgcaactagaggaaaaggaagacaagtgaggaaatgaaagaagtcaacgagacctatgtagaggtca

SEQ ID NO: 135209 - DNA, 252 bp, Glycine max
tatatatatacatatatatatattatatgacccttatagcccaaaaagaaaaaaccaatttaccacttattttttggagcaagggtgctacaaaacccaactgaaaatggttgcctccatgcccaatggaatcaatagccaaagagggcacatccccaatggtgggggttaaataaaagagaaggtgaacctggtatattataaaaagaaaaggcaaaaaaaaataccctgccaacataactctttttttta

SEQ ID NO: 135210 - DNA, 417 bp, Glycine max
  unsure (1)..(417): unsure at all n locations
gaatactaagcttatcattatatatatcatatgatgatagcttgtcattgtattttacatcttacttatactatntcctcataatatattaggtttattaaaaagaacattaaggtagaattaataggaacgtatcacttatcgctttggtattcattcgggtccatgctacattgagtacattntgcttccttagaaatacaactttggcagcacaaaaagctttggtccataaaaacttgccctattaataaaagaaaacaagcgataattacattgtctttacacaataagggataatatgggtgctggtgttgaatctgtactgtgtatgtgctatccttggagcttccattatatatatatatatatattaaacatcggttgtcaatgatcgatgttaaaacgcggttaatg

SEQ ID NO: 135211 - DNA, 324 bp, Glycine max
ttttttttcatcattgaggcgccacttgagctgccaggtctcttcacctttgggcgtattcttttgaaggattcgcgccccctttttgcacatgttttgtagttgcatcctatccgaagccattatactgacactgcctaacgaaggcaaccattaggtccttccaagaatggactcgggaaggttccaagttagtgtaccaagtaacagctatcccagtaagactttcttggaaggaatgtatcaacaattcctcatcttttgcgtatgcccccatcttccgacaatacatctttagatggttcttggggcaagtaatcccct

SEQ ID NO: 135212 - DNA, 414 bp, Glycine max
tgtagccattagaagagaatgagcatgtgattggaagtatgactgttaatgttagtcagtttgtcaaattgattgtgaaggaatgcattaaccgtatctcagtgagagtgtgctccttaaattttgagagaaacaactatcatttagtactgatttttgcgtgaatctctgaagtatgggctgaatgcatgaaattgaggatgatgaaggccatgtttgattgtgatagccacttagccaaaaagttgaccatgtgcttgaatgaattatccattgtacccagtttgagctgaatgaattattgattgattgaaccctgagcctatacagtgttatctcctgctaccttgacttaagttgtaggagagcatcatctacaggaagcatggttcaaagcaaatttgtcccaaatat

SEQ ID NO: 135213 - DNA, 430 bp, Glycine max
  unsure (1)..(430): unsure at all n locations
gctggtatctccttcttcactacatcaagaatcatcgggttgtgtcttctctgnggctgtcttactggtttagctccatcctctaaatttattcgatgcatacatgtggatgggctaataccaagaatgtccgccagggtccagcctatagccttcttatgcttcttgagaactgacaacaacttctcctcttgctcatcaacgagggaggcaaatataatcactggaaaactcttgctatcatccaagtaagcgtattttaaatttgatggcagaggcttcaattctggtgtggtcggctggacagtggtagaaggagatggtttctcagcctttacctcataaagaaagtcagaggtatgtgtacttcctgaaacatggttagtcctatctgactctataaaatcaatctcaagagggtaaacaccac

SEQ ID NO: 135214 - DNA, 255 bp, Glycine max
  unsure (1)..(255): unsure at all n locations
aatgatttatacaagttttgttgagcgataacaactccccatttatgtttacttgtctcagcaaaaagaacattacttgcctgaagggcaagacgggccatcaaaaaatgatgttgatatcaagacataaccatataactgaaattatggaatgcttaaattaatcacttctcacaagcatgcaactnttcaaagatcggagcacaagtattagagtcacagctgacataagctagtangcatgacagaaatcaa

SEQ ID NO: 135215 - DNA, 424 bp, Glycine max
  unsure (1)..(424): unsure at all n locations
tcaagaattgcccaaactccctctccgtttctgatttcatgcttaaataggtggccttgttggtgcttgcgcgctcagtgcaactctagctcgcttagagcgcattagtgaattttggcttagagctcgtctttttgctcaatggatggactcaagcggtctgcttagcgggattagccctcgctcagtgaacatgcacagctcatccttcttccaagtccttcctcgtgctcagccaaaggagtgttgcactcagcggatggcttgctaagctagaagattggcttagcgagcgaatgaatatcaacacttcacaaactngccttattaacctgaaattgagaggaaatgattatttaacacacacaatgggagtaataagtatttattacctatctttaacaaaaactaattacaacacttc

SEQ ID NO: 135216 - DNA, 321 bp, Glycine max
tacttcatgcactcctctaatgacaacaacatcatttctggcactaaattgttgggagttggaaaccatcttctcaattaaattcctggcttcagcaggggtcatgtcttcaagggctccaccactggcagcatctatcatacttctctccatgttactgagtcattcataaaaatattggagaagaagctgctcacaaatattgtggtgaaggcaactggcgcataattttttaaatttctcccagtattcatataagctctctccactgaggtgcctaatgctcgaaatatcctttctgatagtccgtggcctggaaac

SEQ ID NO: 135217 - DNA, 433 bp, Glycine max
  unsure (1)..(433): unsure at all n locations
ntattatgccctctcncctcggcggagatttcttcttctgctaatgcgagatagttgttggcagtgatattattgaccagccctccaaaaccttctaccgagatgtcttgggccacgtgggcctcgttcaaaacttttactagcagatcccgatgaggctcgaagctcatgagtaactccaacagcgagaccctggccggggttttgttgagctgttcgataaccttgaattcgctctgctgaattatacggaggaactcgctggcttcctctagcgacacctcctttttaccatcctttntctccggaagaccttttgccggaatatctttattcgaagtgaggggtgcttcgtcattntgttcctccaccactcttgctttccccttgacgttcgcgggttggactggtaggtcttggggtgcaaacacac

SEQ ID NO: 135218 - DNA, 146 bp, Glycine max
ttgaagccccctgagcctatggttccctttctttgttttgaagctcattacaagccttaagtgaaaaaccatgatatcaccttacccttaaggaattttggagctttggaatcggtttgggaataagtgtgtgtgtgtgtgggggg

SEQ ID NO: 135219 - DNA, 430 bp, Glycine max
  unsure (1)..(430): unsure at all n locations
aaacnaagctcttgtgtgacaaacatcaatacctcatttgattatttattttccagaacctcaaaagcttgagaagctctttgtgaaacgagataatcaattaccacatttctagaaatgcagaccacaaagggattttaatgaattaatcgataaccatatttgacaatcgattaaatacatcctggctgttaaaattataaatatcctcactcgttatttctcattagtgactctttatacaatcttatcttttagaaaacatcttttgaatgtcatctaaaggaatttctctgcatttcttcaagagattcaagtttatcaagaatcattcattcttcatcatgagtttgatcatctatggaagatctcgaagatgttgtgatctacacaccgaggtgaattcaattcaattctgatgtctttcaac

SEQ ID NO: 135220 - DNA, 348 bp, Glycine max
  unsure (1)..(348): unsure at all n locations
tgacccccgcgacatatctccacgtaccactctgtggtcaacaataaaaacaggaagtttcacccttcaacactctctcatcttaagcttgtaggattatggggtacccatcacatgtggtactaagtggcggccgggcgatggtgcacaacaagttttccacatacacaatgcgcgcataaacccaccattccctggtggccacctccatctgagctcacgtattcccacgtagcccatatactcgtttctctcaacaccgggtccccatcaatccttccaagctttcacaacatncaatcaaaacaacattcaaacagcacaagctatcacagtccagccaaacag

SEQ ID NO: 135221 - DNA, 423 bp, Glycine max
  unsure (1)..(423): unsure at all n locations
tcagatntgcccatacaaccaaatgggctgttagcatagttgatcttaaggccagaagccatctcaaagattctcaagatagatttcataactctaacattagcaggagttgcagaaccaaaaaacaaagtatcatctgcatattgcagaatattaatctcttcctttttgctccccacttggtaactgcagaacaaattcttagagatggaagtccttatcaatccggtaagaccctcggctactatgttaaagaggaaaggtgcaagggggtttccctgccttaaacctctctcaggcacaaactctgtggtggggctgccattaattaaaatagagatagttgcactagacaagcatccatagatccaatttctccatctatcacagaatcccattctcaccatcatataacttaaaaat

SEQ ID NO: 135222 - DNA, 396 bp, Glycine max
  unsure (1)..(396): unsure at all n locations
ccctgatacgcaccanacccttatncaacaacttctttacttgaggaataacctcaagctcaagaggtgtggcggtgctaagggatgtttcccttgataggagaaggtagaaagattgttcaagcaccggccgcagattccacttgtaagactaactcaactaggaccgcattaagacacacatactcaactaaattatcgcaccccgattcctcatgaatgcacgacaactcagccctgcactatcaaggactntagagtcagaccagtttccactattgaatgaccttaacaaagcatgcatctacgtgatgaaggtaaaggcatactggaatgaaaaacagatagcacagagaacacataaaacatcattaaatagatagaaatatatttaca

SEQ ID NO: 135223 - DNA, 428 bp, Glycine max
  unsure (1)..(428): unsure at all n locations
tcccaggatgatgcctatcgaacatttcctaaccaatatcatgcttatttcattcagggattgaataaaaaaactcattagccgacatcggtcgtgatgtagccccaactgtgatgagaatcatgaaactggccaaatacaggctaaaggcccaagtggagaaggacaaaggcctaagtggagaaagacaaagcccccgagtggagaaggatgaaggcccaagtggagaaagatgaatgcccagaggcagaggcactatcaagacaattaatgttgctgaaggcccaaactaatttgaaggcccaagttaaatatatttnttagttataatttttatttattgtaattttggcccaaactatttagaaggcccatgtctatttttatcttttaattcacatacactataagtattggtttttgctttg

SEQ ID NO: 135224 - DNA, 449 bp, Glycine max
  unsure (1)..(449): unsure at all n locations
ctcaagccttgtgaagctcctggtttagccttacccgattgtactcaaccatttgaagttgaatgtgatgctagtggagttggcattggggctgttntgatacaaaacaaaaggcctatagcttatttctcggagaaattgggaggagccagattgaactattgcacctatgacaaagagttctatgccattgtgagagctcttgatcattggaatcattatttgcgttctaatcactttatattgcattcagatcatgagtcattgaagtatatcaatgggcagcagaagttgagtccaaagcatgcttaatgggttgaatatcttcaatcctttaatttctcttcaaaatacaacgatggtnagaagtatgtggtggctgatgcactttctaagaagtatgctntaatttcaattcttgaaactcgtttacttggttttgagacttt

SEQ ID NO: 135225 - DNA, 403 bp, Glycine max
  unsure (1)..(403): unsure at all n locations
tcttatccaaagcactctcttggtggtgaagcttcttcttttttgtttattctctagnggatggtgcctcctctcacctcttctcctttatctttcgctacaactccatagctaaaaattaccattgaatgaccttattaagatcaaagatctagcccccatagaagcttctcaagcaagcttccatcaagtgatatcagagcacaagagcttcaagtacgtgtgctctctaaacctccattaattttcagctttaccttctcctacatcgttggttcttcatttttatccatgtatctcctcacatgtctcgtgctgaatgttgtaacatgatttttttagaattgccactgattaaacgtgctatagaagctagatttgatttttatggttaaatttcttg

SEQ ID NO: 135226 - DNA, 337 bp, Glycine max
ggccacccagctcgcccaggcgagctatgttgcttcctccataagctactcgtcttctggaggaatattctggaagggccaagtgggcctggttgctatttgcacccccatttgcactaaatacacccccatgctgctttttgttgaagctttatccggaacagtacgaaatattacgattttcgtaatgatgcttgttttctttccgtaatgttacgaaaccttacggattacataatcaatccttattgcctgtcggacgttacggaactttctgattgcacagaacactatctttaatttccgtctgaaatgtatctactgattggcttaaatt

SEQ ID NO: 135227 - DNA, 242 bp, Glycine max
aaaggaagaatttaagaggaagagaagagaaagttaaggaaagaataaggagaaaaaaaaaaaggagggggaaggaatgggagagaaaggaagagaaaaagggaaagggaggtaaaagaagaggaaagaaaaaaaggaggggaaaggaatagataataggagtaaagagaaaaagagaaaaaaaaagggggtgaaagaaataagaagaaattatgagagaaaagaaaaagaagtggaaagag

SEQ ID NO: 135228 - DNA, 427 bp, Glycine max
  unsure (1)..(427): unsure at all n locations
tcaaatntcccacgtcattaaccatagagtctaacatgtttctactatttaatcgngggatgcgggatgcgtaatactaatatcatgaaaaagaaaaagatggcttgtgtgcgtaaattaattgattggcttaacacttgttggctccaataattattatgcatcttctcttgttggtctgcacggataacactatgttgaggcacaattggagcaaggtcctccatttgatttaatgtggatcgaacttattccaagaatccatcttttaaattaaaaggccacatatatattccaaggatgtgtggaaatataaatgagctcttatcacattatctaatctttctccctgaatcttgagttaacctaattactttatgttacatgaagcttaattcattccgaatacagtctttttcttatccaa

SEQ ID NO: 135229 - DNA, 200 bp, Glycine max
cttcacagatggggcatgcatgatgacccttaacactggaaccgctgagatttccatatgctggaaagtcattaatggtacaaaaaagcattgcacacatttcaaacgtctgcttgcgaaatgcatcaaacactacaaccccctcgttccacaactttctcagatcttcaaccaacagacttagataaacatcaatttca

SEQ ID NO: 135230 - DNA, 265 bp, Glycine max
gagctagaaaaaaagaaatattgagaaatttatcaatttttcacaagtgataattacttctttgtttgaccaagaaaacaactgtaatgactttgtttggctaaataataatttttttttataaaaaaatgcattctaagatggttctctgaaaaaccgttttaaaatgtagaatcatctttaaaaccttctttaaaagtgtcatagaaccgatgtagaatcatctttttgatgtagcgcatactttcttttttggtggtttcta

SEQ ID NO: 135231 - DNA, 418 bp, Glycine max
tgtgataaccattcctttcggtgaagccctctaacagatgcatatgtacaccaagtttgtgaaagacctcctaagaaaggaaatgatattaataatgaaaatattgtggtagaacaaaatagcagttatattatttagaaaattctaccacaaatattctaggatcttggaagtgtgactattccatgctccatcaggacggtgtctgtaggaaagactctcattgatttgggggcaagcattaacttgatgccaatatctatgtgccgaaggattaggaatctgaagatagttcccaccaggataactttccaattagcatatcattctatcacaaagccatatggtgtggttgaagatgtccttggtaaggtcaagcaattcaccttcctgtagatattgtcatcatggatataga

SEQ ID NO: 135232 - DNA, 137 bp, Glycine max
  unsure (1)..(137): unsure at all n locations
ctaaactggtttccctaattaaaaatctatttcactttntactcaaggtatgaattcccttaatgaccatcttcttaaatattaaatccaatgaaacaatttggatatgaatattaagccataattaataaaggaga

SEQ ID NO: 135233 - DNA, 244 bp, Glycine max
aaactaagctttataagctaaccatttatcaataagactaagagatttatattcatataattagagtctatctctgttatcttactgagagtgattcttcctaattctagagtgatgaggacatgaccaagagctagggcaaggattcactgaatgacttggagggcctatgacaagggctagagcaatgaaagccaatgaagctcttcaacaagtgttgtccatactatttgaatacaagccc

SEQ ID NO: 135234 - DNA, 355 bp, Glycine max
agcttgtgcatgagagcgagaatgctagtggttttgatagttcttggaggaccctaaaatgggagggttagaaattaagataaaaaattgagaaagtggaaatagttaatttaaggggtgaaatgagagaactacagataaaatgagattgtgcatgttgttgttgcgagcgatgacttggagcctggagacggcgtcctcattgacgacagcgtcggcgaccttgatgggatgatacttttctacccatggaacgttgtaggcattgcttgatgatgacaatgacatgcttctgccaacagtgaacaaaggtgttcaagtttcagaccagagcggagaataaacgttctaaagc

SEQ ID NO: 135235 - DNA, 433 bp, Glycine max
  unsure (1)..(433): unsure at all n locations
tattctacttacaaaatcgagtgtcaattctggaagaaagtatatttaccacctctctgatattaccaatttgataattgagaacaaaggctcaagattcttcaatgtactctaagattnttttgctaagtaaacaaaaattagattaactacaaaaactaactagtaatctgttaaaaaaaaaaaaaacctcttctcaaccttgcattttgtaatggaagaaaacaaattaaaatatgcaatgataaagaagaagttgcagacaataatataaaagaagacaagagatcatcaatgtaattgtggttaagttctggtgtttctgcttttatttcttagcatacgaagcccatccattatattcaaaataaattatttaattgttattcaagaactttctaattattgacaagtatgtatggacacatatttt

SEQ ID NO: 135236 - DNA, 399 bp, Glycine max
tttccccaaatctataactagctttgaacaatatacttggccttcatttaactgtctttgggcttggaggccacgctcaacaaagtactttcgacacctactttacgttgatttcaccaatgctgttatgggaatggtgcgacaatcctttaaaaccttattgatacattctgagaggttcgttgtcatgtggccatatcgacgttcttctctatcgtaagccaatcgccatttttcctttgagatgcgatcaatccatgttgctatggctggactcaattcacgaaatttttctaaattttgataaaaaatgtgcttgcaaggagtgtaggctgcatataaacagttatgaattaaaattataagtataaatgaaagtaaatacacgtgacaatcaat

SEQ ID NO: 135237 - DNA, 432 bp, Glycine max
  unsure (1)..(432): unsure at all n locations
tcttatccaagacaattcttggtggtgaagctctatcttccttggcttattccctagngaatggngcctcccctctgctcttctcctttgccttccgctgcatctccatggtgtaaaatcaccattgaaggacctcattgaagctcaaagatccagcctccatagaagccccacaagcaagcttccatcatttgattcttaaatgagtgtcacttatagtgaccaaataattaattaaaccatgattatatttgaaggatgcatgtgatgatgtcactagcatcaagcttcaatgtctttgtatgactgccaccttgtgtgggtggaatttggcttctctcatttccaaatattgacaatcacttcagatctgttaagtctcagatagcgtgcgaaatctaaaattaagttatggaagtaacaggaatgact

SEQ ID NO: 135238 - DNA, 237 bp, Glycine max
  unsure (1)..(237): unsure at all n locations
acatcaccacgactgccaccattttgtggcattaacatcgtaatgtttatgggcttttcttgtgacttgttgaatgatgctgagagttntgagggtagattgtcacgtatgcactgtgataacttttgtcctagagaaaacaagggaaggaaaaattgcatgcatgcaaggaagaagtctgcgtntatgagaaaaaatggatgattaaaccttgaattgaaatttaaaaaaatggtg

SEQ ID NO: 135239 - DNA, 233 bp, Glycine max
tgtccacacgtccggttaattactcacaagtttaaatatgaacctcaccataccacgggcgaaaaatggcgtacttgatgcctactgcacccgaagttctgcctcacttaccgccaccctattgcactgtgtacttacataatactccattatgagttgtacccttaaccatctaaactctcctcatggtgctttgaataacggattctcctctacagatacctatccctcca

SEQ ID NO: 135240 - DNA, 342 bp, Glycine max
ctaaggttggcgaagcgtatgtgaaagttttgtttttccaactctactataaactctgcaaactcagaatgataaagttccacattcctttctggaacgattcctctctaggcttcctataattgaaatcacatgttatcattctgcgtctgtggcctagaatcactactcttatgttctttacaagccatttgtctcttatcgaaccaaacaactgatcaggacacaagcttttcaaattgtataaactggaaaataaaactggtaaagacactggccggctaacgagacaaggttcgctttgcttggcttagtaaaaaacaccactcgttatcgacatgg

SEQ ID NO: 135241 - DNA, 105 bp, Glycine max
tttatctcattcgcccccttttttcccttttttctcatgacactccacttataagtatctgtggactctttcctgtttcctggaggccctccacattcttgttcc

SEQ ID NO: 135242 - DNA, 408 bp, Glycine max
  unsure (1)..(408): unsure at all n locations
tctcactgagacttcctcaccaacacgccggtttctgttttgtccggatttaaagcgggttgcagtactgactccgctttcctaaccgtactgaaggcggttgccgnggccttatcctctatggatttctggagttttaacatgacctccgagatggaagccatttgatcttttaaggccgatagatcggccttcatctgttcctgcacgccctcttcattatccatctttctggatcgagtgttataggggtgccttggtgttttctatttatgatgaaattcctaattaaataaacaacgtggagcttgccaccaaaacatgaatatgcaaatggatgatccgagcacttggatcgaccccaacgtttatacataacatgattgagtcagaaccttctcattttat

SEQ ID NO: 135243 - DNA, 386 bp, Glycine max
  unsure (1)..(386): unsure at all n locations
ttcttgaganaacttccttgagaagcttctgtgagataactttcttgagaagctagagcttagctatacacacctctctcataactaagctcacctccttgagaagcttctttaagaagattcctaaagaagctagagcttagctacacatacctctctaatagctaagctcacctccttgagatgagaagctagagcttagctacacaccccctataatagctaagctcacccccatgacaaaaaaacatgagaatacaaaaaaaaaagtccttactacaaagactactcaaaatgccccgaaatacaaggcttaaaccctatactattagaatggccaaaatacaagacccaaacaaagaagaaacctattctaatatttacaa

SEQ ID NO: 135244 - DNA, 135 bp, Glycine max
  unsure (1)..(135): unsure at all n locations
ctcttgctgcanaattcctctttggtggtgttnttttggtttgtgctaaangaggtcttcgtcattggaagtgccggtgacacgctctttggttgatttatggatagccttcgtggataattgggtggtggggta

SEQ ID NO: 135245 - DNA, 255 bp, Glycine max
gtcttttgcttctctgctttttggtcggcaattaaccttaattccatggtattcatcttattctccatgtatatccttccattgttagaggagattaaaaaaataaaccgattaaatcttagatctacacttgttcttgcatttctatggttcaaattttatagatctactctcgaatcatgtttttgtgttggatttaggttctatcattttccagtcataatcttcttgtgcttgacctttagatctaaattt

SEQ ID NO: 135246 - DNA, 443 bp, Glycine max
  unsure (1)..(443): unsure at all n locations
attacggacacataaaactaagcttgtgttgtccaagcaagtctttctggcagagggatgttgtgatatacccttacgatggagaggattatgccaattggcatccataagaaggtcaagagtgccattagaggtgttggcctttgaactaaaccgccctcatggaaaattattgggcttagaagcttgtttcttggtagtggctcacacttgatccttggcaccatgtatccttcctgtaggggaaaacacaatttatgaatagattggatacatgagaaaaatgagcatgagtgacattttcatttaattcctgcctgaatttggatcttatatgaatgattttctttataatacttctgccagaaaatacgaaaataaacataaataaactttcttggtnagttaaaaataaattatgtacttcagtcttaccaaagttt

SEQ ID NO: 135247 - DNA, 418 bp, Glycine max
  unsure (1)..(418): unsure at all n locations
gatcctcatagtcacctgcagctgcagcttaacctcatcgtctcttacagactttatatatgggagccaatccaatccttgtgttcggactctcagccacttatgatagccgccgatgatcccattactgcttcccctaagctctctgtcctttcttcacgccgcatcccatgccttgcgaactccttggagtaccctcgcgttgtggtcactgaaaccccgtgcgatgaaaggcgtgatgctttcgtctgatggcactcctctcatgggacatccttcgcatgaagatacaatcctgattcttccttccttctagcgagggaaccaattaacagacgcccctccatgctagccaagagttggtcccaattcgccttacctttntcgacgcacgagcggggaccttatagcggataga

SEQ ID NO: 135248 - DNA, 373 bp, Glycine max
gtataagcgcaagtctggaagacaaaagtcatgtggtcgcaatgtgcgaagatgatggtcccagtactgaggatttggtacgaccatgccctcctgatctgcaactgggaaattggggaatggaggaacgcccccgcatttacccaacgagcataatagtgaacctttacggatgtaaaagctctataatcaggcctgagctttagaagctatccttttgttaaggctctgaggctgtcgatctataatatataatacaaggatctttcttcatgtggtcctacgtcgttacccattctcattcatttgcatgcttacttctttttgtgaaacggcagatgcgatgacgagtcccacgaatgtactaatacat

SEQ ID NO: 135249 - DNA, 390 bp, Glycine max
  unsure (1)..(390): unsure at all n locations
gacttgctttcctatctgacattcaccacagattctgccttcttctattttcaaattgggaatgcctctaacagcacctttgtcaatgattttcttcatgcctcttaagtgcagatgtccaaatctttgatgccatattctgacttcatcttctttggaggatagacatgtggaggaataactggtttcttgaggtgtccataggtagcagttgtcctttgatctgctgcccttcattaaaacttcactcttctcatttgtcaccaagcattctgactttgtgaagtttacattgaatccttcatcacacagctgactgatgctgatcaagtttgcaatcagtcccttcaccagcagtactttgtccagactaggaangccatcatggac

SEQ ID NO: 135250 - DNA, 473 bp, Glycine max
  unsure (1)..(473): unsure at all n locations
aggcttggacctgacaaccatcgctcatatattgggtcattaatagaattcaccaagcctacctaagcatccattatattcttccagttttttgccttagtcatgagcatcttgtatnttgctctgacatttntagaaatatggaattcacataactagttggttgaaaaaggcaagacaaccttcaacgcactaataagaacaagatctttgccaatgacaatcacataaagcaacacatcatccttcacgaacaatcctttgaccttatttaaagcccattcaaaattgtccatcctctcaaattgtaaataagcaaatgcaaccgaaaaagtcatttttattgaagtcacaccaacaatctccaacaatggaagatgatatttattcatctttgtagtagtatcacaaataaacacgggtgagaatgaatttaatagcttgatggaatctggatgagatcacattatatc

SEQ ID NO: 135251 - DNA, 285 bp, Glycine max
ttctatcaatagacctccaatctttaatagagagggttaccactactggaaaacccgaatgcaaatttttatcgaggcaatagatctaaatatctgggaagccattgaaatagggccttatatacccaccacagtagaaagaagttcaatagatggtagttcatcaagtgaaagcataaccatagaaaaacctagagatagatggtctgaagaggatagaaaacgagtacaatacaacctaaaagccaaaaacataataacatctggcctaagaatggatgaata

SEQ ID NO: 135252 - DNA, 461 bp, Glycine max
  unsure (1)..(461): unsure at all n locations
ctttacggacactataaaactaagcttaacatcagaccacttccaggtgctggaactacttcacatggacttgatggggcctatgcaagttgaaagccttggaggaaagaggtatgcctatgttgttgtggatgatttctccagatttacctgggtcaactttatcagagaaaaatcagacacctttgaagtattcaaggagttgagtctaagacttcaaagagaaaaagactgtgtcatcaagagaatcacgagtgaccatggcagagagtttgaaaacagcaggtttactgaattctgcacatctgaaggcatcactcatgagttctctgcagccattacaccacaacagaatggcatagttgagaggaaaaacaggactntgcaagaggctgctatggtcatgcttcatgccaaagaacttccctataatctctgggctgaagccatgaacacagcat

SEQ ID NO: 135253 - DNA, 425 bp, Glycine max
  unsure (1)..(425): unsure at all n locations
ttgaaacctcgtataccctctcatcaccagccgctgtcttatgcttccagatttgttaaatgccacggaacgtattggaagtgtaaaccttgtaatatttctctcgaattcttcacctgccaagcatcaatcctaaaatccttaaaaattgaaacattgaaacaaaatctaaaaattttaaaaaaaaaatgaaaaaaagaacatttactcgagttaggtgcattgggaaaaccttatgaaaataaaccatatttataaggagctattttgtacttttttaataaactctctaaagtagtatatgaacttcctatttgaatatataaacatcttgtgcataaatacttacatgataatcactcattcgataaatacttcattaatttggttagccanatatatgccatagtaccagtcaaaaatga

SEQ ID NO: 135254 - DNA, 421 bp, Glycine max
tgttaaatatagtgtgcctttatctaaagccaacttatattaatatttgtgcctttattcacttgcactttcattcttctccaatcttattttcatccaacctaagtttcctcacgaagctttgtttgtttgtctacatcccacttttttcatccttctatccatctcttgtttcttgcattgtgaaccaatggtacatgcacaacctagacctattgatgacttgttgttaaacttacaagacaatcatatttcgaatcaagtgtgagaaggccaagagagaatgatctgtctaaggtataatactatttgggctgttacacacttagatcggatagataattgtgtcaaagacctaatcgctttagctgattttgctcatgttataaatgctggaaaaattgatattaaccagcatttg

SEQ ID NO: 135255 - DNA, 294 bp, Glycine max
  unsure (1)..(294): unsure at all n locations
gtgcataattattgaaacatctaatttatattatttnttgatgcatacacaacgtaacacacgaatacgtgccacctgcccacaacatttataccgctcataaaatttccttaatggtcgcattaacgttcagaacattgcgggaacctctaagatttatactagctgctggaacgggaactctctttattgcgtccttgaatggctagaggatatatctggtgcgttctaaattccaaccctccttttgttcttcatgtcacagccatttcattactggggacaagggaggat

SEQ ID NO: 135256 - DNA, 313 bp, Glycine max
  unsure (1)..(313): unsure at all n locations
gcttggacttgctcttcacggtggcaatgtcattgggagatgcccaaggagggggagaggtgactgactgangactgagaactctttcttatatcataatctaacaatattgtttggtaaacttgatcaacaatattgtttgttaaacttgatcgtatgctaataagcacttgaaaagtgggattggttcattaatatttgtgccatggtctcgcacttggcgaatccttatccatgctacatagttcatgtccctatgagagattttcanaaacttattgaaaggttatgcatatgtgttttcatgaaaatt

SEQ ID NO: 135257 - DNA, 424 bp, Glycine max
tagcaatcatgtcatttattagctctgcaatgacagatacattctcatttgtgagttccagatgttccaccatctcctcagcaatggaaattgctgtatcagaattgatatagaatgggaaatggatattcctcgctccacctagagacatattaagtattacgcatatgtatctgcatattgcacagtaaaagaaaaaaagatacatctgaacgtaactcaccacaagcatttgcaattctcagtgtgagtgaaattgtactttcagcatttatctcccctcttagcataaatatgttattctcggtcatcctcacaagatcaaaaaatgaaacttgagaagtctcttcaattcttcccatggaggagccaggtgaagtacgcctggattagaatctatctcatgggatgaagctcacatgtt

SEQ ID NO: 135258 - DNA, 236 bp, Glycine max
acacaccatttattttgagccagtaagggtttgaaaagttaaaatggtgaaagctgaagaaggttgattaccatggctggagataggtatctttaaaaattatttttcttctctgctttcattggttgaactaaatggtgtacttatgggtgttaacatgttccaaccaatatatttattgtcttataaaaaaaaaatttaaaataaataaccataattaataataatttaagtca

SEQ ID NO: 135259 - DNA, 208 bp, Glycine max
accccctgatcaaacagtttcaacaaggtaaatgagtagttccgacctattaaataataaccccaagggtaatgtatgacacataaaatatatattaatctgacacttcccctcaagttggagcatataaattgaatccaagggcccctctattatttagtcaaaatatcttgaagttgatcatttgagctgacaaactttgtactat

SEQ ID NO: 135260 - DNA, 385 bp, Glycine max
tacataaccatgcccatatgtcattgaggcatttcatcaatcacttggtgggcgcatatttaggcatgaatagcaagagagtgggggcaatgtggcatgccccattgcttcagaatgcaccctatgcctaaggccatcccttacaacccctcaatccaacaaaaacaagcaacaatttgaggataaatccctcacgttttttagcaaatacacgcaatttagagcaccaaaacacatcaatggaaagctagagagcccaagaatgaggtacttacttgttggagacgaataatagcgcaaaacatatatcaagaacgcgaaaaatggtgatcctatggctgcatactcgtgaaacccgtgagctttctttttgaatgaggggggg

SEQ ID NO: 135261 - DNA, 315 bp, Glycine max
tctttacacctcttcagatggctctattatgccggccaggaatctattattacactgctcagaagatcttaaatggataatataaaaatgtcaaatattgtacaagggagaacttcttatttaacacataatggtaagaaataagctggattcttactgcagaatatttcatcctcccttcctgggatttttataactagaactgattcttctttttataatattgcaagctaaggtgctgaaaatggaacaggtttgcacactaaaaatttggccaaaaagagagccagttcttttttatctaccatggtccat

SEQ ID NO: 135262 - DNA, 441 bp, Glycine max
  unsure (1)..(441): unsure at all n locations
aaactaagcttctatgattctngattgactgaggttgctggtgagacatttatttatcagcagaaaaacccaaaaagtgatggatcggaggaatctctggatgtaaatgagttgctaactgattctgcccctgcattggcaacaccaaatggcgatgaaaatgataccacagctgaagtaactgaaggcgtggctgatttgaaagtaccggatactgtctctgctaatgaccaagatgaccaactgactctatcaactgcagatgtagattccttgttatgataagtgccttctacaagctntgctcacaacagtgaaggacaaagaccttcccttgcctggaagcacgctatggtggaatattctccctctctttcttttggttgacctagttgaaccatttgaaatagatttggccaagaatctagcataccatgaatt

SEQ ID NO: 135263 - DNA, 344 bp, Glycine max
  unsure (1)..(344): unsure at all n locations
ccctgatcctctgagncacctgttgtcatgcaagctntgcaaagcaaaagtttggatggagagcttatatctttaggttttatttaaataatttattttttaaactgggtcatggtgagtttacggtaatgttgcatctttcattttgtgggtctagctatgatttgtccatggtcacaattatctttttcctttttgtttagggactctgcattgtgcaagcacatgtcatcacaacttatacatatgatattcttttttctttaacgtttaacatgaattacttattctgttgtggttaatttcatagcttacatgatcgacatctcaggtaaataaaaaat

SEQ ID NO: 135264 - DNA, 442 bp, Glycine max
  unsure (1)..(442): unsure at all n locations
tcaggctgttcaattgcttcagattgttgcacagaagggcaaatgtctgtgtggtggtcggcagaggagcataaaccatagagtctggcgacaggtgcaaattttttattcatggccagctaggttaccaggttaaccaaggcatctagtttaccttcaagcttcttagtctcggctgatgaagatgaattcgtggctacttcatgcactcctctaatgacaatagcatcacttctggcactaaattcctgggagtttgaagccatcttctcaattaaatttctggctttagcacgggtcatgtcttcaatggctccaccactggcagcatctatcatacttctctccatgttactgagtccttcataaaaatattggaggagaagctgctcagaaatctggtgctganggcaactggcacatagtttcttaaatctctctc

SEQ ID NO: 135265 - DNA, 281 bp, Glycine max
  unsure (1)..(281): unsure at all n locations
tgaatttgtagctacctcatgcactcctctaatgactatagcatcaattctggcgctcaactgctgggaagtggaagccatcttctcattaaaatttttggcttcagcttgagtcatgtctccaggggctccatatactgagtctttcataaaaatattggagaagngctgcttcgaaatctgatggtgagggcaattggcacatagttntttaaatctctcccagtattcatataggctctcttcactgagttgtctaatacctgagatatccttcctga

SEQ ID NO: 135266 - DNA, 428 bp, Glycine max
  unsure (1)..(428): unsure at all n locations
tcctcggggccatntcctgcgaaggcaaacatttggagagtttgttttaccaaggaatgctattcttaaaatgaaaatggcatacgacctcccccaataacacaaacatcaatgtaaatttagagcgaactcatgcacatacttnctttccaacattcactcgcaccagatattcttctaactaagaaaaatccacccaggcacaatcaaggcaccttcgttacctagatcacttatatgtacttccaaggtgtatttgctacctacatcacatgcacttcctntgctaaatttacatacatgcatanctcaaagcatttggctaccacaaatagcatacgtgcacattctggtatttctaatacctatacatatacaaactttgtgatgaatcttggctacctacacaataatgtgctacatttcat

SEQ ID NO: 135267 - DNA, 301 bp, Glycine max
  unsure (1)..(301): unsure at all n locations
tttattttaaaatccctttttcatgatggataagactttgcattagtactcatttaataagataatagcattgaaaaaactttctcaaaaacacaaaaccactttatatttctagaatacaatttatattgttggatgaaataatatgggaaacgtatattactactttttttatttatagaaataagtaactcttcctgactatgtttctttaaaaaataaataaatcacacatcctaattatatatgagttccttcttttntatatattaaatattatttattctagtcaaatcatgaa

SEQ ID NO: 135268 - DNA, 384 bp, Glycine max
  unsure (1)..(384): unsure at all n locations
tgtatttaaaaatgttgtaaaaatacttgtaattaatatcttaattttcatncctttcttaatatatatgtggggggtagagggtgtcacaagtttatgtttaaaaaaatgaaataaaataaaactattttattatttaaatattctatgaaaaaataaataaaagtgatttcatctcatattctattaaattgaaaaataatcttatttattttatcttatttgaaatgacaaaaaaaactaaatatcatgttattgtatttaatataattaagtaaaattgatatgtcccctcgtctaataagttaccaagtgggctatggcttacattatacataatgaatatgtctccttgtctcttatacttttcccatacaatcttaa

SEQ ID NO: 135269 - DNA, 220 bp, Glycine max
gagcgtttacaccaacagcgcttcgaagccatcaagggatggtcgtttctcccggagcgacgcgtccaactcagggacgaccagtatactgattttcaagaagaaatagggcgcccgcggtgggcaccactggttactcctatggccaaggttgatccaaaaatagtccttgagttatatgcccatgcttggccaacagaggagggcctgcgtgacatga

SEQ ID NO: 135270 - DNA, 250 bp, Glycine max
actaagctgctccaaaccatgggaagcaaagtaggcctattctttttttcttgagaagtctgtatgttctaccttgagtaaagaatataccaccattagagctggacttcaaatccaaaaaatagtcacctcccactgtgttcagcgaaaaattagatgaagttggttataaatagcggcctaagttgatagaactcccgcgattttatattcatcacttaccccaaagataatgattgagaggtatttt

SEQ ID NO: 135271 - DNA, 356 bp, Glycine max
agctagcctcgagaagaacaggggctgaggttaagcgtgtagatatattttgtcccacgtgatcacaaagacccccactcgaggaagccacagtaccattcgtgaaacaaccccatctattaattaatctgcactccacggctccagaactacgccagtcatctctgaaagacttctatgacttttgagaggcaactactctctccaagactgctgaatattcacttttattctccgaatccgctgaccaaactattatccattgatgagatagacgacgatacctacatcatttgtgttttcgcaaagctatacattcactcacgccctctctccaatcttggctcctcgacaca

SEQ ID NO: 135272 - DNA, 456 bp, Glycine max
  unsure (1)..(456): unsure at all n locations
ncgcttgatgacaaacgtgatcaaagctgngaagtaactcatgttgtggtccaaaaagaaaaggaagaaatatacccatggccatgaacattctcctcactattgctgcagctgctattggtcctcatncattcaaccattagcttcacccttaccttcatcctcatgccttgattttgaatacagcaactatggaacattcttaccaaccccggagccggagccggagccggaaccgcaaccacaagagattgccagcctaaactcatcgtatcagcaatatatggtatcaggttcggaaccttgttatggcattccagtcccggtaattcatgcatctcgaacagaaagatcagctggtcaatttggatgtcctttagctttgttcttatttgttcgctgttatttcatgttctactccacaagtagtgataccgtttccaactatgctgctct

SEQ ID NO: 135273 - DNA, 440 bp, Glycine max
  unsure (1)..(440): unsure at all n locations
tctagaagtgggaaccattcatttaataagacaataaanatgttcttgtttgttaaatgtgagaaagagtcgtgtgtttacaaaaaggttagtgggagtgcaattagattcttagtgttatatgtagatgacatattactaattggaaatgacataccaacattgcaaggcacaaagatttggctatcagaacaattctccatgaaggagttgggagaagcagtctatattctaggtataaagatttatagagatagatctaaaaggttgcttggactctcccaatctatgtacattgatattatcttatagagatataacatggataattccaaacgaggctatttgcctgtatgtgttggaattactcttagtagagagaattgtccaacaattcttgaagatagagaacgcatgagtggagtaccatttgctagtgc

SEQ ID NO: 135274 - DNA, 55 bp, Glycine max
cccctggggagaattttatttgtggcttaatcttatccactttttgtgtggaaaa

SEQ ID NO: 135275 - DNA, 405 bp, Glycine max
  unsure (1)..(405): unsure at all n locations
acttggctattgtgcataatatcaacaagcgagatatcggagcaatccacaaaagttagtaatgcattgactagccataagttctgctagtcaataggaatgattatttatgtcaatcaagaactatttaacatgtatgcattgaacatggcttatacacatgtncattccattctaggtgataggttcctatgagtagaacatttgatgttgtcctcttatctatatgtcagccatctctatagagacatactagacccttatttgctacagcttaagttcggagacccttatcattatgctgtgtgcatcatcgctgacgatatatattgatggagactattgatactgagcattatcacaggtactaatacaaaacatactcttcttgccctaggttatgtt

SEQ ID NO: 135276 - DNA, 219 bp, Glycine max
ggattaacagcagcacctttcaactttttcattctctggcgaagtcccttaccttcttgccccaacaatagaatctttatgaccctacctatctctttccttttcacaatcccttctcatttaccttaaccctaagagccactttcaaaccatcagttaacaaaacagcattcatcttttgctcggcaaagagtggccatgctattagtggaatccata

SEQ ID NO: 135277 - DNA, 427 bp, Glycine max
  unsure (1)..(427): unsure at all n locations
ctaagcttctaccttttgttataaacgtngttagatgttcattttctgcttggttcggcatgtatgatggtatttcaagccaaaaggttcgatttttnttgtatgttatcatgagtttgttgtgttgtataccaagcttttcgttttcttggatggtttgttgttatgtaccattttgctcgggctttgttgggttttgatgttgcatgtgcattatttactacctttttgtggttttttgattcatagcaacaacaaagtttccatctttgttcattttttatgattagtacaaaaggttcgacctttttttgttgggttttgatgttgcatgtgcatcatttactacctttgtgtggtgtttgattcatcgaacaagaaagcttcaaccttgttcatttttatgattagtcaaaacttcgacctt

SEQ ID NO: 135278 - DNA, 355 bp, Glycine max
  unsure (1)..(355): unsure at all n locations
atcctctgagtcacctgttgctgcagctagctacacacacctcttaaagctaatttacctncttgagatgagaagctagagcttagctacacaccccctataatagctaagctcacccccatgacaaaaaacatgaaaataccaaaaaaaagtccttactacaaagaatactcaaaatgccccgaaatacaaggctaaaaccctatactactagaatggccaaaatacaaggcccaaacgaaggaaaaagctattctaatatttacaaagaagagtagatccaacctttacccatgggctcaaaaatctaccctaaggttcatgagaatcctagggccttctttagtagctctag

SEQ ID NO: 135279 - DNA, 408 bp, Glycine max
  unsure (1)..(408): unsure at all n locations
tctcacggaaggtttctcaagaaagcttctcaaggttacttctctttctataaatagaagcatgtgtaacacttgttgtaactttgatgaatgagagtcttgtgagacatacttcaaaggtccacttctctccctcttttattccttcaatttcgtgctcccccctctctctttctcttcctctttcttttccttcattgaagcatgcttccaagcttcttatccaaggctcatctttggtggtgaagctccttcttccatggcttattccctagtggatggcgcgctctctcacctcttctcctttgtcttctactgcatctncatggtggaaaatcaccatctaaggacctcattgtagctctaagattctacctccatataagccccacaagcatgtcttcatct

SEQ ID NO: 135280 - DNA, 429 bp, Glycine max
  unsure (1)..(429): unsure at all n locations
cgcctaacaacctcatggactcagatctttatagctgtacctagcacacttgnttgagcaccgtgagaagtaaattctcatgctgagaacagtcaaaacatttaagctggaacatctagaaaattataagcatttaagcatggccaggctatagattcccaatttagggatgtcacctaacatgagtgaactgaaattacagtagtgtgctgcttatagaattttgaagctgttaaagggggaagcatagctnggccagaatatttcctctaccttaattataggattgtatgtatgtggtttctcagatccccatttcagattcttcttatgttcaaggacaacttctattttaaccggtggtatgaatatcaagtatctcctaattttaccaatgaataatttctatcaaagaattgatccatcact

SEQ ID NO: 135281 - DNA, 347 bp, Glycine max
ccctccagagatctttcagatcaccctcaacttgctcttgatctgggtaccctacttctccatccttttagagcatgaattaatcttctgcagaaaaaatcgcataaggagaaagtgcaccaggctactctgcaacacctctactaagccatcctctgccaaccaatgttcgttccaagcttgaccccacctccaactcacgtcttctttttttctttggttgatcacctatctcccccaccttgtgattcaatatgattggggaacaggctccttaatttccataacaacaccatctcgctcattatggctacatgagatagttgccttcatattattatcaatca

SEQ ID NO: 135282 - DNA, 399 bp, Glycine max
  unsure (1)..(399): unsure at all n locations
tcaagccttgggttcggagtcggaatgcaatgaagagagagattgttattgtcttgtatcgcgacancgaacagacagaaatttgttgtctttttcttcccctcctatggtgccgcgatgagagtgaaagtggaggacgagaattaataagcaaagatggggtggaaactccttatgcaatgggtggtgctttgacataaccggtgcacatgatataaaatatggattttacttggttggcgatcttcaccaatactgcagacttttaccgccgaaatcgtgtttcttattttaaagacactcatcatttactgctacaagatctttacaaacttttatcttctgatctattgtttttatattcattcaatcaatgaaaatcacttttattacgattaa

SEQ ID NO: 135283 - DNA, 360 bp, Glycine max
  unsure (1)..(360): unsure at all n locations
tganatgaggaagtgtggaatggtgagacttcctacttttattcgttgaccacacagtggtacctggagatatgtcgtgggggtcatgagaccttgtggacgtcangtggggtgctattgcccaaaaccaaacttgaccaatccctacccaacccgggcatagtcagtcattgagaacctgtgatgtacctaaacaggcgagctcctagcagtctaccgataaaagaacaaagaccacaaagcaaggaggcttgtttggtggctggccagctgtgaatcttgagtgatatatgggatacggcctctggttatcgattaccgatggtgggtagtcaattacaacgcttaaaagtgaagaca

SEQ ID NO: 135284 - DNA, 308 bp, Glycine max
  unsure (1)..(308): unsure at all n locations
acttgatggctgcgttgtatgcngtataggtaatcagaccaatatcagcataatgaggtcatatagagctcttcatctcccatagatacatacaagctcttgaggcctataaatacacctgtccgtcaagtggaacacaattcaatatgattcatagatgagacctcacaattttcatacaagcaacgtatacatgtacatgtacaatttttgggtgtgtccacatctctcctggatggagacgaatctcttggcctacctgaatagctaagagaacatcgtatacggactataccaagtacctatat

SEQ ID NO: 135285 - DNA, 252 bp, Glycine max
caccagcagcgcttcgaagccatcaagggatggtcggttctccgggagcgacgcgttcagctcagggacgacgagtatactgatttccaggaggaaataaggcgccggcggtgggcaccactggttactcctatggccaagtttgatccacacatagtccttgagttttatgccaatgcttggccaacagaggagggcgtgcgtgacatgaggtcctgggttaggggtcagtggatcccgttcgatgccgac

SEQ ID NO: 135286 - DNA, 354 bp, Glycine max
  unsure (1)..(354): unsure at all n locations
ccaagaaancagctgctccaaaccatgggaagcatatgtgagcctattcattttgttttctgtagaacgacgcttatgtatttacttcgagtttgaagaatagagccatcaattagagtcttgacttcaaatcccataaaatagttcagcttcccaagttgtttaagtgaaaaattagaatgaagtttgattataaattgttgacctagttgatagaactaccagtgatatttatttcattaaccttcacctaacgataaatgatatgagaggtttcttgaaaacatagagagatgggtcacacttgcttgcataaacaccaagatgctagagagtatattttaccctgtaaac

SEQ ID NO: 135287 - DNA, 470 bp, Glycine max
  unsure (1)..(470): unsure at all n locations
agctnggaaagcgacagacgactcgcttaacgatgtgataacgcgctaagcgcgtgcttgcggagcaaaggcctttctagattcccctttactcgctaagtgcggtggtggtgggcttaaccattgatgcgcgctaagcgcattacttgcttaatgcgatgactcctttggcacatcttcaaaatagctcctttttgcctggagttaaagaaaatttaatattaattccatgtaaatagggttctactgagcagagatcaaaacaaagaaaatttatttacaatcctaccaaaaagaaccataaattgggatatttatatacattntggaaaacttttctatacaaaaagtagtcgtaaacgacgactaacanatactaatggggaaagcaggaatgcataataatttaaagaaatcagaataattaagggaaatcaaactaattcataagcctactaatctgcacctat

SEQ ID NO: 135288 - DNA, 294 bp, Glycine max
tgtttcgttctccacttaaatctgaatccttgcaaatataatatttagatggaatattacattaaaaagaaaagaccggatagactgaattcccgtaaagtcaagcagttatgtttttattgggccgaaataataagaagagccaccagtgtttatatgtggccaccaactgcttaataatagtacatgcttagcttgctaatgttacggggtccaagtccaacacatatcgtgattttgataaataccaacgacggctgcgcgagctcacagatactaatctcacgcacattc

SEQ ID NO: 135289 - DNA, 314 bp, Glycine max
  unsure (1)..(314): unsure at all n locations
taaatttttattggaccattggaagtcttaattatgtcaattgtaaagataatacttataagtccttcaatgtaaatgtagtacttatccttaaattcctaattgtgtaatgcacctttgtactgctcgtctttgtactaatgtaaatgtgtaaggctagttatatttatagtggtattatacttgtaaatctcctcctttctttnttttttcttccacatatgttgcatgggttactccttggccaacaacagaaagattatacagagcaaggagcctgtctagtaggagaatgctagatcccgatgcacgct

SEQ ID NO: 135290 - DNA, 371 bp, Glycine max
  unsure (1)..(371): unsure at all n locations
cctctactctatcaaacatgtcatcaagtatcaaagggtctccactgtaatatgcatcacgtgcctatttaataagcaaaattaagagcagctaaagaaataaatgaatggtatgggtaaacattccaatgatactaccaataaaaaaattatgtagcgtcaggaagccacaaaatagtataatgccatcagagngacttgatttctacttcatatactaaccttggattgccttggcaatgaaaggatgagagaagtcctaaaaaaccaatccacatttgataataactaaaactacttcaaagaattctagagttcagaatgagagaatagagatgaaaagaataatatatatattctctacctatctc

SEQ ID NO: 135291 - DNA, 411 bp, Glycine max
  unsure (1)..(411): unsure at all n locations
ggatgataagggcataccacatatcctaattggttatcactctactggaggctacaagttgtataatccagaaagtggtcaagtatccatcagcagggatgttatttgtgatgaaactagaagctggaattggaatttaatttctagtgaaagtcagtccaggatattgttagaaaaagaaacaccttcagctgcaccaactacttaccaagttcctagtataatgaaatcatcaatgacaagtcagctaccaatacctttgagggactatgagctgtttcatgattcagaagtccacttataatgagaatgggtccatnttgcaatcatagcagaagctgaacctattcgtatttacaaagcagtgactaattaaatgtgggtgaaggctcagaatgaagagattgactc

SEQ ID NO: 135292 - DNA, 148 bp, Glycine max
actccctgccttatctgtgaaaacatgtctgacagcacagcttctaggcttatattatcccacgctctcgagtgcaactttcatgtctgaccaacaaaaatcatggacactcttcaagggttctctgtcgttgttgcaaaatctcaat

SEQ ID NO: 135293 - DNA, 185 bp, Glycine max
tgcttgaaagcattcacaattcttatttgagaagaactccatatctatgaatattgggtctataatggaatgagaggaaaagaggtttgtgtaccgtatactctatttctctgatgagaacaatggtccaaagggaatgaagggaggaattggggtttcctgtgacccggaatgtcgcttgactt

SEQ ID NO: 135294 - DNA, 427 bp, Glycine max
  unsure (1)..(427): unsure at all n locations
tatgctgctaatatntacaatagacctcctcaatctcagcagctaaatcaaccacagcagaacaattatgacctctccagcagtagatacaaccctggatggaggaatcacgctaatctcagatggtctagccctcagcaacaacaacagcagcctattccttccttccaaaatgctgctggcccaagcagaccatacatttctncaccaatccaacaacaacaacagccccagaaacaacgaacagttgagacccctccacaaccttccctcgaagaacttgtgaggcaaatgactatgcagaacatgcagtntcaacaagagaccagagcctccattcagagcttaaccaatcagatgggacaattggctacacaattgaatcaacaacaatcctagaattctgacaagctgccttttaagttgt

SEQ ID NO: 135295 - DNA, 300 bp, Glycine max
cttagccctagaggggatggaccttttcttgttttggagaggatcaataacaatgcctataggttggacctcccagaagagtatggagtcaccaccacttttaacatttctgaattaactccttttgcaggtggagctgatattgtggaggaggaactaacagatctgaggtcaaactctcttcaaggggaaggggatgatgcaatcctccctaggaagggaccaatcactataaccatgatcaagaggctccaagaagattgggctagagctgctgaagaacgccctatggctctcatg

SEQ ID NO: 135296 - DNA, 393 bp, Glycine max
  unsure (1)..(393): unsure at all n locations
ctgtccttggttatacatgattggacatgatttgtgacttgtatgattncaatcgggcaacattggatgagggaaagagtggttttctaaatctgcactttatgcagaattttgctgttgaaatgtgcagcagaattttgtataagcgtcgaaaaatgcttgtatatggctggttgtgaaacaggttgaacatatggggttctggacatttgatagcagatcccaacggtcaaaatgtagatttatgtactagagacttccagtacaatttttgagtcgatccaacggttaacaaattggaacgaacgaaatgttactggggtatttgtatatgaaaagatgtggtttagagttgtgttttgggcagaagtatctgcctttgccctggtttgc

SEQ ID NO: 135297 - DNA, 425 bp, Glycine max
  unsure (1)..(425): unsure at all n locations
cgtagggtgnaagtctcacgattgtcacgtgctcattcatcatttgttagtcgtggctatacgagacatcttgccaaacaaagtcaagttagccataactcacctgtgctttttcttccatgctatatgtagcaaagtcattgatcctgtcaagtttgatgagtgggaaaatgaggccgcaattatattgtgtcagttggagatgtattttccccctgctttctatgacatcatgattcacttgattgtgcatctggtcagagaaatcaaatgttgtggtcctgtttatctattgtggatgtacccggtttagcgatacatgaagatccttataaggtcttcaaagaatctatatcatccacaagcatctattgttgagaggtacttcgnagaacaagccattgaattttgttcataatacattc

SEQ ID NO: 135298 - DNA, 327 bp, Glycine max
ttgggttaaagatataaccctcggtgaccataatgcatctgaaacatttaagaagttaataaatggtcctaaaagaaatgttataacttggcaaggatatgatatcaataagtattcattctacaccaaatcattagacaaaaagagtaccatgcaaaatagtggtgttagtctaaaggctgaatcttaacactctgctactatacatgatgacaatcctcgcatagctttcatgccttactttggagtcattgaagaaatcttagaggttaattatgtaaaatttcgagtctgtgttttaactataagtgggtacatagcaatatc

SEQ ID NO: 135299 - DNA, 390 bp, Glycine max
taagctccttcaactgcacaaggctcttaatatttgaagagtatccttgctgaaccttcacccgacgaagacactgacaaaaacttatcttctccttcttggacaaagtatggcaggctgggggcaagtaaattttcttcccatcagaccttggatgcaactgtgatcgtatacccatatcagctagatcttgacgggtattcaagccatccttcgtcttgccttgaatgttaaagagcgtcccaatcacactgtcacaaacatttttcttcacatgcataacatcaatacaatgtctaacgtcaatatcacaccagtacggaagatcataagaaatggatcttttctttcatatgcaactctgacttgtatccttctaatgggtcttcc

SEQ ID NO: 135300 - DNA, 285 bp, Glycine max
  unsure (1)..(285): unsure at all n locations
aaaaaaaaagaaaaaaaaagcttaagtcccacatcgttcaggataaacacttgaatagaggttcactccctatatatagagagttcatttcttcttttttccttgtcccagntgagaagcatttcctcaacttttctttctccctcccatatttcagccgatgcatttccggcaaacttctccctctttctttgaagtcatatttttctattggttttaagagtgactttttaagtcacatttttcagttgtcttttagagtgacttttcaagtcatattttcgg

SEQ ID NO: 135301 - DNA, 428 bp, Glycine max
tgtaacagcttacttcaaaatgaagcaagggtttattacctattatcaacgaactaacctccatacccgaaatggaagtaattgccttaagttgcatgatataccatagtcgtacaagactctgtaatcccctttgattctgagattgatttgtagcctcttcctctgctttgtaactggattcatcagagagagctgctgcaacttcattttggattgaccaatctatagtatccacaaagacacctgatgtaggttttgcatgcaaattttcatcaatgtgattcttgtggccatgaaaaacttctagaccatctttctcaacagcattctcttgctttaatagtttgaattggcacggaaaaagagaggtggaaggaatacttttttccaaaataatatcgcatgccttcaaataaacccctatg

SEQ ID NO: 135302 - DNA, 310 bp, Glycine max
aaactttttttgcaaggaaaattcttatttaccaattctattacattttttgttgccattggcaatatggcaacacttgaaatcttaatatggcaaccaagtacactgtcaacgacaaccttttctaatgggttggttcttgaagataacatcacatccctgtccgacacgcctgtaaagcacataaaatttaataacattaacacttattggccaagggttcatacaaagaaaaatgatagaaagagtgataattattctagtgtgcttaccgaaatctgtgaccgatctgacatcaagattgactatc

SEQ ID NO: 135303 - DNA, 448 bp, Glycine max
  unsure (1)..(448): unsure at all n locations
tactcaagcttgtcttagttntcacgaagtggtgccctcaaagcctagacagtaggatatttgacaacttgtttatttgtatctatgtctaacaaacaaaaaattatacaagatgatcctaaaaattaaaatgaaaatgaaaattgttgacatttagataacgaaaaatttagtcctagtatcgcatttgcttgtgttgggaattaaaaatagaagaacctagttgtcttcctttcctacatgaatcagagcctgtatgaacaattctttactataatgaacagaaaggtgaacagagaagacacagaaaaatactttttctatatcatatctgacatttaaggttttcaagttcacatactttaaaaagtaaattatttaataccttaatcatgtgaaataaatgatttgactaaaatatccgttctctttttcgtaaatgatataa

SEQ ID NO: 135304 - DNA, 337 bp, Glycine max
  unsure (1)..(337): unsure at all n locations
acctttcttgcggagctttatggaggctggatcttttagcttcaatggngaatttacaccatggagattttatggaaggccaggagaagaggagaggggaagcaccatccactanggaatcagcccaggaagaaggagcttcaccaccaagaattggcttggataaaaagcttgaagaggatgctttaatggaggaaaagaaagagggaaggggagagcacgaaattgtaggaataaaagagggagagaagtggaactttgaagtgtatctcataagactttcattcattaaagctacaacaagtggtacacatgcttctattatagactaggtagc

SEQ ID NO: 135305 - DNA, 327 bp, Glycine max
  unsure (1)..(327): unsure at all n locations
ttggtcaatgcacaccaccctaattgcgatcgtggaaagttataaaccttgatgttgctatccaaatcacggtcgtggattggtttttaaaaccttgctaccctcaactctatcatatccaggaatggaatagtggacagtggaagacttatatctcaaattaaagtcatctcatggcagtggattttgtatatgaaaggggtaaaaccatgaactttctattctacttggtgctccaacccaagggaatgtttccttttgtgaataagaactatagcatnataatnggatccctgatggtttntgcttgaccaaggatacataaca

SEQ ID NO: 135306 - DNA, 182 bp, Glycine max
  unsure (1)..(182): unsure at all n locations
gcttgagcttgagcacccacgactgttcaagagcagactattgttttcttctatccacagtnccaacagtgatgtacgggtttcttcgacatttctctcatatgacgttatgcgtgttccaaccagctgtttcctcacccttgaaatgaatgatgggcaatgtgggtgtccacctacttgat

SEQ ID NO: 135307 - DNA, 205 bp, Glycine max
ctaatgagggtctttatgaaggttttgaagaaatgaccggtggtagactttggctcaaattggagaaactcttcatgataaatcatttacaacaagtttcttttgaaacatgttttgttggcctcctaataagggaaggtatttcattgtaagaacatctttgtgaaccaaactctattctgatggagctacacgacattgatgt

SEQ ID NO: 135308 - DNA, 286 bp, Glycine max
  unsure (1)..(286): unsure at all n locations
acgttatctaaaaaaccttggggtggatccaagtgctccgaacattcatttttatattcatgttttggtggcatgctcacccgctgtttgttcctttatggaattcaccataactaggaaagcacaaaggctcccctataacactcgatccagaanaatggataatgaagagggcgtgcaagagcaaatgaaggccgatctatcggccttaaaagatcaaatggcttctatcacggaggccatgctaaaactccagaaaactctagaggataatgccacgacaacc

SEQ ID NO: 135309 - DNA, 402 bp, Glycine max
tagaatacctgctgccaattcagttcccaagtctaacaacaatttcatttccattaaatctgtattgtcttgtaataaagaagtcattgatatttggcatatccgcttgggtcatccctcatatgataggatgcaagtgttgaaacaaacttatcctatgttgactcgtgataaaacctctgtctgtgatacttgccatatagcaaaacagagaaaacttccatctctcaataaagactcctatgcgtctagtcctttctctttgatacatgtagatatatggggtccttgttccacaactactctgaatggacataatgtttttccttcaactatggatgaacatactatattagtttgggtattattatgactctaaagccagactcaaactatttacaa

SEQ ID NO: 135310 - DNA, 428 bp, Glycine max
  unsure (1)..(428): unsure at all n locations
tctagaganagctacatgaagctgcctcggtgaatacgctgtttatccttcgataaacgttggatcttctcgaaactatgtctgctacttcacatgacacttgtccacgatctgaccgttgggatctttgagaagatgtctggagtgtgcttgaggcttccatgtccgacagcatctcttacttaagcatatcactctatgctttcgtgtagcttatgagaaacatcattgcttcctctgtgtgtcttccaagccatttataaagtgccaagcactttctccatcacccacagccaccattagccgccacagaccatagttgttcttcattgaaaccccacattgagaggaacccttcaaccgaagcggaatcttccaactaggcttgcggtttctggagagaacaacaccctaatctgaccttttat

SEQ ID NO: 135311 - DNA, 149 bp, Glycine max
  unsure (1)..(149): unsure at all n locations
taccgactntatatgctctcgaatcggacatgcgtgtgaaatgttatgaccatttgaatatcacgagagcctgttgttgtcaatttcgagcgtctttaatattatgcgcctgaaccggacatccgagtgatatgatattaccattttaa

SEQ ID NO: 135312 - DNA, 431 bp, Glycine max
ttgagtgggaagttaatgagtgatatgaccgtcttcatattttatgtggaaaaacaaaaaatggtgaaacttgtatcacatgatggtcactataggagaaaataaagcacaattggaacaaaaaacactcttataccgacatgtccttcaattagccaatatatcgttgagcatgaactcagccaccgctatacaaatccaagggtccagaagtcaaagcgcacatatttaattcatgccattcgaaatatataacagccattttgagacagaaacaagttgattcacttataaaatataaaaattccaatatcatgaaagttgcggcatctagattctgtctacgaggtaactctacacatgcttgaactgcatttgcttgtttcaccacaatattatcaatgtcctgacatgctgttgatattgcaaca

SEQ ID NO: 135313 - DNA, 339 bp, Glycine max
cccgtcataactaagctcacccggtgtgaagcttccttaagtaagatatcctaaagaagctagagcttatgctcacacacctctctaatagctaagctctatccccttgacgagaaaaacatgtaaattcataagaaaaatccttcttcaaagactactcatatgccctgttatacaatggcggaagccctattctacctagaatggccataatacaaggccccgcacgaaggataaaccttatctaatatttacaaagattagcgggctcatacttagcccatgggctctaaatctaccctaatgctcatgagaacacctaggccgtttccttggatc

SEQ ID NO: 135314 - DNA, 227 bp, Glycine max
ctttgatactaaacttgaaaggccaaaccacttcaacaaattttacaaaacacaaaatcacatctcaaaggccgttagtatataaagaaaaaagcacaagaatacgaatattttatattaattcgtctctacctttgagattatgtcaagtttttggcaacctactaaatttccactagatgtaggtctaccatatgttagaactccttaggtagagttgagtctag

SEQ ID NO: 135315 - DNA, 378 bp, Glycine max
  unsure (1)..(378): unsure at all n locations
ctaaaaaccttataagcactcttaaccgaataactaccacatggctctgccgctcacttccactgatcatgttcattcggcctgattctgaacccctcaacatcttgaaggaaagcgactggcatatctatctcactatcaaacaaaggtctcctccactgaaaattccactcccagccttcttcattgaaagctcctacttgctgaatgagatgttgttgctgagccgaaatggtgtacaatctaaggaatntcactgccaagntgttctctccacctgtccacttatcctcccaaaatttaaacttgtccccacatccctaccttcacaaaatcgatttattcagctgctgacccanatgagcgtgatgatatatc

SEQ ID NO: 135316 - DNA, 443 bp, Glycine max
  unsure (1)..(443): unsure at all n locations
ntaaaaattgaatcanaatgtttagtaactggtggtaatcgattaccatctcatgtgtaatcgantacacagtgtaaaatttgaattcaaatttctaatagttgttataaatcattttggccattggtaatcaattacatcctctggtaatcgattaccagagagtaaatctcttgaaaaagacattttagcttaaatttcttggccaaaccttttgttgtttcaatttggaattcccttcctaaaacactagagatcttcttgatgttgtatcttgtattcttggatttttgtattgaattaaacttgagaagcgcattttcataaggcatcaaaacatcatgatcatatggcatcatcaatacatcaaaggcaaagtctttgcttctacaatacaaaattgcttccatttgttctcgttccagatcatttttaggacattg

SEQ ID NO: 135317 - DNA, 352 bp, Glycine max
  unsure (1)..(352): unsure at all n locations
cattgattgaaaaaatgggccaaggtgataattttactaattcattggtataaatcaaatacttttaccaagacaatngtgggaataaagaaacactagtcgtatgaggaaatgaagttggtgattattccttgtgatatgtcattcttgctaaccatttcatttgaagtacantttgttctgctcctttcatgaacttatgacaactgtgaacttgagaaatggccaatgaaattttttggaatgcatgaagttatcttatngaactatgatggaaactctaaactttttccttttgctcgaggacaagtaaagatttaaatttggggggagttgataactactaatcatg

SEQ ID NO: 135318 - DNA, 461 bp, Glycine max
  unsure (1)..(461): unsure at all n locations
ntctcactaagttgtctgatgcctgaaatgtctnttctgatggcagtggtcctagatgcagggaagaatttctccaagaacaccctcttaaggtcatcccagctgaaaatagatctaggagcaaggtagtatagccaatcttttgccactccctctagagaataaggaaaagcctttagaaagatatgatcttcttggacatcggggggcttcatggtggaacaaacaatatggaactccttaagatgcttacgaggatcttcacctgcaagaccatgaaacttgggcagcaaatgtattagtccagtcttgagaacatatggaacaccctcatcaggatagtgaatgcacaagctttcattagtgaaatcaggtgcaaccaatctcctaagagtcctctcacgaggtggagggtgagccatgttctcagtatgaaaattagtagtggaatggtcaaaatc

SEQ ID NO: 135319 - DNA, 53 bp, Glycine max
gcagctaagcgtaataggaaactcatgaccatctttgtagattgaattatgga

SEQ ID NO: 135320 - DNA, 168 bp, Glycine max
gaaactaagctgtttctggatgcaggagctcagactggaacaagctttgctttaatttccacgcataggctcaataaatgcaaataaggatttatcctcatgcgatgataattggatgcgtttcccaataataatattattattcttaagcgtagcatgccatctttt

SEQ ID NO: 135321 - DNA, 421 bp, Glycine max
  unsure (1)..(421): unsure at all n locations
taatcacctgagctgcagcttctaattcaagtcttctatgcaagaatatctctttaatcttcatcatagaatccaaaattttaaatttcaagattgctacatgaaggggtcatcaaacttttactgtcgaaaaaataaccaaaaaaatataaatatatgttaaatgtgcaaagcgagtgcaatattttggtgtgagtgtgctttaatataaataacaatgaggtccacggattgacaagacatcttgcatctaagaatgaatntggcacctttgagaatttttgctttgacgtttttttttttattacaagaggtatgacattttggtgttaccactttgcgccttattttctccttataataaaccatttattccttgcactaacttaatatatacgtaggtcttctaccccttcttatt

SEQ ID NO: 135322 - DNA, 475 bp, Glycine max
  unsure (1)..(475): unsure at all n locations
cctcagctggggctgttaaatatgagtaggtcacaatctagaatntactctttttgacatattattattttacaggtcttcttttgaaaagattatagatcttaataccagaaatataagatgcatgtagcctgagaataaaactaattaatttatttgccttctatatgttgcagtgaaattgctacaagcaatatcagacaaggtagagaacctgaattggaaagttacacaacattcttgcaacggggatagaggatttgataacaggaacatttcaagggataagtctcaaatcataaggaatgtcacgtgtgattgctctttcaacaataacactacttgccatgtgacatcaatgtaagctttttttcaaaccccccttactagtgtcttctacagttggattntgtgcaacttagacaattgggtattgacaccaataggcaatagtgtgagttcgtgaaaaaaaaaa

SEQ ID NO: 135323 - DNA, 315 bp, Glycine max
  unsure (1)..(315): unsure at all n locations
aaaataaaatgaacgccaaagccatgatcctgatcccgtggcaaaatgattttttgctcaaacttaattttacaacagagaaccaagcatgcactcatcagtttactaacctcaaatgaagtggtggtgttaccaaacatgatttgactggacccttgtcagactttagaatgaaaacagcttccacttctttttgctttctacattctaagcaatataagggaacttcttcattaatttacctgagcatgtctncagtttgcaatttggggccgcttaatgcangagatatngctaaagtactggcatgatcat

SEQ ID NO: 135324 - DNA, 464 bp, Glycine max
  unsure (1)..(464): unsure at all n locations
acaagaatctcagcttcactaattccaaatatctatttgcttctgtgttctcttttattttgcaagataagatgattctctaatagattaaaaaaaaacaattnttctccaccttgccatgtcccattttttgcctgctaactttttcaataatgcaactacagagaccaaagttgttgagatcagttgcaaattatcaagcaatcaatgtcgatactctaagggcccaaaatatggaatcttggccattcttcaaccaggtaatactagtgaaattgagacaagttttcaccatttattcattctcactcaaacatttgcttatgtatgtaatcaaaaatcaatattgtgtaggtgacagcagatttaacacctttaaatccaaggaaagtagctgtaaaaattgatactttcaaaattggaggcattgaagtattcggagtctcagtagttatcattgaaat

SEQ ID NO: 135325 - DNA, 263 bp, Glycine max
ttgtatataacacaacgccctttgtcacttttaattgatttaagctctttcactgcaaagatgccccttcagttatagtacaccatctggacatgataacctgagcttagttgttttttgggtgaacatctcttaacattgtctgagaatctacgtgccattattcattatcttactccattcaataaaactgggcgattaattctaagagatcgaaccatacttcaagggacgctgtatttatattgttggtccgactctgg

SEQ ID NO: 135326 - DNA, 424 bp, Glycine max
agcttccatcatatccttccttagatgttcttatacccaatcttcgggttcaaatactatggactttgtccttttatttgcttgacatacatattgctccatcttcttctcaatttgatttctcaccatttcatgaagatccttaacaaaagtggctctaggaagcccatccttactcaaaatagaacaatcattaggtaagagaattatatcaagaggagataaaggattaaaaccataaacaacctcaaaaggagaaaaagaagcggtagagttggttaccctattatatgcaaattcgacatgaggtaaccactcttcccaagttttccctacaattgtttctaacaatggctcacaaaattggaatccctatccgacacaatgctcttaggcaatccatgaagatgcactacctctttga

SEQ ID NO: 135327 - DNA, 241 bp, Glycine max
accacagagtgatacctggagatatgtcgcgggggtcaagagaccttggggacctcaagtggggtgctattggccaaaaccaaacttgaccaattccgacccaaccccggcataatcggtcagtgagaacctgtgatgtacctaaacaagcgaacttctggccgtcaacagattaaaggaacaaagaccacaaagcaaggaagcttgtggtggctggccaactgtgaaacttgattgatat

SEQ ID NO: 135328 - DNA, 91 bp, Glycine max
ttaagccaccgcggctgcagcttaacttcacccacaaagggtgttttgttgattccacgatccttaccaggcacctgaattcactctcctt

SEQ ID NO: 135329 - DNA, 319 bp, Glycine max
  unsure (1)..(319): unsure at all n locations
ggtactgagcatgataccaaagtgctgtgcggaaataagactttttatatgggcataaacttatacgaacccttgctgaacgtaagcagtgaaatatctatgctaacgcgcccatgcttatcctaccatataactcttttacatgcgagggtgctaaactacattgtatgctaatgatgagagagtctctgagtgccagtgtggtgacgtgctatgctaataacacagaagtgtgacactgggccaaccggcttgagtcacataccacgtcggaactgcgnatacaaaggctactgaaatgagaactatgacatggaat

SEQ ID NO: 135330 - DNA, 373 bp, Glycine max
tcgatagaggtggaaagcactctgatacatacatggagaatggagaagcacctggtctatttgcgaagtttcttccagaacattacagtggtgcccaatacactatggttgggtctccaaattagaatggtgtggaagaaagaataaacccgactcgtatggacgatcctgcggatgttgaagagtaatatgaaacttcctcaattctcatggattgaagcacttattaaagacggatgtgtagtttgaatcaaataccaacaagggttctcaaaacaccttctgagtttatcaatgtcggagaccagttgagacatatacacattggggatgcttttctgagttgaattaatatctactgagaagaaactag

SEQ ID NO: 135331 - DNA, 430 bp, Glycine max
  unsure (1)..(430): unsure at all n locations
agcttggattcctcanatgcacatctgatcttggtgtttatataaagggcagcaatactactaacttgactgtagtgtgcttgtatgtagatgacttgcttgtgacacgaaataatgagactgagattgccaactttaaaggagagatgataagagagttcgaaatgactgatttggaccttatttcttattttcttggaattgaattcaagagaactaatggnggagtgatcatgaatcaagggaggtatgaaagagatgtactgaagaagttcagaatggttgactgcaattntgcagacacacccactgccactggtgtgaacttggtgaaagatcctaatgaagaagaagtagatgtaacattggatagacaaatggtgggctcactgatgtaatctttgtgactacactaacttatgtatggtgt

SEQ ID NO: 135332 - DNA, 433 bp, Glycine max
  unsure (1)..(433): unsure at all n locations
ttctcattcttttctttctacattttgacctcaggtncttgctttttaataaacgactcattattaagtatttttcatcgtgctttgctttcactatgcattcaaacaaggggagctcttgattcttcctaaaggcttactattagtttcccacgaaccaagtatagtcaacacgacacctggaccccacattaacgggaatacattgagggcatactccatgggtgataatgaagttgatcttttactgccgggtactgcaaggttagtttctatgattctttcaaacttggttctcttgtgcagtagtgagtagactgcatgttatggttgtttcatttgtcaagagaatctanacctacacncttacatggattttcatncatcatagtatgtaattcagatcctcataattaatatattccatctaaat

SEQ ID NO: 135333 - DNA, 373 bp, Glycine max
  unsure (1)..(373): unsure at all n locations
agctttggtactccaggaggtagttgtattaattnttctagaggaaactgccatgcacctagttcaatgtcgatagtttctgaggtaaactctatattgggtagcttttcactcttaactattaccttaggggaaaagaattgcggacatagttctctgcaagaaagcaaaagctccacatgattntggcattggggacttagataaaagtgatgatgcacgacattttccaaaatgcttatactttaagtattacgattacaaatttattgttatcactgaataaacatttctgtaggcactagaaaattgatgagaacttgtatgttaagaaaagtgtaaggtcttggctaatgttgatatgtagcatgga

SEQ ID NO: 135334 - DNA, 442 bp, Glycine max
  unsure (1)..(442): unsure at all n locations
cgtggtttctntctcattctctcaaccaaaggtgtaagaattattatagtgagagaagagaaggtgctcctcatctcaccgctctttagttcttcttccttcaaaactcgaatgacccatttccttgtttttcgttctcttgcaggtcctgaggtaaagatacaagctttgctcttctgctcactggatcgggttccaggaattcaagggtaggttcaaaaggggttgtgttgatctgcaccaagatgcttaatttgcgttgaaaaatccattcatttgcgagacttagcttcggagatgaaccagttagttgaaagctcaatgaatactcaaagggtctctagagttcaagctccactggtaagtccaattcactccaatttttttatcagcataatagattattgtctctcttttgaatcggataacttttcctcatttc

SEQ ID NO: 135335 - DNA, 458 bp, Glycine max
  unsure (1)..(458): unsure at all n locations
agcttcttatgcaacaaatagaaccacacgacaacgatcattgtagttcacttaacaattaactgccaatgggccctgaatttggcacaatagttatgtattaataacacaaacattggattgcaggataccataaatattacttactgattcaaataaacttctagggacaccttctcgtaggattccctaacccatcattcgatgtaatcttgacatttgccacgtctattctttgtgtcacaacctacctcatgacgggacgacgaattgcaaattaataagccaaaatattcaccttccaaggagaaaatgagcagattcaccaccaatggttattcgaggaaaatgtttgaaaaccaattagaggtctacgaattttgaaataagggtcngtggttgttatgcatgacgaagtataacacccacaagtcgtcacaaggatgacattttatcga

SEQ ID NO: 135336 - DNA, 361 bp, Glycine max
  unsure (1)..(361): unsure at all n locations
aagcttctctcgagctcgtcngtgacacaagcagcaagctgccaatcttctcttgtatctcattgngttccggggtgggacttgcggcttncaacaaaaccagtctaccaccggaccgcgctgccatgttgcatgtgttctggtctcgcgttgtttggtctcgcatcgtctgaacagctccaacttcccgcgaatgaagaacacggacaaacaccaaatgaaagaagcaaaaatcctaaagcaaagtggagcagtgggcacaaaatgatgtcgtctagtggaaaaaaaatttccaactgaactcgtgtgaatctggctagactcccgagttntcacgagttttccgcgagtccacccagtc

SEQ ID NO: 135337 - DNA, 371 bp, Glycine max
gctttgaaaacccctggagctcttgaaaacttcttgaaagtttattttctcacacacccttcatactaagctcactcttgagaagctcttagaaatcctaagaagctgacttagctacacataccttctatagctagctcactcttgagatgagaagcagagcttactacacaccctctatatagctagctcaccccatgacaaaaaacatgaaaatacaaaaaaagtcttctacaagactactcaaatgcccgaatacaggctaaacccttctatagaaggccaaatcaagcccaacgaaaaaaactattctatttacaagatacgggcatgctagcctggctgaattacctagctagaaactaggcttc

SEQ ID NO: 135338 - DNA, 304 bp, Glycine max
  unsure (1)..(304): unsure at all n locations
acattatccgccncaacgcccaaacaatccaaaaatnttggcttctgcgtttatgtcaatacatcaaaatcttgttttacttgtgtcatcatgtaatgcttcctctactactaattcgataaaaccaaaaaaaaaaaaactaaaaaatgaaacctaatatcatcaacaacatataccaaaatttctagtattagtatcaccaaaatttttggctgctggttttgtgcacattccccacatttgatcttcgatgatccaatctacaaatctcccccccacccnccatannaatgaataaaagaaa

SEQ ID NO: 135339 - DNA, 473 bp, Glycine max
  unsure (1)..(473): unsure at all n locations
tatgaatctcagctagccattttctttgtttagaatcatatgctctatttcttttgcaatatatgcnattggcntttgggcaatctgcattgttgcaagacaattcttctagtgtagtgttgcacattttagaatataaatcacttatatacatttttgaaacagaaaaatagttgcttcatagtccaaaaactaagtttagaaatttatggaaacaaaaagggcatttacgccaagatatgaaagcagtagtttgatgccaacagcagacatgtttatgtactctagtgggaaaaggcttgnggttgttgttgtatgtacacctaacatgtattaggtgttggtacgcttaggtacttttgagggtacaaattngttttttctgtctctaatttccttggtagcacacattatggttttatataactaattggcagttgaaacttatccatggtatttcttggacanagctc

SEQ ID NO: 135340 - DNA, 368 bp, Glycine max
agctggagaggatgcttaatgggggaaagaagagatatatattttatggggtgcaccaaattgcaaggagaaaatagaaagaactgcactttcaattgtgtctcacaagactttcattcatcaaagttacaaccagtggtacacatgcctctatttattgactaagtagctttcctgagaagccttcttgagaaaactttccttgaaaactagagcttatcctcacacaacccttctcattactaagctaacctccctgacaagccttcttaagaagattccttaagaagcttgagcttagctacatacacctctcttttagcttagctcacctctctgagatgagaagatggagcttatcttcactc

SEQ ID NO: 135341 - DNA, 159 bp, Glycine max
  unsure (1)..(159): unsure at all n locations
agctttctaattggactttctttntgttttatcttttataagaatagaggagaattcgacatttaaacttgcctgtaaacctcactatattcctttttaatatttttttttctatactggggctcttttgtctgggcaattgtccgaaattattggttg

SEQ ID NO: 135342 - DNA, 322 bp, Glycine max
aatctcagcttgccctttgctaagcccacctgcctttttttttctcgaacaccaccatgattggcgcatgttgcattgggattgtcccattgggggaagggtgattgatagaccttcctggggttcacgatgagcatctaattgttgatcaaagatggtagtaggtcaccataatgcattggtatttgggtgaattcaaacggctttctttctgggaagttcattatgcaagctccattggagcttgtaagccttagatcttcttcatcaatggattcctttgcttcttggaagataaatggcatctcaattgagaatgaag

SEQ ID NO: 135343 - DNA, 363 bp, Glycine max
  unsure (1)..(363): unsure at all n locations
gaaacatgaatatatttctagtctaaccggctaacaaaatgggcctatatttttcataaaattaaaataaagtatcaatgcctaaaccgtaccagaggaaacgattactatagaagatactgataataacttctggctttcaaattttatatttcaatgcatcttgaagcgcttacatttcagtattaaaaaagaaaatataacgcttgttggtctcacaatccaaatccaaatccanataatagaaacatgtagaaaaccagatcgctctgactatagtcaaatgcatacaatataaatcctactacctaagctgttaaatgaaggcagcatgaaaacaaacccatatctcttgttaaatta

SEQ ID NO: 135344 - DNA, 322 bp, Glycine max
  unsure (1)..(322): unsure at all n locations
aacaagaaaccagcttcaaccgatgcggcgctgggatgaatatttctttttgtttatctaaccanncccatncatctgggccttgctgctgaatgtgtataccctccatatcctttaagaagttgactgctgactcaatttcattttcgaacagcgatcttctccacagaaactgccactcccaacctgactgcatgtgttgtaccatctgtctcatggcttggttttgctgtgtagatatttggtacagtctaagatacctcttcactagaggttgctgctgctgatttcatttatcttcccaaagcctgaccttatctcc

SEQ ID NO: 135345 - DNA, 426 bp, Glycine max
  unsure (1)..(426): unsure at all n locations
nntgaaggtggtatgccnttgggaagaaattangtgataattgtttctcctctncccccttttaaatttgtacatcagacacactcacccaggcgagctaaatttntttttttttttttacaaaattgtgttattcattggtatatttcttctaaaaatcctataattgcatattagcttaggagaatncacgatattattcaagggaacaaaccaaccttaaacaggaaattaaaaagccaagtttgagatactatactggctcataagagcacttctttacatctttaaccggacgcacgttgatgatcaatccatcattggccttgcacctgttcgtacctaccccaaagattgaacaaagaaagtggcatcatgcgaatgtgaacaatactacacgatgcatgcattacctttcacttaccc

SEQ ID NO: 135346 - DNA, 200 bp, Glycine max
actaagcttaaccttggcctcatttctgcccaattctttatgtttgctttttctgggtcgtgaagtgcgtggctactagttggacttccaaaatttatgtttgggttgacttctttctcctttgattttcgtgggtatggggctttgggagatatgatgggttaccttgctacgtttctgctgtgtgatgattatttgtg

SEQ ID NO: 135347 - DNA, 463 bp, Glycine max
  unsure (1)..(463): unsure at all n locations
agctgntctnggattttcctcagttctntaacaagctgtgaacaatattactttttcttcatttaactgnctttgggcttggcggccacgctcaacaaagtactctctacacctattgtatgttgatttcaccaatgtcgttatgggaatgttgcgacaatcctttaaaaccttattgatacattctgagaggttcgttgtcatgtggccatatcgacgtccttctctatcataagccatcgtccatttttcctttgagatgcgatcaatccatgttgntattgctggactcaactcacgaaatttttctaaattttgatcaaaaatgtgcttgccaggagtgtacgctgcatanaattagttatgaataacacatttaagttaaaatgaaagttaaatatacatgaccatcaaatatgaaatcttacccaattttttcaacatttcttcttgtttggcatta

SEQ ID NO: 135348 - DNA, 465 bp, Glycine max
ctcttggaccttaggcaaaccttcaactcatccttcaagatcaaatattcttctcgtgattggtccctttcctttctccggagcttaagctcgctgttactgccccatagagcccctcggaatttgttccggccgtgttcttctcaacgagcccttatggtctcttgttccaaggccttggtggtagctatatttacatctctcagttcggcattctcctttcagatcttaagagttgctgatttgaacctttctttgactgtttgggcttgctcgagttctgccctaagggcctgtacctcttcgtcttccttcggtgcctcaacttccttccctttagtggttctcaaactcgggagccaaatcaaaccttgcatgtgggctttcaaccacttacggtagccgccgatgggcccgttgatacttcctctgagttctttgtccttcttttacaccatgctccac

SEQ ID NO: 135349 - DNA, 291 bp, Glycine max
tctggacgaatatcacggaatgtccaagtgggcctggatggtattcgcacgcccatatatacttaacacgacaccctgctcttcttagatgattccttaaccgaaacagtactaaactcttctaaagaaaaaaggatgcttgtcttacttccgtaatggcacgaaaccttacgagttacataagacattcctggtgcgtctatcggaacattacggtacttcacgggaggcacattaacactttcttctaaattctggcaagtgacagagatacccagggtgtgctgcagt

SEQ ID NO: 135350 - DNA, 358 bp, Glycine max
  unsure (1)..(358): unsure at all n locations
cttctggaggaatattctggaagggccaagtgggccttggtgctatttgagcccccatttntactaagtacaccccctgccttttattggtgattctttttccgtaacggtacgaaactttacgaataccgtaacgatgcttgttgtcttttcgtaatgttaccaaaccttactgattacataatcataccttcttttgccttctggaacgttacagaacattatggattgctcactagcaccttcttttaattccacattgtacggacctaccgattggctacaagcattctttgacttctgcatgtaacggacttacaaattgctaacaatggtgcccataccttgaatggccaac

SEQ ID NO: 135351 - DNA, 359 bp, Glycine max
gcaagctcacattcttgttctttctttgtctaaaatacacactacttgaaaagggacacaatattcatcacaatcatgcattcaatccaaaatcagtttataacacccatttcacaaaaaagataaaagtggttcactgcatattcatcaagatcaagtcaaactgtttcatatgcttcaaaacatgcatactaactatccacaaaaaacacaagtatatataaacataaaccaaaatcactaaaacaatgtactaaaatataatagttataataatttccagaaagcaaaatcatcaggaatttaaaattcctgagacagatcctgggtatcttgagtctgagtatcctcctcatcta

SEQ ID NO: 135352 - DNA, 450 bp, Glycine max
  unsure (1)..(450): unsure at all n locations
acactatgaaactaagcttattaagaggcttcctccagaagcttcctcgtggcttctttgagaagctntctcaagaggcttctttgagaagttagatccttatctatccacacccctctattaactaaattaacttccttaagaataattacggatgaaaataacgcaacaaataatcaaacatcaaacataattactaataatatatatatatatatatatatatatatatatatatatatatatcagggtgttacaggtaccgtgccccaaaatgctatcaaacaaacaacaccttttagtcttatgacataaagtcacaaacactgacactggacagtatagtagcacgcagggtgcccttgccgaatgccttgcaagggggtgtttggttggtcactatatagaagcttgtctcttccttaccctaccctacatgtcactaacttc

SEQ ID NO: 135353 - DNA, 164 bp, Glycine max
agcttgcatgcacaaagtgccagcgagttcgactgaatctgggtcacaatggccagagaagtggccagcaagactaaccaacataccttattggttgacaaattcttcaagtggaagttatggaaaacccgcccctgaagaatttactgctgattatggacact

SEQ ID NO: 135354 - DNA, 422 bp, Glycine max
  unsure (1)..(422): unsure at all n locations
tgagaaaagtcacgaagtattttatatttaacactttcttaacacaagtcctttagatatgaagagggggccatgcacaatggagacagtaatgattgaactctataccactgaatcatagaggctctaatagtatggtatagactaactatctcaaaagcttaaactttactatgaaagcacattaatggttttacatttaataacagattgtgtatttatgtgcagatatgaacctcgtaagcgtttaacagcagcacaagctttggagcatgagtaggacttcttctcttctccttctttggtcttggggggattttgtgtatctaaccgtgaaaaagatgaattaagctttntaaagtattggttnttcaatggttactgaaatcttcacttaagtntaccattttnntccctttata

SEQ ID NO: 135355 - DNA, 432 bp, Glycine max
  unsure (1)..(432): unsure at all n locations
agcttgtaggaatatggggtacccatcacatgtggtactangtggcggtcgggcgatggtgcacaacaagttttccacattcacaatgggcgcataaacccaccatcccctggtggccaccttcaactgagttcacgtactcccacgtaacccatatccttgtttttctaacaacgggtgcccatcaatccctccaagcttccacaacatccaaacaaaacaacatttcaacagcacagctatcacagccaagcaaaacagagcaaaggcagaanactctggccaaacgccaaccaaatcacagcttttctcacttaaagaccccagtaacaattccttcgatccaattcgttaaccggtggatcgactncaaaagtttactggaagtctatagtacataagcctacattgtgaccggtgggatctactagc

SEQ ID NO: 135356 - DNA, 230 bp, Glycine max
ttattccccagtggatggtgtgtgccctctcctcttctcccttggctttcgccgcatctccatggtgggaaatcaccattgaaaggacttattgaagctccaagattcaccctctatagaagctccacaagcaagcttccatcagtttagccaggcatttcagaaaaaccctaacacaaatgagattgagaggacataattaatgttccttacacaagaagggggagtcc

SEQ ID NO: 135357 - DNA, 363 bp, Glycine max
  unsure (1)..(363): unsure at all n locations
gatcatnctactttgacgaatgagaaaactggggcaaatggagagaatgagaaagaggagggaaccccttgtgtggctgccattcctacatggccaaattttccaccaactcaacaataccaatacttagccaatatcaacctttcttatatattgtcgtcctatcagccaggaaccctaaatcaatcacaaaggccacccctaaaccatccaatgccaaacaccactcttaacacaaaccacgacaccaaccagagagggaatattccaacgaaaaagccttgtagaattcaccccaatgccggtgtcctatgctaaccggctcccatatctacttgataattcaatggtagccataaccct

SEQ ID NO: 135358 - DNA, 192 bp, Glycine max
  unsure (1)..(192): unsure at all n locations
gcttgtctcatcgtttatgcgagactgagtcncatatgctagctatcatngccaagtaccaagaagagttaggtctagccgcggcccacgagcatatgattgcggacgaatatgcccaagtatacgctgaaaaagaagctagaggaagggtgatccactcttaacaccataacgcaaccctggggatggatc

SEQ ID NO: 135359 - DNA, 450 bp, Glycine max
  unsure (1)..(450): unsure at all n locations
ngtgcttgtttatttaaattcctaggatcatgagcaactatgtgtgtcctactatgacttgagaaacaaaggtgatcaaataacaagcagagatttaaaagttactaggttgcctcctagtagcgcttctttaacgtcttgagctggacgcttgatggcttgtcggtcacggacctagtaccttgcttacctttggctctggacttggtcgcctattgctcggccatgggtcgtaagcaacgctctaacctttttgtggagagctgaggtgaactctataggtgatggcggtgcgtctgttgcccgctgctggccatccccaggctgctgtggtggttcgccctgtgcttgccttggggtgcagtacttcttgatgaaagctcgattagtagggggcctgatgcccttgctggaggtgacagacactccgtataactagcagagacccgt

SEQ ID NO: 135360 - DNA, 451 bp, Glycine max
  unsure (1)..(451): unsure at all n locations
acacaagaaactcagcttaacatcagaccacttccagggtgctggaactacttcacatggacttgatggggcctatgcaagttgaaagccttggaggaaaaaggtatgcctatgttgttgtggatgatttctccagatttacctgggtcaactttatcagagagaaatcagacacctttgaagtattcaaggagttgagtttaagacttcaaagagaaaaagactgtgtcatctaaagaatcatgagtgaccatggcagagagtttgtaaacagctgtggcgtccctaaatttatgactggtttaatagtaattatttaaataacaaaaaccatggaaantttttttntctttcttacttatcttattcatttctttctcttttcactataactaggtttaaaaagaaaattctcactataagtcctgaatgggccgttcacaactctatt

SEQ ID NO: 135361 - DNA, 354 bp, Glycine max
  unsure (1)..(354): unsure at all n locations
aaactaagcttattagtggagagaagagaaagaaagcgaatttttttttttttaacccaanagccggaagaagagaaaaaattgctttgttgtagccccaagccaagtaccgtgatacccaaagcgcattattgagggacaaatctcttacaatactatgccaatgcaaaattaacttcaattggtacaaatttcactggcaatactatattgcttcaatctatacaaggttgaattacttataaagagtgcatcgatgactatttaatgttgctctattaaatcatgatcggtgcttatatactagatgcgttattatgagcgacaatagcttctctgttggatcgatacaat

SEQ ID NO: 135362 - DNA, 439 bp, Glycine max
agcttctcttaccttgggagagattattgtttttattaaaagagaaacaacaaggaaaataacaagattaagataaagaatccatcaatcaaagattgaggaaaagcaaaagaaaatgaaaaaacaaaaaaatgggggaaggggttctttggaccaaacaatgtttgaacaatgtgcaaaaatgtcgaaaaaaaaatataagaaaagagaaatggtacctttgttaaaaccttgggggatgtgtaaagcaatcacctgctttagttacaaaccacaacttcgtgttcgctcttgttatgcgtcgaaccaaagagaaaaggaataaaaaaaagggaaaggcccaaataaccaaagccaaatttcctaccaaaatccaaccttataaagttctattgatccatgatgattgcacatattatacttgatttgatgggaaatg

SEQ ID NO: 135363 - DNA, 449 bp, Glycine max
  unsure (1)..(449): unsure at all n locations
nggcgatagcttcttctattcgatccatatntgagttggagtctatggagctcaatgaaagcaccaagatgttatgatcaagcacaatattcctagaattcgaggtctaaggcctccagagcaacaaaagggataagggaaaaagattgtattatttctgcttatctgttgaattgcattcttcctctatttataagctgtctatgatcattctagaatttaatcctaatagattttggcttcttctgagccttataggaattgagaaattgagaaaatgcattgattgccttgaggtcgtggtacaactttttctaacaagcaaattctacaaccttgctgacgtggctgctgtcctcatttgggtgtgtagtcatccacgtgccttggtctggtgattctcctttatgccctcgcttcttattctttcttgtgtagctctgttcttg

SEQ ID NO: 135364 - DNA, 308 bp, Glycine max
tggttctatggatttctaacagctgggtaccaagtaattaccggatggaattactaaggtcaatccctataatcaagggaatttgattttatattgatgaatgaattttaatatattaaatgacaaggttgagccaacctctcaaacattttaaaatcaatttcagttttatttttatagttcagaaacacccatttgcatatgcatataagccagtgaaatttgaaaaagtatgtagcaccaatgtaatgcacagacagatctcaatagttacctctcttctatattctcgagtaatgatcttcttc

SEQ ID NO: 135365 - DNA, 446 bp, Glycine max
  unsure (1)..(446): unsure at all n locations
agcttatgcatggtgcctgcattgccccagtgtattttaagaggatatgttggtggcgnttatcatgaccttggagcaagaagaaaccaaagaaactatgccagttcttgaaaaagaattttcaaggaccagaaatatttaaaggattttcaattgaccgaataagttaaatgactcttgttcttcacaactcattttttctctcgagaaagacaacttttaagaatgataagatgagatcacatgaatgtctatacttcttatttttgattcggaaacacagtcaatcaaatgtttattcagctntactcatcacttacgacacccccaccaaacgtgtagaatgtgcaatttttgattgggcggacttggagatcaactcaagagcataggtcacttgagcaaacaaaccaatggcgtacattcacattccagtaagttaaata

SEQ ID NO: 135366 - DNA, 394 bp, Glycine max
  unsure (1)..(394): unsure at all n locations
accgattgcaatccccaatcccgtgaatgaggagagaagaactgagaggattgcattaacattaagctacaagttaaaaccagggtgtggttaatactttaaatatttgcttatccacaatcaaatgacataatccctgtttggataaaacttctcacaaggagaagaaaataaagaaggccaaattaaattaacattnttcctaagaataaaattnaattttatattagcctaatttgtgaaagctttattattaatcttctacaaaaagctaattttaacttatgcataagctaattttagctcgaaatgacctatctaccttgtgcaggacctatagaacactacagaactctaaatgagacgtgtgagtagtccctggaaaccgagaaaa

SEQ ID NO: 135367 - DNA, 413 bp, Glycine max
ttagcaactttattttttatcactttctccattgcatcctaaaataaccaaaaagagaattcaccatgtaatacgtattctgaatcggtaataaagaaaatggaaaacaaggacaattgaaataaaaaatagtatgcaggatcaaaccatgaaagcatacgcagaaatggacccctaaatatatatttttatcaaaaaggtttttcctattaatagttgacagttcttgcatatagtaaacccttaagaaaattaaaaatatatatataaaatcaaaacaccgtctaacactcattcttaggacagggataattggacaagtaacccatggatgattaaaccatccctctgttgtcttcaagactaggacaacaaatatttgcctttctagtttctagggtctataaataaaa

SEQ ID NO: 135368 - DNA, 468 bp, Glycine max
  unsure (1)..(468): unsure at all n locations
tatatacaatgagtattgatgaactcgcttagcttagcattctctcttatcgagttcatcgcggtntctagaaaacgcaaaaaacacagctcgttttctcgcacttttcaagcctctaaaaggcatatcatacatgccatgcgtgtgccatactcaattcaatatacaagcttacataacccggatcttaaactaattctaacaaaacataaaatccctaaaaatctaaagctacagttaaagtcttctaccctaaagttaagacaagaaaaagagaaaaaaggatcaaggaacttacttggacggtgtatgattgatgcttcaaaagtgaaaatgcacaaagagagtacaaatgcaanatgtgcaaattttttgagagagagaatgtagaggcgaggtttctataatctggcaaatgtgagtgtaactgttgttacacttacttaagcaagttcgatactttcactt

SEQ ID NO: 135369 - DNA, 344 bp, Glycine max
  unsure (1)..(344): unsure at all n locations
ttccctagaaacttttaccacaattaaaattttttggttgaacatatatttgaaattttatcatgatggagataaatcattggaattggtgatcttcagagtcgaagcattagtgcagtgtccaatactcacttggtctgattggaaatgggaatatcctgtccccatgtgttatctgagtggggatttattttcccattcttcagagtcattcataacttgcatgcattcttcaataaaaaaggtcatataaaagtattaaatatgttcanagacaaaacttgtgtaattgactactcactcatttgaccaatgggtggcggtttcaggttttgaacggcact

SEQ ID NO: 135370 - DNA, 463 bp, Glycine max
  unsure (1)..(463): unsure at all n locations
ctaagcttgaacaattacttggccttcatttaactggcttttgactttgcggtttctctcaacaaagaactttcgacaactactgtacctttatttgacccatggtggtattggaatggtgcaataatccttctaaaccttattgatacattctgagagggtggttgtcattgtgccctatcgatgttcttctctatcataagccatcggccattttttcttttgaattcgatcaatccatgttgctatggctggactcaagtcacgaaaattttctaaaatttgataaaaatgtgcttgcaaagagtgtaggctgcataaaaatagttatgaataacaattntaagtatatatgaaacttaaataaacgtcaccatcaaatatgaaatcttacccgatcttttcaacatttatttttgttggcattattgaatttcgatgaagttgcttgtatgtgtcacac

SEQ ID NO: 135371 - DNA, 288 bp, Glycine max
tatttgcacccttttttttactggatgcacccccatctatttttttgggaattctttttcccgaacaataccaaactttgggaaattcataacgatacttatttttctttccgcagggtatgaatccttacggatcatgtatttactttcttttagctttcgaagaagttatagaaactcacggattgcgcaaaaacacctcttttcgattttcgccacattacttccttttgatttctgagacgtctcgggacttcatttattgcatatcatcaagtaataatcctc

SEQ ID NO: 135372 - DNA, 344 bp, Glycine max
  unsure (1)..(344): unsure at all n locations
ctaagctctggcggacatcttgacttgctntccaatctgacattcactacttattctgccttcttctatnttcagattgggaatgcctctaacaacacctctgtcaatgattttcttcatgcctcttaagtgcagatgtccaaatctttgatgccatattttgacttcatcttctttggaagatagacatgtggaggaagaactggtttcttgaggtgtccatangtaacaagtgtcctttgatctgctgccttcattaaacttcactcttttatttgtaccaagcattctgactttgtgaagttacatngaatccttcatcacacaactgactgatgctgatc

SEQ ID NO: 135373 - DNA, 433 bp, Glycine max
  unsure (1)..(433): unsure at all n locations
agctnttcgtcttacagatagcaaaagtgtttatactgataaccactacggtatctccgcccgtcagcgtgactcaaaagtcagtatgacaaatcttgtgagggtggccgacaaaagcgaggctcttgctcctacgtatcctccaatgaggaactcagacctacgtagttcttgataacttgtgagacttgaaaaagtctccaccggaagatgctgacatctccggaaagggcgcagatgaccacattggcctctgctcatcaatcacacttggggtcactgaatgacgaggtgcggataaccgtaaggtgtctccgcgggctaccagctcttgngtcatggtaacaaaagcggtgtggtcgacaaaagcaaggcttttgctcctacatatcctcaaatgaagaactcagaacctacgtagtctggataacat

SEQ ID NO: 135374 - DNA, 282 bp, Glycine max
  unsure (1)..(282): unsure at all n locations
tcngaagaaagtgatgaggtacaagccctaaaggcatatctttgtatagcccgggtagtccaagagaagttcaagtccatagccatcaaagtctgaaaagagtatgatgaactaatggacgtcaatatggccaccgctgaagccttggaacgagaaaccaaaaaggcccgaaaggaagaacacgaccaaagcaaagttttgaggggctttatatggcagcaatagtgagctcaagctccgaagaggtgaaaggaatcatcacgggtcaaaagcatgatcttg

SEQ ID NO: 135375 - DNA, 450 bp, Glycine max
  unsure (1)..(450): unsure at all n locations
agctntcctgccagctgcaacaatgntgaatatgccatccaactgcatgaagtatggcaaaaaggggctgatgaaaatgccagcacaatacgattaaattaattaaaaccccacaaataaattaaacataagaatttactcattgtgttntatttctcacattgatgacggtcgcatgaaaaaatgatattttaatgagcattctgaaaaaatatcgatgcatttcgagcgaagatggtggggatccctgaatgcgtttttctcaccgactgttcttacttctgattctcctgctgacgggagcaccaatactcgctcaggagccttctgacgttgcgaaaaacgtgcgtatgatggtttccggtattgtcagttacacccgctggcctgcgctatcagggccaccaaagttatgtattctttcatcttcacgttttagtacccgcctac

SEQ ID NO: 135376 - DNA, 370 bp, Glycine max
aagcttgaacctatttcctccattactgtgttggagcttcctgtgttcaccagctgcacttgagtcaaagttcaaaaactttaatgcccaataagctttatgttccaactcaacaggtaggtggtgtcgcaacctacccttcggcgggaggacgatgcgagactcactggtgcgtcttccgaggaaggaaaacgcacggagtcaccaccaacgtttatttgaggaaaacgttagaaaaaccgaaaaggggtctatgaatttgaaggataaaaggtttgggagtcgtttacgtgaggggaaggcattaacaccccatgcgttcgcctcatgggacggcagtcctttaatcaaatgggcaatatcatgactt

SEQ ID NO: 135377 - DNA, 449 bp, Glycine max
  unsure (1)..(449): unsure at all n locations
gacctcgagtgtatatgggtnttcttccatgtttcaattgtacgtagcttgtgtcttcttcacagatagggcatgcacgatggcccttaacactgcatccactcaaattcttgtatgctggaaagtcattaatggtagaaaataacattgcacacaatgggaatgtctcatttcgatacccatcaaacacaacaacttccttgtcctacaactttgtcaagggttcaatcaaaggactgagataaacatcatagacaacatcaattatttttacttcatgcactaccaaggaggtaagttgttaattactagcaaaacaagtcacaaactatgctgagttcttaaattggcatagggattcattccatcactggcaagtccaagcctaagatttcttgcatcttttgtcaaaattggatacattgctattaatcttcttcattgagaag

SEQ ID NO: 135378 - DNA, 427 bp, Glycine max
aagcttgaaaatgaaccatgcattttctaatatattaaatggattgagtttctttacacctcttcagttgtctctattatgctgtcaaggattctattattacactgctcagaagttcttaaatggataatataaaaatgcaaaatattgtacaaggtagaacttcttatttaacacataatgttaagaattaagctggattcttactgcagattatttcatcttcctttcctggcatttttataactagaactgattcttcttttttataatattgcaagctaggttgttgaaaatggaacaggtttgcacactaaaagtttggccaataagagagccagtcactttttatctaccatggtccatggcaactttgttaatgtttctagaatggacattccgatcaaagcattggaccatacatgct

SEQ ID NO: 135379 - DNA, 468 bp, Glycine max
  unsure (1)..(468): unsure at all n locations
acactatgaaactaagcttctatgattctngattgactgaggttgctggtgagacatctattgatcagcagaaaaacccaaaaagtgatggatcggaggaatctctggatgtaaatgagttgcaaactgattctgcccctgcattggcaacaccaaatggcgatgaaaatgataccacagctgaagtaactgaaggcgtggctgatttgaagttaccggatactgtctctgctaatgaccaagatgaccaactgactctatcaactgcagatgtagattccttgttagataagtgccttctacaagctttgcacacaacagtgaaggacaaagaccttcccttgcctggaagcacgctatggtggaattttctccctctttttctcttggttgacctagttgaaccatttgaaatagatnggccaaagaatctagcaaaccatgaatttcagttgacaattaagtagt

SEQ ID NO: 135380 - DNA, 407 bp, Glycine max
  unsure (1)..(407): unsure at all n locations
agcttctctcccaattttctataaatagggggtttatgttatattanaaaagggctcagccccttangcacttctctctctttcgaatatgcttaggaaaattgtttccgtgaagaaaatccaagccgaggcgcttccgtaacgttttcgtgagtgatttcgcgaaggttttcgaccgctcttcgacgttcttcattcgttcttcatccgtcttcagtcttcaacgggtaagtaccttcaaccaagcttttcaattcattctatgtacccgtggtggtccacattcggtttcatgtatttttattctcgcttcattcacttattattcccgcttttgaccagctcaacgcattttatttaagtattttttgtgtaactaaaactaataaatttccccgatcgttcga

SEQ ID NO: 135381 - DNA, 416 bp, Glycine max
  unsure (1)..(416): unsure at all n locations
ggccacccagctcgcccaggcgagctcagctcgcctaggcgatcatggttgcttcctccagaagcaacagccttctggaggaatcttctggagggcccaagtgggcctggttgctatttccacccccatttttactaagtacacccccctgccttttttttggtgattcttttttcgtaaagttacggaaacttacgaatttcgtaacgatacttgttttctttccgtaatattacggaaccttgtggattacataatcatccccttcttgacttacggaatattacgaaacctcactaattgtgcaacgatgcttccatttgatttccggtgtgtcacggaaccttacggattgtgcatcaatattttcttttgttttccggcatgtnccggaatttcacaaattgcctaatgat

SEQ ID NO: 135382 - DNA, 445 bp, Glycine max
  unsure (1)..(445): unsure at all n locations
agcttgtagaatggctagacatgatacatgttanggcttggnttggntcaagggtaaaagggatgccccacattatttccatgacacaaatgcaaaaatgatgatttggaaactttatgcaaaactggtcatgcatgcatctatgcggacactcaaatgtcaaatttttatggtcatgtgatgctagggttcacgattcatttcctctattttaatcaacccaatgtttccaaaatatgttcttttatcaatttgtgcattcatccgagtccatttcgggcgtctgggaaaatcttcacagcattcacccttcaggtgtatacacattttttcaaaaactagttatgatcagtgaattnttccaaagaaaaagtggaagtcatctcttttcaaaagcatgttggtttttcagcttgacaaccttatttttcttttctcttttatc

SEQ ID NO: 135383 - DNA, 317 bp, Glycine max
  unsure (1)..(317): unsure at all n locations
gcttaagaactatggctattgctaccgccaccctctctctccatttcgccaaaaatcccattcgtcaaacgcattcatcttctccaatacgccatcgcattccttttggtcgacgggtgaatctttattaccctcgcacttcccacagggtaatttttttttttttttttcgtccttcgtaaatgaaaataaaatttcgaacttggattctgggttaaacgttaattggtaacggnttttggttggtatctctttctgcttttttggttacagatttgcgtgttttggttccaagtgttcactgacagacactgatg

SEQ ID NO: 135384 - DNA, 435 bp, Glycine max
cttgagatggatcataattctataaccacaacttaattaaataacatcccaatagtttaaattaatgaataaatccaaatacacgttcttcacttattcaaggattatcggatcatcactattagaaaatatgctctctacatcggttatttatgactttcaacatcggtttttcaaccgatgttgaaagtaccgacgttgataatattatcgttaacatcggtttttgaaaaaccgatgttaacgtaaaattaccaacatcggttatataaataaccgatgttgctaatatgaattacacccacaaaatgaatattaatgttgaaagttaacatcggtttttacaaaaaaccgatgttaacgaatgtgttactggtgacagttaacatacggtttttacagaaaaccgatgttaacgaatgtgttattattgac

SEQ ID NO: 135385 - DNA, 346 bp, Glycine max
  unsure (1)..(346): unsure at all n locations
agtccttcaccccaattcaaccttggcctcttcttgtctttttatttactggncacactcatgtccactacattcttgttcttgcccctaccctttcctgtactttgagaatagaacctttcagaagtattgttccctttattaagtgggttctaacccaaaaaatcatccccttcataggtcatcttcttattattatcatggcattgttctttggagttaagcttcttcctagtgttcatagaatatgcatgagagggagtacttaactcattatcaatgcacctgcttgaggaagaactcttcctctcatagttcttcctcttcatattattattattaacat

SEQ ID NO: 135386 - DNA, 242 bp, Glycine max
attggttccacggatttttcgagcttatttctttataacttgaactaatcaattaacgaatactctggtctggtgttaaataaatatattggttcttgtacatttataacctccgaaacataaaaattgggaataatacgtgccttatttaaatctaataaatgaatgcctgcctggagatgaagatctaaaaggagaagatgcccatttacgtaccgagatcgtcaccaacgctatacgtt

SEQ ID NO: 135387 - DNA, 459 bp, Glycine max
tccttacttcttgtacttttgactctagtccaacaggcagattctgattatgttaactagcagggttaatcttctcagagaccgatgcaacaattctcccaataaacttgtattcatattcatctctatctcaaacaaaaaagtttcaatgaaattaaactaaaagcctagtatccatgccctgataagtccatacgtgtatcgacaaggttaacacatatttcttttctctttaaatttgaacattaaattgtcagacaagtaaaacttaatccaataaaaaataaaaaataaaaagaaaggtatgggtgggtacctatctttgaaatgaaggccagacaagttggctacttgacgcagagccctctcccatttctgcaactcgtctggaaatactttcttatgcttagccaatgcttctccataagtacctttctggtgtctgacatcacaaggata

SEQ ID NO: 135388 - DNA, 135 bp, Glycine max
  unsure (1)..(135): unsure at all n locations
atgacttgtaaatcagatagaatatacaatgtgacctttctgaanaaatagctatattaataaaacatattttcaatattaacatattcccaaatttaatgctcaagaaataactaccccatagtcaaaatgaac

SEQ ID NO: 135389 - DNA, 405 bp, Glycine max
  unsure (1)..(405): unsure at all n locations
gctngtagaccttcaattttatgtgtcaccatacttacatntacatatttattattcttttaaatagngtacagcatgttgtattttattaaatagctttttttataaaaaaaaagccttaacctagattcttttcttaattatcatagccttaacctagtagtttacttctttaaaaagtttgatctaacttaatctgatatagctgggtaggcttgttgaacaatatggcctattgttatttctaaaggagctagataaaatatggaataaaaattaaatgacatggaatggaaggatctatctatgaaatttataagaatttgtcatgcggattatgtgaggtcataagtctcccattttctgcccgatatgggttgcactggcttatgttatgagttacga

SEQ ID NO: 135390 - DNA, 93 bp, Glycine max
  unsure (1)..(93): unsure at all n locations
agctagtccttcagaatagagagattaaagagtgttggtcnatagtgtgaagacacctgaggatcctgatttcttttatggtgacacttaacc

SEQ ID NO: 135391 - DNA, 430 bp, Glycine max
  unsure (1)..(430): unsure at all n locations
aatgcatgcaatagccctggatcgggtccttatttttgttattcagnnctccgctaaaagatgtgaacgtagggtttcaatacgaactgtagaaaaaaagagtttcaataccaattccaatcaaaattaagtatttatttggtttaaaaattaaaaatgttccatatttctttgagtgttggaacaanggtctttttgaatttaaaaaagcctttgtcttctggtgatgataacactgatgtctgattggagaggagtgcccttggcccgagaggatacttaccaaaaattaacatgatcgtcatcaattcatacttcctaatagcgatatacacaaaatataaagagcttttccatgtctgtcaaatagaatatctatttcttaagaacaccgactccacaacctcaagcttttttatttccaatcctg

SEQ ID NO: 135392 - DNA, 390 bp, Glycine max
  unsure (1)..(390): unsure at all n locations
catgcaagcttcaagtgcgtactctcagccacttatgnatttcgtcgatgatcccattactacttctcctaagctctttggccttcctttgcaccgcatcccatgccttgcgaactccttgaagtaccctcgcattagggtcactgaaaacccatgcgatgaaaggtgcaatgctttcctccaatggcgctcctctcatggggtagccaagctgtctgatgatgaggacgggattataattaatacaacatcttgttcccatcaagggaagaattggaaatccttaccatgaggatagaatcctggntcttctttccttccaacgagggaaccaattaacggatgccccatctgtagaagcaaagactcttgctttgatgttttgatgat

SEQ ID NO: 135393 - DNA, 442 bp, Glycine max
  unsure (1)..(442): unsure at all n locations
tgttacagtaacacaataaccctatagataattcatggcttctatataacgggtactctacaattgataagatgataatgacattatcattaaagttcatatatattaatagcttatcagtccaatgacccatatgctaagcaagtcgtgtttgcattcctatatcaaggctaatgaggaaggttgatgtgtatattttaacgccacgtcagtttatggaccccagacagtacaaatttgaaaaataatcattgtaagtaaaccaaatgtcttataggatactgctttttagaagttcacattntggttctctaatcaaattntaatttttataattttaagaactttggctctacttatgaggttgaagaatactctntccaaaatattttcttgcatgagcttngttagtcttggtttaacatgaagatntctcatgtgt

SEQ ID NO: 135394 - DNA, 361 bp, Glycine max
  unsure (1)..(361): unsure at all n locations
acacatgaaactaagctttacctttntgtcataaacgttgcttgatggtcattttctgtcttgntcggcatgtatgatggtatttcaagccaaaaggttcgattctttttgtattttatcatgagtttgntgtgctgtataccaagcttttcggtttcttggatggtttgttgctatgtaccattttgctcgggctttgttgggttttgatgttgcatgtgcattatttactacctttttgtggttttctgattcatagcaacaacacaagttccatctttgttcattttttatgattagtacaaaaggttcgaccttttttctgtgggtttngatgttgcatgtgcatcatttactacct

SEQ ID NO: 135395 - DNA, 378 bp, Glycine max
agcttagctacacacagcctctctaatatctattttcacctccttgagatgagaagctagagcttagctacacaccccctataatagctaagctcacccccatgacaaaaaacatgaaaataccaaaaaaaagtccttactacaaagaatactcaaaatgccccgaaatacaaggctaaaaccctatactactagaatggccaaaatacaaggcccaaacgaaggaaaaagctattctaatatttacaaagaagagtagatccaacctttacccatgggctcaaaaatctaccctaaggttcatgagaatcctagggccttctttagtagctctagcccaagcctcttggagtcttctatccaatacccttgtggggt

SEQ ID NO: 135396 - DNA, 432 bp, Glycine max
tctcacggaagttctctcaagaaagcttctcaggaagctatcttagtctataaatagaagcatgtgtaacacttgttggtactttgatgaatgagagtcttgtgagacatacttcaaagttccacttctcttccttttttattccttcaatttcgtgctcccccctctctctttctcttcctctttcttttcctccattgaagcatccttccaagcttcttatccaaggctcatcttggtggtgaagctccttcttccatggcttattccctagtggatggcgcctcctctcacctcttctcctttggcttctactgcatctccatggtggaaaatcaccattaaaggacctcattgaagctcaaagaatcagcctccatagaagccccacaagcaagctttcatcaatccaaaggcggcgagcctgatgac

SEQ ID NO: 135397 - DNA, 442 bp, Glycine max
  unsure (1)..(442): unsure at all n locations
agcttgaaggtaaactagatgccttggttaatttgtttacccaactgaccatgaataaaaaatctgcacttgttgccagactctgtggtttatgctcctctgccgaccaccacacatacctttgcccttctgtgcaacaatntgaagcaattgaacagcctgaagcttatgctgcaaacatctacaatagacctcctcaacctcagcagcaaaatcagccacaacagaacaattatgacctctccagtaacaggtacaaccctgggtgaaggaatcatcccaaccttagatggtcgagtctttcacaacagcaacaacaacaacagccttatttccagaatgctgctggcccaagcagaccatacgttcctccaccaatccagccgcaacaacaacaacagaatagccccagaaacaacaaacatgtggggcccctctgcaa

SEQ ID NO: 135398 - DNA, 442 bp, Glycine max
  unsure (1)..(442): unsure at all n locations
tgcctaacaacctcattgactcagatctntatagctgtacctatttcacttgtttgagcaccgtgagaagtaaattctcatgctgagaacagtcaaaacatttaagctggaacatctagaaaattataagcatttaagcatggccaggctatagattcccaatttagggatgtcacctaacatgagtgaactgaaattacagtagtgtgctgcttatagaattttgaagctgttaaagggggaagcatagcttggccagaattnttcctctaccttaattataagaatgtatttatgtgggttctcagatccccatttcaaaatcttcttatggtcaaggacaacttttattttaaccgcgtgtatgaatataaagtatctcctaattntaccaactgataatttctatcaaagaattgatccatcacttttaatagaattc

SEQ ID NO: 135399 - DNA, 246 bp, Glycine max
ccccatgtaaatgacacattcttcttcaccaactcattgagaggtgatgccattgtagaaaaaatacgaacaaaccttctatagaaacttgctaacccatggaagcttctaatatcctccacactttttggggggggccattcttggatggccctgaatttctcagggtccaaatggaccccatttcttcccgctacaaaacctaagaaaactatattatctaccacaaaggtacacttctctata

SEQ ID NO: 135400 - DNA, 371 bp, Glycine max
  unsure (1)..(371): unsure at all n locations
actcagcttggaaatggtggtttaccttctcgcaagcctattgctggcttatctagcattacctgaacgcaacactcctgggcttagtgcgaggaagaatccagaagaagatgagctgtacaaattcgcttagcgcaccgcttgatctttctaagtgcaccgcttcagttcatccgctaaacgagaaaggcgcgctaagccaaaaatcactaacgtgcgctaagcggtccatacgttcgctaagcgcacgagcacgaacaaagccacctatgtaagcctgaaacagattttgtaggggagttggactgtattcaagctntgctgtctaggttctaggagagaaggccaagttcaagagtttgaagatttgt

SEQ ID NO: 135401 - DNA, 198 bp, Glycine max
  unsure (1)..(198): unsure at all n locations
agcttcacttgcgatttacattcaatttgttatatttcttttccatctagntattgaggtatcaacaaaatttctggattgctttgaatggaatctcattcacgaccttcaattttcaaagaacaagtcaataattatgttgcagacgaaattcaatgttagtgccattcaagttcatggatttgctgtgggattttg

SEQ ID NO: 135402 - DNA, 374 bp, Glycine max
  unsure (1)..(374): unsure at all n locations
ctgcggatntggtcttcgccaacgaaaggatcaaagtgggtcttgaaagaggtaaatctgatcatcctgctttgatgaatgcgaaaactggggcaaatgaagaggatgagaatgagggagaaacccttgctatgactgccattcctacactgtcaaatttcccatcagcctaacaatgtcattactcagccaatatcaacccttctcattacccaccacctagtcatccacaaaggccatccctaaataaaccacaaagcctgcccgccgcacattcggtgccaaaacaccaaccaaaaaggaattttgtagcgaaaagcctgtaggattcaccccanatttcggtgtcatatgctaacctagctccatatcta

SEQ ID NO: 135403 - DNA, 330 bp, Glycine max
gaccttaagcgacctgcaggctgcagctcttatttagacgagcagatgtctggtatctactctcatgcactcctctaatgactatggcatcatttctggcactaaactgctgggagttggaggccatcttctcaattaaatttctggcttcagcaggagtcatgtcttcaagggctccaccactggcagcatctatcatacttctctccatattactgagtccttcataaaaatattggagaagaagctgttctgaaatctgatggtgagggcaactggcacatagtttattaaatctctcccagtactcatacaggctctctccactga

SEQ ID NO: 135404 - DNA, 318 bp, Glycine max
  unsure (1)..(318): unsure at all n locations
ctaagcttagacaatggagcatattggctgcaggttctacatttttattcttttccaagaacatggaatgctaccctatataaagttctattatagctgaatcgcaaccagaccaagtgttgttctcttttcctactaaaggctttcgagccaaaataaaaaataagatatttctcgcttgagaggttctaacgaaacacacttggggaatgaagagaatttgtnctctaatgatcaaattgaataggagactatcgcccttgacttccttattattcttcttgactatgcattgagcctgaaaaggctcttcaacat

SEQ ID NO: 135405 - DNA, 444 bp, Glycine max
  unsure (1)..(444): unsure at all n locations
agctnggaaagtgacagacgactcgcttagcgagttttatctcgctaagcgcgngcttgcggagcagaggcctttctagattcccctttactcgctaagtgccgtggtgttgggcttaaccattgatgcgcgctaagcgcattacttgcttaatgcgatgactcccttggcacatcttcaaaataactcctttttgcctggagttaaagaaaatttaatattaattccatgtaaataggtttctactgagcagagatcanaacaaagaaaatntatttacaatcctaccaaagagaaccataaattgggatatttatatacattttggaaaacttttctatacaaaagttagtcgtaaacgacgactaacaaactactaatgggaaagcaggaatgcataataattaaagaaatcagaataattaaggaaatcaaactaattca

SEQ ID NO: 135406 - DNA, 438 bp, Glycine max
  unsure (1)..(438): unsure at all n locations
attctctttcaatntttttatgttctccacttaaatctgaatccttgcaaatataatatttagatggaatattacattaaaaagaaaagacaggatagattgattaccggtaaagtaaagcagttatgtttttattgggccgaaataataagaggagccacgagtgtctataggtggccaccaactgcataataatagtacatgctatgcttgctaatgttacggggtccaagtccaacacatccgtgattttgataaataccaacgacggttgcgcgagctcacagttactaatctcacgcacattctttctctctctaaattctgcaccacaatccgcaaaatgaccaaatacttcttgctgtgaatgtcgaaaatgcctgcaggcacaacatgtgaagtgatgcaaaacggcaacactttgtttaccaggttagt

SEQ ID NO: 135407 - DNA, 283 bp, Glycine max
accatggaaggtaaattatacatgtgtttttaagctattggagtgccgcctattgtatatagtcgtggctttctaggtatgtatatggtagtagcttcatgtacacactactagaaaataggctttggctgcataatagggtttttggtttgcatggttctgtgagtatgtgcttgataatggaactttgtgccggcgtgagaatattgccacagccttatgccccgaaaataggaatatcatattgtgctggtgaaagaattcttggctgttcaaaattatt

SEQ ID NO: 135408 - DNA, 305 bp, Glycine max
  unsure (1)..(305): unsure at all n locations
agcttccatcaagtggtaatcagagcacaagatcttttatttgtgctccttaaccctccattaattntttgctttaccttctcttccattgctgtttcctcattttttntctccatgtatctcctcacatgtcttgtgctaaatggtgttaacatgattctttagagtttccaccgattaaacttgctatagaagctagatttgattttctatggttcaaatttcttgttcttgttcttgaaccatgaattgtgttaagtttacgttccttcgagatatgtctttgtattttttgcggctgaaac

SEQ ID NO: 135409 - DNA, 354 bp, Glycine max
caactctgacatggctcccgaccggacttagctgcaaaacatgattaaatgggaaaacgagtcctttaaagaatacactcagccgtggagggacctggcagcgtaagtagccccttccatggtcgagagggaaatggttactatgatggtggataccttgcctgtattttactatgagaaattagtgggctacatgccttctagcttcgcggacttggtctttgccggagaaaggatccatgtgggtttgaagaagggaaagttctgatacatctccctaataggtgccaataataggaggaccggactagttgggcacatagaaagagggagatgccataccgtcacttcaca

SEQ ID NO: 135410 - DNA, 418 bp, Glycine max
  unsure (1)..(418): unsure at all n locations
agcttcaaggggtagcctctctctaatattatatcttcacttctcacaccatatgagtggactaaaattaatttaactttagccttaacaaaactaacaagtgacttgttcttacccatatgaaccttcttcatgggatctgcaattacaaaggttgggttaccatcacttgttngtttcaagtggtctaagtctcattcccctcaatgttttctatatcaatttcttccctaggggtttcatccaaggatctgccaaatttccttctaacttcacatagtcaatggaaattgctccatcctatagcatcttgtttaccacattatgtctcaattgtttatgtctattttttccattaaaggttttggttttcactatggctatcgctaattggttataantatgcattgacactaat

SEQ ID NO: 135411 - DNA, 459 bp, Glycine max
  unsure (1)..(459): unsure at all n locations
ngcaaaaggagagcaactcagaagcacgagtcaaaactgattatgtgagaanttctgagtggagatctcgtctggaggatgaagggagaagcaagaaaagactataataaagggaagctcaccccaaactaagaagaccctttagagtcatcgcaatactacagaataatgctttttgacttgaagagctngctggaaaggtcatcccaaggatctagaacgcaacacatntgaaaccatacttcagttaaaaccatgtgtcatactctttttctacttcactcatttttcccgagtaaaaaataatgtgatttggttgaagagattntagcaaggcgcactgaggtcacaatataaaaggaacaccactatcataattatttaatgaaatccctctaaaacctatgtctcgcaatttctattacttgcaattntaatgcttgcccattacttattcta

SEQ ID NO: 135412 - DNA, 125 bp, Glycine max
agttttcacatgcttgaaagcattcccaattctcatttgagaaaaacctcctatctatgaactttgggtcctataaggaatgagaggaaaagaaggtttgcgtccgcattcgctattcctctgtg

SEQ ID NO: 135413 - DNA, 463 bp, Glycine max
  unsure (1)..(463): unsure at all n locations
acacatgaaactaagctatgctgctatattacaatagacctcctcaatctcagcttcttaatcaaccacagcagaacaattatgacctctccagcagtagatacaaccctggatggaggaatcacgctaatctcagatggtctagccctcagcaacaacaacagcagcctattccttccttccaaaatgctgctggcccaaacagaccatacatttctccaccaatccaacaacaacaacagccccagaaacaacgaacagttgagacccctccacaaccttccctcgaagaacttgtgaggcaaatgactatgcagaacatgcagtttcaacaagagaccagagcctncattcagagcttaaccaatcagatgggacaattggctacacaattgaatcaacaacagtcctagaattctgacaagctgccttttcaagntgtccaaaatcccaaaaatgtcag

SEQ ID NO: 135414 - DNA, 436 bp, Glycine max
  unsure (1)..(436): unsure at all n locations
agctttacactggtgtgaagagctaatgtcttgngttctcacttganactttgaatccgatcacacaaatagataatgaaaatatttttactttctcctctctgaatactatatttgctaactcttgctttcaaatatcccagtatcactgacatgttctccaaaatttacttgcgaaaattagtttctgaaagttttaagatctaacactttcagaaattaatttccggaatgtatttaacatttacctgccatcaaattaaattccaaaatataatttctaaaaagagtgtctatgtggaaaaattattaaaaaattggcaaaggaggattgtattaataaaaaagggaatgcacatagcaattgccaaaataaattagaagtcatgggtcaaaacaaatgcaattggactcatgctcaacttagaaactacga

SEQ ID NO: 135415 - DNA, 419 bp, Glycine max
  unsure (1)..(419): unsure at all n locations
ntacaaggaaataatctccttgcgaagggagtagttggtgtttttgtaaccgctatgactagacgggatactttgctcagctctgtgaagatcgataaaatagtcaaagatcgttccctaggccgtgatagagacatgcagctaggtcactaaatatgcaggagcctaactctggtaggatctgggggaggggaggggcttcttaagattagaagcttatccgaccggccgaaatgtatatgtatggacgagtgacttccgagacaattattgagtcgattcaacggtgtacacaattgaacgaatgaaatgttgctggggtatttgtatatgaaaagatgtggtatatcaaatgacgtttgggcagagaacacttgcttagccctcgttcgcttgggttagctagcccatgatgatag

SEQ ID NO: 135416 - DNA, 343 bp, Glycine max
  unsure (1)..(343): unsure at all n locations
atatacataaactatcattaacctcaactattaagcgatataagccttcataactatctaatccattaaaaatatatattctaattgcgatttttggatagacaaaaaggtatataagaataaaccctatcaacaatcatcttaatggttatcacggagctagattcataaatggtatgttcaaacttgtgttaatagaagttgctatactttttaggaatatcttactattgtcatatcgagaanagtggataattattattacacgaaactacagttagcttatagcgtctttaaatatttgaaattgcagattttttgtctcatctagacaaaaacaaaa

SEQ ID NO: 135417 - DNA, 458 bp, Glycine max
  unsure (1)..(458): unsure at all n locations
tacaatantctactataaggactaacaaatataaatgagacttctattataaccaaatgaatagtttaacctatcataaaaatgagtataatgtaggattcattattatataggctttgtttgaattgttgcaaaagaataaaatgtgagaaatggaatatgatggtattctgtttcattgcttggaatgataaaatgaggatggaatataaccttattttatcttatttcattctttaccttcctaaatttgttaggaatgacagggaataagaattttgttcattccatcattacatattcaaattataaaatggaaattttattccatgatgttgcattctacttcattctattctatctcatcactttccatcaatctattntcatgcgaagtaataacatggacatgggatccaaattcgtggtcggctcttgcaataaatgacaatatatgt

SEQ ID NO: 135418 - DNA, 282 bp, Glycine max
agcttcatgatgaatcaagattgattcattgagtttgttgataacaaagatgatgacaaaaagctcaaaagtcaagaacacttcatgataacaaagatgatgatctcaagaatcaaagaatgagttcaagattgaatcaagaatcaagttttaagattcaagttccaagaatcaagattcaatttcaagaactaagatttacgaatcaagagaagactctatcaagataagtattacaaagttttcttaacaactgcgcagcacattaatttttctcaaaaa

SEQ ID NO: 135419 - DNA, 453 bp, Glycine max
  unsure (1)..(453): unsure at all n locations
tgtgggttaaagtctcacgattgtcacgtgctcatgcaactattgttagtcgtggctatacgagacatcttgccaaacaaagtcaagttagccataactcacctgtgctttttcttccatgctatatgtagcaaagtcattgatcctgtcaagtttgatgagttggaaaatgaggccgcaattatattgtgtcagttggagatgtatttcccccctgctttctatgacatcatgattcacttgattgtgcatctggtcagagaaatcaaatgttgtggtcctgtntatctattgtggatgtacccggttaagcgatacatgaagatcttaaaagggtatacaaagaatctatatcatccagaagcatctatcgttgagaggtacatcgcagaagaagccattgaattttgttcataatacattcagaatggctaaacctgttgccttcttgag

SEQ ID NO: 135420 - DNA, 450 bp, Glycine max
aagaatactaagctaagctccttaactgcacaagctcttaatattttatagtgtattcttgctgaaccttcacccgacgaagacactgacaaaaacttatcttctccttcttggacaaagtatggcaggctgggggcaagtaaattttcttcccatcagaccttggatgcaactgtgatcgtatacccatatcagctagatcttgacgggtattcaagccatccttcgtctcgccttgaatgttaaggagcgtcccaatcacactgtcacaaacatttttctccacatgcataacatcaatacaatgtctaacgtcaatatcacaccagttcggaagatcaaagaaaatggatcttttcttccatatgcaactctgacttttatccttctataggtcttcccaaatatagtattcacgtgttgaacccgctcatataccttctcacagtc

SEQ ID NO: 135421 - DNA, 248 bp, Glycine max
agctttgcaagctggaatcattattttatctctgacagccaatgggggagtcccgtccaggtagtcccgaagaagaccggcctcacagtgataaaaaacgagaaggaggagctaattcctactccggtgcaaaacagtcggagagtctgcattgatcataggaggctgaaccaggttacccaaaaggaccatcttcccctgtcattcattgaccagatgcttgaacgcctggcaagtacatcccacta

SEQ ID NO: 135422 - DNA, 457 bp, Glycine max
  unsure (1)..(457): unsure at all n locations
acacaagaatctaagcttgatgccagnggcacagatttatcatccatattatttttacaatgcgcacttctacgcccttgaagaagaagaattattaaagataaacgagcacaactgagtgaaaatagggagtgctcacttatttttcatatgcaatgaatacagagttcaaaatactcctttttgcagcctgatacaaggccctatatatacacaaacagaccctaactaactaactctaacagttacaacaaaataacagaaatgcagagggaatgtttgccatctctacagtatatctatatcacatgacgtcttatattgatatcatgtgttttaactttcaccttcgaaacatgaaaggtttgagaagattttcataattcaattaatatgaaggctgttaatgaatcaaaataaagtgcttcacttaggttagttcttaacttcatgtaac

SEQ ID NO: 135423 - DNA, 298 bp, Glycine max
  unsure (1)..(298): unsure at all n locations
gatgacgacaganagctgcagagaatcaaagaacattcatctcaacaaaatctcgaacaagtcaaagagttcatagaatctaagaagatatgcacgacttcaggagaaaggcttcaaaccagaatcaagaatcaagatctcgagaactaaagatcaagattcaagacttcaggatccagaatgaagaaaagactcaatcacgatacgctttaaaagttgttcaaactttgaatagcacatgatttttgacaaaaccttacccaagaagttttattctctgggtatcgataccatattg

SEQ ID NO: 135424 - DNA, 385 bp, Glycine max
  unsure (1)..(385): unsure at all n locations
agctntacaaactattgtgaacanaatatgcttatggtgagagtgctatagggctgctattgcatgaaacattatccattagcaaagaagagatagtgactaatgaagccaactaacagactaactaaagtaaccaaaaagtaaaggccggaaccactatatgcagggaagaaatggaccatacctgcacaggtggaaaactaacttttccaatatgatcttccccagcgaaaccaaagatgccaacagcctggttataagtcacacgctttccaacctcacacatgttcttgtagaaggaactggaaaggaaaaccatccttcaaaaacagaagatttgctttttataaataaattaacaaagagtacaacacgttcagagatc

SEQ ID NO: 135425 - DNA, 342 bp, Glycine max
atcttaagcgacctgcaggctgcagctttaatatagtcgtggggtgtgtttcttctcatttgtgatatcgcgacaaatcacagacaaatttggtcaatgcacacgaccctaattgcgatcgtggaaagttataaaccttgatgttgctatccaaatcacggtcgtggattgttttttaaaaccttgctaccctcaactctatcatatccaggaatggaatagcggacagtggaagacttatatctcaaattaaagtcatctcatggcagtggatattgtatatgaaaggggtaaaaccatgaaccttctattctacttggggctccaacccaagggaatgtt

SEQ ID NO: 135426 - DNA, 434 bp, Glycine max
  unsure (1)..(434): unsure at all n locations
ntgagctntgagcacccacgactgttccaagagcagtctatggttnttcttctatctcacagntccaacagtaatgtagggttttcttcgacttttcttcgataggaggttatgtgggttccaacgagcggtttccgacagtattgaaatgaatgtggggcaatgtgggtgtcgaccgagtagttttctgcagatttctggtgggaggagaaagagaagagagaatgcaacatggttttctagcgcgcgagttgtgaaattttatcacgttttaacatattaacataacaacatctacatcggttttttaaggataaccgatgttaggatgaatctgttaacattggttttgtaaaaaccgatgttaacttcaacaaggtaacatcggtttttaaaaaaccgatgttaacattaactccttaacattcgttatc

SEQ ID NO: 135427 - DNA, 134 bp, Glycine max
agcttgccacctagctcgtcgagctggttgctttctgatgaagtttcttgagcgcaccctcacattgattagttcaccaccattcttgtcttcctcataatgaacatggaaacgttacggacgtaccttgtgct

SEQ ID NO: 135428 - DNA, 427 bp, Glycine max
tagaatacctgctgccaattcagttcccaagtctaacaacatttttatttccattaaatctgtattgtcttgtaataaagaagtcattgatatttggcatttccgtttgggtcatccttcatatgataagatgcaagtgttgaaacaaacttatcctatgttgacttgtgataaaacctttgtttgtgatacttgccataaagcaaaacagagaaaacttccatttcccaatagtgactcctatgcttctagtcctttctctttgatacatgtagatattaggggtccttgtaccacaactactttgaatggacataagtattttcttacaattatggatgatcatactagatctgtttggatgtttataatgacttcaaaagcttagacttcaactcatttacaagcctttggtttctatgttgag

SEQ ID NO: 135429 - DNA, 232 bp, Glycine max
atactcagcttgtgagaagcacatgaaggtggctagggcaacaacgctgttttattcttggttgaacgttggatctactccaaatatgtggtggcactatgcaaaaaagttgggcaccatatgaccattgggatctttgctaagatgtctcgaatgtgctccacgcttccattttcgacagcatggtttagtgtaacaggtcaatctttgctttagtggatcctaggaaaaa

SEQ ID NO: 135430 - DNA, 454 bp, Glycine max
  unsure (1)..(454): unsure at all n locations
cctttaaaattaaattcanatntccaaaagctgtacaaactattttatcttctagtaatcgattacatactgtgtgtaattgattacaacattttaaaatcaaattcaaaatttgtaaaagtgttccagaaatcaatttagccactggtaatcgattacatcctttggtaatcgattaccagagagaaaatatcatatctttgaaatttcaaaaaagctttggtaaatatcctttacccaaacctatgcagcatcaattaaggaattctttctaagatcctaggaactaagtacatcattcttcttgaatttctggattcttgacttgaatcgcgctcatatttggcatcatcaaaactttatatcatatatgcttctacaatctcccccttttttatgatgacaataatttgaaatcaagataagtgatatacaatttgataatgtgtgctca

SEQ ID NO: 135431 - DNA, 441 bp, Glycine max
  unsure (1)..(441): unsure at all n locations
ctttagttggaagttaatgagtgatgtcaccattntcatatattatctttanaaacaaaaaatggtgaaattgttatcacatttttgtcactataggggaaaataaacaaaaattgaaacaaaatacactcttataccatacatgtccttaaattatcaaatatatcgtagagcatgaacttagtcccagttatacaaatcccagggttcagaagtaaaagtgaacatatttaactcatgccattcgaaatattaaacagccatttagagacaaaaacacgttgattaatattaaacaataaaaaataccaatatcatgaaagtagcaacaccaagattctttttcgaaggtactcacacatgcttgagctggattagatgtttcaccacaattaatctagtcatgactgctgtgatattgaacatatatttgcgcaagat

SEQ ID NO: 135432 - DNA, 437 bp, Glycine max
  unsure (1)..(437): unsure at all n locations
cttaagcgactgcagcatgcaagctgcctaggcgagctggagctcgccctacatgtggcttgcttaaggctgaagaaatttaatggctcangccagccatatgctaccctgtgcgaagttaggttcacaaaaatttaagaaacaaccatttcgccccttcctttggcttttgtttctggaactgacaaacaaccatcaaaaccctgtgcgactccttgggcttgtgctataaccggtgccaaacaccataattcgattagcaatgatcaaagcatcatatccgaatgataaaaatattatacccggatgaaattatggtctgacaattgtacctctttactcattttttattgaaaatcaacagatagataatgacactatattcattctagcactctgactattcaaaataggatgcccaacaaaacaaacaaatg

SEQ ID NO: 135433 - DNA, 456 bp, Glycine max
tagcctcaatgagtctaacatactcctttgatggtggaggattatagtcttatatagcaagagcttcctgatcaactgcatcctcaacatcataattcacttctttaattataagttgaacatgatgggtgaagatgaatctggagtgaggtcgacgcacaacataagagaagttgtgattagacataacatcaaacttcctcttccacaagtagaccatgttgaaatgagtcttaatagtgaagagggtatgatttagagtctcatagcaacgttccacttcatgatgcacgtcttctactgggggcttctcatctggttccaaacttgagcaataagctctgagtctataaaaccttttgatggcatacaaatccaagattggaagcctagtcttttgctttagagccttaagctcatgtttgaaaagtctattatggagagcttttacatatc

SEQ ID NO: 135434 - DNA, 331 bp, Glycine max
  unsure (1)..(331): unsure at all n locations
agctngacagattacttagagccattctctgttcttcctagcctccacaaggaaggtcaaaaatagtcacatgaagtacctccctgcttagtaatgatattaatgaagacagcgacctgaaactcataaaatacagctgatgcttgttcatgatcggaaacatacattactcatataaattccagacattggaaaacactctctctactgtattatcaacgaccaactgcccctaaccttctactagatgacagaggtgagagtaatttctaagatttagcgcacatcacatctatgagcggaatatagatgccctaacggcgttccatat

SEQ ID NO: 135435 - DNA, 321 bp, Glycine max
tcaccccttgagaagctgccgtaataagacctccgccgaaggtagagctttgctctcactcctactgatagctgagcgcccgccgtgacgaaaaacatgatctactagaaaaaaatccttaccacaatagactactcaaaacggggtgaaccccggcctaagcccgatactgtagaatggccaaatacaaggccgagatgaggaacgacctattaaagaggtacatagaaaacgggggatacaagacccgggctcaaatctaactaatggtatgaaaccctatggcttgccttgtactctagcccgattacttggagattc

SEQ ID NO: 135436 - DNA, 178 bp, Glycine max
  unsure (1)..(178): unsure at all n locations
agctctgccacctgaacggaatgtcttatactcgttatcatgtacgaacaggngaggcagatgcttgctgatgattacacacagatatcaaggcttgataaaatcacggagattacacccggcggaaggaatagaactgataaacactctgagagattgggcaaaccggatggaattt

SEQ ID NO: 135437 - DNA, 233 bp, Glycine max
  unsure (1)..(233): unsure at all n locations
ctaagctttggagtaagtattagagacnactttatgctgggtattttgtntcgcggatgacattggagggggactatatacaattttgactgacccaattaaatgctacgattaatgatgtatgccataataatattaccatgtgattaactcagcgacatcaccggcggtggcatgatcagtagaaaaccaccagacgccggcaatatgatagcataagttgtatttgatgc

SEQ ID NO: 135438 - DNA, 362 bp, Glycine max
  unsure (1)..(362): unsure at all n locations
agctntctctagaatgaattgaccatcttatctttccattaggatcttttcctttagacattgccaagngatgaaccccttataggttgagctttgatactaaactgtaaaggcaaaaccacttcaacaaaatttacacaacacaaaatcacatctcaaaggtagcttttatataaagaaaaaagcacaagaataccaatattttatattaattcgtctctacctttgagattatgtcaagtttttggcaacctactaaatttccactagatgtaggtctacatatgtttagaactccttaggtagagttgagtctaaatgcacgtctacattatttaagagcataattagatagctttttt

SEQ ID NO: 135439 - DNA, 415 bp, Glycine max
  unsure (1)..(415): unsure at all n locations
ctaagcttaagaagcaatgcataccccaatggataatgcaatttttaagagnngaattctattgagaagaattcaacatgggaacttgttaatctgcctcttgacaagaaacccatagcactgaagtgggtttataaagtgaaggtgaaatccaaatgaggccagacttgtggcaaaagggttcttatgaaaacctggagttgactatggtgaggtctatgcacctgtggcaagaatagaaacagtgagattggtggtagcaatcgcaaatataaaaggttggtctatgcataaactagatgtgaagtctgctttcttaaatggacagctagatgaggagggttatgtggaccacccactctctgagaaattgggacaagaagaacaggtatacagattgagaaaggcaatatat

SEQ ID NO: 135440 - DNA, 389 bp, Glycine max
  unsure (1)..(389): unsure at all n locations
agtggatgcttaatggaggaatatattatgtgtagaaagagagatgggggagcacgaaattgaaggaagaaaaagggagagaagttgaactgagttgtgtctcacaagtctcattcatcanagttacaacaagtgttacacatgcttctatttatagactaggtagcttccctagaagctgtcttaagaaaacttgcttgagaagcttctttgagaaaacttccttgagaagctagagcttatctacagacacccatctaaaaactaacctcacctccttgagaagctagagcttagctacacacccatctaaaaactaagctcaccttcttgacaaaatgcatganaatacaaaaaaaaaaagtccctactatcaagaactactcaaa

SEQ ID NO: 135441 - DNA, 313 bp, Glycine max
tggagatatgtcgcggtggtcaagagaccttggggatgtcacgtggggtgctattgcccaaaaccaagcttgaccaatcccaacccaacccgggcatagtcggtcagtgagaatctgtgatgtacctaagcatgagagctcctggcagtcaacagataaaaggaacaaagaccacaaagcaagggggcttgtggtggctggccagctgtgaattatgtgtgatatatgggttgtggctctggtaatcgattaccaaggatgggtaatcgattacaaggcttaataatgaagacaggagactgagatggtctct

SEQ ID NO: 135442 - DNA, 375 bp, Glycine max
agctttaagctgctaattgctcagggtgttgtattgtttgtcataggtctgtatggtggtcggtagaggagcacaaaccacaaacccttgcgacaggtacataattctgattcaaggccagctgggttaccaagttaaccaatgcatccagtttgccttcaagcttcttagtttcagatgtgcagatggtgttgtagctacctcatgcactcctctaatgactatggcatcatttatggcgctaaactgctgggagttggaggccatcttctcaattaaatttctggcttcagcaagagtcatgtcttcaagggctcaccactggcagcatctatcatacttctctccatagtactgagtcctttatcaaaatat

SEQ ID NO: 135443 - DNA, 366 bp, Glycine max
  unsure (1)..(366): unsure at all n locations
cccaactggtcatgaatcaaaaatctgcacctgtcgccagactctgtggtttatgctcctctgtcgaccaccacatagacctatgcccttctgtgcaacaatctgaagcaattgaacaacctgaagcttatgctacaaacatctacaatagacctcctcaacctcagcaccaaaatcagccacaacagaataattatgacctctccagcaacaggtacaatcccgggtggaggaatcatcccaaccttagatggtcgaatccttcacaacagcaacaacaacaacagccttattttcagaatgttgctggcctaagcagaccatacgttcctncaccaatccagcagcaacaacatcaacaacaac

SEQ ID NO: 135444 - DNA, 313 bp, Glycine max
aatgtcttttgcttgtaatcttctggattagttttaactatcaacaactatttatggattgactatttacttgtactattttcaaacccatgataaagctgctcaatttcaaaagaaaatatgtttggaccattataagatattaagagtcatattcaacaaaagcattgcaacatgagtacttcatcattcatctacccaagacccaccaaaataaatgaagaaaatgagcttgaaggttaataccttaacatttgcagtcgtccaaatgatgataatgctagctcaaatgatgacttgcgagaagttgagc

SEQ ID NO: 135445 - DNA, 434 bp, Glycine max
  unsure (1)..(434): unsure at all n locations
acttcgatctaaatggaatggaccttttgttattactaatgtttttccccgtggtgcaattgagattaaaaatgaagttaccagaaaattcttcaaagtgagcggtcatcaactcaagctttttcatgaaagcccccaagtggaggagcaatttatggtggacctctctttggtcttgccagttttatgtgatgatgtgccttgaattacacttgaggagtttcttttctttttcttttatatagttgctctttgtttgtatttcattacatgctcacattgaggacaatgagcatttcaagtgtaggggagggtttagaaaaaatctgtctgttntctggttttctattttatgttttctatnttctggttttattggttctggttccagattttggttcaatctttgcggtgtgatctatcttatgtttcta

SEQ ID NO: 135446 - DNA, 240 bp, Glycine max
acatattccaatccaaactcagttgaaataacaagaacagaaatggaaagaaataaaaaatatattaacacgaaccacaaatgatgataaaaggattgggttatcagcatcaccatgaacaaaaaatcgaccacctcggcaccaccaccacaaatatcgcaccttcgccatctcagatttgcaaagtcgattcttaccccaaacctgtcttcaactccgatgaatccatcttcgacttct

SEQ ID NO: 135447 - DNA, 425 bp, Glycine max
  unsure (1)..(425): unsure at all n locations
tggtatttaaaatntcatgaggtcatttcttcattcatctctgaagagaatatcatggatcactgtatataccaaaaggtcagtgggagtaagatttgtttccttgtattatacgtagatgatattctgcttgcgactaatgataagggtatactatatgaggtgaaacaatttctctcaaagaactttgatatgaaggatatgggagaggcatcttatgtcatangcataaagatccatagagaaagatctcgaggcattttatgcttgtctcaagaaacctatatcaacaaagttttagagagatttaatatgaaagattgtttaccaagtgtagctcccattgtgaatggtgacaaacttgctttgagtcaatgccccaaaaatgattgtgagcgggaaaacatgatatatattccatatgc

SEQ ID NO: 135448 - DNA, 402 bp, Glycine max
agcgtgggatcgattaaaccaatatgaaaatttctctgcaagttacttacacaggtgtaatcgattatgatcagcttgtaatcaattataatcgagttttaagcacaaaagaaattttctaactttagaacctttctttttactcctacatgatgatgcatgatgcacatatggaaagatgagactgagatgcgacacataatacaacatttaattcaaatgccactcaagagagttaggcatgtaagagacaaaacttcttcaatcttcttcaagcttcaaggctaaggcttgatgttgctcctcctatctctaataggtagttggctgccgatccaaatctcgagtttagagaattagtatgatataagagagttcaaaatgggaggactatgagaaagt

SEQ ID NO: 135449 - DNA, 426 bp, Glycine max
  unsure (1)..(426): unsure at all n locations
taagcttacganagtttgatgctaagtcagatgaaagaattttccttggttattcttttcatnagaaagcttatagaatttataataagagaacaatgacaattgaagaatcaattcatgcttcctttgatgagtctaatgctatttctccaagaaaggatattttagataatattgtagaatctttagaacaaatgcacattcatggacaagattctaaaggaaaaggagaaggaagcaatgaagatcctccagtagaagtcaaagcaaataatgatcttccaaaagaatggaaagcttcaagagatcatccccttgacaacattattagtgatatctcanaaggggtaacaactagacactctctcaaagatttatgcaataacatggctgttgtatctatgattgaacctaaaaatctaaatg

SEQ ID NO: 135450 - DNA, 396 bp, Glycine max
  unsure (1)..(396): unsure at all n locations
agctngcacttgcattgggtggggttttgtttctcaattggactcttttaaaatatccttatcagatgcggaatacaaataacaatttttttttacataataaaagaagcaatatatacggttttctcttttaacactacaaggtcctattcatataagtgttatgttatgctaacctggcatgctaaaactaaattttgaagccttctcttggataagttaacctgaatgtagtgaacagatcagacatccatcaaattggctcttggatcctttntttcctctaatccatgatagaatttcagtgtattatccactgagttaaatntactagttggttatctttctgcaaatgtgtttgatatctttntctaacaaagtttatggatgctttct

SEQ ID NO: 135451 - DNA, 313 bp, Glycine max
  unsure (1)..(313): unsure at all n locations
gtatctggaatttggcctctggtaatcaattaccaagggtgtgtaatcgattccaaggcttaaaaatggagacaggatgttaaaatggcctctggtaatcgattaccaattgtgtgtaatcgattacatagagtaacaaggcactagtaatcgattaccagttgggtgtaatcgattacacagggagataggacactggtaatcgattaccatctangtgtaatcgattacacagtgtaattngtatgtttccatgtgcanaagctgtataattcgagtttggcactggtaatcattacatactttgggtatc

SEQ ID NO: 135452 - DNA, 154 bp, Glycine max
gatccatccccatatacccgggtacatcctgtccatcgacacgcgaggctgcctaaagaggggaactatggaggcgatagttacccttcaaagatggaaatcgttccaacaatcctcctacttcacgtatggatagaggacaggcaacttacca

SEQ ID NO: 135453 - DNA, 245 bp, Glycine max
  unsure (1)..(245): unsure at all n locations
attcatgggtctccaaataagatttgagggtggaggatagacgaacaatgctaggcaatcaattcgtggggcttcagactcgatggtggatgacgcatgaaccgaactangaaatcaattcatgggacttcgaataagatttgagggtggaggatagacgaacagtgctaggcaatcaattcgtggggctccagactcgatggtggaggacgcatgaatcgagctaggatatcaattcatgagag

SEQ ID NO: 135454 - DNA, 353 bp, Glycine max
  unsure (1)..(353): unsure at all n locations
tctgaagctgaactatcgggtcttataatncaatttgctaagagtagattcggagctttcgggatttctgatcaatggaagcatgatgcagcaaagtacttgaactgcaactgcttaactcttttttttgtgtatcttggcataactataggggctattaatgcaacaaatggtgagctatggactaaagttttgaattccaaatatggtggatggaggaaccttgatataaaagacatcaaaactttcaacactgctttgttaggaaaatggagatgggagttgttccagcagcccgatgaaccatgggccagggttctattctcgaagtatggtggttggaggtccttgga

SEQ ID NO: 135455 - DNA, 450 bp, Glycine max
atatttgacattcccataatgtatttcctaacattctctttgtgatttgagtgatcccacttctcctaaagtttcctctattcagaggtactataatctgtaggagaaaagggtttctcaatccttgatgcaaggtctatatccatgcagccaataacaatttgcatgttctctgtccagtccttaaaatttgcaccattaagaactggaaccgaattcagattatcatatgtagaagcaacaactgataaagatcaaaacaaatatacaataaactcacatagcattcatcaatgcatgtaaataatgatatatctcatcacaagattttcagtgcaccattaatatcaagtctgtggacagtgatattaactactagtgaaatccttgttgtaatgttcacacattgataataaaagcatgtcaaataacaaatccatcttttgatat

SEQ ID NO: 135456 - DNA, 339 bp, Glycine max
  unsure (1)..(339): unsure at all n locations
gacccggatccttaagcacctgggctgcaagcttaaccgttattaagccgttcttttctaataattgataaaatgaatttcaaccgatcatttgtgttgtaatctcgtttaatcactgttaaaatgaaatctaatcgatcgttcatgttgtaacctcggttaaaccaaaaaaggcataataataataaaataatcaaaattctttgaataaaataatcaaaaaaatcaatcggatgtttttctttgaaagtttccttgaatgaattgactaataaccaaagtgaaactaaggctaanatcaactcacaaatcaagctttgtccgcaaaagtcacttaaa

SEQ ID NO: 135457 - DNA, 466 bp, Glycine max
tgctaagtactgggaaagattcaagaaattgtgtgcattctgttctcaccaccagatttctgagcaacttcttcaatatttctatgagggacttagcaacatggagaggagtatgattgatgctgctagtggtggagctcttggtggtatgacccctgctgaggctaggaatttaattgagaagatggcttccaactcctaacagtttagtgccagaaatgatgctattgtcattagaggagtgcatgaagtagccacgaattcatcttcataagctgaaactaagaagctagagggtaaactagatgccttggttaacctggtaacccagctggccttgaatcataagtctgtacttgtcacaagactctgtggtttatgctcctttgccgaccaccacacagaccttttcccttctgtgcagcaattgaacagactgaagcttatgctgcatacatctacaata

SEQ ID NO: 135458 - DNA, 436 bp, Glycine max
  unsure (1)..(436): unsure at all n locations
agcttctcaagcaagctttcatcatcttttctctcttcttactnanncctacacccttaagctttttgttttttttttatctacaattggtagtttttattcgtgggagaattaagctcacgatataggtctttcttctttctcctttcaccatccacccttaaactcttattccaatcacgagactgagtttatatctccatctacatgcatttgttaatcttcagaatttcatattgtagcaagttatatattttattctgaacaagacaactaaatttttctaatgaaatagctctactctaagattcttctttgataatgcaagattatccaactaataaattaacacatttttttacatgtatttcttatatataaatcaattactctattaaattttcccgtaaaacagagttatcgttagaccattcat

SEQ ID NO: 135459 - DNA, 357 bp, Glycine max
aacaacagctcacaaatggcggtgagctgcgatatgaatctggcaatataattcaagcgtcccatgaagccccggacttgtctctcattacggggttctggcatctcatagatagccttcaccttttcggggtatacctctatccctttctggcttacaatgaaaccaagtaatttccctgatttgaccccaaaggtacacttaacggggttcaaccttaattgatatttcttaagcctttcgaacaacttccgcatgttgacatagtgttcttcctcggattaagatttaacaattatgtcgttcacgtagacctcgatttcttgatgcaccatatcatggaacaaagctaccatt

SEQ ID NO: 135460 - DNA, 358 bp, Glycine max
  unsure (1)..(358): unsure at all n locations
ctccaggtggggtggtgatacctctgaaattgaccaagcttgtggttgttgtagctcgttttgggatccactctcagtctctccccttccctctgtttacctttccttctgaccactgttgtccactcgctctattctctctctcaccctctctctctctcattctctcaccctatcctcttagttaatagacacgggaaatggtagggtggatgaaggaattgtaatgaaatggaaatgaanactacaatattatgcagttcttcatggtagtgggtcggatcatcacagatacttcttccatgctacctcatgtgattcctttcaaacgagaatggtctggcttttatatttggat

SEQ ID NO: 135461 - DNA, 338 bp, Glycine max
cttaatagaaacatattgtggtatcttgaacaactcatactaatgatccaagatgttgattttggactccttcacttagttagtcccttcatgggtcattttcagggtataacatttctacttggctatttcacaacaagccattgtaacatattacttctactcaatgcacacaaaagaaagtatcttgcttttgagttcagaagatactttcacttctttgttgagctccattgcgcttctggcaatatgttttgaacttcttcagagtttctcttgctaagaatgtatggatcttactagataatgtcctacatgtttaacatttgagattcatg

SEQ ID NO: 135462 - DNA, 349 bp, Glycine max
agcttaaagtactagaatgtggtttatattattcccaaatagattaattggccttctaatggtcttccttatcaagcgaagcttcccaatgtcttcaagcatcaaatcaatacaatgagatgcacaaggagtccaataaatatgtttccttttgtcctctaacaacttacccctaaaacatagttgctcccattatcagttacaacttgaacaacgttctcttctcaacttcctccaaatagcataagcaactaaaaagcttttacctatcttcacaaaatcagagccatcaacagacttcaaaacattataccagcttgagagtaacaaaaaattatgatgcattttg

SEQ ID NO: 135463 - DNA, 420 bp, Glycine max
cttaagtttcatgggataatttcttcattcggttttaatgaaaaccccatggatcaatgcatataccacaaggtcagtgggagtaaaatatgtgtccttgttttatatggatatgatattgtacttgcagccaatgatcagggtttgctacatgaggtgaaacaatttttctctaagaattttgacatgaaggatatgagtgatgcatcttatttcattggcattaagattcatagagatagacctcgaggtgttctatgtctatcataggaaacctttatcaacagaattttagagatattttggatgaaagattgctcaccaagcgtcgctcccattgtgaatggtgataggtttaatttgaaccaatgcccacagaatgattttaagagggaacatatgataaacattccttatgct

SEQ ID NO: 135464 - DNA, 330 bp, Glycine max
  unsure (1)..(330): unsure at all n locations
aagagagatgagataacaagggattatgtgttctcacttccattatacaaatgtttggttacgattggaccatatgcctcgtcagatcctacagcaaactcttcatactgtctgtcccacaactggtatgcacgcgtcacatcaatttaattatacacatcacgcttgttcacactatttatgcattcggagcaaaaccgctgccctgttntcatctangattactcttgtataatatatggatatggatgtatntgcaaccggaaccaagtgttctccaagttccaacaagcctagaaaatgctttctggagtacatctcacttacact

SEQ ID NO: 135465 - DNA, 351 bp, Glycine max
acccaaaaattcatctctgcaatacatatacaacgttggaacagaatacaaccagatattgtatttggaaccggacccaataacctcaacaaaacaattatgcctattatgaagaacagcacaattgcaacggaagtgttatgcctgatgttatcccttattaccctccttcaagttggagagtgaagaatgagatttaagaactcccaacttcgccagcgggtcgtgaaactgtctagagcccaaagccttagtaaatacatcatctgggtgctgcttgctaagaacataattagtagcaatgatgctggatagaagatgctcatgtgaaatgggattcattgatatatg

SEQ ID NO: 135466 - DNA, 361 bp, Glycine max
  unsure (1)..(361): unsure at all n locations
agcttaagcgcatatgannatttttggcttattatcatatgatactttcaaaaatttaggtgggtattggacttatgtcaaagttaggccctatagacaagggtcaattgtgaaaaagttacaccaaaagttggttgtgtgttactataggccctttccagtggtgaagcaaatgggaccgtagcttttcaacttcagcttcatgtttgtccttttaagaaaccaatagggcaacatccggttgagcagactcttcccacacaattatagattgagacaaaagcattagttctggaacaactattggacatgaggaacatttccaagggaacagatctaactaagcatgttttgatccaat

SEQ ID NO: 135467 - DNA, 377 bp, Glycine max
tttaattcactggcgaaatcttcctcccaaagaaaataattgggaatctgcggcttaattacaagaggtttttccgacttatcaccttgagggcacagggagtcttttatgcgggaatattgataaacataagcattatccacacatcacccgctaacagcgagcaagagaagcaattaccatggtccaccagcagcatggtgcacaacacccaaggggtgcataccacccaacagttatgacccacccaatgggtgcataccacctaatagttatgacccacccaaatggtgttaaccacccaatagttaggaatcacccacaaggtgcaaggtcagaagatgtgaatcaaatggacatgacccttgtgaacaatc

SEQ ID NO: 135468 - DNA, 382 bp, Glycine max
  unsure (1)..(382): unsure at all n locations
aaatcttgccaaacgacgatctttctctttcttggaacgtaccacaagatatggtacttccacacctttgtccatagcctttccacttctactcttctctgaaatcttatttatttttctctttcatttttccattatctatttctttttctccttctctatccttttcttggttctccatctttttattctgaaccattattttcctccctttctcctgattctttttacccttcacatcattttccttaacctcagcacctatcttttcacccatttgctccttgtacaccatactctcttcatactcagctttcacaaaatttntactcctactcatcacaaccttgcattcctccttaatattattttggatttgctc

SEQ ID NO: 135469 - DNA, 475 bp, Glycine max
  unsure (1)..(475): unsure at all n locations
ttatctaagctacttgaatagttgtacttttgaattatacatttaatctaaatcttttcaattctaatttttaaggtgttctcctttacaggcctcctggtactggtaaaacattgttagccgggctattgccagtaatatatatgctaacttcctaaaggtcagattatgtttgtttttttataaattctgagtgctttgaagtcttcttcgttgtaaaattgacaaatacattgtcaattttatgctaacttccctttattctgatgtaggttgtttccagtgccataattgacaagtacattggagaaagtgccaggttaatcacagagatgtttgtgtatgcacgtgatcaccaagtgagatacttgtgtgaaattgtcttcctatatgtttacacatactacattanagatgttctaaatctatacttttcttgattagtcgtgcatcattcttatggatgagattgatg

SEQ ID NO: 135470 - DNA, 346 bp, Glycine max
  unsure (1)..(346): unsure at all n locations
agagctccaaccctataacgcaacgtggcagacaaaagagggcagttaacttgaatggtcatcattgtcaatgcggaaggtattcagcgcttcactatccatgttcacacattattgcagttgtggttacgtgagcatgaactactaccaatatatagatgttgtttatacaaacgagcacatcttaaaagcttactccgcacaatgggggcctcttgggaatgaagcggctattcctccctctgatgacgcatggacacttatctctgacccaactacaattcgttcgaaaggtcgaccaaaatcaacaaggataagatatgagatggatngtgtcaaaccatct

SEQ ID NO: 135471 - DNA, 403 bp, Glycine max
ttctttgtaatgctattttaaagcataaatgccatactaatcttttcgagttataacaaacttgtgcatacatttccctgaagaagaacatttatgaacgtgcatacgcgcaaaatatcctgctatctatatcaatatacaaggatattcaaaacattctagctacttatatcccacacatattctttagaaaataattcatatatgcatgctcaaggtattgtgccaaaatcacatatgttcgtattcaaagtattttgctaccataaattacatacgcacattcaaggtatcttactacttaaattaacatacaaattaatacaggttgtttggtgtttcattcacatttatttatacatatatgcacattttgagagccaatgtcatgttatgcacacac

SEQ ID NO: 135472 - DNA, 340 bp, Glycine max
  unsure (1)..(340): unsure at all n locations
taccacttattgatgaaagatgatagaatttcaccttagatggtttggtcatttgagaataaagacgaataaaagctccactatgaagatgatcaaagatgatctgatactaatatgctggatacctactaaaaaatgtagaatctggtacatctgaattctccttgatacatatttgattcaatgtgagaaattttcagttttctgatctgtaaattttccagtttctgaaatctgttacattccataccaatccacatcttctctttacttattccactanataccgaatgtctgaagacagagcactagctacaccaacttgccacacatgcttaca

SEQ ID NO: 135473 - DNA, 362 bp, Glycine max
  unsure (1)..(362): unsure at all n locations
acaatgtgtatcatcgctaaaaaaaattgaaattcttacatgtccttgaatttgaacatcacttcttttacacaggatttgagcatttcttaaattatttgctaatcttaaatggattgataaaataaaaaaagtgcaaagaaaattcaagatgtatcacgggcattagtgttcaagaataatatatacatatgcatctattaatgtaagtggttacttgcgattgatttgtgggtgaaggcacgagagaagaattcgttagcgctggaataaatgaagttgcaaagaatgtgtaaaagataatgaaagaatgtgacatattagaagtcaaaatanattaattattctaattaatttcataa

SEQ ID NO: 135474 - DNA, 245 bp, Glycine max
accacaggagtggtagcctggagatatcgtcgcggtggtcatgagactcttggggacgtcagggggggtgctattgcccaaaaccaagcttgaccaatcccgacccaacccgggcatatgtgggtagcgaaatctgtattgtaccatatctggcgatctcctggccgtctgcagataataggaaaacaagaccacatagcaaggaggcttgtggtggctgtgcaactgtgaactttgtttaatat

SEQ ID NO: 135475 - DNA, 352 bp, Glycine max
gactgccctcacgtactgtctcgtggggggtatgaactgcttgacaagaaacttatggaggagaagagcaagcgtggacatgaagaacattcgtgtactgaaagcccaacactcaacttcgacccaccatccccagttgcaagacacttgatgtggaagattgcccgtactaagcggcatggacaaatgacgtctgaagtggcacaagatattgcagacaaaattgtcagttcatatatttttttggttactgtcattggcaaataatggttagctaacctagtcaaatttgttttattcaaattcaacaattgtatatgcatgcatgattcattacatgaacatgcaacac

SEQ ID NO: 135476 - DNA, 370 bp, Glycine max
agcttctcgaacgtgatcaatactttcattgtcatagattgaaggatgaagttgtggtgcgtgatctgttttggtgtcacccagatgcagtaaagttatgcaatgcatgtcatctagtgttttttatagacagtacctacaaaacaaacaggtacagactcccactacttgtacttgtggagtgacaccaacggcgatgacattctctgctgggtttgcatatctggaggctgagcgtgttaataatattgtatgggctttggaacgatttcgaggcctatttttaagacacgatcgcctccctctttgtattgtcactgacagagacctagcactgatgaatgcagtgaaaactgtgtttcccgagtct

SEQ ID NO: 135477 - DNA, 378 bp, Glycine max
atagggggagaagtgtagtttttatggttcaaccccttaggcacttctctctctttcgaatttgcttggaaaaattggtttcgtgaagaaaatcctatccgaggcacttccgaaacgtttccgtgaggaattttgcgaatgtttcgaccgttcttcgacgttcttcattcgttcttcatcgttcttcgatcttcaacgggtaagtacctcgaaccaagcttttcgattcattctatgtacccgtggtggtccacattgtgtttcgtgtatttttattctcgtttcagttactttttatacccccttttgacgtgcttaagccattgtatttaagtcatttctcgcttaacctaaaaataaaataaatttccaccgatc

SEQ ID NO: 135478 - DNA, 353 bp, Glycine max
  unsure (1)..(353): unsure at all n locations
agcttgagcaaattcaaacgactataactttntacttgttgtccgaattaatcccataatatatcgagacactcgtaattgaaaatggaagctctgagcaaattctaacgataataactttttactcggatgtctgattgagtctcgttatatatcgagacgctcaaaattgaaacaaaagctctgagcaaattcaaacgacaataactttttactcggatgtccgattgtggccagtggtatatcgacacgctgcaaattcagaacaacagctcttagcaaattcaaacgaaaataactttnttctcggatgtccgattgngtcccatagtatatcaagacgctcaaatttc

SEQ ID NO: 135479 - DNA, 472 bp, Glycine max
  unsure (1)..(472): unsure at all n locations
tattgtcgttggaatntgctcaaagcttctgttctgaatttcgagcatctccatatactacgggaaacaatcggacatccgagtaaaaaggttgtgttgtttgaatcttctaagaggttatgatttcaattttgagcgtctcgatatattacgagactcaatcaggcatccgagtaaaaagttattgtcgttagatttttcttagagcttctatttccgattatgagcgtctcgatatattacgagattcattcggacatccgagtaaaaagttattgtcgtttgattttgctcaaagcttctgttatgaatttcgagtgtctcgatatactacgggacacaatcggacatccgagtaaaaagttattgacatttgaatttgctcatagcattcgctggcaattacgagcgtctagatatattataggattcattcggacatccgagtaaaaagttattatcttnttatttt

SEQ ID NO: 135480 - DNA, 414 bp, Glycine max
ttaagtcacctgcggcatgcagctgcctattacctgaatttgagtcttgattttacgcaaacagaaaggaagtgctaagtatttattacctatacttaacaaaaaatacttataacactacgagataaccatatattgggagagtttgctacttacacaagctttatacacaaaagttagtcgtattaccaactaacacttatgcttaattatcttgaataacacaattaaagagagcttaatacttattttgattcacaaatccagccataactcagcaccacaactcaacttcatcataggcatcatctaggaaacttataaaacaaataaaagttcaacaacaagattacttctacgaattgatttagaacatgttatgaactatataacatgtatgaaatagactcaaaa

SEQ ID NO: 135481 - DNA, 414 bp, Glycine max
  unsure (1)..(414): unsure at all n locations
gagaagtgttgtttataacggntcagccccttatgcacttctgtgtctttcgaatttgcttaagaaaattgtcgttgtgaagaaaatccaagccgaggcgcttccgtaacgtttccgtgagtgatttcgcgaatgttttcgaccgttcttcgacgttcttcatcggtcttcagtcttcaacgggtaagtacctcaaaccaagcttttcaattcattctatgtacccgtggtggtccaaatttggtttcatgtatgtttagtctcgtattcatttactttttatacccccttttgacgtgcttaagccatttatttaagtcatttctcgcttaacctaacaataaaataaatttccaccgatcatttgaattgcatcatccgttaactctgggtgaaatatattgcgaccgatcg

SEQ ID NO: 135482 - DNA, 328 bp, Glycine max
  unsure (1)..(328): unsure at all n locations
attccgcacagaattggagctgcaaactgggttcccaccaatcatacttccactggtgccacaggtttgggtaaatttctgtatgctgntggaaccaaatccaaatttaattttggaaactatatctttgatcaaatgttaagcattcagaatcttttgctatcaaattacccattgccttccctactgtattgtgtggcattatgttgagtcagcatcccaatatgttaaactacactgactctgtgatgaagagagaatctcctctatccctgcattacaaactgtttgaagggacacatgtcccaaacattgtctcgacatctgt

SEQ ID NO: 135483 - DNA, 319 bp, Glycine max
  unsure (1)..(319): unsure at all n locations
tgctttattgcatccagcagaggtatgtttacctctaactttctaaatgtttccaagatctccttctctgcctcttccatttttttgttggaaattgctcttggagggaatggaagagggatatgctgcttctgtaaatcacaattaccagtggaagattcacttgcatagaaattgttaggtaacttactctttaaatttttgtcatcatcttttgctggagtagagtgaggttgggcacgttcatttgcggacgatgaaagtgctatngtttgatgtccttgacactactttcccgacctcaattgtatggcactca

SEQ ID NO: 135484 - DNA, 350 bp, Glycine max
  unsure (1)..(350): unsure at all n locations
agctttgatggtggtgagaagattatacatgtttgtcatcatcaaaaagggggagaatgtgaatgtatgcatacatgattttgatgatgccaaagaagaaccaaacaaggctgcttcaaatgataagcatttgcttcaagaataattcaagattgcttcaacaaacaaagcttatttcaagattcactaaagaccaagccttgccttanaacaaagtgctttcaagacatggaaggctctggtaatcgattaccaggaagtgtaatcgattaccagaagacagggttgagaaatagctggtgaaaaaggttttgaatttgaattttcaacatgtaatccattaccatatg

SEQ ID NO: 135485 - DNA, 441 bp, Glycine max
  unsure (1)..(441): unsure at all n locations
ntatatgcctttaaagttnttatgccaaagtggagaatctatgtggaaagcaaattaagatcgtgagattcgatagaggtggaaagtactatgatagatacatggagaatggagaagcacctggtctatttgcgaagtttcttcaagaacattagattgttgcccaatacactatggttggttctccaaattagaatggtgtggaagaaagaagaaaccgaactttaatggacatagtgaagagtatgaagagtaatagaaaacttcctcaattcttatggattgaagcactaattaaagacgggtgtgtagtattaaatcgagtaccaaccaaggttttctcaaagacaccttctgagttattcaaaggttggaaaccaagtttgagacatatacacatttggggatgcttatctgaattgtagaattataatctataag

SEQ ID NO: 135486 - DNA, 231 bp, Glycine max
ttgcttcaatcctgtatatcatcacaacttcagaggcttggttctaggattcaacttccaaaggcttacttactctaatatatctctgattcaggtgctctgagagtttcttgttttaatctgaagctttgagcttttgttgatagatatgccaaaggcaaattgcagtttctaatttgttgaaactacaaagattgaggttagaactgatagaagagttaccatgtgtat

SEQ ID NO: 135487 - DNA, 327 bp, Glycine max
  unsure (1)..(327): unsure at all n locations
agcttggagctccttgtctttatgaagattctcatttgatttgtagtagaaggagacatattcttccacccaagacttgatatcatcccatatctctagcccatcagaagcatgaggatagtcctcgatcaaaagtcaaactccatggggagcagatggatccttaacagcaactcctctgattaaaagcacccaaataacattgattagcataagagttatatcaagcctgaagcctttnttcttcttatgtcattgatgactttttatatcatgcattcatgtgccactactctgtcaaagccatgaactgtcaaagccatcatt

SEQ ID NO: 135488 - DNA, 371 bp, Glycine max
atttcataatgtatgtcgtatctagtcaagggctgagagaccatacaagtttcctaacgatttctaattatgtgggccattaagtctatcatatgctgacaatagccgaaaagcccatgaatctcttcgggggtggagtaagtgtctgccatcgccttggccttggctaacaagccgggaagttcttgactctcgttcaaggtaagagcaaaccgatccatccacatggttgcctcttggtgtaaagagtcgatcacccttcctctagcctctttttccgcgtatacttgagcatactcgtccgcgattctatgcccgtgggccgcggctagacctaactcttcttggtacttggcgatgatagctagcat

SEQ ID NO: 135489 - DNA, 435 bp, Glycine max
  unsure (1)..(435): unsure at all n locations
gcttttggatccattcgacaactatcatttaattatacttgcttcaaacctctncttccatccaagaagatggcaaactcaatattcactttcctccttacatccacatcaagaaagaacctcttgaagcattntaatctttcacgagtgagttccatgtcttgatgtggaggaaccgattataattttcacttaaccattcatgactattatatctacaattaaaaagaaatatatacatgattaaaatttatgtaattctaaaaaaaatgtatgtaaaaaagtatagagtcgattacctacgagttaaagaatgagctgaacaatggagaggagtgcttctcttatatcaacgggcaattaatatggagcgcactacgtatataagaggtgatcttcactctcctccttctttatattgtatatggaatctta

SEQ ID NO: 135490 - DNA, 459 bp, Glycine max
tttatccggagttccaaaaatgaaattgagctattctttgtggctatggaaaacttgaagaaagctcttcaactttcatgaacaagttgcggtctgatactacatggattatggaaaaaattgagcctaaagttacagacattagtctacctggataacttgatatatgtgcaataatttgaagactgcttgagctacaaaagagaatttgagattatctcaatggatgtggaactctaagagaaagatctacatatttcatgaagaagtcgtggggtaataaggcttagatcttggaagaaactaattatgaagatactttgaagattatttatgttgtagtggtacaaatgacataataccaatgcttaaatgtcaaggatgaaattctctacaactttcatgaagacatcgaaagctagtttgggcattcaaagggtcaaagaaataaataacaat

SEQ ID NO: 135491 - DNA, 415 bp, Glycine max
agcttcaccctcttcaagcatgaagctgttattgattcattttaagttaatagacatgtatttaaactaatgaaacaagatttgaaatacaaagtagaaaccatattaaagtaaaataaaaaataaaaacaaaagggagaagtacagagtaagttcaaagaggaacactataaaatttctattcttttcacagtcaaatcaaactcaacaagtctcacgggcttacaggctcacaaaaccttgcatgtggtctcaaactcagaggctatcgtccttacctttcccgtggcatatgcattggtaatcaaattctgaagcctctgccctccactggcagatatgtactggctgcatatgtactaagcagaggacgtctcctacaagattaagaaaagtgattatactcattcacaca

SEQ ID NO: 135492 - DNA, 445 bp, Glycine max
tgtaagtgctgctactggtggaggcacttctatttgcttgccagacctcaaggtgatggcactcacatttttcggattatgcacagtttgtgaaggcaatctgtcataattttgggactgagcttggttcaactaagtagccatctgccccatctaatttgtcagactctaaatggaggctcttgtctcttgttgaaattgcatattctggatggtcatttgcctcactaactcctctaaagaaggttgagaaggggcctcagttgcttgttgtctttgttgttgttgttgctgctgctgcattggaggaggaacatatggtctactggaaaggagggacagactgttgttgctactgttggtgctgtggaggattttcccatctcaaatttggatgattcctccaacctggaatgatctattgtttgaaagtcataattattct

SEQ ID NO: 135493 - DNA, 409 bp, Glycine max
  unsure (1)..(409): unsure at all n locations
agcttcttatccaaggcactctctnggtttttgttctcatccttccatggcttattccgtagagcatgacgtctcctctcacctcttctcctttatcttccactacatctccatggttgaaaatcaccattgaaggacttcaattaagctcaaagatccagtctccatagaagcttctcagcaagcttccatcattagcggtctctagagatatcatcctcttaggtaatacattgtggcgatagggactatcagcgacaatgcatcaccagaagaggaaaactctagatgaggcttcactgttatcaagcgagttaggaacccaacatgaccatagatcaacctccactccctatggctaacacagacccgggtatagagcccaatatctcaaagtgtgtgcaaaagt

SEQ ID NO: 135494 - DNA, 433 bp, Glycine max
gcttaaagcattcctcgtagatgacttcctagctatcttatttggatacatgtaaatagttcttttaaagttaataatgttgtttgcacctctaggtccctaaagctactacaccttgacctgtttagaccaaccaaaactctatccctctctagacgcaaatatggtctggtcatattggacgattacactagataaacatgggtcaagttcttaaccaacaaggatgagtcttttaatacctttggtaaattatgtaaaaagattcaaaatgaaaaaaaaaaggaatgtgtatctctctaatcataaatgatcataggggagagtttgaaaataatctttttgaaaagttttgtgaagagaatggtattcaccacaatctttctataacaccaccacaaaatggaggtgttgagaggaaaaataaatctct

SEQ ID NO: 135495 - DNA, 316 bp, Glycine max
tatgataataagcatgcgttgaagttttttttcttctttccaataaacataattttgtttttgctatatattatgcatatgttgaagtggaaagggcaatgaaagtcatcgatcaaacgaccaatgaaaaaagaaaaacaatgaatgaaaattataatcatttgcatagggtgagcccagacccgattcattataaaaattaaaaagggtattcatatgtatgcagctgcgactccattttcgaaaccctaacttaattcttcccaagtatcattatagggaaaacttgtcttaattgtcattaaattatgggttt

SEQ ID NO: 135496 - DNA, 387 bp, Glycine max
  unsure (1)..(387): unsure at all n locations
tgagaaagacattcaattaatttgttgccaatcaaaggcaagtacattgtggcttgttccgccaattgtgcaagccaaatttataaagtcccttatgtggaacatggacattactttctcctgggaatttatcaaagataggcctaaaggaaaggaagcagtaaagtatgaactaaccatactggagcaagatcttcccaaatcttcagaagtgactaaagttttcaatggtagttcaaatagtttcactgtattcaatatttacccgagatattttcgggtcacgggctctggagatgtgcggtcccttgaacagtcggtatgtntaacatataatatacctaatctaagactaaaaatatgtattaagaccaaaaaaatgtacct

SEQ ID NO: 135497 - DNA, 378 bp, Glycine max
  unsure (1)..(378): unsure at all n locations
agcttaatggagctaaagagatcaatgcttatctcgagagattgaagaggatgaaggaacaagagaaagtggcaacgtattttctatccttcaatataattctaaagtaatattctatctaaaaatggttatagtgatggttttaatgatgttgaagctcaatgttaatgtaagcatggtgagcagaaactagaatgtactagagttatggaagtaacattccatctaaaaatgtctaaccacacttccttaatttctattactancccggtaatttatgaggtgagaatgttttactttggcagcgactaatgtgatggcttgagttggcattctgtctacaccttatacattgaaagaaactgggtggatgagcat

SEQ ID NO: 135498 - DNA, 414 bp, Glycine max
  unsure (1)..(414): unsure at all n locations
tcagcttatgagacttatgcagtnttggatatttgttcattcttattcgatcctattacaactttatgctaatgtttaactaaatgtgtatacccgaatatgcacatggctattcttaattatttttttttataaatcatttattttcttgaatcttatggcactctttaatgaagaaaaatacctttacaaaaagaaatcaactacctgcattcttctggattttangctgcccagctttaacaagaacctcaagatcaacttggctgaatgacaagagtcctataaatagacctgatgtgatttcagcatataacacaaatgccgaacacatgcttagttaaatccaatagtgagttgcacaacaaggtgctctttcctcaaaatatgaactcattnnttctttggatgggg

SEQ ID NO: 135499 - DNA, 372 bp, Glycine max
  unsure (1)..(372): unsure at all n locations
caagctgctgtcaggagcttactagttgtttatgttttcgttaactgacaaaagtcacatattctgtatacttgaagttttttttaataaaattgcatattcggaaaaaaattattcattctcattccttaaatttgatggtttaagtgtatcttctgtttacagataaataacaaatatttcaagatgagaaacagctaatgattgttactctttcctttggttttttatacaagaaacaaaaaactaattcatcaaaaccaatgaaagtagttaataaattttaattaataatgtcaattntaattnttattcacaatatagccatagaattaattgtntagtagtgttatggtaatgacctaccataat

SEQ ID NO: 135500 - DNA, 474 bp, Glycine max
  unsure (1)..(474): unsure at all n locations
tgcattaagacaagccataactaatggccgtgtctgtttttncgccactgacaatgantttgacaagaacttcttaccctggatcggngatgaagattgttcaagtttatttgctttttgttttgttatattgttatattccataagaacaaatcatgatttaattttatatatattgaaaagtttaaataacgtaatgatgatttatatatcgctaattgttaggctcaggactcatcacgaacaaatactttggattagtttatattattgctgaaaaaattaaaatattttgttttattatagagcactttttgaatataagataattctgttgtgcctttcaaatacagctttagttacaaactggtatatatctaaaatttattgaagtttataataattatctgaattaaaggttatgataaaactaattcatgtctattggttttgtttgaagaataatgatgctta

SEQ ID NO: 135501 - DNA, 72 bp, Glycine max
ggggagaggaacacccaaaagacaagggggagcgacaacccaacaagagagggagcaaacgcgaaaaacaag

SEQ ID NO: 135502 - DNA, 268 bp, Glycine max
  unsure (1)..(268): unsure at all n locations
actatnatactcagcttgatgatactggatgattcaaaatgtttcttcttctcccaccaattcagcactcttaaattctatgaggactacaacaggagagagatgattgagctgcagggtggactcctggcgtatacccccgatgaggcaagacttgataaaatgatggcttccaacttccaccaaatcagcgcaagaaatggagctattggtcttataggaatccatgaggtggccacggactcatcttcatctactgaaaataaaa

SEQ ID NO: 135503 - DNA, 468 bp, Glycine max
  unsure (1)..(468): unsure at all n locations
agcttaagcttcttcctacccctctctttttctcatttctccttctccctctccaatagttcctttnttctcgagtttgaggtttgagttcctacatctttagtggcttgtttcttctttgattgttttggaaggaaataattgccttctctaaattaaaaagtctcaaattaaaaaataaactctaaatcctttgatatgttatcctgctttttctgttcatggattaaaattattaagattgattaattatagtgtagagtccatttttagagactttcaacaaattataagtagttaaataaatttaccaacaaactaatctcaagtctatgttagtaaagaccaaatattatacattntgtgctttactagtaaccaactcttggcaatcatatttattcatttgagtantaacgaactatatttattntaaataaaatttcgaggttatttctttaaaaaaaa

SEQ ID NO: 135504 - DNA, 429 bp, Glycine max
  unsure (1)..(429): unsure at all n locations
tcttagtttcagatgatgcagatgggtttgtagctacctcatgcactcctctaatgactatggcatcatttctggcactaaactgctgggaattggaagccatcttctcaattaaatttctggcttcagcaggagtcatgtctccaagggctccaccactggcagcatctatcatacttctctccatattactgagtccttcataaaaatattggagaagaagctgttctgaaatctgatggtgggggcaactggcacatagtttcttaaatctctcccagtactcatacaggctctctccactgagttgtctaatacctgagatattcttcctgatggctgtggtcctggaagcanggaaaattttttctaagaatactctcttaaggtcatcccagctcgtgatggaccttggagcaaggtaatata

SEQ ID NO: 135505 - DNA, 379 bp, Glycine max
acgtgactcttaaggcaacacattctcccacaatgcatctttaagaaaagacgagaaatatgaaggtgaatgtattttgattagtgatgaattgaagtggcaccttgagttttgtaagcaacaaaaagattaaaatcatggcgactttaccataaaagcaactatgtgctgctttaaaaaaccatggcaagttcaaccaatagtcaatccaacccgcactagactcatgtcaaagattagtctcttaaccgcggaaagtcaaaaagattattaccaataacagaagatcagcatttattttactaatataaaatatcgagtggcgttgtgctggttggtaaagtatattcagaatattaattagagggaaaaaataatg

SEQ ID NO: 135506 - DNA, 215 bp, Glycine max
aaaaatcctgaggacagaaccaaacgtgagagagcccaacaaaagaatgcgccccaacccgacagaggaaagaaaagagtgggacgaccaacatcggaggggcccctcaaacgaatggagaacaacacaaattggaagcaacgggcaaaaaggtgaaccgacaacgaggggaggccagacacacaggaaacaacggacacttaaagaagctccct

SEQ ID NO: 135507 - DNA, 356 bp, Glycine max
gaactaacttgaatcactgaatgtgcactagaattaccttgactttgtggaggtgcaacatatgcacatgcggttgaccttgtagttctcaaattaacacatgcaattgaattagcagtagatataattgggatgaaccatttggagttggtacatgtgcaattgattgagcaataattgctttgtgcgttgatgtagatgtttcactaggtccagacttaaagaatggctccatccttgatttatgcaaacatcaacaaacatacaaatagtttaatgaaacagacatatatgaagaaatgtaggtttcaaatgtgtgagtatttatacaatgtacctattacaggtagccacat

SEQ ID NO: 135508 - DNA, 457 bp, Glycine max
  unsure (1)..(457): unsure at all n locations
gacactttatactaagcttgggacccattatctagttcgcataacaggggttagcttccaccttatgtggcaactactttgattaagcattntatttttatttttaatatttcttggtatttggcatgatatgtaagtgttatccatacctctcttgcaatgttttcccttcatgacaatgttgtcaggcttcacactggacatagtgatcaatattgcctccattctgaagaatgttatgattgtaagtgtagctctttctctgtatagccactcattagtgatattgaggatgtaagtgaattgaattggcttcactaagaatacagtttaatttactgaaaaatgttattttcattgtgaacttgcctaattgtattggtgttgctggatgtangagacaattgcaactagtttattccttctgcaaaataaagctgtggtaaatctttggttc

SEQ ID NO: 135509 - DNA, 325 bp, Glycine max
  unsure (1)..(325): unsure at all n locations
gcacgctntaaagagaatgaaaaagganaaatgtctctttttcttgtctagacgangcattgagacattctttataagagagttagtatttctaaattgtcaaatcacatcaaagctctatcctcttgaattagaagaagtgagaatctacctaataccgagactgtatgttcaaatcacataaagctttatcttacttggccatttaaactcttattgcctttttcttctagatttggtgggatgcttctgttttaacgcgtgatgaatgtaacttattatgattgtcactctctatacgtaatattgaacggtctaatatgga

SEQ ID NO: 135510 - DNA, 430 bp, Glycine max
ttatgatgaaaaaaagctcaaaagtgcggatcacttcatgataacaaagatgatgacattcaagaatgagtgcaagaatgtgttctagattgagtcaagaacacttcaaggatcaagagcaaatttgatttccagaatcaagattcatgattcaaagattcgagaataatcgagatcaagataaaagactcaaagattcaaaaatcaagagaagacttaatcgagataagtattaaaaagtgttgtaaaacattgagtagcacaagaagttttcacaaaatcattaccaaagagttttactctctggtaatcaattaccagattatagtaatcgattaccagcgggtgttaaaatgtttagattttcaaaattcagaatgaagagtcacatctggtgatgtgttatcgattacacctttatggtaatcga

SEQ ID NO: 135511 - DNA, 243 bp, Glycine max
cccgacttggagaagcgagtttgagtttgggtttagatatgtcactttgtcccatatgtgtcccgctcaaaggcgctggggaacagaatggagtacagtttggcgctaacgtgttgtaaatggaatccaccttgttttcattcctacccgctacggatatcatattttaatgactgttgaagttaatgggtctagctatcgcttatgaactctattttgattcatgacatgctaacgatgggc

SEQ ID NO: 135512 - DNA, 425 bp, Glycine max
atcttgagagcttcttcccctaatcatatactttccatatcttataacttttcacaacaccaaccttattgctttgctactcttttcaacacctctattttctttgatgatggttgtccctagcttttattctttaaatcttcttttttttcttttcttttgcaaatgtaaaaacattcatactacgttggagtaataccatattttgtaactcaatttaacttgtgatgtatatgtattttcctacaatagaaaatcacccataaacatttccccaatattggtacaaatgtgtctggatccatgagcattctcctacaacctaaaaaagggtagttagtaaatatcactctttgggctcgtgttctaatgaacatttttttttacattatgctcaataggagttatgggatgcattcattcac

SEQ ID NO: 135513 - DNA, 354 bp, Glycine max
tttagctcacgtaagtgtatatctcaacccacgaccctaaacaacaatacaatttaactttgattttcatctcaacaatcaattctcataggcacatgcaaagatcactaagtactttcttggtatgtaatgtgactgggatacaaagaacttgatttttttggatattaaaatgactgagagaagagaaagcttttatttatctatttttttttataaaaaaagtcagtcattttttgcttttcttagccactatgaaatacctgaacttgattctcccttggtgagcatagattgtccactccaaacttagaacactgcattattataagtcatttgctcttcctcttccta

SEQ ID NO: 135514 - DNA, 351 bp, Glycine max
attcaatttagaacgagaaatcccccagagaaacgtccgattgatttttccgctttattttactaaaagggatttttcgattattatattattattttacctctttttttatttccaacgtggttacggcacaaccgaacggtgggaattcattttaactgacattaacggatattacaaatcaaatgatcagtggaaatttattttatttttgattaggcgagaaatgacttatataaatgactgaagcacgtcaaaagggggtacgaacagttaatgaaacgagaataatagtacacaaaacaaatggggaccaccacgggtacatagaatgaattgaatagctcaatt

SEQ ID NO: 135515 - DNA, 268 bp, Glycine max
  unsure (1)..(268): unsure at all n locations
ctgcagctaccataagcagccnatctttttgatgtttttcannacaaagagcttataaggtcgtaaattaccttgatcacctggaaactgtggcttaaagctctgactaactgcactatacatcgcaattaaaacaaagattatatcttatggatccacatgtatgcatacaagataatttataatgtgatatgactggtaacttgattcgcttcttatacatcgggaccttcttgacctcaacattgagaaagatgctttagtcaag

SEQ ID NO: 135516 - DNA, 168 bp, Glycine max
gccttgatactagctgaggcgacttaagagaacgtttttttttccaacgaaaatggactggtaatattaatacaaatgctacttttgcgacacatatcttcagaccggctcatgcgaacttatatataaaactataagtatggtctacaactctgcctgatggatcct

SEQ ID NO: 135517 - DNA, 385 bp, Glycine max
  unsure (1)..(385): unsure at all n locations
agcttatattttntatacagcaaatatatttcatgaaactcattgtccgcattcacgtgaccactttcgtaatatattttaaaacagattcattttgagaataagtttttatccgctgtcacatgaccactttcgtaatatattttaaaacagattcattttgagaataagttttaagagaaattccctttggtcaatttgctttgccgtgtttgtctgagaatatagttcgttctgaaaaaaaaaacatcaattgtttgtcggtgtccacttcttggttgcttgtgtttttcacccggaaaccttgaaaaagtaatgaatgtcagttgaaatgtttaattttcatactatggggaatcataactgggggaatcatataacctag

SEQ ID NO: 135518 - DNA, 460 bp, Glycine max
ttttgcttcgtcgacttgtgggggaattctttcttttcagcaccgatagccaaaatggttgattgttagatctctgcagtatataatcaatttatgtacagggttttcgcttctattattaattaattagatatttattcacatatcgtaacaattggatgtaattattaaatattattttatcaataaaacggcatgaaacaggaatagttcttagagatattttgttcccttcataattctatgcatctttgtacgcctttaatttttatgttgtctattactcccgtgacaactgaaatgctttcgtgggaaactttgacatattaaacataatcaataatctattattgtgaaattcattcaattaccgtgattgtaaaaatttgatgacagaatctgtagtgaacctcacgattctctgattatatctttaatatgaaaatttgttttatactta

SEQ ID NO: 135519 - DNA, 342 bp, Glycine max
  unsure (1)..(342): unsure at all n locations
agcttgntctctntatttaaaatttattttctccgttccatcaccaagntaatgaataactgcgatcgagtaggaaaatgtttttttttttccttttccttttccttttcaaaagacgtttgttgatacaaaataaataaaaaaatgggagtcgcaaggctaatgattactatttccttatttatccattccaatggggtcaccacatattgccacccatgcatgcatgaggaaacataattatatacacacccaccttatatagcactgtgttatctcatctcatcctcggcattaaatagctcgcaccgacgttcaaggaaaaaggaaacatcccatcta

SEQ ID NO: 135520 - DNA, 350 bp, Glycine max
ataaagtataagggtttttttttattttgagttccactaacgccaaaatttgtttggtgaaaatatttttttttttaaatttttcaaaactaattatttcacttattagaaatacgttcatatcattgttaatcttactatataaagtatttcttttatacaatctaaacgaaatatattattttaaaattatttttgttacctaaaaacataaaaattgatttcacatataatctaaaaatcattaaatatttataaaaaaaaatggcaatatgctgaccacgctacttacgtccgtgtttaaaaaaaagtattatatactaagaaattatatatatagggaattcttt

SEQ ID NO: 135521 - DNA, 364 bp, Glycine max
gctctgtgttaatttcagcgtctaatatattattggcctgaatcagacatccgaatcatatgttatggctgtttaaatatgccatgtgcttcaatgttcaattttgaacatctcgatatattatgcgcctgaatcgggcatctgagtgaaaaggtatgccatatgagttagccgagagcttcgttgttcgatttcgagcgtctcgacatattattggcctgaatcggacatccgagtcaaaagttatggcagtgtaaactttccatgtgcttccatgtttaattttgagcatctcgatatattatgcacctgaatcggacatctgagagaaaagttatgccatatgagatagccgagagctttc

SEQ ID NO: 135522 - DNA, 385 bp, Glycine max
agctttattattaagcttcatgttgttgttataaagcttaacaatatatataacttttaatgatcttcatattccttatgggtggagtatgatttgcagcatacacttgatgaaattacctatatgagtgtcaagtaagccaccttgtataagatcatagtgaagtctctaaacactcatgaatactaagcacatgcatgacctattagcacacaacaacgataacaacaaggattgtgggggtgtaatgtgattggtagacctctaacatacaccaaacattttttcttcatatagcttgctacaccaactatgatgtgtgttaagtcctgttagtctatgcttgggtcatatagcttactacaccatgtcttgcacattacaa

SEQ ID NO: 135523 - DNA, 380 bp, Glycine max
  unsure (1)..(380): unsure at all n locations
ctgcagctagcttcacaagtttttactggttttcatagctttgcatgtctagggtttctagagagagaaaggtccaagttccagaaagttttgagagaatttgttgtgcgaagatctgtagagaccagagcttgaagcaggagccagttcgagagcttgagatgagttttgagtgattgtgagatcctagaggtgaaggagacatcttcaccacttgtatttttgcaatttttcatcttgttcttctctttgntgntaagaaggcttcctggtatggaaagctaaatactctgttggatctttcctgtangtacctgatgtaaatatatttatatttatttaatgatggtttgggtgtctttgtgctatctgcttggcat

SEQ ID NO: 135524 - DNA, 322 bp, Glycine max
tatgggaggaggttacatgccattttttctttaagagtaatgtcccactaaaactaactttccaaatgtttgccttcgcaggaatggcaccgaggaagcttgcctcatagatgtccaggaaagacaaggcggccgaatgaactatttccgccccggagtacgacagtcaccgctttatgagcgttgtacaccagcagcgtttcgaagccatcaagggatggtcgtttctccgagagcgacgcgtccagctcatggaggacgagtatactgatttccatgaggaaatagggcgccggcggtgggcaccactggttactcccat

SEQ ID NO: 135525 - DNA, 337 bp, Glycine max
  unsure (1)..(337): unsure at all n locations
gatcttaagtcacctgcngcatgcaagctttaccattagatttacatatgctttatttttgcaattacaatccacttaaatttagtaatgatccactaacctagggaattaaaagaacttaatggctgagtgtaactgaaattgtggcaaccaaaagtcaccccaaggctgatgcctaagctgccaattgggcccttattacaattgaactaaaccaaactaaagcccctttagtttattaacccaaaacatatttttggtcagccaactntacatggattgagccattatttagacaaactaaacactctaaaattgagatgaagtggcgccattt

SEQ ID NO: 135526 - DNA, 354 bp, Glycine max
  unsure (1)..(354): unsure at all n locations
tctcacctattctcctttgtcttacgctgcatctccaaggtggaaaatcaccattgaaggacctcattgaagctccaagatccagcctccatataagccccacaagcaagcttccatcatgtaatcgattaccagtgaagaatttcagaaaaagctttttgaaaagacacatcacttcaaaccattttgaaaatgcacgaagggcctatatatatgagtgtctgacttcaaaaagcaagagagagatattctaagagaacttaattgtcaaatgctctctcaacaactcttggagaaacacttgcngatctatcgagaattcatccaggaacttcaaatggtgttatcatctct

SEQ ID NO: 135527 - DNA, 497 bp, Glycine max
  unsure (1)..(497): unsure at all n locations
tcttcagtcacctgcgggcatgcaagcttccacatccgtacttggaaggatctgattaccgcctttcttangcaatatcagtacaattccgatatggctcccgatcgcactcagctgcagaacatggttaagaaggaaagtgagacatttaaagagtacgctcagcggtggagagacttggcagcacaagtttcccctcccaggtcgaaagggagatgattaccatgatggtagacaccttgctagtgttttactatgagaagttggtaggctatatgccttccagcttcgcggacttggtattcgccggggaaagaatcgaagtaaggttgaagagagggaagttcgattacgtctcctctacaagtaccaatgctaggaaaatcggagcaactggggcaaaatggaaggaaggagatacccatgccgtcacttcngcgcccgcgagggtcaagccaccgcagacctctcatggacccatcagtatgggaacatca

SEQ ID NO: 135528 - DNA, 435 bp, Glycine max
ctaagctgaagaagtttgtctttacatgcctaactctcttgagtggtatttgtattgattggtgtactatgtgttgcatcttaatctctatattttcatatgtacatcatgcatcatcatgtaggaagaaaaagagtgtttctaaagttagaaactttcttcaatgcatagaactctatgttttaatcgattgcaagcatgatcgtaatcgactactcaagtgtttgtagcttgcagagaagtttttcgtatcgatttaatcgattacaagctaatgataatcgattacacagttcatttgagacaatgattgattcttcaagagtctatgctttaatcgattaccaagtgatcataatcgattactttattcttaaaagtgttgccataagtgatcaaaaacactctaatcgatcacatcaagaatctaatcga

SEQ ID NO: 135529 - DNA, 353 bp, Glycine max
tggtggtcagcaaaggaacacaaaccacaaacccttgcgacaggtacagatttctgattcaaggccagctgggttaccaagttgaccaacgcatccagtttgccttcaagcttcttagtttcaatgatgcagatgggtttgtagctacctcatgcactcctctaatgactatggcatcatttctggcactaaactgctgggaattggaagccatcttctcaattaaatttctggcttcagcaggagtcatgtctccaagggcttcaccactggcagcatctatcatacttctcttcatattactgagtccttcataaaaatattggagaagaagctgttctgatatctgatgg

SEQ ID NO: 135530 - DNA, 371 bp, Glycine max
cgagtcgcactcaagccatggagtttcttcctcctttgtcgataacaatgtcaattggtgtgattgcagacaacaactcttttaaaaaaagaggttctaatacatacactaacggaaaaacaacctcttatgttggcttgagaatacctaacaatggctctgcagcccactatcgctggcgatcctttggcggcaggctcactatcttgatacgctgtggcttcctcggatgaaaaacgacattgaaagcttttagcttattgaactcttccatcactacgaataaaaaaaaaaaaccatatttccggcgccaaaaattgttggaaacgttaaacatcgtgtcgtaattgaaaatattcaatggatttttg

SEQ ID NO: 135531 - DNA, 381 bp, Glycine max
  unsure (1)..(381): unsure at all n locations
tgcggcatgcaagcttggacttcctgtgtgttgagaaccttttctttctcatgtgtacccaaacccaatcacctggntcaagcacgactttctttctgcttttgttggcttgccttgcatagctcgcatatttcttttcaatttgaaccttcacttgctcatgcaacttcttcacatactcagctttagctgtgcatccttattcttaaacatagcaatgttaggcataggcaacaaatcaagaggagtcaaaggattaaatccatacactatctcaaatggtgaacaattagttgtgctatggacagcccgattataagcaaactcaacatgaggcaaacaggcttcccaagatttaagatttttctttaaaacagtcct

SEQ ID NO: 135532 - DNA, 282 bp, Glycine max
tcaaaatcagttgggggctttttctcttgattttcggggttggggttgggaaatgagggcagttgttatttctgcttctgaggtatttggaaactcttgtgaaagctgtgaatgccagttgatagtagactcccatcgtttaggtttggatgatgttggagttattctgaattctatgaaatgttaagtgaggaagtactaggtaaaaggaaatggatgttgatgaaaaatgagtttaagtgatgtattgaactgggaatgagtaaggagatctactgaatg

SEQ ID NO: 135533 - DNA, 318 bp, Glycine max
  unsure (1)..(318): unsure at all n locations
agcttncttganaagattcctattatagctatagcttagttacacacacctatctaatagctaagctcacctccttgagatgagaagctagaacttagctacacaccccctataatagctaagctcacccccatgaaaaaatacatgaaaatacaaaaaaaaatccctactacaaagctactcaaaatgcctcgaaatacaagactaaaaccctatactactagaatgaccaaaatacaaggcccaaacgaaggagaaacctattctaatatttacaaagataagcgggctcatacttagcccatgggctcgaaatct

SEQ ID NO: 135534 - DNA, 411 bp, Glycine max
  unsure (1)..(411): unsure at all n locations
catttaaggtactcgaatgcataatttgtcatcaattacatgacgaatgattatgtgatttatagcataaatttaaatatacataaatgatgtatttatttctatctatgaaaatttgcgaaagtcagattctcttaattttatgtggatgtaactagagaaggtaccgaattatgtgtccttttacaccaagaaaagactaatttgtaagctgtaactcttaatggatgctatctatttaaataagtttcaaattaaattgggtggatattatttctatttcaaagtgaatggactgctgagtggaaagttgangggctaccaaaaaggattatcaaagattgtcaggctgaatagatgttttgggcgacaacatttggtggtgtattgacactcataacgtcataatca

SEQ ID NO: 135535 - DNA, 318 bp, Glycine max
aagcacctgcgctgcagcttattcttttaagaattttttctctgaccctgctcagaaccctggtgagttatactgaatgtaacctgcttatatcatggtattaacttttaaatcccataattgtggctgcatctgtgtgagtttctgagctatatcaacgtttttgatgtcactgccactgttgcaattgcaatttaaacccttggcttatgcactgtaaacataacacttcactgcctctatcacaccctaccttgatagttgatactagtcagcaatatcttgctatctctctctctttgtataccccattgctgt

SEQ ID NO: 135536 - DNA, 465 bp, Glycine max
  unsure (1)..(465): unsure at all n locations
tgcttaagtggaagcagacttagttattagnttagttttgtcaatttaatcaagcatttaaaatttaaattcaaataatttacgaataactcaaatcattcactttattaaaaaaaaaactcaaaccattcacaacaaatgtaagcggtggattacaatgtttgtgtggctaacatgtgtatattatgattttggaaacaatgattaacatggtgttgccacatgttgtgtcaatgcctcaacaatctaaatcccttaaacaacctaaattcctaattgtgaaaatgaattgccttaataatttcccgaactaactttgcgtttcattacatttgcctaatgagctagatggcgaattgtgaccacgagaatgataaaagtagcctgattagaaaaaataaaaatggtattatgtaatggtaattaacattaattgtaaattaaagagactaatngcgtcacata

SEQ ID NO: 135537 - DNA, 432 bp, Glycine max
  unsure (1)..(432): unsure at all n locations
agcttataagaacanaatagcctaaatcttttccaaatatacatgggaattacgaagcatcaacaagaatcaagccaaggctattgtgcaagcaatcaatggggcaaaactcaccaaaagattatgatgatggatggctcaaattctcacaaaggtaaacttatcactttcaaatgagccttcaaaactatcatgacatgtagaggaaaaacaaggatttcaaatcacaaaatgtcaagagacttttattttcagaacaattacccatttcttgaacatatcctataattcaaagaaaaatatgcaaagttgtacatgcaaacagaattgacctaatatattaaactagaaacccaacaaaactaacaaaactaacaaaactaagcaaaccaanaaccaaagaactccccttccncatacttaaacaacaca

SEQ ID NO: 135538 - DNA, 271 bp, Glycine max
tctgtctctaaaacctgatggtggtatttagaaggtacaagatactgaaaatcgcaggccaaggaaaaaggtaaccatgataaaatgcgcactttagccaactgcgaaagaataaagagtgctctaatcgaattctcattattcacttcacaacctaaaggggtgcaaggaattgttcccatcaaggcctttctaaaataatgtgctgcgacatctttaacaatagtgtccctataaattggtggattgtcttctgataacaactctttta

SEQ ID NO: 135539 - DNA, 336 bp, Glycine max
  unsure (1)..(336): unsure at all n locations
agcttatgctgcnacatttatatagattcttttttttctaaccaacaaccgcagaataattatgacctttcaagcaacagatacaatctatgttggaggaatcatccaaatctgagatgggcaagtcctccaaaacaacaacaacatgtccctcccttccagaatggtgctgtccaagcaagccatatattcctcctccaatgcagcagcaagaacaacatagacaacaagcaactaaggctcctcctcaaccttccttacaagagttagtgaggcaaatgaccatcgcaaatatgaaatttcagccagagacaagagcctncattcaaagtctga

SEQ ID NO: 135540 - DNA, 363 bp, Glycine max
tcatcctggtggcgaggctccttcctccatggcttattcgctaggggatgggacctgctctcaactcttttcctttgtcttccgctgcatcttcatggtggaaaatcaccattaaaggacctcactgaagctcaaagatccagcctccatagaagcttcacaagctatcaatatattgacagattcagatatactgattttgatgactgatgctcataatgttggagaagctgaagatctagaagatcaagatgttcaaagccatagtgcttcttctccctcaaaggcaaaatgaattccagagcccataatcaaattaaatgccatcaaggtggattctactttaatgatcttttggacatt

SEQ ID NO: 135541 - DNA, 329 bp, Glycine max
  unsure (1)..(329): unsure at all n locations
ttaagtcacctgcggcatgcaagcttgttgtgttcaaagtctattttctttttattcttcacncctgacagagtaggaagagtccctaccaaaccattatgactagcatcttaaacagttatgctttccaacaattcaatctcttgtggcaagcaacctccaatgtcattgcccatgaacacaatctcattcattgtttcatgttcacaatatactttggaatacaacccgtgaatctgttgttagcctaggacacaactgacaccttggattttcctagagtgactgagatgatagacgtgaaaccattattgctcacaaatattgca

SEQ ID NO: 135542 - DNA, 483 bp, Glycine max
  unsure (1)..(483): unsure at all n locations
taagctctaaatatatatattttataatgaatcgagtgtattattatttattcaaataatatattatactataataataataataataataataataataataataataataatgtctattattttctatatagaataataataatgccttagataattttaatatatattattgcacagcatataatattataaatattttcagttgttgtgtgaaatatatactttaatgtaccatattgtttttttaaaaataaaactaagcatacttaaatattatttaatttattattaatgtggaaattataatttagaatagtatcaaataatataattaggattaatacatttaattagatgaacttaattgagaattatatttcacaaataagttaatttagagctcatatgtatttatgtatctattgtacatanaattcaatcttataacttattcatgttatataacagttttctattaat

SEQ ID NO: 135543 - DNA, 465 bp, Glycine max
  unsure (1)..(465): unsure at all n locations
agcttcaggaacatgaaatggaacttatgtgattccatccacatgaagagaatgacaaanaaaataaaggaatttcactcagagccttatcatcttctattcaagaagaaagtgacaaagaggacttgaatgaaatagaagaagatgatgatttcaaattttttgtgaaagattcaataagtttatgagaaacaaaagaaataaaaataaatcaaacatcaatccaaagaagaaaggaaaagattcctctttagccccaaaatgctatgaatgcaatcaacctgggcacatgagattcgattgccttgtctttaaaagaagaatgaanaaatccgataagaggaatttcaaagaanagaaagaaaagaaagcatacatcacttggcangataatgacatggattcttcatgtggntcagaaaatgaaatcatatatctgtgtctcatggtgaaagactatgaaag

SEQ ID NO: 135544 - DNA, 373 bp, Glycine max
cgtgacacttaaatactcagcttctccccattttcttataatagggggagaggtgaagagaaatttcgttcagccctcctggtaattcagaatcacttaaaattagtgaacaaaaatggttgcgtgaagaaaatccgagctgaggcgcttccgtaacgtttccgtaacgtttccgtgggtgatttcgcgaaggttttcgaccgttcttcgacgttcttcatcgttcttcggtcttcaaccggtaagttccctaaatcaaacttttcaattcattctatgtacccttagtggtcctcatttgcttttacgtgctttcatttacatttcatttactttccgtacccccttttgacgtgctttagtcatttgctta

SEQ ID NO: 135545 - DNA, 347 bp, Glycine max
ctgctgtgggcttaatggaggcttgttctttagcttaatggggtcctttaatggtgattttccaccattgagatgcagcggaagacaaaggaaaagaggtgagaggaggcgccatccattaaggaataagccatggaagaaggagcttcaccaccaagatgagccatggataaaaagctggagaggatgcttcaatggaggaaaagaaagagggagagaaagagagaggggggagcacgaaattgaaggaagaaaaagggagagaagttgaactctgagttgtgtctcacaagactgtcattcatcaaagttacaacaattgttacacatgcttctatttatagact

SEQ ID NO: 135546 - DNA, 347 bp, Glycine max
tctttcaaaccattctatgtgctcgcgactggtccctttctttccttcgcaacttgagttcattattgctaccccatatcgctccgggaaatttgttccggccatactcttacttgcgagccctcttggtctcttgttcaaaggctcttgcggtaatttgattctcttcccgtaacccggcacactccttccgaacgtgtgtagcggccaactcgaacttctccttggcaagttttgcctttactatctcgcttctgagagcgtggacttcttcgtgctcttacggtgctgtaaaattctcttcgctgacgacttttaacttggtgagccaatctaaacctcgtatg

SEQ ID NO: 135547 - DNA, 403 bp, Glycine max
  unsure (1)..(403): unsure at all n locations
gcttatgtctctctctctttcgctcattctatcttacttgagcattacttgctttactctccttacacatattcatatttgagtgtcggcatcctttattttacaggtccccccttctatcaaaggcaactctcctagccgacgtgtgaagttcggaaccccacccaaccacgtccatctgacgtttcacgattttgaattttggtaagaacaatttatatcttggaatgtctttctagatattcactcttcctgtcactattaaaatgaattntttaataaaaaataaataaacttataagcatttataaaaacaatgaaaactaaaaataaaatctacttatttcaaactaaaattnagttatacataaatgaaaatcagctctttggagaagtaaatata

SEQ ID NO: 135548 - DNA, 452 bp, Glycine max
aatcttcctgtgttacagctgatgacacaacagccccctctttctttcttgattgcgtacgatatgtgtccagatcttacgaacaactatgagatatgtgctttcgtagccttcataaactcgcttattgacaacccagatgatgtgaacgagctgcaaaaagcatggattcttctcaacatgcttgggagtgacgaggaagtggactatctcttcaatacaataaatgctgatttggtgcccaacatggatggttattcacatgttagaccccagattgagaggcattatatgaacaaatgcaagacgtggatagctcttggttctcatacctattttagtaacccttgggcaatcattgctttccatgctgctgttttagctattgtgctaactctcatccaacacttggatgctattcaccctgctcatgctggtaattcactccaata

SEQ ID NO: 135549 - DNA, 355 bp, Glycine max
gcagggacattattgatacatccttcgtaaccttctaccgagatgacttgggccacatatgcctcgtccaaaaccttcattagcaatacccgatgaagctcggagtctatgagttactccaacagcgataccctggccggtgttttgttgagctgtttgataaccttgaattcgctctgctgaattatacggaggaaatcactggcgttcgctagtgacacattctttttaacatactttttatgcggaatacctttcgacggaatatgtttggtagaagtgaggggtgcttcatcatcttgttcctacaccaactttgctcttcccttgacgttcgcaggttggactggcaagt

SEQ ID NO: 135550 - DNA, 377 bp, Glycine max
tgaactcaaaacattgttattattgctggaaatttctacccctgtttttacagcaaaaaataacgctcatcccttggcttatttacttagaaatttaccgcgaaggcatttctacttatgaaaataactcgttcatggagaagtcaatatcgttggaaaattaaatgaggtaagctaacctactttttaaatatttttatttattgttggataaaatattatgcccgttccattcacaaaaaatgggcctaaattaatgacattggatttaaattgaccgtctttttacaaaatattgacagatgaattactcatgcttctcacaataattatatatatgctgatttcaatgtctttatcacgtatatgtaatcata

SEQ ID NO: 135551 - DNA, 389 bp, Glycine max
ttaagtcacctgcggcatgcaagcttgtaggcattataagagaatgcacatatgatatatagttgactgaaaatgttagttagttgtaagattgattgtgaaggaatgcattaactgtatcccggtgagagtgtgatccttaaattatgagagaaacgactatcatttagtactgatttttgcgtgaatctttgaagtagaaggccatgtttgattgtgatagccacttagccaaaaagctgaccatgtgcttgaatgaattatccctcatacctaggatgaagtgaatgaattatcgattgattgaacccagagcctatacaattatctcatgctaccttgacttaggttggacgagagcatcatccacaggaagcgcagttcatagc

SEQ ID NO: 135552 - DNA, 427 bp, Glycine max
  unsure (1)..(427): unsure at all n locations
ccttgacttggcagaacctcttgccgagttgatttgtttccatgctngctaaagtgagacaaaagctggtgcatatcataactccgatatctcatgggtggaatggatgaatgcatgaaggaatgcatataacacagatgcaatctatgaatgcatgggtccggggaattcatccccatcttatacacaacgtctatgggtagcaaagtgccccaacgtacgtttttaaaaatgcgacacggaccctccgttggtttgtttacaaaagggatcaagacagaacccatatgctatgcccatgcataagacacaatgcgggaatgtacacagtatgacaatattcactgaacataagcaaaagggtatatgatacttatgcatggcagtgtgaaaaatggcacgcatcgtgtttgctcgtgcccctatt

SEQ ID NO: 135553 - DNA, 298 bp, Glycine max
  unsure (1)..(298): unsure at all n locations
gaacgngccaccccactcattctttatgggaaattattgtatgacctgtcgggtgcaccacatctttaaggtatgccaatattaaatcaaatgagggcaggaggggcattataaacatcgttttcacatctatcaagcaccaaatcatatgcatgttaaatacactcaatactatgactatcccaacccattagaatatagattaaaggcaaattgggaaacttgcaaatacaaatatgactaaattcttcatatttattataagtgataaagtatgcctgattcactcccttttgag

SEQ ID NO: 135554 - DNA, 390 bp, Glycine max
  unsure (1)..(390): unsure at all n locations
cattaaccacaaaatctggcgacaggtgcaaattntttattcatggccagttgggttaccaagttaaccaatgcatctagtttaccttcaagcttcttaatctcacccgatgaattcatggctacttcatgcactcctctattgacaatagcatcacttttggcactaaattgctgggagttggaagccatcttctcaattaaatttctggcttcagcaggggtcatgtctacaagggctccaccactggcagcatctatcatacttctttccatgttgttgagtgcttcataaaaatattggaggagaagctgctctgaaatgtgggggtgagggcaactagcacatgattntttaaatctcttccagtattcatataggctctcttca

SEQ ID NO: 135555 - DNA, 324 bp, Glycine max
attttggttttagaattataaaagcctgaaaattaggacttgcttgtgagagtttttgctcgaatttgggctgccccatgtttggtactttgcacctaagtaatatgaaaacacctcgcaatagtatgtatatataggtaaataaaaagggcttgaaattctttgcaaagggtgaatgaatattgaggtcgcttcctaaatgaatgtatgatagcacggaattcccttttgaatgcaagtgtgtgcataatgtaaatagcttgccaatatgaataaatgtgagtgaaacaataaaaatctggatgatatatatttcacatatat

SEQ ID NO: 135556 - DNA, 345 bp, Glycine max
gaccacaaagtggtacctggagatatgtcgcgggggtcaagagaccctggggacgttatgtggggtgctattgcccaaaaccaatcttgaccaatcccgacccaacccaggcatagtcagtcagtgaaaacctgtgatgtacctaaacatgcgagctcctggcagtcaacagattaaaggagcaaagactacaaagcaaggatgcttgtgtggtggctggccagctatgaactttgattgatatatgggatatggcctctggtaattgattaccaacggtgggtaattgattacaaggcttaaaaatgaagacaggagactaaaatagtctctggtaaatcgata

SEQ ID NO: 135557 - DNA, 223 bp, Glycine max
gacacctctaaggacaatagcatcatttcttgcactaaattgctggaagacggataccctctcctctatcacaatcctagcgttagaacgattgatattcccttgagcgtcagcactgacattatctccaatctcccgtccatgttggtaaagcccctcatagaaatattgtagagacgattgctatacaatctagtggtgggacagctagcacaccatttct

SEQ ID NO: 135558 - DNA, 268 bp, Glycine max
gtcttaatgtgattgtcaccaggttatccttcaagaaaggagaaagagattgatgccctccctaggaataagcaggagatgacttcacgaccataacgtgcttggataaaactgaaatagctttatggggaaataagaagacggggagccaaatgaggataaagagggaatggaacttgaggggtataaacttattataaggacacagattaaatctgattataactagagttcttaaacttttaaaattctgaaaatttgaaatctc

SEQ ID NO: 135559 - DNA, 257 bp, Glycine max
  unsure (1)..(257): unsure at all n locations
gagcgatggtgcacaacaagttntccacatccacaaagcgtgcataaacccaccatcccctgttgcccacctncaactgagctcacgtactcccacgtagcccatatcctcgtttttctcacaccgggtccccatcaatcctcccaagcttccccaacatccaagtaactcaacattcaaacaacacaaaccatcacagccaagaaaaacagggcaaaggcagaatactctggccaaaacaccaaccaaaaatcaca

SEQ ID NO: 135560 - DNA, 391 bp, Glycine max
cagctgaaatgaggaagtgtagaaaggtgagacttcctgcttttattcgttgaccacagactggtacctggagatatgtctcgggggtcaggagaccttggggacgtcatgtggggtgctattgtccacaaccaatcttgaccaatcccgacccaacccgggcatagtcagtcagtgagaacctgtgatgtacctaatcatgcgagctcctggcagtcaacagataaaaggaacaaagaccacaaatcaaggatgcttatgtggtggctggccagctgtgaactttgattgatatatgggatatggcctctagtaatcgattaccaagaggtgtaatcgattacaaggcttgaaaatgaagacaggagactaagatggtctctggtaatcg

SEQ ID NO: 135561 - DNA, 440 bp, Glycine max
  unsure (1)..(440): unsure at all n locations
agcttcctcggggccatttctttgcaatgttacattnggaaagntagntntaccaagaaatgctactcttaaaacaaaaacggcatacaacctcctttaataaacacaaacatcaatgtaaatttagagtaaactcatgcacatactttattacgaacgttcacttgccaagatattctcctaactaagaaaaatgcacccacgcacaaccaaggcaccttcgtcacctagattatttatatgtacttccggngtgtatttgttacctacatcacatgtacttccttggctaaatttacacacacgcatactcaaagcattttgactaccaaaaattgcacacatgcacattctggtgtttctaatacctatgcatatacaaactntgtgatgaatcttggctatctacacaataaggtgctacatttcatgctttattc

SEQ ID NO: 135562 - DNA, 284 bp, Glycine max
caatatggggttgtggaaagcaaattcatattacacagtgggagggatgtctcctccacctctatgaacctaaaaatcactctaaaaccctgaatcctcttgaaaagtgaagtttttggtgcccccttgccctgttgcatctcttccgcatatctctattctttcacaatctaaagactccaagactcctctttttacgccaacttcagcttttaagggctttctgtcctcaaaagctcgcttagtgccattttcgttctaagtgcgagttaatgacttttggc

SEQ ID NO: 135563 - DNA, 365 bp, Glycine max
agcatatgacgggagattcatcaaaattcacacatatctctcccaagaaaagtgggcatgttacttatggtgataacaacaaaggtaatattcttggagttggaacaatagatgatgttgcagatctttggaacaaatgcatattcatggacaagattctaaaggaaaaggtaaaggaagcaatgaagatcctccagaagaagtcaaatccaatgatgaacttcccaaagaatggatagcttctaaagaacatccctttgacaacattattggtgatatctcaaagggataacaactagacattctcttaaagaacttatgcataatatggcctttgtgtctatacgtgacctaaaagataaatg

SEQ ID NO: 135564 - DNA, 417 bp, Glycine max
gtattaatcttgaagcaatgcttaacctttgaatgtttgttgaagtaatcttgaaagcaaccttgtttcattattctttggcatcatcaaaatcatgtattcatacattcataaactccccctttttgatgatgacaatcattatcaagtgaattcttttcggcatcatcaaaacatgcatgattcacattctcccccctttgtgatgatgacaatcattgtcaagaaaattctttttgacatcatcaaaacctgcatgattcacattctcccctttgttttatgatgacaaccatctgtaggttaggagtaaaaacaaaagaatatctatctggatagtttactcccacttgattgtgcaatgatggcttatatgaaacagctgaagattgatagatttatatataaaagtggctc

SEQ ID NO: 135565 - DNA, 376 bp, Glycine max
  unsure (1)..(376): unsure at all n locations
gctttgactngagtcatcaagagactataatatgttccatgacaagaggttcaataatcatcaatcatctttgaatcatctatctttcaatcttttttcaacatcatctctcaaacatctttcaatcaatctttcaatatctttctaaagaattttctgattcatttctcttcttcttctaagagattttgttcaatacattctctttcaagaaaagttcattgttcaaaaacttgggctattctttttcttcattctcttctccctttgccaaaagaatagaaggactaaccgccagaattgtttcgtgatcccttctctctttcaaaatattcaaggactaaccgcctggatatctttgtttcctttcaagatc

SEQ ID NO: 135566 - DNA, 415 bp, Glycine max
  unsure (1)..(415): unsure at all n locations
ccactctactcaaagntnttgaaagatgtgttttctangaagcgcaaatacattcaccangaggatatcattgtggaaggaaactgcaaagctgtgatacagaagatccttccaccaacacacaatgaccctggaagtgtgactattccttgttcaataggtgaagtcacgatgggaaaggctctcattgacttgggagccagtatcaacttaatgtcactctccatgtataaaaggttgggagagttggaaagcatgcccatcaaaatgactttacagcttgctgatcgatccatcacaaggccttacggggtaattgaagatgttttgataagagttaaaagttagaacttacttcataatcgttatacaagggtatatcagcttggtcgaataatggatatangggttttta

SEQ ID NO: 135567 - DNA, 314 bp, Glycine max
  unsure (1)..(314): unsure at all n locations
gaaagatgcggagcatcccaatgccaacaagtaaattccgaatctctttcaccaatctccatcccagagagcacgataatgctgcctaaacctttttgatggactaaccatagtccgagaatactccccataactcggccagaaaaccgagcctctgcctatgcactcggaaaagccccacaaccatttccatcgtgatccctcaacaacccggcaaatcatgctgaaccacccaggctctntacagccgcatcagtaatgaggcatatccatccttgatgacggggatgccatataatctgcacttggatctt

SEQ ID NO: 135568 - DNA, 356 bp, Glycine max
  unsure (1)..(356): unsure at all n locations
cgagtgcatcatttatgtgcattcattggcgaacgaactaatactccactttatgcaaggcttcacgcaattaatcaagggttgagcataaacaattattgaccgatttgccacacaattatagccacactctatttgattcttatttggcccaaataattgatagactgagttgtgactgactcgcagatattctcagatctgaaagctcatatcttgtcatctcaggcattgttgttatcactctaactccagagacggggtatagacntctatttatctgtgttgttatctggattacagatcatatattgacgatatatgggtgagagattgaaactctatttgtacacatg

SEQ ID NO: 135569 - DNA, 373 bp, Glycine max
agcttctaagcccaaccctgtgactctccttcttttgctatcataaaaagccaaagtacgtggtaagcaacacaaggtggcagaataataagcaaatataactaaagttcacataaccattcataagtcaaaaccaaatgtaatccagtcatagaatactaagtgccaaataccgaaattaactaaagctcatataaatgataacttaaaaagcatagccaaatacaaggcttaaaataaaagataataataataatctaatactaggaaggtggtggaaggtcgaagcaccgacgaagataactcacatcctctttaaggtgagtgatgcgggtatccattccttcaaagcgaccatctgaggaatcaaagc

SEQ ID NO: 135570 - DNA, 366 bp, Glycine max
  unsure (1)..(366): unsure at all n locations
aagtcacctgcggcatgcaagcttcttagctctttttagcccttgctattgttattgtcccccctatgcctcgnattgggtcttgggcttccttctgggcttangtctggtctttgatatcctcatcacttattcacaaaggaccctaagggtgggtaccttattttctttttctggggtaggaactgagactgtttggaatccttgtaagaattctatatgcataataaaaatctaattcacgttggattagataattggattaccttctcaacagaaaaattggtgtacatcttctcttgatcttatcttttggttaatattctggtcttgatcaatttactgaacgttaaagaaaatatcttt

SEQ ID NO: 135571 - DNA, 215 bp, Glycine max
cagcgtttctcttatgtgagtatgacagatcttgtgagcgcgaaagatgacgtaaatctccgcgtgtcaacgggcttgtctgccgcgattgacgaatggcgcataatacgacattagtctctgcgtgctattatgcttttcgtcttacaaacagcaaaaataatgtttataccgataaccactcgggtatttccgctcatcaacgtgactcaaat

SEQ ID NO: 135572 - DNA, 346 bp, Glycine max
  unsure (1)..(346): unsure at all n locations
agctctgtggcaaacttcactgcanaatttatatatctggcaagtgctaaattccctgtcaaggtacctcaaaaagtggacagaaaatttttcttcactgtggggctagggactaatccttgccccaaaaacacaacatgccaagggccaagtaataacaccaaatttgcagcctcatgaacaacatttcttttgcacttccatcatctgtttccatcatgcaggcatactattctagccaggccaatggggttttcaagactgattntcctgccacccctttgaaccctttcaactacacaggaacaccttcaaacaacacaatggtcaccaatgacacaaagct

SEQ ID NO: 135573 - DNA, 451 bp, Glycine max
  unsure (1)..(451): unsure at all n locations
acatgcatgatgccttttctcactgtatccacttaaatttccatattctagaaaatcattaatagtacaaaacaccattgtgcgtaacctgaacgtctgctgcacatttgcatcccacgcatctaccccttcttaccacaattggttcaagtcttcgattaacggcgtaagatacacatcaatatcattccctggctgccttggatccgcgatcgtcatacacaggataatgtatttacgcaaaatgcacaaccatgtgggaatgttgtaaatcatcagtaaaataggccacgaactgtggttgctgcttaagctaccataagattaattccatcagaagcaagagcaagccttatgttccttggatcatccncaaactctatatacaaacgatcaatggtcttccactgtggagaatcggcaagatgtcgcagtaatccattagattttc

SEQ ID NO: 135574 - DNA, 364 bp, Glycine max
  unsure (1)..(364): unsure at all n locations
tctttataggacacagtcatcttctggataattntcttgatgtttttgtttgccgcctctattgtcccgttcatcttaagcctgtanggcgtggagttgtggtgctggattntaaagtcctcgcacatttcctcatcatcttgttgttcagattggtggcgttgtccgtgataatctttctcggcaatccgtatcagtagattatctcctttntaataaacttgacgaccaccttcctcgtgacactggcgtacgaggcagcttcaacccacttggtgaaatagccgattgctaccaagataaaatgatgccccgttgaggctctgggcttgatggccccgatgacatctatttcccacatgga

SEQ ID NO: 135575 - DNA, 477 bp, Glycine max
  unsure (1)..(477): unsure at all n locations
tactaagctatccaatggactcttgtacaccaatttctatcttcttgacttttaaagtcccgatgaatgagtacaaagtgacttgcagtagtttggtgagtaactcaacattgtatataatcagtacaaaaacacctttgtttgtcaaattttaaaatcatattctaagatgaacttaatattaatttcaagatgtgtcgagtaccatgtactcatttaagaaaggtgcaagattcacccatttgaatttgaaagggattacagaatgcaagattgtttataatcattggaggaagtctacaaaaattggctatggagggaggacttttgcataatcacaaaattcggaagctagaactcatattatatttgagttcccaaatgcaacatctaaccttgtttattttggatgtggtggaatttaagacactatactatactaatatctataaaanaaatataactcttggtggatat

SEQ ID NO: 135576 - DNA, 338 bp, Glycine max
  unsure (1)..(338): unsure at all n locations
agcttgtaccaagatagaactccgtatgattcnttccatccaatcaacgggccttttaagtgataacaggagggagtgtgagcttcaacgcaggaaaaatctatttgatcaccagattgatatggctgcagctttcatgagctacattgatgaacctcatatccaacctttaaacaggaccttctcctttgcgagcctgattctggaggaccctactgctctgagtcagaatactgcttcctgcatgatgatgactctcatgttactgaatatattgctccccagaatatctggaatctcatacttccacctagagcaagcgctctctctttgagaac

SEQ ID NO: 135577 - DNA, 402 bp, Glycine max
ggacactataaaactcagcttgtataacaaacagccttatcacttgcaatcttcttttttattaagacgcatcaacatgtatcaagccaaggctgttgtgctagctatcaatggcgccaaacacacccaatgattataatgatggatggctcagattctcacaaaggtcaaatcatgacttccataccgagctctcactactatcatgacatgttgaaaagaatcacagatttcaagcctcacaatgtcaagaacttttattttcaaaacaattacccatttgttgaacatatcctataattcaaacaatgacatgcaaagtcgtatgtgcgcacattattgacccaatgtatctaactatgcatccgactattctaacaacattaactaattaactcatct

SEQ ID NO: 135578 - DNA, 448 bp, Glycine max
  unsure (1)..(448): unsure at all n locations
agctngaccaaatcgaacatctaattggttcatgtatcatctaatatagctatgnttcgggtcatacattttttgctttaattacggttctattctatcacaaaaatataggggctgctatttgcattctaatttttactcttcacacctcttattattttcaaacattntaaacaccctcccctatttctatcttaaacactnttctcacttccctccccaaccacccccaaaataacatgcatagttattgtctttgttaacaaacagtgtgtgaccttaggatcacaaaccacaaaccgtacataataaaggcaggcaagtaatggccatctcatatgtattgcttattaagaataattngtgtactttaatgaaccagtacaaaaatgtggtccccgtgaaaaatgctntctactcctttnnttgtcttacaaatacatatatc

SEQ ID NO: 135579 - DNA, 407 bp, Glycine max
tcagaccaaagcaacacacaatctatgtgtccaatacccctctatttaatggattttcaaggtttgagaagtgaaattgagaatggggtgaatttggagcaaactctcacctcacacaagtccataacatcaatttaaacttgctcaaactggatttacacctaatattccaccgaatcaaaatttgactcctcaacacccaaattttaccctacaaatggctctttgttcactttggtcatttgtttttctctctagcacagcccaaactttctcataagtcctaaatgacatttcaagctaggattaactcactttaacctccaaataccactaaatgcagatttggccttgcaactctcaaaacctcactcttttgtcactcataacaccatattctcaatttc

SEQ ID NO: 135580 - DNA, 360 bp, Glycine max
  unsure (1)..(360): unsure at all n locations
agcttaagctccttaactgcacaagctttattatttgaagagnatccttggggaaccttcacctgacgaagacactgacaaaaacttatcttctccttcttggacaaagtatggcaggctgggggcaagtaaattttctatccatcaaacattggatgcaactgtatcgtatacccatatcggctagatcttgacgggtattcaagccatccttcgtcttgccttgaatgttaaggagcgtcccaatcacactgtcacaaacatttttctccacatgcataacatcaatataatgtctaacgtcaagatcacaccagtacggaagatcaaagaanatggacctcttcttncatatgcaac

SEQ ID NO: 135581 - DNA, 290 bp, Glycine max
  unsure (1)..(290): unsure at all n locations
tttggtaggccatatggaaatgatgttcagagaactcatacttctcttggcaaagatatagcattccaagtccataccatgcgttatagtgccttgaattaaaattaaaatgataaatgctcaaatcaagcgtcccaaatcccttaaatatatgaattataaatgaaacctatgattnttatttaatatatatatatatatatatatatatatatatatatatataattgtataagggcaaaaaatacattagtagatttatttattttacatatataaacttatataat

SEQ ID NO: 135582 - DNA, 369 bp, Glycine max
ttcacaacttgaaggtaaatttttattttattggtttgggtttgattgggatgattatggttaattatttggtgttaactttgggaacatttttatgagattaagactgtggaacttgtgaagccaactgggtgggtttatccatccttgtctggagttgatcctatgtaagtacagtgctctttttgttttgcaatatgagaatttgtttattgactgttctaccatcgtgtgattttggtctcttttgcctaattatgctctgtctgtagctgattgtggattgtgtttgttttaatgggagaaactacagtaacaatagtttattgtatggaatgtgaagaaacaaatcctgctactttatgaatt

SEQ ID NO: 135583 - DNA, 454 bp, Glycine max
  unsure (1)..(454): unsure at all n locations
agcttatgactcggttcttgttgattttaactatangangangaggatgggattttgtgaataatggagaanatggatctatggatgcctctctagtgcaactgtatctattttgatcaatggcagccctactagagaatctgtgcctgagaagggtgtgagagaagagatccccttgcacctttcttatttaatatagcagctgagggcctcactggctcgaagaagacaactgttcccaaagatctgttcagcataactgccgtgtctcgcgcatacaatcacagaatccttgccctaaattgctttcaaaactagactttcctctcggttgtaatccccatctgggccacgttcctcagcattgccatttcttgattttgccacacccacttacctctctttccatccattcatcattgttgcgagacccctttatcccccccaatttccc

SEQ ID NO: 135584 - DNA, 380 bp, Glycine max
actcagctaagctcttcaatgcacaggctcttatatttgaatattatccttgtggaaccttcacccgatgaagacattgacaaaaacttatcttctttttggacaaagtatgacaagctaagggcatgtaaattttcttcccatcaaaccttggatgcaactgtgatcgtattcccatctcaactagatcttgacgggtattcaagacatccttcatcttgccctgaatgttaagaagcatcccaatcacactgtcacatacattgttctcgacatgcataacatcagtacaatgactaacatctagatcaaaccagtacggaagatcaaagaaaatggacctcttcttccatatgcaagtatgacttttatccatcttt

SEQ ID NO: 135585 - DNA, 243 bp, Glycine max
  unsure (1)..(243): unsure at all n locations
ttctcccatgtcagctactctgatgtcattatgtggctgggcgcactgagggcactggctatgaataaatacctgtttttgttagacatggcccttataggggaaattcatatgaggaggggagatatttggttcgtgagcccattttgaagcatgtcgcaggagacataactntttttattagagatagacactaacaaatgaagatattctcgcttttgaacttgttgggattctgaacga

SEQ ID NO: 135586 - DNA, 327 bp, Glycine max
ttatttcaccttaaaaaaatattagatagtgcataatgacatttgctaaataacaagtcaaatgtacaccaatgcaacttgaaaaaatttaaataattattatacacaaaaaagcattgtctatgtacgtaccattccgaagcatgttttttcttcaaatcttttaattggattaatatattttgccttttatgtattaattgaagattagctgagctgaagactaaaatctatatattacgaaatatcataacatataaggtgaaaatattgataattaattctgtcaactatcatatatcaatcatgcatgctatgatccatgga

SEQ ID NO: 135587 - DNA, 428 bp, Glycine max
  unsure (1)..(428): unsure at all n locations
agcttctatataagttgaacccatttatctatatacacaagttgagttttattcagaaaattagagtttatctcttttatcttagtgagagtgattctcctaaattcttgagtgattcaagaacaccctggctgtatcaaaggactttcacaacctttgtgtgttgccctcgctggaagagtgattctttccttcctttcatcttcacccttgttctttcaaaccacaattccagaaaatccacctctgcccagaattatctcgtggccataactcccattntacgcactcaaattaagtgattcttgagcctaaattgactttcaaaacgagacctttcacctcgttttggaatcacctcattnggagccctgtagcttcagttattgccatttctatatttctgtccagccaccacttaacctaca

SEQ ID NO: 135588 - DNA, 395 bp, Glycine max
atcctgactcaccatataccttgacccattgtgagaatgtcaatccttaccctcggaagcaaaaaaagaatagaggggaaatttccaatcaaagaaaaagagaaggaaaatttccaatgaaagcaaaaaaagaaaagaaggaaaattccccaatcaaagagtgggagaaagcaaaaaaagaaaagaaggaaaattccccaatcaaagagtgggagaaagcaaaaagaaaagaaaggaaaattcccaatcaaagaatgagagaaagttaaaaaggaagaagaagaaggaaagaaagctcctgatcagggatcgaaggaaaaacagaataaatgtgcagagaggtctttggaccggacaatatatgaacaatacataattgtcaccaaatgaacaaa

SEQ ID NO: 135589 - DNA, 263 bp, Glycine max
  unsure (1)..(263): unsure at all n locations
tattccctattggatggtgcctactctcacctattctacttggacttctgctgcatgtncatggaggacaataaccattaatggacctcagagaagctcacagatccagcctccatatatgccccacagcaaactgtcatcaagtggtaatgagagcactacagcttcaagtaggtgctccttaaacctccattaatttttcgctctaccttctcttccattgatatttcattcatttttctgcatcgatcttctcaaatgtc

SEQ ID NO: 135590 - DNA, 448 bp, Glycine max
  unsure (1)..(448): unsure at all n locations
taactggtgtttgtagggacttggatgggaaagtttgttgtctcttaacctgatagaagcagggctaaattactacattaccatggatggatcgtggagttatagatttcttattatgctgngctaataatgctgtataagtctagcctagtccaataatatggatcgaggcttagtactttacgcttcagcatataatacatgaacatgactaattagagaaatatcgccatatgcatcaacttgtttgttagaaagacacaacgttttttacctattgctgtcacgtactttaattacttgcttttactgtttttaacatagaatatagtttacttttaatcatatccacaattaccaatgtttgcttacacaatgcctaattcctgaataaaactttgtctaataaacaagttccctgtgttcgatactcggatcattccatttt

SEQ ID NO: 135591 - DNA, 350 bp, Glycine max
tctttcattaatatttctaataaaactaataaactcacaagaaaaaaaatcacacctgtcaccaaagatgctgtgtgaacagattgaaatacggttgggtgtgaacatactaatcatgtccaacagtttgattaaaaattagacacatgatgacatgttaagttcaaacactctcacgacttatcaacaaattgctcaaaagaagaaccacttgtcaatagagaagaacaatagtcgtaatcgtaacgctttgaccaactttcttactttaattatacagagagaagagttaatgcccacgtgggagtaaacattttattggagtcaagtgagacacgtactattataag

SEQ ID NO: 135592 - DNA, 379 bp, Glycine max
actacatcaagaatacgcgggttgagtcttcgtcgcggacgactcactagtttatctccatcccctaaatgtattcgatgcatacatgtggatgggctaataccaagaatgtgcgccagggtcaaactataaccttcttatggcttttgagaactgacaacaacttcttctcttgttcatcagcaaaggaggcagatataatcaggggaaaactcttgctatcatccaagtgagcgcatttttaatttgatggcagacgcttcaattctggtgtggtcggctggaccgcggtaaaaagagatgggttctcaccctttacctgataaataaaggcagatgtatgtgtacttcctgaaacatggttagtcctatctgactc

SEQ ID NO: 135593 - DNA, 227 bp, Glycine max
ggtcaatgccaatactgatgtcccgcaagacgaatttggatttaccttaggaaacctaaataaggtgggttatatggacgaacctttcattatggcacaacaagcaagacaggtgttttagtactagatccttgtgattcaaaatatatagtggttctacaaggcagaccaagtgtgttaaatgagtcacacaatgattgcacacttgacatttgtgaaactacacc

SEQ ID NO: 135594 - DNA, 347 bp, Glycine max
  unsure (1)..(347): unsure at all n locations
aactgagccaaaatttcactaagtgttgggagcttatcgagtgaagctcgcttaactcaatggatgccgcaaccaaatgcgcttggctcatgaatgctcggcttataacgcgtctatcaccaaaaaaattggttaagttacctgngcttagcgattcatccttgcttagccacaggtagttcagcaagaggatgagtgttcatcctcaaaggatgaactcacttagcgcagtaagcgcgctgatcgangccgtatccgaatcaaataaacatgaatatgcagtaactatgaagtgatcctatggtcgttcccaaagagcaatgataaaccaattggtcataatatac

SEQ ID NO: 135595 - DNA, 402 bp, Glycine max
  unsure (1)..(402): unsure at all n locations
agcttcaagcagctaatacaaagggacagtgactattaatatcctggctttagatgagtcaaagtaacagtaatgacatacagtcatacaacacaatacccataaacccaatttgcacaaccccattttttaaatcaccaacatcacaagttcacaacacaacacagctatgcagattagaaaggagaatcgcagagatcaatgcaaatcaatttagaacacataaacacagagaacttagcattaggcactaaaccaattgaaactgaagttcaagttctccttataatcacattcttcgacgcaaacgaaccaaacgcgaccaatgcaaatcataactcanaagggtcttcgaacaatataaaaacacaatcagaanaagggtcttcgaacattaccatc

SEQ ID NO: 135596 - DNA, 332 bp, Glycine max
gggatgacacttaacacatgatcacagttgataatgaaaatgtgtggaatgaatattgtacctgtagtattctttaatatgttgctatatgttattcaaagtagattggatttgactttttcttttttttcgtcgcatatatcggctaaaccgttccatttcaatgtgcttcacaactgggatgatatattggatttgtgtgctaaagatatagccactggtcatggggctgaaactgacatggatgctgggttgagaaacaaatgaaatggaattcattgcggttggtgctactgctaccatgactttcaataaccagctcctttcaatat

SEQ ID NO: 135597 - DNA, 392 bp, Glycine max
ctctgagtcacctgcggcatgcaagcttgaattacttaataaattactttatttctaccttgccatcaaattagacattgaaacagtctttgatactctagattgggattatctttcgggttttttcgagtcctttggctctctctagagattatgccaatggattgatatactttttagattatcaaaactctcctttgcagcgaatggtcagatatgtggttacttcagttgtaagcgaggggcgtgccaacggaacccactcgcacctcttctttgttgcttggctaaagaggtgtcgagttgctccatcactttgcttttagaagcccatagagttctctcaatggcattctcaacgggcttcaatactattagccattatttttatg

SEQ ID NO: 135598 - DNA, 355 bp, Glycine max
ttctattccaccatgtgtcttacacatagttggtgatctctcccttggtgatgaccattgagggctaaataatcgatccatccatggatccactccgagctatgctgaatcttagggttggtgtgagatttctactctgttaatagtattcctgctcctcaatcctatgttcattagtcatgaatgtgagaatgtttaggaacaaaatagattaagcttggattcatttactaatactgaaaattaatcactagatattgtcgtgatgatacactatgatttgtgtattcaatcactttacacatttgattcgaccgaactctcattatgcatttttgtcactttcacattgaac

SEQ ID NO: 135599 - DNA, 424 bp, Glycine max
  unsure (1)..(424): unsure at all n locations
agcttcaggctgctcaatcgctccaggtttctgcatgtatanggcanaggtctgtatggtggtcagcagaggagcacaaaccacaaacccttgtaacaggtacaaatttctgattcaaggccagctgggttaccaagttaaccaatgcatccagtttgccttcaagcttcttagttcagatgatgcagctgagtttgtagctacctcatgcactcctctaatgactatggcatcatttctggcactaaactgctgagagttggaagccatcttctcaattaaatttctggcttcagcaggagtcatgtctccaagggctccaccactggcagcatctatcatacttctctccatattactgaagtcttcataaaaatattggagaagctgctccgaaatctgatggcgagggcaactggcacat

SEQ ID NO: 135600 - DNA, 472 bp, Glycine max
  unsure (1)..(472): unsure at all n locations
tcgctgcanaattcatttctgggtggagtgttggttttgtcttaangtggcgttcgtgttggctgtgtggtaagtgggttttcgggctgatttaagcatgatctttgtggataactgggtggtaagtaaggagaaaggttgctattggcttaataatgacattgttgggttgctgggaaccctggccttatatgaatggcagtcacaacatgggtttctccctcatcctcaccctcttcatttgcctcaattttctcattcgtccaagcaagatgattaaatntgcctcttttcagatccgcttcgacccttttctcggcgaagaacaaatcttgcaagcttgaatgtgcgtaccccaccatttttcataataaaacactggtaatgtgtctactattattgtgatcatctctttccccatcattggaggtgccacttgatctgctaagtctctacatctttgggtgtattc

SEQ ID NO: 135601 - DNA, 287 bp, Glycine max
tcctagagcaattcccttatgttatccaacatacacagggaaaaggtaatattgtatccgatgctctctctcggtgtcatgcactactttctatgcttgaaacaaaattgattggtcttgaatgtttgaaaaacatgatgaaagtgatgaaacttttggtagaatattttaaaattgtgaaaaattttcagaaaatggtttctttagacatgaaggctctcttttcaaagaaaacaaatagtgtgtgcctaaatgttctacaaaaaacttgctttgttgtgatcaca

SEQ ID NO: 135602 - DNA, 455 bp, Glycine max
  unsure (1)..(455): unsure at all n locations
tcgacataacactgaacaagatggtaattatccttttctcttcacattcagcaaatttaacatttaaatatgatatttattttatgttatgctctnttatgtcatgataattggtggaaagaatattatttatctgtcaaggtttcatgatatcaattatcgatacatgaaaatgggaatgttcaaagttgtgtgattagtgttattttgagatgaagcatgaacaaaaagtgaatctgtcccctacgtgaattgaccttggtgaaaaggatctaccatcagcagatgcaaaccaaattgccaacaatctctccaacttgggtcaaatctattatggagaagacccttcaacagatggcttggtaaggatgaaaaccctttaataagtttatagtaccaattcatacaataacaaatataattgtggttatatttatatgcctaatgagttcata

SEQ ID NO: 135603 - DNA, 289 bp, Glycine max
ttcggagtcttacagagaaaactcagaatataagaaaggaaaaataatgctctgctaatgtttattgaattactgacgttgaatctaatgagggaattctctttccaagggtttcccctttctacaaaactacacagagcatatgctaggttcccaaatgctagctaatctgaaaagcttttccttctaccccttctactgtttcggccaagtccctgatattccaaccataaccaccttactaattctataactctctaaatcttattagaagcacattaagaacaaa

SEQ ID NO: 135604 - DNA, 429 bp, Glycine max
cttgtggtgcacgatggttccttcaaagagatttttttgcttcttaatctgaaaggattatgcttggaaccccatggagaaatcaatcccaatggattataaaactctcggattgtgcccctcctcattaatctataaaccttggaagttatgaggtcctattagttccataaacttggtaccacacacagtgtctttctacaatatgacgtatttggaaataaacagttgcaatagcctgttatatgtgttcacatccataacagccacaagtttggtcaactcaaaagaatggagataaaatgctgcaactcacatcgatgagatagtgtcttacgaggggggtgaatcacatgaagatgatatatgtattcagcagctaaattgtatgaatctttgcttattacaaaacactcaaaagttctacat

SEQ ID NO: 135605 - DNA, 279 bp, Glycine max
  unsure (1)..(279): unsure at all n locations
agcttcatgctgaaccatgaatggcacattcttattagaggaggacaagacagacgacngagagcgtaacagaccttatacactcgtgatgaccacgatcatgatctctagagctattaccacgacactctgtaatgaatgccgagacactatgaaggccaacaggataatcttctcaatgtattatgatcaagattcaatagctatgtctgcagagtacctatcaacaatcgaggctcctgtgtcaactcgatcctatgagtccctattaggatcttc

SEQ ID NO: 135606 - DNA, 185 bp, Glycine max
catgacatcatgcgttcaatcacaaatagatcttcacacgcacgttcgaaatgtatcatacgcgatccacttgcatgacataatattaccgtccagtgcgtgacaccctcccatgtagcacgtcaactatgtataaatcaaactagcggtgtatgagatcattgttgacataatgtaccgaaacc

SEQ ID NO: 135607 - DNA, 478 bp, Glycine max
  unsure (1)..(478): unsure at all n locations
agcttgatattgaatacgaaagctcctagtattttcaaacaacaataacctttgactcgaatgtctgattgagtcccgtgatataccgagacactcgaaattgaatacagaagcaccttgcaaatcaatggagaataactttttactcagatgtactattgtgtcgntaaatatatcgggacgcttggaattgaaaatggaacctctgaccgaattcaaacgacaataacttttttctcagaggtccgattaagtcctgtaatatatcgagacactcgaaattgaatacggaagctctaagcaaattcaaacgagaataactattttctcgaaagtccgattgagtcccgtaatataccaagacgcttganattgaatatggaagctttgagcaaattcaaacgacattaactctttactcggatgtctgactgagtcccgtaagatatcgagatgctcgaaactgaatatgtaagct

SEQ ID NO: 135608 - DNA, 301 bp, Glycine max
ggtcatctaagcttcctgctctaatagttcaagtttgaaaatggcggatggggcaaacgaattttgctgtcccaacgcgggaatacccaccctttttacggactggatagaaacctctggggtcgcatacgctcaaacttggactgcgcgctaccgactgaggcttactggtccctccagatgggaggagtacgatacttgggcgacctctgaaggcaacatcgggctataaaggggactgtttaaggcagcaggttcggggggccaggttccaggatccagtggcaggtttacttggaag

SEQ ID NO: 135609 - DNA, 403 bp, Glycine max
cttaagtcaccgctgctgcagctgcatttgaattgcaaagcccacttttttttaggattagtacctgacatctcaaacaaacaaatcacacgtaacaagacaattatagttgctgttagaatacctcacccactcaagttatcacacaattatggcttttctctaatgaaacactcttgccttttaccactctaattccccgtgagttcttatgcaatacaagagattatggccacaacaaagaacaattcaccaatatgtgtaaggtaaggctagacaaggaaaaggttaaccaagaaaaacgctaacaatgtttttaggcacaaatgaaggaaacaaaattcagaatttaggaattcaagtaacaatccttcatgcaaccaatatattaccttaaagagtt

SEQ ID NO: 135610 - DNA, 400 bp, Glycine max
  unsure (1)..(400): unsure at all n locations
tggttatgagtcaaaggaggaccttccccccttcaacacctaactcatcttatgcttgtaggattacggggtacccatcacatgtggtactatgtggcggtcgggcgatggtgcacaacaaagttttccacatccacaatgcgcgcataaacccaccatcccctgttgcccacctccaactgagctcacgtactcccacgtagcccatatcctcgtttctctcaacaccgggtccccatcaatcctcccaagcttgcacaacatccaagcaaaacaacattcaaacagcacaagctatcacagccaagcaaaacagagcataggcagaatactctgctcaacacatcaaccaanatcacagcttgtctcacttaaagaccacagntacgaatccttcgat

SEQ ID NO: 135611 - DNA, 470 bp, Glycine max
  unsure (1)..(470): unsure at all n locations
aacatccaagcataacaacattcacacagcacattctatcacagccaagaaaaacagagcaaaggcagataactctgccaaaacaccaaccaaaaatcacagcttttcccactcaaagaccccagtaacaattccttcgatccaattcgttaaccgttggatcgactccaaaattttactggaagtctatagtgcataagcctacattttgaccgttgggatctactagcaaacatctagaactcattctacattagactttccacagccaaccacacacaagcattttctgcactaagctaaaatcctgctgcacctattttgacagcaaaattctgcataagtgcagatttcgaaattcacacttccnctcatccaatcttgctcaaatcaaatcctacaagtcccaaatcgtgtatcaaacatgtctaaaccaaagccaagcttcaaaccacagcaacacanaatct

SEQ ID NO: 135612 - DNA, 361 bp, Glycine max
agcggcatgacgaaccaagactgatgcaaggagttttgatgacgacaaagacgacgacaaaaagctcaaaagtcaagatcactgcaggacaacaaagaggaagacatccaagaatgagctgaacatgaggcaagaacacttcaaggatgaagagcgaattcgatggcaagaatcaagaatcaagagccaagattaaaagactcaagaataatcaagatcaagattcaagactcaaagatgcaagaatcaagagaagactcaatcaagatcaagatgaaatccttttccaaaacatcgagcagcacaagaagctctcacaaaatcattaccaaagagtttcactctctgggaatcgatcacc

SEQ ID NO: 135613 - DNA, 406 bp, Glycine max
aggcaggcgcaaagtttatcacaacttcagcctggggatggccagcaacaggcaacagatgcaccgttgccaccttcagagcccctcagctcatccacaaaaaggttagagtatttcctacgacacatggccgaccaataggcgaccaagtccaaagccaaaggtaagcaaagtactatgtccgtgaccgacaagtcatcaggcgtccagctcaagacgttaatgaagcgctactaggaggcaacctagtaccttttaaatctctgcttgttatttgatcacttttgtttctcaagtcatagtaggacacacctagttgctcatgatcctaggaatttaaataaatcaagcacaagctggaaaggtagtcatacctcacaaaatatatatgtatgtttaggtagaa

SEQ ID NO: 135614 - DNA, 424 bp, Glycine max
gatgtgtgactaagaccacacaagttgtacagaccaaatgatgtgggacaaaggaactaagaccacaaactctaacacttgtcccaacaagtggtatcaaatgataccaaaaggccacttgtcttcgattgattgtgtttgagagttatgttgattgtctttgatgattgcttttgataattgtttttttattgagtttttgattgtccttgatgattatgtttgagaattatgttgattgtcttcgatgattacttttgatgattgttttttattgtccttgatgatcgtctttgagagttatgttgattattgattactttcgatgaatggttttatattatatattatattattcttactgaatatgattttttgagtgcaaatagttagtctaagacctttgaatcattgatttatactt

SEQ ID NO: 135615 - DNA, 474 bp, Glycine max
agctagcaagaactggctcagcaaatgttctttatgagtgtagagcaattcattgagaaggtggccaggtctggagcccgaccttcttttatgggggataatgaaagttttacagcccaagccctcaaccacatgagctagagccaaaaaacgatcactcatctaaagccgtcatccctggagctgttgattttttgaaaagaagattagaaatgagatccaatgaggctgctcatcctgaaccagtgccagtatcagctgatgcactatttctaggggtggatccatctttatctcagtatgcagcagactcttccactcctgtcttagagatacctgagggccaaaccataccagtcctgactctggacacttctcctccagttattccagtattacatctagcagatgaggaggatgttcatacacatgacacccacgaccagtcacaggaattgtgatgtctgatgacac

SEQ ID NO: 135616 - DNA, 299 bp, Glycine max
  unsure (1)..(299): unsure at all n locations
ggcctttntcccacaactctcataaataggagagaaatgttcatctaaagcatacaagtccctaatattatcaaatcctaaaatttgagctcctagggagcaaaacaatgtgtgtctcctagagagggcatcagctaccacatttgtttttccctttttgtatttgataacatatggaaattgctctaggtactctacccattntgcatgcctcttgtttaactttgcttgccctctaatgtacttaagtgattgatgatcactatgaatgacaaattctttggaaccaaggtattgtt

SEQ ID NO: 135617 - DNA, 265 bp, Glycine max
caccgctttccactttgagcatttcattctttaccgggctcagccggacttccggaggaggagtcatcgtcgttggggtctgatcctagctaatggggacgggatgaagctatcctatctatgacaggactcattcctacatccgagagcaaaatgattgacgatgatatgtccagagatcttcaacaatgccttacgaacgtcatgatctcttacgggaattaatgagacattcgccaaggatgggtcgaccttgaattagata

SEQ ID NO: 135618 - DNA, 417 bp, Glycine max
agcttcttaacataaaatatataagatcatttctatctttatcaagatgaagaacaatgaaattattttagatctttcctttcttcgcctggaaaagaacccgaatccatatctctttaatgtataaatagaagtatatactcgagacaaagtgcaccacacacaacctagaaaagctctagtgtaggtggagatatgaaaattacaaagaggatttcctctatagattgccactcatcaaaggagagtcttcacactattgaagaaaagttttgttacttcaaaaacacacgtgtaaagacacaaacatattgtgctctatttactactgggagtatatgcctttaagacaaaatagatcatcttctgctgcaagtattaagaacactccgtgtgaactggcatggaccatcggag

SEQ ID NO: 135619 - DNA, 429 bp, Glycine max
  unsure (1)..(429): unsure at all n locations
gcgatgggaggtgatggtctgatgaaacattgtcacgcctcaagaagttcaaccgtagttgtgattttcgacttcagcaacagcatctatctcctttgataattgtttttccattgatctattttacacacaaacatcattttctttagtgattattataaaatccagaatatagattccaaataaatattatttgaaatcaaaatatgtaaaagatttttcttagccctaatataaattaatttctttgttggaattgtgtgacagtgttacatttaatattacttaaaacatgttattccaaatattaattattctttaagaatagttntatttattaatatctcacctaaatatttaaataatattacagtgactatgtaactcttagtaaaggcaagtttataaaaaaaatattntaactataat

SEQ ID NO: 135620 - DNA, 428 bp, Glycine max
  unsure (1)..(428): unsure at all n locations
agcttctgaattttgggctgtgatggtgtgagacagaacgtggcttgtgtttaaaaggcttcctctnttctttcttctttntaaacaaaagatgtgccacatgtcttcttttgagggagcaaaaatgatgcaagctccattggagcttgtaggcctaggatcttcttcatcaatggattccttngcttcttggaagaagaatggccgcgaattggagaaaggaagaaagagaggagactccccttcaaggagaagatgagtctagaataagctcaccaccataggaggccatggataatatcttggaggaagaaggagatgaatgaagggagagggagagaagagcacganattctgtgctctaaatgagctntgaaatctgaagttaatattcaaatgatcaaacgtcagaaaaatgcacacacatg

SEQ ID NO: 135621 - DNA, 435 bp, Glycine max
  unsure (1)..(435): unsure at all n locations
agctntataagcgcgggttctttatttatagtcatgcgttcgcgatatgcgaagatgatattccgagtactctgggtttggaacgaccatgccctcctgatttccagctgggaaatttcgagtggaggaacgccccggcatttgcgcaacaagcataatgtaaacctttactggtttaaaagctctatagttgggcctaagctttagagtttttccttttgttaaggctttgtgtcttttgtttttgaatttataatacaaggatcttgcttcatctgttcctggactctacccattctcattcatttgcatgtttacttctttttctgaaacggcagatccgatgacgagtccccccgaggtactaatacctgcgacccgtctatcgacttcgagcaagagatgaatcatacggaacatgaaggagatgacgat

SEQ ID NO: 135622 - DNA, 405 bp, Glycine max
caagcgtctagatatattacgggtttctatcggacatccgagtaaaaagttattgtctattgaatttgctcagagcatctgctttcaatttcgagcatctcgatatattacgggactcgatccaacatccgagataaaagttattgtcgctggaatttgcccagagcttctattttcaattttgagcgtctcgaaatattagagcactcaatcagacatcttagttaaaagttattgtcgtttgaattcgctacgagcttctgttgtcaattaccagcgtctcgatatactacgggacataatcggacatctgagtcaaaagttattgtcgctggaatttgctacgagcttctgttttaatcaccagcgtctcgtatactactggacacaatctgacatcccagt

SEQ ID NO: 135623 - DNA, 320 bp, Glycine max
gatcgcgctcctctgccgaccaccatacagacctttgcctcccatgcagcaacctggagcaactgagcagcctgaagcttatgctgcaaacatttacaatagaccgcctcaacctcagcagcaaaaccaaccacagcagaacaattatgacctctccagcaacagatacaaccctgtatggaggaatcaccctaacctcagatggcccagccctcagcaacaataacagcagcctgctccttccttccaaaatgctgctggcccaagcagaccatacattccttcaccaatccaacaacagcaacaaccccagaaacaac

SEQ ID NO: 135624 - DNA, 362 bp, Glycine max
cctatctcttcctcaaactccattattatatctcttcttggaataataacatcactaatgatatataaaataacaattaataatgtatgctactactattattaaataatatattgattaagagaccagataattaataccactcatgcattaatctctttattaacatatattctcactaattataatgtaactcaaagagacatatacacctattaataaatcctatttctatatgaccttacattaattgctatcatctacactaattatattttgcgtattataataaacctctatatccatctatatataactaaatatcaacactatattttattaaacattatataacatattca

SEQ ID NO: 135625 - DNA, 470 bp, Glycine max
aagtcacctgcggcatgcaagcttccaaaactacaagcggaggttgcttttctttctttccagaacgcgaatgccgaagcaccattcggctgaaacgtctgccacagaagtggcatccctggaaatgcagctgatggaaacctccagtaggagcccacgtatatctctaattacctctctgtgtctatgaaaattgatactgcactctcatcaatcaaaatatctacaacagattgacaatctgtttcacaaataatggatttaactccacaattccaacaaattttcaacactggagactttattccctactatatcagaaggaatcactttactagttctgctattttgctttagttaactgtcatattagctacatctgagaatcatctaaagcataataccacagctagtgattaaataatgacttgtgcattagttagtctagccggccggctctattcaagaca

SEQ ID NO: 135626 - DNA, 140 bp, Glycine max
gcaaaaagcaatgcttataggcaaaacgccggcaaataaataatggtctcaatccatacaagaacaacacttctcttaataaattggctacacaataccaaaaattgacaaaaacaaatatttaaaaaaagttcctaaaa

SEQ ID NO: 135627 - DNA, 182 bp, Glycine max
tctgggtggtaagctgtttctcttgagattatgatgccaaaaatgagttttttgggtattaaaacctatggttagacttaaggtgcatctaaaacaaaaatttctagagaaagttatgagcaaaacaagttaaggagatttttaggaagccataatcttatcatgaaattgaattggatagt

SEQ ID NO: 135628 - DNA, 294 bp, Glycine max
  unsure (1)..(294): unsure at all n locations
atatgtcttactacgaaagggaccggctccacacccatatacccccggacggtgcccgagccaatgccattngcatatcaaatgaataaggccgttccgcggaagtatacccctcccgcgtccagcgaaagagttgcaaccgaagttgactccctatcagctaaggtaaccaacatcaccggcctcagtggcgtaacccgcagcggtcgggagtcncttcccctcacccggcagaattgccctctaaagggaaagctcccatggatcatgaacccactgacatatccaccccct

SEQ ID NO: 135629 - DNA, 373 bp, Glycine max
  unsure (1)..(373): unsure at all n locations
agctttgagcaaattcaaacgacaatttacttttactcggatgnctcactgagtaccgnaatatattgagacgctcgaaaatgattaccgaagccctgagcaaattcaaacgacaataactttttactcggttgtctgattgagcgccgtaatatatcgagacgctcggacttgaatgccgaagctctgagcaaattcaaacgacaataactttttactcggatgtctgattgagtcccgcaatatatcaagacgctcggactggaatgccgaanctctgagcaaattcaaatgacaataactttttactccgatgtctgactgagtcccgcaatatatcgagacgctcgaaattgattatcgaagctctgag

SEQ ID NO: 135630 - DNA, 404 bp, Glycine max
  unsure (1)..(404): unsure at all n locations
ttactagtctcattcagacatccgagtaaaatgttattgtcgtttgaatttgctaagagcttcgataatcaatttcgaccgtctccatatattacgggactcagtcagacaaccgagtgaaaagttattgtcgtttgaatttgctaagagcttcgataatcaatttcgaccgtctccatatattacgggactcagtcagacaaccgagtgaaaagttattgtcgtttgaatttgctaagagcttcgataatcaatttcgaccgtctccatatattacgggactcagtcagacatccgagtaanagttattgtcgcttgaatttgctagagcttcgaaatcaattcgaccgtttcatatatacgggactagtagaaaccagtgaaagtattgtcgttgaattgct

SEQ ID NO: 135631 - DNA, 475 bp, Glycine max
  unsure (1)..(475): unsure at all n locations
tagctntattatgccctctgccctcgatggttatttcttcttcggcgaaagcgagatagtcgctggcagtgatattatagaccacccctccgaaaccttctaccgagatgtcttgggccacatggcctcggtcagaacttttattagcagagcccgatgaggctcggagctcatgagtaactccaccggcgagaccctggccggagttntgttgagctgttcgataaccttgaattcgctctgctgaattatacggaggaactcactggcttcctctagcgacacctcctttataccatactttttctccggaagacctttcgccggaatatctttattcgaagcgaggggtgcttcaccatcttgttcctccaccactntttctttcctcttgacgttcgcgggatggactgggtaggtccgaagcgcaaacacacgaccggtacggtgcacaccatttactctcgtgatattt

SEQ ID NO: 135632 - DNA, 349 bp, Glycine max
  unsure (1)..(349): unsure at all n locations
aagctccaaattcctcttcctttctaccccaaatngcaaggaaaagccatttttggagtcttggagcctccctctacttcgtggggctttaaatttcacgtaagggtggacttcttctcacttgaaatttgtgggtgttgggtttttgggagctataatgggtagttctactaggttattgccttaaggtagttatttgtgaaggaatatgttgaaatcatgctaaacttgacatgttngatgtgagcaaaactatccatgctgatttagggtttcggaatgatgctttgtgatatatgtatgcttaaaatgttgatagaacattggtagagatgatggggagagataa

SEQ ID NO: 135633 - DNA, 460 bp, Glycine max
  unsure (1)..(460): unsure at all n locations
cgcctggagaggatgcttcaatggaggaaaatatataggagatatttatagagggggcggcacgaaatggaaggaagaaaaagggagagaagttgaactttgagttgtgtctcacaagactctcattcatcaaagttacaacaagtgttacacatgtttctatttatagactaggtagcttctctgagaagctttcttgagaaaacttccttgagaagctcctttgagaaaacttccttgagaagctaaagcttatctacacacacccctctaataactaagctcaccatcctgagaagctgtcttgataagattcctatagaagctagagcttagctacacacaccttcttgagatgagaagcttgaacttagatacacacccnctattatgctaagctcaccctcatgacgaaatacatgaagataccaaaatatgtcctactacaaagaccactcta

SEQ ID NO: 135634 - DNA, 339 bp, Glycine max
  unsure (1)..(339): unsure at all n locations
atttaacccctaaggtaacttttcccctcatccataccacgttttctatcagcaatttcagcacacaaacatcacaaagcatcatcataaaaccctaaaacagaatgggtaaatttggctcacatcaaacatgtcaagtttagcatgctttcaacaaattccttcacaaataactaccataaggcataaacctagtagaactacccatcatatctcccataaacccaatacccacgaaattcatgtgagaagaagtctacccaaacctgatattcgaagtcccacaacgtagaggtgcgtntcacgactctggaaatggctttctttctgcaattggag

SEQ ID NO: 135635 - DNA, 440 bp, Glycine max
  unsure (1)..(440): unsure at all n locations
agcttgtccattggtcaagttgtatgttctcttttatatgagtaggcagccttcccctgcctgtttctgcccagatgactagaatccgaatctataaagncattaactctctatctttctcctttctcatttgaatacttttcaggagctaaaaagagagagagcacaagcatccgttgctatcaagtcacttcgacaaaagatggaagacaaactgaagacagaactagaacataaggtgcacaattagctnttgtgttggttttacacgtacctatatcccactttctcaacatgtatgctgttagagttatcagatactatatagtatttgttaaataaaatgtatttctggtaatcgcatgcaaatgaaactaatttgaagctgaacaaactcatgaattagcaaagggagacttaaatgcagccataacacatga

SEQ ID NO: 135636 - DNA, 324 bp, Glycine max
  unsure (1)..(324): unsure at all n locations
agcttggttcgaggtacttacccgttgatgttcttagaacgatgaagaacgaatgaagagcgtcnaagaacagctgaaaccttagcgaaattcctcacggataacgtttcgganacgntcggaagcgcctcggcttagattttcttcacggaaacaattttttcaagcaaattcgaaagagagagaaatgccaaaggggctgaacccttttcttcttcacttcctcccctatttatagcaaaataggggaggtggttgccgcccagcgtcgcctatcgagccagggtgcttccttcagaagcaacagtcttctggaagaatatt

SEQ ID NO: 135637 - DNA, 481 bp, Glycine max
  unsure (1)..(481): unsure at all n locations
agctagtccttaattcatataatatagtatctcttttggaataaaatcattttatccaagcaaagacacattatgtgatatgccataagcaatgtgtgcattatgtaaagtctctccgcttgcagggcaaggttgcatacatctacactccccaaaccccactaggtgaaagcctcatgcatggggtctcatttatgtacagccttaaaccagaaggggtgaaagtttattttcaaaaaaagacagaaagaaccactcactaaaagtaaacaatatatgctatagaccaatacacaaacaaaagcacagcttactcaataacaaaaacattcatattagatatgatagactctaatttcctttanaatgtcgtgtgatttccaaaattccagaattgaatcttcatccaanaaaattctgttgatagatgatacaatattctaaaaaaatacacaccatctcaatcttctttatagtaaaa

SEQ ID NO: 135638 - DNA, 355 bp, Glycine max
tgccaaatcatacacaacactggtggcttttctgaccacatgattccaaacctcattttcatattgtcctgaaaatccgtgaatctcttctacaagttgatgctgatgatgacccaaatcacatcttccatcatgaaggtttatagcctccctagaatccgaatccacacgaataagtcgtaaagccgaccatgcaaacttaagaccaagtaaaatggctctaagctcagcataaagaacactgtctccttcactttaggcctgaagactgcaaagctaggaaccacctaaatcgcggattatccctccctagcccgcaagactgccacattgagcaacagatgcatcacaattc

SEQ ID NO: 135639 - DNA, 499 bp, Glycine max
  unsure (1)..(499): unsure at all n locations
ttatagtcacctgcccgctgcaagcttctgacctttaagccttctctgttgttacttttacaaagtaacaagagaggaaggaaattaactctcttccctctcttgggccaccattattaatatggccccttaagtggaatattccattcacacaaaatcacatcgtgttacacatcacatcatttaacatcaaacatcatcaaccaaataataactttgcaaagggttggattggatacccttggacccaatctcaaatcatggcaattcataacaatatattatcaataagcttacaatcataaacatgcatcattctttgtcaagtggtcacattcacttggtcttataactcataacatataaatttccatgaatcccaaatcataattcatcaatcaaaagtagacaaacatttatgcaaatcaccatttatntatttcatacatagtctacanattaaagtcattactctatctcatttagatttgtacaccat

SEQ ID NO: 135640 - DNA, 438 bp, Glycine max
gagcaccacatcgaaggaagaagagaggaatagaagttgaactttgaagtttgtctcacaagactctcattcatcaaagttgcaacaagtgttacacatgcttctatttatagattacgtagcttccttgagaagcttacttgagaaagcttcctagagaaaactttcttgataagctagagcttatctatacacacccctctaataactaagctcacctccttgagaagcttctctgagaagctctcttgagaaactttcttgagaggattcctagagaagctagagcttagctatacacacctctctaatagctaagctcacctccttgagatgagacgctagagcttatctacacaccccctataatatctaagcacacccatgtgcctaaatacctgaaaatactaaaaagggccgtactacatagactactca

SEQ ID NO: 135641 - DNA, 283 bp, Glycine max
taactgaactggaagccggtgccgaggctttatccctatattactccggaagtgtaacatgacctccgagatggaagccattggatcatttaaggccgagagagcggccttaatgtgcgcctgcaagccctcttcactatccatttctctggatcgagtagtataagggcgccttggagctttctcaggcatgataaaattcctaaagaaataaacaacgatgagtgtgccaccataacatgaatatgcacatgaatgatcggagcactggtatccaccacaa

SEQ ID NO: 135642 - DNA, 385 bp, Glycine max
tatcaaaataggaagggaattcctattgaagtatcaaacagtttggccaagaaatataagttaaaaagtctttttcaagagattaactctttggtaatcgattaccagaggatgtaatcgattaccagtggccaaaaactgatttacaacagctattaaaatttgaattcaaaatttgcactgtgtaatcgattatacatatatggtaatcgattaccagcagttattgaacgctttaattcaaatattaaagcttgtaatcgattacacatatactgtaatcgattaccagagaaaatgttcagaaaaatattctcaacagtcacatgtttctacttgtgtcttgaatggccatcacaggcttatatatatgtgacttgagaca

SEQ ID NO: 135643 - DNA, 349 bp, Glycine max
tcatctatctttcaatctttacatcatctctcaacatctttcaatcaatctttcaatatctttctactaaattttttgattcatttctcttcatctttctaaaagtttttgataaacacattctctcccaagaaaagttctttgttcaaaaacttgtgctattcatctttttcattctcttctctcttttccaaaagaatgaaggactaatcgcctaaattattttgtgtcccacttctcccttacaaaagattcaaaggacaaaccgcctaagaattcttctaattcttcccttccccttaagcaaaagatttcaagcactaaccgcctaagatatcttttgttcccc

SEQ ID NO: 135644 - DNA, 336 bp, Glycine max
gcttatatatatataacgctcattttttctatataagctctcgagatatgcaaatggtcatatcttttcacccggatgtccgaatttggcgaattacatatcgagacgctcagaattaacaacggaagctcttgataaattctaatggtcataatttttacctggatgtccgattcaggctcatcacttatagatgcgcctcaaaaagaacaacggaagctcttcataaatatcaaaggtcataactctccacactgatgtccgattactgattataatatatcaagacgctcgaaataaacactgaaagctctctaaatatcaattggcataact

SEQ ID NO: 135645 - DNA, 390 bp, Glycine max
gacccattttcttactttttatacctaagccgtaacctatggaattaaaacaaactaaatgactgagtgtaactgtaattgttggcaaccaatagtcaccctcaacagccaacaagtcagccaccatttggtctcccaaaaggctgatgcctaggttgccaattgggcccttattacaacttgaactaaagccctcttagttgattaacccaaaacatatttttagtcagccaactttacaaggattgggccattatttatacaaactaaacactctataattgaaataaagtggtgtcatttaatcctccatttgggccatgatacaactcacaaccttggacttttctcattgaaactgtgcttgtattcaaataatatggacagcac

SEQ ID NO: 135646 - DNA, 407 bp, Glycine max
gaattacactagttgagtggtgagtaattattcacttaccgtatacactaggcactattagagagaccaaatagacaaacattttgcgcacatacacaaggacaacctcctgctcgtgcgttcacgcacactattagctaagctagggtggcaaattaacaagaaacccactcttgcatttaccccatttcatacgggacgtgtgcttctttctatgtgcctctctctgtctctctaacttctacttgccacttttgtaccaaccggatctacccaaccacgctctccaatctttccataaaaaataacattatattaatgtaacttatatatatgccatcaccatttatatttgatagtatctatcacacaacttcactgtcagtcaccgagtaccatattgctct

SEQ ID NO: 135647 - DNA, 381 bp, Glycine max
  unsure (1)..(381): unsure at all n locations
ttctcaactcacatgacaagatttaatcaaaactagaatttctccactaggatcaacagtatgtctagccgctagggtctccattacaattgaccttgctggtaaccatgaattgacatgaaatcgaacactctgcaaatgaggagggagctatctcaaacaacaaagcaaaaggtaaaacaggcaagataaaattcaaaaccacttattcatgttaaagttcaacaagagagtacacaagtgaagacttacatncataaactcactgccagcaagagccattgcacgtngaaaggtctcattttcattctcaggtgactgatcaggatctgcccatccacattaaccttctactcttgggataaagagaatatcacgatc

SEQ ID NO: 135648 - DNA, 401 bp, Glycine max
  unsure (1)..(401): unsure at all n locations
agcttgtagcatatgcaaaccacaatttcttttatttcggatatgcgattgagtcccgttatatatcaagactctcagagttgaatacaaaagctcttagctaattaaaacgacagtaactcctacacggatgttcgaatgtgcaacgtgacatatcgactcgctcgaaacttaatacaaagctgatagcaaattcaaacaacaangacttttacctcggatatcccattgagtcccataatatatcgagacgttcgaaattgaatagagaagctgtgataaaattctaacaacaatatacctttactcggatgttcgatttgagccccgaatataacgagacgctcgatatttaaaacggaaggtcgtacataatcaaacaacattactttgaacttgga

SEQ ID NO: 135649 - DNA, 484 bp, Glycine max
  unsure (1)..(484): unsure at all n locations
gcttggaggattatggagtatccatcacatgttgtactatgtggcggtcgggcgatggtgcacaacaatttttccacatccacaaatcgcgcataaacccaccatcccctgttgcccacctccaactgagctcacgtactcccacgtagcccatatcctcgtttctctcacaacaccgggtccccatcaatcctcccaagcttccccaacatccaggtaatacaacattcaaacagcacaaactatcacagccaagaaaacagggcaaaggcagaaaactctgcccaaaacaccaaccaaaatcacaaccaaaatcacagcttttctcacttaaagaccccagtaataattccttcgttccaattcgttaaccgttggatcgaactccaaaatttactggaagtctctagtacataagcctacanttgtgaccgtgggatctactagcaaaaatccagaactcattctgcactgctctttccac

SEQ ID NO: 135650 - DNA, 362 bp, Glycine max
  unsure (1)..(362): unsure at all n locations
ctccacgcaagcaatacatgaaactagtgacccatgcatgtagagcctctagatgttaggtcccctcatacaattggattgccctcagattagccaatatttgttgcaaagcttcttagctctttttagcccttgctattgtcatgggcccccctatgccttgtattgagtcttgggcttccttctgggcttaagtctggtctttgatatcctcatcacttattcacaaaggaccctaaggttgggtaccttagtttctttttctggggtaggaactgagactgttnggaatccttgtnagatttatatgcataataaaatctattcacgtggatagatattggatacttctcacagaaaat

SEQ ID NO: 135651 - DNA, 473 bp, Glycine max
  unsure (1)..(473): unsure at all n locations
agcttccttaagaagattcctaaagaagctatatcttagctacacacacctctctaatagctaagctcacctccttgacatgagaagttagagcttagctacacacccctataatagctaagctccccccattccaaaaatacatgaaaatacaaaaaaagtccatactacaaagactactcaaaatgccctaaaatacaaggctaaaacccattactactagaatggccaaaatacaaggcccaaacgaaggaaaaaccaattctaatatttacaaagataagtggggtcatacttagcccatgggctcgaaatctaccctaaggctcatgagaaccctagggccttcccttggatctctggcccaatctacttagagtcntttatccaatgcccttgcagggtaggattgcatcactnggatatttaactntntatcctncttgagttgagtaaaggttnttagtctcttt

SEQ ID NO: 135652 - DNA, 331 bp, Glycine max
cttctttcgattttcactccgcacgcttgcgtgttagggaaaaacaccataactaaactcgccacaaggcattcctattgctccagattcaaatctagaatgatgggtgatcaagaggagacacatgaacagatgaaagccgacatgtcggatctgaaagaacaaatggccttcatgatggaggccatgttaggaatgatgcagctcatggagaaaaacgcggccaccactgccgctgtcatttcggctgtcgaagtatacccaactctcttggcaactgcgcaccatcctccctcatacatagttcgacggtgaatggacacatggggca

SEQ ID NO: 135653 - DNA, 482 bp, Glycine max
  unsure (1)..(482): unsure at all n locations
agcttcctaaataaatttcatgcaggtggactcngctttagtaattctgacttacagcagcctcctatccctcttccattcccacctagagcaattccaaacaaaaagatggaagaagcagaaaagagatcttggagaccttcagaaaagtagaggtgaacatacctctgctagatgccatcaagcagattccaagatatgccaagtttctaaaggagctgtgcacccataaaaggaagttcaagggcaatgaaaggattagcatgggcagaaacgtgtcagcattgataggtaaatttgttcctcacattcttgagaaatgtaaggacccaggtactttttgtataccttgcattattgggaacagtaaattttagaatgccatgctagatctaggagcatcgattagtgtcatgcctctntccattntcaattctttatctcttggacctttgcaatctacaaatgtggtgattcatttg

SEQ ID NO: 135654 - DNA, 411 bp, Glycine max
  unsure (1)..(411): unsure at all n locations
ctgacgtcagactctgtggtttatgctcctcagtcgaccaccacacagacctttgcccttctgtgcaacaatatgaagcaattgaacagcctgaagcttatgctgcaaacatttacaacagaccttctcaacctcagcagcaaaatcatccacaacagaataattatgacctctccagcagcaggtacaatcccgggtgaaggaatcatcccaaccttagatggtcgaatccttcacaacagcaacaacaacatccttattttcaaaatgttgctggcccaagcagaccatatgttcctccaccaattcagcagcaacaacagcaacagccccagatacagcanactgttgaggcccctccgcaaccttttcttgaagaacttgtgatgcagatgactatgcaaaacatgc

SEQ ID NO: 135655 - DNA, 451 bp, Glycine max
agagagactgcagcatgcaagcttcgctcttaaacaaatacccctatcctttattattcatcttgagccattgtgccacaatgctcgtaaatgggagagaaatgtcatccaagcatacaagcccctatcgtatcaaatctacaatttgagctcctatggagcataacaatgtgagtctcctagagagggcatcaactaccacaatagtctttccctcctagtatttgataacatatggaaattgctctaggtactctacccattgtgcatgccttttgtttaacttgctttgccctctaatgaactcaagtgatcgatgatcactatgaatgacaaattccttcgaaacaaagtaataggcgcaagatcggagtgctcctataaggcataaagctcatatcataggtgggtagataatggtggaccacgaagttttcactaaataagcaat

SEQ ID NO: 135656 - DNA, 394 bp, Glycine max
  unsure (1)..(394): unsure at all n locations
cttctttatgaaacagcaggagggcccaagtgggcctggttgctatttgcacccccatttttctaaatacaccccctgcctttatttggtgattactttttcgtaaagttacagaaacttatgaatttcgtaacgatacttgtattcttcctgtaatgtcacggaaccttgcggattacataatcatcccttntttgacttacggaatgttacgaaacctcactaattgtgcaacgatgcttcctcttgatttccggtgtgtcacggaaccttacgaattgtgcatcaatattttcttttgatttccggcacgtcacgaaatttcacaaattgcctaatgatgggtgtcaagcacctcataatgacgaaacacatagtgcataccaccaagcac

SEQ ID NO: 135657 - DNA, 332 bp, Glycine max
  unsure (1)..(332): unsure at all n locations
agcttgcatgcgactgggcccatcctcgcgatgattctaaagggnccacacaaacgcctggaaagcaaggattgactgcgacccgacaccgcggatgaccgatacgagctcaacgggacgaggaccagccacccacccggaacgcatgagctctacgatgcccatccgcgactgccttcaagcaagcctgagccttctgaagatccgggcgaagtaaggcaaacatggcctccctctgactgagcaattcatccactgccgccaccgtataagtgcccgncaagaactgaggaaaacatggcggtgagcggccaaaagagatcacaaacggc

SEQ ID NO: 135658 - DNA, 275 bp, Glycine max
tgctttatttcaagatgaagagctcgcagggcgtcaagaagtgctgatagttgaccctgatgtcattaatgagtctcttgctgatgttgatggaggtggagaagagatagatgcatatttactcaaacaactagacttggttgaaccagacgaggatgaatgcatattaagtgagaatgacattgagagcgagtttgatgatataaatacttcttatgtaattcatacactaaagttgagtgcatgtcttatgttcattgtgtatatgtgcgtgg

SEQ ID NO: 135659 - DNA, 85 bp, Glycine max
gcatgaaggagcccatgtgagttaaggcatgggtgctagccctcatgcagtttgggttggaacaacaatggcatggcgagcttgg

SEQ ID NO: 135660 - DNA, 458 bp, Glycine max
tagcttgatgtgtcaagagaccaaatcctttcatctggattagaaagagatggatagaatgcctccataccatatgggactgcaattcagagaattccctataattcaaatttcaatggaataaaaatttcatgaaagagtagcaaaagatgaataaaattggcttataggggcactggacaaaatagagaagagtcttggaaaagcattaaaaagaggaatgtaacccacccagatggccaaatgtcctcccaaaatttaacatgggaaccattgcccaaacccagggatactagatatccaaaggtaacatgactcagatatgagtccccaaattaagagagtgatagagatgggcaccatgtctgagatatgagtccatgatccctaatattaaaggctactctcttctcttcagccatctaagtctagcagccatcaatcttttctcttcaaca

SEQ ID NO: 135661 - DNA, 374 bp, Glycine max
tcacacagagaacttgcctcaaggttctatcactcggaatgctgcaacttaacttcaagacgctccttgtcgacctcttaaagctctaatagaagatcatttgaagtgtatctaactcaatcaacatacttctagaggaagaagacatagatgacagctgtcatatcatgacaactacaacgtcactctaaggtgctcattttgtggaacctttcctatgagcattctaaagttacttagaatggaatttctgatgttagctaagacatgttcatactatcggctatcatcttgatgaagtcaactgtatgactttctgatgagcacaacttctcaatcttacactctttcagcccaagcatttgtagtagatt

SEQ ID NO: 135662 - DNA, 277 bp, Glycine max
  unsure (1)..(277): unsure at all n locations
ctcacaagancgggcacacgcaaatttgagtcacgctgaccggcgtgaaatacccgagtggttatccgaataaacatcctgtttcgtgagtgtgagacgaatagcctgagagcatgcatagactaacgtggttttctgcgccctttgttaatcgcgggcgacaagtccctttgacacccggagatttacgttatgttncgggcacacataatctgtcatactgacatttgagccacgttgacgggcggaattacccaattggctatccgtataaact

SEQ ID NO: 135663 - DNA, 358 bp, Glycine max
agttatgagcatttgtttttctcaagagcttccattgggcaatttcgagcatctcgatatattataagcctgaatcggacattcgtgtgaaaagttatgaccatttgaatctctcaagaggttccgttgttcaatttcgagcctctcgacatcttatacgcccgaatcgaacatccgtgtgaaaagttatgaccatttgaatttgctagagtttccgatgtttaatttcgagcgtatcgatatattataagcctgaaacggacattctgataaaaagttatgaccacttgaaattctcaagagcttccgttgtcaatttcgagcctctcgacatattatgcgcccgaatcggacattc

SEQ ID NO: 135664 - DNA, 384 bp, Glycine max
  unsure (1)..(384): unsure at all n locations
ttaaaaaagagatggtgcatataaatataagtgaaaatttttcagtttatttttttatattttctatattataagagaaaaaataaatgtatatcatttcctataaaaatcttaaaatatattttttacccaaagattaattgtcacaccttattccttagtcaagggtgtgtatatcattttacatagttgtttattctttttcactttctacacaactaaataagaaaagaccaaaangtttaaccttttttcctttcattttctctctttctaaacaacttaggaaatctttttactttatattaatgtttctttcctttcactattctccccacagcagacaaattactacataagatntngaaagagcttgtgaaaata

SEQ ID NO: 135665 - DNA, 403 bp, Glycine max
  unsure (1)..(403): unsure at all n locations
agcttgcaaggactatagttggtgtcattgtgttttgccactcccttggagncatgcatagggatctcaacctgaaatttctctttgtatcgcaagaaaatcccctcttaaagcatagattttggactgtctgcttttttcaaaccaggtttgtcaaaatgttccattgtttcttccccttgtgcaattaacatctatcttcagtagtttgctttaggttcttattatcaagagagttgttatggtatccaaagaaatctaaaggttttgatacagttgtttttctgagccaatagttgaatgagtttggtacaccaaagaaaagagaggcacanagagtttctcagtagtcagtaccaaatcccttaaatgtccaaaggtagaatttatctcttatcaattc

SEQ ID NO: 135666 - DNA, 436 bp, Glycine max
  unsure (1)..(436): unsure at all n locations
acgatcacggacccattggtgaacgcatgattttcttgtttgaaaaaaaaaggatgcacagggttagcttgcctgggcgaggttagctcgcctgggtgagcaccccctgcacgagaaaggttaaaaggagagggaaagggtaagtttttcacccaaaacttcttcctctcatccaaaaaacgtatgctcactggatcccttggatttccaaccttaagtcaccatttctcaacgttctttgattccattttgcgttattattcatccccaacaagagatggctctgaagaagctctccacaaagaggtccaggagggacgcccatggggaaagctccagcgcctctatggagttcaacagtcaccagagatagcacgtagaggatgagtactcagacttctangaggagatagcacatatgcattggacacctcta

SEQ ID NO: 135667 - DNA, 474 bp, Glycine max
  unsure (1)..(474): unsure at all n locations
agcttgttaaagtctctcgctcttatttgtctataagacaaagaaggaataatcgtctagaccatcattaagaggtccgtccaaagcaccaagtgtagctagctcctctaatgaagactcaaaggacaatctgatgaggacgacgagctagccttcatctcgagaaaaatctgaaagatgtggaagaacaagggtggatctaaatagaagaacttctccaagaaggtgttcaatgaaaagaaagacaaagataaaagctccatcattgctatgagtgcaaaaagcctgaacacttcaagtctaagtgcccagatctggagaagtccaagggaaagcatgaataatacaattccaagggtaagaaaagcctcatgagcacctgngaggacctggatggcacctccgtcaatataagagaggaggaagccaacctatatctaatcgctgctacaacctctgaagaatctgaatcat

SEQ ID NO: 135668 - DNA, 441 bp, Glycine max
  unsure (1)..(441): unsure at all n locations
tcacttataaagttgtgacttttgaaaacattttcagaaagaagtcacttgaagaattatgactnttggaaatgtatttttcaaaatcagtcactggtaattgattaccattaaggtgtaatcgattacacatcaacagatgtgactcttcattttgaattttgaaaatcttaacattttaaaacactggtaatcgattactaccttctgataattgattaccagagagtaaaactctttggtaatgattttgtgaatacttcttgtgctactcaatgttttgaaaaactttntaatacttatcttgatngagtcttctcttgattcttgaatctttgcttgaaaaatttgcttaactctcgattctttggcatcatcaaaataacccttggaagacatagcttncatagtcatatgtttggagcaaccgctatcaatgta

SEQ ID NO: 135669 - DNA, 430 bp, Glycine max
  unsure (1)..(430): unsure at all n locations
catcttacttgagttctatggtctaagttacaacccaatattaacctntacgatgcaacaaattcgtcataaaacatacgattagtggtgaatccaggaaatttttctattgaagacaaataaataatttataatattttcataaaataagcgttaaatgtttttacaaatatgagaaaaaaatacttagatttctagaaattacaataattctctatatatttcaaatttttaaaaaaaattatgattttttattgtcaacattataaagataatagaatagtcaaatgataaaattattatgaattgattctctcctttatctntataactgttatgttaatacaatttaaaatttgtctatgggtaaaaccaatttttattgtggcaaaatagatatattgatatactcaaataaaaaaatatgtat

SEQ ID NO: 135670 - DNA, 369 bp, Glycine max
  unsure (1)..(369): unsure at all n locations
agctagaggcgataaaagaaggtagcgaattactctntttgactagggataatgntaaaaatctgaaggaagatttagtgactgttgaagatactctattggtggatggtagaattgggcctaaacccaatatcaaaagaagaaggtgcatgctaaaatttcaaaagataagataggaatattgagggttgcacgggtttgggcttgaaatatgtggactaatctactccaaagtcacatagggaaattgtaatttcactatcaaattgatttgcagttcttatgagataaggcccaatataatctgctagtagtgtttcttcaaagaaagactcttatttctatgattaggggaggaaagtgcaatga

SEQ ID NO: 135671 - DNA, 405 bp, Glycine max
gcaagctaggtgaataactgtgggatatgaagacttgtatatctcttaaaccagctatagttacaacagtcccatttgcatgttaattttcttactcttgggacatggtgaacatgtggcgaagtgttggataagggtgtcagtgtcatcatgtgatctgtggctcatgaatccaatatccataactgggtagaagatgtttcagagacatttaatccaaatgagaatggaagcttacctgaatatgccaaagtacaagtacctgttggtttttctagtctgccaaggaaaattcttatcctttctatcccttcctgatcaagatcggtggattcaggcttattttcttcatttgttccagcagcagcagcatgagtatgtctattcttccttgcagaacccccc

SEQ ID NO: 135672 - DNA, 451 bp, Glycine max
  unsure (1)..(451): unsure at all n locations
agcgtgcgtctacatgatcaaggcaaaggttcactatatttaagtgctgataggcgaagacaagtggcctcagatatcttaggaaggtgggatgaattaagatattgcaaactatgggcccgagtaaattgtgatgcactttctatgcgaggcacaaattcccttaaaaacgaactcttaataatgatgcaaatagaacaagctgaatataaatatagagcaataataaataaaagagtgtaagggaagagaaagtgcaaactcaaatttatattggttcggccacacccttgtgcctatgtccagtccccaagcatcccgcttgagagtttgactatcttgtaaaatgcttctacaagttctgaacacacaaggacaatccttccttagtgtcaatatctttgacaaaagagacctcggctctaatccncttgaaatgtaaaaaagagag

SEQ ID NO: 135673 - DNA, 494 bp, Glycine max
  unsure (1)..(494): unsure at all n locations
actcaagccttgcttctacattatcttcccaagtgtggtatgctntcttttctttcttttctntgaaatttctcttggcagattnttccattcttctctaggtttttctatagtttcatttcccactaccattgtaggaataaagggaccaatttcaatggcatcccatatatttaaatctatggcttctataaagatttgcattcaggttttcccatagtgataaccctcaccattgaacataagaggactattaataaaatttccctcaagaaatggaaagttagacaagaccataattattcttgaattttttaaactttaaacaaaaatcctgctctgataccacttgttagacaagtagcctcaataacttaagagggagggtgaataaagtttcacaantttcccactaacacactntaaccccatttaaatgataggcttagaatganaagaagaagaagaagagcaatccattaacaatgtctttt

SEQ ID NO: 135674 - DNA, 409 bp, Glycine max
  unsure (1)..(409): unsure at all n locations
agctntgcttctacatatccaagatgagttgttattatgagtcatgtgtgtgcaaaatacatcgttagaaacttctagtgcaagggtcagatcaaactctgttctctcttttgctgttacttggtctcatatggcttcatctcttcaactgtgttcttctcttttcttagtaaattttcactgttcttccattggtgatgactatggaagactaaacaactaatcaatccaaggatccagttcaagcaatgatgaatttgagttctggttaacaatttcaaattatggtgtgaatgttcatcctcttctctaactctattttcatatgcatgattatgaatgtgtttaggataagaaatgagataggtaattgattaatctcgcaattcgaatgctcatcatagattaa

SEQ ID NO: 135675 - DNA, 382 bp, Glycine max
gcacatgctagcttcaaaagatgctgctcaaatggctaaaattaaagctttgtacgcttcaatagctcgcaccgcgaagctggcacatgcatgagtagtatgaaagaacagtttgtgtaagatggatgcacatgctactcaaacattatctcatgaagcatgcttataaggtctcttacatgaaatgatgtatcatacccatggaattttggcagaaataaagctagtgatataataacttctcatcacggaccactaaaacaattaagtgctgcgtatattggactccacgttatgcataaatattatacaagttaatgtatcggaagctaacacttcggcaaagaaccaatacttgtgtcaaccatttctttcaccacct

SEQ ID NO: 135676 - DNA, 302 bp, Glycine max
  unsure (1)..(302): unsure at all n locations
cctctatcaaatggagttcaataataatattanaatcggaggagtagattgatgatttagatcttgcacatatatagtaagntgaagagtattctatccctccttagtgtagtaggataatagacatttagtgcatctttctgacaatgttctataattgtcttgactaaaatgatacccaatagctcgtaataatgacatatttaagttgctgaataatgtcatgaatagacatattctttaaagaaataagagaatgtgttgaaataaaacgtactttttgattcaaaaaaaattgtcta

SEQ ID NO: 135677 - DNA, 449 bp, Glycine max
catgcaagctttaacaagagtcttcacaaagaatcatctttattcagaaaactagcaaaactacccatcatatctcccaaaaccccatacccacgaagatcaaaggagaaagaagtccacccaaaccgaaattttgaagtcccactcgtagacacgcacttcacgactccgaaaatgccctcctttcgcgatttggagcagaaatgatggccaaaggttggagctttgttgggcaacaatggtggaggaagaaaagaagaagaaggctgcgtgagagagaaggagagcttctgaaatttcttttgggctgagtgaggagagagagagagatgcttcttggttttaaaaaggagtttctctctttctattatcttatttaagctatgccacatgtctccatttgagtggagcataaagggcccactttctcttttgattgtgacccatac

SEQ ID NO: 135678 - DNA, 400 bp, Glycine max
gatgactcataagacataactggtaatctttgtattttctacatctaacataaataattaagaattctaattcctcttaagagacaaatatcttttgacttaacaacgttatagaaaaactattttatagtaataaaattctaataatacttttttactataacaggaattggttacatgatagattcaaacataaacacttatctctaacattatattccaaggttaaatctaatatcatttgatcgcttggcttcattcaaattccaagatgtcaattccctcgtgtgttacaccatgaaaataaataaaagtcatggccaccacttgtctcaagttggtgggagtactttgccaagaccaaattaatgatcacatgggcaatatgtgacactaaatc

SEQ ID NO: 135679 - DNA, 443 bp, Glycine max
  unsure (1)..(443): unsure at all n locations
agctagcttntcttgaatatcaaacttattttggaaagaatggacaaattatgcgttagtagtagggctctaacagatattaaatagaatggaagatgtgcgaatgtcagcaacnttatacatactaacatgtgggtaaagcaaactgaaccaatggcaataatgggtataatgtcactattaggcagagttacatttttatcaaaaacaagctggtcggatctaaaatgatgaatagagcaagtaatatgaatgcttgcaccaaaatctaaaagccaacaatcatgaagaaaatgggaagtagaaataagcatactacttgaggaatgacaacattggtagcatgactttctaaaagatcatcaattggcttattgttgagaagtagtagaaactcggaacctaagtcaccaaagatagtgcgatgaggcatatcacagaca

SEQ ID NO: 135680 - DNA, 399 bp, Glycine max
accaaagaaacttctaatctcatacactaacctatgagctttccaactcatcatcgcctctacctttgaaggaactactgttatccctcccctgtatataacgtgccctatgaagctcacctcctctagccaaaactcagacttggataacttagcatacagtttggtgtccttgatggtttgcaacacaacccttagatgttcttcatgttcctccctagtctcggaatacaccaagatatcatctatgaagaccactactaaactatctaggttgggatgaaagatcctattcatgtcgtccatgaacacaccatggacattggtcacaccaaaagggataaccaagcactcataatggccataacgggtcctacacggagtcttctgaaatcctca

SEQ ID NO: 135681 - DNA, 372 bp, Glycine max
agaatagaatctcacactcctctgacttaatataacacacccatatcaataataatatgaacaataacctctactatatctaagatatcttatatcaatcaatttaatataataaaatagcatggttctaagaaggccacatgatttatttcggttggatcaagagattgaatagattttttcaaaatctctaccaatttggtcttaatacagattaaaaacaacccctttaaatcaatcaaagtttcttcaatagagtattataaactagaaacttctatgattataatgtgtattacaaccaaatctttgatggtgggccttgagatcaattctcatacaaagatgaatacaagactcagcggtaagaga

SEQ ID NO: 135682 - DNA, 474 bp, Glycine max
agcttcatatcatcatggagattgtgtccttcttctagaagcattattatcattatacaaaccacaaagctccataacgggcatccccaacacctcatccaccacacggtcatgccacgtgccctcatggcttcattcaaccgttggatgaaccccttcttgaatttctcacaataatgcaacaaacgtgccacatggctagggtccttatcctcccaccaccaaccgccaccaccctccctacattgtggcatctcaccgccaccggagaccataccacggcggaatccagccatctccgccacatactccgccatgccatcaacaagcccttgtggagccccttcccatatccaaaccttatccatgccacgtatgattgcacccactatatctatcttatccgtaccttggtcttctagtcacgtagggctaatctcaatgacataactataacattttcctccacctcgt

SEQ ID NO: 135683 - DNA, 219 bp, Glycine max
tcaacgttccttgtacggtgtattatcatttttccaaacataggcttactctatgttaagaaagtcctaacttttttttcttaccaaaacagaaaaatcctaattatatcctaaatttctcaaaaatgatcttttaacacctcaaatgttatttaaaccatagatcaaatgaagcatggttaataagtgtggcgtatgatataatatgtacaaagagac

SEQ ID NO: 135684 - DNA, 403 bp, Glycine max
  unsure (1)..(403): unsure at all n locations
ttaacagacatgtgctgcaaacgaaagaattatgagagaaaaattacaaattcctatatnaatggacccaaaatatactcataattaacaactatcaaggtactaccagcgacaatgcatcacaaaaagaggaaaactcaagatgaggtttcactatcatcaagcaaatcgcagactcagcatgaccatcaatcgacctccctctctatggctcacataaacccaagtatagggcccaatatctcaaagtgtgtgcaaaaagtgtaggtgtcatgtgtgcatggaagaacctaaggactaccaaaccttggctacaaagcaattagaaaattcctagggagatacannaattatagcacatctcatctaccctacgattcattgacatantttacttctaatt

SEQ ID NO: 135685 - DNA, 269 bp, Glycine max
  unsure (1)..(269): unsure at all n locations
agcttctcccccaagtttctataaatagggtgattatttcagtgagagaaggctcaccccctcaggcactgctctctctctcaaattcgcctgacaaaacggcgccccgtgaagagaatccaanccacgcactgccgaaacgcctccgtgaggaatatcgcgaaggctgcgaccgctctacgacggtcaacatcccgcctcgatcgcccaccagatcctcaacaggacagcacctccaaccaagcttatcgatgcatcgctacgcaccc

SEQ ID NO: 135686 - DNA, 432 bp, Glycine max
ttcttctgtaggaatcttctggagggcccaagtgggcctggttgctatttacaccccctgtttactaaatgcacccccttttctatttttttgtaattctttttccgtaacgttacgaaactttacgaatttcgtaacgatacctattttccttccgcaaggttacgaatccttacggattatgtattttactcttctttagctttcgaagaagttacggaaactcacggattgtgcaaaaacacctcttttcgatttccgccacattacgaaatttcacgaatcacgcaagcctgcttcctttcgtattctgagacgtctcgggacaacattttttgcacctcatctagttataatccccggacgaaattatggtatgacaatatgcacatcatgtgaagtgctatagataataatatcatcatagttcac

SEQ ID NO: 135687 - DNA, 361 bp, Glycine max
  unsure (1)..(361): unsure at all n locations
cttaagcgacgcagctgcagctttccccaatttctaaaaagggtatatgtgatgtagacaagggtncagctcccttaggcacttctatctctctcgaaatagctgaggaaaatcaggtctgtgaagaaaatgtaagccaggcactgccataacgtttccgtagcgtcgccgtgagtaatcacacgaagattctcgaccgttcttcaagattcatcgtgcgttcttcgttctcttcagtcttcaacgggtaagttcctcaaaccgagcttatcaatccattctatggacccgtggtgggccacactatagcacatgtcttgcttatactcgnacccatctaccgtcgataccccctgttgac

SEQ ID NO: 135688 - DNA, 319 bp, Glycine max
  unsure (1)..(319): unsure at all n locations
agtaanaatacctgggtaatagtaactatccaaaagtttgccttctcaagatatggcccctaggaaacttgcctcatataggatcacgatggataaggcggccgaaggaactagttccgctcctgactatgacagtcaccgctttaagagcgctgtacaccagcagcgcttctaggccatcaagggatggtcgtttctccgggagcgacgcgttcagctcatggacgacgagtatactgatttccatgagaaaatatggcgccggcggtggacatcactggttactcccatggccaatgtcgatccagaaatagtcctt

SEQ ID NO: 135689 - DNA, 272 bp, Glycine max
ccggaatttataatagcaaacccggagtcgcgcccgtactgtgatcatggaagacctaaggaaatgatatcattactatacacggcgggagcataacactaaatataattataccagatgataatgattgctactaacgaaaacaattaaatacaaatacacctgatacggaactatgtcactccagctctgacggaaactgctcgtgccccgtaagtgccgccgctggtacagattgtccatacgccaaagtgggtacagaaacacatcac

SEQ ID NO: 135690 - DNA, 381 bp, Glycine max
aagaataactgtcttccatccattcgctgcaacttcaggtctaaatgagcaacttatgccaagattatactaagagaatctttcttagatactggagataaagtctctttgtaatctattccttcctttgagtaaatcccttagcaacaagtcttgccttgtatctctcaatgttgcctaaagaatcccttttggtcttatagacccatttacatccaatggcctttgccccattatgcaactctacaaggttccaaacttttgtactttgcatagaattcatctcatacttcatggcatcataccataaatttgactctttacaactcatggcttgatcaaaagttctgatcattttagctccatatttactcaaatctt

SEQ ID NO: 135691 - DNA, 463 bp, Glycine max
  unsure (1)..(463): unsure at all n locations
agcttgctgctcatttgctgagtatgttactgtatcttgnagagggttcgatggaacctgtatttatagtagttgagtgtgactgttggtccttgtttgtaagggctgttatatccnttgcaataattctcggcttgtagataatagccagggagctttaagataatgctagagataaacatttggctatagatcaaaggtagaagataatcgtatcttgtagataatgtgtggctttatagataattaattacctgccaacagataaagttattcacatacatttgaatattaataggttaaggataacctacttgtatggagcccgactgctcatggtctagcattcgcgctcctataacaggattgctnggatgattgacacgtgccatatagtgccatgttggatgccacgtgtgttttgtgggtcctaggacagtcattagccctctagctctgagtc

SEQ ID NO: 135692 - DNA, 232 bp, Glycine max
  unsure (1)..(232): unsure at all n locations
ctacgatcaactagatcacacagacagagatgggttgcctctcagcaagcactaacttaacgtcactagctcgacgcatgatacctcaaaggtctggagctagcttggatcttgccatcataaccatctaattcttaacattatcatcttggaacaaataatcgcggacaagtcgagtgctntctctgaatcaaacaaattaaatgagatcgtttgatcatctataaccaat

SEQ ID NO: 135693 - DNA, 433 bp, Glycine max
agcttatgatttgatggatgtagacttatttatataattaggaaagcttgataaatatcaagagaggtctaagccatgagaaacgaatgaatgatgaagtgcttgggtataagagtataactaagtgtagaggtcttagaagactcactgagacattatgtctcacccctttaagttcccttcttttcagcaaacaagtgatgatgcatgttgtggaacatggagtcttgttatggagaacatagtttatctacgctttatgattatatgtaatttcttttatatgatgtgtgagacccctgatacaaaggaggacttgatctatccatattataattaaagtataatctgtatattaatttgtcaacttctgcatgataacactcgataaatggttctaattctcaaggtctagaataataagcataattat

SEQ ID NO: 135694 - DNA, 398 bp, Glycine max
gactagcatagactgagtttcatccgcagatccctcttgtgagactagacttatctcaagcagcttacgaaagtttagcctaatttagcctaagctttggccgcagattcttcttgtaagactatgcctagactaaacaacattattgttacaacataattaaaaccaaaacttaatccgcagatccctcttgtaagactaagcttcaatcctacttcaatcaagttttaaggcaacagtacatttcccaatgctaaagtcacctaactatgcacacaaatggatgatcaaaccaaaaacatacaaacattatgcattgaaggaagcattgaacacacaaaacataatcaattagatattaagtatttacaccagctgttcattataaatccccaact

SEQ ID NO: 135695 - DNA, 285 bp, Glycine max
catgcctccaaaactccaacttacgcatacaactcctaattataagacgaatagataaggcggtgaccactaatcattgccctaatagaagcaattggatgggcttgatgcataatcacagccccaatcccaacatttgaagcatgacactcaatattcaaagatacttgaaagtttggcaccgcgagaatggtggcattaattagcttttgcttaagaacactagaagcttcttactggtgtctctccatctgaaccaacaattttcttgagcactttattgag

SEQ ID NO: 135696 - DNA, 343 bp, Glycine max
agcttaaatagagacctcatatttatcattcaattcttattcaatgactgaatttaaactactggaattaaatttccgaaactaaaatgcagaagatcataaaaagaaaagaaataaccaactatcctaaaaaaatcaaattacaactaactaaaagagagataagaaatcctgggttgactcccaataagagtttttttaacgtcattagcttgacgagtcaaatgccttcaaagtgccatgaaggtcacaaagaacacaacttccttacattttcgcctcttaactagagactccatgaaagtcatgtattctagaagcacctttcatatcattgcaaaag

SEQ ID NO: 135697 - DNA, 428 bp, Glycine max
  unsure (1)..(428): unsure at all n locations
atgaggtacacacctctattgcagagcttcaaagagcccaggtagtcgaacagaatgtcaagtccatacccatcagaggctgaaaagagtgtgacgaactaagggacnctatatggccactggtgaagccttggaacgataaaccaagaatgcccgaaaggaagaacacgtgccagcaaaggtctgaggggctntatagggcagcaatagtaagctcaagctccgacgaggtgaaaggaatcatcacgggtcaaaggcatgatcttgaaggacgagctaaaggcttaccttacgttcgagagaaattagacccaacacgcaagcgatactgaatggaatatgtggggcgtcatcgacgagtgcaaagagaagctatactcattggcgactcacgagcagaagctagaggatgagcacgccaagatatc

SEQ ID NO: 135698 - DNA, 341 bp, Glycine max
gggcacaggatgcacactgctcggacaaagctactttcacacacactactcgtaccgtagattacaccaaggaccgccatgggaacgatgggacaatgcttcttgacaccattgatacgtccttggacgtggcgtgccatgaggccatatcctcatgcatctctatcgcataccatgggacatgactattttgagatgcgatcgaaccacgttgctatggctggactcacataacgaaaaaggtctaaatccactcacaaaagtgtcgcagagagtgttgctgctaaaatacctctgaatcacaatcatagtgatatgaagctaataacgagccacaaatc

SEQ ID NO: 135699 - DNA, 378 bp, Glycine max
taatagggtctatggcgaaagtctacctcaaatgtttatataattagagattatggagcgcacgttttactaattaatatctttcttgaattacctttttcgtcacaggatggcatatgtgaacaacaataactatctcgagcttgctaaattagattacaacaattgccaggcactgcatctaatagagtgggggagaattcacaagttagagcaactaaaactattccaatctatataattaatgcttcagtttctataatgtaattgacattattatacttccatttcttaaatgacatgtaacaggtggtactcagaatctatattggacgagtttggaatgaacagaagaacgcttctattggtcttttttgt

SEQ ID NO: 135700 - DNA, 403 bp, Glycine max
  unsure (1)..(403): unsure at all n locations
agcttgtaagattatgggggacccattatcatgtggactaggtggcggtcaggcgatggtgcacaacaagatttccacatccacaaatcacgcataaacccaccatcccctgttgcccaccccaactgagctcacgtactcccacgtagcccatatcctcgtttttctcaacccgggtccgcatcaatcctcccaagcttgcccaacatccaggtaattcatcatccaaatcatcacatactaacaaaccaagcaaaacagggcaaaggcagaaaactctgccccaaactcaaaccanaatcacagcgttttctcacttaaagaccgcaagaacactttgcgttggtgcaattcgttaaccggtggatcgactcgaaatatttactggaagtctctaagacat

SEQ ID NO: 135701 - DNA, 426 bp, Glycine max
  unsure (1)..(426): unsure at all n locations
gcgcgctttgtttctagaattcaaaaacagnaagagagtggcgcttagcgcttcctgccccgctaagcccagcgtgaaagcttaaattccggaatggatctggggcttagctcaagacaacgcgcttagcgccgctacaattaaatatttccaaaggtggagtggcgggtagcacatcatccacgctaagcccactgattaaggttcaattacactgaagatgatgggcttagcgtagtgatgtgcgcttagctgaactattcatccaaccaatcaggtgtatctgtgcttagcgtgtgaaaactgagcgcttagtggatagacaattgcgaaaaaacatttgagtctttctctgtttatctcttcgcacaagcttattacaccgcgtttattactaaacaagctaaaataatcacaatcacaagt

SEQ ID NO: 135702 - DNA, 430 bp, Glycine max
tctacactactcgttagtgaacattccatttcctgaccagatgattaaccaagaggatctctctctctctctctctctctctctctgtatatatatatatatatatatatatatatatatagaaaattcggtgcttcttatttattgaattgaagcaggttcctaacaaataaatctcttagcggaccaattcatgactggattctgagctccaagaataatatgttagcatattttattcatcgcgttctctctaatttcataatttagaacctctacagaattacaccatatactatatcattgatacaatgatactaattctttcagctctttctcgcgactaatctcgaatggtaattttatgattaaaaaataaattgaatcctaccatatgtttctctttcatagacttatcttacaacaatct

SEQ ID NO: 135703 - DNA, 308 bp, Glycine max
atcaagctagagatattcctgaacccaattgtgtgacggaggaacttattgctatccatgaatcatcagagcttaattcatagcctctaacgccgataatgccatcaagaatcccttttctctctgcgtcagtgtcatccaagttcgcataacagacgacattggtgactctagaatggtagtctttaatgagataggcgtcatcaaatacgaattagaaatgatttaaattacaatatactcactcgaacatatcatatctcaatctatatttcatctttatttcgatattttatttcaataatccc

SEQ ID NO: 135704 - DNA, 422 bp, Glycine max
  unsure (1)..(422): unsure at all n locations
tgttttagaagaaagaatttgccttatagaaaactcatggtcaagttgaggtattgacagaatagcttaacaagcataaaagtcgggctaaatatttagaaacttatgcacaccgaggagaagaagaaatcatttgacttaaggaggaagttaatcaattgaaggaaaagcttgttgatgtagaaacagctagggatcaatggtaagagcatttcaagaaagtagtcaaagactctttcaacaatgccctgagacaggtcgacttcctccatcctaaagacaatattaaaattctctttgtaatcctttctgtcaggttgttgatgagtaattctctgtttggatggatggtaagctttgttcaactcattctanggctccttgaactgtgaatgaaaattttgtggacaggaactactaat

SEQ ID NO: 135705 - DNA, 143 bp, Glycine max
accccggggcccgccacaccgaagacgaaagggagcaacaccaaagccagacagtaaccgcaaaaagcgagcagccaaaaaaccatcaaggaaaacagaacaccgagccagaccaaaaaaaccggccccaactgcagacaaga

SEQ ID NO: 135706 - DNA, 334 bp, Glycine max
  unsure (1)..(334): unsure at all n locations
agcttgtaaggttaaagcctcactattgtttcttgctcatgcaacaattgctatccgtggctatacgagacatcttgccatacaaagtcaggntagccataactcgcctgtgctctttttccatgctatatgtagcaaagtcattgatcctatcaagtttgatgagctggaaaatgaggctgcaattatactgtgccagttggagatgtattttccccctgttttctttgacatcatgattcacttgattgtgcatctggtcaaagatatcaaatattgtggtcctgtatatctaccgtggatgtacccggttgagcaatacatgaagatctta

SEQ ID NO: 135707 - DNA, 397 bp, Glycine max
acactggatatcttgatgattatctcgtgggtcatgataccttgtggacgtctagtggggtgctattgtcctataaccagcttgaccaatctcgacccatcccgggcatagtcggtcattgagaacctgtgatgtacctatacaggcgagctcctgtcaatcaatagattaaaggaacatataccacaaagcaaggaggcttgtggtggctggccagctgtgaagctggattgatatgtgagatatggtctctggttatctattaccaagggtgggtaatcgattacattgctataaatgaaacatgacgttaagatgtctctggaattgattccacgggtgtaatcattctcggcttgaaagatgtcagaagcattatgcttctgtgaattttatt

SEQ ID NO: 135708 - DNA, 344 bp, Glycine max
  unsure (1)..(344): unsure at all n locations
ccccacgacacctccagactttaatggcgagggttaccactactggaaaacccgaatgctaanttttatcgaggcaatagatctaaatatctgggaagccatagaaatagggccatatatacccaccacagtagaaagagtttcaatagatggtagttcatcaagtgaaagcataaccattgaaaaacctacagatagatggtctgaagaggataganaaccagtacaatacaacctactagcgcaaaaaataataacatctgccctacgaatggatgagtatttcagagtttcacattgtaagagtgctaaagaaatgtgggacactcttctattaacacatg

SEQ ID NO: 135709 - DNA, 373 bp, Glycine max
  unsure (1)..(373): unsure at all n locations
agcttatcttattcagatcntatntcatctattatttatctcgcccacattntattgcatccactcttatcttatctagtccagattctatcttacttatgggctcggacttatcacagatttttagctttggggctgaggacctatatatcaacatcggggttttaggttacggagtttttggaagaggataataactctagggttgtggaataccagctcttatgactgttcatgcacattgatcacatagaataaaactgcattcttcgcaatgtcggttctgcttcaatctacaatttcgttatctgctgattaatggaaggctaagtctccaacgctgctttctcttgaggatcatacacaactctct

SEQ ID NO: 135710 - DNA, 379 bp, Glycine max
tttttatcggtttatgcagtttatttccgacgagaccacggaatgggcacttgctaccgacaaggactgtgtggacgacactgtctgtgaaaaatacggaattagcatggagaaatgggcccagttttgtcagacccgcagagacccctcgtgggaggtatgtagtttgtcattttagttggtttccagaaaaaatcacttcttataattcattgtagcaatcattttcattaatgttcgatttttgcatgatgtgtggaaaaaagcacaggccattcataagcaaaacattgtcccccacgtgttgtctcgtgggggttatgaatatctagaagaaaattcatggctgagaagacaaatagaagactggaggaagctg

SEQ ID NO: 135711 - DNA, 467 bp, Glycine max
ccgcggctgcagctaacaaatttcttataggtagattctgtctattttatctaaaaaaggtctttaaagaatttgagcttgagttttataataaacaaaacaagccaaaccaagccttaaatataccgagccaagacccttgataagcggctcggctcatttacatctctagtcgtgatatatagtcttggttactttaccttttttgtgttgtgagagaaaaaaatatattaaagagaaatattttattttttttagatacgtatcttttacattctatcttaattaagaaaaaaagttctcctatctttatctgttttatttgcattctctaaaccaaactcacattaatctcttctcgttagttattattcctgtaccgagcattcaatagcaatgattatcttctagctcggatgttcgctcaagtatatagaactatacacctctaacatgttgttagctca

SEQ ID NO: 135712 - DNA, 297 bp, Glycine max
tcctccttcaatcttcaacttaaagagattatgttagagtagagataggtcttaatttctaggacattgatgctttccaaatgatataacagaataatagtacaattatcactcactgtcttcatttattaatccatgggtttatataaccgattacaatctcttatccttggctgccccaagttggttgtcacatatatattagatatcaatataatgaatacagatatatgaccttcgtcacaaacgtatactccttccttatgaatgcatttctgtatgtgacgtcgcacattc

SEQ ID NO: 135713 - DNA, 191 bp, Glycine max
cctaatgctcttgacattttggctggatacctttagttttttgcgatgaacctctagtgctttgtgcagcagtagagctttccttcaaaaattgccatttggggggctccccaaaatattatgaacaacaggtgttctctgctgacactcgaagaagtgtgctggttctaataaaggggaggactgtgaca

SEQ ID NO: 135714 - DNA, 327 bp, Glycine max
  unsure (1)..(327): unsure at all n locations
gaagacanagagctcaaaagtcaagaacactccataataacaaagatgatgatctcaagaatcaaagaatgagttcaagattgaatcaagtacacttcaaggatcaagaggaaagttgaattcaagaatcaagaatctcgttcccagaatcaagatcaagactcaagactcaagattcaggaatcaagagaagactcattccagataattattaaaaagtttttttaaaaaactgaatagcacatgaatttttctcaaaaccttttaccaaagagattttactctctggtgatcgattaccagattattggtattgattaccagtag

SEQ ID NO: 135715 - DNA, 450 bp, Glycine max
agcttatgctgcaaacacttataatatactcttctcaacagcaaaaccaacaacaatagaataattatgacctttcaagcaatagatacaatccaggttggaggaatcatccaaatctgagatagacaagtcctccacaacaacatcagcctgtccctcctttccaaaatgctactggtccaagcaagccatatgttcctcctccaatgcaacaacaacagtagcagtcacaacaaagacaacaagcaactgaggctcctcctcaaccttccttagaggatttagtgaggcaaatgaccatccagaatatgcaatttcagcaagagacaagagcctccattcagagtctgacaaattagatggggcagatggctactcagttgaaccaagctcaatcccaaaattctgacaaattgccttcacaaactatgcagaatccgaagaatatga

SEQ ID NO: 135716 - DNA, 359 bp, Glycine max
  unsure (1)..(359): unsure at all n locations
tcttggacgaattctacaagcatgagccaataagccactgggccatatgttggtgacctgtagagatccatacaaacgcttggatagattaatatatgtatgcacgattgaagtctggtgatgagggcggagacgaatgtacacccaaccattgacgaagaagtgaacatctcagtggtaggcgtccaccaaattcttcatagaagcatgagccttttgtaaatggcgacataaagtagcatgaatagtggtgtgtgtaaccaacaagtcatcaactacttctgcctgagaggtaccctagaggtactgnggtattgacgatgggagcttcccataagtggcttcggatattgaaatac

SEQ ID NO: 135717 - DNA, 444 bp, Glycine max
agctgccttgagaagctagagctcaactactttcacccatctaagaaccaagctcacctccttgacaaaatacatgaggagacaaaaaaaaaagtccctactacaaagactactcaaaatgcctgaaatacaaggctaaaatcctatactactagaatggccaaaatacaaggcccaaaagaaggaaaaacctattctaatatttataaaaaagagtggatccaaccttgacccatgggcacaaaaatctaccctaaggttcatgagaaccctagggcattctctagtagctctagctcaatccttttggagacttctatccaatacccttgggggagaagattgcatcatcctctccaccttggaaaggatttgacctcagatcccaaggttcttcatattttgggctccttccctcgcacctgtaaagagataaaaacatat

SEQ ID NO: 135718 - DNA, 365 bp, Glycine max
gtgcacatcgcggacatgttttcgcatctagaatccacgcaatattatttgtgattctgaataagtgatcattattttttatttcaaatatattgcctcctaatcaatcgagtgttcatcttattattgatttctcatcttccaatcatgtcttgttaaactgcttgatatattgtgatgatgttattctgttacgaataaagaaagacttcactcttgttaatcacattaaggcattcgagaggaaatccttgagtaggcatgatcctcgctcttacagatgaaagtaacataataagtcaagtacttgtgctccctgaggatatgcttatgtaccaccctacgtgtgacattgagaatcttat

SEQ ID NO: 135719 - DNA, 228 bp, Glycine max
agcagtacaaaacacaaggacggctatagagagcctggaggtgattggatacccgatgatatacagccggacagagatccgaaaccaaggggtaatcgggacgtgaagaattagatgcatggtaaaataataaagcacatgacaataatgccgaggcatagacataatcgagaagcaatagctcatgtgcgctgaatagacaaagcggggactgaccatggacaagag

SEQ ID NO: 135720 - DNA, 403 bp, Glycine max
  unsure (1)..(403): unsure at all n locations
tacggacctataaaactcagcttatgacatgcctaagtgattgcaatgattgtgatcgtgtatttaacaaccgcttctggtgagatctctttcatttacaaggcataacactcgcttttagtagcacctatcatccttattccaatggagagactggggtgaccaatcatatcctacaaagttaaaagctttctacgaaactccttcaactactccacctccattaacgacccacgtcactgaaactattatgcctttggtgccttctgccatcctagagagccacatgcttcgtcttggccgtggctacattgatcaagtgttgattcaatgggaagggctntcacctacgacagctacttgagaggacaagaaggctntttgcgacaactatccttacttt

SEQ ID NO: 135721 - DNA, 420 bp, Glycine max
gctactgacttacaattctgaatgcttgttcacattcctggtctttccttggctaacatacaaacttgctcaaattcacgaaaggaaacacaaatctcatcttaagcatgcattcaatttaaaacaaagtcatacaccctgttttcataaaacagatagagtgtttcactgccatgtcatcaaaaattaagttaaactgttcaaaatgcttcaggataagcatactaactattcatatatagaactagcagtatatatagacataaaggaaatattatacgaaaattaaaattataataataataaatcaaaaagaaaaagtgtcatcaagaaataaaaatcctgtgactggtcctgattgcctatatgtaacattcttctcatctggtatattcatactggagcagcgggaggagaagt

SEQ ID NO: 135722 - DNA, 381 bp, Glycine max
  unsure (1)..(381): unsure at all n locations
gcttgctctaaattacatttgatgttgtatttatgggaggaggntgtatgtcattnttgttttaagaatagtgtcccactggtaaaactaactttccaaatggttgccttcgcaggaaatggccccgaggaaacttgcctcaaagaggtccaagaaggacaaggcagccgaaggaactagttccgctccggagtatgatagtcaccgctttaggagtgctgtacaccaacagcgcttcgaggccatcaaaggatggtcgtttctccgggagcgacgcgtccagctcagggacgacgagtatacttgatttcaagaggaaatagggcgccggcggtgggcatcactggttactcccatggccaagtttgatccagaaatagt

SEQ ID NO: 135723 - DNA, 304 bp, Glycine max
  unsure (1)..(304): unsure at all n locations
agaaacctaatcatgcaagcgactggcttatatatattcaaatctctggatgcttatcagaacattggacatgaccaacgcaacttcaaggtggcctgtaattataaactctttccaaagtaccttcagttcagtgaagtaatcagacacagatgatgaatcttatctaaagctctagaagttttgttggcattctgctatatgaacaagatccccttgtgagaacctctctctgagtcttacacacgtatgccgctgaatcatatacacgacttntttcaattgacttaaatggaatcatcat

SEQ ID NO: 135724 - DNA, 245 bp, Glycine max
gagctttgagcacccacgagtgtttcagcaccctagtagcaacagtgtatgtagggttttcttcgagcgaggacaatgtgggttttgtggggttcgagtgaagacaatgtgggttttccggcagtgtagggggttctgtgggttccagcgaggacaatgtgggtgccgaaggagcggatccggcatattcaggccgtagagaatgaataaacatattacgccgacgattacaagaaaaagggttg

SEQ ID NO: 135725 - DNA, 446 bp, Glycine max
  unsure (1)..(446): unsure at all n locations
ccgggattgtacatcatcgccgctgcagcttttatccaggctcatcttnggggtgaagctccttcttccatggtttattccttatttgatggcacctcctcttacctcttctcctttgtcttccactgcatctccatggtggaaaatcaccattaaaggaactcattgaagctcaaagatccatcctccatagaagtcccacaagcaagcttccatcaagtggtaattagagcacaagagcttcaagtaggtgctccttaaacctccattaatttttttgctttaccttatcttccattggtgnttcttcatttttctccatgtatctcctcacatgtcttgtgctaaatgttgttaacatgattctttagagtttccaccaattaaacttgctatagaagcttgatttgattttctatnggtcaaatttcttgttcttggtcttg

SEQ ID NO: 135726 - DNA, 332 bp, Glycine max
aagcttaagctacgccgactctctgctgcaaggctcttctatataatgctcaactccctttgcaatctgatttcagtcttaaataggtggccttgttcgtgctcgtgcgcttagcgcagatttggattgctttgcgcgcataagtggattttggcttagcgcgcttgattcgcttatcggatgagctgaagtggtgcgcttgatgacctggagcggtgcacttagcgaacttgacagctcatcttcttcttaattctttcttgcgcttagccactgagtgttgcgcttagcggatgctcactaaaccaacagatttgcttatcgaaagagtg

SEQ ID NO: 135727 - DNA, 429 bp, Glycine max
  unsure (1)..(429): unsure at all n locations
gctttgaagcttaacaagagtagagctattttatgccttatcttgagataattgagaaacagaatggcatgtattgccagggactaccttcaacctgaaggccaatctttttcccaatactcgaccaaagagcttttgtatatctcttggataaaaaactttttcctatgtaattaaatatatgaaaccattaatatgccactacaatattatccgtgtaagatgaatattgacacatggtggtagatataatatgctttacctcattaataattttatgcttaatattagntgcagtccatttatcagagcataacattcatgatccgagaatgtaaaaatggtagattcacgaaggtgagctactctacctctacacaaacctatggacaacttgtgaataagagcttacacaaaataataaactaa

SEQ ID NO: 135728 - DNA, 447 bp, Glycine max
  unsure (1)..(447): unsure at all n locations
tctgagtcacctgagctgcagctgtatttaaatgtttaanaatacttttaattaatattngaatttttattcctttattaatatatatgtgaggggtagagggtgtcacatatgtaagtggaagtgctagatctaaagagaaggtattgttgtaattgaagttatatactagcagtcgtacataagtcagcatcacctattccttatttgttttggtggttgaaatacctattctttttacaaggtcaagaagtactactttntttattagtctatttagcttatatgaatatttctgccaatttttgagcttgagcaatattctcttttataaaccacttttcaataaaaactgagacaattgctttgatatatatatatatatatatatatatattttcattttcagntatcattggcggaattaaaatacatacaacttcttat

SEQ ID NO: 135729 - DNA, 271 bp, Glycine max
cgaacatagcacctttggagtgctcaatatatgtaggtgcttatctattctcgagagcctgaagaagtgcggtgcactatgtgataaagctctttctaaacatcccttgataccagctgagagctgcccatccattataagatcaaccgagatgctttcctatgcggcgtgtggtggttatcgaagaactgtgtgaacttgacgatccatcccatggcgttggtgctgtctaagcagggaatattcatctcgaggagatcgctggaggaat

SEQ ID NO: 135730 - DNA, 378 bp, Glycine max
  unsure (1)..(378): unsure at all n locations
gcatcaaatcattacaatgagctgcacaaggagtccaataaatatgtttccttttctcctcaacaacttacccgctaaaacatagntgctcccattatcggttacaacttgaacaacattctcttcttcaacttcctncacaatgacatcaagcaactcaaaaagcttttcacctgtctttacaaaatcagagccaccaacagacttcaaaaacacggtaccagcttgagagttaataaaaaaattaatgatgcatctttggttccgatcagtccatgcatcggacataatagtacaaccatacttgacccattgctcctatggcctttcataaattntcagatatcaacttcttcttcagagtggactctgatgcat

SEQ ID NO: 135731 - DNA, 451 bp, Glycine max
  unsure (1)..(451): unsure at all n locations
tcaagaaaaagatggcctcagacaattcacttatgtccagattgttattctatcaatagacctccaatctntaatggagagggtaccactactggtaaacccgaatgcaaattcttatcgaggcaatagatctaaatatcttggaagccattgaaatagggccttatatacccaccacagtagaaagagtttcaatagatggtagttcatcaagtgaaagcataaccatagaaaaacctagagatatatggtctgaaaaggatagaaaaccagtactatacaacctaaaatccaaaaacataataacatctgccctatgaatggatgaatatttcagaagttcaaattgcaagagtgctaaggaaaagtgggacactctttgatttacacattgaggaactacagatgtttaaagatcttcgatgaatgcacttactcatgagtatgattt

SEQ ID NO: 135732 - DNA, 432 bp, Glycine max
  unsure (1)..(432): unsure at all n locations
agctntgcatatttagtcttcgccagggaaaggatcaatgtgggtccgaaaagaggcaaatttgatcatcctactatgacgactgagaaaactggggcaaataaagagggtgagaaagagggagaaacccatgctgtgactggcattcctatacagccaagtttcccaccaacccaacaatgtcattactcagccaataacaaaccttctccttacctaccgcccatttatccacaaaggccatccctaaatcaaccacaaagtctgtctactgcacttccaatgacgaacaccacctttagcataaaccaaaaacaccaacaaaaaaatgatattttgcagcgaaaagcctgtaggattcaccccaaaattcggtgtcatatgctaactngctcccatatctacttgataatgcaatggtagccataaccc

SEQ ID NO: 135733 - DNA, 405 bp, Glycine max
agcttgagcgaggaaggtcttcgtctggattggaggaactcatcatgggttgctcttcacagtgaaatcaaaaaggtaaaaaaagtgttgaaattgctacaaatttcaaaaatattcttaaatataatatgtatagaatatggtagaacaatctagaactataatgtgtatgaatatggtagaacaatctagaactataagtctatgtataagatagaagaatctagaactatcatgatactaatctatcatgaaactctagaaagacctaaagtaatgtagaaacattcaccaccattgagaggttagtaacttgagcctataaataggcaattggtatgttgaattgatcaatccaagaaataatgacatagctttttctaaacaatctctaaactataacta

SEQ ID NO: 135734 - DNA, 439 bp, Glycine max
  unsure (1)..(439): unsure at all n locations
actcagctgtagtggtatacacaaaaattaattgactctatttcttaaatttgtgatactttcaaggaccaaaagcatgcttaactccatantcttattattgtatgcaagttatttaatcaagattatcagtctagtattaattccaaatcatactcatcggcttattctcttttcttccttttctaattaaatccttgtaatttcaacaattgtttttgtcaatagattttcacaaactcagacaaagtccatacgattaatgcacttgaaagacttgggttggaagactgtctttgaggaatgatatgctntgagacccttaatcctatccaaaagagcactggtttttattatgatagctgacataaaattgatggttgcaagagcataaattcaacacctcaaaatggtgtagaatgctctgaaatctttacat

SEQ ID NO: 135735 - DNA, 426 bp, Glycine max
agcttcgttcgcaaatccctcttggaagactatgcctagactaaacaacattattgtaagagcataattaaaaccaaaacttaatctgcagatccctcttgtaagattaagtttcgatcctgcttcaatcaagttctaaggcaacagtacatttcccaatgctaaagtcacctaactatgcacacaaatggataatcagaccaaaagcatacaaacattaagcattgaaggaagcattgaacacagaaaacataatcaattagatattaggtatttacatcggtcgttcattagaaatccccaactagggtgcttagccacccattacaaagaaacccaaacaataataatcttacaaaacctaggtttcaatgagcaagctactcctcttgatgcttctagggctcttttccccaaataggcact

SEQ ID NO: 135736 - DNA, 363 bp, Glycine max
tctattcgttctcatgcgcttagtgcaattctgaaccgcttagcgcggcttttctcgctaagtggatggactaaagcagtgcgcttagcgagattgtccttcactcagcgaacatgcacatcttatccttcttccggattcatcctcatgcttagccgaggattattgcacttagctgatggcttgctaagccagcagattggattatcaagagggtgaaaatcatcacttcaaaacttgtctaattaacttgaaattgagaaaaatgattattaaacacacaaaatggaggaactaaggatttattacctatctttaacagaaattaagtacaacactacaaaataaccatatattggagga

SEQ ID NO: 135737 - DNA, 208 bp, Glycine max
  unsure (1)..(208): unsure at all n locations
ttctatgaccactttttataaatatggangacactttttcttcttttactcatcaatatatgtccaatacacactagtatgccttttgattagtatactaagttgatgacattggcataactatccaatgtgaatgactttatgtctaaatgattgcagaataaagtttgattcattagggctaggtattttattgacaaaaaatagt

SEQ ID NO: 135738 - DNA, 398 bp, Glycine max
gacacttgaatctcaagctggttcctcttctcactacataagaatacctttttttcttcttgggctgctactggtgacccaatcttctaattattccatcatacatgtggatgggtaatccatgaatgacgccagagtccagcctataccttctatgcttttgagaacttatacatcttctctcttgctattacaatggaggcgttataattactagaaaacttcgctatcatccaagtatcatattctaaatatatagcgagtgttcaattttgtgtggacggccgatttggtcaaacatatgcttatagcccgtactcattaagaaatataaggtgggatcttcttacatgttacacttttcactcttttattacacagaggaaacattaccactg

SEQ ID NO: 135739 - DNA, 448 bp, Glycine max
  unsure (1)..(448): unsure at all n locations
atggggtacccgtcatatgtggtactaggtggcgatttgtctatggtgcaaatcaactctcccacatgcacaaatcaaacatgaacccaccatgcccagttggccaccttcaactgagctcacgtactcctacgtagcccttatccgtcgtactctcagcaccgggtccccatgaacccctccaagcttccacaatatccaagcaattcaatttccaaatatcatgaactaccctaaaccaagaaaacagggcagaggcagaaaactctgcccaaaacacattcacatattacaactttccttactcaaatatcccagtaacattctctttgttccggttcgttaaccattggatcgactnngaaaatttactggaggttcctagtacatacatctaaaatttgaccgtggggatctgctagaanatgtccaaaacccactatgtact

SEQ ID NO: 135740 - DNA, 420 bp, Glycine max
  unsure (1)..(420): unsure at all n locations
tttatgaataatatatttcttctctaggtatgtggtcccagtggtcgctggtatctggcagacagtgggtctgtgcctggagatcttttacttataatatgaaaggcacttacccatgctactgttggcctatgtcctgctgcatcatatagagcttctcctgattattttttgagtcctaatggtggaggaaggtaccaaataattcttttaacaaaagtcttgtatttgtgatgactgataagatttccaaccaacttatttaggtactctcttgagctctgtgactgtangacttctcttgcatatagactcatgccacagggcaatgctatattagattgntccctaattgcagcagctggccatctgtatccncaaagatatgttcgaatatctgttagccaatatatggatgac

SEQ ID NO: 135741 - DNA, 343 bp, Glycine max
gagagagaaagctgtcttaaaaaaaaaaatgagggctgagtgaaaaaagaaaaagggtttttgggtttaaataaaagggtttcctctttttctattattttaatcaagctcttgcccatggtcctatttgattggagcaaaagggcccactttctctttttgactgtgacccatactcagtcacaaaagtgagaaaaatctgacctttgaaacgctaaaatcctgcctcggtttgcgtgccatttctctggttccagtttctcgcgtttctctgcgtccgtcggggccagttttcgaaagcaagcaatatgtatatcacaacgctcagaataaaaccccgagc

SEQ ID NO: 135742 - DNA, 497 bp, Glycine max
tactcagcttattatgccaagttgattctacttggaagttcttcaaaaagcttatgatataaggtaatgttcccttcatggtgatgctaacaatggttgtgatattctcacatcttgagttgtttttttcacatcttgtgggagatatattagcaattacccatgatctttgtaatgatttgaaatgcaagaatccaaatattttgaatgcaatgtcgttgggttcaactgctaaaagtttgctccaaagaatgaaggaatccgattgggaaagatatttcaaggaagtcatatcattttgtgaaaagcatgaaatcaatgttcttgacatgatcattttgtatgctcctagaagaggttgagctcaccacaatgttgatcatattacaatatagcattattacccgattaattttgtcattactacacttgacacttctttacaagagcctaatattagattgtgtgataatacaataaaggttctttctttgagt

SEQ ID NO: 135743 - DNA, 348 bp, Glycine max
aggggcgaaactattgcaacataacccttaataaatttgtgataaaagccagttaaccccaaaaaaccgtgaaaagccctggggggggtccaaattggcttaggaagcataacttgcactttatcatgggctagggccactctttagggcgagatgatattggccaggtaattgagttgattctgagggagataacacttaaactggctaacaactggattgtgcttctatatactgaccaaatctacctctttagtgtaatagaaaccctaaccacgctgtaactctgttcattatctaatctctgcctttatcttggatatggtttatggttcgtctctctcacct

SEQ ID NO: 135744 - DNA, 409 bp, Glycine max
  unsure (1)..(409): unsure at all n locations
ttgatcaaaacaatcatctaatcattccaatccactcaaatcatacaattgctcattctaatcatactcaaacacttatttcataccaaacaatctactgcatatcattttcaatcaattcactgttcaaacacgcttttggtacaagcaaacaactcanagtgctgaaatttaaataactgaaatgtaaaaactaaaattaaaatgactaaacataaatcataaaataactgaaaataaactaaaatgttcaagatgcacaaatttaaatgtcttgctcctgtggttgctcctctgcatgctcattaaggtccaacacctgagcagctggtgaatcctgagagataggctgctctaactcagatgttggtgcaaatggtatggcatcatcaggtgtgggtgctgagga

SEQ ID NO: 135745 - DNA, 414 bp, Glycine max
  unsure (1)..(414): unsure at all n locations
cttaatggatgtagcatcagaaatattctctatctcatcatcatctaatgcttgaaagatgaggaagaaagctctcttgtctctctttcttgaatcctttaaagattccttttgcgcttgggataatgaagtctaatcttgccgcttcttatagccttatttaaccattttccaaacatcatgtgctctaagaagggccttcactttgatgcttaaattgtcatatgtgcttccctttaaaagtgtaacattggaggatgccgctccattgcttgccataactaaagaagaaatatattaatataggtgcttctcctcctaagatttnctgtatcatttgatctaaatatttcatgtattagtgactacttctatcgctcattcccgctggggcattaacccattcctgctttg

SEQ ID NO: 135746 - DNA, 414 bp, Glycine max
ctgtagaactgtcctgaaatgtcacaccttggacatggttatttatctcattaaaatgctgctataggtagtctatataacaggtgttgtactcttttccttggctttttatccctataaaaatgtgaaatgatttttctcctatgttttaatgaggaacacctagtagcaatcatcaatgaagaatttcttctttctttattcacaatcgtgtgtcattattaattaaacaatttccttcccatataccatctcttgctaatgttgaactcatcattattaatcaataagttccttccctaataccctcttcagatgaggttcacgtatcataattcgtaaatagctcattgcaaatacctctgtgacatggttgacttccattattattaacagttcttccaaatacctttc

SEQ ID NO: 135747 - DNA, 358 bp, Glycine max
  unsure (1)..(358): unsure at all n locations
gcttatgcgcatatttccttatgaacggttacttgtacaatacatcctattaactaagaaaaatgcacccatataccatcaaggtagcttcattacctagattatttacatgtacttccaaggtgtatttgttatttacatcacacacgcctccttggcttgaattacatacatgcatactcaaagcattttggggtaccaaaaactgcacatgcgctcatcttggtatntctaatacccatgcatatacaaacttcacgatgaatcttgactacctacacaataaggggctacattncatggcttttttcacagttttgtacctacagccacatgcanattcaagcatattttcctt

SEQ ID NO: 135748 - DNA, 320 bp, Glycine max
  unsure (1)..(320): unsure at all n locations
cctgcctctactggtgaccacagaatggtacctggagatatgttgcgggggtcaggagaccttggggacatcatgtggggtgctattgcccaaaacccagctttgaccaatcccgacccaacccgggcatagtcggtcagtgagaacctgtgatgtacctaaacaggcgagcttcttgcagtcaacagataaaagaaaacaagaccacatagctaggaggctngtggtggctggccagctgtgaatttgtgtaatatgtggatggaggcctctggtaatcgatgaccaatggtgggtaatcgattacatggcttaaattg

SEQ ID NO: 135749 - DNA, 219 bp, Glycine max
cccctcattaagaactagcttctttcttcctctattgcccttagttgaatacacctttgtttggttctctatgtgggtcttaaccctcttatgccacttctgtacaaactctgacctatattccccttctttatgtataatagaagtgtcaagtgggaggggaatgaggtctaacggtgttaatggattgtacccatagacaacctcataaggggattg

SEQ ID NO: 135750 - DNA, 353 bp, Glycine max
ttttacttttacttctatttctttatatcttttgtgtctaaatatatctatgatattaaaattaaaccaacctgaatggtatacaaagatcaagataaacaaaccaaaagaaaactaattaaatttcatatataatgaataattccacttatttttacgtatgaataatacaatgtagtcaaataaaaaaattatttaatcaacataattagaggtatttaagcaaaataaaaaagtaaattaattatcgaatgtataaactaacaatgtcttgtaagaaaaattgtgaaaatatacaaatatgattaacaacatatgagagttttttctatatcactatagataatgaaaaa

SEQ ID NO: 135751 - DNA, 393 bp, Glycine max
tctagcgtacccgctattggtgctcagaaaatgcccctattctttatctctcttattactagctattttgaattctttagttcctgaatgtacaaccttcatatttgtgctcgttcccgtatttgttttttgccaaaaagaaaattaatcttaaacaattcaggctgaattgttatcgttattattactcgaaccataaggaataacagcttaacaagtaattctatatgcaactcttaaattatgtggtatgtttgtaattacaattattcttcaatatctaatatttttaaatctactcaagacgcctgttaaatataaatatgaaattaaaggcgatctactgataatatcaagcactctgctactcacatattatgatacgcgtcattt

SEQ ID NO: 135752 - DNA, 80 bp, Glycine max
tcgcttgtggagctctatggagactggatctaagagcttttattatgtcctttaatggtgactttccaccatggagatgc

SEQ ID NO: 135753 - DNA, 355 bp, Glycine max
  unsure (1)..(355): unsure at all n locations
catgaaatgtatgctgagcgaaattgcatgcttagtctgaaattgcccgctagcgagagtgcgcgctaagaatggattgcgcgttgaaccaactggccaattcttccaacttttctttaagattttctcttccagatattacattaattntcctgtaaaacacttgaaattttcatcttttaacttctactaataaaaaattacaaagatattaattctttccgtacttcattaaaaacaatagtagaatgaagaaattgtaatcattattaaccaaaattgactatcaaattnaacttaaatttggcagtatcatttatcatacaatagggttaaaaaataaaaacatcaacga

SEQ ID NO: 135754 - DNA, 421 bp, Glycine max
  unsure (1)..(421): unsure at all n locations
agctntaatattttacagntattcctgtattaatataatttctcttatccgcaattntttcaaattttttgtccttcacttggagggaaccacccgtactatttgtcatgtgagaagaaaaaaactacccactttctcacaccggtagtttattctttcccttttataagcaccttcccaattggcaattgatttatgtataaatgtataaaaggaatttcaaatgataaggggatttataattgagaattttaaattaaatttaaattcttctattttatttattgatgaaaaaatacaataacaaaatagaaataccaacataatatcatgatatatnagtgtattggattagtatatctaaaattaataagaacatactgtgaatatcaaataattggtttctaaaataattattatg

SEQ ID NO: 135755 - DNA, 398 bp, Glycine max
  unsure (1)..(398): unsure at all n locations
acacacataagatacatctgcgcagaggatgttgaagcagtcagttttgctgccactgcagcagctgcagacttgcgtggatcttcctcaatgtgtccagattattgagaaaatgacacttgtggtgtgtacattaatggagccgattgctccctctcactagaaatattaaaacttgcaggagtcatggaggttngaatttcctttgagctctgctcagctaatgatggaatgttgttgacattcagtaattgctggcaggtgttggtcgcccgttctgactgaacatgtgcagcctgaatggttaacacaagcatcanatataagagaaaccatgcttacaccaaagtgacaatttcaatacataatacatgagatgaagtaattacttctaccat

SEQ ID NO: 135756 - DNA, 411 bp, Glycine max
tcattcaatctggtttttcagatagcactcttatttacattgagttgggcctcgcggaggttataattactaacaaaactaacttttgtcagcttaaataggtaggcttaatcatacattttaattccaataagtttttttttcttaacaatttaaatccaataggtaacctaacttaatggcttccagattccttaatttttcaacagctaattaactttctaatttccaatcaatttaattgctagttctggtaaatataccaaaattaagaactcgtctcttaggggacgttttgataattaatatgcaatggtggcatgtgtgagaaagtgatcgattcgtggcacacgttcaaaattaataatgtcaattacttttttctgacgggggggagactgaataccattt

SEQ ID NO: 135757 - DNA, 249 bp, Glycine max
cttatgataagccggtgatgaacccaatactggtttcccttaactttctggtctttcttcacgccgcattccatgccttgggaactccttggaagacccttggggtgtgggcactaaaaccccgtgcgaagaaaggcgtgatgctttcttctaatggcgcttctcttatggggtaaccaaactgtcttatggcgagaatgggattataattaatacaaccccttggtcccataagggaacatttggaca

SEQ ID NO: 135758 - DNA, 459 bp, Glycine max
atgcgagacagagaccaacatgttagctatcatctgccagtacgaagaagagttaggtctagccacggcccacgagcatagaatcgcggatgagtacgctcaagtatatgcggaaaaagaggctagatggagggtgatctactctttacaccaagaggcaaccatgtggatggatcggtttgctcttaccttgaacgggagtcaagaacttccccgattgttagctaaggccaaggcgatggcagacacctactccgcccccgaagagattcatgggcttctcggctattgtcagcatatgatagacttaatggcccacataattagaaatcgttaggaaacttgtatggtctcttagaccttgactagatatgactctcttttcaaataaaatgagatgggtccatgtttctactccataaagcttgtgcacatcaaatcactcctacacttatctct

SEQ ID NO: 135759 - DNA, 241 bp, Glycine max
atgcttccaatactggtttccctaagctttttggcctttcttcaacccccattccatgccttgggaacttcttggaataccctcgcggtggggtcactaaaaccccgtgcgatgaaaagcgtgatgctttcgtctaatggcgctcctctcatgggggagccaagaattggtgcacaacaaacaattcttgcgccgctcttttcacatccccggtcgaacgtgtcatacatggcccaaatgg

SEQ ID NO: 135760 - DNA, 481 bp, Glycine max
  unsure (1)..(481): unsure at all n locations
gaaactaagcctncaattagtgtaccacactaccgcggctgtgccaagctatctttatagaagtgtattaatagcttctcatctttagagtgggcgcccatcttacgacagtacatcttgagatgattnttgggacaagtcgtccctttatacttgtcgaagtccggcactttgaacttcgggggaataacaacatcgggtactaagcaaagatccgtcatgtctgcgaacggataatccccaaatccttccacgaccctcaatctttcctctatgagatcgagcttcctcctttcttcagttgctggaggcggcccttccatggacaaaactataggtggtgctgcgatgttgggtagaggcaacatgcctggtgccggcccttctgtgatcggtggatagaactcgacatcccttcgagcatagtcttgagggtctttgggactacatcacgctgctgatgaggctctctttcatggac

SEQ ID NO: 135761 - DNA, 394 bp, Glycine max
tgaagcccatagggcatcatccaacttcacaaccaatccttccttgaggatgcaacaatattctccagaattttcttcaattctttgttggatacctcggcctggccatttttctgaggatgataaggtgaaactaccttacgtttgacattataatgcccaataccttctacaactatctattgcagaaatgtgaaccctatcactgattatcactctggagaccccgaagcgggagaaaatgtttctcttcaggaatttgatgacaatcttggcatcattctttgaggcaaccacaacttccacccacttggacacttaatcaacaaccaccaagatgtactcattcccataagaggatggtagagggcccacaaaataaataccccaacag

SEQ ID NO: 135762 - DNA, 365 bp, Glycine max
cttttattggttaccacagagtggtacctggagatatgtcgcgggggtcaagagaccttggggacctcagggggggtgctattgcccaaaaccaaacttgaccaatcccgacccaacccgggcataatcggtcagtgagaacctgtgatgtacctaagcaagcgagctcctggcagtccacagataaaaggaaaacaagaccaccaagcaaggaggcttgtggtggctggccaactgtgaatatatgcgaataattggatatgtggcatctgcgattggctatcttgacccgacaccttaaacatacgctctttttcgttccttctaggtcccaatctttcttatatatatcttattgtttattt

SEQ ID NO: 135763 - DNA, 452 bp, Glycine max
tctaagctctttcctcatcgagataagcgatgtatgtataagtcttatctctattaacagaattatgtgcagaataataaaataattttcattaaatgttgaccactctacttgtgtttaattagccaattccaatcttctggagatacatatttaggcctaccctgtatcattaagataagcttgatgttaattatataacttattcttgtattgagattgaatttgcttcattgcatatgccttcatctcatcagataaactaaaagcatccttatatcacatagtttcatcataataagtgaaaattaaattctctcaagatacattattcaacccatttgaatatattactaatatttcaatatatgaaaatatctgatataatgtacctaattatatactaaccttcatgtgggccacacttattctcattattctacttatttact

SEQ ID NO: 135764 - DNA, 353 bp, Glycine max
tggtctttctcttctgtttcaagaatgatatgtacgatatttatgaatctgaattctgcgaaggacatttgggactacctcaaatcagagtattacggtagtgtgcaaactaaaggtatgaaggcacttaactcggctacagaatttgagatgcatagcatcaaggagacaacaactatcaaaagttatgctgacaaacagttgagcatagcaaacaacgtacgtcttctcggtaaggattctcttactaaatgatagtgcaaaaaataattgttactatacctgaaaaatatgaatccaaaatatcaactttagaggagtcaaaagaatcgtcaaatatcacccttggagaa

SEQ ID NO: 135765 - DNA, 130 bp, Glycine max
gggggagcgggaaacccccccgcccacaacccggaaacggaaaaggcaagcaggaaccaggaaccccggggggaaaaaccggcagaagaaaagcacgcaagcccccaagggggcaacagcaaaaaaaggg

SEQ ID NO: 135766 - DNA, 414 bp, Glycine max
  unsure (1)..(414): unsure at all n locations
agcttttacgtgtagagaaatcagaccttattgtattatactttcaatggactggttcattttgatttggtggaatattcaattagaatattccttccatttgcaggattaatgatagcccgaagtatatattcagaccttggcaattaaaaacttaaatatcgaggaagtaaaccaaaacactaactatatacaaaacttcaattctgaagagaagttaccatggatgttcacgaagatgcagactatggcataaatccaaagcggccagcttgcaaaatgaaataaagaaaaaagggtattcagctctaangtttttcattggttttttttaataaaccttttgattagaaaaaaaacattggtattttctacaataactctggagtttctcacaggaaacattatttctat

SEQ ID NO: 135767 - DNA, 424 bp, Glycine max
atactcaccacctgtattagatctaataatttttgcctttctgtctaattgtcttcctacttcattcaagtaaattgttcatgcatctactggctgagatttctaatgcagcaagttgacataatcgtaatgtgaatagtgatcaataaaggtgataaagtatctctcttttccgaaagagttagcatcaaaaggtccacaaatatcagtttgcacaatttcaagaagctatgtgcttcttgtagctcatttcttagattgtttagcttcgtgttcctttaatacaaccaacacaaatattagatccataaaatctagacaaggaataagttcgttctttaataatctttccatcctctctctagatatgtgtgctacacgtctatgccctaatgaaagcacatcgttgattcactaaactaca

SEQ ID NO: 135768 - DNA, 310 bp, Glycine max
tacttctttctagaacccttattacctcatgagtggcaaacaacccgcttaatagtagagcatattatggtttcatttaacactggttaccagaatactcaagtcttcacataacttttgctttaatgattcctcatctcttactactttttatggaagcaatgctttccaagattattttgatgatgccaaagactcaagtcaagaatcaagagtcaagaaagtttcaagaatcaaagattcattcaatcaaagcaagtttcaagaatcaaagagttggtcaatcaagattcaagattcaagtaaagat

SEQ ID NO: 135769 - DNA, 423 bp, Glycine max
  unsure (1)..(423): unsure at all n locations
tagcaccncacctgacgtgcgcaatgtcttctgatccccgcgacatatcttcaggtaccactttgttgtcaacaataaaagcaggaagtttcacccttcaacactttctcatctcaagcttgtatgattatggggtacccatcacatgtggtactacgtggcggtcgggcgatggtgcacaacaagttttccacatccacaatgcgcgcataaacccaccatccnctgttgcccacctccatctgagctcacgtactcccacgtagcccatatcctcgtttctctcaacaccgggtccccatcaatccttccaagcttgcacaacatgcaagcaaaacaacattcaaacagcacaagctatcacagtcaagcataacatggcaaggcagaatactctgctcaacacaccaactcaaaatacag

SEQ ID NO: 135770 - DNA, 265 bp, Glycine max
  unsure (1)..(265): unsure at all n locations
acatttctgaaggaaatgcgcaaaatattcaaaagaagggcaaaatggtcacttttaaggcattntttcagccactgggcccacctgggcaaagtgagctcgcctgggtgagcaagttacttaaggaggaagcaagcagcttgcctaggtgagctgttgtgcaacctccacccctcatttcctataaataggcgtgagggggctgaggagaagggtcgagcatctgaaatcaagaganattgagagaaattagtgagaagaaaga

SEQ ID NO: 135771 - DNA, 261 bp, Glycine max
taatgagaaaactgatgctaatgaacatggtgaggatgaagtataatcccatgctgttactgccattccaatacaagcacagttcccaccaactccacaatgtcattactcagccaataacaaaccttcttcttactcaacgcccaagtatccacaaaggccatccctaaaatgaaccacaaagcctacctaccgcactttcaatgactaacaccacccttatcgttaaccataacaccaaccaagaaatgatatttgctg

SEQ ID NO: 135772 - DNA, 252 bp, Glycine max
  unsure (1)..(252): unsure at all n locations
cataaattgaaccctgaacttaaataattatctcctgataccttgcttagattgtaagagagcatatggttcaagacaaaatttaccccaaatttgggggagtaaaagcagttagaatgcaaagaaaaagggtaagcatcaacacacacaacanatatgttgtatgtaaaaaaaaaaaagaagaaaagtgtgctgatgtaacagggtctaaagcaaatgaaagtgagcangccccagtgatatggcatttta

SEQ ID NO: 135773 - DNA, 156 bp, Glycine max
caaaaatggcacaatggatgcacaaaagatagttatactatgcacgcaacttcctatttgcgaatacaatgcattattcaacgggattggtgaagaacaaatgaaatccacaaatatttaatttattgtcaaaacaaattcaatatttgtataatc

SEQ ID NO: 135774 - DNA, 407 bp, Glycine max
  unsure (1)..(407): unsure at all n locations
ataaatactaagctgcctgcccctgttatatgagggactatggttcttttaatacaaattcctgggataaaggagtgctgccatgtttcaaagcccgtacaatgcatacaactccttatcataagtngaatagntaaaggaaggaccacttaacttttcactaaaataagcaattggatggccttcttgcaacaacacagccccaatcccaacatttgaagcatcacactcaatttcaaaatatntttgaaagtttggcaacacaagtatgggggcattagttagcgtttgcttaataacattgaaagctctcacttgtttctctccccattttaaaccaacatatttcttgagcacttcattgagaggtgctgccaatgttcctaaatcctttcacaaactgctat

SEQ ID NO: 135775 - DNA, 461 bp, Glycine max
  unsure (1)..(461): unsure at all n locations
ctatgcttctacaatctcccctttttgatgatgacaacttttgaaaattttatacacactcacactttttcctagtcgatactctcataattctcccctttgttttgaatttatgcttatcttaaaaataagttgattactcatgtgaaatatngatttaatcccatttctcttcccctttggcatcaacaaaaagccaaagtgcgtatcaaataaatttaatccatacaatgttcataaaaaaatatcaaccaaatcatgaagcaagaagcaagaaccatgaaaccatgaagcaaacaaccatgcatagataaattataaactccacatagtcaaataacatacttaatattagttcanacataccatgcaaatagagaaatagtaaattgttcaaatagtataataatatagccaaaatacaaggctganaatcaaagtactaatattaaattataagt

SEQ ID NO: 135776 - DNA, 359 bp, Glycine max
ttgttctaactcgctctcagagttttcaagaagctctatgtttttttcaaaaactctcaagagctcctctctataatgaacatggtacactgtgtacttgataatgaagtcttggagacaaaactcaaagttaacttctctcctttttttcttaatttatgctcccccctctctttttctcctcttctttcctcattgagcatctctcaagctcttatcaagctatctggtgtggagctcttcttcatggctattcctatggaggcgcctcttacttttctcttgtcttcgtgcattcatggggaaacaccattaaggacccatgactcaagatcacctcataaacctacaagcaactt

SEQ ID NO: 135777 - DNA, 375 bp, Glycine max
atttggagcgtctcgatatattacgggactcaatctttcatccgaatttttgttattgccgtgtgaatttgcttacagcttctgtttcaatttggagcgtctcgatatattacgggactcaatcagacatccaagttaaaaggtaatgtcgtttgaattttatacgaggttccaatttcaaattggagcatcgcgatataataggggactctattggagatccgagaaaaaagatattggtcgttgaatttgatacgagcttccgttttcaatttggagcgtctcgatatattactggactcaatcggacatccgaatataaagctattgtcgttagaattgctacacctctgtttcaagtggagcatttatata

SEQ ID NO: 135778 - DNA, 239 bp, Glycine max
tactaagcctgcggggctgttattcctactatttccgtgagcaatggggttctattttaggcgatgagtcctgggtgaagaaaactcacttcccctaccccttttcatctaccacgtgcagggtgtgctcgcccacgctagctaaccctgtgcattatttttttgaaacaatatacagtcctcatgagtcggagttcgcttactctagacacttatggttagatcggctctctatcatc

SEQ ID NO: 135779 - DNA, 325 bp, Glycine max
  unsure (1)..(325): unsure at all n locations
cattggtgattcttcattgttctacctgtatttcctcacatgtcttgggttgaatggtgttaacatgattctttagaatttccatcgattaaacttgctatagaagctagatttgatttcctatgggtcaaatttcttgttcttgttcttgaaccatgaattgtgttgagtttaagttcctttgagttttgtcttgctattttttgtggntgaaacttaaaccgtaaaattcttacaaaaacattaaagtagaagaaaaccttaaaaatctagagtgacatgttcacctattatagttttgtcatagaagtcatgtctagacatg

SEQ ID NO: 135780 - DNA, 347 bp, Glycine max
  unsure (1)..(347): unsure at all n locations
aagctagagnctagctactcatacccctctcataactaagctcacctcttggagaagattcctaaagaagctagagcttagctacacatacctctctaatagctaagctcacctnctctagatgagaagctagagcttagcttcacacccgctataatagctaagctcaccctatgacgaaatacatgaaaatacaagagaaaatccctactacaaagactactctanatgcctcgaaatacaaggctgaaaccctatactactagaatgaccaaaatacaaggcccaaacgaagganaaacctatgctaatatttactaagataagcgggctcatacttagcccat

SEQ ID NO: 135781 - DNA, 253 bp, Glycine max
  unsure (1)..(253): unsure at all n locations
cttttggggcctttggcagagatccgaatatttttatcccccacatggcgaanagccaaggtaagctcaggttatagagatagtcaggaggggtgcatcacacgtctacgaattcttggcatcgcctgcacctnctagtcaagtcatgggtgtcagccaatagcagccggcatacaccattntggtttgcagggagcatccctcagtatggaggtcacaaattccttcgtgaagttctcgcataacatagtct

SEQ ID NO: 135782 - DNA, 249 bp, Glycine max
ctgagttgtatgataagttggtgaatggagattctcctatgacgaggatcaatataagtttcgtgttggacttttttcgtaagggaattgagcacgatgagttgccaccgctcctgctgccactgagccataatgtgttggtggaaaatgaagatggcgctgttaatgatgaagattctttgatgtttaaattgaagactatcgtgcctgtgcgaaaagctggagcttgtgacaatgctgattatttat

SEQ ID NO: 135783 - DNA, 447 bp, Glycine max
  unsure (1)..(447): unsure at all n locations
agcttctctgctttgaaaagtcattaatcgtaatgaaaattaacaattaaacaacaattaataaaagagaagtcaagcttattgaaaagcttgtaaatacttggaaaatatccatttgcaacatgttggtataaaaaagtaacaacgataataaaattaattaaggcgtacccaacaagctttctcttgctttgaaaagtcattaatcgtaatgaaaaataacaattaaacaacaattaataaaagagaagtcaagcttattgaaaagctagtaaatacttggaaaatatccatttgcaacatgttggagtaaaaaagtaccaattatctcactaatgaaacttatatataaaaaacattaataaattaatcaacatgcacctttcaataagcgataatanattaatcaaagcgtataactagagacatgttgacagtaaatattaa

SEQ ID NO: 135784 - DNA, 353 bp, Glycine max
  unsure (1)..(353): unsure at all n locations
gggtcatatagatgtcttcctctaaatccccatggcagaatgcagntttaacatctaactggtccaagtgaagaatctctacagctattatgcttagaataactctgatggtagtcatctttacaactggagagaagatctctgtgaaatcaattcctttgttctgctgaaaccctttcaccacaagtctcgccttgtatcttcttctaccgtcagattcttcctttagcctatagacccacctattctgtaatgccttctttccttctggcaatttaagtaaagaccacgtcttattcttctgaagggatgtcatctcatctttcatcgctagctcccactcaatagtgtca

SEQ ID NO: 135785 - DNA, 383 bp, Glycine max
  unsure (1)..(383): unsure at all n locations
agcttgacattactgcccttattaactggcttgttttgtgtgtcccgctcaacaaaatactttcgacacctactgtacgttgatttaaccaatgctgntatgggaatgttgcgacaatccttcaaaaccttattgatacattctgagaggttggttgtcatgtggccatatcgacgtccttctctatcataagccatcgtccattattcctttgaaatactatcaatccatgtggctatggctggactcagttcacgaaatatttctaaattttgatcacaaatgtgcttgcaaggagtgtatgctgcataaaattagttatgaataacgtggatatgtatatatgaaaggtaaattaacgggaccatcatatatgaaatctt

SEQ ID NO: 135786 - DNA, 421 bp, Glycine max
  unsure (1)..(421): unsure at all n locations
agctntataagtgcgggtctgggagacgattgtcaagtgttcgcgatatgcgaagatgatgttccaagtactttggatttggtacgaccatgctctcttgatttccagctgggaaattggcgagtggaggaacgccccggcatttacgcaacaagcataatgtaaacctttacggtttaaaaagctctatagttgggcctaggctttagagttttcattttgttaaggctttgtgtcttttgtttttgaatttataatacaaggatctttcttcatctgttcctggtctctacccattctcattcatttgcatgtttacttctttttctaaaacggcagattcgatgacgagtcccccgaaggtactaatacctgtgacccgtctatcaacttcgagcaagaaatgaatcaaacggaagat

SEQ ID NO: 135787 - DNA, 416 bp, Glycine max
  unsure (1)..(416): unsure at all n locations
ngagggtaactagatgccttgggtacctggtacgcatctttcatgaatcaaaaatctgcacctgttgccagactctgtggtttatgctcctctgccaaccaccacacagacctttgcccttctgtgcaacaatctgaagcaattgaacagcctgaagcttatgctgcaaacatctacaacagacctcctcaacctcagcagcaaaatcagccacaacagaataattatgacctttccagcaacaggtacaatcccgggtggaggaaccatcccaaccttagatggtcgaatcattcacagcagcagcaacaacaacaacaaccttatgttcaaaatactgcgggcccaagcagaccatatgtttcttcatcaatccagcagcaacaacagcaacgaccctagaaacagtaaacagt

SEQ ID NO: 135788 - DNA, 339 bp, Glycine max
  unsure (1)..(339): unsure at all n locations
agctntgagtttagtgagttgaaaagtattcttatttagcttaattntattgcctttaacacacatacatatatacacaatacaaggcttaatgagaagacagtttgatgggacattacaatgctgtcttctgaaacaagctaaacataaaatacaagcaagcatgaatacacataatttgacatagaagttttctcatctaacttctctaaagactgaagcgcatagattgattttaacttatgagagttcagttcattttaccttcttgtgtttttttctcctataagngtttatggagaaaattattaaaacaggagcttaatctttataaagtgt

SEQ ID NO: 135789 - DNA, 387 bp, Glycine max
  unsure (1)..(387): unsure at all n locations
acagaataatccaaaaatttcaaagaatngtgtgttgttaaagcataacaagactttctgtgattggtttaaagatacaatctntgcagatgataatgctntagaaacattaagaaagctagcaaatgggcctaaaagaaatgttataacttggcaaggatacgacataaacaagtgttcaatttacacaaaatcacaagatgacaaaagttcaatgcagaacaacggcgtcaccctaatggctgaatctcaacacttcgcaagtgtgaatgacaccaatccctgtgtagcttccatcccttactttgtgttcatagatgaaaattgggacttaactatgtgaaattactggatgtgttctaaagtaatggttgacagcacaccagt

SEQ ID NO: 135790 - DNA, 371 bp, Glycine max
  unsure (1)..(371): unsure at all n locations
aatgtaagtaaaaaagaaaccttaatggtttgcccttcaaacatgtattgagttttggttaactccataaaataaaaaaacatcccggtattcttctacatttatctgctacgtattttgtccaagcatgccatagagcattttgttattctccacgtgtcttttgttgttaatttggtgttttcttctcatggattntattaaaatttacaggtggagattttgaggaggaaaatggagggattgtcaaagggcatattattacagagaatggaggatgagtataattcactgctgtccactgctagtagttctcttgctagttctggttcanattccaaaagaactgaatatcaagattcatcttcggt

SEQ ID NO: 135791 - DNA, 176 bp, Glycine max
gtgatttatattagtagtgacttgaggtacacagataagtttttgtctataaaaattgaaaacatgtactaattgaagcgctcattagtgttcgcattggagatactctatggggtttgactaccttgagaaaagagcgagtttgcctccctcccactcaattggaaatacatgat

SEQ ID NO: 135792 - DNA, 411 bp, Glycine max
gcttgctttaaatcttcccctttttgatgatgacaaccctgaaatcaagaaacacatacacattctttttcctagtcgatcactcacttaattctccatattctcccgctttgtttttgagtttaaccttcacttgaaataaagttatttaattatatgagttcttgatttaattcctattttctctccccctttggcatcaacaaaaagccaaagttcgtaagtaatataaaaaccatacataaatgactaatcatacaagagaatagcaaacaattaaacaagataacatagtgtcataccctaatttcgtccggggattattacttgatgacatgcaataaaagaagtcccgagacgtctcagaaattaaaaggaagcaggcttgcacgatccgtgaaattctgtaat

SEQ ID NO: 135793 - DNA, 324 bp, Glycine max
  unsure (1)..(324): unsure at all n locations
ctagctctgaccactggtcttccttcccgcgatgcctcttttcatgtccgcctgagtgggcttatagcctaaaccatacttcccacgatttccttgggtttttatcacgctagttatgccgccattgtctttgcctaaacccatcccgggttcataaccgttccccaacataactcgggccatcattaccgccgcatctgacagacaaagttgcccaaagagggagtccacggaggaaatgctgaccacctcataagactggaaagcggnttctaacgattcttctgcggcttccacataatgcatggaggatgggcagcttac

SEQ ID NO: 135794 - DNA, 463 bp, Glycine max
  unsure (1)..(463): unsure at all n locations
gcttggagaaaagctggaagatgttttgtcttttacatgcccaactcccttgagtggcacttgtattggttggtatattgaatggtgcatcttaagccatatcatatctctttttcatcatgccttatcatgagtaagtaagaagaaaaattaataagttagaaaagtttcttctgaaggcaaaactctttattntaattgattacaaccttatcataatcgattacacaagttttctgaagcttccaaagttatgtctcgtatcagtttaatcgattacaaccttatcgtaatcgattacatagttgtttttggacaatgattgatttattcaggagtctctgctttaatcgattaccatgtgctataatcgattacttctttttccacaagtgtttcagaagtgaacaagaacattntaatttgatactttgagtatctaatggattacattattcttgag

SEQ ID NO: 135795 - DNA, 323 bp, Glycine max
aacacccgagataattccataacttaagacaatatcatgggttatactcatatcgaatatggctggagttattggatgatcaatagatttggctaagaaccaataaagccatttctatttttcttgattttcgatttatttggtataagtcagatactttgacttttaggtcactttatgttttggcttccaagtattagtggtaaagagttactttagggaaataatgcaggaaattattttaaggaataatcctagggatgttagggaatctggtataataagaacttgtacttgagaaatgattgctgaagtgagttctc

SEQ ID NO: 135796 - DNA, 452 bp, Glycine max
aatgaagtcgttatgtagtttaatttcagtctaactaactaacactaatatatagagtgttagtaactaactaactaattacctaatgttagacttttggtaagcataccaattgtcgtcgcaagttatagatttgtaaaacgagattgtctcacaaagactcgagttacttagttcatttggataaaaagtatcagtttaatagctatgtatatatttaattgaaatatcatgggtttgtttattttacgaaagataatctatagtaatgaaatagtggaattacagaaataacggaaacaacgaaatttatcgtgtcagaaatacataaagttacataaacaataataacgaatgtagttaattcaatgaaacgtaagattgaattcatggtcatactctcagatcctaaaagataacatatgaataatttcgacatactgatcacacat

SEQ ID NO: 135797 - DNA, 383 bp, Glycine max
tgaatatgacagtcaccggtttaggagcgctgtacaccaacagcgctttgaggccactaagggattgtcgtttcttccggagtgacgcgtccagctcagggacgacgagtatactgatttccaggaggagatagggcgccggcggtggacatcactggttacccccatggccaagttcgatccagaaatagtccttgagttttatgccaatgcttggccaacagaggagggcgtgcgtgacatgaggtcctgggtaaggggtcagtggatcccgtttgatgccgacgctatcggccagctcctgggatatccgttagtgctggaagaaggccaggagtgcgagtatggccagaggaggaaccggtctgatgggttcgatgagg

SEQ ID NO: 135798 - DNA, 437 bp, Glycine max
tctaagcttataggatgaagtggatggtggaagctacttggccactcttcttagggagaggaatgctgaataggaggagaggattggggttgagtagaaagcatataacgatgtttatgaagcttatgagtgtgggttcaatcactgcctctaacaattactctttgactgtgaggtcccaaatgaatccattttcgacatatacaaagatgtcttagatagagactcgatcttgattgatgacattttggatgaagcgggaccaaatggggggcagccaactacccctcttggtgaaacccaaatgactaattccactgaggaggatgttgacgacgcctctctggggtgaaaggtggaatgacaacccttgaacatgtccttttttgtgtgtgtgtgtgtgaaagtgtttacaaacatgcctctgatatcttaat

SEQ ID NO: 135799 - DNA, 449 bp, Glycine max
  unsure (1)..(449): unsure at all n locations
accgggattgatcatcacctgccngcatgcaagcttgctgatgaaagtgcttctaaaacattaagaaagctagtagatgggcctaaaagaaatgttataacttggcaaggataccacataaacaagtattccttttacacaaaagcacaagacgagaaaagtacaatgaaaaatagcggggtcaccctaagggctgaatctcaacacttcgcaagtggacatgatgacaatccctgtgtagcttccatcccttactttgggttcattgatgaaatttgggagcttaactatgtcaaatttactgtatgtgttttcaaatataaatggattgatagcaacaccggtgtgtggaccgatgatgtatgatttacgttgaaagacctaaagaaactagcttaccacaatgaccctttcatcatggcagaataagctaaacaggtattttatgt

SEQ ID NO: 135800 - DNA, 379 bp, Glycine max
  unsure (1)..(379): unsure at all n locations
tttttccctcacaggtatgtattttctggtagaaacaattttggtcgagacttactggggatatctctccccacccttatttaaactggaggtccacaccgtattggaaattaaccccttctggtgggttccacttcatgggctagttataccttgtaaaatgataaaactcacttagcaggccttaaaatggtttatgctgatcagcatttggtcggcgatgttttttctttaatttacaaaaggaggcaaaaaagagaaaaaggtgaatttggataagggagagaaaaatcattgttggatgtggtangaagtgaaagatgaataatgcaaaggaccaaatagtgaattatttggggggagtgacaggtataatata

SEQ ID NO: 135801 - DNA, 415 bp, Glycine max
taatgtgaaagcattagcctacatggaatctttgtgcgtggaagagcctcgaccagcaagagaatttcaacggcgcatatctgtattatttaattcgaactttgggtacttcacatttgtttataaaaatcatgttcgtttcatatcttgagagaataaatccttccaagttgaatcgtgaggatatatgtcttgctgtgttgttagaatttgatgactcgatcaataattttctttggaatatattgctatttagccgccgcttgagagtgtgctctctttcttgtgcacatgataaaatcacatctttgttgctatacacacttgtaagaactagtgtgtgataaaccaagatctgactatattatgtaacgtctcttattacgttccgtagtattgatgtatcctctgtgca

SEQ ID NO: 135802 - DNA, 379 bp, Glycine max
  unsure (1)..(379): unsure at all n locations
aaaatggaccaattaggtttaattagtagggcacttactggaattaaattggatttgaatttgggaatgtangccacattatgcaagacttagatgttggtaaagcaaactgaaccaatggcaataatgggtataatgtcactattaggcagagttacatttttatcaaaaacaagctggtaggatctaaaatgatgaagagagcaagtaatatgaatgcttgcaccaaaatctaanagccaacaatcatgaagaaaattggaagtagaaataagcatactacttgaggaatgacaacattggtagcatgactttctaaaagattcatcaatnggctatattgttgagaagtaagttgaaactgggaacctaagtcaac

SEQ ID NO: 135803 - DNA, 342 bp, Glycine max
  unsure (1)..(342): unsure at all n locations
tcatacttaagctaggctatctgtttagttntcttttctgcatatcatttgaatttcaatcttaaatgcttcttaaggtgtgtgtgatccttaaatgggatgaatggagtgacatatcttgttattcttatgtaattcacatttatatgaattggtgttgattatgggaacttgtggtgtgaaaagtctcatgatggttaaatgaactatgggagaagtcatgtttggtgagaaggacatgaatggtgaatcggtgatgaattgaacaagatgtgaataatgaattgatgatatgttgaatgtgatatatgatcataacatgcatgcattttatgaatgaca

SEQ ID NO: 135804 - DNA, 423 bp, Glycine max
  unsure (1)..(423): unsure at all n locations
atgcagctntaccatagaccaactaanatggatacagtcctataggagttttgaaactggtttggtaggcccacaaagcatcatctaacttggcagcccaatccttccttgtacatgccataagtcttctccaatattctttttaacttcttggtagagacctcaacctgaccatttgttttgagggtgataaggtgaggtcaccttatgcattacattgtagtgccccaacaccttctgaagttggacattgcagaaatgtgagccatcgtcactgatcaagactcttggtaccccaaagcgtgaaaatatgttcttctttacaaacttgacaacagtctttgcatcattcttcggagtagcaacaacctctaacccattggaaacataatcaacgaccaccaatatgtactcattcccata

SEQ ID NO: 135805 - DNA, 314 bp, Glycine max
atcgagtcagatcatcagaggcgtgacaagagatcttatctgcttctcattatataggccatcagatctatcactgtgtgacagtaattgattagcccatgaatcttctcgggagccgttcacacttacagacattggcatctgctttggctcatacacgcaggaggtcttgacttccatttcaacgtctatggcgaacctatctcatcacatagtctcttcttgatgcaatgcatcaatcaccctccccttggcattctttcggcgacacttgtgcaaattcctgcgatagcttttggtcatgtgtcacagac

SEQ ID NO: 135806 - DNA, 382 bp, Glycine max
  unsure (1)..(382): unsure at all n locations
tcaactttgtagatgcctatatttgagaataaaattatttatttttgtaacgactcatttatttataatatttgaattaattcaaacaaataaaacttttaaaatcttattttatagatgtttaaggtatatttttatcatgggttgttattgtaatgaaaagtgttacaatcaaggtggttttaatttttgaaataaaataaagatagtagccatttttggtgtcactaattattnntaaaattaaatgttaacaaaaaactaatgtttcatacagaaattttgaaaaaagaccaaagcaatacattttgaaacacaaaggaccaaaacaatattttntaaacttaatggaccaaaatgaaactaaagtaaaacttgatag

SEQ ID NO: 135807 - DNA, 341 bp, Glycine max
agcttgtgtgttctgattgtggggagcaattgctttctttatgtccttgctctgaagagatggcctcttcgcaccgcaacttatgcactgttgaggtggggagtgctgggagggtctcattcctcattgagaatgagaataacaatgagagtaccccagtggttcttcatcgtttgaatcacaataacaaggccaaggaggataataataatgaccaggatgatgttgtggtgctgaggaggaacaacaacagctgtgttgagatcaagaggcatcatcatggtggtggcgggatatgagaattcggaacctttcttgtaaaaaatgatcaataggtgtct

SEQ ID NO: 135808 - DNA, 378 bp, Glycine max
  unsure (1)..(378): unsure at all n locations
ttgaatctcagcttcaattcaatcatcaataagaagagtgctgatggatctcttcgtcttataccactttggggcaggaactgtttcttatggctgacattcaccacaactcaaatagatgcagatttcatacacccttcaatacatttgacccactttgggttgaagctaattctctttaacatgtccaatataaagtcccatgagaccagtcatatgccttctcatactctactcttaagacaaggcataattaggtactcctttaggcgcatcaatcacctctatagctatgagtgcactatgaagtaaatgtctaccttcaatgaacgcaaaatgtggctcatctatgatagttggnaacaccatctttattat

SEQ ID NO: 135809 - DNA, 383 bp, Glycine max
  unsure (1)..(383): unsure at all n locations
ttaagcacctgcagcatgcaagcttgcattttggtcttccaaccacttttggttgcattttgctttcatttttcatattcctactcattccaacaagtaagtattcaatccttgagttttttgctttccattggtggattttgttcatcttttggagctctaaattgtaagaatgtgctcatatttgtggggcagttttggggttttttatgcttaattttgtagaagtgaggggttgtagaggatggcctcacgcctatgtggtactctgaaacaatggggcatgccacaatgcccccattctcttgcaatntatgcctaaacacgcgcccaccaagtgctcggtgaaatgccccaatgacatatggatgtgattatgtaag

SEQ ID NO: 135810 - DNA, 463 bp, Glycine max
  unsure (1)..(463): unsure at all n locations
gcttaaaaacaagaaatgaatatgaagtctcggattctaaatctacccgttgaagaacgaataacggatgaagaacgatgaagaaccgacgaaaaccttcacggatttgcttacggaaacatctcggaagcgttactgaagcacctcggcttggattttcttcacggaaacgatttttccaagcaaattcgaaagagagagaagtgccaaaggggctgatacctttgaaacagctcccccctcccctatctatagaaaaaaaaggaggtgcttgccgcccaaagacttaatgaagaagatttcttagcgcacccgaattacttagttcaccccccttttcgtatttacgaaaaagttacggaagccttaccgaaactgtttcgaattttgatttcaccctcttttctgttcccttctaccaatgttaagtggaatatgcntacccaagggtttcggaaattta

SEQ ID NO: 135811 - DNA, 463 bp, Glycine max
  unsure (1)..(463): unsure at all n locations
gcttatgcaatggcgaccaagagaattaattcccatatcttctcttagtattctaaaacattatggatcttntacacatctttcaataaatttatttctaacccatgcgtgacttatgacttattactcacacttttgttccaacaaatcccctcttcccctctgagtctatgaacaaatacataaaataagcaacagataattatctcttaaagattgatacaagaaaaaaagatgttacatcaaatgaaaggaataaatgataagagagagaagtatgatatacaacaaatgatacgatggaaaaagataaaaacaaacaatattatataaattattggatgaattatcatatttctataatctatattactattaggactatgtttcaataaatttcttaacacgcacttattaagaaaataaatttatcttataagttaaaataaatatatttttctta

SEQ ID NO: 135812 - DNA, 393 bp, Glycine max
ctcagcttctggagatgctcgagctggggccatctctttttgtacttctcttggccccataaccaagaacttagcctgtggtctgtagttactgctttaaaagttatgcatcaagagattctctggtgccatgactctattccagctgtgctgctctgatccatatgctcttcttagttcagaagacagtctaggcatgagcatatatagctctggcagtcttaatagaacctattttctacattcctccgcatcagctacccatgtgctctatctattttcttcttcaacttcaaccccaatgtattatgaattattgcttggcaagttacaatggacccaacacgctctgctgtctctgctttcattattctaactgtcctattaatacac

SEQ ID NO: 135813 - DNA, 320 bp, Glycine max
aaactccctgacgagggccacatctatgtgaccaccacgctgcatggtcaaagatttatgccatatctgcctctcgagctccttactgaactcatcatactgtgtcacatacaaatcaacattcctctcaaggaggatgtttctggaatgcatgtgttgctcataccgatcccaggcgacctcggaaatgaatctagtcgtgtcatatggctcttgaggtctggagatggatgatattctctttttggaggccatctgcatcacaagaagcgcaatataaaaagttagacacgctgtattgaagaatgataacacataaa

SEQ ID NO: 135814 - DNA, 457 bp, Glycine max
  unsure (1)..(457): unsure at all n locations
cccgggattcttagtctcctgcggctgcagctttcctcaatttctataatagggggagaagtgaagtggaaaagggttcaaccccttaggcacttctctctctttcgaatttgcttagaaaaattggttccgtgaagaaaatccaagccgaggtgcttccgtaacgtttccgtaacgtttccgtgccgtgatttgcgaaggttttcgaccgctctttgatgttcttcattcgntcttcatcgntcttcnggctttaatgggtaagtacctcgaaccaagcttttcgattcattctatgtaccgcgtggtggccacattgaggatcgagcattttccttctcgtcgtcattactttccgactccttttgaccgctaagccacttattcacatctttttcgctactgctaattatataatttccccgctcttgtatgttctcccgtcctcctcgttaca

SEQ ID NO: 135815 - DNA, 421 bp, Glycine max
  unsure (1)..(421): unsure at all n locations
atttactgcacatctttgttttttatcattctcatatgntgnacattcttttcactgtggtacttcatttcccatgcatgaataacatgcctacaatctggttaaataatgattggaatgtatgtcctctcttaaggaacttatgttagacctatctattgtgaaagacattctctccgattttacatgtgttttacattgtatatacccattctcttcgatttacaatgaaaatactcagctctgtgtagattttttcctcataatcaatctatcatttcttctatttgtgaaataagtcaaagaaggctgcttagagggattctcattttcaaccttcaatctcacccaattagaattcaaaacctattactagtctctggtgtatccgttggtgctacacagtggactagcgatatgt

SEQ ID NO: 135816 - DNA, 312 bp, Glycine max
tacaagaaagcatatatatgatggcattatgatagttgttttcctttaagccagcggctgaattttggggctgcaccatgatgtttgcttaatttgtgtaaaagatgttattcaccatgtacgtatatgtataggataggtagctagagaaaggagcctttaaataagacgtgtatatgttgaataagtggtgaagcactctatgaatgtactcgcggctgcatgcttccctaaatgacaatcttactctatttagtatatcacttgcatatagactgcatataaatttcttacattcatcttccgtcaatt

SEQ ID NO: 135817 - DNA, 285 bp, Glycine max
  unsure (1)..(285): unsure at all n locations
accttncatcactttacatgtctcatgacacctaagtatacttatggagaatcttggattngatcttggaataangggctgaaccatagcagaaattcactaatcataattagtccaaatttggcttccaatttggcttcacaaattcaaattcaaattccagtgaaatttgaatagaaaatcaaatttccctccaactttatgtgaaacttaggctataaatagaggccttgtgtgtgcattttttcaactttgatcatttgagaaaatagacttaaaagttca

SEQ ID NO: 135818 - DNA, 302 bp, Glycine max
ttctggaggggccaagtgggtctggttgctatttacacaccctctttttttacttaatgcacaccccttttctatattgtatggaattctgtattcgtaacggtacgaaactttacgaatgtcataacaatacttatttgttctttcgcaaggattcgaacctctacgaattatgtatttctctttttagcttcgaagaagttcagaacttaggattgcgctaacacctctttcgactttggcacattacaaattcatgggtagtcccgcctgctttctttagttctggacgtctcggactt

SEQ ID NO: 135819 - DNA, 390 bp, Glycine max
  unsure (1)..(390): unsure at all n locations
atcttaattctttttgacatcatcaaaatcttcatgatttacattctccccctttttgatgatgacaaccacctgtaggttaggagccacaacaaagaaaaaatatctatttgaatataatttactcccccttggttttgcaatgattgcttatatgagacagttgaagatttcatatttttcatatgtaaacaaattgtctcataaagaataaataatttttcttactattttatcttttatctttctctcccnctttgtcaacatcaaaaacaaatcatgaatagagaggagaaagatgtaccacttgntgatacatacatatatttatctttatcttgtgatggcatgatgaaatgagtgataccaaggcattaaacaatcattata

SEQ ID NO: 135820 - DNA, 265 bp, Glycine max
tggcttaatacatcgtgggcgtttcttcttgtccaccacctcgggacgatcccagccttttatgacagctgtccaggtactgcgtttcagtgatttgaggaaggcctcccatttttctttccaggattcatagttgcctgcatcaagaattgggggtatgttccctggacctccttctacgtacatgtgtatgagaacttatcccgccatagctcacattgtgatttaaagtgttggctctgtatccaatagaaatattgatacc

SEQ ID NO: 135821 - DNA, 305 bp, Glycine max
  unsure (1)..(305): unsure at all n locations
tttcctccaactcatccccaacagatgcaccaacacctgtggagaccttaacaacacccaccacatcttcatcttttcccaaaccacaaccaacaacaacacccacgttagctccgcctcccttggctggttcccaccatcccgaactcaaaacagtcgcaccaatggctctgctgtcgcttttgcgctntcattcgaccaaccaccacatccagcttagtcgtccggtggctccatcacttcgcaccgcccactgtcattaccgccatgggcattgtcacgaaattccttacgacaatgacacc

SEQ ID NO: 135822 - DNA, 209 bp, Glycine max
gagatttgctgggccgtggggctcccttcctatgtggagccaaccgccaactgagaagacttgtatgtctcacttatttaactggaaagaagtccaagtagagagtgagatgtagtgagacatactcacttaatatgggaaaacaacttctcatcattgtcagagaaagaaggagagggatagtcatctggaatatatcatacccacta

SEQ ID NO: 135823 - DNA, 422 bp, Glycine max
  unsure (1)..(422): unsure at all n locations
agctttcttatattttgctcttcctcattcagctgcctaatatctcctttttccagnttggtaaactttgaatccacttttttcaattgttggtgagcatcaccaaactgatttatgttccattcttttagtcccccccccccccccaaccaggtacagaaattttcatccttgagtcctgcactactttcttgaatgatttatcctcaagccagcaatcaaaaacccgaaatggcttcggccttcaatcagcactaaaggattgcaacaagcaatgattagaaaattacggtccaagattagctgaatgctgtctagccatttggaaaccactctgccgagacaggatcctataatttgctttaggtgtctattagtttgcccacgaaatattacccacataagcacccctcacctcaagt

SEQ ID NO: 135824 - DNA, 168 bp, Glycine max
tcatcgctattagtggccttagcgacatcaacaaggatgtcgttatcacgcaccttggcaagtcccatgtgacctcgactttctcatcaatgccaccatgcacttgtgccatcgtgttgacatcaacgataaagactacctctgtgtttccaaggaggactatctcgg

SEQ ID NO: 135825 - DNA, 263 bp, Glycine max
  unsure (1)..(263): unsure at all n locations
acatgctacactctctctttaggctttacatttcatttttagggcagaaatttaataaaacaaggagtcagccctacatgaattatatgtataacttttcattctaacaagggagatatatatntttttggtaaagaggatatataatactatgcagttgaaattcaattttcaatatttcttttgtttatataataataataataaaaaagtctaactaacccctgaacacaataactcttaggatgagtctaaacagggac

SEQ ID NO: 135826 - DNA, 424 bp, Glycine max
tctaagcttctcgatttgtgatggtgctctaagactgctgcttatttatttaaccgagttccaaccaaggctgtctcaaagacactctttgagttattcaagggttggaaaccaagtctgcgacatatacgcgtttggggatgcccgtctgaagtaagaatttataatccacaagagaagaaacttgaccctaagactattactgggtatttcattggatatgctgaaaggtctaaagggtataggttctattgtccatcccacaacactatgattgtggaatcaatgaatgcaaagtttcttgaacatgacttgatcagagggattgatcaatttcacaacattcctcttaaagggatcactatgaagctgaaccttctgggacaagaaatatgttggtagcatacccaccctcaagtagaat

SEQ ID NO: 135827 - DNA, 132 bp, Glycine max
atggaagcattacagaagtgtctcggccttgaattttcttcttctttttccttcttctaactaatttctctcaaatcctcttgatttcagatgttggacccttcctttagccccccttatgcctatttatag

SEQ ID NO: 135828 - DNA, 446 bp, Glycine max
  unsure (1)..(446): unsure at all n locations
cggagtagagctggatttgtaaaatcaaanagtgattgtgtcatttatacttgtaatttgtgagaagttaatggaacctggtgttttaccaagaactggacgtagtctcagtggtagagatgaaccaatataactctgagtctggtatttcttcgctttctctctatgttcaactgaccttaagtctgaattgattgtttagtcgtttgagaatatcttgtgttttgcaaacttgttttctcatcatctgagagttcttatttcaaaatatgttatgtgttctttttaaggggttcttcttagattgaaaaacttgttatattaagaagagggtttaaaattacactaaaatcacaattcaacctctcccgttcttatgatatatgtctttacaaatactattntgaactatgacagatattttccttgaatctcaagttgatgtt

SEQ ID NO: 135829 - DNA, 394 bp, Glycine max
  unsure (1)..(394): unsure at all n locations
gcatgcaagctnggagctaggtcatgaaatgagggctttctactagtgagggctttcttgttttaattttctacgatgacgaagaccagcagtccaacacaaccacacgacatcgatgaccaagaccaccacgatgccagtagcttaacacccgaaccaaacttgaataaggcagatgagtgagtagacagagtcgcgagagtcattttcggggggttttcgtacgatgctnatttcggttttcataaacccgcggattcggaacagactcgcgagtctacccaaactcgctcgagtctgcgctaaatcggacgagtctacttcgtttttgattttgcttccgatttaactcgccgaaccttattagaatccgaatattgacgatttacgatat

SEQ ID NO: 135830 - DNA, 250 bp, Glycine max
agctgggttcgaggtacttaacccgtgaagatcgaagaacgatgaagaactaatgaagaacgtcgaagaacgggtggaacctttgcgaaattcctcacgaaaaacggttccgaaacatttcggaagcgccttggcttaaaatttcttcacgggaaccattttttccagccaaatccaaaaaaagaagaatggctaagggcgtgacccttttcttcttcacttcctcccctatttatagcaaaatagggga

SEQ ID NO: 135831 - DNA, 366 bp, Glycine max
  unsure (1)..(366): unsure at all n locations
atattccatgctaaataaaatntgaaatttgaaatcgctagtgttggaaactcgaacataccaacttacataaattactgggaattggtcactacagtttttgagctgaaatttctactgaatattctagacatctgagacataattatgaaaaacgaaccaagagatttggactaaagaataaaaaaagaaaaatcacacatgttggcagaaaaattagtgtccacaagagaaaaaagtgaaagggaagtgtggttgtagtttggctcaaaattattctataataggtgcctatattataccaatcttagtgtcaaaatctcaattgagaatatgtgtgagacatctgtaaagatagtgtggatc

SEQ ID NO: 135832 - DNA, 228 bp, Glycine max
aagacctaggcttctccttcttcttcttgttaagggccaggagagtctcaccagaaaccttcacgaccttgaacctgactccaggaatatcacccacggcatgaccctttcgtccaaatccagctattaagactttatcctacaaccatcaaccacataacattatgataagcatatcagcgccaacataacacgcaaataaaggtaatatgattgatgaatcactta

SEQ ID NO: 135833 - DNA, 329 bp, Glycine max
  unsure (1)..(329): unsure at all n locations
tccacattgccgaaaaacgcataaacccgacattcccttgtgcccaacttcaactgagctcacgtgctcgcacgtagggcatatcctcgatgttgtcaaaccgggtgcncatgaaatctgccaagcttccccaacatccagggaattcgtcatccaaatcatcacatactaacgaaccaagctaaacagggcaaaggcagaatactctgacccaaactcaaaccaaaatcacagctttttctcacttacagaccccagtaacatttcctaagttccaattcgataaccgtcggatcgactcgaaaatttactggaagtctctagtacat

SEQ ID NO: 135834 - DNA, 307 bp, Glycine max
  unsure (1)..(307): unsure at all n locations
aactttctttcaaagcaataaaagctttcttttggtgatctccccaatcaaaaacaacaaattttttaacaatttcatttaaaagtgcagcccaagggctaaaatctctaacaaacctcctattgaaacttggtaaaccattcataccacctatatttagttntaaaggttggtttctacccatctccttctctaattctaatttgatgatatccactttttgagtcaattttagagaagacacaagcacccatttcatttaaccaacaagtcgtctaacctaggaataggatctctatacttttct

SEQ ID NO: 135835 - DNA, 285 bp, Glycine max
  unsure (1)..(285): unsure at all n locations
caatttttttataacctagactacttgnaagcgaacattccatttcctgaccagaagaattaccaaaaggatctctctcgctctctctctctctctctctggctatatatatacgcctatatatatctatatatggaaaatggggtgcttcctcattattgaagtgatgcagggtcctaacaaataattttctaagcggaccaatacatgactggatactgcgtctcaaaagtatttgttagcatttatattcattgcgacggctctatttcatatttagaacct

SEQ ID NO: 135836 - DNA, 363 bp, Glycine max
  unsure (1)..(363): unsure at all n locations
agcttgttcttgatanttctaagnctttatcaagcnttgaacaatatacttgcccttcatttaactgtctctgcgcttggcgggcacgctcaacaaagtactttcgacacctactgtacgttgatttgaccaatgcttgtattggaatgttgcgacaatccttaaaaccttattgatacattctgagaggttggttgtcatgtggccatatcgacatccttctctatcataagccatcatccattnttcctttgaaattcgatcaatccatgtggctatggctggactcagttcacgaaatttttctaaattttgatcaaaaatgtgcttgccaggagtgtangctgcataaaattagttatg

SEQ ID NO: 135837 - DNA, 386 bp, Glycine max
gcttaagcttgagaaccagtagcctatttttctctgcagatcatctcacttaggcgcaagttactcttcgcttaagtgccgcaacctcgaaaagctttgataaagtagtttttcactttcaatggcttccaaatcaacccaaatggggtcctaaccatcttaaacatgtttccccacactatatactcgaaacaacaacaatttacaagttctaaacaccttgacatgaaatctacaagaaaatgaccttaagtcgtggtttatggagaactaacttcctacgcttctataacacttctaatgaaggatactccataaccaaacaagaataacaagagtaaggatggactaactcctacatacctcaattggtgcatgaaaatggt

SEQ ID NO: 135838 - DNA, 385 bp, Glycine max
  unsure (1)..(385): unsure at all n locations
agcttctatagaaggttcgntcctaantttctctactattgcatcacctctcaatgagctggtgaagaagaatgtggcatttacctggggtgaaaaacaagacaagcctttgctttgctcaaagaaaagcttactaaggcacctgttctagctcttcctgacttttctaaaacttttgagctagaatgtgatgcctctggagtgggagttggagctgtattgttacaaggtgggcaccctattgcttattttagtgaaaaacttcatagtgccaccctcaactaccccacctatgataaaaagctttatgccttaataagagccctccaaacttgggaacattaccttgtttccagggaattgcattctagtgacatcaatacta

SEQ ID NO: 135839 - DNA, 462 bp, Glycine max
  unsure (1)..(462): unsure at all n locations
ggcagaanagtgtctcgtatggttaatagatacatgcttatatttatcgattacacaattcttgttgagacgatgattgatatttcaagagtctctactntaatcaattaccagctgatataatcaattacttctctcttaaaaagtgttntagaagtgatcaaaaacactttaatcaattacattgagaatctaattgattacatggttcatgaaggttttctagtctttgggaagaacactttaattgattgaaatagtaatatgatcgattacttcttccaaataatcgattacacgtggttataatatgtttctctataaatagtcaccttgtgttctcactcctaataagttttaaagacttttgaatgagcttgattaccagatgatattagtaaagaaagaatagaagatatgtgctcagaaatagtgcgactcgcaacttctattccttgatta

SEQ ID NO: 135840 - DNA, 352 bp, Glycine max
agcttgacttgagtcatcatgagattattaatatgtgaccatgacatgagtttcaataatcatcaatcatctttgaatcatctatctttcaatcttttttcaacatcatctctcaaacatctttcaatcaatctttcaatatctttctaaagaattttctgagtcatttctcttcttctttctaagagtttttgttcaatacattctctttcaagaaaagttcattgttcaaaaacttgggctattctttttcttcattctcttctccctttgccaaaagaatagaaggactaaccgccagaattgttttgtgtatcccttctctctttacaaaatattcaaaggactaacc

SEQ ID NO: 135841 - DNA, 379 bp, Glycine max
  unsure (1)..(379): unsure at all n locations
tcttagtctcacctgatgaattcgtggctatgtcatgctctcctctaatgaanatagcatcacttctggcactaaatagctaggagtttgaagccatcttctcaattaaatntctggcttcagcaggggtcatgtctctaagggctccaccactataagcatctatcatacttctctccatctagctaagtccttcataaaaatattggagaagaagctgctctaaaatctggtggtgagggcaaatggcacataatttcttaaatctctcccaatattcatatacgctctcttcactgagttgtctaatacctgaaatatcccttctgatggtcgtgggcctggaagcatggaaaagtttttctaaaatactctcttg

SEQ ID NO: 135842 - DNA, 180 bp, Glycine max
tccggtggactactggacctcaatatcgccactgatcaatccttgtatctacatacccttaagggccaaatggaacaacactaccaaatcaaaaagttgaggggctctaatcggcagcatatatgagctcaaactcccaagacgtgatacgaatcatcgcgggtcaaatgcaaaacttga

SEQ ID NO: 135843 - DNA, 267 bp, Glycine max
  unsure (1)..(267): unsure at all n locations
agcttctatataagctgtatcatttaattttatatcacaaggtgagtcttattcagaagaatagaggttatctcttttatcttagtgagaatgattctcctaaattcttgagtgattcagaacaccctggctgtataaaagactttcacaacctttgtgtgtgccctcgccgaaagagngattctttcttctttatcttcaccttgtctttcaacccaattcagaaatcactttgcccaaatattcgggcatactccatttacacac

SEQ ID NO: 135844 - DNA, 335 bp, Glycine max
ctgtatctaggcaagggtcttaagagaccatacagagtttcctaacgaccttctaattatgtgggcctattaagtctatcatatgctgacaatagccgagaagcccatgaatctcttccggggcagagttcgtgtctgccatcgccttagccttggctaacaaccggggaagttcttgactcccgttcaaggttagagcaaaccgacccatccacatgggtgcctgttggtgtaataagtcgatcacgctacctctatcctacttatacgcgtatacttgggcatattcgtccgcaatcctatgctcgtgggccgcgggtagacctaactcatct

SEQ ID NO: 135845 - DNA, 429 bp, Glycine max
  unsure (1)..(429): unsure at all n locations
agaggcttctagcacactcgagacatcttcttatttattccatacggaagatcatggacaagtgtcttgtgaagtttaagaccaaatttccagaagattcaacggttaatgaatgctgggcatcgnttttaccgaagcagctgcatgtatctttctttagaagcttcattaagatgctttctctagaagctttctcgtggcttctttgagaagctttctctacacgcttctttgagaagctagatccttatctatctcacaccccctctattaactaaattaacttccttaaaaataattactgttgaatatcacgccacaaataatctaacatctaacatcatttctaatgatatatagatttatatatcatggtgttccaacgctcccacccttctagaaattctgtccctatattacctactcaac

SEQ ID NO: 135846 - DNA, 419 bp, Glycine max
  unsure (1)..(419): unsure at all n locations
gctttggaaaatgatttctataccaaaggtatgtcgtatgaagcaacttatttacttccaccaaattgccggtttggttggccttaaaaaaattaaaaacaattcacttggccttcagtgaccaagggagtggcccatccaaagaaaatggtggttgattcattaaggacatcgaccctatgaactgaatatcatcgaatgcttaaattaatcacttctcacaagcatgaagcttttcaaagataggagcacaagtattagagtcacagctaaaataagctagtaagcatgacagaaatcaaggaaggatcatcaaccaaaacctcacagtcattggttcactcaaactcaagtggttaagcttattccatcataaaaaaccaacacangttccaacctatgcatttcatctcatatca

SEQ ID NO: 135847 - DNA, 419 bp, Glycine max
accctagtgttttttgactaaggatatctacaataggtattattcaagatttggtgtacccatatctttttgggtccaacatagttagtacccttagacatttgtttcttcttatggatgcatctgaacttgaagtgtccagacttaccacaaaagtcacatttgtctgaaatagactatgacttggaggatgttgttcctttttcgaagcccaagccagactggtcatggagatgttgatggaaattcaaaagagtggtgacagtatttgaactttcaagaacttgacaagtctttagtaagacatgcaactttttcccttagtttgtcaagagtggacgtttcatcagtcttactagccagactttagacctcttctagagttagaatcttctttttttatcttagtctgttttcta

SEQ ID NO: 135848 - DNA, 462 bp, Glycine max
  unsure (1)..(462): unsure at all n locations
agctagcaagtgtaatcgaattacttgacttctgcacgcaacacaagaattgttgcactagaattagaaggtactctcaaagagtattctttatgaaatatatctcgatatgagtaatcgaactataaagtattcatattgctaagaacaagaaatcataaacaaccatattatctatgtaattaaggtagaacatcatattacaagcatacatagaattataaggttcctataacaagtatataacgtatatataagaagttagagttaaacagctaataagggtgtattaaggaattacaaacttcaacaactacattcacgactacacacaaaataaagggagttaagtagtcatgcgtttatacatcaagaaagacatactcatncgaggtatatatatacggttcanaaggttttcacaacactaatccatacatcaagaaagaaatagtttattaa

SEQ ID NO: 135849 - DNA, 303 bp, Glycine max
  unsure (1)..(303): unsure at all n locations
agcttgggctgtagctgaagcatagggtaagtttatcactccagaanacaactgatggtttacttaatggattcttgataaaagaactatgacagctcgtcacccccatttatactatttaaaaaattaagatttccttcttgctggcctctaccacttttgatctaactctactctggcaccgtgcttgtcttaaagtgaggagtactcatactgtgctattatatgtttatacttttgtgccttctggtttattgaatgaagatacagacgtatgttctaataaactcttaacaaatttta

SEQ ID NO: 135850 - DNA, 382 bp, Glycine max
agcttcttagtctcagatgatgcagctgtatttgtagctacctcatgcactcctctaatgactatggcatcatttctggcactaaactgctgagaggtggaagccatcttctcaattaaatttctggcttcagcaggagtcatgtctccaagggctccaccactgggagcatctatcatacttctcttcatattactgagtccttcataaaaatattggagaagctgctccgaaatctgatggtgagggcaactggcacatagttttttaaatcgctcccagtactcatacagactctctccactgagttttctaatacttgagatacctttcctgatggctgtggtcctggaagcagggaataaattttctaagaatactc

SEQ ID NO: 135851 - DNA, 226 bp, Glycine max
tcatgatgaatcaagagtgattcacagagtcttgtttatctcttttaagacgacaaacagctccatagtcgagaacacttcataataacacagatgatgatctcaataatcaaagaatgagttcaagattgaatcaagaacacttcatggatcaagatgaaagttgaattcaacaatcaagaatcaagttccaagaatcaagatcaagattcaagactcaagattc

SEQ ID NO: 135852 - DNA, 327 bp, Glycine max
  unsure (1)..(327): unsure at all n locations
cgtcagaggtagagagctcgacagggagggtgccgggctgttatagcgtntcaacanggaaacactgggaacatggtgaatcttggaggattctagaagcatgatccaataggccactgggccaatatgttttgtgacctggagagatccatacaaacacctggatagtgtagtataacgtaggcacgactgaagtctggtgatgatggcgtggacgaatgtagacccaaccattgacgtaaaagtgaacatctcattggtaggcgttcaccaacatcttcatcgaagctggagccttttgttgatggctacatgaaagtacatgaa

SEQ ID NO: 135853 - DNA, 402 bp, Glycine max
  unsure (1)..(402): unsure at all n locations
atccttaagcacctgagcatgcagctgatgattacatctcccctttcttaagaaaattcttcttgatatcatcaaaatcttcatgatttacaagttgctcgtgtggtggtgtgtggtaaagntttgaaggaatttggtatttataggactagaatgaaactacgggtccttgtttgtaggggtttttatagccttttcacataattatcggcttgtagatagtagctggtagcttatagataaagttaaagacaatgcattgcttatagataattgctagtagataatttagcacttacagataacaagtaactcgtagataattgagtacctaccaagagataaagtggttacagtatatacaaataataagaggttagagacaaccttgtagttagggag

SEQ ID NO: 135854 - DNA, 349 bp, Glycine max
cgaactaattatgtagttggagatgaaccattccttaacaactatatgcgtgcttgcttgagcgaatagtgttgacgaatgagatgcttcatatgaaaacaaaaaaacaagtgtttcgtattacctccgccacctgactctgcttgtactctttccaccattattatcgtatgatgggaggatcgtcaactaaattaacaaacataggttagcgtagacctggtcgtgatgatactatattgatgaaaaagctcaaattgtgctgctgtacttgtgcatactaagcatgtcatcaagagcactgtgcgattatgtaaattgatccaaccatactaggtgattttaccac

SEQ ID NO: 135855 - DNA, 392 bp, Glycine max
  unsure (1)..(392): unsure at all n locations
agctggtaatacattatgtttaantgaatgcttattatgttatgatttacaaataatgatctcgttattatttntgattttgcaagtaacatacgatgtaatccaagtcacctgctaaagntatgccttctttagatcccataattgaatatttggtggttaaagctcgggtttcagatgttgcaaagctcagaccagttaaaatcgatgacgcttaggtgactggcttggttaaaaggtggaaatctgaatcaaacccatttcatcttcttgttggtgaatgcacaatcaccttggaagatgtggcccttcaattgtgtttancgtgtgatggaaaaccagttactggcctaaacatatatgattgtgaacagatgtgcgtaaaatatata

SEQ ID NO: 135856 - DNA, 425 bp, Glycine max
gtcaacaaggacatacatgcatgttgtattttaacagattatgccagcaaaaacattaatcaccacgaaacttatctaagcaatgacatcaaccatcccaaacattaactgtgtcatccaccacatcatgatttaaacttgaggtactgttgtaagtcacagggaaaaatcgcattcaagtggcacaatgttgaatgcagatatttttacaagtaccatatcctttagtaagagaatatctaatttccaagctcacaaagcagcttcgcttcatgtgttaataacatgtgatataataaaaactttaaatgtttacttccaataccattatgataacaatgggatcatctattactgatctaaatgaatttaccacaatatagctattctatgttgaaattctaaagaatggatatataccttac

SEQ ID NO: 135857 - DNA, 384 bp, Glycine max
  unsure (1)..(384): unsure at all n locations
aaaccaaaatacaccatacccttaagctaaccgacaagcaatttttggatgaaatttactatcgacagcctttcacatatgcaagtaatcaatttcgggttcaatgtatgcaactgaaagatgatgcttgatgtaacacaatgttaatgtgtaatcatgaattttcgtttggtggtctgattgagttattatgtagcattgctagaaccccagatgatattttaaacttacttcaaaccactatgacccctactcatgatgccctgctatattacaatgggaggtggaacatgtcatgccaaaatgangttggttggttactcgtcacagggaaaaatcccanaaaagtttaaccattccacccgatgtaccatggatgaactg

SEQ ID NO: 135858 - DNA, 461 bp, Glycine max
gcttcccacattactcgacacgtatcaaatacagagcttcaattgtctttaatctgattaacctcaatgaacgtgcatgcatttcacgttggcatgcgtgaaatgctgcacaaacatatgagaataaagcttgggatctcaaatttctatgttaataataattatgtcaacaaggcagctatatggagggtacgtgacgagaggatgagcaaagacacttgagatgataagttgtgccttctatgtcaatcgtcaactcctttctaattctattgaataataaaaagaaaagtctaaaatgataattacctataatatataatgtctaccaaatttacaagctgagattacctcacaaaataaaacaagtgaaatttcacgcaaacctaatggcgatatatactcttatgtttttcgatactatatacacttgagtgtccgtaaattatatgtgtttttta

SEQ ID NO: 135859 - DNA, 436 bp, Glycine max
  unsure (1)..(436): unsure at all n locations
ttatcttgcacgcctgagattaactaagcatgatcgcgcttctaaggagttgactggcttttgaggaggggcctaggctaatgcacaacactgctgacccacataaaaaagtataaataatatacgaagagcacgtacaaacgactatgtatataagatatttntataaggaaattataagagaaagttataaagaattttatcttaaacttcacaattaaatctcaattaaataaagctattaaacgagacaattaaaaagatggctgcacatgatatatacggatgaatgattttttatcaacggatcactcgtaaagactattattattaatttctattaacatgagtacttgaaccgcgatctctacatttgttttttctacatgaaggctacagtaatttatttattcatataagattaataatgatgatt

SEQ ID NO: 135860 - DNA, 291 bp, Glycine max
gaccaaaaactcagctgctctagagaccgcggcgggtgcgtgctttttttatcaacaactccgggagcatcctacgttcactctaaatagacttctatatagtgaaatagtccgtctctcaaccacgtaacaaagagtggtggtctcgagataaaccacgtttaaatcgggtagtctaccttgctgataaagtattgcgataccaggcgtgtctctaagccggcttattcaatgaagatactcgatcttattctggctcctcccctaggctcttaggaacaaatgcctacc

SEQ ID NO: 135861 - DNA, 379 bp, Glycine max
  unsure (1)..(379): unsure at all n locations
aacacgaatcatgttcacgcatgtgtaattttttttaaaacaaaatgaagcaatctgttggtggaaatcatctatatatatgagacaccgcangttgctaacagaatcacacatctacctactttcacattttctccctattgtacaaaaaagtatggcatttttaggagaaacaagcagtcagacgaatgtgaactcaaggttgggtttcatttttccaaatggatcaattatttacaacgatagtggggtttacttccaaagttccactccggtgcccattcgagtaccaaacagttgtgaccttgcaacgctgaanagcaaaatacacatcacccttaatctaacccacgaacaatttttgaatgaaattcactac

SEQ ID NO: 135862 - DNA, 323 bp, Glycine max
ctttaacctcatcggctctcacagtctttagaattgggagccaatccaagccttgtggtcagactctcagccacttatgatagccggcgatgatcccattactgcttcccctaaactctctggcctttcttcacgccgcatcccatgccttgcgaactccttggagtaccctcgcgttgtggtcactgaaacctcgtgcgatgaaaggcgtgatgctttcgtctgatggcactcctctcatgggacatccttcgcatgaagatagaatcctgattcttccttccttctagcgagggaaccatttaacagacgcccctccatgc

SEQ ID NO: 135863 - DNA, 399 bp, Glycine max
ttctcttccattgttttttattcatcttttctccatgtatctcctcaaatgtcttgtgctcaatgttgttaacatgattctttagagttttcaccgatttaacttgctatagaagctaagatttattttctatggttcaaatatcttgttctcgttcttgaaccatgaattgtgttgagtttaggttcctttgagttttgtcttgttattttctgtggctgaaacctaaaccatataattcttacaaaaatattatagtataagataacctcacaaatctagagtgacttgttcacctatagtagttctgtcatataagtaatgtctagtcatgagacatgtcacataagaaatgtatgttgtgctgaattttattttcttggttctcttgctaactca

SEQ ID NO: 135864 - DNA, 428 bp, Glycine max
  unsure (1)..(428): unsure at all n locations
gcttagatatgattntgaaattcccaactttgagaatgctgggaattgggctgcgaacatgatactcaaattttacgacgatccaacggtgaacgggttcgaaatcgtcgtttttctgagacaggtttggtgggctgcgggaaaaagaaagggttctgagaggagaaggggaaaaacgaaaatgacgccaaaaaggaggtagctgacttaacataactatttatacctagggtactcagtctattatttgctctatagttatttatttatttctaaaaatctttttaaatttatttacgaaaaattgggatgttacaaagatgctcttgataccacatagtgtaagctccattgaagctcgtatgcctaggatcttcttcatcaatggattcctttgcttcttggaagatgagtggcagcggaatgga

SEQ ID NO: 135865 - DNA, 300 bp, Glycine max
tctaagttctcaacaagcttagaattatatacttgtccttcatttaattgactttgggcttggcggccacgatcaacaaagtatctttgacacctactatattgttgattcgaccaacgttgttatctgtatgttgcgacaatccttcaaaaccttatttatacattctgagaggttcgctgttatgtggccatactgacgtccttttctatcataagtcatcggccatttctcctttgaaatgggatcaatccttgttgctttggctggactcaattgacagaatatctctaaattttg

SEQ ID NO: 135866 - DNA, 403 bp, Glycine max
  unsure (1)..(403): unsure at all n locations
gcttggtgttgagaaggaacaactnttgtagntgattcacaaggagattgagaaaatgcagagatggagaatgtcatggataggacaagaagtgaagtagagaattcgaaaaaaatttctatacaggtctgagttttggcctttgtctaattcttattttgtgattcatccctgttgcccttgtcacgtgcttttcggttntgtgctgagtggtttcaattttctaatttgatgtagaattttgcaaagagtttactagatgtagatgataatttgggaagagcttcctcagttgtaaaggacagcttttcaaaaatagaatctcttgaggagtcttctgaagcagcacaactcctaanaacacttctagaaggtggtgaaatgatagagaaacaacttgcag

SEQ ID NO: 135867 - DNA, 443 bp, Glycine max
  unsure (1)..(443): unsure at all n locations
nttgatgttgatcatatattcattaatggaatatttattgtatacattgacatagtaattatcatcataataataatacttcagcaatatggtaagtattgtgtgtttttcatgtttgtaatccatttgtagaaaaaatgtttgtaaaacatgtaatgcaatgtaatgtattagcttatttatttaatacaattataaaaaatccattcataagtataaatgaataaataatttattcataactatgaataaataatttttaattaacgttaaaagatggcatgaattgtaaaataatataaaccaaggtagtaaagtaatgaattaaactaaaattacaaaaatgcctaacatcataagtttcctaacatggtaactaaaattacaagctagtaaactaagtttcatttgtaactttcagataatagtttgcccactggatg

SEQ ID NO: 135868 - DNA, 310 bp, Glycine max
  unsure (1)..(310): unsure at all n locations
gcttagtgccngacatgcgcaagcgcttcttttattatttcaatatattatgatgttggcgcttagcgcatcctttccccactaagcccagcttgaaagctcaacttatagaatgaatttggggcttatggcatgatggcgcacttattgctactattaaaaaattttacagagaggaagtggcgcttattgcatcatccacactaagaccactgcttaaggcgcaacttacagtgaagatgtttggcttagcacagtgatgtgcgcctagctgaaccattctgcccatgaattatggggctttgtgctt

SEQ ID NO: 135869 - DNA, 297 bp, Glycine max
  unsure (1)..(297): unsure at all n locations
tagctgtacccatcttagaangttctgaacctactaaactcttattatgtttgtttctgtagancccacttnccgcttgtctgaatgaagaaacatcatatgagctctgcagaaattttaaaatttataatgcttgcatatggtccccgcaatacttcctgtatggtcatctgaataatcaagaacctcacttcatctttggaaatattgacggtggaaacaagtntcacctttctatagtttgagacatnttcctagtgtatgcgaccgaccaaaaatgataattgcatcggtata

SEQ ID NO: 135870 - DNA, 374 bp, Glycine max
agcttcaacatcagaccacttccagggtgttgtaactacttcacatggtcttgatggggcctatgcaagttgaaagccttggaggaaagaggtatgcctatgttgttgtggatgatttctccagatttacctgggtcaactttatcagagagaaaacagacacatttgaagtattcaaagagttgagtctaagacttcaaagagaaaaagactgtgtcatcaagagaattaggagtgaccatggcagagagtttgaaaacagcaagtttactgaattctgcacatctgaaggcatcactcatgagttctctgcagccatcacacctcaacaaaatggcatagtggaaaggaaaaacagaactttgcaagaagct

SEQ ID NO: 135871 - DNA, 440 bp, Glycine max
cacttaaagtctctatttatcgaacaggtagtatctttgattaacacactattcaacctcccttctagtgtgaatgttgttaatttagttggcatcagagcttggcctcacagaggttgagtatttaacaacacttatgaaaagatccaacaatcaaagaaggaaatggaaaaaagatactctaccaacaaaccacccatgttcagaggtgccaaatatgattactagaaggaacaaatgaaagctcattttgagtccattcacattgacctatgggatatggtagcaaatggaaatcacattccatatgacgatgagttaaacgaaattcttagaagccaatagatggaggagtaaaaactcaaatttttgctcaactccaaggcttgaaattgtatgttatgcgccttatctgaagaagacacaccaaagacatagct

SEQ ID NO: 135872 - DNA, 259 bp, Glycine max
agctataactgcctgagatctttgttttcttattgagggtacatcctttgtggtacaagtagagggtacatctacttgcgttgttgactgagaacaagagagggtacatctcttgtggatcagttctagtggaaggtacatccactatgttgaaagagaacaatggagggtacatcccttgtggatctttgcttgtaaacagatttttacaagggttgaaaagaaatctcaagggccgcatgtcgctaggtgactggat

SEQ ID NO: 135873 - DNA, 367 bp, Glycine max
tatcctaagaagggggggttgatatcacatattccaaactgtttcccctaattaaaaatctatttcactttctactcacgttatgaattccctcaatgacacatctctttaaatattaattcaaatgaaacaatttgaatatcaatattaagcaatactaaataaaggagattaagggaagagaaattgcaaactcagttttatactggttcggtcacacccttgtgcctacgttcagtccccaagcaacccgcttgagagtccactatcttgtaattcctttacaagtctaaacacaaaatgacatcctcctttgcgttagagatccttacaacatgagactcccacctttaatccctccagatga

SEQ ID NO: 135874 - DNA, 440 bp, Glycine max
  unsure (1)..(440): unsure at all n locations
catgcccgcttaaaacaatagaagagatatgagatttattaagcattttctattaagacacacaatatgtcagactcagataagctgcaactctgaccggacaataagaaagcttctccatgaaggaaggagaatttgaggatgatatatttgggagactaaaagttctcctgaacaacctagaagctttgggtcaaacctataccaaggcccagataaacctgaaagtgttggacaactctcccaaagagtggaaacctatgacaacaaccatccaagaggatagagacacganaaatcttgcttgggatgaactattagggattcttagtgtaacacccgtgaaatttccttcaccatttattcttctacacatgtaaaaatttcactggtanagactagatagtagatagtttgcactgcgtagttaattatatgac

SEQ ID NO: 135875 - DNA, 463 bp, Glycine max
  unsure (1)..(463): unsure at all n locations
actcaagctgangattatggngtacccatcacatgtggtactatgtggtggtcgggcgatggngcaaaacaattctccacatccacaaatcatatataaacccaccatcccctgttgcccaccttcaactgagctcacgtactcccacgtagcccttatcctcgtttctctcaacaccgggtccccatcaatcctcccaagcttccacaacatccaagtaattcaacattcaatcatcacaaactaacacagccaagaaaatagggcaaaggcagaaaactctgcccaaaacacaaaccaatatcacagcttttcacattcaaaaaccccagtaacattctctntgttccaattctttaaccgttggatcgactcgaanaatttactggaagtctctagtacataagtctacattatgaaccgtgggatctgctagaaacgtctagagcataatctgtactac

SEQ ID NO: 135876 - DNA, 171 bp, Glycine max
ttataacatagatttgtgcactaggatggttcgctggttaaccaaacaaatactgtccttatgactgtataaacaattatctgcttttattagactataatctgatatgtgaaccactggttcacacgatactaaattaactttgtgatgggaggatgctctacattagct

SEQ ID NO: 135877 - DNA, 295 bp, Glycine max
  unsure (1)..(295): unsure at all n locations
gctctagcttctcaaggaagcttctcaaggaggtgagcttantctttagatgggtgtgtgtagctaaactctagcttctcaaggaagtattctcaaagaaacttctcaaggaagttttcttaagaaagcttcttcaggaagctacctagtctataaatagaagcatgtgtaacacttgttgtaactttgatgaatgaaagtcttatgagatacacttcaaagtttcacttttttccttcttttattcctcaatttcgtgctgcccctttctcctctttttttctccatttaagca

SEQ ID NO: 135878 - DNA, 433 bp, Glycine max
  unsure (1)..(433): unsure at all n locations
tgngaggattgatggggacccggngttgagataaacgatgtttggtctacgngggagtacgtgagctcagttggaggtgggcaacaggggatggtgggtttatgcgtgatttgtggatgtggaaaaacttgttgtgcaccatcgcccgaccgccacctagtaccacatgtgatgggtaacccataatcctacaagcttgagatgaggaagtgtagaagggtgaaacttcctacttttattcgttgaccacagagtggtacctagagatatgtcgcgggggtcaagagaccttggggatgtcaagtggggtgctattgcccaaaaccaagcttgaccaatcctgacccaacccgggcatagtcagtcagtgagaacctgtgatgtacctaaacaagcgagctcctggcagtcatcagattatagggacaaagac

SEQ ID NO: 135879 - DNA, 432 bp, Glycine max
acacttgaaactcacctatatgggtgtattagaggttaacacttgctatgttctatcccgatatttatagccgcccaacaaccaaaattctaataaacaatgcatattcctcgatgggtcctatatcaagaactgcaacgttataacataacatttatataccttaaaccattaataattaaaatcatgcatctacttcattaaatttcggaagagaatggcaccactgtggcaggaatcataagtagtgtttctccaaccagataatgaatgtgcacttaagtcatgtctgccaaaattttttaagcttattaaatagtgatgaaaggaactaaactaagtctatatattctcatcaaactctctggcttaccccaaagcacaacactataaccatcaatactacaatagccccttccaaactgaaaatgc

SEQ ID NO: 135880 - DNA, 482 bp, Glycine max
  unsure (1)..(482): unsure at all n locations
agctnggttcccaacgctctgttcaagctctcctattttctatagatatatcaaggatctctataagatactatgctagatggcacatcatgtaacctgacaacctcacttatatacaaggtggtcaacttctccaaggaaanattgatattaatgggaatgaagtgagcagacttagtcaatctgtcaacaataacccagatagaatctaaatctctagggtttctaggtagtcctaccacaaaatccatggaaatattgtcccacttccactgnggtatctctaagggttgtaacttcccttaaggtctctgatgttctatcttagccttctgacagactaggcatgcatacacaaactcactaacctctctcttcatgttgggccaccaaaacatcatctttaaatcctgatacatcttggtagcactaggatggatgctcaaattactcctatgtccttcctctaagaatcatcttct

SEQ ID NO: 135881 - DNA, 469 bp, Glycine max
  unsure (1)..(469): unsure at all n locations
ccgatttggttntcgctggcaaaaggatcaaagtgtgtctgaattatgaaaatctgatcatcctgcctcgatgaatgagaaaattgcggcaaatggagaggatgataatgaggaaggaacctatgttgtgactgtcattcctacatggccaaatttctcaccagcttcacaatatcaatactcaaccaatatcagcccttctcattacccaccatccaatcaactacaaaggccaccccttaattagctacaaggctcgcctaccgcacattcaataccaaacaccaccctttacacaaaccaagacacctaccagggaggacgttttacagtgaaaacgcccttacaattcaccccaattctagtgtcctatgctaacttgcttccatatctatcttgtcattcaatggtagccatatacccagccaaaggtctttaaccatcattgtccaatgatatgactgctaca

SEQ ID NO: 135882 - DNA, 261 bp, Glycine max
cgacagagcaagaagagaagatccgatggtgatacatgtacggagacgataaagactttgaggaagcggtatgtgccggctaagttctcaagggacttgaacattcaagctccaaaactaacccataggaaccagggggtcgaggagttcttcaaggaaatggatgtgctcatgactccagcaacatactgaagaagatgaggaggtaactatggctcgatttcttaatggttcgactaatgatatccgtgatattgttga

SEQ ID NO: 135883 - DNA, 350 bp, Glycine max
ctgaagagagtatgacgaccgggggacgtcaatatagccaccgatgaagccttggaatgagaaaccaagaaggcccgaaaagaagaacacgaccaaaacaagttttggggggctttatagggcagcaatagtgagctcaaactccgaagaggtgaaaggaatcatcacgggtcaaaggcatgatctggaaggacgagctaaaggcttgccttatgtcgaaaagaaatttgtcccaacagttaaagtgagactgaagggaatatatgggccatcatcgatgagtgcaaagagaagctaaatctagcggcgactcacgagcaaaggctagaggatgagtacgccacgatatc

SEQ ID NO: 135884 - DNA, 435 bp, Glycine max
  unsure (1)..(435): unsure at all n locations
tgtctcagcgtttatgcgagacagagaccaacatgttagctatcatcgccaagtaccaagaagagttaggtctagccacggcccacgagcatagaatcgcggatgagtatgcccaagtatacgcggaaaaagaggctagaggaagggtgatcgactctntacaccaagaggcaaccatgtggatggatcggtttgctcttaccttgaacgggagtcaagaacttccccgattgttagccaaggccaaggcgatggcagacacctactccgcccccgaagagattcatgggcttctcggctattgccagcatatgatagacttaatggcccacataattagaaatcgttaggaaacttgtatggtctctcagaccttgactagatatgacattccttttgaaataagatgnagtggtcccatgtttctacttcaaa

SEQ ID NO: 135885 - DNA, 480 bp, Glycine max
  unsure (1)..(480): unsure at all n locations
agcttcttcttctggctcagcatgaaccattttgtcttggaagagaagatcctcgcggagttaatggcgatgcttacttccactcgcggtggcaccgcgatgtccctcccctccgttattgttcctacattcttccattctatctccatatccccatcctgagtatagggtgatgtgttagtttttgagaattcgtatggatcatacagattttcaattcatattttttgttaattttaagcaattttttatttaataaaattttttaattaaaaatcaatgtataattttttaaatttaattattttataaataactattttaataattttatatatttaaaataagtaaataacaaaaattccaaatttttataatgtatatattntaaaatttatttgaaaaaatacgtaatattgtatatgaaaaatgtttttattaatatatttgtataaatattactacattaatagtattaaa

SEQ ID NO: 135886 - DNA, 425 bp, Glycine max
  unsure (1)..(425): unsure at all n locations
tcatcagatgttgcatttcaagaatgcttcctcttatggtataacggaatgcacttcttgcattgtatatctgtttaatggtcgtacaactattggcattgtgttccttcagagttagcagaatgtttcttggcttcaccatggacttcgtcatatcagtaataagtgttttttcagctttagtcaatcgccccgcatatggatgtccaactaatgacttggccaattcatgattatgcactccataaatcaacttcaccatccagccttctcctccaaccactggcttgcaacgaagcttgaaaggatacccacatttcctagtcctagtgtctcttctgataaattctttnttcctacacctatactcgccactcctttcatagccaattaacacanacgtagtccttcctctactacctgtg

SEQ ID NO: 135887 - DNA, 390 bp, Glycine max
  unsure (1)..(390): unsure at all n locations
agctngcacattcatgcacctgcaatggtttccatccttggcatgactatgcacaggtagagtatgccatacatttcttgatgggactcaatgaatcctatagttcaattcggggtcagattctttctatggatcttttcccttccattaatcaaattttttctctagtggttcaagaagaaaaacaaagagagattggtacttctatttctgctctccactccacaaatgatgcttcacaatctcatgctcttgttgttaaagattccagatatcagtctgatcacaagggtagtgctacttccagaaatcgacctctttgtgcacattgtggccgacttggccatactcaagataagtgtttcaagtacatggttttcctcccaatta

SEQ ID NO: 135888 - DNA, 471 bp, Glycine max
  unsure (1)..(471): unsure at all n locations
tccttgagaagattcctaaagaagctagagcttagctactctcactgttataccttgtggcctcaataatcttaagagggataggcttagaatgcacaagaagcaacaacaatcaatttaataatgttctgtaaacatgcaaggcaaaattgattgcaataacataaatgatataagggaagagagaatgcaaacacagttttatactagtttggccacaacccgtgcctacgtccagtactcaagcaacccacttgagatttccactatcttcgtaaattccttttacatgttctaaacacacaaggacaatccttcctttntgtttagaattgctttacaacaagagactcacagtctcttaaccaatctcattgaataaaaagaatggaagaagaattctctcttcaagagaagaatattacaataaagatcatgtcagaatccttatagattttgcaagtgtttgat

SEQ ID NO: 135889 - DNA, 373 bp, Glycine max
  unsure (1)..(373): unsure at all n locations
agcttctccccaannnnctatatatggtttgtaagtgaagnagaaaagggttcagccccttaggcacttctctctctttcgaatatgcttggaaaaattgtttccgtgaagaaaatccatgctgtggcgcttccgaaacgtttccgtgacattgtcgtgaggaatttcgcgaatgtttcgaccgttcttccacgcacttcattcgttcttcgatcttcaacgcggacgtacctcgaacccagcttttcgattcatctatgttcctgtggtggtccacattgtgtttcgtgcatttctattctccgttcatttactttttataccccctttcgacgtgctctaaccttttatttaacgtatttctcgctctccg

SEQ ID NO: 135890 - DNA, 478 bp, Glycine max
  unsure (1)..(478): unsure at all n locations
atagcctactcaagctttaacaagttatacatttcaagcaaataanatttgctttgtttccatgaataggctccaatcaaaggttgtgctcatagtttcattttagttcattttctttttgatagtcacatataatttattttaagtaaacatgtagaagacagcattaaagttgtcactaacactatcatcaactcatattacaaatgcccaatgggataagcacatatttatatgagcccaaattatcactatatcattcagaaagaagacaaccaaagctaaaaaataaaatttcatccctgcttcctatgatactcttaaacagaacacccaagaaactagtttacccattaccacttaacanaataaaaaacgcatacatatcaaanatagaaactccatagntgacatcattatcatgatacctaagtagaaacatacaataaaaaaacaataactaaagcaagcatgcaag

SEQ ID NO: 135891 - DNA, 389 bp, Glycine max
  unsure (1)..(389): unsure at all n locations
cacccagctcngccatgcgagctattgttgctttttatggcccaagagggcctggttgctatttgcacccccatttttactaaatacacccttgcctttttttggtgattcttttttcataaatttatggaaacttacgaatttcgtaacgatacttgttntctttccgtaatgttacggaaccttgcggattacataatcatcccttntttgacttacggaatgttacggaacctcactaattgtgcaacaatgcttccttttgatttccggtgtgtcacggaaccttacggattgtgcatcaatattttcatttgatttccggcacgtcacggaatttcacaaattgcctaataatgggtgccaagcacctcanaatgaccaaacac

SEQ ID NO: 135892 - DNA, 422 bp, Glycine max
  unsure (1)..(422): unsure at all n locations
tgcctttagcgctggcacctcancactatctttcgaagctntaacctcattggctctcacagtctttagatttgggagccaatccaatccttgtgtccggactctcagccacttatgatagccaccgatgatcccattactgcttcccctaagctctctgtcctttcttcatgccgcatcccatgccttgtgaactccttggagtacctttgcattggggtcactgaaaccccgtgcgatgaaaggcgtgatgctttcgtctgatggcactcctctcatggggtagccaagctatcttatggcgaggacgggattataattaatacaaccccttgttccatcaagggaacatttggacatccttcgcatggagatagaatcctgattcttccttccttctagtgagggaaccaattaacaga

SEQ ID NO: 135893 - DNA, 361 bp, Glycine max
gacagtctatagagtcttagaaagggcatattaaataggaagggagatccaattgaagtagcaaaaggtttggccaagaactttaaagttaaaagtcttttacaagagatttactctctggtaattgattaccagaggatgtaatcgattaccacaggccaaaactgatttacaaatagctattaacatttgaattcataatttgccctgtgtaatccgatacacatatatggtaatcgattaccaacagtttctaaacgttttaattcacatttaaagcttgtaatcgttacacatatactgtaatcgattaccagaacagattttcagaaaatattttcaccagcacatcttttatgtg

SEQ ID NO: 135894 - DNA, 456 bp, Glycine max
  unsure (1)..(456): unsure at all n locations
tcatgangatgaatcaagttgattcaagatgttttgatgttgacaaagatgacgacaaaagacccatgagaatgatttcaagattgagtcaacaagttcaagatcaagtttaatttcaagtttcaagagaagaaatcaagaagacttcacaagggaagtattgaaaagatttttcaaacaacaaacatagcacagttttgtttttcaaaatagtttttctcaaaattatccaagttaccagagtttttactctctggtaatcgattaccagtttcctataatcgattaccagtggcaaagtttgatttcaaaagctcttaactgaatttgcaacgttccaattgtttttttaaatggtgtaatcaattacaatatattggtaatcgatcaccagtgtatctgaacgctgaaattcaattcaattgtgaagagtcacatcttttataanatgtttgt

SEQ ID NO: 135895 - DNA, 304 bp, Glycine max
gagagacagagggagggggagcacgaaattgaaggaagaaaaagggagagaagttgaactttgagttgtgtctcacaagactctcattcatcaaaggtacaacaagtgttacacatgcttctatttatagactaggtagctctcttgagaagctttcttgagaaaacttccttgagaagcttctttgagaaaacttccttgagaagctagagcttagctacacacacccctctcataactaagctcacctccttgagaagcttgcttaagaagattcctaaagaagctagagcttagctacaca

SEQ ID NO: 135896 - DNA, 458 bp, Glycine max
  unsure (1)..(458): unsure at all n locations
tataagaacaaaattgcctcaatcatttccatatatgcatgtgaattangaagcatcaacaagaatcaagccaaggctattgtgcaagcaatcaatggggcaaaatacaccaaatgattatgatgatggatggctcaaattctcacaaaggtaaactcatcactttcaaattgagctttcaaaactatcatgacatgtagaggaaaatcaaggatttcaaatcacaaattgtcaagaaacttttattttcaaaacaattacccatttcttgaacatatcctataatacaaagaaaaacatgcaaaatcgtacacgcacatagaattgacccaaaatattaaactagaaacccaaaataataaactaacaacattaacaaattaacacaactaacaaattaacaaaaccgacaaaactagcaaaaccaaagaacactccccccatacttataaaacaca

SEQ ID NO: 135897 - DNA, 406 bp, Glycine max
  unsure (1)..(406): unsure at all n locations
agctnggacgggcctaaagacttatatattgccgagcttcattgagatttgtgaatatgctacatttagtagagctctagttagaaaataatttctcggtttatattaaccacaaataaaccaaaatctgaagttgttaatgcacaatttcaataaagtttaaatgtcattttagcggagacttgcttttgtgtagataggtttgtggtcttaaagtcattgcaatctgcaaggcatggtgtaactttttgaattatgatatataattattcaaataagttctctcttactttatggctggcttattctttcccatatcatgtcaggggtactgtacaactgtgtaacatattaagttccagcaaacttgcatgcatggatactgtctatgtatttacatgcacac

SEQ ID NO: 135898 - DNA, 480 bp, Glycine max
  unsure (1)..(480): unsure at all n locations
ggaccttaactactcagcttgggattattgccttgcagatagntgattcatatgctgttctgctatnggccaagtattgaaattcaggaagatatggtgatgcattcctagatgcaaaatcaattgaccattgctttttcttatttcttgttacataaaaataatatatagataattttatgttatcttgttttgaaattgagttctaagttatatgattgagttctgtttatggcagatccagaggacgaggaagaatacaagaacgtgcgtagagctgtgaaggagttccgagtggcaatgaatgaatattataaagcagtatgttgcattctttgtttgggttatatttagttctacatttgatcgatctagtagtttcctgtagctctatntgcgatcatatgtaaagactaatgggtctcttggtacctaaagcatngtnttctcgtttgcagccccccacattnttacttaact

SEQ ID NO: 135899 - DNA, 323 bp, Glycine max
  unsure (1)..(323): unsure at all n locations
caacttgttctgtgccaataacgtgttatgtgatgatagctacatcaatcttctcttcgtgggttggngggttctgtctcgtataatgacatgatcactgtctaacatattatcaattagctctattgcttcttctggggtcttcaaatttatctttccacctgcagaagcatctaacaggtgcttggntcgtgggcttagcccatctataaacatattcaattggattggctcatataacctatgagtgggagttattcttaacaagcctctgaatctttccaatgcttcactcacagaatcattatgaaactgatgaaatg

SEQ ID NO: 135900 - DNA, 461 bp, Glycine max
  unsure (1)..(461): unsure at all n locations
ttagggaaagtgaaacggccataactttcgactctgatgttctgattanngccatattatatcaagatgctcgaaattgaacacgaaaacttttgacataattgaacgaccataacttttgactcggatgttcccttgagtaccataatgtatcgaggcgctcgaaattgaacatggaatctccgggccaattcaaacggccataaatttttactcaaatgtatgattgaggcccacggtatatcaaggagtttgaaattgaacatggaagctctgggaaaattgaaactaccataacttttgacttggatatcctcttgagaaccataatatatagagaatctcaaaattgaacatcgaatccccaggaaaattcanacggtcatcactcttgagttggatgtatgattgaggtctatgatatatcgaaatgttcaaaaatgaacacaaaagctctggac

SEQ ID NO: 135901 - DNA, 497 bp, Glycine max
  unsure (1)..(497): unsure at all n locations
catgcaagcttactttaagacaatgcttcgcatatatgtggattatcaatnggggcatgtgaccaacctttgaagtatgttatgcccgtctccttgcatattgcatcatcaccaactccaatttcttgccccaggtaagcataaaaaatttatattgaaaacaaaacaaactaaatgaatatgaatacataacaaaacaaaaaatgtataagagattgtgctcctatctctttatattntgttcagggatatcatacacaaagatttctttaaaaataataaagatagtgtaacattgttaatntaatgactactaacttaaagagagataaatataatttttttccttatatttttaatgaacatgcaagtatctagagctataaatttatatacacacgatgatacaatcttatattttggttagatccaattccctaggtcaacaatattatatcatggttatatttttatatataatgacgttaacttagtat

SEQ ID NO: 135902 - DNA, 456 bp, Glycine max
atttctctcccatgactaatatcaaatctatgacactgtcaagtattatttgaagctcaggatgcattgcatacgattcataatccagtttgataaggaattaaagaaccccctgcagcctagttccattaccaaatcagcacttgaattttctctaacagctcaaaagatagttattaaggcaatagatattctaattaactaatggactaaaatattataaattctaatgaagccaaaaattgcaatactactctcaagaatgatgtcctacactctgatatttcatgttgtccatacaattgaaccttttcaataacatagtcttgacatggctagaaattgaaaaccatgcattcttccaacttcttttgtactccctattcaactatgtatttgctgaaaagccagatgaagaagattaaccacttatatataacctgtaagatacaacat

SEQ ID NO: 135903 - DNA, 411 bp, Glycine max
agcttatggtaaaatctgggacctagccatgtgttatgtcttcacagaggccattgcctccctcgcccaatattatgaccagttgttgaggtgcttcacctttggggacttccagttatcacccatggtggaagagtttgaagagatcctgtgatgccctctaggaggaaggaaaccatacatcttctcaggattttatccctctttagctagaatttctaagatagtccgaatctcgacgcgggaattagaccacagaaagcaagtcgaaaatggggtggttggagtaccgatgaaatgtttggaaacaaaagcaataatcttggcatgtaaaggcgaatgggccccattcataaacatcctcgggcttttgatcttaagaggggtcctctttacaaatgtggatagggt

SEQ ID NO: 135904 - DNA, 250 bp, Glycine max
  unsure (1)..(250): unsure at all n locations
ggaagagagaganaaatcactctctcaaagagtgtttatatgtttctattacagcacgaatctccgtttgctactattctctaatgaagcgcggtagtaacagctttcaagaatctatttttcaacgttacaaatgaacttttgttctttcggctctgaaagcgcatgtgcactgaatgcctcattacttattaggtcnctactatggggttcgaatatattcttaagatgaacgaatggatcacgtcta

SEQ ID NO: 135905 - DNA, 351 bp, Glycine max
agcttctctttataaaatacatatggcattcttattatttcaccaattttagtgttagctcctatacttaaattgtttagtaatatatatagagtacatgttaagtttattttagtgcgtatagttaaaaataatctttttagtccttaccggatttgtattttaattctctgttgttcctataatttaaaagtaatagttatatccatataatttggatgttaattaccttttaggtgttactaagaaaatatacaaataattaggtacacattaggtgtcaattattaactatgtttgattataaagtttattgcgatgaattaactataaattatttggtgatatttt

SEQ ID NO: 135906 - DNA, 440 bp, Glycine max
aagcttaggccattacgaaaaatatatgctattcgtttttaattttaagacgcctcacatgtgtgggcaacgaattcatgtatgctggctaaagaacttactatataattatcacatataaaataaaatgtttgtcttaatagttgctttagagtattaccttatgctggatctgccctgacttcatcatttaacttgtcgttcacagaaagaaatgattacatgcttccatattggttcaatctgtgtttaagaaaatcttccctactgaccaatcattgcttacgttgcactcatgcatcatagatgttcttctcttacactattgcctacaaatccatgatttttgttggacaatgcaactagatgcctcctcaaaatatcatgggaacgtcatctactgggaccacagctcacaactcggcaattaacgatgctct

SEQ ID NO: 135907 - DNA, 372 bp, Glycine max
agcaccgcagccgcagcttggattgtgcaaaacaacccacttgaccttttttatgtctcctgaccaccgcgacatatttacaagtaccactctgtggacaacgaataaaagcaagaagtttcacccctctatacttgctcatctcaagctggaaggattatggggtacccatcacatgtggtactatgtggcagacgggcgatggtgcacaacaagttttgcacaaacacaaagcgcgcataaacccaccattccctgttgcccacctccaactgagcttacgtactcccacgtatcccataaccttcgttatctcaacaccgggtgcccataaatccttccaaagctacccaacatataagtaaatcaaca

SEQ ID NO: 135908 - DNA, 404 bp, Glycine max
  unsure (1)..(404): unsure at all n locations
actaagctagttcccacgtcgntcgtgtgtatgatatccactccacattgtttgtatttgatgagaccttcaatcctattacgcaatgtggtagacaaaaatgggctgctaacttgaatggtcattattgtcaatgcggaaggtattttgcgcttcactatccatgttcacacattattgcagcctgtggttacttgagcatgaactactaccaatatatagatgtcgtttaaacaaatgaagtgttaaccttaattaatatgataccatacattaagtgtcatagtcaaatcacatacatataacaacatatataagcagagacattaaaatcattcattatcatgttcgtggtgacgtgaggatgtgccacatggtcgatcccatctacgcgcttgacgatc

SEQ ID NO: 135909 - DNA, 319 bp, Glycine max
tcttatctctactcagcatccttcgcttctctgatatcaagtacttcttctcactacgctggactatcgcaagccccttaatatagatataaatcaattattcctcatagggtaggaatgtaattacctgatcaatgaatatgattaaatgtggtgtttcttcctctaatactcttttactgtcctagcttgacgcttgatcctttttaatgtctggatgcggaccatggcggctatccactctgtatattaccatttttgatctttacactctgtcctatcatttcctacctcttctcgtcatttttacttaatccat

SEQ ID NO: 135910 - DNA, 463 bp, Glycine max
agcttaaccaagatggtaatctagcccttgtttataacccatctgtcttcatggcaaagcccaaatgcagtggccctattagtgatcatagttgttgacaataccagcgtatcggagcgcgcgaccccaaaaatgggatagcgggacgaccgctattctaatattcttttatatatgttaaataattaatatatatatatatatatatatatatatatatataaaagttcaaaaacagataaataactcaaaacatagttatgtaaacacaagttacgagacatataatagagaaatttattgaatatgataaaataccctccaatacacattaaataattatgcttagaggacccgagttgtagcacttgcccaactgtacatataagttttcccgctaataatataaagagaaactacgtcctcaatataaatatttattctatttatgttattaaatttt

SEQ ID NO: 135911 - DNA, 373 bp, Glycine max
atggttgaatctagtgatcctcttttgcttgttttatctaaatctcggatcctggcaggggtcatcttctcctgtgctagtccatgaatctattaaaggtgcttagttgtcataataatgactctgaagataaaatgatgtcgggctctctttatcctttaatgcagtgtcaacgattgtagatatacttaatgctttctcgaaggctacttactatgcctattaatgggcttatagctggcactaaatgggcactatttaacacagcaggtatgtctcattacacttctaaaaagttttccccaagcgtgcagctcaattcgttgctgcatctgtcattggatactcctcgtttattacatgtgcagcaaat

SEQ ID NO: 135912 - DNA, 306 bp, Glycine max
gcgacatagctccaaggaccactctgaggacagcgacaaaaagcaggaagtctcacccctctatgctggctcataacaagctaagaagataatgggagacccatctcatgtggaactcagagacaagccggcgatggagcacaacaaagttatacgcatacgcaaagcgcgcaaaaacccaccatgcgctgatgcccacctccaactgagctcacgtactccgacggatcccataacctcgattaattaacaccgggtcgccatcatacgtgccagctcgcccaacatcaaagtatatcaacagtc

SEQ ID NO: 135913 - DNA, 362 bp, Glycine max
  unsure (1)..(362): unsure at all n locations
aggcgagctaggatgcttcctttttccaccttcnggaggaataatctgaggggcccatgtgggcctggttgctcttcgcctcccattctactaaatacacccccttgctctctatccggagattctcttttcgtaacaataccaaattttgcgaatctctgttacgatgcttgtttcctttgcgaatgatactaaaccttacggattacataatcatccctgttttgtcttacggaatgtcacagtactctacggattgcgcactaacactatcttttaatttccatcgtgacttggaactccacggatagggctaccatgccttctttagacattatggatggaactgaactacacaaatt

SEQ ID NO: 135914 - DNA, 450 bp, Glycine max
  unsure (1)..(450): unsure at all n locations
tctcggctcatgcggngaacgcctctagttcaacacccgtgcagcctaaatcacccacccagagggaagctccccaagttccaactccgaacacgactcgaccggccggtaattccaacacgacaaggaacttccctccgaggccattgccggaattcaccccgctcccaatgacgtacgaagatcttctaccatccctcatcgccaatcatttggccgtggtaactcccggaagggtcctcgaaccccctttcccgaagtggtatgaccctaatgcaacttgcaagtaccatgggggtgtcccggggcattccgtcgaaaaatgcttggcccttaaatacaaggtccaacatttaatggatgccggatggctgactttccaagaggatcggcccaatgtgaggaccaacccgctcgccaatcatggagggggagcagttaatgcagctg

SEQ ID NO: 135915 - DNA, 443 bp, Glycine max
  unsure (1)..(443): unsure at all n locations
aagcaccgcagcctgcagctgtaaaagnttctcacaaatttataattattatctnaaaacannatgctctatgaaaataagtatttttttcaagagcttttatgttggactcggctacaacatctgcttttaaggaggagataaactatataaaaaaaaaaatcaagactaacacactctaaaggccatatgcaactcaatatgttttctcttttacataattatctcactactattacacgttactaattctaaggagttataatgttaatttggtggtgaaagacaaacaagaagttataatttgaatattcttataaaaaaactgcaactattcaattaaaataagtccaaatctaacatatataactaagctttctctacccattcaacattccaaacctctgtttaccaaagaccctaagaactctattttaattttt

SEQ ID NO: 135916 - DNA, 444 bp, Glycine max
  unsure (1)..(444): unsure at all n locations
atntgcgcggttcatgcacaacatntctcttataataagttcggttttattaaatcaaaacggaaatacgtttctctagtataaaatgaataagtgtttccaccttagtatatgtggtgtgaaaaaaaaatcaaaactgagacagattttcctaatattacatgatgggtcttaatactagataaattgtttatattattaatatataacactttcttataccataatataattaaaataataatattctaaaacaataatatttttataatcatattttaaaataaaaatgttttaatttaacataaaattgagttcaacttggagctacgccacaatatattctagctgctcttaaatccaaccacactatgaaagatgattctcgcaggaactagtatgaacttatgcagtgacaggccatacatccaagaacgctactat

SEQ ID NO: 135917 - DNA, 432 bp, Glycine max
  unsure (1)..(432): unsure at all n locations
ctgcagctctcatcaatcatgtttggggttgcttctgttatggtgaactttgaacaatggagactcgcttcttcatgatatctttagtcagatatttttcttaaattagaactatacactgagaagtgattacacttaatctatcgcaataaatactaacgttttacagcaatttagagcatattgagaatgtcttttttatttaacaaaagaaaaaaaaagtggctgatactactacctctataaataccagtaacataggccttagagctactacaaaagttgtctgggttttcatatgttatgaacggtcatgattttttaagagaacctttcctgttgaaagttcaataagagagggatcaaatccatacatacgtttgagagttgatgtatcatcgngagtgagttggtcacttataggatacaaac

SEQ ID NO: 135918 - DNA, 463 bp, Glycine max
tctggaagaagcctctaatgaagcttcttgaggaagctacatgaatctgcctcggtaaaaatggtgcccacccttcgttaaccgttggatcttctcaaaattaggtctgtagcttcaaaagacacttttccacgatctgaccgttgggatctttgagaagatgtttggagtgttctcgaagcttccattcccgagagcatttcttatttatgcacttcagcctttactttcgtgtagcttaggaaaaacgtcatttcttcttctttctttcttccaaagccatttataaagttccaagcactttctccatcacccacaaccaccattagccaccacaaaccatcattggtctccattgaaaccccacaccgagatgaacccttcaaccgaagcggaatcttccaacttggcttgcggtttctgtagagaatgaaaccctaatctgaccttttcatttctttcg

SEQ ID NO: 135919 - DNA, 287 bp, Glycine max
  unsure (1)..(287): unsure at all n locations
agcttatnaatctattgtaagtccaagcccttaaactatatacaatanaagctaggcaagataagatacgattagatgaaattaaatgcggacgaacaaacaactagatgaaataaaatctggataagataagatttgatcaaatgaaattgtctgctctcttcaagtccaagcccaatttcagatacaagcccaattgcctataaatctcctgacatgaaattaaaaacacacaaattagtccagtagggcccaatgataaaactgcataattaattcgataatca

SEQ ID NO: 135920 - DNA, 452 bp, Glycine max
  unsure (1)..(452): unsure at all n locations
aatttggaaaagcatttcagaaattattnttttcactggtaatcgattacaacctctagtgatcgattacgagacagttaatatcatatttatgaaatctcaaaaacttttggaaaatatcctttggccaaacctgtgcatcatcaattaagaaactcttccttatattctatgaactaagttcatcaattatcttgaatttctagattcttgacttggatcaaacgtgagaagcgcttatatttggcatcatcaaaacttcatatcatatttgtttctacaattactatgggctatattgatggcgggctacttgagactctgatagtccccattcctaaggttgatagcccaacaacctttacggactgtaagtctatgtaacgttcttttaaaagctgtctcgaaaggtattgtaacaaattgacaccatttcttgatattattataag

SEQ ID NO: 135921 - DNA, 253 bp, Glycine max
gtaactctggccaattgtttaaccagtcgatgctcctccctctatgccttctgcttataatacaaccagcatactgctagaataaaaagcagactcagaggtgctcgaagcgcaatgccatatgtgacaaacaaacgcaaggttgatgaatatattggatgacggacccaacgaataggtcctaaatgcacaacagcagctggctccaccacattgtctgaatactcggcgagatacaatgttgcggtatact

SEQ ID NO: 135922 - DNA, 443 bp, Glycine max
  unsure (1)..(443): unsure at all n locations
tcctgtntcattgtagcatttccttttcatgcctctgatacaaaaatgaatagaggatcagcattcgacaattatacactatttacaaataaagcacacgttcatgtagggaaaagtattttaaaaaaattaggaaattggggaactntgttaattcttgcacgtgcttagaagttcatatgatatttaacaggaaagggagataatacgcattaaaaatatgttcaagataataaggtaatgacctcaattttggaaggttggaaagcatgaagctgttaccgagccttcaataaaatgggtctaccttatgaagtgtggaaaaatgtgttagataaatgccttaagaaatagttgtgttggacataacatattgaattacacctgtcttggaacttctctcttangaaatagctagaattaatactacacacgaattagct

SEQ ID NO: 135923 - DNA, 411 bp, Glycine max
agcttcggaagaaagtgatgatgttcttgtcttataggcagagctagaaagagctagggtagtcgaagagaagttcaagtccatagccatcaaagtctgtaaagagtatgatgaactaagggatgccaatatggtcaccgatgaagccttggaatgagaaaccaatacggcccgaaaggaagaacatgaccaaagcaaagttttgaggggctttatagggcagcaatagtgagctcaagctccgaagaggtgaaaggaatcatcacgggtcacaggcatgatcttgatagacgagctaaaggcttgccttaggtcgaatagaaatttgtcccaacagttaagcgagactgaagggaatatgtgggccatcatccatgagtgcaaagagaagcttaatctagcagcgactca

SEQ ID NO: 135924 - DNA, 468 bp, Glycine max
  unsure (1)..(468): unsure at all n locations
gggttntgggcaatagcaccccacctgacgttctcaatgtctcttgaccnccgcgacatatcttcaggtaccactccgtggtcaacgaataaaagcaggaagtttcacccttctacacttcctcatttcaagcttgtaggattatggggtatccatcacatgtggtactangtggcggtcgggcgatggtgcaaaacaagttctgcacatccacaaatcacgtacaaacccaccatcccctgttgcccacctccaactgagctcacgtactcccacctagcccttatcctcgttcctctcaacgccgagtccccatcaatcctcccaagcttccacaacatccaagtaattccacatccaatcatcatggactaacaaaatcaagcaaaacagggcaaaggcagaaaactctgcccacaacacaactcanaatcacagcttttcacatacaaataccccagtaacatt

SEQ ID NO: 135925 - DNA, 308 bp, Glycine max
aatttgtattttaaatttcattaatccaattattaaactatttcatattaactcaacgaccatgcatactgaatttttgataaatcaattatctataactatgtcatgctatgatcgacctttacttatatttttaaaaactaacaatatattatatgataaattaaatgtattcaataaagcattaccgtatatattttgtcaacaaatactactaacaaatattaatagtgtataaagactaaatgaccacaaccacatcacactatgttgttttttccaaactcgattacacaatatcctgcttt

SEQ ID NO: 135926 - DNA, 420 bp, Glycine max
  unsure (1)..(420): unsure at all n locations
actcacgcttngataccatatcaaaattagagaacttagtgatcaaattatattattagaaaacattcagaacagaaaatggagaaactgatattattgattctgaaaaagttagntctaatgcagttacaaaggaggtatttataaacctctagaccttgaagtggattgcacctcacaacaccatttggcacggttaaaaaccaaatcttcatatattatttaccaatgcacttgctaataaaaaattttgtaagcaatataaaatcataaacttgtaacttattgaatgtttcagacgtacttcattattttctgattgataggcacttctttgaactcgtttctcaagttctattatctcatttcgcagaagctcgaagcggcggatatcattgggttcttggttcacaaccccta

SEQ ID NO: 135927 - DNA, 439 bp, Glycine max
  unsure (1)..(439): unsure at all n locations
agcttggaataaatgcaagctgacagnttatattctttccttngnntttttccttgcccttntccttaactctcttgaattttgatagatgaatgtatgatgtatcattccctgatctctttctctatcgtgcgctatgatttttttcccacattgaggaaaaagtataatccacaagatagtgatggattgtagtgctttatgggcaattcatatgtgaaaatacagcttttctgtcactaaactatcactgaattataaacttcccgaataaaaagaagtgacactactattagcttaactctttcattcttgtaaattgaaaattttgattatatgttatggtggtcccagaccatataataaattctcacttggtgcttactatattcctgtgttctcggaattcgtttggatcaaaccttatataagtaatcac

SEQ ID NO: 135928 - DNA, 443 bp, Glycine max
  unsure (1)..(443): unsure at all n locations
agcaatgtaatgtgtattctaatatctgctcttctgctgctacatcagcctttttctcttgtttctgtttttgaatcctttttccctcttattatattcacttttattctgttatattcggntatggtgtgcatatggaatgtctactgccggtgtgtgctgaagccatgcgattcctatgattttctttttattattctccattttgttgttattttattatatttaacatgtctttgttattatatctttacgtatgtagaaactatcattaaaggaaatagttacaaaaattctaaataaaatattggtgaagttctagtgaagtaaaatttctaaaattaagtatttataatctaactcaaaatagaaaatataattctcaatggaaanaggggtgattggattacatctttccatcttctcaattttgggatacaaat

SEQ ID NO: 135929 - DNA, 343 bp, Glycine max
  unsure (1)..(343): unsure at all n locations
ctataccggaaaacaaaacttattgtttttccccaaacacaangccattgggagaagctatggacatattcccccactatgaacgctagacttaaaaattaaaagccacaagggaggtgtaaggctagaatctgatacataatctctactacaacataaacatcgaaactttcaaccagtggaacaagccaataatgtgataacagcattcatcccatttcctaaaaaacaaaacaccgatgggacgagtctggccaccatacagggctagcaataggattggaaaaccttacaaaaaatactgtaggaaaatcctacatgcactctgacgtcaatatatcaa

SEQ ID NO: 135930 - DNA, 444 bp, Glycine max
ctgagctgcagctttactagaacatattgtatctgtcatcctttgttactgcgcaaggcataatattaaccagggaaactatacaagatagacgtttgacagaattgatttaaatatatgatgctacaatataagataagatgctaaatctcatacttgaattctagttcgtctattatgaaatcaatgaaaatctgcaacaaaaaaagagattgtcaatactaatccaaggacaaaaaattatcacccatttgaaaacaaaatttttaaacacctgcgtaaccaatcatcctctcttgatcaaacaattttgagggtctgaaaccatttcactgaacaaagtgatcattttcaaccataattcattgaacacagacatgagcacacagaagaaatttgtattctgagaactgtcctaatcagctatgctgtatgggtaatatg

SEQ ID NO: 135931 - DNA, 433 bp, Glycine max
  unsure (1)..(433): unsure at all n locations
caaaatatatgatttgcctatttgagaactaaaatcaaacaataaaacagaacataatttagattaagtttgggaaaatacatagtacctatgctataaaatgtccaaacaaaaacttataaattgcaaagagaacaatatatgacaaagccaataaatagaactaaaatcaaacaataaaacaaaacaaaatttagataaattttgggaaaatacatagtacctatgttataaaatgtccaaacaaaaatttataaattacaatacttcttagagccacaagccagccaatgtggctacttatgcaaacgtgctacctctagcttatcttgctacaacaccaggtaccagccattttaatcaattacatttactttcgtggtactcaaatnttggatacagcgttgttgctactacaaaatgatctcatgat

SEQ ID NO: 135932 - DNA, 353 bp, Glycine max
  unsure (1)..(353): unsure at all n locations
gcttccttctataaagacgcactctgaccatgaccaccctnatttgtccactttccctattcctatttcagtcagcactatctcctattatcacccatcattaccatcgtttcatactctccagagacccatcaccagcaccatcaccatcaccacatctgtctcagccattccttttattgttgcatggcttgcaaagctcaacaacacaacgctttggccccttcgaacgacctttttttagcccttcttcccttcttttattaaatgacccttctacccttcaggttgctaccaaggttcttttatctgggccatcactgtctttattactaatgcacaccacacaaaat

SEQ ID NO: 135933 - DNA, 393 bp, Glycine max
agcatgtcagttgagctgagtccacctcttttaccttcttggcattttcgaagaacatgatggacaagttgaagcgttccacaatatcaccatcaagagatctaattcttgagtgaaatcccttgttcgaggtgaagagctatagtttgtatagtaaatcacatatcctcttttttgtactaagtctaacaggggttgacaaaactaaaatccaatggggttgttggtctagttgaggctagaattaaagtccagttggggaaatgacaagttgttgaaaatcaatggttgctacgtcaattatgactggttgtattagtgaaatctcatcttgaagggtaagaattggacatagcccaagcttggagtgaaccaatataaaacactaagtgc

SEQ ID NO: 135934 - DNA, 413 bp, Glycine max
  unsure (1)..(413): unsure at all n locations
tangctaaattaatttaaactttagtaagctattttagctaagtctagtccaacaagaaggatctgaggatgaagcttagtttaagttactctaaacctatgagggctgtctaaattgagcctagttcaacaagagggatctgatgacgaagcttggattgattcactctaactagggatcgaggtttaataacttaagctacagcatataacacaaaagcatgattgattagagaaatatctttgtatgcatcagctggtctgttagaaagacccaacatttctacctactgttgcaattttacttatttgcatttttactatctttagcttagacttagnttaattctattctacatcatcatctatcaatgtttcttttaccatgccttatttctgaatttaactctatc

SEQ ID NO: 135935 - DNA, 427 bp, Glycine max
  unsure (1)..(427): unsure at all n locations
agcttgacaaactttccctgagttcaacttctntaatgcatgataaaagagattattataaaggatgatcatgcggacacacacacacacacacgcatatgtaatagtggaaataaagacacataaagtagctctaaaaaacactttttgaattaatgaagaggtgtgtcgcaacctacccttcggcgggagggcgaggcgaaacaaaatggcgcgccttagaaaagaagaaaatgcatggagtcgccaccaatgtttattcaaggaaaacattagaaaaaccaaaaagacgaaggtctaagaattttgagaataagggttcgggagttggttacgcatggggaagacattaacaccctacgcgctcgtcacaagggacgacagcccttaatcgagtgtgcaaacatgacttcaaaattatgatttc

SEQ ID NO: 135936 - DNA, 321 bp, Glycine max
  unsure (1)..(321): unsure at all n locations
attaccatatatcctttctctcttccttccacctataacggcgcacattcaccatgaccatcttntgttttgcactttccctattccttgttcacttaaaaccatcacctattaccacccatcataacatcctttattttctccagagacccatcaccagcaccattcccatcaccacaactgttgtagccatttcttttattgatgcatggcttgcacaactcacaacacaaagctttggcccctctgaactacccttttttagtacttcttcccttctttattaaaagaaccttctaccttcagggtgctcccatgttc

SEQ ID NO: 135937 - DNA, 309 bp, Glycine max
  unsure (1)..(309): unsure at all n locations
gaactattgagacttgcttcttcatgatatctttagtcagatatttntttttaaattagaactatacactgagaaggtaattacactaaatctaaccaaataaaaactaactttttacagcaatatagagcatattgagaatgtcttttttatttaacaaaagaaaaaaaaattgcctaatactactacctctataaataccagtaacataggcctaagagctactacaaaatttgtttggtttttcatatgtaatgaacggtcatgaatttttaagagaacctttcctggtgaaagtacaaaaagaga

SEQ ID NO: 135938 - DNA, 457 bp, Glycine max
  unsure (1)..(457): unsure at all n locations
tcttgaagaagcctcttaatgaagcttcttgaggaagcttcttgaatctgcctcgngaaaaatggtgcccacccttcgttaaccgttggatcttctcacaattaggtctgtagcttcaaaagacacttttccacgatctgaccgttgggatctttgagaagatgtttggagtgttctcgaagcttccattcccgagagcatttcttatttatgcacttcagcctttactttcgtgtagcttaggaaaaacgtcatttcttcttctttctttcttccaaagccatttataaagttccaagcactttctccatcacccacaaccaccattagccaccacanaccatcattggtctccattgaaaccccacaccgagatgaacccttcaaccgaagcggaatcttccaacttggcttgcggtttcggtagagaatgaaaccctaatctgacctttcattt

SEQ ID NO: 135939 - DNA, 445 bp, Glycine max
  unsure (1)..(445): unsure at all n locations
ngacatcaaatccatcatatagcccncactgctcatcaatttcttgtcttgtactagtgataacaagttctgctgcatccagagaaagttcttctgcctcaatcctcctcatcatcttataagttgaattgatatcctcttttgattggcgtccctgcttgagaagttgttcaagcttgtttcttccaagtgaatgacctgtaagcaccattggtacatttaaagcacctgaaagaatagcagcagtatctccagcatcagcgtaatgtccatgaattacatatggccagacaggttggcccccaccaacttgttcacccaatacttttgacatattgagaatgtgtgctaatgctccatccacaaattcttgaatataaggccaaagaagttctttccggaggtatttattgcgtggaccgaagggtattcttatgatatatgc

SEQ ID NO: 135940 - DNA, 356 bp, Glycine max
  unsure (1)..(356): unsure at all n locations
agcttatatgcaatgtggtaccatgtcagtgtaaaactaccctanggcgcttaggagtacataacaagacacaccatacaatgggtttgtcaggttactctcactaagtaagatcatagggagaccagttaggatcacgatgttttgagagaatgctccaatcatatgggatcggcataggcttaaaggagcactcaaacccgaagacccccaaggcctacactccgaagagtccgtcaaggcctctccctcctaattcaggtccaacccctaaaatcattttagcacacagacattgctcgtgaattatacaatacccatgacctcacactcgtgttttaaacacgtacaacata

SEQ ID NO: 135941 - DNA, 460 bp, Glycine max
  unsure (1)..(460): unsure at all n locations
ttgcgacaggcttgtcactggagctgacccatcaactgttctaactctnttatactggcgattcctaggctcttgatcttgacttgatagaacctctttttaagccaaggcgtttgactcgatcccatgttttactaaaatggaataaaaactagtgcgaatcaagactttgacacctatcacaggtgaaatggatgaatgcatgaagaaatggtatggcacaaatgcattttacggatacgagagctcgggagattatctcattcttacatacaacattcgggcggcatagcgcccgatgcatgcatttaagaaggtgacatggaccttntgtcttctcgtgacaaagtgaggtgatcaagacgcaacccgtgcatgatgacatgatgcagatgcgaaaaagaaagggataacaaggagatgtacacaacatggcaatattcacaaattatcatacagc

SEQ ID NO: 135942 - DNA, 484 bp, Glycine max
  unsure (1)..(484): unsure at all n locations
agctntgcggatttggtctttgacggcataaggatctaagcgggtctgaaaagaggaaaanttgatcatcctactttgataagtgagaaagctggggcaaatgaagaggatgagaatgagggagaaacccatgttgcgactatcattcctacacggccaaacttcccaccagcccaacaatgtcattactcaaccaatatcagctcttctcattacccaccacccagttatccacaaaggctatacctaaatcaaccacaaaacccgcctaccacataaccaatgctaaacaccacctttagcacaaaccaaaacaccaaccaagaaatgaattttgtggcgaaaaagcctatagatttcaccctaatttcggtgtcctatgctgacttgctcccatatccactcggttattcaacgggagccatataccccaccatagtttctcaacttccatttttctcaggatacgacttgaacgccacat

SEQ ID NO: 135943 - DNA, 450 bp, Glycine max
tatccttggcataaaatgtcatgcgttctatataatattctcatattattattgtatgttcaaatatttaaattattttaaatgatctcttcggacttggtagtggcttccatcattatatttcatgatttgcttacttttttactttaattaggccaagcggtctggatgtctagtattgtcataactaggggttactggcattacttttctttcttatcacagcatcacattgcatcattatcaatttctaattcattagctcactctctctgtcctcctcctctacatacatccatttaatttgaacatatactaaacacgagttctaaattttgtatgtcaatgctagtgatgatcgttcaacagcatcaattgaagccaaaatccttgatgtggtccagatgaactctgtcttgtctgacttaaagacaaagtgtctgcgatttt

SEQ ID NO: 135944 - DNA, 343 bp, Glycine max
cagctgcagcttgaaggctgagattttgttattgagaaatctggacaaggattcttaactggctccaataatgtgagcattagcatcttatagtatgcggatgatacaatcttttgtggggaagcatctcaagagaatgtcaaagcaatagaagctatcctactgacattcgaactaggatgaggtccaaaaatcaactttgcacagagctgttttggagcatttggggtaacagatcagtggaagtaatctgcagccaattacctgaattgtaggatgctggcttttacttttgtttaccttggcatacccataggggccaaaccgacgcgatgtcaaatgt

SEQ ID NO: 135945 - DNA, 398 bp, Glycine max
  unsure (1)..(398): unsure at all n locations
tagtggcttggtatagagtatgaaatcagaatcatgaatttttagacgaatattctacccggaagagcatgcactctaagagaggtttaataaatatggtatagataattggttgaaaactcggacaaataaaagtttatccatgaaagatgaaccttanagaaactactaattaatggatagcatatgttcatagatataattaactttttacagcaatcgacccttacatattatatatgaagtgtaagtttaaaaataactcatcattctaagtgtttcattttcaaaaaaagaaatagagcattctcctttttactaagtggtgggcatagtgtcaaaaaaatacggtgctacataatatttttaaaattacgtgagatatgtacatacattta

SEQ ID NO: 135946 - DNA, 368 bp, Glycine max
gaaattgtcattctggttgtcaacacttggctttggaggtaccgcagaggacccaagcaaccgtatgttttcctcaaaatcattagggccatgtttaaataaatgaaacaatgacataaactcttttctatgaattcaaagtaatttatgcataggttgaaataattttttcttctataaagtgttatgaatatttattcaaacagaacgttagttattgcacccaaagttttgattctgacaatagctaatacataattaacttgaccattttgtgatgcagatgggactatgttccaataggcgacaagatacttaaagacatggatcgcatggaggctttaaacttggtttgacacatggctaat

SEQ ID NO: 135947 - DNA, 458 bp, Glycine max
aaactcagcttgacacacatattctcatactcaggatgagatattctttctgcctctaaatggaaataaggaacttttaatgtatttgattgatgacaatggagagaattatgattgttctgtttttttccattgcacaataaaccaatcaccatgcaactttttattgtgatttattttcgtaattgtatgacccccatttccataattattggaaatattatcagcaataatcataacatttaattttgttgtggaactgtctcccacttgccctagtggcgaattaagcactttcgtatcactctcatttgattccatgtagttttttcttaaatcttgcattcccttaataaatgaccatattatatgaagaccattatattcaaccttatacgcaaaatcttttatccatacctttcccacaaccggctgtcgttaattgatttcacacatac

SEQ ID NO: 135948 - DNA, 451 bp, Glycine max
  unsure (1)..(451): unsure at all n locations
agcttgaatgagtttctactttataagttttttatagaaaaacactgtagggtgttttctcttgggattgacaactaaatttacttcgttactatatagataacccgttatttttttgtactgtttgataatatcccttggttgttagacaacttcatattacagtgctctatgaattttgtcatttctttgtaacaaacaagacctcattatccatctcttattgtgtttaggcatgtgaatgatgtgatgtatgttcaaagtgatttcaagacattagttgtggagaaatacctaatcaagatgattttagctacattgagatngacaactaaacagaagaagtttaagaattacaggagtgaattntattggtatggctctttcaatgtcatcttcttctaggactccaacttctacaagttccaaaatgttgatatattccattctt

SEQ ID NO: 135949 - DNA, 448 bp, Glycine max
  unsure (1)..(448): unsure at all n locations
aagtcacctaaagagatcatttattggcctttgccttaatggtttatctcctttcaaaaaaatcaaaagatcgtttaatggtccaacgccttaaacgacttnttgtttggtcacaatatatcttgcaaaaaagataaaaacaacttaaccaacgtttatgtttcaaagaactacgtaggtctgatgtccttatcacaattaaggaatacgtatgagcaagggaaacacccttgtcgaccacaaaaagataaaaatacaaaaaagggcgtaaaaagacgtaaacataaaaaaagggaaaataaaacaatttgaagtcatctttgcacacttgattaaaggatgtcgtccctttgacagccgcatggggtgctaataccttccccgtgcgtaaatacaactcccgaacctttcacacttaaagtacgagaccacaccttctgtttttcga

SEQ ID NO: 135950 - DNA, 456 bp, Glycine max
agcttcttggaaaaaatgctattggatgtgtcattctgatgtaatactgctccaataccagtaccggacgcatcagtttccagaatgaagggcagctggaaattatgaagagctaacactagagctgaagtcatgactttcttcaattgaacaaatgctgtctctgcctctggtgtccacttgaatgcttcttctttaagtaaatctatccatggtgcagcaagctttgcatatcctttgataaaccttcgatagtaaccagtgaggcctaagaaacctctcaactgcttgatattgagtggtgtatgccactctagaactacctgcaccttagtagcatccgtagcaactccttcacctgaaactatatgtcccaagtagtctatctccaatacaccaagagagggattagataacttaccagacaaaacattttctttcacactgtcaatacag

SEQ ID NO: 135951 - DNA, 343 bp, Glycine max
  unsure (1)..(343): unsure at all n locations
tttatttaaatacctattatcctgagcagctacgtgagtcaaaggtgatcaaataacaagcagagaattaaaaggtactatgttccctcctagtagcgcttctttaacgtcttgagctggacaccctatgacttgtcggtcacgggcctagtactttgcttacctttggctttggacttggtcgcctattggttgaccatgtgtcataggcaacgctctaaccttattgtggatgagctgacgtgaactctagaagtggtggcggngcatctgttgctcgttggccggcattcttaagctgccgaggtggctcgccttggcctggctgggggtgcacaacttc

SEQ ID NO: 135952 - DNA, 456 bp, Glycine max
  unsure (1)..(456): unsure at all n locations
tnctatccactntttcctccataacctaattacacatatattttaaattctagagaacaaaatttcaatgtcagaaacaataactaaggacaaaactcataatgatttaaagagcccattctgaatgcatgctttttgtgaaaaattgcaaatagagaagaaaatcgagttaaacaaaagtacaaggatggaaagtgagagatagaagagtagagtgtaaaagaacttatgctttgcaaaaacctgaaaatcaagttctgaggaaaattaggttctaagaaaaaacattgtggctattctcccattgctttaatttggactcactttgcacttcaatggcaataccctacaaactcgtgcaaattagatatgtagaaaattaaataacagagttgtcaaacttttgtcaactatacatgtgttaggccaatacttattgcaaaatgtanggatttg

SEQ ID NO: 135953 - DNA, 313 bp, Glycine max
  unsure (1)..(313): unsure at all n locations
agcttgcaagtgtcntctgggataattttnatatgatgngtctgcgttaaccagtagatatctgaagctcctagaaaacttaccctgatcgaaggtggtcatcaagtccacgtatcctctagtctcgactctctcgcttgcaaaaccgaggagtggaccaacgtgagggtagatagtgtcgggtgagaccttgagtctctagaaggttntccaatacagaatattagtgaaactcccttggtcgataaggaccctggaaaccataaagtttgcaatgatgacggagacaaccacagggtcatcttggttgaca

SEQ ID NO: 135954 - DNA, 299 bp, Glycine max
agtcccaatgtaatctgtctatgtgtgagtgaactctctacaaggctcactcttagtacacatatcccaagggagtttagcacactaatctagaaagttatcatactaatctagaagatcagaataagacttaccagttttagcaaaaacagttcttatcattttttggaaaaacttgactttatccttttatagatagtttaggaaaagtgtaagaagtcatataaggcatggctgagcttgctgagagcaccttaagggatatccaagctatcaattactcatattaattggtattc

SEQ ID NO: 135955 - DNA, 362 bp, Glycine max
  unsure (1)..(362): unsure at all n locations
agcttgcttctacatagggcaccaaaagttgatatgtttgatatgtngnnngagntcaatggttagtttttggtgaacaagttcaagccattgtgtaaagttatggcctttgtgaccattgaaagttttgtattgttactaacaaaggtgatgccctcattagtattgcaaatttggtcgtattagtaaacacaaacatatgtagttaggtgacacattgtggtagggattgagatgaanatttgaaattgttacaaatgtctttagctatagtggtatttaatagaattggttatagttgggtgagtcactagttaactgtgcatttagatgaacgggtaaatgaacacttaagcatattt

SEQ ID NO: 135956 - DNA, 274 bp, Glycine max
  unsure (1)..(274): unsure at all n locations
aactcaagcttcttcacaaacgtggcatttgtgcgcaatacacaatgttctgtacattactcaaaatggngcattagaaaggcgtaatagaactttaatggatatggctaggagtatgttaatcaattcaactttacccatatctttgcggatgcatgctttgaatactgccatgtatttgatgaatagggttcctactaaggcagttactaagacacttttgaaccgtggacacatatgacacctatcattatgcacctgtatgtatgcggtt

SEQ ID NO: 135957 - DNA, 404 bp, Glycine max
  unsure (1)..(404): unsure at all n locations
agctntgtcgcctatggagggaggacgttctactgtttttattgggcgaccaggncaccctattcgtgcccgtgctgctggagccaatgtaatgatcaaacaatattttggaccaacttcaatgagctcccgcacgtctatgtccatgcctcctgaagacctgtaacagctgacacaaaaaattaaggaccagcaagaggagtcgatcatagaaaaagttacttgaccactaatgttgtccttcagccagatgtattcccagatgcgtcgcatatgcaatcttagggactcacactacctcctaaccctaaggttggtccttctgctgcttgtgtaacacctgagaagcaagttcatgaggatgaaccaacaattttatgatgcacaagcccactattaattca

SEQ ID NO: 135958 - DNA, 413 bp, Glycine max
actaagcttatgatgatgaatcaagctgattcaagaagctctgattatgacttttatgttgacaaaaaggccacagaatgattttcagattaaatcaataacacattcgagaatcatgagaagtttgatttcaagattcaagaaaagacgaattctagttccaagagaagaaatcaagaagactttacacgggaagttttgaaaagatttttcataaaacagacatagcacaattttgtttttcaaaagagttttcacaaaattttctaagataccaaagtttttactctctggtaatcgattaccacgttcctgttatcgattaccagtggcaaaggttgatttcaaaagcttttaactgaatctacaatggtccaattgatttcaaaatggtgaattcgatacaagatatt

SEQ ID NO: 135959 - DNA, 419 bp, Glycine max
  unsure (1)..(419): unsure at all n locations
agcttttgcaagttggaatcatntatcctatcttcgttatccaatgggngaagcccgtccaaatagtctcgaagaaaaccggcctcaccgtgataaaaaatgagaaggaggagttgattcctactcgggtgcagaacagttggagagtctgcatcgactataggaggctgaaccaagttaccaaaaaggaccattttccattgccattcattgaccaaatgcttgaatgcctggcaggtaaatctcactactgtttccttgatggtttttctggttatatgcaaatcattattgctcttgaggatcaggaaaagaccatattcacctgccccttcggcagttttgcctattggaggatgcctttcggcctgtgcaatgcccctggtaccttccagcggtgcatgactntaatgataaat

SEQ ID NO: 135960 - DNA, 462 bp, Glycine max
  unsure (1)..(462): unsure at all n locations
aagcttttgccanaaacatggaccaactattgatttatttagattttctatctagncaaggtctgagagaccatacaagtttcctaacgatttctaattatgtgggccattaagtctatcatatgctgacaatagccgagaagcccatgaatctcttcgggggcggagtaggtgtctgccatcgccttggccttggctaacaagcggggaagttcttgactcccgttcaaggtaagagcaaaccgatccatccacatggttgcctcttggtgtaaagagtcgatcacccttcctctagcctctntttccgcgtatactagagcatactcgtccgcgattctatgctctggggccgtggctagacctaactcttcttggtacttggcgatgatagctagcatgttggtctccgtctcgcataaacgctgagacaagcttcttttggaccttgaacaagcaact

SEQ ID NO: 135961 - DNA, 303 bp, Glycine max
  unsure (1)..(303): unsure at all n locations
agctngctctanattacatttttgtngtatttatgggaggaggntgcatgtcatttttgttttaagagtagtgtcccactggtaaaactaactttccaaatgtttgccttcgcaggaaatggccccgaggaagcttgcctcaaagaggtccaggaaggacaaggcagccgaaggaactagttctgctccggagtatgatagtcaccgctttaggagtgctgtacaccagcagcgcttcgaagccatcaagggatggtcgtttctccgggagcgacgcgtccagctcagggacgacgagtatac

SEQ ID NO: 135962 - DNA, 443 bp, Glycine max
  unsure (1)..(443): unsure at all n locations
gggcaaaattccttactgaagaaagctatatgatgtttattctgtgagaggactgctctgacgccggtgcctgatgcatttgtctctaccacaaaaggtatatcatagttaggcagtgctaatacgggggccgttgacaccgcctccttcaaagtggtgaaagattttgtggctgcctctgaccactgaaattggcccttacacaacaactgggagagaggtgccgcaatcttagcataccctttaataaatcgtctataaaagcctaccaacctgagaaagcttctcaatgattttactgattgaggaagaggccactcctgaatagcgtgtaacttttctggcaccggttcaactccattaccggaaacgacatgcnccaggtactctaattgggactggcaaaagtgcatttggacgtttatagagaactttctgaaaca

SEQ ID NO: 135963 - DNA, 349 bp, Glycine max
  unsure (1)..(349): unsure at all n locations
agctnggaaggcaaacaacgcttaccttatgctttacaaggcatcattcagatgactaagtgaactcgctttattaaactaagttattcagtcgtcaacacactgccattaaacaaatgttcaatacgttgtgacaaccccagcacttatgcactgagtgtttctacatgtccgaaaagacataactaacttacactatgacttatattatattacgttacacccagacaatttatttatcttcagtgctttaggttatctttcgatgcacataacttaatataaactatctttgtgaaaagctatttttatccattggacactcttattaagagcattctcttcaagt

SEQ ID NO: 135964 - DNA, 356 bp, Glycine max
  unsure (1)..(356): unsure at all n locations
agcttaaaggcgngtaaccctcttattttcatttagaactaccgaaacgcgnctactatcattggtatcatctccctctccatcattgggggcactacttgagctgccaaatccctccacctttgagcgtattctttgaaagattcatgctccttcttacacatgttctgtagcagcattctatccggagccatttcaaggtccaatgccttaaacgaatctttgttcgcagataaaataaatctttcaaaaacataaaaatcagatttacacacaaacattcagattaatagaactacgtatgtctgaatatctcatcgcacctgacgatacgtacgagccagggcaacaccctt

SEQ ID NO: 135965 - DNA, 312 bp, Glycine max
  unsure (1)..(312): unsure at all n locations
gaggaagtgtngaagggtgaaactttctgcttttattgttgaccacagagaggtacctggagatatgtctcggaggtcaagacaccttgtggacgtcaggtggggtgctattgtccaataccaagcttgaccaattccgatccaacctgggcatattcggtcattgagaacctgtgatgtacctaagcatgcgagctcctgccagtcaacagataaaaggaacatagaccacacatcatggaggcttgtggtggctggccagctgtgaattttgtgctatatgtggattgtggcctctggtaatcgattacc

SEQ ID NO: 135966 - DNA, 388 bp, Glycine max
  unsure (1)..(388): unsure at all n locations
agcttcaatggcttagggaggatggagatgtgcaagtaatgaagcaagcggagttggatatttccattggaaaagtacaatgataaggcgctttgtgatgttgctcctatggaggccagccacttactcttggngagaccatggaaatntgataagagggctaatcatgatggtttcaccaacaagatctctttcacgtatcaaggcaaaaagatagtgctcaaaccattgagtccacaagaagtgtgtgaggatcaaataaaaatgagagataaaattcttcccgaaatgagaaaaaaagaaaaagagagccaaacacttgagagttcataaagtgatgacatanagagggaaacacatgagaggaaaaagatgagtgaaacacttg

SEQ ID NO: 135967 - DNA, 438 bp, Glycine max
  unsure (1)..(438): unsure at all n locations
tgtgagatcaaactntgccactgtgaatcgattatatgttaccggtaatcgattaccagagagtaaaaactatggtaacttagaaaattttgtgaaaactcttttgaaaaacaaaaattgtgctatgtttgttttttgaaaaatcttttcaatacttcccttgtgaagtcttcttgatttcttctcttggaacttgaatncatcttttcttgaatcttgaaatcaaacttctcttgattcttgaatttgctcttgatttaatcttgaaatcattctttgggctttttgtcaacatctttgccattatcaaaacctcttgaatcaacttgattcatcatcatgaagcttgcttctacaacgtcttgatgcaacaattgttagtcgtggccatacgagacattttgctaacaaancaagctagccataagtcgcctatgc

SEQ ID NO: 135968 - DNA, 452 bp, Glycine max
  unsure (1)..(452): unsure at all n locations
tgaggaagaataatcaaaaacaagtatttnntgtgcaaatttggcctacntagtttgtgttaatattcaactctcattctttaaatgagaaacataatataagaacaaaattaacaattaaaatttttatattctcgtatattcattttctttctatgataacaagtctaaaaaatacttaagagacatttaatattttatattctaaattgacattcttgaaggtctaaaatagttaattttttccaataatgttatcatctttcaaatgtccatttatattgaggtgtaaaataaatctagagttaaaaaataggaataaattacattttgaataaaatatgattatgatccataatacttgcctgagtttatttctgttctctaataaaaaagttttttatttttactgctaataaaatatacaatttgcgttagatctttatgctttt

SEQ ID NO: 135969 - DNA, 478 bp, Glycine max
  unsure (1)..(478): unsure at all n locations
gacactatagaacactaccgcttggtcgcacatcgttcgcgtgtatgacatccactccacattgtttggaagagaggagaccttcaatcctattacgcaacgtggcggacaaaaaatttaaactaaagctaatctaaaattaataagttacgggacttcaaactatttctaatctattatacaaaaaatttcaactaaacctaatctatcatataacaatttaaactattcctaatctaccatataaaattaataacttagagtatgtaaaactattcctaatttatcataaaaaaaatttaaactaaatctaatgtagcatataacattaagaattcaaactaaactatacaaaattattatcttacactacctaaaactattcatttatcagaatataaacatctacataaataaaacatacaaaatatattcaatatataacttacaagctctntagaaaatagaagaacacaaa

SEQ ID NO: 135970 - DNA, 359 bp, Glycine max
  unsure (1)..(359): unsure at all n locations
agcttcatctgcagatccctcatttaagactctatcttattagacattcctcttagctttagactaacttaaaatgagtttcatccatagatccctcatgtaagactagactcagctcaagtagcttacaaaagtgtagcctaatttagcctaagctacgtccgcagatccctcatgtaagactaggcctaaactaaacagcattattgtaacaacatanattgaaccaaaacttaacccgcagatccctcatgtaagaattaagtttgatcctgcttcaatcaagttctaaggaacagtacatttcctaatgctaagccacctaactgtgcacacaaatgggtgatcagaccaaaagc

SEQ ID NO: 135971 - DNA, 472 bp, Glycine max
  unsure (1)..(472): unsure at all n locations
tcatgatgaatcaagattgattcaaagatgttntgatgtatttctaggtgatgacaaaaagctcaaagttcaatcaaagaatgagttcaagatgttcaagatagaatcaagaacacttcaagattcaagaggaaagttgatttcaagaatcacttcaagattcaagaggaaagttgatttcaagaatcaagaatcaagattcaaggatcaagcttccaagaatcatgatcaagattcaagattcaagaggaaagttgatttcaagaatcaagaatcaagactcaaggatcaagcttccaagaatcatgatcaagattcaagactcaagattcaagaatcaagagaagacttaatcaagataagtatgaaaaggttttttcaaaaactgagtagcacatggatttttctcaaaacatgtttaccacagagttcttactctctggtaatcgattaccagattgtcgtaatcgat

SEQ ID NO: 135972 - DNA, 230 bp, Glycine max
  unsure (1)..(230): unsure at all n locations
tctgacacttctgttctaccatttcttgccaaaattactgccttttccattattgatatcatagaaggataatactcatccatccaggatcactncgacaaactgattgcgtcctggtaaatttaaatcttggaataaacttttttcaaccatttcatttcagaaatgatttgctaagatgaaatgattgtctgataattcctagttgaaattaactaactttggagatt

SEQ ID NO: 135973 - DNA, 425 bp, Glycine max
  unsure (1)..(425): unsure at all n locations
agcttccactctagatcacattcgagtacttaacgggtgtgaatntcaaacgctaaaaaccagaatacacagtacccttaagctaactaacaagcaanttttggatgaaatttactaccgacagcctttcacatatgtaggtaatcaatcttagtttcaatgtatacaactgaaaaatgatgctgatgttaacacaatgttaatgtgtaatcatgaattttcgtttgttggtccagatttaaactcaactattaatttaactgaagcaattttacgatttacactaattaatctacacanttgatttggtatntgttttttttttgttcgacaaaatataagattcatcgattcggtatttgtgatcactatattttaccatacaaacgtaatttgtgtaatcatacatatatntgacacctaat

SEQ ID NO: 135974 - DNA, 470 bp, Glycine max
cagcttaagacttgtcatctagcattctctaatagtcttatggtctgcatggactgttatgaaggacctagcgttcaaggggaacttcatagtcaagtggggggtagacactatggcacccaaagtatttaaagacggacaaccaataagtatattgtaagaggtgtgggcatgcactatcacatattaaatgtttaaacctttctgttgtggtccctcatgtacaaaattagtgaataattatatacatcccttggttcctactctttctccaatgaagctgaataatgggttgttatggggaaggagctatgagtccggtatacctaactgcttgaaagtgttccaaaatatgatatcaatcgaactcccttggtcagtaattgtctttctcactatacagttggtgatttctacgcttatcacaaccaaatcatcctcacatggatctattgctttgaagtcagtca

SEQ ID NO: 135975 - DNA, 261 bp, Glycine max
  unsure (1)..(261): unsure at all n locations
agcttcgatcacttttgctcctacgtatctctaatttgtgatgangaactcagacctacgtagntcttgataattgtgagactaaaaatagtctcggtgttttcttcactaaaatgcgaacatgcttttgtaaagagacaaaacttccaactgatcagagcaacatatgccttttggatgaaaaacaatgtgtctatcggggaaggagagtatgctgatgaaattttctcctcatcggaaatgagaatttggatgttagca

SEQ ID NO: 135976 - DNA, 416 bp, Glycine max
  unsure (1)..(416): unsure at all n locations
actaagctagctaacccatggaagctcctaatatctcccacactntttgttgtgtttcattcatggatggccttgattttctcaaggtccacttggaccccatttctaccaactaccaaacctaagaaaactacattatctacacaaaatgtacacttctctatatttgcatagagggtgtttttcctaaagactgaaagcacttgcttgagatgtcctaagtgatcatctaagctcttactgtacactaaaatatcatcaaaataaacaactacaaatctacctatgaaatcccttaagacatgatgcataagcctcataatggtgcttggtgcattagtgagcccaaaaggcatcactagccattcatacaaaccaaacttggtcttcaaagcggtnttccactcataaccctc

SEQ ID NO: 135977 - DNA, 402 bp, Glycine max
  unsure (1)..(402): unsure at all n locations
agctatggatgtggtgctcgctgccatcatcttcgttttcttcacatttggaccacaaggaacaacattaaatatgacaacttcaatactaattntaggtctgtcacctctgctattttagctaacggtcatctttctgggcacattttttctgatactatgacaaactcaatgtcagaatttggtatcatatatagccttggtatcaattccaccctaaaaaaaagagagctcattaaacagggtgtgtggaaacaaccgactgctctttgtattatagagtaaacaaacagtgcaacaagaagatcccaggatgggtggagcagcgtattatataaaggtgggtcttatgggtttcttttttgcaaaatggtgaggatggaatgaaaaaaattatacaat

SEQ ID NO: 135978 - DNA, 474 bp, Glycine max
tccatcaagtggtaatcagagcactagagcttcaagtaggtgtcttcttatacctccattaatttttgctttaccttctcttccattgttgcctcttcatttttttctccatgtatctcctcacatgtctggtgataaatgtttctaacatgattctttatagtttccaccgaataaacttgctattgaagctagatttgattttctatggttcaaatgtcttgttcttgaaccatgaattgtgttgagtttaggttcctttgagttttgtcttgttattttttgtggctgaaacctaaaccatataattcttacaaaaatattaaagtagaagaaaacctccaaaatctagagtgacttgttcacctattgtagttttgccataaaagtcatgtctggtcatgaaacttggcacataagaattcttatggtgtgctgaatattatttttcttgtttctatgcctaactcattt

SEQ ID NO: 135979 - DNA, 422 bp, Glycine max
  unsure (1)..(422): unsure at all n locations
ntaactcggatgtccgattcaggcgcagaatatatcgagtcacttgatattgaataacagaagctctcgagaaattccaatggtcataacttttcacacggatgttcgattccggcgcataatatgtccagacgctcgaaattgaacaacggaagctctcgataaattccaatggtcataacttttcactcggaggaccgattcaggcgcataatatatcgagacgctcgaaattgaacaacggaagctcccgagaaattcaaatggtcataacttttaactcagaggtccgattgacgcgcatcatatatcgagacgctctgaattgacaacgcaagctctctagaaatacaatggcataactttcactcgaggtccattcacgccgtcaatatgagacggtccaattgactccgatgctc

SEQ ID NO: 135980 - DNA, 317 bp, Glycine max
catccgcattgagtgatgtattgcgcgatgcatcttaagcgctatcttgtcatatctgcatcatcatggaggagtaacaagaaggaggctaacgctagaacatataatgttgttaaaactctctgttctaatcgattacaggctgattagaatccattacacacgtgtttgtagcttgcaaagaactttcttgtatcggattacacgattacaaggcaatcgatagccattacacaatctctattctagacaatgactgatatgttacgagtctctactctaatcgattactatgtgactgcaatccactacttctc

SEQ ID NO: 135981 - DNA, 362 bp, Glycine max
tctccagatattgatgcgcctatgatgatcataacaaatggctagcactgtgagagttgaacatgctaattaaatgaaataccatattccctatacatctgagaaagccacactccctaatgtgcttcgaactccaaatatgggaccctcttacatgagaatgtttgttggattaatattatcaccccacatgcatgagagatcaagttgaattcaaactccagatagaagcttcattcgacttatgaaaagagatgccaagaaacggataccgaataccatgactattacagcagctacctgtgtcgcgccactataaattctcattgcattgatgactggtgagaagtgttcatattgca

SEQ ID NO: 135982 - DNA, 216 bp, Glycine max
gtggttgtattgtacgagactccacataagcactattcacaattttcaacgcctgaaacgatttatctaatgactccttcattgcttaaacataaggcattgaagatggacaacttactattatgttattcttccctgatactataacaagctgacccccaccacaaatttaattttcttatgcacagatgatgggaccactctactgtattggat

SEQ ID NO: 135983 - DNA, 287 bp, Glycine max
cagaaatacaagaagtgcctacataaaaactactcaatagcctcaaatacaaactaataccctatactctataatggccaaaatacatggcccatactaaggaaaaacccattctaatcactacgaattattagcatgctcatactcatcccactggctctaaatctaccctaacgctcatgagaatcctagggcctctcctgggatcactggcccaatctacttgcgatcgtctatccaatgccattgccgagtaggattgcatcagaacctatataacaacacca

SEQ ID NO: 135984 - DNA, 251 bp, Glycine max
  unsure (1)..(251): unsure at all n locations
tgaagagcgagagctagagagtgcaagaatgagcgcgggttgcatcgcaagggtttgtgagtgaaagtaagggttgcatccatgagagtgagcaagtgacgatgtccacgacaggttcgattccgtgaaagcaaatgggaattntagaatttcctctctttagatagaatttacaattntaagattttagttaattaataatcatatattaaaatactggtattngaaatttctataggacatccaaacca

SEQ ID NO: 135985 - DNA, 334 bp, Glycine max
ccgctcattttctcccttggagacgaacgctttggcctatctatttgggcctttccatcctgtcctgaagatggttgtgacaattttaatacaaaacttcattatgcgacaaaggggcattaatcaagaacaacataaactgctaacatagttaaactataaaaataacaccaagtttaaaaaataaatacatcatgcccatagtgtagccctatactcctctacaaacaaattgagattaattatgcttcaaccctgatgtccatattacaagcttgcaacgcacgagtttgtcataaaacaacaattcttagtaataccatatgagctatta

SEQ ID NO: 135986 - DNA, 338 bp, Glycine max
  unsure (1)..(338): unsure at all n locations
agcttccttntaatgcgtcacatctaagatctatttctatggtagtatgcgctttcgacggtagtctgcgggaggtgatgggggaaattgacatccccattcaaataggcccccacacttgcaatgtcggtttccaagtgatggacataactcccgcctacagctgccttttggggaggccatggatccacgcgctaggagtggtcccctcgacgcttcaccagaaattgaaatttacagttggtggactcttggtgatagtgtcaagcgaagacgatatgttggtaagatgcccctcctcggcaccatatgtagaggcagcggaagaatcattggat

SEQ ID NO: 135987 - DNA, 478 bp, Glycine max
  unsure (1)..(478): unsure at all n locations
aactcaagctncaacaccagaccacttgcagggtgctggaactacttcatatggacttgattatgcctacgcaagtcgaaagcctaggaggatagaggtatgcctatgttgttgcggatgatttctccagattgacctgggtctactttatcagagagaaatcagacacctctgaagtattcaaggagttcgagctatgactttaaagagaaaaagactgtgtcatcaaaagaatcatgagtgaccatggcagagagtttgaaaacaccaagcttactgaattctgctcattcgaaggcatcactcatgagttctctgcattcattacaccacaacaaaatggcttatttgaaaggaaaaacatgactttgcaagaagctgctttggtcatgcttcatgccaaagaacttcgctataatctctgggctgaagtcatgaacacaccatgcttatccacaacagagtcacacttataaga

SEQ ID NO: 135988 - DNA, 385 bp, Glycine max
agcttccatcacttaagcctaaaactagatatacattattgttttcttagcaaagatgatgatccatggttatggcataaaagaattgttcacataaacatgggtcacttaaacaaattaatttcaaatgatttagtagttggtttgcctaaattaaaatttgaaaaagatacactatgtgatgcatgtcaaaagggaaaacaaactatagtctcattcaaacccaaaaatattgtttcaactactcaacccttacaattattgcatatggatttatttggtccatcttgaactatgagatttggaggaaattactatgctcttgtcatacttgatgatttctctagatatacatggacattattcattactcataaaaggtatg

SEQ ID NO: 135989 - DNA, 465 bp, Glycine max
  unsure (1)..(465): unsure at all n locations
ctgcctaattaacttgaaattgagagaaaatgattattaatcacacattatgaaaatactaagnatttattacctatacttaacaaaaatacttataaaactacaaaataaccatatattgggagagtgtggtacaatttatacaagttttatacacaaaagttagtcattttcaccgactaacaactcccccaaatttacagttttgcttgtcctcaagcaatcaagaacaactcacttgtcctcaagtgacaatgacatgcagtgactatatacaaaggtgtatgcaacaaaagttactgatagcataataagagaatggagtaaaatgccctcatcacttgtctttcacaaggtatgcagttattcaaagagaagaatgaaatgcaccctaacaaatagatggagttaggcattagaaagatatcaatgaaagtagcttataccacagtctcacgactacta

SEQ ID NO: 135990 - DNA, 371 bp, Glycine max
  unsure (1)..(371): unsure at all n locations
agcatctattttatgatgtctcttnctattgtttacctatcaacaatgacatcccaccgtagntatcctttctctatattaaactattcctctcctctatttctnaccctttatatgcacatccgcattaatattactcagtgtgaacaacatcttttctgcgatattctataccctcgaattatcatggtgcttttctcttactccatcgcctgccttctatataatgttgtggctctttattcatgccatcagaagtagtagtgcttaatgcctgcgtgttcagagctcagacttgagagagataatttccatggaaataatgaagcctggtgtgggaaggtggaatacatacatcattaaatattatt

SEQ ID NO: 135991 - DNA, 362 bp, Glycine max
  unsure (1)..(362): unsure at all n locations
ttttgatttctattcaaaacttatcactggtaatcgattaccaaatcattgtaatcgattacacaaagcatttntgtgaaagaatgtgacttttcacatttgaatttgaatttcaacgttcaaacacactggtaatcgattaccaatatattgtaatcgattataccaatttgaaattgattggaacgttgcaaattcagttgatagctttctgaaaacaaaactcgccactggtaatcgattacaggagactggtaatcgattaccagagagtataaactctttggtagaagcttttgtgaaaacttcatgtgctcctcaatgttntgaaaacttcttagacttaacttgatggatctttc

SEQ ID NO: 135992 - DNA, 441 bp, Glycine max
  unsure (1)..(441): unsure at all n locations
tctacactntatacaagaatgaagctctgatccacttgtttacaagtggcctcagatatcttaagaaggggtgggggttgaattaagatattacaaattattttcccaattaaaaattctatttaactttctattcaagttataaattcccttaataatgaatttcttaaatattgattcaaatagaacaatttgaatatgaatataaaacaataataaataaaggagtttaagggaagagaaagtgcaaactcagatttatactggttcggccacacccttgtgcctacgtccagtccccaagcaacccgcttgggagttccactatcttgtaaattccttttacaagttctaaacacacaaagacaatccttcctttgtgtttagaattcttttacaacaagagaccctcggtctcttaattccttttcagaataaaga

SEQ ID NO: 135993 - DNA, 327 bp, Glycine max
  unsure (1)..(327): unsure at all n locations
ctgcagctttaaagacctgagccttacctactatatattnnttatgcccgagcctggcctatggcctatcaaagggttttattttggcttcgactggcctttttaaaagcctagtctggcctgatagcctttttaaaagtctttttcacattaaatctttaatattttagagtaggaacgtaataaaaagttaaagtaaaaggaaacgttgacaggaataggtaagttaataaaaataatgcggaatataaagggacacatgattcacacctaaattgtaattaaagtcttacttgattataggaatagaagttatggagcagtaat

SEQ ID NO: 135994 - DNA, 435 bp, Glycine max
  unsure (1)..(435): unsure at all n locations
accttaaaactacctcattctctcactctatcatatggactttatttgtccagattatactatgctttctgatatactgatatttgatgaatacatttttctattgtaggatngtagggttgtaggattggaagtagaactgagttttaagtttccgattggagttcctttcttatgaaaaagcttctcggctataaaggaaaatgtacgaataggtagctatgagacactcccactcttaactgatggagaattttggtagatgtagatgtagatcttgtttaataagtaagcaacaacttgtcttttgggtatgattttgatacagaggcctaaatgaaatcatgcattagtagagtggagggacatgaaagaataacgtgtaatcgcttctcttgcactttggttggaagataaaatctaatacctaagtaa

SEQ ID NO: 135995 - DNA, 429 bp, Glycine max
agcttagaaatacctttttggtttatttacacgctaatctgagaacactcctatatgaaacatgacaaggttgagttgatgggaccttgtacgcatgttgtgacatgtgtggattggatactttggggaagggcataatggaagattggaggtttttttattattatttgggaaattggaggttatgtaaatgattcttttaatttactaacatagcaagctttcttattattattttcatgcattgacaatataaattgcgttaatctgcaattaaagataatcttaattattttcatggatggaaaaacttggaatttgctctcatatttttttataaatgatatggtttttttaagtaaattaattgaattatcaaataaagattgatcttcatttataaccagttgaacaaacgatttaaaattg

SEQ ID NO: 135996 - DNA, 454 bp, Glycine max
  unsure (1)..(454): unsure at all n locations
cttcttggagaaacttccttgagaagctagaacttagcttcatacacctctctaataactaagctcacatccttgagaagcttccttgagaagattcctaaagaagctagagcttagctacacacacctctctaatagctaagctcacctccttgagttgagaagctagagcttaactacacacccctataatagctaagctcacccctattccaaaaatacatgaaaatacaaaaaaaaaagtccctactacaaagactactcaaaatgccctgaaatacaaggctaaaaccctatactactagaatggccaaaatacaaggcccaaaagaaggaaaaacctattctaatatntacaaagaagagtggatccaaccttgacccatggtctcaaaaatctaccctaaggttcatgagaaccctatggccttctttagtagctctagcccaagcc

SEQ ID NO: 135997 - DNA, 438 bp, Glycine max
  unsure (1)..(438): unsure at all n locations
agcttaggcaaattcatgagataattcattataatgaatatgtttgaaacatgaaatcaaagagcatagttagagatattatgttgcctcctagaagcgcttctttaacatctttagctagatgcagggtggtgatcgagactttgccatctcatcctccctaacctcccttttggtgtgattgatctgatcatggacctagcacctgttagcacctgccctaatgctttaacaaagaaagtgtcatcatgtaaatgtgaaaaaatactacaagatacttgtatcacctttccacttgcctctagacttacccaagttggtgtggtgctgaccatcacccanaatgactcttcattcattatatgatttgtaggatcccttgatgataagatgcagatgcatgcactgttatgatcgaccgttaatgtaataataaat

SEQ ID NO: 135998 - DNA, 446 bp, Glycine max
  unsure (1)..(446): unsure at all n locations
ggtgagtactcaattagganaacactttaactctctgtttatattgtccgaagataggtgctaaggtggagtacaagtcaaaggttccttatgccaatgtagntggttgcttgatgtatgttatggtgtgcactagaccagatttggcgcatgctataagccaaggttgcaagtttatgtatgacccaagaaagcaacacattgagaagcagtgaagtggatcttgaggtacctaaagggtacaacaagtcatggtattatgtttggcagtcaacatggagatccttcaattgtgggatatgtggattctaactatgttggcgatctaaatgatacgaggtctaaaacaaggtgtgtctctactttttgggtgagcatggttggtggaagttcataattaagtctcttgtggcaatgtcaacaacttaagcagagtacatagcagt

SEQ ID NO: 135999 - DNA, 424 bp, Glycine max
  unsure (1)..(424): unsure at all n locations
agcttgaaatcagatttgttaaggtagtttgtcactnttcttgagaagctctacatgcacgaaggttctagagagagaaaggtccaagttccagagagttctgagagattatgctgtgtgaagatttgcagagacgcgagttcgaagcggaagctgttttgagagcttgagatgagtttgtgagtgattgtgagatcctagaggtgaaggagacatcctcaccacttgtgtttttggagactttcatcttgttcttctctttgttgtaaaggaggtttcctgactatggaaaactaaatcctctgttggatcttccctgtaggtacctgatgtaaatatatttctatctatgtaancgatttttgtgtgttctctgtgctatctgctttccattcacaggtgctttaccctgatcacatagatg

SEQ ID NO: 136000 - DNA, 369 bp, Glycine max
tgccacccagctcacccaggcgagctatgttgcttcctctcaaccaccttctggaggaatatactgaaaggcccaagtgggcctggtcgcttcttgcattcccatttttactaaatacaccccctcgctcttttatggagagtctttattcgtaacggtacgaaattataccaatttcttaacgatgtttgttttctttcggtatggttcgaaacctacggattacatatcatcccttttttgccttccggaatgatacggaactttacggattgcgcactatcaccttcttttaattttcagcatgtcatggaaccccactgaatgtgctacaatgccttcttttgactattggcatgtcacggaact

SEQ ID NO: 136001 - DNA, 125 bp, Glycine max
gcatcatgcttagatagataagcactcgagttctgggaggaacccgaggtactctgcccatcccgtttacattctccctacatgtgcggcaagcatacttcctcacataaacgaatctatttaca

SEQ ID NO: 136002 - DNA, 406 bp, Glycine max
  unsure (1)..(406): unsure at all n locations
agcttctgactctaggtaatttctntaattctagtcacttaagaaaagttgtgacttttgaaaaaatcttcagaaacaagtcacttgaagaattgtgactnttggaaatgtatttttcgaaatcagtcactggtaatcgattaccattaaggtgtaatcgattacacatcaacatatgtgactcttcattttgaattttgaaaattaaaatgtttagaagctctaataatcgattacaagtattgtgtaatcgattacacaagtttaaaatgatttgaaaatgtttaaaccccaagtgtgactcttgagattttaaatctaacgttntaaaaacactnggtaatcgatacataattatggtaatcgatacaactttgtaattaatttttgaaacaatgctggctat

SEQ ID NO: 136003 - DNA, 445 bp, Glycine max
tgcgtgtaactcgtgcatacgcacgagtcgttctttatttatttaacatgcatgcttatttgtgttgcaaggtagaaatataataaaaggcaccttgctaattaaaatagatttaacattgataataaatttcatgttcaaagttgacaaattgtttatcatcatcatcatcatcatcatcatcatcattatcattattattatcattagcaattgcagctgaaatgaattctagatagtcaattgacctatttttgtcaatatcagcctaacgaaaaaatatacatgtgttgcatatggtaactattcttactgaaacacatgtgcatgaccacacaataaagatttagagatataaaatatcactgttaactcctgaattcacaaaatacacataggccttcacgtagagcctacataatctatgatgatgataatactaata

SEQ ID NO: 136004 - DNA, 485 bp, Glycine max
  unsure (1)..(485): unsure at all n locations
ctaagctcatacgccttgttggtttgaaatacgctcccagagctcttttactttataacagatactttactctcacaagatggattcatgagatgcactactgaatatggtgtgtatgttaaaagagaaagtctttcagacatcctcatagtgtgtttatatgtggacgactngttgataacaggaaaagatttcaatgctatctcgacatttaagcaagagatgaaatctgaatttgaaatgtcagatcttagagaattatcatattttctgggcatagagttcaagaggacaaaggctgggatttttatgcaccacagcaaatacacaactgatgttctaaagagggttcaaatgtttgactgcaactcagtttcaactcctgttgaaactagtgttgtgctggatcaatcatggttgacacaatcggtagataagactgtgttcacacatatggtaggctccttgnggacatatgcaatatc

SEQ ID NO: 136005 - DNA, 320 bp, Glycine max
caagctggtgccactgcttctttttatatgctgcaagattatgatgaatgggttagaaagcaatcataatccttaaagtcatcgcacgtacgtaaaatccacttgtacaaactttgtgattagagactgcgtgagagggagatcctataggggttagagacatcctcaccacttggattggtgaaaactttgatcttgttcttctctgtgttgaaaaggaggtctctggaccattgaacgcttggttgattattggatcctccctgcacgtacctgatgtaaatatatctatatatatgggcaagaaatttgtgcgctct

SEQ ID NO: 136006 - DNA, 482 bp, Glycine max
  unsure (1)..(482): unsure at all n locations
aagctgagccctggccttttatttaaataggctcttaaagagtctgagtattttataataaacaagncaggtcaggccttaaataggtcaggccaaaggcccctcataggtggcctggcccatttccatccctacctagacggtacacctcatgacatttgacactctagaggaattaatttaatcactcttgagtaaagcaaactctacattgtagtaatttttcaagttacaagcccaaaaaaggaagatggtgcaatacacaccgagtgcatatttgcaaatgcccaataatgagacaattagcgccaaaatcaaagttatatagattaatttcacaatgccagaaacatttaagtgtcaaggctcaagggacccttaaaagatgtcaaaggaagctgtatatcatgatagggtaatacttttagaatatgttcattcttcaactctgctaggagagttcgtttgataaatgaaataac

SEQ ID NO: 136007 - DNA, 453 bp, Glycine max
agcttaaactcaaaaataaagggggagaatatttatatttaattgagtgatcaactaggaaaaagaatgtgtatgtgtttcttgatttcagggttgtcatcataaaaaaagaggagattgtagaagcaagcttcatgatgatgaattaagttgattcaagtagttttgatgatgaaaaagatgatgacaaaaagcccaagaaaatgatttcaagattgagtcaacaagttcaagatcaagattaatttcaaatttcatgagaagaaatcaagaagattcaagaatcaagagaagtttgatttcaagattcaagagaagatgaattcaagattcaagagaagaaattaagaagacttcacgctgattagaaaaaaaagaagaagacttcacaagggaagtattgaaaagatttttcatacaacaaacattagcacagtttggttttcaaaagag

SEQ ID NO: 136008 - DNA, 480 bp, Glycine max
  unsure (1)..(480): unsure at all n locations
tcgcgtctgttcctcttctctcggtcactcatctttcttcttctcttctcttccctntntcctctctccaccttctccccgatgccaccaccaccccatctccacattcctccaccgctcccattctcctttcctccagtggaaccgttaaaaaccctaacccccaaaaaacacaaaccccctactgcctggacttctcggtgttcgtaacctagtaggaaacttgcattgtgtcacgagcaagctgagaccaacttgcattgtgtttaacgagaggcggatcaacgctctaaagggcgtgtgcagaatgtcgtcacacacgtcgttcgaggttctggtggcccacatgtggaggagttgggcgagggtgatggtgtttcttcctaaaaaccagacgctgaagctttntgttagcgtgaacatgcggaagcgcgtgaattcaggactaccagaggggtattgtgggaatgcgcacaaaca

SEQ ID NO: 136009 - DNA, 442 bp, Glycine max
  unsure (1)..(442): unsure at all n locations
agcttgttaaagaacttcgaaaaaatcaagatttttcttgttcgcacatcgttcgcgtgtatgacatccactccacaaggtttgaagttgaggagaccttcaatcctattacacaacgtggccgacaaaagtgggcagttaacttgaatggtcattattgtcaatgcagaaggtattctgcgcttcactatccatgttcacatattattgcagcttgtggttacgtgagcctgaactactaccaatatatagatgttgtttatacaaatgagcacatcgtaaaagcttactccgcacaatggtggcctcttgggaatgaagcgactattcctccttctaatgacgcatggacacttatccctgacccaacagcaattcgtgcgaaaggtcggcctanatcaacaaggataaggaatgagatggattgggtcgaaccctctga

SEQ ID NO: 136010 - DNA, 410 bp, Glycine max
  unsure (1)..(410): unsure at all n locations
ctaagcctgtacggttcaccccanattccgtcgtcatatgctaaacttgatctcttatctacttgataattcaatgggagccataaccctagccaaggttcatcaacctccatttctccgagaatacgactcgaacacaacgtgtgcttgtcacgaagaagccccggggcgttccattgagcattgtaaggctctgaagtgtagggtgcgaggtctaattgatgctggctgaaatttgaggagaatcgtgtgtaaatcctgacattgacaagagatgccacacatggggcaattntgaaagctgttgttagatgtctctaatgactcaccaggattttcaactttcaccggaatgtgggtgtaagccattggtctgttggctcaagcaacctgcgctcctgagtggtgac

SEQ ID NO: 136011 - DNA, 440 bp, Glycine max
  unsure (1)..(440): unsure at all n locations
ctgctgcatgcaagctcgtgcatccaatacactgatgaggatgtttatatgttcttaaaactggactgatccatttgcttccaaagtttcatggccttacaggtgaagacccgcacaaacatctgaaagaatttcatattgtctgctccaccatgaaacccctagatgtccaagaggatcatatatttctgaaggcttttcctcattctttagagggagtggcaaaggactggctgtattaccttgctccaaggtccatcacgagctgggatgaccttaagagagtattcttagaaaaacatttcctgcttccaggaccacggccatcaggaaggatatctcaggtattagacaactcagtggagagagtctatatgaatactgtgagagattaananactatgtgccagttgccctcaccatcagatttcgaagcagct

SEQ ID NO: 136012 - DNA, 457 bp, Glycine max
  unsure (1)..(457): unsure at all n locations
ctaagctngnctgtccgatgcagcagtaatgatggcccgatgtatgttggtgttcttttctaacccggaatgggtttaggcaaagacaacagcggcataactagcctgataaatgccaaaggaaatcgtgggaagtatgggttaggctataagcccactcatgcaggtataaagagaagcatcgcgggaaggaagagcggtagtcaaagctcgcggtggagacaagaatgtgaaggaagcccgccctgccacataagtaggagctttataagcgcgggtctggcgatgaaggtcaagtggtcgcaatatacgaagatgatgttccaagtgcattggatntggtacgaccatgccctcctgatttcagctaggaaattggcgagtggaggaacgccccgcatttacgcgacgagcattatgtaaacccttaccggtttgaaagctctatagttgggct

SEQ ID NO: 136013 - DNA, 444 bp, Glycine max
  unsure (1)..(444): unsure at all n locations
agcttttgaatgtttaggaagttctatagatataaaggtccaagttctagagagttctgagagattntgctgtgtgaagatttgcagagatgagagctcgaagcggaagccgttctgagagcttgagatgagttagtgagtgattgtgagatcctagaggtgaaggagacatcctcaccacttgtatttttgcaatctttcatcttgttcttctctgtgttgtaaaggaggtttctggactatggaaagctaaatcctctattggatcttccctgtaggtacctgatgtaaatatatttctatttatgtaatgatgttttgtgtgttctctgtgatatctgattttcattccagtatgcctttaccttgatcacgtagatgcatgctntgttagggtcattcaacagtggaaattggtctgattctaaagtccttgagagtacg

SEQ ID NO: 136014 - DNA, 400 bp, Glycine max
  unsure (1)..(400): unsure at all n locations
cgaaagcccccctccatcattatgatttgtttctgccatctcaaacaaacaaatcaaacgtaacaagacaattatagttgctgtttgaatacctcacccactcaagtgtatcacacaattatgtcttttctctaatgaaacactcttgccttttaccactctaattccccttgagttcttaggcaattcaagagattatggccacaacaaagaacaattcaccaatatgtgtaagggaaggctagagagacaaggaaaaggttaaccaagaaaaaggctaacaatgtttttaggcacaaatgaaggaaataaaattcagaatttaggaattcaagtaacaatccttaatgcaaccaatatattaccttaaagagaattgtntaaaagttcttcaagcatg

SEQ ID NO: 136015 - DNA, 440 bp, Glycine max
  unsure (1)..(440): unsure at all n locations
agcttaanacacttgaagagatattattattttttatcattaactatgaagacacaaaatatgtcagactcacaaaagctgctactctgaccggacaataataaagcttcttcatgaaggaaggagaatttgaggatgatatatttgggagactaaaagttctcctgaacaacctagaagctttgggtcaaacctataccaaggcccagataaacctgaaagtgtgggacaactttcccaaagagtggaaacctatgacatcaaccatccaagaggatagagacacgaaaaatcttgcttgggatgaactattaaggattcttagtgtaacaccctggaatttccttcaccatttatttttctacacatgtaagaatttcactgttaaagactagatagtagatacttcgcactgtgtagtttaattatatgaccatgtg

SEQ ID NO: 136016 - DNA, 400 bp, Glycine max
caaaacacatctccacatccacaaatgatatataaacccaccatgccctgttgcccaccttcaactgagctcacgtactcccacgtagcccttatgctcgtttctctcaacaccgggtccccatcaatcctcccaagcttccacaacatccaagtaattctacattcaatcatcacaaactaacacaggcaagaaaatacggcaaaggctgaaaactctgcccaaaacacagaccaatatcacagcttttcacattcaaaaaccccagctacattctctttgttcaattctttaaccgatggatcgactccaatagtttactggaagtctctagtacataagtctacattatgaccggtgtgatctgctacaaacgtctagagcataatctgaactactc

SEQ ID NO: 136017 - DNA, 323 bp, Glycine max
caagaggcgcaaagagagcgatgttatgtttgctcgcgcagagcgcacgcgtgcgacggacacacaccaaggtttacaccagaggagaccaccgagcctataacacacggcgggcgacaagcgggggaacaaagcgggacaggacacccgtgtcagcgccgcgcggatgacgcggttcaccacacacgcgcacataggatagcaccctgaggtaccagaaggccacaggcccaccaaaaacaacatggtgggaaccaccgtgggcgcatgcgcaacgcacactacgaacattggaggaccgttgggagcgaactcacacagcc

SEQ ID NO: 136018 - DNA, 422 bp, Glycine max
cttgactggccttcctaagatttacctagtgagaatgatctgacttactactgtgtagtttgtcttttcatgtactcatgggctcccgacaagatttttcactgacatggtaccacattgtatataagattgagtcttagtatatctattacataacatttgtgtattgattgatattgattggttgagtgatattgtcgttgatcattgagtacgtgaataatgtaaaaatgaatgagacgtgttgtgttgtgatgtgatgttacacgacaaagtggtggaatgacgtgagctatgtttaagtaacgtgtatttcgtttatatgatatgtatatctacatgttatcttatttctctctattagctaagaatgtgataactcactctctgtgtgttgtctgtgtttggatcctatgatgatc

SEQ ID NO: 136019 - DNA, 424 bp, Glycine max
agcttccttaagaagattcctaaagtattttgagcttatctacacatacctgtctaatagctaagctcacctccgtgagaagagaagctagagcttagctacacaccccctataatagctaagctcacccccatgaaaaaagacagaaaaaaatccttactacaaagactactcagaatgcctcgaaatataaggctaaaaccctattctactagaatggccaaaatacaatgcccaaatgaaggaaaaacctattctaatatttacaaagataatcgggctcatacttagcccatgggctcgaaatctaccctaaggctcatgagaaccctagggccttcccttggatctctggcccaatatacttggagtcttctatccaatgcccttgcgggataggattgcatcattatgtacatattaa

SEQ ID NO: 136020 - DNA, 455 bp, Glycine max
  unsure (1)..(455): unsure at all n locations
ggcaccaacattcattagtccaatacacactcaacaaatatttattattcatccataattccaatcattcatgctcaatatgatgcatgcacctgacatcaactctcatatgcaatgtggtatcatccccaaggaaatagcctaagcgtgcccacatgacactttcacttatgaaaactaggcagtaagtgtcgaggtcaccctgtcgtgcacaggcaactcccccacacggtgatcagcatgagtcttaagggagtttcaaaccgagtgacatgccccctagtacaagtattcctcctcatgagaaactacaagtacttactgacaaagtttatactatttccatgtcatatgaagtatgagacatgggcaccatcaaatgcactgaccgtgaataattaaatattctaagccatccccttccagagatgcttaanactctttaaccactatat

SEQ ID NO: 136021 - DNA, 355 bp, Glycine max
atcctgactcaccataaaccttgtctctgtttgatattgtcaatccttaccctcggaagcgaaaagaatagaagggaaatttccaatcaaagaaagggaaagaaggaagatttccaatcaaagagaaagctaaaaaagaatagaagaaaaattccccaatcaaagagtgggagaaagcacaaagaaaagaaaggaaattcccaatcaaagaatgggagaaagtataaaaggaagaagaagaaggaaagatagctcctgatcacggatcgaaggagaaacagaagaaatgtgcagaaaggtctttggaccggacaatatctgaacaatacagaattgtcaccaaataaacaaaaaa

SEQ ID NO: 136022 - DNA, 433 bp, Glycine max
  unsure (1)..(433): unsure at all n locations
agctttacatggagctacatgatgtggtattatagcaccttcctcccngcgatgatgtgccgcttgctctatcactttattaggccaattcactttaagatcttgttaggccattgtcctgtatctggaactggtgtcacaatcatgccatacttatgacacgccttacgtgcatcgacacacttcagttgcatcagtcaccccaaaggagtggaatgaaatcatccgaaagctcaccgaagggtggaggatagaaccacaagacgattacaggtgctcttactagatcatgatagaccacttgaagggaggcgatgaaaaatgagatatcccaaatggtctctcaacactcacccacatttgagacaccggatacacacgtattagctacacgtgncaccactaagggaagttgtgctgaagctattacaaa

SEQ ID NO: 136023 - DNA, 437 bp, Glycine max
agcttcttcacaaggcattatttgctaacctgtaaaacatgaaaactaaagagatgagttataatgtctcagtgagtgttctaaggactctatgatgactttttagtctagagatctttttcctacctctccaggcttctttgatcttttattaattctctctttcataactaatccttcatcataatatctttatcttagatatgagattatactttaaattttacttaggcacttagaattagcctaccatgccaagtctaaggccataggtatacatgaacactaaaccttcctctaactctttgatcactcactaaagttacactttcctatcacatcggatgaggacatgcctaatctctctattcttttctgacttgccaactagggcttacatcacttctatatgaggtatctaaattttcctacccctt

SEQ ID NO: 136024 - DNA, 439 bp, Glycine max
  unsure (1)..(439): unsure at all n locations
tctatcgttcctaagattgttccatactctatcaccctcattaagaactagctgttntcttcctctattgcctttagttgaatacacctttgtttggttctctatttggttcttaactctctcatgaaacttcttcacaaactctgacctagattccccttctttatgtataaaagaagtgtccagtgggaggggaatgaggtcaaacggtgttaggggattaaacccatagacaacctcaaaaggggactacatgaggaagatactcatcccaagacttatggttgcctttcagaagagctcttataaaagtggataaagacctattcactaccactatttgccaatcagtttgtggatgacaagtggtagagaaaagaagttattttctatcttacccatacgttttccaaagtggtaacgacttacatttctattg

SEQ ID NO: 136025 - DNA, 393 bp, Glycine max
  unsure (1)..(393): unsure at all n locations
agcttgtccgcataaaatcactagaaatggattttattgtttaacacctcagttnttctcaccaagtaaaaatggatcattttaaggtccaacgccttataatggccaccttccaagtaaaaagaatcgcttgattcccgcttaaaaaaaaaaaagaaaagaaagaactacataggtctgatttcctcttcgatggagggtatgtaggagcaagagccccacttttgtcgacctcaaaaaataaaaagaaataaaagtttagatacactattctaatttaaggctgttgtcctttgggacaaacgtgagaggtgctaataccttcctcaaacgtaaatacaactcccgaatctggaatattctttatgaccgcgttccttcggtttttccgac

SEQ ID NO: 136026 - DNA, 474 bp, Glycine max
  unsure (1)..(474): unsure at all n locations
tccttggggccatttcctgcgaagggcaaactttggaaattagttttactcgtgggacactactcttaaaacaaaaatggcatacaacctcttcccataaacatcaatgtaaatttagagcaagcttatgcgcatatttccttacgaacgntcgcttgcacaagacattcttttaactaagaaaaatgcacccatatacaatcaaggcggcttcgttacctagattatttacatgtatttccaaggtgtatttgttacttacatcacacacatctccttggcttaaattacatacatgcatactcaaagcattttggggtaccaaaaattgcacatgtgcacatcttggtatttctaatacctatacatacacaaacttcatgatgaatatngactatctacacaataaagtgctacatttcatgctcttttcaagtttttgtacctaaagccgatgcaaatcaagatattttc

SEQ ID NO: 136027 - DNA, 448 bp, Glycine max
  unsure (1)..(448): unsure at all n locations
agcttgatacctaaggagttctaagctactttgattcttaacaagaacttagatggaaatttttgttcagaagaaattgaattggccactatgggagaagtagtggttgataagcaaattaccatcattttttatcatcccaccctcgaaatgaccaaacacttgaagcctttgtttattaaagcctagatatatggtaaaaccttgtcgagaatgtttgtggatggaggcaccattttgaatatcaagcctttgaccacactcaagaagttaagcagaagaaaagaggaactaattcctacaaatatgaagatggccaattttattggagaagccactccaacattaggagttttggtggttgaagtcactgttggacccaaaaccatgtattctaccttcttcattatggatgccaagctaacttattntatgttgttgaggagag

SEQ ID NO: 136028 - DNA, 424 bp, Glycine max
  unsure (1)..(424): unsure at all n locations
atttcttcatttaactttgaagagaatgtcatggatcactgtatatactagaaggtcagtgggagtaaagatttgtttcctttgattatacgtagatgatattctacttgcgactaatgataagggtatgttatatgaggtgaaataatttctctcaaagaactttgatatgaaggatatgggagaggcatcttatgtcataggcataaagatccatagagaaagatctcgaggcattntatgcttgtctcaagaaacctatatcaacaaagttttaaagagatttaatatgaaagaaatgtcaccaagtgtagcttccattgtgaagggtggcaaacttngtttgagtcaatgccccacanatgaatttgagtgggaacacatannanatattccatatgcttcagcagttggaagccttatg

SEQ ID NO: 136029 - DNA, 342 bp, Glycine max
agcttagacgaaatgtacctaggtacgctggcgatggacttcatatagcgagcagtcatggtcgtcagcgcgatggagaaagcttatatgcagaacacggagaagaagagagcgcgagcaatgtaggtcgtgtatgatataagttaaaatgtaattccaacatcgattttcaatacaaaaccgatgttaacaaaatgatgttaacgttaacatcggttttcttctagaaactgatggttactgatcatatgttaacatcgatgttcaaaaaaccaatgttaactaacataggttaacatcgggtttcttgcaaacccatgataacctagagacattatctgt

SEQ ID NO: 136030 - DNA, 259 bp, Glycine max
gtagatctctcgtgaaagagtctatctctttcttttattcctcgtagatcacgatggcagcgcagctcatccatgacagagtggagatggagtgcctggagggagtttgggagacccccgaaagcaatgcgaggtgccgattccgtggcatgatccgactcacggctacttcgttggtacatccagaggaaccagcacgcacgcttcaagcactgtggagcggatattacctacacctacctcatatctactagtggag

SEQ ID NO: 136031 - DNA, 364 bp, Glycine max
agcttggcatacgtgaaaaaaaaaaaagaaatgattgttattcctatgaacttacctcccacaaacaacttcttcagcgagatatcatgcaatgcaacagcttgaaaggggatgaggttgtggagaggagaggagaaggaaagcataaggtgtaatagtaatataatgtgtttttgtaacatctaggaggtgccattagcaagcaaagtggtatcaataatagttgcctccaaatattttcaataattcaagatcaagttttgaaagcctaattggtttgttcaatcagcccaagccgtacaaggttacatttatttttttacttttaatttttaagggggtgtttctttctcttcatcctctt

SEQ ID NO: 136032 - DNA, 445 bp, Glycine max
  unsure (1)..(445): unsure at all n locations
agcttagaaagcttagaaatcaagagtatcattatttccaaaacatagggggagtatggaatgagtgaacataacgttatatcttgcatatattctatcttgtatcttgatttcaggaattaaattgtcatcatcaaaaagggggagattgtagaagcaaagactttgatatttcgatgatgccatgtgatcatgtgcttctcaagattaattccagaggatcatgtgcttctcaagtttaattcaagacaggaatccaagaaattcaagatacatcatcaagaaaatctctagagacttaggaagggaattccaagttgaaacaacaagaggtttggccaaagaatatgagttaaaatattntttcaagatatttactctctggtaatcgattaccagaggatgtaatcgattaccagtggccaaaatgattataactatttat

SEQ ID NO: 136033 - DNA, 403 bp, Glycine max
  unsure (1)..(403): unsure at all n locations
actcagcttagacaactggaatgatatgaatgatgtttctatttacatagagcttttccttgtaaagaattttataactttagaaattctcttctcacttactcatgatgatgcatgatgcacaaaagatttgatgtggactaagatgctataaataggggaggaagtgaagaagaaaggggttcagccccttaggcacttctctctctttcgaatatgcttagaaagaatggttccgtgaagaaaatccaagccgaggcgcttccgtaacgtttccgtaacatttccgtgagtaattacgcgaggattctcgaccgttcttcaagattcatcgntcgttcttcgttttcttcagtcttcaatgggtaagtacctgacaccaagctctacaatacattatatg

SEQ ID NO: 136034 - DNA, 416 bp, Glycine max
  unsure (1)..(416): unsure at all n locations
agctnttcggcccgtgtcggaaacctcttttatctggcgctcgtccagcaatcaggttggattaagtggttgaactgattagggataaattcttgtaacctaggataagaggcttgcttttgaatcaagggtaagcaacatgttttaattctgttatttctttaattcgagtttacttactgtttaatttacaaaaacaaacaaccgccccccaaatcgntactattttatttctatctgttatgaacgtttggttgatcatttctcgttgggagaagacctatgatcacatcctagatactgcatttttaatgtttatttgattcgggtacggcctcgatcaacattggtgtctttccagggagcaatggtccaaaggttcataatatgtttagttgtttttgtcgtactctgcc

SEQ ID NO: 136035 - DNA, 349 bp, Glycine max
agacacactcacaaaaacttgaatgatataagaattaaataaaggcttgaagtataggactggccatattcaatttacaaatgttgctataataatgaagatattacctgcatggttaaaatttggtgtaacgtttgaactggatagaatacatggtgatcaacgaataggaggaacacgctagagtaattaagataactggcctcgacactactagaaaaatgactttttacgacggttgttaagtggttttaacgacggttgtaacccgccgtgtatataatgtcgttgaaaggaaagtggtttttacgatgggtattataataaccatctttgagagtagaacaat

SEQ ID NO: 136036 - DNA, 329 bp, Glycine max
agcttcaaatggatatcgcttcattttggttattatcgacttctccaacaccataattctatgccttaaagccccaagatgaatgggggagttgaggctgctaataagaatatcaagaaaatagttcagaagatgatcgtgtcattcaaggattggcacgagatgctccctttcgcgctgcatggttatcaaacttcggtgcgtacaacgactagggaaacccttttctcgttggtgtacgggatggaggttgcgctcccatttgaggtagaagttccttctttgagaatccttgccgaattgcggttagaagaattagaatgggccaa

SEQ ID NO: 136037 - DNA, 412 bp, Glycine max
tctaagcttggaagaagtgtgaggtcaagcccaaaggcttattttttattatccccgggagacgaagagaagttcatgttcatagccatcaaagtctgaaaagagtatgataaactaagggacgtcaatatggccacagctgaagccttggaacgaataggtgaaaggaattatcacgggtcaaaggcatgatctccgaagaggtgaaaggaatcatcacgggtcaaaggcatgatcttgaatgacgagctaaaggtctgtcttatgtcgaaaagaaatttgtcccaatagttaagcgagactgaagggaatatgtgggccatcatcgataagtgcaaagagaagctaaatctatcggcgactcacgagcaaaggctagaggatgagtacgccaagatatcaacagaaaggg

SEQ ID NO: 136038 - DNA, 280 bp, Glycine max
  unsure (1)..(280): unsure at all n locations
agctnggagaggatgcctcgannggtttgatatgttttttttaaacataggacggggagcactagggtcagggagaagtatggtgaactggatgatctctgcctggccacggacgagactctcaatcgtgaaatatacatgcgcctgaacagaagactggatctagaacactatgtaacgggcttgagaggggctcctgagatagctatcttgctaaactggatgaataaaagttgcttggcatgctgtaacatgactacacacacgcttgtcataagtc

SEQ ID NO: 136039 - DNA, 218 bp, Glycine max
cgatatgcatgtcaccgctttagcaccagcaatcaatgtggcataatgcaccaagatgactcttaatatggatctgccacattagctcgaatggctacatctgtctgtgcatatgcgctcacacacctgtcgtgacatgtccaagagtaccaatgataccaagacacgtatagttccaaacatgtatcatgaagcaattacccatggactgaacctat

SEQ ID NO: 136040 - DNA, 422 bp, Glycine max
  unsure (1)..(422): unsure at all n locations
agcttggacgggcctaaagacatatatattgtctatcttcattgngatttgtgaatttgttacatttagtagagctctaattagaaaataatttctcgggttatattaaccacaaataaaccaaaatctgaagttggtaatgcacaatttcaataaagtttaaaggtcattttagcggagacttgcttttgtgtagataggtttgtggtcttaaggtcattgcaatttgcaaggcatggtgtagctttttgaattttgatatagtaattattcaaattaggttctctcttactttttggctggctttttctttcccatttcatgcaagggggacggtacaactgtgtaacaaattaaagtccaacaaacttgcatgcatggatactgtcattgattttaacatgcaacacgcaacacgcaac

SEQ ID NO: 136041 - DNA, 311 bp, Glycine max
  unsure (1)..(311): unsure at all n locations
tcaagaagaaatggtgatgcattcctatatgcaaaatcaattgaccattggtttttcttatttcttggtacataaaaataatatatagataaatttatggtatcctggtttgaaaatgagttttaagttatatgattgagttctgtttatggcagatccagaggacgaggaagaatacaagaacgtgcgtagagctgtgaaggagttccgagtggcaatgaatgaatattataaagcagtatggtgcattcttttgttggngtatatttaagtctacatttgatcgatctagtagtttcctgtagctctat

SEQ ID NO: 136042 - DNA, 431 bp, Glycine max
  unsure (1)..(431): unsure at all n locations
ctctgagtcacctgcggcatgcaagcttatcaagggaatctgttaaaatctcttgttgcttagacaacaacttgttctgtgccaataacgcgtcatgtgatgatagctatatcaatcttttcttcgtgggttggtgggttctgtctcgtagaatgacatgatcactggctaacatattatcaattagctctattgcttcttctggggtcttcagttttatctttccccctgcagaagcatctaacagttgcttggtttgtggtcttagcccatctataaacatattcaattggattggctcagaaaacctatgagtgggagtttntcttaacaagcctctgaatctttccaatgcttcactcatagattcattaggaaactgatgaaatgaagagattacagctttcccttttgcaatctttgactttggg

SEQ ID NO: 136043 - DNA, 266 bp, Glycine max
tacgagaggactagaagtaccggagctgtggacttattgtacaccatactttggcatggagtttctagagaccatgtgcatcaggcgctcgaagtgacagaaatctcggccaattacaggccataattatactcaatgttgatgcgcccacagaataaggagttgattgaacaggagcttgggaaattgaactacctactctcgactgatatctctgaaaccatatattaagaactcttatgaatcgatcccagaaatttacggct

SEQ ID NO: 136044 - DNA, 403 bp, Glycine max
  unsure (1)..(403): unsure at all n locations
agcttgnccttggntnagacatgattgatactttatttangaattgtaggattcaatttgggcaaaattggatgaaggcaagagtgattttcgaaatctgcactttatgcagaattttgttgttgaaatgtgcagcagaattttgtataagtgcagaaaaatgcttgtgtatggctggttgtgaaaagggtagtacatatggggttctggatatttgctagcagatcccaacggtcaaaatgtagacttatgtactatggacttccagtaaaattttcaagtcgatccaacggtgaacgaattggaaagaaggaaatgttactggggtctttaagtgagaaaaagctgtgatttttggttttgagttttgggcagagattctgactttgcctgtctcgcttgg

SEQ ID NO: 136045 - DNA, 364 bp, Glycine max
ggattatggggtacccaacacatgtggtactacgtggtcggcggacgaaagagcaaaaagactatccacatccacaaatcacacataaacccagcatccccagttgcccaccttcacatgagcttacgtactcccacggagaccttaaacgagatcctctgaacactgggtccccatcaatctttgcaaagcttcacaacattcaagacatacaacatcctatcagtatgaactatcaaagccaagaaaatagggcaaaggcagaaaactctggccaaaaacaccaacccatatcacaggtgttcagactcgagaaccccagtaacatcctcctacgctccaattcagtaaccgctggatcaac

SEQ ID NO: 136046 - DNA, 307 bp, Glycine max
  unsure (1)..(307): unsure at all n locations
tcaacccttggccatcatttctgctccaaatcgcgaaaggatatctnttttnggagtcatgaagtgcgtggctacgagtgggactttgaaatttcaggtttgggtggacttctttctcctttgattttcgtgggtatggggttttgggagatatgatgggtaagtttgttaagtttctgcttcatgatggctatttgtgaagactctcgttgaaagcttgttgaaattgccatagttggatgagttaaacatacccattcttgtttaggcgttttgtgatgatgttagtcatgcttatatactgaaa

SEQ ID NO: 136047 - DNA, 444 bp, Glycine max
  unsure (1)..(444): unsure at all n locations
agcttctatggaggctggatctctgagcttttatgttgttcttcaatgatgattttccaccatggagatgcagcggaagataaaggagaagtggtgagaagaggcgccttccactatggaataagccatggaagaaggagcttcaccaccaagagagttccttgcataagatgcttagagaggaagtttcaatggaggaaaagaaagattgagagaaagagagaggggggagcacgaaattgaacgaggaaaagagggagagaagttgaactctgaagtgtgtctcacaagactctcattcatcaaaattacaacaagtgttacacatgcttctatntatagcctaagtagcttccttgagaaacttctttgggaagcttccttgagaaactttcttgagaagctataacttagctacacacacttctctaataactaagctca

SEQ ID NO: 136048 - DNA, 456 bp, Glycine max
  unsure (1)..(456): unsure at all n locations
tgaagaatggaaaaccatttagaactcaatttgattttctctactgtgaatcaccttcttggtcttggaaaaacatttgaagatgatgagctaaacatcaaatcctcaattgtcttaaaagaacttgggaaccaaagatcacagcgatcaaggattccaaggacttggcatcaatgtcggtggaagctctatttgaaaaattgcttgcatatgaacatgagttgattcaacaatatcatgtngaagaaatagaaaagaagagaaaaagaattgcactcaaagttagttcttcaaaggaagattgcaaagaaatatatagtgatgatgatgatgcagagaatttaagcttgatggtgaagaagtttggaaaatttctcataatatccaaagatagaanattctctaaaccttcaaagaagatagaaagcaacaacaacaccttcacattgctttaat

SEQ ID NO: 136049 - DNA, 449 bp, Glycine max
ctgcagctaccccactattacccacaaccaccttcttacctattttgttaagataatgacatcggcagaaatgcagttgagaagagaaaggggcctatgctttacttgtgatgacaagttttcccctagccatcgttgtcctaataagcaatattttgttccacagtgggaagaagaggatgaacctgcattacaaccagatccaccagacgaggttgagacagctggtgaccccagtttgcaagatcatcatttgtcttataatgctttaaaaggctcatcaggtcttgggacaatgaagtttcaaggatcaataaatggattgggagtgtagattctactagatagtgggagttcagataacttcctccagcctagactagctcaatgcctgaagttacctgtagaaccaattccaaatttgcagggtttggttggaaatggaaatg

SEQ ID NO: 136050 - DNA, 435 bp, Glycine max
  unsure (1)..(435): unsure at all n locations
tatcttacctatntatctnccagttgtctttgcaaagattttattataaaaaacatgaagntctaattcaagatgttttcttttgtgcatgggcataatgcaatcactctatgtctagcaatgattttattaagatgtccctacctttgagttcaactcaaaattatcttctctcgagcgactaatctctaaaactgatgcatataaaaccttcaatgtatttctactaaggattaccctctttcaagcgccaaacccctaaagatgatgcaaggatgaagcatataatacatttgttggcattttaggcctgccaagccctaactaaaggggtttagcctttcattgtcatgagagactnttacactttatggggttgatatggatggaagaagatggatggatagaggaagaaaagaggataatggacatata

SEQ ID NO: 136051 - DNA, 441 bp, Glycine max
catgcaagcttgccaacccatggaagctcctaatatctcctttatcttttggggtgggccattcttggatggccttgattttctcagggtccacttggaccccatttctaccaactacaaaccctaagaaaactatattatctacacaaaaagtacacttctctatatttgcatagagggtggatttcctaaagactgaaagaacttgcctgagatgtcctaaatgatcatctaggctcctactgtacactaaaatatcatcaaaataaacaactacaaatctacctatgaaatcccttaagaaatgatgcataagcctcataaaggtgcttggtgcattagtgagcccaaaaggcatcactagccattcatacaaaccaaacttgggtcttgaagcgggtttcactcatgacccttttcatactgatttggtgataccac

SEQ ID NO: 136052 - DNA, 434 bp, Glycine max
  unsure (1)..(434): unsure at all n locations
actaagctgctttccnaactgactcggcaaaaagcgtcacaagctnttcatatattattacgncgcactcnatatagaaatactaagagtaacaatagtaacaataataataataataacaataataatcataataataactactgataataataataataataataataataagaacacgaatcctaacaataataatcagcgcctgatatgtcatccatatactgagagaaaatcatcggatgtaatagcggacaacatatagagattaaatcattcattaacccagatcatatcgcgctgactgcctaacacaagtaaccctgcgttagctaatgactctggaagaggcaacaacgtgatcatcagtgggatgaaccgcaagtccactgcttattctaacataatctcttatgacactgctttaatttcac

SEQ ID NO: 136053 - DNA, 444 bp, Glycine max
  unsure (1)..(444): unsure at all n locations
agcttgcatgatttacattctcnccctttcttatgcttattcttaattcttcttgacatcatcaaaatcttcatgatttacattctccccctttttgatgatgacaaccacctgtaggttaggagcaacaacaaaaaaaaaatatctatttgcatatagtttactcccccttggttttgcaatgattgcttatatgagacagttgaagatttcatatttttcatatgtaaacaaattgtctcataaacaatagataattttttatgcgtgtttactccttaaatatttgattgtcattaatgtttttgattgatagttatgttgattgtctttgataattgtttttgattgatagttatgttgaatgtctctgataattggttttgattatcgtttgatgattggctcttgttgattgggtctaattgggaagatttgattata

SEQ ID NO: 136054 - DNA, 371 bp, Glycine max
  unsure (1)..(371): unsure at all n locations
ctcaatatgaaaattagtagtcgaatgctccaaatcagaatattcaaaatcaccaacaacagaatactcagaatgcgtcaaatactcaaaatgcacagaatgaccaggatgcacactatgtctaactaatctatgaaaggttctatctatttcaggatcaaagggttgtaaatcacctggatagcccctagtcatgcactatatgcagcaaatcatgtgtttctcaaacaagcactatgggagggttaaaactacaactatagtcaaacgatatccaaatgagctgaaattttgtgagcaacaccctcaaatcatgaaaagatagcacanaaaaattcaaacaaaaattcaaagtctaactatgaaaacta

SEQ ID NO: 136055 - DNA, 438 bp, Glycine max
  unsure (1)..(438): unsure at all n locations
agctnttcaatagctttatatttactttttttatctattagcaatcttcttaagtagtatacaactgactttgtcccatcatcggcctaaggaagttgatctttcctattaaactttgcaactctaatttatttttggaggagttgcttctagaatcgccttggttatattcttgttgactctaattcccttgttatgtacaaggaaacctatgaaatggcctaccgttatcccaaaagcacacttctcatgagtcatcttcaagccatgtaacctcatccttttgaatgcatgttccaagttcaacaagtgttgatcaaatgtagccaactcgaaaactatgtcatgtatgtatacctccatgggcctaccaatcaaatcatgaaatattagattcatangcctgtgggaactagcctcaacattcttaagttcaaa

SEQ ID NO: 136056 - DNA, 438 bp, Glycine max
  unsure (1)..(438): unsure at all n locations
agcttagcaaatggacatgggtgttgtcctattttatcatatcttccgtaatacttatcacctctatcatatttaataattttcacatttatgtctaaggcatccattgcctaagaaatatcgggcagtaagtagacataaccgtaacgtgaataatcatcaataatggtgataaagtatcattcctttccgaaagaactaacatcaaaaggtccacaaatatcagtatgcacaattttaaaaagctgagtgcttcttggagctcttttctttatatgttttgcttggtttcccttaatacaacacacacaaatatttagatccataaaatctagataaggaagaatttcattctttattaatctttccatcctttctctagaaatgtgacctaaacgtntatgtcacaagagagcagatcgttcattcactacacta

SEQ ID NO: 136057 - DNA, 434 bp, Glycine max
  unsure (1)..(434): unsure at all n locations
tgtgccactccacctatatttggccttcacattattcnatcttattatcactgacaacaacatcaagaaattcttgcacctcggatacaaaagcttctttgaatcaatttgcaatttatcatacatagggacatgtgcttgtcgaaaagactcttgtccaagatcacgaattatatcctccaagcaatctcctatttctacatcaaacggttcagattaggacccactctgcatgtctgtcaaattcaccttgccatatccacattgtataattcttcttaatcccatcacacaatggatgctctcgtatatcgtcgagtatttgccatctttcgttcaaacaatttatgcacggacaaaaaaaatttcgtcctcatccagtcgacttcttttttgaagcaaatgcaagaactggctcacgcctttctcataca

SEQ ID NO: 136058 - DNA, 405 bp, Glycine max
agcttgtaaaaaagggaagcaagttattatttattcttctaaagcaaaaacattggttctacttcaaaaacccttgaactacttcacattgatttattttgtccctctagaactataagtttaggtgaaaattactatggctttgtaatagtagatgattactcaatgttcacatgggctttatttttgaaaaccaaaatgaagcttttgatgcttttcgcaaacttgccaagatgattcaaaatgaaaaaggtcttaacattgtttcacttagaagtgatcatagaggtgaatttcaaaatgagttctttgaaatcttttttgaagaaaatgtaattcaccataatatttctgcaccaagaacacctcaacagaatggtgttttggagaggaaaaatagatccc

SEQ ID NO: 136059 - DNA, 480 bp, Glycine max
tgccacccagctcgcccaggcgagcaaagatgctttctctatatatcaacagcctctcggaggaatcttctggagggcccaagtgggcctggttgctatctgcacccccatttttactaaatacaccccctgccttttttggtgattcttttttcgtaaagttacggaaacttacgaatttcgtaacgatacttgttttctttccgtaatcttacggaaccttgcggattacgtaatcatcccctttcttgacttacggaatgttacggaacctcactaattgtgcaacgatgcttccttttgatttccggtgtgccacggaaccttacggattgtgcatcaatattttcttttgatttccggcacgtcacagaatttcgcatattgcctaatgatgggtgccaagcacctcataatgaccaaacacaagttgcatgccaccaagcacaggtccccggacgatattatggtatgacacat

SEQ ID NO: 136060 - DNA, 293 bp, Glycine max
  unsure (1)..(293): unsure at all n locations
aagctcgaggagatgggatcaagacancgcccgcgaaattctttttcggcnncgagaagccctccgccattcatcatctggccgtcacccccatcattcanggccgtgacgtcatccgttcacgcccaatccggaacggggaaaacgttcatgattgctctcaccgtctgccacgtcgtcgatacctccgtcagaaagtgagcgccccttccggatcttatcttttatttgcgatctgcttttgttgctaagcgccttgatgaaaattctaggataggtgtttgcaatgaatt

SEQ ID NO: 136061 - DNA, 390 bp, Glycine max
  unsure (1)..(390): unsure at all n locations
agcttagccctagaggggatggactttttttttcttatagaggatcaataataatgcctataggttggacctcccagaagagtatggagttagtaccacttttaatatttctgatttaattccttttgtaggcggagctgatattgaggagaaggaaccgacagatttgaggtcaaatcctcttcaagggggaggggatgatgcaatcctccctaggaagggaccacttaccagggccatgagcaagaggctccaagaggattggaatagagctgttgaagaaggcccgagagttctcatgaacctcagggtagaattttgagcccatgggctaatgttatgtccacttatctntgtacatattagatcaggaattcattaattttttct

SEQ ID NO: 136062 - DNA, 338 bp, Glycine max
  unsure (1)..(338): unsure at all n locations
tgctctaacggcactatcccactaattctttttttttctttacgcataatcttgaaggtaagctggcctcattactctccttttgggcttttccatattctgcacctctgctgaatgttctctttgtacccctgctctgtgatctgtgttttccctatcattgaccttcctcctttcaccgacgatgatctggtaaggtggctcgtgaaggcagaatcgtacttnnnnatgcaaaatacaccgctagatttacggatttcccttgcccaaatatgcatggaggggatgacttggcactggttcaaggtcctcaccaacactgaacttcaccttcaatg

SEQ ID NO: 136063 - DNA, 463 bp, Glycine max
  unsure (1)..(463): unsure at all n locations
tcaccggatgacgccgatcgaacatttcctaaccgacgtttgcttatttcgttcagggattgaattgaaaactcgttaggcgacatctgtcgtgaagtagcgaccgatatttttcagccgacattgcacaattctttttagaaaagctcgctggtcgataatggtctttntacggcagagtaagttttcttgttttggtgttgcataaaaaagttacaatgtacttcggctaggtttttcgtgcgagttcaaccgacantttgtttcggccaggaaaacattagcccacctctgcaaaaaaaatatttgctaaccgtcttcatgcatatttcattcaacgattgaatagaaaactcaatagccgacaacggtcgtganatagtcccgactgatatttatcagccggcattggcgcatttttttanaaaaacgctcgctggcagaaatatgttttttcaccatc

SEQ ID NO: 136064 - DNA, 383 bp, Glycine max
agcttgatgagaatcatgaaactggccaaattcatgtattatgtccaagtggagaaggacaaagcccccgagtggagaaggatgaaggcccaagtggagaaggatgaaggcccagaagcagagacactatcaagactatcaattgttgctaaaggcccaaactaatttgaaggcccaagttaaataagtttttagatataatttatttttattggaatattgacccaaactgtttaaaaggcccatgtctatttttatctttttgttcacctacactataagtattgggtgttgttttgaataagaaaacttttggcatttgataaagtagggtgagagtttctctctgggtttctttgtgaaccaattatcagacttatcaa

SEQ ID NO: 136065 - DNA, 472 bp, Glycine max
  unsure (1)..(472): unsure at all n locations
tctaaactntgtacaagaatgaagctctgataccacttgtattctttggcctcagatatcttaagaagggggggttgaattaagatattcgaaactttntcccctaattaaaaatctatcttactttntacttaagttatgaattcccttaatgacaatcttcttaaatattaattcaaatgaagcaacttgaatatgaatataaagcaataataaataaaggagattaagggaagagaaaatgcaaactcagttttatactggttcggccacacccttgtgcctacgtccagtccccaagcaacccgcttgagagttccactaacttgtaaattccttttacaagttctaaacacacaaggacaacccttcctttgtgtttagagattctttacaacaagagactcacagtctcttaatcccttagagaatgagaagaagaagaggacaaatctctcttgaaagagatgga

SEQ ID NO: 136066 - DNA, 394 bp, Glycine max
cgcttcctgcctgtgaaaaaagattcatgatttctagtttttttgttgtactatacacaccaagattacgagatgatatgaatcattaaatttaagaatcaaaaaataattcactccaaacagctaagcgacgtagaaccaacacttagatatataaacccaaaccaatattaaattcggagataattggatttctcatgcaagcaacgctgctgatcaaaagacaataacatgaagataaaaaatgataaaaaataggtattaataatggagagaatatagaacttgagagaaataataaagtacagagatattgctagcttgagagagagagatattcgaagaaaaagagggagagatatcaatatgatggatgataaccttaaaaagaaag

SEQ ID NO: 136067 - DNA, 286 bp, Glycine max
  unsure (1)..(286): unsure at all n locations
cactcagctgccattaactattatatacatttaccctcatgttattttttctataagcanagacaacttaactaatcagtgatggatcaaaaagggaggtttatcgtaaggtgaaaaatatgtacaagtataatatcagtaagggagtattaatttttatttaccaataaaaatntggcttgattacatttatgaacttttaattggtgactctttttgtcgtgggtattaacgtgaatttataatttttttatattgaaaatgattaaaaaaatatctataatat

SEQ ID NO: 136068 - DNA, 452 bp, Glycine max
  unsure (1)..(452): unsure at all n locations
catgcaagcttgaggatatggtgacccatcacatgttgtcttttggcagncgggcgatggtgcacaacaagttttccacatccacaaagcgcgcataaacccaccatcccctgttgcccacctccaactgagctcacgtactcccacgtagcccataacctcgtttctctcaacaccgggtccccatcaatcctcccaagcttccccaacatcaaagtaaatcaacattcaaacagcacaaattaccacagccaagaaaacagggcaaaggcagaaaactctgcccaaaacaccaaccaaaatcacagcttttctcacttaaagaccccagtaacaattccttcgatccaattcgttaaccgttggatcgactccaaaattntactggaagtctatagtacataagcctacattttgaccgttgggatctactagtaaacatccagaactca

SEQ ID NO: 136069 - DNA, 411 bp, Glycine max
  unsure (1)..(411): unsure at all n locations
tcgggctgacagggatctgaggatgaagcttttatttattctttctgacgacggatcgagggttaataatttatgctacaacatagaacaccagaacctgatngattaaagaaatatatttatatgcatcagcttggttgtgagtaagacccaacatttctacctattgctgtcacttttacttactttgtattttacagaattagcataaaagtttagtttgaattctgtttgaaattatgaatcatacatgttctctcaacaatgcttcatttctaaacttaatttaggctaacgttagttccttgtgttcgatactcggattcatcccgtttaatttttaaatacttgacgatccggtgcgcttttcggaaaactggattctcttgaatatattgaacgtagaaaagt

SEQ ID NO: 136070 - DNA, 194 bp, Glycine max
  unsure (1)..(194): unsure at all n locations
agcttgaatganaactgttcgagaaaatgttcttcttaaaagtgtaataaaaaaagaaagaganagattagaggaaaaaaagaaaaatagacaggagaagattgttgaagagaaagaataaaatgaaggagtgtaacggcctcgtatgaacatgacttatgatgaagaaaggtggttctacagtgcaacgagcg

SEQ ID NO: 136071 - DNA, 258 bp, Glycine max
  unsure (1)..(258): unsure at all n locations
agacacctttngagttattcaagggttggaaaccaaggttgcggcatatacgcgtttggggatgcccgtctgaagtaagaatttataatccacaagagaagaaactagatcctaagactattactgggtatttcattggatatgctgaaaggtcaaaagggtatatgttntattgtccatcccacaacactatgattgtggaatcaaggaatgcaaagtttctttgaaatgacttgatcagtgggagtgatcaatttc

SEQ ID NO: 136072 - DNA, 441 bp, Glycine max
  unsure (1)..(441): unsure at all n locations
agcttatgccccactctcttgctcatacgtattttactttagcatatattttctttactttcctcactcatattcttacttgagcatcgaagtcctttgttttgcaggtcccccctcctgtcaagggtacctctctaagccgacgcgtgaagttcaggaccgcactcaaccacgtccatcccaacgtgtcacgggtccggattttggcaagaacaagtttaaataattaaaccaatggtgataagtgagatgtgaaagaagaacctggccatctagctaagaagtgaccaatatacaaatgattgattagagaagatgggatttcttgttgttgggcaagaagaggctctctcctcaataagaaggtttcttccatatcagattcttccactcactcactcctttngaccattaattagntntacaaagattatctaaagc

SEQ ID NO: 136073 - DNA, 463 bp, Glycine max
  unsure (1)..(463): unsure at all n locations
ggatgaagttctggttcatgaacgcatccaagatattatatttatttaaaaagaacatcaacttgctatcaccatgtatactatatcttagtatgcaacacagatgtatataccaagagcaacattcttcaaagcatgtccaagtccaagtttgagtgattgaaacacaactaatttttcaagaggaatctaataatttaatcaaacacatcatanatacttttcatcagcttcaatttcaatcaattgaaattaagttacaacgaagtaattgaacatagcactaaataacgtagatcaaatgctgggttgcttatgcgtttccgaacattctcaacattaccaggaaggtcaaaacagaacagaataagcaaggctatagtaggtattagaaagaagcatgctggaagatggtatgaaatggcatcatcaattaaatctaacctcaccatcaacatatgac

SEQ ID NO: 136074 - DNA, 388 bp, Glycine max
agcttagcttcatatgtggggaggagaggttgtcatacattcctgcttctagagctcgaccccacaggaattccaaggtaggaaaaaggaaactgcagctggccacaattcagaaacagagctgcctccctacaccaagcttcagatatgcccatacaaccaaattggcttttagcatagttgatcttaaggccagaagccatctcacagattcttaagatagatttcataactctaacattagcagtagttgcagaaccaaaaaacaaagtatcatctgcatattgcagaatattaatctcttcctttttgctccccacttggtaactgcagaacaaattcttagagatggaagtccttatcaatccggtaagaccctcggctacta

SEQ ID NO: 136075 - DNA, 448 bp, Glycine max
  unsure (1)..(448): unsure at all n locations
cttgatgcaacatatggagaggttaatgaaacaactatatgtttctctccatgagaggctggatcaaatggagaatagagatcataatgaagaacaaaggaggaaaagagggaacgatggtgttcctagacaaaaccgaattgatggtattaaactcaacattcctccatttaaaggaaagaatgatccggaggcctacttggagtgggagatgaaaatagagcatgttttctcatgcaacaactatgaggaggaccaaaaggtgaagcttgccgccacggagttatccgactatgctcttgtgtggtggaacaagctacaaaaggagagagcaagaaatgaagagccaatggttgatacatggatggagatgaanaagatcatgaggaagcggtatgtgccggctagttactcaagggacttgaaattctagcttcaanaactaacc

SEQ ID NO: 136076 - DNA, 416 bp, Glycine max
  unsure (1)..(416): unsure at all n locations
agcttatttctctaaagtgtctagatcttctattttaccaccacttcaagntntacttggtgtgcagctgcatctgtaaagaatacttcaacgccatgttcaattgtagattgaagtctgtcaagctcttccaactcgacttgtttggcttctaaggccgactatacttgaacatactcaataatgacttcctctggcactggctctccatccacaacaaatgtggtagcctcttcagctgctttcttattagtttcttttgcagtcatggcttcaataaaggcaataatgtcagcttctatctatagagccttttttcctctcaagctacttatctaccttagcttttcatatagaattcacgagagatagtctagttgccttggcaagagtagttgctcctttntgctagtgat

SEQ ID NO: 136077 - DNA, 442 bp, Glycine max
  unsure (1)..(442): unsure at all n locations
ggcatgaattagtagcaacaaattcagagtaattttgtattgttgttataactgaacagaatttaacagttataatagaacctcaaagagaattgtgcttgatcctcaagagaaaacaacgctgcggacttagcctttcattaatcaaatagagaatgaaattttattgataaactaaaagtctaaactggaattggtaaaaatgaaaaatagaagagagagagagagagagcttaactagaaccttggtgctgttatatagttnttcagccccaaagcttacaaatctattttaaatccaagcccataagtaaagtcaaatcaaatctagataagataagatctagatgaaataatatcaagatgagatcaaatctaaataatatctagataagacaagataagaaaagatctaantttgtagaataaattagtctggcct

SEQ ID NO: 136078 - DNA, 413 bp, Glycine max
  unsure (1)..(413): unsure at all n locations
agcttgtaacacatttaaagagggttctctctctatcttttctcaaattatatattaatggagtaattgttttttctcaatttttttatgaaaaaaacaccatattgctctagtgtaatttttaaaataatgaatgatagtaaggtatcccaaaaatataaacaatataattatctaaatatttaaatacctcatttaacctatgctaatattaaaggggggaataactttttttatagtttgaaacattttcctaatttattgagtgaacaaaaatataatagaaacaattaaaaatatccttttttaataatccaaataaagggttaaagtgcaagtaaagagttttttgcaaaacaaaaatatttacccaaataataaattggaaaatataaattnttataaaagaaata

SEQ ID NO: 136079 - DNA, 480 bp, Glycine max
  unsure (1)..(480): unsure at all n locations
ntntggagataaaaatcgcagcattaatgttctttcaccttctctgcatacacatagaaaggtattgggagaaataagaaaacaaaataaaaaaatttaaacttttgtattgtcagaagtcacaaagaaaacgaacctgcactcagagttttgagataaaaatggcagctttggtgtgttcttccaccaagaaaatgatataaaaatgcaaacctggagaggaacgcaaatatgctatcgttgtcatggaatctgagataaaaatcacagtttttgtgtaaaaaatcacagctttagatgtaaaaaaacacagaanaatgcaaaaaacaaatttgtttgagataaaaatcgaagctctttgaagataaaaatcgcagctntagtgttctttcaccttctttgcatacaatagcgaaagtattgtgagaagtcaaaaaccaaaataaaaaattaaacttttgtattgtcagaagtcacaaa

SEQ ID NO: 136080 - DNA, 414 bp, Glycine max
  unsure (1)..(414): unsure at all n locations
agcttgcttgtccgatgcagcagatattattgntctagttatgttagggaacgggtacgaacccggaatgggtttaggcaaagacaacggcggtataactagcctgataaatgccaaaggaaatcgtgggaagtatgggttaggctataagcccactcatgcagatataaagagaagcatcgcgagaaggaagagcggtagtcaaagctcgcggttgagacaagaaggtgaatgaagcccaccctgccacataagtaggagctttataagcgcgggtctgggggacgaaggtcaagtggtcttgatatatgaagatgatgttttgagcaccttggatttggctctaacatcgtcctctgattcccagcgggaaatatgtattgtatgaaatacctatccttaacttcgtcctta

SEQ ID NO: 136081 - DNA, 325 bp, Glycine max
  unsure (1)..(325): unsure at all n locations
gctgaatcgagctattgtttttctttgaccattcgnatttctcgaaggctcccgtggttcaattccgagcatctcgacatattatatgcccgaatctgacatccgaatgaaaggtcatgaccatttgaattgctcaggagcttccgttgtcaaattttaagcgattccgacaaattaagcgcccgaagatgacatacgtgtgaaaacttatgacactgttaatttctggagatcctccgcgcgtcattatcaagcgcctctatacgtgaatcgcctgaatcggacatcctggtgaaaagtatgaccatatgaatttctctagagc

SEQ ID NO: 136082 - DNA, 437 bp, Glycine max
  unsure (1)..(437): unsure at all n locations
agcttggtctctcataaaatgtatatttgcttcttgaattnccaacaagaaatgtatcccatgtaatatacagccaagtaaccatgcctaaaacaacattatctgctaccaattaattgtagaaaaatagaagaaaaaagaagttaaatcttttcttatcgtgttaactattcctcagtgactcaatagaatgatggccccatttagaggggtttatggacagtttattgagatttgtcttataaatgcttacgaaagtgtttgacataatgtataaaaattgtcctttgagtgcttcataagatcttttgagcttattttaataagttgtctaatatggcttattagaaacagcttacgtggcaccttataaaagaccaagcttcgatcgattcttggtagaccccaagcttcaatttggtcatatgtatgtatat

SEQ ID NO: 136083 - DNA, 475 bp, Glycine max
  unsure (1)..(475): unsure at all n locations
tctaagctgagtatgccatgaccaatgggtagggggtgcttttttatcaatatctcccacaaatagttggacttcaacacagttggtactggatttctgtagttcgatacaatatatatgtatttaaaatttaaatcagattacttagtcctagtgatattaggtattagacttatatttttgtatcttctgaaaacaaaatatcttaaccaaaaattatgagaacccttgaggcttagaaactctttattattntaactgtaagttcttgaattaatcaagacagaaatataaaaaaagaattctcattaaagcataaataaatcaatataagtgatatgtattatgcaactaattaatatacacacatatacgtaccttactggattgattattattatgtaaatcacagtagtttaaatatggttggcaatctttctaaatgaacaagatgcgaataacctatggttcaatt

SEQ ID NO: 136084 - DNA, 421 bp, Glycine max
  unsure (1)..(421): unsure at all n locations
agcttccagctagtaataattggaggaaaaatagtttttgtgcactcatgttatagcaaggcaaggttgaggagggcagattgcaatgccaaggtgcgtccctagttaccaaacaagtcatagcctttctagttaggctctcaaattggcaccctagaattgtcttcttattagaagtgttcatgttaaacatatttacctacagttgaagatgataagtacatactaaagacttttacctacagttaggagatgtaagtagaagttaatgacttttacctacacactatacatattaggttaaacctatagtgacagacaattagtcgtcactatacgccccctcaaagctgacggaagaaacgtntgtaggacaaagtctatcatacacttacctatggattttttatttatagtgaca

SEQ ID NO: 136085 - DNA, 487 bp, Glycine max
  unsure (1)..(487): unsure at all n locations
tagtgacattngtgacttgatcttaagtgaagatgttcactatagtatattangagaatcttctagtcaggtttccaattcagcattgaatactaaaggcagaggaaggactatccagaagggtcaaaatggtcaaggcagatcaaagtcaagagggaaaagacaaaatttcaaagtgacattatctgttggaattatgacaagagaggtcactttaccaatcagtgcaaggcaccaaagaagaacaagactcacaaaaataagaagcacgatgatgatgaatccgcaaatacaacaactgatgaatttgatgatgcattaatttgcagtatggatagtcctgttgattcatgggttatggactcgggtgcgtcattacacaccactccctctaaagatttattgtctaactatatttctggaaggtnntgggaaagttaccttgcagatggaaaatctcttgacattntcggaagaggtaatattg

SEQ ID NO: 136086 - DNA, 450 bp, Glycine max
  unsure (1)..(450): unsure at all n locations
agctntagaaaaagcaaactttccccctattatctctnggaataacaaatctcattcatgacaccagtagctagccaagggccattcaaatttttccctagggtagtcaaataatcctagaaagaagaaccaaggtttgggttatgcaacacgtacactactgaacaatactaactcacattgcacttctttattgcaaaagctatacattggggagttgagtcaaccaaagaaaacgagagatcataccttgaagtcaagatcccaatacctcccttgtgacctcgagcttcatacagaaattactcattcaaaatagttttcaatcttaataagatgttttttccatctactgattattttaaagaactaaaacaagcgcattaaaaattaaaaaaatgattacgttnttttaaaaaagaaaacaagttattcttttatgaaaaagtg

SEQ ID NO: 136087 - DNA, 389 bp, Glycine max
ctcttgaccttgacttgatagaacctccttgtaagtgaaagcatttgacttgatcccatgttttactaaagtgaacaaaaatctgtgcgaaataaaactccgacatctatcatgggtggaatggatgaatgcatgaagaaatgcatatagcacagatgcaatttatgaatacaggagaccgagaaattttctccttagatacaacgtcttggggtagcacagtgcctgacctatgaatttaataaagtggcacggaccctcaaagagaggggatcaaaacagaatccgtgcgtgatgcatatgcgacaggcgcaacactggaatgtcaggttgacaatattcacaaaatataagcgaaagggtacatgacacttatgcattggagtgtg

SEQ ID NO: 136088 - DNA, 360 bp, Glycine max
  unsure (1)..(360): unsure at all n locations
agctctcgcanatagctcgcagtttggaatcctgngtataagtataggcttgtaatctccgaactcgccgaaaacgaaggctccgcggtgtcttatatgaggaaaattgagacgcgcgaactcgcctctgagcttaaacgctgcgttgtcgtacgctaatgctgcttcctctgcggtgtcgaatgttcctagccagaggcgcgtgcggttctttgggagtctgatttcagcgacccacttgccccaatgccgttgccgcaccccgcggtagagcttcgtgggtttcgcggtcgttccaacgagcttcatggagactccgttttggcccttgacgtattaaatcaagcctctctctccgct

SEQ ID NO: 136089 - DNA, 413 bp, Glycine max
  unsure (1)..(413): unsure at all n locations
tgactagaatccaaatctataaagntattaactctctatctttcctcctttttcattgtaatacttttcaggagctaaaaagagagagagcataagcatcccttgctatcaagtcactacaagaaaagatggaagagaaacttgagacagaactagaacaaaaggtgcacatttagtgttgtgttggtattacacttactgttttcccactttctcgacatgtatgctgctagtgttatcagctactatatagtatttgttaaataaaatgtatctttggtaattacaggagactgaaactgatttgaagtttaaacaaactcaggaattagcaaaggcagagttaaatgcacccatagcatatgagaacgcagctcacaatgaaaaaatggctgaagcacatggtaatgtga

SEQ ID NO: 136090 - DNA, 474 bp, Glycine max
  unsure (1)..(474): unsure at all n locations
gggaccttaagtcactgagctgcagcttcgaagaagtgagaggacaagcttttttgcatagcttgaaagagcccgagtagtcgaagagaagttcaagtccatagccatcaaagtctgaaaagagtatgatgaactaagggacgtcaatatggccaccgctgatgccttggaatgagaaaccaagaaggcccaaaaggaagaacacgtgccagcaaagttttgaggggctttatagggcagcaatagtgagctcaagctccgaagaggtgaaaggaatcatcacgggtcaaaggcatgatcttgaaggacgagctaaaggcttaccttatgtcgaaaagaaatttgtcctaacagttaagcgagactgaagggaatatgtgggccgtcatcgatgagtgcaaagagaagctaaatctagcggcgactcacgagcanaggctagaggatgagtacgccaagatatcagcagaaagc

SEQ ID NO: 136091 - DNA, 421 bp, Glycine max
  unsure (1)..(421): unsure at all n locations
agcttatgcaaaatttaaggattcccaagntttgttcaaagcctttccattacaccacagacacactcccgattagacttttatagagaacaaacaagactttatatttatattgtcagcttcatacggaataaacatgaacatatgtttactagatagaaataaaggtgaagtatgtatcttctttttaaaaaaaataaaataaaaatactaaccatagcaatagcttcttccacatcatccttgattctgcctgccacacgcccttttaaggattcaagtgcatctctaagctttttcaaaagaacatgttgttccaatgatgctgcctctctaagtctagcctgaacttcaccagcatacaaaaagcttagttaaaaaagggcaatcagtttcttaggaaactacgaatatgataagt

SEQ ID NO: 136092 - DNA, 417 bp, Glycine max
  unsure (1)..(417): unsure at all n locations
tcaagcttattgctgaggaacctgtgcatgtcagggctcatctttttatgtgcatgaacaccaagagatcgggtatcccatgatcacaaatcccaatgtgcaaccttttataaacagtactcatggtaaccggtatgctgctattatgaataatgctgtcaatggcatcaccaacaacaacactgtctatcatcaccctgaaatgaatgcccaaccccttgcttctcctacagatttgaacatgctctatttgagcaaccccaccaatcacggtgataattaataaggagggatcactagctaggcttcatttgcgactttatgtgtcttgaataataatccaataacagaatgcttgtttatgctgttacctatgtatacgcgtgcctctgggcnaggagtaagtatactacatat

SEQ ID NO: 136093 - DNA, 437 bp, Glycine max
agcttgcctcaaagaggtccaggaaggatattgcttcttattgaactagttccgctcctgagtatgacagtcaccgttttaggagcgcggtacaccagcagcgcttcgaggccatcaagggatggtcgtttctccgggagcgacgcgtccagctcagggacgactagtatactgatttccaggaggaaatagggtgccggcggtggacatcactggttactcctatggccaagttcgatccagaaatagtccttgagttttatgccaatgcttggccaacagaggagggcgtgtgtgacatgaggtcctgtgtaaggggtcagtggatcccgttcgatgcagatgctatcggtcagctcttgggatatccgttattgctggaatatggccatgagtgcgagtatggccagaagatgaacccgtctgatgggtccatg

SEQ ID NO: 136094 - DNA, 443 bp, Glycine max
  unsure (1)..(443): unsure at all n locations
tctgctccagatcgctatatgtatctatttcagcgtcgtgaagtgcgtggctaccagtggaacttccaaatttcggtttgaggggacttctttctctcttaaatttcctgggtatggcgttntgggagatatgatggctgagtttgtaggacactgccgggtgaagatattacgagagagcactctctgccaatcttgtgcaaggtccccatgattagctgaactcaccatacccatactcgcgatgatgatgagtccgcaaatacaacaactgatgaatttgatgatgcattaatttgcagtatggatagtcctgttgattcatgggttatggactcgggtgcgtcattacacaccactccctctaaagatctattgtctaactatatttctggaacgtttgggaaagtctaccttgcagatggaaaatctctcgacattct

SEQ ID NO: 136095 - DNA, 310 bp, Glycine max
  unsure (1)..(310): unsure at all n locations
atccttaagtgacctgggctgcaactaactcttaacgccattcttttttnattgaagagtatccttggggaaccttcacccgacaaagacactgacaaaaacttatcttcttctttttggacaaagtatggcgagctgggggcaagtaaattttcttcaatcacacatgggatgcacctgtgatcgcatgccactatcaactagatcttgccggcattcaagccatccttcggcttgcctggaatgtaaaggagcgctcgaatcacactgtcataaacattttttgcgacatgcataacatcaatacaat

SEQ ID NO: 136096 - DNA, 486 bp, Glycine max
  unsure (1)..(486): unsure at all n locations
ngaaccanaactggtgagagtgtgatcttacactgtgagttttctactngctgtgagtaatattctttgcatgaatctctgaattttagaatgaaatgtataaatgaggacatgatgaaggccatgattgtgcatatacaagccttttgaccaaaaagcttaccttgaatgataattatatcctttgcaccctttttgagctgaatgatattgtaaaaaatttgaaccttgaacttaaataattatctccagataccttgtttagattctaggagagcatatggttcaaggcaaatttaccccanatttgggagagtggaactaattgtgatgcaaagaaagagataaagcataagcacacacaacacataagttatgtgttaaaaaaaaaaagaaaggaaagtgtgctgatgtaataaggtcaaaagcaaatgaaagtgaaaagctagtgagcaagctaagcgcattgaaaagatcacttggata

SEQ ID NO: 136097 - DNA, 443 bp, Glycine max
agcttgccttgtcccttgatatattttatgtactcatgatcactatgaatgacaaattccttgggataaaggtagtgttgccatgttttcaaagcccatactaaggcatacaactccttatcataagttgaatagctaagggtaggaccacttaactgttcactaaaataagcaattggatgaccttcttgcatcaatacagccccaatcccaacatttgaagcatcacactaaatttcaaaagatttttgaaagtttggcaacgcaagtatgggggaattagttagcttttgcttaagaacattggaagcatcttcttgtttctctccccatttgaaaccaacatttttcttgagcacttcattgagaggtgctgccaatgtgctaaaatccttcacaaatcgtctataaaaacttgctaagccatgaaaactcctcacctc

SEQ ID NO: 136098 - DNA, 450 bp, Glycine max
  unsure (1)..(450): unsure at all n locations
tcttgaatgtgattagtatattcattggcatagattgaatgtttaatatgttgnatgngatatattntggagtcatcctgatgcaatcaaattatccaatgcctctaatttcatatatagtacctacaaaacaaacaggtacaggttgccgttacttgacattgttagtgtgacactgacaaagatgatattttctgttggtttttcctatatggagggacaacttctaaataatgttgtttgggatctagaacagtttcaaggtattttctgagacgtgatgcactccctgcagttattggtaccgatagagatctaacattgatgaatacagtgaaaattattttacttgagcctaccaattttgtgtggttggttctcattgataagaatatgaaggaaaaatgtaaaaccctttgtgctaanaaaatgcatgggattatgtcatgg

SEQ ID NO: 136099 - DNA, 436 bp, Glycine max
agcttgcctcaaagaggtccaggaaggatattgtggccgtaaggactagttctgctcctgagtatgacagtcaccgctttaggagcgctgtacaccagcagcgtttcgaggccatcaagggatggtcgtttctccgggagcgacgcgtccagctcagggacgacaagtatactgatttccaggaggaaatagggcgccggcggtggacatcactggttacccccatggccaagttcgatccagaaatagtccttgagttttatgccaatgcttggccaacagaggagggcgtgcgtcacatgagatcctgtgtaaggggtcagtggatcccgtttgatgccgacgctatcggccagctcctgggatatccgttggtgttggaagagggccaggaatgcgagtatggtcagaggaaggaaccgtctgatgggttcta

SEQ ID NO: 136100 - DNA, 432 bp, Glycine max
  unsure (1)..(432): unsure at all n locations
agctnggccaaggacgctcaaataaacgcttttgaactcttcaaaatcaacgacccaacaggtaacctcgctggacctaacccagactctcatccaaagacctccgaggttcctcttctgagctcaaacaagaaaagcaaaggcagcacgagaaccctaactgccgccgtcgcaggcgcagtttccggtgtcgttatgttatcccttactgttgctttcttcctcatcaaacgcaagaagaacgtggccgtcgatgaaggttccaataaaaaaggtggaacttctcgaggcggtggctcatcatcgctaccaaccaacctctgccgtaagttctcaatcgcagaaatcagagccgccaccaacaacttcgacgaactctttgtgtgtggattgggagggcttggcaacgtgtacaaaggctacatcgacgac

SEQ ID NO: 136101 - DNA, 451 bp, Glycine max
  unsure (1)..(451): unsure at all n locations
tactaacgcttttatacagaacaaatgcctgtactgtgtaatgtccaattctcttaacgctccacaaactttagtacctttggtttagttatcaattaaatcatacaaaactcaatacaactttatcaatctaaaagcaaaggctagaaaaatgaagcatttataaacaaataatctgcatgaatgctcctggccgagttgtctcgaagtaaaagacttgattnttattttttggtaaaaaagaagtaaaagacttggtatgtctttacataggtctagactaatacgccaactaaaatcaacttagtaacctaaattctttctgaagttctttgttcttcttattaacaaaccaatccttagtaggggtatcaataattggttcttgttaacatcttcattgccacaatnatggttgagaacatctgagagagatgtatcaacctttgga

SEQ ID NO: 136102 - DNA, 150 bp, Glycine max
  unsure (1)..(150): unsure at all n locations
aacgtcttgagctggacaccttatgacttgtcggtcacgggcctagnacattgcttacctttggctntggacttggncgcctaatggttgaccatgtgtcataggcaacgctctaaccttattgtggatgagctgaggtgaactctagag

SEQ ID NO: 136103 - DNA, 417 bp, Glycine max
  unsure (1)..(417): unsure at all n locations
agctnntgtggattggtctttgtcagggatttttctatgtgggtctgaaaaaaggaaaatttagtcatcctgcttggacgaatgagaaaactggggcaaatgaagagggtgaggatgaaggcgaagcccgtgctgtgactgccattcctatacagccaagtttcccaccaacccaacaatgtcattactcagccaataaccaaccttctccttacccaccgcccagttatccacaaaggtcatccctaaaacaaccacaaagcctacctaccgcacttccaatgacaaacaccacctttagcacaaaccaaaaacaccaaccaagaaatgaattntgcagcgagaaagcctgtagaattcaccccaattccagtgtcctatgctgacttgctcccatatctatttgataattcaatg

SEQ ID NO: 136104 - DNA, 471 bp, Glycine max
  unsure (1)..(471): unsure at all n locations
tgaaggtgcgtaccccaccattttttcatagtaaaacactgttttgtgtctattattattgggatcatccctttatccatcattggaggtgccacttgagctgccaggtctctccacctttgggcatattatttgaaagatttgtgtccatttttgcccatgttctgtagttgcatcctatctggagccatatcagaattgtactgacactgcctaacgaaagcaaccattaggtccttccaagaatggactcaggaaggttccaagttagtgtaccaggtaacaactaccccagtaaaactttcttggaagaaatgtatcagtagttcatcctcttttgcgtatgcccccatctttcgacaatacatctttagatggttcttggggcaagtagtccccttgtacttgtcaaagtccggcaccttgaacttgggaggggtgatgatattgngtactaggaacaactcttct

SEQ ID NO: 136105 - DNA, 439 bp, Glycine max
agctttcataggtgaaatcaggtgcagccattttttttagagttctctcacgaggtggaggttgtgccatgttctcagaatgtgcaaaattagaatgctcagaatcagaatgctcaaaattataatgctcaagatcaggatgttcaaaatcaccaataacagaatgcacagattcaccagttatggaatgctcagaatgatcaaaaggtataaaatgattcctaactaatctatgaaatgtcctatctatctcaggatcaaagggttgtaagtcagatggattgcctctagtcatacactacattcagcatgcacacaactagttgccttgtcatgtaaataaaggtgtaggtttgaactacagctaccctcaaatgatatccaaatgacttgaaatttcagacaaaaattcaaagtctaactatgaaagctaaaattg

SEQ ID NO: 136106 - DNA, 282 bp, Glycine max
  unsure (1)..(282): unsure at all n locations
aaataccattgaaggactcattgagctaaagatcaacctcataaagctcacagcagcttcatcattacataggataagaactccttgttctaaacctgttcttctgaaaacatattggcattangccattgcttatctttatggactataactatttgaaggaccatactcaagatatggttaaatagctaacagacgtctattctacctcctaagtctaagctgtgatattgcattaatgcgggctgaagacgaacacaattaagggtaggacaatatgct

SEQ ID NO: 136107 - DNA, 443 bp, Glycine max
  unsure (1)..(443): unsure at all n locations
agcttgctaacccatgggagctcctaatatcttcttcattttttggggtgggccattcttggatggccttaattttctcagggtccacttggaccccatttctaccaactacaaaccttaagagaactatattatctacacaaaaggtacacttctctatatttgcatagagggtgtttttcctaaggactgaaagaacttgcctgagatgtcctaagtgatcatctaggcttctactgtacaataaaatatcatcaaaataaacaactataaatctacctatgaaatcccttaagatatgatgcataagcctcataaaagtgcttggtgcattagtgagcccaaaaggcatcactagccattcatacaaaccaaacttggtcttngaaagcagtttccaatcatcancccttttcatcatgatttggtgaataaccacttta

SEQ ID NO: 136108 - DNA, 430 bp, Glycine max
  unsure (1)..(430): unsure at all n locations
atactaagcttacaaacctaaaaaacctacttggagaagacctcacattcttatatgtacctttatttcactaattgaagagtcaatttccttcaacccatcacatacaatgaaattcaaaatgtgtgtgaaacaccgcatatacatgaactctccattcaacaaagtatgaccattccaaacactaagacctctacttaaatatgaaatgactacattgttagcacttgcattatcaactgttacacaacaattttttntaatcccctattctttcaagcaattccctaaggctatccctatggattaactnttgtggttgcaaatcaaacanaatttcaatattttcttatgcagcctaaatgctttatcaatgtaatgagctgtcacacacatgtaattcacattttggattgatgtccatgtatta

SEQ ID NO: 136109 - DNA, 438 bp, Glycine max
agctgtggggctgtctcatgtattacatgatatgcttctcttatcttctcaaattaaaaagttacctgagtttcttcaatgcgtgaggaatcatccattgaattatccattaagcatacatatgcaatttatttttcactagaagagccagaggattttgatgcattgtcttcccaagctatgtaggcatttttcagattccatccttctttcctttcattttcagcaagttgttttcgtgaggtatacaagacaatccgacctgatgtggccttgcttcccgcattcgaagcatgtgaaggtgtcgcttttggtttccacctcttttgaaagtttagagaatttattgtctttggaccctttgaggaatatccaaactttagaccagtaaatcaaatctatgcatcttgtatcactagagcttctttgggcttcgtt

SEQ ID NO: 136110 - DNA, 382 bp, Glycine max
  unsure (1)..(382): unsure at all n locations
actaagctgctgcactctaacttttacttgcggtccattcagtttgtgtgttctattntactcacgnggaataaccgatgataacggtggttctcagtcccaacctagccaaagtaatttggtggacaagtttttgcacaatgctcaggtggtcagtataggtgaaattaacaacctcaaacatgtgactaactgaacagtgcaatcctttatgtgtgttttacctcatctttgttttaacacctattgtttaccttttttaggagtgttactgtttgactattgggacagttgacaaaatcatcattgatgctccatagagttatgacaattgtccttagtgtaccacacacattgatccatccaaagtaggttcaacttg

SEQ ID NO: 136111 - DNA, 436 bp, Glycine max
  unsure (1)..(436): unsure at all n locations
gcttacaatatgatacaacattgttatcatcttgctagaaacaagngcagaaaaaataaaaaagaattgtttgttgatgatcgagagcacaacaaacatgcagagcacagttgtccattgagaaactgatgaaaacaagtatcaacttcaacttgaaaagctgataaaaggaatggtttatggggagagaacattgtttccaaattattctgctacaaataatcgatttgaatttattatggcatgtcttttctgctgaaactatcttttatctaacttacagaacactaataggatactatattttaattgttatatccaatacatcttatcttactacacagaattatcactggagggaaataggagtagagatatgtgtagagatatgtgtttaataatcgtgtatcggccttctatgatcaagttagttgag

SEQ ID NO: 136112 - DNA, 474 bp, Glycine max
  unsure (1)..(474): unsure at all n locations
ngcatagaganaaatgagtgagtcgctagacaagatanngtaatcttacaacaaacaatataatgagcaagaagtatataaaaccttatcacataaaaaatgagatcaatgaaatcaaacgaccaaataaaaaaacaaaacacaaattaacaaaataaaaaatgaaaccctagataaccttgtatgaagcactaagagagtgattgctctgaatcaagagagaacgagtgtggtcgtcatcatgaaagagagctagagttttaaagtcacaaggaagtgagtgtgacggcagaacaagtcaagctttcatagaaaaagagtaccgagtcgctagaaaaagaataaaattctntagttctagtaggatttcaattctatcatttcttgtaactaaataaagttccttattaaaatgttacaaattccattttcgttaaattctttattaagcgtgtaattaaccacatggtattt

SEQ ID NO: 136113 - DNA, 399 bp, Glycine max
  unsure (1)..(399): unsure at all n locations
agctntttggattgctaagcanaagtcttactattattatagctaacaaacgggaataattttaagattaaacatctacttaacactcttaaagaatcaacaaacatacattgaattgctatttatatttttaccatatctcgtactatgaattgtgtataaagtcctattaattatgaatttggtgattatttttccttcatgaatatatatttttcgaattgtagttgcgtgagtcagcttgtcaacttaaagcaaatggaacaatggtgggtaatggccgactatggtcttcctcttctcccccacccttttcttattttgcaaccaccttcactctctgttgatattatgaaatacttgtgaaaactagacttctgtaaaatccacaaatctcca

SEQ ID NO: 136114 - DNA, 478 bp, Glycine max
  unsure (1)..(478): unsure at all n locations
ntcttgttatattatgtgtttcaagaacanaatgtataatttttcttctattaaacaaaaaagaataattgtgtcattcttttagagaggcgtttggcagtaaagaaattctttcatgtttaagaatcttgggaatgaataaaatttgttgattgaacattaaaagtctctagataagttttctaggaatgaaaaaattacacatatctttatcgattattntaattatttattatattatatattttaataaaaaataatatgatatttttattataaaaaaattaaactcgaaatggtaagattttcacttcttttatgagaaagtttttgttgaaaattaattagaaaattctcccaaaaaagtaatttttattacatatgttcatgattnttttaattatgttcttctagacaaaananagtgaatatatgaagaanatctacaanttttattaccttgagtgataagaatgtt

SEQ ID NO: 136115 - DNA, 452 bp, Glycine max
agcttcaagaacatgaaatggaacttatttttatttcttcaataggaagagactgataaaaataggaaaggaataacattcaaagcctcatcatcttctattcaagaagaaagtaacaaagaggacttgaatgaaatagaagaagatgatgatttcagattgtttgtgaagagattcaataagtttctgagaaacaaaagaaatcaaagaaaatcaaacatcaatccaaagaagaaaggagaagattcctctttagccccaaaatgctatgaacgtgatcaacatgggaacttgagattcgattgtcctgtccttaaaagaaaaatggaaaaatccgacaagaaaaatttcaaagaatagaaagaaaataaagcatacatcacttgggaagacaatgacatggattcttcaagtgatttagaaaataaaatcataaatctgggtcgcatggg

SEQ ID NO: 136116 - DNA, 493 bp, Glycine max
  unsure (1)..(493): unsure at all n locations
gaaactcagcttacatagnttatctttttcaaacttaagntntgatgactttttatcnagncnnncctaactagaggagttaaatgatgcatattaatgtgtgtcgctgatgtgtcattattttctcctatttcttaaccctttttatcatcactttaattactaattagccttaattgtcaaattaattatgcagttttatcatttgggcctacttgactaattttgtgtttttaatttaattntaggataattataagcaattgggcttggatccgaaattgggctgaaccggcttggacttgaagagaatagacaattttattttatttcatttttgggcttggacttaaaacatattcgtaagctttggggctgaggacctttataacaacacgagggttttagtagaaggagactgttgagataggagaaaaantcttatggtttgcaatttcagttcaatgttactattcacgcgcactattcacat

SEQ ID NO: 136117 - DNA, 438 bp, Glycine max
  unsure (1)..(438): unsure at all n locations
agnncttgggcctagtgacctttagtgagtctctttgttatggntttaagagtggtttggttactgttcacgcagagagagattgtagggtttcatttttagttttcggtgttactgttcacgcacatggtactgttcacctagcaattccattttcattttctgcttcaaattccattttcattttctgcttttaatgccagtttcgttttcaattctgtcttctaatttcagttcgttttctgcctttgatttcctattcatttcgtttctaattgcaatttcattttcggtttctatttgtaggttcattttcatttatgtgttgcaattagtttccagttgttgtgtttcgtttctactgttaatggaaagctgaatctcttgtgttgttttctcttgacaataaaaatagctctctctagctttgttataata

SEQ ID NO: 136118 - DNA, 456 bp, Glycine max
  unsure (1)..(456): unsure at all n locations
ttaccaagtattcttgagcccttcttncatcaagtttatgttattgttctccattttcaactctaagggtgattntcacttcatcttcttgttctattctcacttgtagtttcaaaaccttattttgcacacttgacggttggaaacttgaacctaaactccctcattcttccttctaaatttggtggaacctataagggccaaatttcagttatttttgggattaaattgttagctataataactattgttttttataaaagccaaagcctaggctagttctcccatcttgctaaagattntggagaaagaggagaccatanttttcttcttcttccaagctttaccaagtattcttgaacccttcttccatcaagcttaggtaagtgacctccattttcaactctaagggtgattttcacttcatcttcttattctattctcacttgtagtttc

SEQ ID NO: 136119 - DNA, 465 bp, Glycine max
  unsure (1)..(465): unsure at all n locations
taagtcacctgcggcatgcaagcttatacgaaagaaaactttatctttattttgctgaaaatccaaacaacaaaatgttaataaaccgttagatatagaatataagtaagactcccactaaactgaagtactatcagtaattatgcccatatgagtagtgtgcttatgaaaaactttaagtgtcatacctttagtaagtgaatcaactagcatgtaatgagttcctatatgttctatacaattttgtattttctgaattctttatttaacaaccaaatattntatgtcaacaaacttttacttggttgaatccttaataataccactaagatattgtcccaataaacaccccgatgcctacttaatggtggcgacaacagacaagccagntacaataatttagcaatcatatattctagtatgatgtctcatagaagaatataactccaccaatatgggtaaatg

SEQ ID NO: 136120 - DNA, 418 bp, Glycine max
  unsure (1)..(418): unsure at all n locations
ncaagcttgtaaacatggtctgaatctagtatttggtgcaaaattagacaatacacagactaaaaatacaaatatcaaggcaagtctaaagagttgtggttactttttcaggaagggtgaggaataggatctgaaataaaaataggtactgttggaagtgcaaatattcaagatatatgatgaatagaagtccttaacacaaaacatcctaaaacgatattttagacatgataggatttcatgaccccaccaaaaaaaaaatacacaacagaatttgatctaagctactgagatttatttgtaaaattatcttgaaagcacaagaagcatggagacaaattctcaatcatcaataaacaatattatcccaatataagaataacattatatgtaatacagttattaactcccagaacct

SEQ ID NO: 136121 - DNA, 426 bp, Glycine max
agctggagaggaagttatgttgaatttttgagggagagaacgagagagggggagcactatattgaaggatgaaaaatgggagagaagaggaactttgatttgagtctcactaaactctcattcatgaaaatgacaacaagtgttacacatgcttctatttatagactatgtagctaccttgagaaaaattccttgacaagcttctttgagaaaacttacttgagaagctagagcttaactacacacacccctctcataattaagttcacctacttgagaagcttccttaagaagatgtctaaagaagctagagcctatagacacatacctgtctgatagctaagctcacctccttgagatgagaagctagagcttatctacacacactctataatagctaagctcacccccaagacaaaatacatg

SEQ ID NO: 136122 - DNA, 452 bp, Glycine max
  unsure (1)..(452): unsure at all n locations
aagcaactgagctgcagcttggaaaaagtgtaggtacacttcttttttttctngaaagagcccgggtagtcaaagagaagttcaagtccatagccatcaaagtctgaagagagtatgatgaactaagggacgtcaatatggccatcgatgaaaccttggaatgaaaaaccaagaaggcccgaaaggaagaacacgaccaaaacaagttttgaggggctctatagggcagcaatagtgagctcaagctccgaagaggtgaaaggaatcatcacgggtcaaaggcatgatctggaaggacgagctaaaggcttgccttatgtcgaaaagaaatttgtcctaacagttaaagtgagactgaagggaatatgtgggccatcatcgatgagtgcaaagagaagctaaatctagcggcgactcacgagcaaaggctagaggatgagtacgccaagata

SEQ ID NO: 136123 - DNA, 470 bp, Glycine max
  unsure (1)..(470): unsure at all n locations
ctaagcctgagaatggtagacatgatacatgtanggctggttttttcattgtataanagggatgccccacattatttccatgacacaaatgcaaaaatgatgaattggaaactttatgcaaaactggtcatgcatgcgcctatgcggacgctcaagtgtcaaatttttatggtcatgtgatgctagggctcangattcatttcctctattttaaatcaacccaatgtttccaaaatatgttcttttatcaatttgtgcattcctccaagtccatttcgggcgtccgaggaaattttcacagcattcacccttcaggtgtagacacgttttttcttcaaaaatcggttatgatcnaatgaatttttttcaaagaanagttggaaatcatctcttttcaaaagcatgtcggttttagctagacaacttatattctctttttccacctttttccttacttgctttttcccctt

SEQ ID NO: 136124 - DNA, 430 bp, Glycine max
  unsure (1)..(430): unsure at all n locations
agcttcggatgaaagtgatgaggtacaacctctattgttttgtcntaaagagcccgagcagtcgaagagaagttcatgtccatagccatcaaaagtctgaaaagagtatgatgaactacgggacgctaatatggccaccgctgatgccttggaacgagaaaccaacaacgcccaaaaggaagaacacgtgccaccaaagttatgaggggctttatagggcagcaatagtgatctcaagcttcgaagaggtgaaaggaatcatcacggatcataggcatgatctcgaatgacgagctacaggcttaccttatgtcgaaaagaaatttgtcccaacagttaagcgagactgaagggaatatgttggcctgcatcgatgagtgcaaagagaagctatatctagcggcgactcactatctaaggctataggatg

SEQ ID NO: 136125 - DNA, 389 bp, Glycine max
  unsure (1)..(389): unsure at all n locations
attggtcattgagggatatattatcttatgaacactccttcattacatatgaactcatcagcaccactttgttcctaacttagtacaaaacgaccacatcttatttgacttgcaaccaccgacaccgaattacagacctcaaatacatgatacacacactaacaagctaagacagacccctcacaccaccganagagatcctaagaaattttccttgctcttcatgatcctgatcctgctctgcaaagctttatccctcaactacaaatcatcaactttcttcatcaatgccaccacgatggtcttctgacgactgctggcactagatcatgccactcacaaaattacaccctttcctacctgtacctacatgctgaaatatccaaaag

SEQ ID NO: 136126 - DNA, 404 bp, Glycine max
  unsure (1)..(404): unsure at all n locations
agcttgaaggcaaactggatgcgttggtcatacttgtttacccagctggccttgaatcagaaatctgtacctgtcgcaagggtttgtggattgtgctcctctgctgaccaccatatagacctttgcccttccatgcagcaacctagagcaattgagcagcctgaagcttatgctgcaaatatttacaatagacctcctcaacctcagcagcaaaatcaaccacagaagagcaattatgacctttccagcaacagatacaaccctggatggaggaatcaccctaaccacagatggtccagccctcagcaacaacaacagcaagctgctccttccttccaaaatgctgctggcccaagcagaccatacattcctncaccaatccaacaacagcagcaaccccagaa

SEQ ID NO: 136127 - DNA, 487 bp, Glycine max
  unsure (1)..(487): unsure at all n locations
ctggtattcttttactactaagaataccgggtttttcttctcttggctatcttactggnttagctccatcctctaaatttattcgatgcatacatgtggatgagctaataccaagaatgtccgctagggtctagcctatagccttcttatgcttcttgagaacagacaacaacttctcctcttgctcatcagcaagggaggcagatataatcactggaaaacttttgctatcatccaagtaagccgtatttaaatatgatggcagaggcttcaattctggtgtggccggctggatagtggtagaaggagatggtttctcagcctgtacctcataaagaaagtcagaggtatgtgtacttcctaaaacatgggtagtcctatctgaatctataaaatcaatctcgagagggtaaacaccaccaccagacatgcaatcaatatcaatttcagattcactctcagcatcaaattcagacatatgatcaag

SEQ ID NO: 136128 - DNA, 465 bp, Glycine max
  unsure (1)..(465): unsure at all n locations
agcttgattgagacattatatcaaacactctttcctttttaaataaatatttgaaagaaatgagttaaaaacataaatgcaggagcaaaacactaaaatttgaagtaaaaaaacatattcaatcaatagacattaccgggaacacgtccaataaaaacacagcaactaaacgacccagcacacacaaaaaattgcactaaaaaaagaaggatgttaacacatacgtattaacaaggtgggttcccttccaacaaaagacgagtttacgcccaattagagaaaaaagaaaaaaaaagaaaaagtgttaaaatctcttcatgttaagaatgatgtcatgtcttgtatgaagttaaaaagaataagaagtgagtattttagatatcaaattttattaaaagtcacgcgacatcatgtgtctacttttntattaaantattaaataatatttaatatgagttaaataat

SEQ ID NO: 136129 - DNA, 445 bp, Glycine max
agctttccatcttgaagactggcttctgattatatcttatcgaaacagattactgaaggaagaggatgcttctttttcaatctcggcatggctgccgttgtgacttggattctatgaaagaaacggatttctaaaggaagagattatgacgttttttgacagatgcacgaggcaactgaaatgagtaagccatctgcgccactggtaatggtgcatatattttcactttggaaagagtacacagtttttatctgaaaaatgttatgtatatttttttttctacacctacgtaaccttgcacaagctaagtgtatctaattattcgtcaaccaccaatttttatatgtaagaaatatctcatacccaatttatgagacataagttgtgatgcaaaatacatgaccacttatctcttattaataggaagaaagatgatcatatttct

SEQ ID NO: 136130 - DNA, 438 bp, Glycine max
acactatgaaactcagctttacctagtttcttgatggggagagttttgttttattgtccagccctcctggtgattctagatcactcgaaattagtgaaaaatatctgttccgtgaagaagatgcaagccaaggcacttccgtaacgttcccataatgtttacgtgggtgatttcacgaagagtttcgacccgtcttcgacgatcttcgatcgatcttcgccgatctttgtgcttcaaccggtgagtacccgaaatcgaactttttcaatacagtctatgtaccctcagaggtcctcattcgtcttcacgtgctcatactctcatttaaaatactttctgtacccccttttgacgcgctctatacatccacttgagtcattgtctcccctagtcaaaaatgaaataaatttccaccgaacatttgaattgaacgtgcgt

SEQ ID NO: 136131 - DNA, 439 bp, Glycine max
  unsure (1)..(439): unsure at all n locations
aagctatgctgatacatctacaatttatttcntattctataagaacaagcagccacagcaaaacaattatgacctctcccgcaacagatataatcccgaatggaggaatcacgctaatctcaaatggtctagccctcaacaacaacaacaacagcctgctccttccttacaaaatgttgttggtccaagtagaccatacgttcctcctccagtgcaacaacaacaacaacaacaacatcaacagaggcgacaattcactactgaagcccctgctcaaccttgattggaagaattattaaggcaaatgacaatacaaaacatgcagtttcagcaggagactagagcctcaactcagaagttaacaaatcagatggggcagatggccacccatctgaaccaagctcaatcacaaaactctgacaagctgccttctcaatct

SEQ ID NO: 136132 - DNA, 466 bp, Glycine max
actcagctggatgaaaaactgaaaaagtggcgagaatgtttttttttatatgtcagcaagttgaagatgggaaggaacaaactgagtaatgagctttttggagagaactaactcgcatacaaagtggtaggtaatatcaatatgcttggcacacttatgagcaaccggattctgggaaagaaatatagcacttttgttatcacaaagaagagtagggggagcagagtaaacattcagatcacgcagcatatgagtgagccacattagctctgctgctgcatttgccatagcccaatatttagattcacaactggaacgagcaacaataggctgctttttagcactctaggacacaagattacctcccaagaatatcgagtagccataggtagagtgacgagtctcaacacaacaagcccaattggcattagagtaaccaagaacaagaagaaaggatccccgagtg

SEQ ID NO: 136133 - DNA, 443 bp, Glycine max
  unsure (1)..(443): unsure at all n locations
agctntacataaaaaatataaacatatctttttatattacagcaaatgcaagcacactcaatagacaacaatgataacataagaatgctgatcgagagtgatttctaaggcagaattgtgataggactggttactctgtgcctgccatctgtccaagacaaattcccaaataaaggcaacccatgactggcaccaattggccgcagtataacctgaaacttcttcttttctccggttctcttaaaagtcaacgaacatggttgaacaagaaccttaatccccttcgacccgtgagtattcacaacatacgtgcttggaggcccaacatttgtaactgtacgagtaacacttacggtctttgacccaggatgacgcacccgtattgaaggatagttgaaattttcaattctgtaagacttatgacaagtgtaagggaattcaat

SEQ ID NO: 136134 - DNA, 483 bp, Glycine max
  unsure (1)..(483): unsure at all n locations
tatgaaactcagcttggattcttacctacagttttgggagctatatattatttttatnngaaacaaaccccgacattaggtgtgttctagctactttcatgttgtctttttgtattattnttcaaaactatacgaagtgctagtgtactactggtattgctttcagtgagagtgatttaattatctatcgctatggactttttaagtcagcaaattgttatccattgtatataactgtgatccacgcatccagcggatctttgttatgtattttgctgggccttggtttcttattttgcagcaaatctgttaatatttaccttatgattgcagaagcacaacataatctctgtattattttcgtttgctgaataagactttcaagtcagtattttcttaaaaaaaaaaatttgggagaatgattttatttcttttctgtcataatataaaaagttgagatttatgttattacaagagataatg

SEQ ID NO: 136135 - DNA, 378 bp, Glycine max
agcttctaaaacaaggtcaaagggatctttttttgtcaaataccactgtcaaaacataaaggctcgaggagtatttcacgctctacagaaaagaaacatctttctgaaattccgatcatgccaatgcgaccggggttcagagaatgccgcaaaaacaacctccaggttataaaaagatagcctttacaacgtctcattctctaggagttttccaaggaagtgtaaaaacaccctattacagtacccaacacataagagacactaagaggaactcaaactagctagcagaaggcttataagtcaaggttacctcagagaaactttgaaacggaggatagagggatcttctccaccgactcttcgaggaggagtctgagg

SEQ ID NO: 136136 - DNA, 476 bp, Glycine max
  unsure (1)..(476): unsure at all n locations
tcgcttggaagaaccccctgctttctcatcctatggtaatgttgtatacttcaatcctaggtcaagggtttggcaaaaaagtcgatgtttggctcaaaaggcttgcaaatggcagaacataatgtatattatggcatctatttggccaatggcttagaaagaagggaatgcccaaatcatttccacaaaacgcatattatgataactagaaattcatgcaaaatcaatcatagcacacatccatgtggacaatcaaatataaggctttgtggccacgcaaacactaaggcttanggttcgtttccacattcaggccaaaccactgtttcaatgattgctcttttatcaagtcacataaaacacccgagtccaaattggcattcangaaagtctttcatttgtttcaccctctaggtgaacatttctttttagaaaaagttgaatcctangcaaattataacccgagatacacttat

SEQ ID NO: 136137 - DNA, 452 bp, Glycine max
  unsure (1)..(452): unsure at all n locations
gatcctatgagtcacctgcggcatgcaagctttcgtcaaaatttttgatattntgttccccttggccacaaccaggttacccttggtgagtttccactttccagaaccaaagtggttatcataaccagcatcatcaagtacctgcataaagataaaactaaagcgaacatatggagcatgtttcactcctctaaataacaactgcattcccatgttggtttgcaaacaaacatcaccaacaccaatcaccttggacacaccatcattatccatcttcaagactccaaaatcacctggagtgtaagatgtgaagaacttctttctagctgtaacatgcagtgaacaccactatcaattatcacatgcttcatcagatacaaattagcgaacaatgcatgtgaatacaagacatactatagcagagtacacggcatatatgatcttttgcttac

SEQ ID NO: 136138 - DNA, 374 bp, Glycine max
  unsure (1)..(374): unsure at all n locations
ttcttgcacgaccttgccacagggaagacaattttaattgctaaagagcagggtgcattcagggttgttcttcttggagcacaagaagatccacgaccagaatcaaaagttaccataaagccaacaagcaaagtcagacactcgggctacctctcaaatatggcttcaccacaaaccacttgggaatcctcagtttagtcttcttaagtccttatttccttacttgcttacaaaagagtctattgagtcatttaattgtgatattngtcagttgccacagcaccatcgtgcatcttttcctgttagtaataatataagatcctctccttttgattaatacattctgatgtgtgaggacccgctgtggaattata

SEQ ID NO: 136139 - DNA, 409 bp, Glycine max
gaccttaagcaccgcggctgcaactttcagcagctttatctttgtttttatagcacaagagcttcaagtaggtgctccttaaacctccattaatttttagctttaccttctattgcacattgttatttcttcatatttctccatgtatctcctcacatgtcttgttctatatgttgctaacatgaatttttagaatttccaccaattaaacttgctatacaagctagatttgattttctatggatcaaatttcttgatcttgctcttgaaccatgaattgcgttgagattacgttcctttgagtttttttttttgtattttttgtggcgacacctaaccatgaaattttacacaacattaagttaaaaaatctcgaatctgagtgacttttaccattgtaatcaaataa

SEQ ID NO: 136140 - DNA, 420 bp, Glycine max
tatatgcgaagacgataggccgagtactttggatctagtacgaccacgctctcctgattaccagctgggaaactggcgagtggaggaacgccccggcatttacgcaacgagcataatgtaaacccttacggagataaaagctctattgtggggcctaggctttagagttgttccttttggtaaggctttgagccttttggttttgaatttataatacaaggatatttcttcatctggtcctgggctctacccattctcattcatttgcatgtgtacttctttctctgaaacggcagatccgatgacgagacccccgaaggtactaatacctgggacccgcctatcgacttcgagcaagaaatgaatcaaacggaagatgaatgacatgaggatgtgggacttcccccagaactagaaaga

SEQ ID NO: 136141 - DNA, 392 bp, Glycine max
  unsure (1)..(392): unsure at all n locations
ggcttcttgtggaccctgttctgtaattatcttctctctcagaaccatgctatgcgctcgtgacagaagcctttcttcccttcgcaacttgagttccctattgctaccccatatagctccgagaaagatattccggacatactcttacttgcgagccctcttggtctcttgttgaatggctctagcgagtatcgcgttctatttcgcgtaccacggacactcctttcgaacgtgtgtagcgggcaactaggactgctacttggcaagattggccttatctaactcgctattgagagctgggacttcttcgtcctcttgccgtgctacaaaactcgtttggctgaacgacttttaacttggggagccaatctanacctcttatatgaactttc

SEQ ID NO: 136142 - DNA, 342 bp, Glycine max
  unsure (1)..(342): unsure at all n locations
gcagagcnaggaanaaaaaaatatattttttagaaaaaaaaaaagggggaaggaagaaaacaaaagaaaggaaaggaaaggaaaagaaagaaagggaaaaggaggaggagaagatagagagagaaagaaggaaaggaaggggaaagagaaagaaaaggaggagagggaaaggaagggaaaaaaggagaagaaaggaaacaggcggaaggaaaggagagaagggctgaagaaggagaggagggaggggaagagagcgacagaagaaagagaggggaacgaaggagaaggaaaggaacgaagggagagaaggaaggaaacgaaacgaaggaagggaaagaaaag

SEQ ID NO: 136143 - DNA, 431 bp, Glycine max
  unsure (1)..(431): unsure at all n locations
agcttgaatctaagtgtgtcttaatcactttatttatgattgatgcttaantatcatcttccgtcttttttaagaattaaatgtgttttggcataacacattcccatagaaagattttcccttccaatgcttcaggtcatgaaacacttgaatatatatatatatatatatatatatatattaaaaatcatgttaaataacctctcaagtactaaaagattttttttattattaaaactagcctctaaacttttgggtgtaattaagattttagactctcagtgatgtttcaaattattcctatttttataagttttaatcttatccctccaaaaatatattccgggaatcaaactcaggtaataatattattagttgtgaacgatactcangagagaataatattagagggatgattcttcgagttcatt

SEQ ID NO: 136144 - DNA, 440 bp, Glycine max
  unsure (1)..(440): unsure at all n locations
cacgcaagctnncataggggaaaacaggngcagccatttcccttatagtcctctcacgagggggaggctgtgccatgctctcagaacgcgcaaaattagaatgctcagaaccagaatgctcaaaattataacgctcacgatcaggatgttcaaaatcaccaataacagaatgcacagattcaccagttatggaacgctcagaatgatcaaaaggtataaaatgattcccaactaatctatgaaaggccctatctatctcaggatcaaagggttgtaagtcagatggattgcctctagtcatacactacattcagcatgcacacaactcagtgccttcgcatgtaaataaaggcggtaggtcgaactacagctaccctcaaatgatatccacacgacttgaaatctcacacaaaaatcagagtctaactatgaagctaaaa

SEQ ID NO: 136145 - DNA, 456 bp, Glycine max
  unsure (1)..(456): unsure at all n locations
agctntgattatgtcgagaagaaatcacatgtttgtcttcatcaaaaagggggagaatgtgaatgtatgtatacatgattttgatgatgtcaaacaaggatcatttgcttcaagacgaatacaagattcaaacaaagccttgattcaagatttcttcaagatcaagccttgcctcaaaacgaaaggtttcaagtcatccaaggcacatgtaatcgcttaccaatacatgtaatcgattaccaaggtacatgtaatcgattaccaatggtttgaaagtgtgtaatcgattacacatcatacgtaatcgatgaccagagactctaaatgttgggaattcaaattttaaatgaagagtcacaattgttcaagaaaaataactgtgtaatcgattacactaatgctgtaatcgattaccagagacaattntcaaggaatatcgccaacagtcacatctta

SEQ ID NO: 136146 - DNA, 494 bp, Glycine max
  unsure (1)..(494): unsure at all n locations
ctaagcttaatataatgatatttctttatgatagacgatagcaattgatttagttcttttctttcaagggtcaaatatgaaatgaaactaaatcaaattaaattcaatataaaattaatattttgaagacatataagttaattaaaactgtaaaaatgtgagggttccccgcaagtttacataaattcaataaaatcagacatggatgggtttaaaactataagctttcctctattacatctaaacccaaatttgtctcaccttcaattggatgaggatggtgagtcccaaatagattgcttattgacatactcattttatatataaatatttatgtgtgtgtaattntatttgaagacatgaacgtaaaaccataacatgatactaaatcgaacaaaacatattatatatatctttaaaatttatataaaagatattattattctaatgcaatatatgtatcatctttaanttaattacgcatctatttggtc

SEQ ID NO: 136147 - DNA, 447 bp, Glycine max
  unsure (1)..(447): unsure at all n locations
agctttatgaagttttctgtttttccaaaccttgaaaacttgtgctattcatcttttcattctcttctcccttttccaaaaataattcgccgaggactaaccgcttgaattctttttgtgtctctcttcttccttttccaaaagaacgaaggactaaccgcctgaattcttttgcgtctcccttctcccttgtcaaagaattcaaaacgaaacagtctgagaattnttttgattcttccctttccctaatacaaaagtgttcaaaggactaaccacctgtgaattcttttgtatccccattcacaaagtatcaaaggtttaacagcctgagatctttgtcttaacacattggagggtacatcctttgtggtacaagtagagggtacatctacttgggtttgactgagaacaagagagggacatctcttgtggatctgttctagtgga

SEQ ID NO: 136148 - DNA, 113 bp, Glycine max
  unsure (1)..(113): unsure at all n locations
tcgattacagctntttaaattcanaatcaaaatttgcaaattgtttcataaatcaatttaaccactagtaatcgattacatcctctggtaatcgattacagtgaatttcacat

SEQ ID NO: 136149 - DNA, 420 bp, Glycine max
ttaagtcacccgccgcatgcaagcttatagaaatcaaacaagataatatttttgctcttacattataatagaagcatatgtgcataaataaaaaataagtcataaatcatttgtctaagtcacttgcatctagaaatcctaattctcttctaatggtttagaaagagtatatggttagtggtttagtggtaattgattatgttttaattgttaagatctattttgttttagtattcttgttttttttgaaagtttacctttgcattgcggcacatgtggttgtgactgtgatgatcttgaactccatgttagtgggagctaatggctaggaggcaatccttccgctcaacagcttgtggatatgtgtacctacatgtgaagacgtagttttcatctttcgtatccttttagataatgata

SEQ ID NO: 136150 - DNA, 406 bp, Glycine max
  unsure (1)..(406): unsure at all n locations
tttttattatatactttgggggcctggagacaattanttattatgctgacattcattgagctccttattgaggttgaggctattgagggtgtagctcgctacatcattaaagggtattccgccactggtgtgttatttgtcggtggcctgttattgctgattatcagtgccattatggcgcacaaagtgtttccttccagccaggcttcaacaggctacagcgccacggatatccttgaatacgctataatattactaatgagccgcggcggcgcctccgcatgatgatatgatgctggtggattgcccctacatgaccatattgcgcaatgaatggtggcaagctgcgcaaaacattgtagatataactcccttacctgtgatattgcccctatttgttccttgt

SEQ ID NO: 136151 - DNA, 323 bp, Glycine max
cgcgcgcgcaagcttgatgtgtgacttagatcacattttttattttctgtttcgtaattaaccacttgacgcaatgaaactaactaagaatagacgtgcgatcgcactttctcttagtataattcaccatatccaggcttaatgtcttataacacttcaagatatcttgatcattctattattatcttgctataatcatgcgtaacttacgctacagcgctaacgaacagttatattttgttttaaaagtccttaaacgttggtacgacacaaaagatcgactgccactcggtgttatcattattacgtgagaaaacggcgtt

SEQ ID NO: 136152 - DNA, 466 bp, Glycine max
  unsure (1)..(466): unsure at all n locations
ataaaactcagctttcgatattctatgtcccgtagggtccattggtttctgcattttattctcgtgttgttactttttatacccactggtgacgtgcttaagccattctacttaagtcgtttctcgcttaacttaaaaataaaataaatttccaccgaacgtttgaattgtattatccattaacttcggttaaaataaattccgaccgttcggtcgtgccgtaaccacgttggaaatcaaaaagaggtaaaaaataatataataatcaaaaagacatcttttagtaaaataaaggggaaaatcaatcggacgttttctctttgggatttctcattcttaatcgaattgattaataactaaagtgaaactaaaggctaanatcaattcgcctagtcaagctcgtccaccaaaataggcttttgaagttcgtcatttcaatttctcactaagtaaaatggatcatttt

SEQ ID NO: 136153 - DNA, 433 bp, Glycine max
  unsure (1)..(433): unsure at all n locations
tagcttgagccaattcaaacgacaatttccttctattcggatttctgattgagncccgtgatataactagacgctcgaaattgaatgttgaagctctgagctaattcaaacgacaataacttgttactcagatgtctgaatgagtcccgtattatatcgagacgctcgtaactgaatgttgaatgtctgagccaatccaaacgacaataactatttactccgatgtctgattgagtcccgtaatatatcgagacgctcgaaattgaatgatgaagctttgatccaattcaaacgacaataacttattactcagatgtctgattgagtcctgtcatatatcgagacgctcgaactgaatgttgaagctctgagccaattcaaacgataataactttgtactcggatgtctgatagagttccgggatatatcgag

SEQ ID NO: 136154 - DNA, 437 bp, Glycine max
  unsure (1)..(437): unsure at all n locations
tgtgcaaatcaagtcactcccgcattntatctctagcatgcattgtatgttggnctcgtcctttgtcacgggaagccggaaggtccatatcaccttcttaattgtacacatggggcactgcgcccccaaatgcgcaagtaagaagagataattttccgggctctcgtgtccgtaaaatgcattcacatcatgcatcgcataagcatctcttcataacattataatggacatatcctgcatttgtccgttatcatattccggcctcacattttgcatgagtcatggcatcatcaggcatatgcgttcaacaaactttttgatctgcaaaattgcataccatttgttttcatgtttgctcatccttgcattttcctctacaaaacanaaacaaaaaagggggaagcgtgaaacttcacactacattcttattttcatgt

SEQ ID NO: 136155 - DNA, 485 bp, Glycine max
  unsure (1)..(485): unsure at all n locations
tgcggctataccttcgaccaaacactgacgngtttctgtctctgtccggatttaaggcaggctgcagaaccggctccgtttacctaactatactggaggcggntgccgcggctttatcctctatagttttctggagatttaacatgaccttcgagatggaagtcatttgatcttttaaggccgatagatcggccttcatctgttcttgcacgccctcttcattatccatttttctggatcgagtgttataagggtgctttggtgttttcttagctatgatgaaattcctaaagaaataaacaatggtgagtatgccaccgaaacatgaatatgcanatgaatgatcggagcacttgaatccaccccaagggttttttagataacatgatgagctcagaacttctcattgtataaaaagaacaaagctttcatctagccaagattatacaaaagtgttataagagaagcctaacgattctaattat

SEQ ID NO: 136156 - DNA, 320 bp, Glycine max
  unsure (1)..(320): unsure at all n locations
accataactgcaccacgactttattttgcacacgatttcctatcgaatccaagatcacacgtacgatcacggatcaataggatnttcttgagggtagtgatatatgagacgaaactgggtgttccggtcttttcctctttgtttatgtgtggagggatatcgccagtcgagaatgactttgaatggccattcgaaaggaagagacaccaaaaatggggttgtctcttgcgaccgtcacttatcttgccganaattatctggttganaggtctctgattttttctttattgtcaaaagtactcattttctcgagctttcat

SEQ ID NO: 136157 - DNA, 379 bp, Glycine max
  unsure (1)..(379): unsure at all n locations
agcttatgagaacaaaaatgactctttcattttctaagaggcacgggaatcacgacgcatcatcaagaatcaagccaaggctattgtgctctctatcgatggggcaaaacacaccgatgattactgatgatggatggctcaaattctacaaaggataaaacatcactttgaaactgagctttcaaaactatcatgacatgtagagaagattcactgatttcactgttcaaaaggataagaacttttatttcctagacaattacccatttcttgtacatatcctataattcatatagatcatgcaaagtctacgtgccacaaaatnacccatagataaactaatatcgacaaactaacacattactaataaacacttaca

SEQ ID NO: 136158 - DNA, 383 bp, Glycine max
agctttgtgcacagacccttctcgttatactttgcttctcttaaacaacattatcatcacagcatattctgagaaccaaaaccccacaatacatgcgtggtaatgtagttatttagtcctgcttctatcaagttctaagccaacagtacatgtgccaatgctaaagtcagctaactgtacacacaaatgggtgatcaaaccaagagcatgcggttattaagcattgaaagaagcatcgaacacacaaaacacaattaattagatattaaaagtaattacatcagctattccttagaaatccacaacagaggtgttaatccagccagtatagaaacactctaacacaaatgacaatgagagtagagaataatcgttccttacac

SEQ ID NO: 136159 - DNA, 341 bp, Glycine max
tataaaactcagcttttggaagctatggaacaacgggacctatttcttgttttagtctccacagaggccattgcctccctgcgccaatattatgatcagccgctgaggtgttttaccttttgggacattcagctatcacccattgtggaagaatttgaagagatcctacgatgtcctctatggggaaggaaaccatacctcttctcaaggttctacccctcattagccagaatatctaatatagttcaaatctcggcgcatgaattagaccgtcacacgcaagtcgaaaatggggtgtgtggaataccgagacaatgtttggtggcacaaacatgaatctt

SEQ ID NO: 136160 - DNA, 257 bp, Glycine max
  unsure (1)..(257): unsure at all n locations
ttatctcaccctcatttgtcacaagatagtgacatggagttgatggtaaatatttgtcacaacaaagtagttttatctcaacctaatttgttgcagcactccatttttatatattacaaatattcatgtttggcatttgcatgtaggtccctgcaactattggtccaccaatagcaaggaataagctcaccataacaagagccaaacaaaggaagggtgctgataaagatgatgtanaaaactgaagaagcattttt

SEQ ID NO: 136161 - DNA, 417 bp, Glycine max
  unsure (1)..(417): unsure at all n locations
taaacccagctcgatggttgtgctagcctttgatggactcngcgggaagtgatgtgggaaatcgacattcccattcagataggcccccacacttgcaacgtggtgtttcaagtaatggatataaatcccgcctatagctgcctcttgggaagaccgtggattcatgccctgggagttgtcccttcaacgcttcaccagannatgaagttcgcagtgggtggactnttagtgatagtgtcgggtgaagatgacatgttagtaagctgcccctcctccgcaccatacgtagaagcggcaaaagaatcattggaaacggctttccaatcctttgtggtggtgagctgcacctctgtggaaccaagtctgtcgctaccttctctcttcaatgcggccataatggtggcgcgtgttatgctc

SEQ ID NO: 136162 - DNA, 122 bp, Glycine max
cctactgactgaggcggtgggggattatcttatggttctgagtttacatgacttcagatggagcattgactttaggccgaagatcgcttatctgtcctgcaccctcttatatcattttctga

SEQ ID NO: 136163 - DNA, 390 bp, Glycine max
  unsure (1)..(390): unsure at all n locations
gtatttaaagaattgtgaagatgacgtttaacgctnggtccaaaggaaacnnggnnangcttaagnngacaagattaattgacaacatgaatgactaatgaccagcaatggtgaacatgccaagctatgccacttggggtaattgttgcttttgaaattttgaccaaaaatggataaagtaggtttaaaccaaaaatggcaatttctacttttngctaaaattataaatcctatcctaatcccttacatagatgtgttaaagttccttggattatgtgtaatcatagtggaccttgcacaaagtccactctcacagagctaaattacattgtcactcactgcacgatgcaattctttcatagatgggattttagctcagatagttatata

SEQ ID NO: 136164 - DNA, 88 bp, Glycine max
gattttttttcttagcgtcactagagagaatgtgtgtgttttgactcgggtgtctctaaatacgagagattgttaccagctctgatat

SEQ ID NO: 136165 - DNA, 358 bp, Glycine max
tcgtctatcggtcactcaacactcttcttctatgctatatccttgttacactctacaccttctgccggatgccaccaccaccccatctacacattcctccaccgctaccatgctgctttgctccagaggaaacgaaaaaaacgctaacccccaaaaaacacaaaccccctactgcctgaacaacgcggtgttcgtaacctagtaagaaactagcgttgtgtcacaagcaatctgagaccaactagcatggcgtataacgagaggcggatcaacgctctataaggcgtgtgcagaatgccgcacacacatcgttctatgctctgaggagccacatgtgcacgagttgggcgaaggtgat

SEQ ID NO: 136166 - DNA, 326 bp, Glycine max
  unsure (1)..(326): unsure at all n locations
ccttctggaggaatcttctggagggcccaagtgggcctggttgctattngcacccccattattactaaatacaccccctgcccttttttggtgattctttnttcgtaaagttacggacacttacgaatttcgtacgatacttgtttctttctgtaatgtatggaccttgcggattacataatcatcccttttgattacngatgtacggacttactattggcacgatcttctttgattccggtgccggaactacggatggctaatattttttgattctgacgcacggattacaattgctatgatgtgcaacactcaaagacaaacag

SEQ ID NO: 136167 - DNA, 420 bp, Glycine max
  unsure (1)..(420): unsure at all n locations
ctaagcttccccccagctcgcccaggcgagcaaggtggcttcctccatattctaccgccttctggaggaatcttctggagggcccatgtgggtctggttgctatttgcacccccattnttactaaatacacccnctgcctttttttggtgcttcttttttcgtaaagttacggaaacttacgaatttcgtaacgatactctgtttctttccgtaatgttacggaaccttgcggattacataatcatcccttttttgacttacggaacgttacggaacctcacgaattgtgcaacgatgacttctttttgatttccgatatgtcacggaaccttacggaatgtgcatcaatactctcttttgatttccggcattgtccaaaacttcacaaatttgctaatgatgggtgcctagcacctcac

SEQ ID NO: 136168 - DNA, 335 bp, Glycine max
caattatgcaacatctagcactttcttacaccatagtaagggactaagaatgaaaattgattaaatcaatgttggtgctagtacaactaacaaataacttgtttttcctatagaaccttctttatgggatctcccatcacacaggttggtgtaccatcagaagatgaccatatcatacaatgattggcacgagatgctacccttcgcattacatggttatcagacttttgtatatacatctactatggcaaccccattctctttggtgtacgggatggaagttgtgctctcatttgaggtggagatctcttcttagagaattctattacagtcga

SEQ ID NO: 136169 - DNA, 387 bp, Glycine max
  unsure (1)..(387): unsure at all n locations
atggagcatacaagcaacaagaactaaatgctatatcaactccttctttatgaaatgcaacccatttgaagttctattttagcttacctactgtaagaccaggtgttgtattctttttcctactcaagtttttttgtcccaaaagagaaaaatcaaggttttggcatgagaggttttaacgaggcacccctgtggagcgaagganatttgtactcaattgactacattgaataaaagttctatctcccttcagctnttataattttcttgtgtcgaccctacaaaggcttatcaaatccaaggtttgcccttggtgagcctcaacacaacgcaggatgaactacgtcctggttgcatctncaaaggcatgccaaacctaaggtccac

SEQ ID NO: 136170 - DNA, 299 bp, Glycine max
  unsure (1)..(299): unsure at all n locations
tctgctagcttagtgagcggtcactaagcgtaacactcatgtgctaagcacgaggaagactctggaagaagatgagtngtacatgttcgctaagcgcaccgcttcatctcactaagcgcaccgcttcagtccatccgctaagtgagaaaggcacgcgctaagtcaaaattcactaatgtgcgctaagcggtccataattgcgctaagcgcatgagcacaaacaaggccacctatntatgcctaaaatcagattngagaggggggagttggactgggattagagctttgatgtctagaga

SEQ ID NO: 136171 - DNA, 384 bp, Glycine max
  unsure (1)..(384): unsure at all n locations
aactgctggttatctattaccatatatgtgtaatcgattacacagtgcaacctttgaattcaaaatttaatagctgttgtcaatcatttctggccactggtaatcgattacatcctctcgtaatcgattaccagagagtaaatttgttgaaaaagaatttttaacttaaaattcttggccaaaccttttgctacttcaatttggaattccttcctatntaatataccctttctaagactctaaagactgtcttgatcatccatcttgaatatctntaatttctttgtcttggataaagctttgagacgcatgtgatcctttggcatcatcaaaacatcagcttgatcctttgtctacaatctccccctttttgatgatgacaat

SEQ ID NO: 136172 - DNA, 366 bp, Glycine max
  unsure (1)..(366): unsure at all n locations
atggggaaaaatcatcattccaggaccccattgaagntnaaagatncagncttcatagaagctccacaagcaagcttccatcacctttgcccttctgtgcaacaatctgaagcaattgaacagcctgaagcttatgctgcaaacatctacaacagacatcctcaacctcaatagctaaatcagtcacaacagaataattatgacctctccagcaacaggtacaatcccggatagaggaatcatcccaaccttagatggtcgaatccttcacaacaacaacagcaacaacaacagacttattnttaaaatgctgctgacccaagcagaccatancgtnctncacacaatcagcagcaacaacaacaa

SEQ ID NO: 136173 - DNA, 273 bp, Glycine max
  unsure (1)..(273): unsure at all n locations
tatgcatgtgaattaggatgcgtcaacaagaatcaagccaaggctattatgcaagcaatcaatggggcaaaacacaccaaatgattataatgatggatggctcaaattctcacaaaggtaaaatcatcactttcaaattgagctttcaaaactatcatgacatgtagagaagaatcaaggatttcaagtcacaaaatgtcaagaacttttattntcaaaacaattacccatttcttgaacatatcctataattcaaagaaaaacatgcaaagt

SEQ ID NO: 136174 - DNA, 424 bp, Glycine max
  unsure (1)..(424): unsure at all n locations
agtaganacatgggaccaactcattntatttcatttaggaagtcgtatccagtcaaggtctgagagaccatacaagtttcctaacgatttctaattatgtgggccattaagtctatcatatgctgacaatagccgagaagcccatgaatctcttcgggggcggagtaggtgtctgccatcgctttggccttggctaacaatcggggaagttcttgactcccgttcaaggtaagagcaaaccgatccatccacatggttgcctcttggtgtaaagagtcgatcacccttcctctagcctatttatccgcgtatacttgggcttattcatccgcaatcctatgctcgtgggccgcggctagacctaactcttctttgtacttggcgatgatagctagcatgttgtcttccgttcgcataaacgctg

SEQ ID NO: 136175 - DNA, 220 bp, Glycine max
ctcggtatttgctccaaggctgttggatgacttctcagctagcagcttaaccagttgacccacctggatctcaaggggttttagggttgactcactactcttatggttggacatggtcacttgcataaattgagctagtgtctcctccagtctggtggtcctcatgaaaatatttggccctttgtggggtggcttggtggatgggccaccctggtcctta

SEQ ID NO: 136176 - DNA, 431 bp, Glycine max
  unsure (1)..(431): unsure at all n locations
ggctaagtagttattcataatcaaacatggtcttcatcatcctcaagttcatgcatccaatccatacttcagagattcacgcaaaaatcagcactaaacgatagtcgtttctctcaaaatttaaagatcacactctcaccgggatatggttaatgcattccttcacaatcaatctgacaaccgactaacattntcagacataatttcaatcatatgctcattctcttctaatgacggcaaacttgatcaaaacaatcattcaatcatcccaatccattcaattcatacatttgctcaatcaaatcattntcaaacactcattccataccaaacaagccactgcatacaatgttcaatcaattcactgttcaatcaagctntttgtacaagcaatcaaacaactattgctactgaattaaaatactaaaaca

SEQ ID NO: 136177 - DNA, 467 bp, Glycine max
gcttttatgaaaggatatgactctttacttttgtttttgaatttcaacggtcagatacactattaatcgattaccaatatcttgtgatcgattacaccattttgaattcaattggaacgctccaaattcaattaaaagcttttgaaatcaaactttgctactgggaatcgattacagataattggtaatcgattatcagagagtaacaactctggtaacttagaaaattttgagaaaaaactcttgaaaaacaaaaatgtgctatgtttgttttttaataaatcttttaaatactttccttgtgaagtcttcttgatttcttctcttggatcttgaattcatcttctcttgaatcttgaaattaaactgctcttgattcttgaatcatggccactcaatctttaaaatcattctcttgggctttttgtcatcatctttggtatatcagaactacttgaatcaacttg

SEQ ID NO: 136178 - DNA, 401 bp, Glycine max
  unsure (1)..(401): unsure at all n locations
agctntacatggagctactttatgtgttattagagcatattcctataggtgatggactgttgcttcctttatcattttaccacgccaattcactttaaattcttgttcggtcacgttcatgtagctggaactggtgtcacaatcagtcaatacttaggacaggccttacgtggttcgaacacttcatgtgcatgagtcaccctaaaagaattgatagaaatcataagaaatctaaatgacaggtggaggagagaagtataacatgaaaacaaatgctgtttggagataatgaaaaaagagttgaaagacgcgatatatnatgagttatcccaaatggcctcgcaacactcacccccatatgagacaccagatacacacgtattatctacacgtgtcaccac

SEQ ID NO: 136179 - DNA, 267 bp, Glycine max
  unsure (1)..(267): unsure at all n locations
agaaatatggctgggattgagcaatatttatagtagcatattgtgggagacatagtcgggtggagacttggactcaacacaagtcaaatcacatggtaaggtcttcaaaattttagtacaatttttttgtttacgttacagtaattcacgcggcagaaaccgtgtcatctttacctaccctanggagttccttcacggaaagtgaaccaatgaaatcttataaaaagtgtaatcattgaagggctttcgtatctctttttataacat

SEQ ID NO: 136180 - DNA, 317 bp, Glycine max
  unsure (1)..(317): unsure at all n locations
actttgataagaaaattttttttttttttcccccancgggggggattttttgtttttncttctgtcattgactttaattctttttgtacatttatctcgactcncncattatatctattatatagtaaaatggngtgttagtttgttttaagtatttattttatttctttaacttatgatggtgatttattttttatttttttatttttgagttgatttacttattctttattttattttattttttatgctctttttaacgtttattttttaattttacttattcttgttttgtttatttgtctttttattattct

SEQ ID NO: 136181 - DNA, 360 bp, Glycine max
  unsure (1)..(360): unsure at all n locations
tgcataagtactattagactcggtcgaattcaccggagtagggtttaccctagattgcccaccttgtgcattattattagacttcttgttaaaactaacacaagcaacaataagaatcaataagaatcgctaaaaaaacacgcaaatcatataaccctangtcaccacgaaacaaaccaagtttcaaaatccacaccaccccacactgaaaacaacacaaaccaataccacacaagaaaaaaagctcaaataaaaatcacaaccccatatccncctactattcataaaaacacgcaatagttcaacaaaaatgaaagaaaaagacgggaaaaatatgaattagcaaacccttaaaactca

SEQ ID NO: 136182 - DNA, 232 bp, Glycine max
ggcttattccctagaggatggtgccttccctctcctcttccccctttccttctggcagaacgtgccctcttgggcgaacgagggcgatgctcacgggtgcgctttcctaaggaggaaagatgcgcggattcgccaccaacgtttatttgtggaaaacgtctaacaatcacgaggaaaccggtccaacatgaaactctaagtttggaggtgtgctcacccttgcggtcggatt

SEQ ID NO: 136183 - DNA, 294 bp, Glycine max
  unsure (1)..(294): unsure at all n locations
aatgagctaaagatcttgagctgttattagtcaaaaaagaagagaacaaaataactttgtatattaactcacaacttgcaaatcctttgattgtgaagactctntcttaaaagtgagttgtgtcactttcttgagttcacgaagaacacctccttggtcaagcaaagttttgcggaaaaggttgatcaggttgtatctatctttgctcttgggtttcgtgtatgggtttacgtatctttttttgtgcatgaatcgcttataacatgctagaatacgtgtttctaagttgggcta

SEQ ID NO: 136184 - DNA, 359 bp, Glycine max
gtaattttttagagtattataataataattattacaattactaatgtaggtgtggttgtaacttgtgaataaataaccatttcagcgggatctctctgtttttcaatgcctagatcggaattggttgaggattgactttgacataatttggttgtttatgcggggagtgtttttaaggtgatagtattttctagtaagattggaagcatcacctctttgatagggtgcttgataagttgattttctaaaagtatattctaattatgctaaacatttgtgatatctagtaatcccttcagacattcatggtggtcagttggtattgcacatgtcagatgtattcattatatgctgtctct

SEQ ID NO: 136185 - DNA, 355 bp, Glycine max
  unsure (1)..(355): unsure at all n locations
caaatctcgtttgactcttgtggaggaaaaaagacaattataaagaaattttttattaaagataattaatgatattttaataaaattaataaatacttttgtacttatatcacggtaattaaaaaaatatgtgaatggttcttgtgaatgactaagttgttaatatttgacagtgacatagtgaanaacttacctgngccactaaattgagatcgaggatggtcctcatttcccacttaacattatttctagtaacctccaaaattgagcacatcagaattgacgcacagaaatgccntcatggcatacttagaagaactagtaggcattgataaaaaaaaacattccataaagc

SEQ ID NO: 136186 - DNA, 366 bp, Glycine max
  unsure (1)..(366): unsure at all n locations
agaaagagcacacacacagtcatctaataatgtttcatgtattaaaaaaantgtaagtataaaataaaagtgtgtgtgctgctaattaagaacaagaaaagctaagtgcggaaaaccaagtaatagagttagaataaaaagaaaaagggtgatctatggatgaatgctctcctagaacctaagcttttgcatcctangaaaaccatgaattgatggcagcccatcatcgttacaagcctagaaaagtccttcggattcagtttgtgtgttcttgactgtatggcatgagatgaactgcaaaggttgagacttatgttggttgttgattgatggataacctaaacacttgtgctcgagtgaaacaat

SEQ ID NO: 136187 - DNA, 263 bp, Glycine max
catcaacgggcgttttttacctgccacatatcctataagagggaaaaaggatgctaactcatctaaatcttatatcactatatccatcatatgacatagacggcactttacgagacatgtctgtatatgtgggcgagcgcaggcttgcaggacttcgccacctgccataacaacgtcaaccatataccgcacgaagactaacacataaaggccctctatattaactcagatttaattccgacactcaaagaacaaacattaat

SEQ ID NO: 136188 - DNA, 376 bp, Glycine max
  unsure (1)..(376): unsure at all n locations
aagctccactccatcattagattattacctgacatctcanacaaacaaatcaaacgttacacgacaattatagttgctggttgaatacctcacccactcaagtgtatcacacaattatggcttttctctaatgaaacactcttgccttttaccactctaattccccttgagttcttaaggcaatcaagagattatggccacaacaaagaacaattcaccaatatgtgtaaggtaaggctagacaaggaaaaggttaaccaagaaaaaggctaacaatgtttntaggcacaaatgaaggaaataaaattcagaatttaggaattcaagtaacaatccttcatgcaaccaatatattaccttanagagttnntttttt

SEQ ID NO: 136189 - DNA, 172 bp, Glycine max
  unsure (1)..(172): unsure at all n locations
caacatacgtgttccttccatattgcaatttntatgacttccctatcattacataaatattgatcatgtttgatttatttgctggcttattttccctttccatttatttgcacatcgcaatagaaatattctatcaaagacacactgtttcttgtttacgcttcctcacttg

SEQ ID NO: 136190 - DNA, 218 bp, Glycine max
cattcccagcaacaaattcgcttgtgcggccgggttgccccgtagccaaactggcccaaacccggccccgttcaactctttcccccacctctccaccttaacctcgccggtcctcttgggccctcccactgccacgatgttcctgatctcgcagcccaacagatgctgctccaccgtgtgcctctccaggctagactcacccaacccatcccccagcg

SEQ ID NO: 136191 - DNA, 482 bp, Glycine max
actacaagtctcaatagtcataattttattattttcataccacggattccatcaggggatgcaactaatcctctaaacaagcaattgccatcctcatttctgctagcatagcctgcaataggagtgcggcaagacccttccaacttttcaaggaaggctctttcacaggaaactgctagtcttgtttcttcatgattcagtgaagcaaggtattccgcctgcataaatcagccaaccacataaagagaaactaaactaataattatgcaattgtatcaagctcggaattgttttctccttgaaatatttaagatagaatagttcctcagtcctcactataaagtctcttatattgataaagtctcttatacttatggatacaaaatgtaatccatcattaactaattatcatctaaggaaacatcttctgtacaggcccaagtggcaagatgatgcatataatgcattatagttaattaaat

SEQ ID NO: 136192 - DNA, 327 bp, Glycine max
  unsure (1)..(327): unsure at all n locations
gcagctttattagctgaccatttatctattttattgttgagttttattcagaaaattagagtttatctctttattcttagcgagagtgaatcttctaaattcttgagtgaatcaaagaaccaaccctggctgtatcannatgacctttcacaactctttgtgtgttgccctcgcccgaaagagtgattctttccttcctttcatcttcaacctttgttctttcagaccacaattccagagaatccacttctgcccagaagtatctcgtggccataactcccatttacgcactcaattaagtgatcttgagcctaattgaattcaaac

SEQ ID NO: 136193 - DNA, 452 bp, Glycine max
  unsure (1)..(452): unsure at all n locations
caacggaagttctcgagaaataaaatggtttatatcttttcactcggatgtccgattcaggcccataatatttcaagacgttagaaattgaacaacggaagctcttgagaagttcaaatggtcagaacttttgactcggatatccgattaaggcgcataatatatcgagacgctcgaaattgaacaatggaagctctcgagagattcaaattgtcataaattttcactcaaatgtgccattcagggacataatatatcgggacactcgaaatggaaaaacggatgctctagagaaattcaaattgtcataacttttcactcggatgtccgattcgggaaaataatatatggagacgctcgaaattgaacaacagaagcactcgtgaaattcaaatggtcataacttttcactcggatctntgattcaagccgataacatatcgagacgctcg

SEQ ID NO: 136194 - DNA, 189 bp, Glycine max
  unsure (1)..(189): unsure at all n locations
gccattccggaatgacgtgggaactaataccgagcccacttgcattacctaagaaagcactncaataagcgggctaatattacccctctaattatcctcaatactcgttgggtagacacatacaaaggactatgctacaggtgctagtgcaatggggcgatttactagttgacgacacatcttaagatg

SEQ ID NO: 136195 - DNA, 153 bp, Glycine max
ttccgtacttaattattagtaattgtttggtatcatgtataatatagatataatattgatatgaaaaataactggttttttatatgtcttgtttgatgttaatatataaacttcattgtatcgatgtttaaaatatgttttgattgaaaattg

SEQ ID NO: 136196 - DNA, 301 bp, Glycine max
tgatgacgaggcgatgactaaaagatcacacgtccctcccagaatgagttcaagatattcaagatatgatcaagaacaattcacgcgttcaagatagaatcgtgaagaactctcgactccagaagatagttaagagtcctgaatcaacacttaaggttcatgatctcatgaatcaagatcaagattcacgactcaacgatcaagaatcaagagaacgctgaatctagctaagtatgaaaagtttttctcataacttgagtagcccatgattttgctcaatacatggctaccacagagtatt

SEQ ID NO: 136197 - DNA, 250 bp, Glycine max
  unsure (1)..(250): unsure at all n locations
cccaacatctcaagagaatcatgagcaagtcaaggagtcgagactcaagaagaaagcctacatacaagaatcgagaatcgagagatcagatctccagaagtctgatcaagattcaggactcgtgatncaagaataaagaatggactcaatcaagatcagtattaaaaagtctttcaaaactttgaataccacatgagattttgcaagacccttaccagagagtcgtactctctggtatccactaccatag

SEQ ID NO: 136198 - DNA, 404 bp, Glycine max
  unsure (1)..(404): unsure at all n locations
acatatacttaattatcttaattgcctcttcaacgggcttcaactttatatttccccctgctgaagcatctagcacgtgcttggcttgtggtctcagcccatctataaacatatttaattgaattggctcagagaacccatgggtgagaatctttctcaataaacctctaaacctctccaacgcttcactcaaggaactctcagggaactgatgaaatgaagagattgcagctctcccttccgtagtctttgactctgggaaatatttcttcacaaactattcaacaacttcttcccatgttttcagactgttacccttatatgagtggagccacctcttggcttctnctgccaaggaaaatgaaaacacgctgagtctaatagcctcatcttgcacttcctgc

SEQ ID NO: 136199 - DNA, 439 bp, Glycine max
  unsure (1)..(439): unsure at all n locations
gttgtcttaaccacatcaacctccctttgtttattatccacttgcacttaaagcccagtgctgctcgtttatctgcttgcatgtctgagagaatattttcaactccatttgcacattcatcaccttgctcctttctgcagccaaaacacaactttctataaaccagtttctgtaactgtttgaaaatactaatctattggtaacaataatttttatgctcaatttaatgactaaagaattggaaggattacattgtttgcaaatgtgatatacaattagtagtatcaggaagatctgaaccatgattagcatctactgcccagctggtaaaccatgtnatggcatgaaattcttcctttgtcatcccaaatccagataaaccttttatctgcaagtttacaatttcagtcagctagtaaccaaaacttatgatcacatc

SEQ ID NO: 136200 - DNA, 472 bp, Glycine max
  unsure (1)..(472): unsure at all n locations
cttagttactaaggattctgtttgtacctttccctatctttgtcttatcctataacttcgaccagctatattgggaaagatgtttatacagagtttatcaaacggatcatataaacatctctgctgcatgttctttgtgagggaggtggggcatagtatgggtgcattaaaagttaaaacatagcttgcgtagacatgtgctatatgaatcacggattgttacttaaagcatgataagaatccataattgattattgcagcctttatgagatgtaattattaacttgtagaatttataaaacaatgataaaatatgtgtgtgcagatttcacatttcttatgtatctaaacaaattgctctgtgtaggctttnntttatgtgatgtaattatcattaactngtactagaatntataatacaactcataaatattcgtgtgcagatgtcacatntcctatgtatctaaactga

SEQ ID NO: 136201 - DNA, 332 bp, Glycine max
ctttgtggttgaattatggattggctttgtggatcacctgggggtgatattggctgatctatgaagttgatgagctgttgggggattttcatgtatgaacagcagtcacaacatgggtttctccttcactctcaccctcttcatttgccccagttttctcattcgtccaatcagcacgattaaatgtgtctctattagacccacttcgatcattctgcggaaaaactaatcgcaaagcttgatggcgtccccacctttttcataaaaacactgtatgtgcactattatggacatctctttccgcatggggtgccttactcccatctcacatt

SEQ ID NO: 136202 - DNA, 395 bp, Glycine max
tgtagggttcaccccaaattccgttgtcatatgtctaacttgatcccatatctacttgataatccaatggtagccataaccctagccaaggttcatcaacctccatttctccgagaatacgactcgaacgcaatgtgtgcttgtcacggagaagccccggcgccgtccattgagcattgtaaggctctgaagtgtagggtgcgaggtctaattgatgctggctgaaatttgaggagaatcgtgtgtaaatcctgacattgacaagagatgccacacatggggcaattttgaaagctgttgttagatgtctctaatgactcaccaggaatttcaactttcaccggaatgtgggtgtaagccattggtctgttgctcaacaacctgcgatcctgagt

SEQ ID NO: 136203 - DNA, 348 bp, Glycine max
ttctattgccggaagcttgcctggcacttcttctccaacatcgggatcaacaacacgcataacagatcactggcacaactatccccaacatctgtatcaacaaaactcataacatagaggctttcctgaaataaataatccaatatttgctaagaagagaattgctattttgaggtcattcaatgaatatataatggcatactcgatgatcaaatattacataagaatgatatcatattacaatagaatggcatgcacatacagcttttgttgtttttgtgttaacgagctcatatatatatatatatgcaaaaatcgtaagcaaagtacttgtggagtatgaattct

SEQ ID NO: 136204 - DNA, 287 bp, Glycine max
  unsure (1)..(287): unsure at all n locations
tcctgagtatgacagncaccgctntatgagcgcagtacaccaccagcgcttctaggccatcaagggatggtcgtttctccgggagcgacgcgtccagctcagagacgacgagtatactgatttccaagaggagatagggcgccggcggaggacatcactggttactcccatagccaagttcgatccacaaatagtccttgaattttatgccaatgctatcgggtaatgggtcagtggatcccgctcgatgcatatgctatcggccagctcctgagatatcccgtact

SEQ ID NO: 136205 - DNA, 324 bp, Glycine max
aagggtatttgatctcttacatcaagaggcaaccatatggatggacagatatgcttttactctatacgggagtcaagaacttcctcgaatgttggccaacgccaaagcaatggcggacacctactcttgccccgacgagatccacgaacttctcagctattgtcatcatatgatacactttattgcccatattattacgaactgctacgacgttcgtttgcactcatatctcgcctactatactctcgaataaatggttattcacgttttactcaaaaatcatgcaataaatcactcacattttatcttcatgactcacttctt

SEQ ID NO: 136206 - DNA, 306 bp, Glycine max
  unsure (1)..(306): unsure at all n locations
acaaaccacacaccctcgcaacaggtatagaattctgattcacggccagctggtgtaccaagttaaccaatgcatccagttngccttcaagcttcttagtctcagatgatgcagctgagtgtgtagctacctcatgcactcctctaatgactatggcattatttctggcgctaaactgctgagagtcggaagccatcttctcaattaaatttctggcttcagcaggagtcatgtctccaagggctccaacactggcagcatctatcatacttctctccatattactgagtccttcantaaaatatt

SEQ ID NO: 136207 - DNA, 400 bp, Glycine max
agcttcagttatggaaagctaaatcctctggtggatgtttcttgttgtacttgatgcaaatatctttttatctatctaatgatgttttgtgtgttctctatgctatcagtatttcattatagtatgctcttaccttgatcacgtagatgcatgctttgttatggtcattcaacagtggaaactagtctgattcttataacttgatatgacaagggttgtttgtcgtactatcacaagggatcggggtacgataacccatttgttgtatgtttgtcttaatgcggtcctggacgagtttagtccaacaagaggaatctgcggacgatgcttgatcaggattatgctatactatcatgaggaatcatggtttagcattttaagagacaccatagaatgcata

SEQ ID NO: 136208 - DNA, 383 bp, Glycine max
aatcctatccatgcggcatcgaagtatgctactaaccgcatgcttctgctaacattattatcttcacgaaagaattataccaatgagaacctatgaagaatgaagggagaccgacctgcaacatcttatccaatatcctgccatctgagagatgggtcactataaatcatgtacaatgattgcgcgtgccccaatcttcttacttcttgaaagacaacctttaaagatcttcaaactatgcttcaaagaattaaaaacagcgggtttaacattaggaccgaaatgtgcagggacctacaaccacttattctttattataaataaaaaagatcttactcttaaacaatcaaatggatggattatttcttctgacccgtttttcc

SEQ ID NO: 136209 - DNA, 294 bp, Glycine max
gagcccaaggcatgatatctatctaaatatatatcgctcaacaaaaatatctatataactaatgaatcacctgcgttgcaatacaaaagtgtctttcagcaataataatcatatatatattataaatcattatatatataaatatatgctatcactgtcatcatatgcatagaaaaaatcgatcatattacgaaaactaaactatatatcatttaattataaatacacatatttaaaaataataaatatattatggtatatattatatcggcatacctaataattaaacaacac

SEQ ID NO: 136210 - DNA, 273 bp, Glycine max
  unsure (1)..(273): unsure at all n locations
gtttgatggaaaatagaaagggacaagtaaatctttttagttttaaattatagagaaaataaaaagaatattaaatttatgctaatttgtgaatttatcttgaaacattatcatattagaaaatatttattaaaaataaaaaattgccttcttctttcttttccttctctcaaatttcaaacgcactctaagtagctcanatggtattaaaagaatagcaaacttncaaaccgaaatctcagacttaaagcangtcaaatggataaaaaaatt

SEQ ID NO: 136211 - DNA, 383 bp, Glycine max
  unsure (1)..(383): unsure at all n locations
taagccttaaagcactggcttagcgagttcatccncaaaatgcagaaaacaaagatcaacttcatgaactcccttagcgcacaaggcgtgcttagcgtgttcatcccaaaaacccaaaattcaaagaaacgtatgaactcgcttagcagcacaggctcgcttagcgagtcttcgcattcccaaaaatggaggcttgcgagcctcaactccttaagccaccaaccagccttaccactttagggtgtgcctcgaactcttaacattcatattcttaccctagaaatcctacctattcaccacggataaattcttttccacaattcaaccatctctttcacagaacacggtgttattctctggttntattacacaaatttaatata

SEQ ID NO: 136212 - DNA, 353 bp, Glycine max
  unsure (1)..(353): unsure at all n locations
ggagccaggggagcgatactcggcatactctaggttctgcagcacataccctgatcctcaggagcttgctgccagactatctattccggggcggggttttgtacttaatgctgagggagctccttggaagcttctaagaaaggatctcactaccttcgctcanacctggagcgtcttctcttattctaacctcgcccccacttctcatacgttcgatcttaatatggacagggcgaggttagtctacggactagtgatgaagatggatatagatgtgggctccattaccttagaccagatttctcaggacgtggacaccacacctatgccagctcaggatgccctagatcacc

SEQ ID NO: 136213 - DNA, 197 bp, Glycine max
  unsure (1)..(197): unsure at all n locations
gaaatgatcatactcatcggcgaaaatattgacttctgtaactggctactaagttgcaatggaagacattgtatatatattgattgaatttgcattcactcaacataaattgtttaattngtacgctcaatctattacctatgtgttcacntataatatgaaattcttatttacatctttaatttggcatatgtaac

SEQ ID NO: 136214 - DNA, 350 bp, Glycine max
agcttcttagtctcacttgatgaattcgtggttacttcatgctctcctctaatgacaatagcatcatttctggcactgaattgctaggagttggaatccatcttctcaattaaatttctggcttcaacaggggtcatgtctccaagggctccaccactggaagcatctatcatatttctctccatgttgctgagtccttcataaaaatattggagaagaagctgctctgaaatctggtggtgagggcaactggcacataattttttaaatctctcccattattcatataggctctctccactgagttgtctaatacctgaaatatcctttctgatggtcgtgggcctgga

SEQ ID NO: 136215 - DNA, 454 bp, Glycine max
  unsure (1)..(454): unsure at all n locations
tcatatgtggcactaggtggtgatcgggcgatggcacaaatcaactatcccacttctacaagccaggcataagcacaccatccccagttgcccacctttacattgagctcacgcactcctacgtagctcttatcctcgttcctctcagcaccgggtccccatcaacccctccaagctttcacaatatccaaaaaattcaattccatttgtcacgaaactaccctaaaccaagaaaaacagagtggaggcagaaaactctgcacaaagctcattcaaattccatagttnttcctactcacatgccccagtaacattctcttcgttccaattcgttgaccattggatcgccttgaactttactagaggttctatacagaaatctaattttgaccgtggatctgctgagaatgctagacacagatgactcctttccgtgatagcgtgacaatatttt

SEQ ID NO: 136216 - DNA, 363 bp, Glycine max
ttgtgatgatgtttgtgatgtttatatgctgaaattgcctatggaaaactggtagagatgaatggtagaattaacctacggttagaaagtgagaatgtgatgttatgagtggaaaaagagtgaggctttgagggttggaaggttacgtctgaattctgtggtaaatggagattaaggtgagttaatactagcttgaaatgtcatttaagacttatgagacagcttggactgtgctagagagaaaaacaaatgaccaaagtgaaccaagagccatttctagggcaaaattgggtgttgaggagtcaaattttgattcggtagaaatttaggtgtaaatccagtttgagcaagttagatcaatgt

SEQ ID NO: 136217 - DNA, 469 bp, Glycine max
  unsure (1)..(469): unsure at all n locations
tataagcttatcaactatgttttaccaaacattgtctacaagctaaaaaaatagatggtagttgagagttgaaagttatcgagctagcttattgaactataagtttttgataaaattatatattatagtagcaaataaatataaaataataaaaatgaacatgttataagatatttttgtataaattttaantttattttatgcatggttaaataataaatttgacgtataatttttttttggttcatggagggtctaaaaggccaaactaattaatggcctctaaaaaatgaaacatgagcaacatctgcaagaagaggaatntgattccaagcatgccaggagtaaaaaaattgaacttcttcaaacacctcgaggccatacttcgaaaagttgtcaagcacttgattggcctctggtaaaatgtagcacgtgaaaaaggtaatcccagccatgtaataaccttgtc

SEQ ID NO: 136218 - DNA, 424 bp, Glycine max
  unsure (1)..(424): unsure at all n locations
gcttacgaaatcgctacggaaatgtcttgtatgctttactgaaacacctcgacttggctgttggtcatggaaaccaattttctcactaatttcgagagaatcctcatataccagaagggctgaacattntgctctaccctctttcccctatttgtaggagaaaagagggagtggttgccgcccagctcgcccaggcgagcaaagttgcttacaccagaaggcaccgccttcttttggaaccctcaggaaggcccaagtgggcctggtttctatttgcacccccttttcactaaatacacccccttgtgtggtttttttgttgattcctttccgaaacattatgaaactctacggattatgtaacgaaacccattttctttctggaatgttgcgaaactttacngattacacaacaatgttcttt

SEQ ID NO: 136219 - DNA, 394 bp, Glycine max
  unsure (1)..(394): unsure at all n locations
gagggtgcgcagcccaccatcttttcatagtggagtactgataatgtgtctaccatcacgattatcgtctccctttccattattgggggtaccacctgngccgccagatccctccaccttttgggcgtgttctttgaaagatccgtccccctttttgcacatgttctgtagttgcatcctattcagaaccatatcaaaattgtactgatactgcctaacaaaggcaaccattaggtccttccaagaatggactcaggaaggttccaagttagtgtaccaggtaacagctaccccagtaagactttcttggaaggaatggtatcagcattcctcatcttttgcgtattcccccatcttctgacaatacatctttagatggttcttgagacaagta

SEQ ID NO: 136220 - DNA, 456 bp, Glycine max
  unsure (1)..(456): unsure at all n locations
gcttatgatgaatcaagattgtttcatttatttttgatgatnacaaagatgatgacgaagagctcataagtcaagaacacttatgataacaaagatgatgatctcaagaatcaaagaatgagttcaagattgaatcatgtacactttaaggatcaagacgaaagttgaattcaagaatcaagaatcaagattcaagattcaagaatcaagagaagactcaattcagataagtattaaaaagatttttcaaaaaaacaaaggactaaccgcctgaattcttttgtgtctcccttctcccttgtcaaagaattcaataagacatagtctgagaattcttttgattcttccctttcccatatacaaaagatttcanaggactaaccacctgagaaatctttngtatcctcattcacaaagatcatagggttaaccgcctgaaactttgtctaacacatt

SEQ ID NO: 136221 - DNA, 471 bp, Glycine max
  unsure (1)..(471): unsure at all n locations
cttctatggaggctggatctttgatctttttaaggtcctttaatggngattntccggcatggagatgcagcggaagacaaacgagaagaggtgagaggaggcgccatccactatggaataagccatggaagaaggagcttcaccaccaagatgagccttggataagaagcttggaaggatggttcaatggaggaaaagaaagagggagagaaagagagaggggggagcacgaaattgaaggaataaaagagggagagaagtggaactttgaagtatgtctcacaagactctcattcatcaaagttacaacaagtattacacatgcttctatttatagactaggtagcttccttgagaagctttcttgaaaaacttccttgagaagcttctttgaaaaacttccttgagaagctagagcttagctacacacacccctctcataactaagctcacctcctgggagaagcttct

SEQ ID NO: 136222 - DNA, 292 bp, Glycine max
ttctccctttattcttgcacaagcaaccctttatatacaattctgctatagtatgtaactactcacaatgctgttacaacaaactaatggcctatgactaactaacggtctcggtaactaactaatagccatgcatgtcttcctccttcttcctaacattccctattccatcaaaaacaccttgtcctcaaggtgttgggtgcagaaaacagaacatgagtaaaacagaagctcagcttgtgccagccatggttgtggttgaggcggtggcttctgtggtggtggcacgtgt

SEQ ID NO: 136223 - DNA, 336 bp, Glycine max
  unsure (1)..(336): unsure at all n locations
tggatttataatttgctattgttttaaagtcgacttattgagagaataataagaacttcatctttacaacaattatgttgacgtaattgaaacataacataaatgaaggaaaaaactacatatgattgttggagattttggctgtacatgatgtggttaaatactattactattttctcatctaccatacatatttaactctatngctttatatttgactggcataaaattttaggttgtgttacaaacacatgcatatggatatatatgctgacgcaacgtaatcttaaaaattataaatattagtacgttacataaaatgagctactagttttt

SEQ ID NO: 136224 - DNA, 342 bp, Glycine max
tgttagctatcatcgccaagcaccaagaagaggtaggtctaaccaccgcccacgagcatagaatcgcggatgagtatgcccaagtatacgcggaaaaagaggctagaggaagggtgatcgactctttacaccaagaggcaaccatgtggatggatcggtttgctcttaccttgaacgggagtcaagaacttccccgattgttagccaaggccaacgcgatggcagacacctactccgcccccgaagagattcatgggcttctcgggtattgtcagcatatgatacacttaatgcgcccataatttgaatcagtaggaacttgctggttctcaaccttgacta

SEQ ID NO: 136225 - DNA, 265 bp, Glycine max
ccatagcaatcattcgagagcttcgaacgtctaaatataagcggcgcgcgatatcaacctcctggagagaacctaagagcaaaaagatatgaccagagcaatcgttgtagagcatccagagcccatatattagcggggccatatgtgaggaaccgaaatcggacctacgagtgaaaagatatgaccatagcaatctctggagagcttccggcgtgcaaatatgtagcgctcaacatatgatgctcccgaatcggacgtccgaggg

SEQ ID NO: 136226 - DNA, 356 bp, Glycine max
  unsure (1)..(356): unsure at all n locations
agcttcatatttcgggtttagtgagcttgtatgctctttcaacttcttcattataaattntgttatctacaataaacttaacaatttatgtgatatctcttttccttctatcatctattttccgtatctgtttgcacacttcatagtcttaaacccaatatcttcaatggaatggatgatgcaagaaaaaatgagattatggttatgaggttggctatgaaaatatcacanagacaggttcctcatgtgaacgaggaaaagatagccaagagaagaaagaagcctatcaagactgtgttagttgtgggatgatgctttatctcacgttggcattagtaacaagataaacaaaatca

SEQ ID NO: 136227 - DNA, 408 bp, Glycine max
actcaaccttaagaataatggcctcagcaaacttcttattcccagaatgaaattcaataaataggccctcctattttaatggagagggttaccactactggaaaacccgaatgcaaattttcactgaggcaatagacttaaacatttgggaagccatagaagttggaccttatatacccaccatggtggctggaaatacaataatagagaaacctagagaagagtggtctgaagatgaaagaagattagtgcagtacaatttaaaggctaaaaacatcattacttatgccctaggaatggatgaatattttagggtttcaaattgtaagagtgctaaggatatgtgggactgatgtgtcattattttctcctatttctctaacccttttgtcaccaatttaattactg

SEQ ID NO: 136228 - DNA, 412 bp, Glycine max
  unsure (1)..(412): unsure at all n locations
tcctcggggccatntcctgcgaaggcaaacattnggaaagttagttttgccaagaaatgctactcttaaaacgaaaatggcatacaacctcgtccaataaacacaaacatcaatgtaaatttagagcaaactcatgcacatactttcttacgaacattcactcgcacaagatattcttctaactaagaaaaatgcacccacgcacaatcaaggcaccttcgttacctagatcacttatatgtacttccaaggtgtatttgctacctacatcacatgcatttccttttctaaatttacatacatgcatactcaaagcactttggcttaccaaaaatgcatacgtgcacattctggtatttctaatacctatacatacacaaacttcgtgatgaatcttggctacttacacaat

SEQ ID NO: 136229 - DNA, 306 bp, Glycine max
  unsure (1)..(306): unsure at all n locations
atcataacatcaacgttgccgcattggattacaggtcctcanaataaagacacaatttgtataaattagacaaacaatcttactaataagcattggtaagatattaactaacaatattaattaataattatattttaagtataatgaatattgtctacaatattcattattcaaaaaaataatttaatcgcatttaatttgattatttctaagttaaaatctactttatatctaaatgcttatacatcaattgactttatagttatttataatccacagtaataacctacaatattaataaaaaac

SEQ ID NO: 136230 - DNA, 401 bp, Glycine max
  unsure (1)..(401): unsure at all n locations
acacttcaggggctaatatggataaaagaatttattgtatgactaanaganaataagggaggaatggctagagaaggagagtttctcctattagaaatgctcaggcttcatatattttcaatagagagctttgagactcggggtgtcttttccttctgcttcctattctttttaaagccctaaggtagtttacttttcacgctgactntgcactgagcatgcactcttgggcttagcgagaatagcggtttaatcactcgctcagcgtgaccttgggctttctcgtgggtcttctttgcgctaaccctgagcttgcccgctaagcgagggtatgcgctgagtctggcttgtgcgctaagcgagctgtctctttcttcaagttttcttcaagtttttgcatc

SEQ ID NO: 136231 - DNA, 185 bp, Glycine max
  unsure (1)..(185): unsure at all n locations
cacccttatgggtcatacaaaagtttcttcatgtacactgcgtgctcacacacacaagaattccattccacgcatcatttacacacaagaatccttttatacacactgtccttttacacatatatagataaaaacctntntcttttctgtacgaacatgactcttattcacaacgcttctttctt

SEQ ID NO: 136232 - DNA, 366 bp, Glycine max
  unsure (1)..(366): unsure at all n locations
tatgctgatcccatatggttggagcattctctctaaacatcttgaccctgactggtctccctatgatcttacttattgagagtgacctgacaaacccatggtgtggtgtgtcttgttatgtactcctaagcgccccaaggtggtttttcactgacatggtaccacattgcatataagattgagtcttagcataactgttgcatatgcttgctaattgatgtgttattatatcttgatcgaagtgtgggattcttgtgtaatgtgattgatgattgaaaagtgaattctgaatgacaaagtgatgaaataatgtgagatatgctaagtaaatngtatttggctactatatngttgtctgttctctct

SEQ ID NO: 136233 - DNA, 155 bp, Glycine max
  unsure (1)..(155): unsure at all n locations
gagggtcatgagaccttggggacgtcacgtggggtgctatngcccaaaaccaagcttgaccaatcccgaccgaacccgggcatagtcagtcagggagaacctgtgacgtacctaaacaggcgagctccttgcagtcaaccaataaaagaataaag

SEQ ID NO: 136234 - DNA, 326 bp, Glycine max
  unsure (1)..(326): unsure at all n locations
ctcactctttgcgaagaagttcccgaaatggaagaagaacacaagaagactctcaagttcttagatgttacaaatgcaaccaacttggtcacatcaaagctaattgtccttcaaatgaagaatggcctgagaaaagtgataagaaaagatatgatgaaagaaggaccaagaaggcctacattgcatgggatgacaatgattcatctgacgggtcagaaaaggagatcaaccttctaaccaaggattatgagagtgatgagaacatttctcatgaagataagtaaaaagaanaaagtatgactttcatctttgaagatctagatacc

SEQ ID NO: 136235 - DNA, 353 bp, Glycine max
  unsure (1)..(353): unsure at all n locations
gaatttagcattcttatcgtaattctagagcaaggacacgacagtgctatatttgagatagaagctctggaggcagtaagaggagtagctntgcagagaagcctatggttctttaattagaaagagattagtgagttgtagagtgattatgaggtgctgagacacccttgtttgggaatttctaaggaacaactgatgtaattactttaatatctaattaattgtgttttatgtgttcaatgcttctttcaatgcttaatttctgcatgctcttggtctgatcacccatttgtgtgtacagctaggtgactttagcattgggaaatgtactattgccttanaacttgatagaa

SEQ ID NO: 136236 - DNA, 68 bp, Glycine max
tgttatcagatgtatgacttatgttatattagatattgcaatgactgatcatgcgctgctactagctt

SEQ ID NO: 136237 - DNA, 459 bp, Glycine max
  unsure (1)..(459): unsure at all n locations
actaagcttctcgtagtcgaatggcgacacccactgcaccgtgcttctctgtagtcataatggcgacaaccctgcacctctgtaaaagcctgtccctgcacgctgctgctctgcacgctcccagggctgtaccctgcatgcaaatcaccagtcaaactgacgtaacacgctgaccttaactcgccaactacagtggcgagaccactggctatttcgccagtggcagtggcgttttcgccatgtgttgcaccagggacgtttttccagtgaccgctggcgtttgcatggcattttacgtaaaaaataatcccatgtagaaatttgtttaaaacagccccattctagaaaattgtttgtaaaagaagccccattaggaccaattgcctccagatttccttcggnnggttagcactcatgaaatgttatttacgacgtgttcaatgggttatgtgtaaaaat

SEQ ID NO: 136238 - DNA, 281 bp, Glycine max
  unsure (1)..(281): unsure at all n locations
gaccatattttgcagaattatatantgcatcacatgttactaagttgaacaataatctagatcattactatccttgagttggtctaaattttaacacatgatagtgatccaatttgatttgatgtatgattcgagatcggtgtgtaatgaataaaaattgtgtagtgatgaaagaaactttaggtttgattgccactaatctcaataatatcattggcacaggatgctatcagtgtcgctggacagataaatagtcttattatgacacataacaaaaacta

SEQ ID NO: 136239 - DNA, 398 bp, Glycine max
  unsure (1)..(398): unsure at all n locations
ccaccatggagatgcagcggaagaccaaggaaaagaggtgagaggaggcaccatccattaatgaataagccatggaagaaagagcttcaccaccaagatgagccttggataagaagcttggagaggatgcttcaatggaggaacagaaagagggagagaaagagagaggggggagcacgaaattgaaggaagaanaagggagagaagttgaactttgagttgtgtctcacaagactctcattcatcaaagttaccacaagtgttacatatgcttttatatatagactaagtagcgttctagagaacgttcttgagacacttccttgagaagtcttcttgagaaaacttcttgagaagtagagctatctaccacaccctctcatataagctacctcttg

SEQ ID NO: 136240 - DNA, 324 bp, Glycine max
actataggcccattactgcttcatatcttttctttcttgccgacacactatcatgggtgttgagaacttccagtgtccacattggtgtcgacaggctagaagcaactgtgtataaatgcgctttgatggcacatcaatacttgaatatagaacacctagtcaaaagcgagccggtctacatcattcatatacttaaccctcacacctctatgaataccaccatcacagtgtacatccaacctaattatagtactatactgacacaaatcatcaaatgaatatgctacccatgtaacagttaaagcattgtactgttagatataa

SEQ ID NO: 136241 - DNA, 421 bp, Glycine max
  unsure (1)..(421): unsure at all n locations
atctagatatgctagtgcttaaagctgcatttttctctattttgagcacccactcataatgatagatagtgcattccactcatatctccttcacaaacaagaactttgtgaagtacatatatttaattcacaacataaaaccctccttaaatttgattatatccctcaaactccacaatctattgctgcataacacgtcaccacctcaccttaatgaaaatcaaaaccatctaaacaaatacttatggtacaattgtgtacttgttgggttcaaggagattaatggctcaattgaagcaataaggcattgcgggtggtacaactcaatcatgaccctaatactngtcaagcatatactataagggggacgaataaaactgctccatacaaggatgatgagatgtcacactccaagagatac

SEQ ID NO: 136242 - DNA, 301 bp, Glycine max
  unsure (1)..(301): unsure at all n locations
actactaagagactagtttatcaaacaatcaaacaatttttttactgaaagtgtcaaaacgggtgagcccaacccacactggttgagcattaaagggactaaaccaaccccactcacctttgagtgagccatganaagtctaacctggcttgacccaccacaagtaggtaaattattgtgaattatattngtgttgaagttgacaaaaaggtacaagnttattatgctttctctattattggctntgcacttttcgatgtacattgtaatttatggtntggatagtaacaaataactatat

SEQ ID NO: 136243 - DNA, 301 bp, Glycine max
  unsure (1)..(301): unsure at all n locations
gatgaggaagcgtagattggtgaacttcctgcnnttanctttgaccacagagtggtacctggagatatgtcgcgtgggtcaagagaccttgtggacgtcaggtggggtgctattgcccaaaaccaagcttgactaatcccgacccaacccgggcatagtctgtcagtgagaacctgtgatgtacctaaacaggcgagctcctggcagtcaacagataaaaggaacaaagaccacaaagcaaggaggcttgtggaggctggccaactgtgaaacttgattgatatgtgagatatggactctg

SEQ ID NO: 136244 - DNA, 106 bp, Glycine max
ctctcaccaccatctctttctctcttatatgagttctcatctgggctatgtcttcattgctcagaattggcaatagctgtgtctctgacttctatcctactctact

SEQ ID NO: 136245 - DNA, 447 bp, Glycine max
  unsure (1)..(447): unsure at all n locations
tgtattctcaatcgatccttctttcttccnctctgcatcctcggatntgtcgtttattgcccatcgataaaggaatgactcttggtgagccaatgagctcgaatcaagctagagaacttgctgaaccacatagtgtgatggcagaacttattgctatctatcaattcccagagtttatatcagaacctcgtaggctgggaatgccatcaagaagccttttcctctcggcgtcagtgacagccaagttagcatcggcttcgccaaagccatcattttaagcggatgacattgatgagtgacccaacagtcttgagtggtagttctcaaaggagaacggatctgaggtactaactagctatggaatgaatgcgaactaaaagctntcttccattctccttcgattcgtgacgtgattagctggaacagtcgattgatctgatctactta

SEQ ID NO: 136246 - DNA, 468 bp, Glycine max
  unsure (1)..(468): unsure at all n locations
tatgaagaagaagatggcgacaatcccatatcacaannttacttacttaaacaaaggatcgngatttcaacatgaagaatgagacatcaattcattatggaatggcaacttaccactttaatgagacatgtacaatacaacgtgttagactgtagatcaatntatttataagaaaacaatactacttcaaagcttttagaaaagaattgcaccaaaaaaagctcttagaaaagataaaaataaattaaatctcatagaatcaatagcagagtcaataagaaaccagatcaatgcagntcttttcataacttcagaaaatcttaatcccattggacaatcaatagctgagtcaatataacaaaccaactataagcaccatacaacacttctagtatccaatggagtgaacattctattacctatgaacatgacccatcttcttgaatatgcatgcatcatatcaaataa

SEQ ID NO: 136247 - DNA, 321 bp, Glycine max
ataccttacggagttggattgctaacaaaaatgctactttattaattaatccagctagtgatcctctggaatactgtctaaagatggctcccaagaacaattcactccctgatcatcatcaaactcaccaacctctgagattttcctgctctcaacctcacagcatgtaataattgctcccatagaagtgtgttcatccttgcacctcatcatccgtttccactcttcttgagtcatcaccactcttatcctcacacttctagaagtacccttactgtctctctaccctcatagtattatcatcattttgatcttgaacct

SEQ ID NO: 136248 - DNA, 361 bp, Glycine max
  unsure (1)..(361): unsure at all n locations
agcagataacatgaggtatagggaggcacttatcatttgcttctgcccaaccgaggtggaccaactgctatatgagaaatgtcattcgatcaacatcacttgagacttgaaaacgcaaggctaagagaagaggtatacatcaattaattaagtagcaacattctatgtgtatgacactctgtgtgtgttaatagttctatagctactactcgttggtccaaagtaaggaccttaattcaaataaatattaaaagagcatgcattgcccttntttattgagtacacacatttcgactcattatattatattagcaatgacctaacagtagcaaaccccaaacactaggatatgtttttattt

SEQ ID NO: 136249 - DNA, 348 bp, Glycine max
  unsure (1)..(348): unsure at all n locations
acttatttatataatgttttgatgttttaaaacggataggaaactgccacaaataataatgtngcatggcgactaatggatcgagtaaacggggaagaaaaaaaaagccaattttcaaaagttcaaggactggtttcgagtgtgtttgggataatgtttaaaaaggacttttgtgtgttgaatatactctacgagagtaaatttaattttctaacattgttgaatacattgataagtatgtctgcccattgagatattgtttgacaacttaacttcgtaaaataatacttacgtacttttgagatctggttgaaacttaagttaatcaaaattaattatagacttatt

SEQ ID NO: 136250 - DNA, 484 bp, Glycine max
  unsure (1)..(484): unsure at all n locations
ntcttggagaaacttccttgagaagcttctttgttatatacttcttgagaagctagagcttagctacacacacccctctcataactaagctcacctccttgagaagcttccttaggaagattcctaaagaagctagagcttagctacacatacctctctaatagctaagctcacctccttgagatgagaagctagaactcagctacacaccccctataatagctaagctcacacccatgacaaaaaacatgaaaatacaaaaaaaaaaagtccttactacaaagactactcaaaatgcccgaaatacaaggctaaaaccctatactactagaatggccaaaatacaaggcccaaacgaaggaaaaacctattctaatatttacaaagataagcgggctcatacttagcccatgggctcgaaatctaccctaagggctatgagaaccctangggccttccttggatctctagcccaatctacttg

SEQ ID NO: 136251 - DNA, 374 bp, Glycine max
ttactatgaccttcagttggcaggatggacttttggtcctccctggccgaaatggatctggcccattaaaggctacccatgcccaagtccgtcgcctgctctaaatggaccaagtcgctgccttcttcgactttaactttgcaaggatcctcatgtttcatcttcttttgacacccacttgccaatattcctccaacgacttctagacaattacttgcccccattccaacagcccaacacttaaccttcacgacacctacatgatcaccagagtcaccttctacctaactctcagcttggtcacgtcaagccataccactacccatatattcaaaagcatgaaatcgatataccggtcgaggacatgcttcgtc

SEQ ID NO: 136252 - DNA, 286 bp, Glycine max
cacaaaaataagaaataaatcagcccggccgacaaaaaaagcgggtgaagaaaagcactgaagagggttcaatgtattacatcaatcaattctaagggactcaatgtctcattcatgaaccagatgcaacaatttacatcatacaccaattataacagtttaaagcaaccaccccaaatgtatttaaatgaaacatcgtatatactgctagcactacgacgacctgaagtgcaataccaaacgacctatcacaatgcaaaaaaagtagcatgaaacctgaaaaaaa

SEQ ID NO: 136253 - DNA, 335 bp, Glycine max
ttccaagcgcatgcatgcggctgcttgtgctcaaataaacgctaacatcatcccttgtttaacgcgtggtgatgcggctatcactcatgaacacattgttgctgacttatgtcaatttcatggtcaatcatgatgatacgtgatcatgatttacagccaattatgaatgaaatatctcctcgcatctcatttggtgagtatgacacccttcgtaaacctttctttatgatcaaattactaaatgcctcttttgaaatgaacttctgacaaacgacctaatcctgatggttgataccttgccctccattgacattctgaaatgaatagatactctt

SEQ ID NO: 136254 - DNA, 303 bp, Glycine max
  unsure (1)..(303): unsure at all n locations
agcagtcctcgccttacagtaatagtgaggctgttgactataactacacttggngctggcgacctcctaagatgccacaactaacgcacgctacggttgaccgcaattaaagcacggctttataacactccccctcacacccaggactaatgaatctatgataagctttgagaccatcttaagatttggatttatggcctatatcaatcccacataagcagattgttagatgaggactgtccaatctttataaactctatctaagccatatctttagtcgatgttgggactaaacaccaccct

SEQ ID NO: 136255 - DNA, 377 bp, Glycine max
  unsure (1)..(377): unsure at all n locations
cgaagaaatgatgatgacaagccctaaggcttattttgtatgacccgagnacnccaagagaagatcattttcatagccatcaaactccgaaaagagtatgatgaactaatggacgttaatatggccaccgctgatgccttggtacgagaaaccatcatcgcctcaatggaagaacacgtgccatcaaagttttgatgagctttataggccagcatattaagctcaagctcctaagaggtgaaaggaatcatcactggtcaaatgcatgatcttgaatgacgagctaaaggcttacctcatgtccaaaagagatttgttcaacagttatcgagactgaaaggaatatgtggccatcatcattaatgcaatagaagcta

SEQ ID NO: 136256 - DNA, 437 bp, Glycine max
  unsure (1)..(437): unsure at all n locations
cagctatgcgctatttcctacgaacgtttttttgttttatacattctattaactaagaaaaatgcacccatatacaatcaatgcagcgttgttacctagattatttacacgtactttcaaggagtatatgttacttacatcacacacatctccttggctaaattcacatacatgcatactcaaagcattttgnggtaccaaaaattgcacatgtgcacatcttggtatttctaatacctatacatacacaaacttcatgatgaatcttgactatcttcacaaaaaggtgctacaccttatcccttttttcaagatttgctacctaaagccgtatgcaaatatatgcattatttcctttgctgactaaaagtgtattcacattaaaanggatatcttttgtaatatgttctcttcacataacatgcaacatatttata

SEQ ID NO: 136257 - DNA, 445 bp, Glycine max
  unsure (1)..(445): unsure at all n locations
ggttctgacccatgtatgctttcacctttttggttattaacgcgttnctgcgaagaaaatccaaaccgaggtgcctccgtaatgcttctgagacgattcccggggttgattccatgaagattttctgtcgntctttgtccgttcttcggtcttcaaccgataagtgctcgaatctgaggcgttgaatttatttcttgttntgcttgcttncatactcatctcatcactttcggtatccttttcttccatattttaacgagctttaacagatcatttaagtcattatctcgcctaataaatgataaaatgaatatcaactgatcatttgtgatgtaatgccgttaatcactcgttgtatgctatacggtaggttacgatagatatttttttaacaacattttgaatntgtattatatcatgtgacagccatgatccgcatagctat

SEQ ID NO: 136258 - DNA, 279 bp, Glycine max
  unsure (1)..(279): unsure at all n locations
gaccttaagcaccgcagctgcagcttgagagagagtgtaaagatatatttctgtntatgcgngccacagacggacctgcagaatgcccggtggtcatgaacttggggacttaggtggggtgctttgctaaaacaagcttgatcaatcccgacccacccgtcatagtcagcagtgaaacctgtaagacctaagcggcgactcctggagtcatagataataaacaaaccacaatcaggagcttgtgggggctgccagctgcgaacttgattgatatgtggg

SEQ ID NO: 136259 - DNA, 425 bp, Glycine max
  unsure (1)..(425): unsure at all n locations
tgccacctagctctcccaggcgagcaggggtgcttcctttgattcaacagccttctggaggaatcttctggagggcccaagtgggcctggttgcctattgcaccctcatttttactaagtacacccccctgcctttttttggtgattcttttttcgtaaagttacgaaaacttacgaatttcgtaacgatacttgttttctttccataatgttacggaaccttgcggattacataaccatcctcttttttgacttacggaatgttacaaaacctcactaattgtgcaacgatgcttccatttgatttccggtgtgtcacggaaccttacagattgtgcatcaatattntcttttgtnttctggcatgtcccggaatctcacaaatttcctaatgatggttgccgagcacctcacaaggaccaaac

SEQ ID NO: 136260 - DNA, 475 bp, Glycine max
  unsure (1)..(475): unsure at all n locations
cttgcagcgaatattatcctattccacagccttgtttgagtcccgtccaggtagtcccgagaaagactggcctcacagtgatcagaaatgagaaggaggagctgattcctactcgggtgcagaacagttggagagtctgcattgactataggaggctgaaccaggttaccaaaaaggaccattttcccctgccattcattgaccagatgcttgaatgcctggcaggtaaatcccactactgtttccttgatggtttttctggttatatgcaaattactattgctcctgaggatcagganaagaccacattcacctgccccttcggcacttttgcttataggaggatgcctttcggcctgtgcaatgcccctggtaccttctagcggtgcatgattagtattntcagtgantttttagaaaattgcatagaggtgtttatggatgatntcactgtatatggatcctcttttgatgg

SEQ ID NO: 136261 - DNA, 423 bp, Glycine max
ttatagttactgtgcatgcaagctacaccggatgttgaacttatatactctaccactcgaggtggggagagggtacacgttcttggggcatgctctgatcagataagtgtagtcagtccacactcgacattggccggggtgttttattaccatcaccacattgatgagcctgtggaaaaactgaccattagatgaaatgcttatcgacttcttcttgaaggctgtatggcctcttctccattctccttttttctgagaataagtttggctgggggcgaaattcatatgtggcaaatatgctgaatgattcccacatgtcaatggctacagaaaaaaatttgattcttctacatgtgacatcactgggctatgatgtgagtcctataaccggggcatggaagttaggccaaataactaacaact

SEQ ID NO: 136262 - DNA, 424 bp, Glycine max
  unsure (1)..(424): unsure at all n locations
tagactgatntagaggtttaaggagtcaaaatggagctactttttctcgatcttgcacatggaaatttcagctttacatttttgggcctagttctgtgtttattgacccaatagtgtttttaattggggagctactattagaacaaacaccttttctattcacattaccaatatgtgctttatttttttttctttcttgaaaatacattnttcacgaaaacatgattacgctgacaaaatacataatagaattatgtttccattgtttaaaaaggggtgctaaaaaaatgcacaaaacaaacattgacaaaatacataatagaattatgtttctgttgtgcaatgtgaattggatctagatgggatgagtggcacgacgcgatggtttggggtggtgcgagtgcaacatgacttgaatctatat

SEQ ID NO: 136263 - DNA, 494 bp, Glycine max
  unsure (1)..(494): unsure at all n locations
cggagttgcaatagtgctaaggtttctggttttagttactctatattgtcgacaattaacttggggtcctgtcttcatgattnttaagtttaatgtgctaagttgttccaagtttggtctttggcaagtgtgtacaaagatattcatgacccactgattaataggaaagattcaacacctataggatatgaagagacttttggtgtattgctaaattgctgatttcttaatatgatgcaaggctaactcagtgatgtctactccaataaaaaaggtcgattcttttttgttagttcctatcactttatatatttttggttgttcagacctcactatgaaaactgaaagtttcaattctttaatatgttaatttttaaatagtttacgtggctctacggatgggttggttggttgagtagatgttaaaggtagttacgtctggccttgtgggagagcttattttctcgaagtcaattctggtttgattaatgaat

SEQ ID NO: 136264 - DNA, 282 bp, Glycine max
ggaaaaaaagaggggattttttgacaaacggggaccaacaggatcttgagaaaatagcacaagccgggactaattccctaaaaacaatcaccccaaaccaaggacaagaacttatacagcgataaaaatgccaacaaaaccacaatcaaaagtatgaacactggtgcaaacaccaacttatatgcttagaaacaaccgcgagaagcaatgacaaaacaaaaggaagggcaaaaacccgaagaacaaaacaaaccgaaaacacatcagaaaaaagattggcat

SEQ ID NO: 136265 - DNA, 408 bp, Glycine max
  unsure (1)..(408): unsure at all n locations
gcttagagcctaactcaacctcacaaaactctattgttatgtgaggattatccaaaccttatacgaagggctatattggcatgggatctcaacattgtcaatacacaatttcaccaaaattaaacaatgttcaaagtattggattaaaaatcagcaccaagcagacaagttgcaatttaaaccaaacattatccataactaaatatttcatcaacagttcatggatgacaaaaacactaacctcgtcactaggataaaggaaagttgatggcttcaagttgtaataatctctcaagcaactcagtggcttgaaccctaaaagatgtagatgtccagtagaaactcttttaatttcagagagttgcttcattganaatatactattctggcttgaaacataaaataaat

SEQ ID NO: 136266 - DNA, 481 bp, Glycine max
  unsure (1)..(481): unsure at all n locations
ggtagcgtacaatattgggtaaaagtggtacatatatatatatctatcattgtagaaatattctcgaaattaatttcctagagctggagtagaggtttgaagaaaagtaaaagcacatatatatttcattaggtgatacacacaccaaagagcctcagacccttttgtgcattgaaatcctttccaatgtttgcatcttcatcttcaccttcttcactgccagctaattgtaattggtttcccaaaacttggttggtgtctcccttgctgtcttcttctgcattattattataaattacatcgatcaatgcanaagcttctccctctcctccactttntccccacgtaaaaaacgcaatgacatctttagccttcaacttcttatccttcacaaaccgattccagcctctggtgaacacgtaactntggctgctcttncaatagcagtatcggaacttccacaatcgcatgagtttgtcat

SEQ ID NO: 136267 - DNA, 492 bp, Glycine max
  unsure (1)..(492): unsure at all n locations
tatacacacactatactattgctgagagtgggaatagttattctctgataggatcatatataagacagaaacctaataataaagacttgcaatgtgatcactcacaattggcagcgatatcagcaaagtacaataacatatattgtcccacaagttagcaatactcaccatattctggcgctgatttaaagctngcagcttatgccgttcaaactcatttctccttccttccttctttaactgttntgaaaacatatatctaatacaaggtcatagaacatatatgcagtacaggcaagtaaatcatgtttaagagttggattagtcatgatcaaccatcacacgggcaagctataattctggctctagaacctgagagtcggagtcattataaagtaaatactaattcatggttacattnttataacaaaagatgcgactgataacgaagcaataagttcatgtacggaaaatataatagacaaactatct

SEQ ID NO: 136268 - DNA, 413 bp, Glycine max
taacattcaagggcactggtaatcgattaccaaaacattgcaatcgatcactgcctcttgaaaataattggaacgttgaaattcagttgaaaactttttcaaaaaactcattttgctactagtaatcgattacaacaatatggtaatcgattaccagagagtaaaaactcttcggtaaaggttttgtcaaaaactcaagtgctattcaatgttttgaaaaaactttttaatacttatcttgagtgagtcttttcttcattcttgaatcttgagtcttgaatcttgatcttgattcttgagacctcgaatcttgattcttgattctaggctttcttcttgagtcttgaattctccttgattcttgaactcttgacttgctctagattcactagagatattctctgatctatgag

SEQ ID NO: 136269 - DNA, 399 bp, Glycine max
  unsure (1)..(399): unsure at all n locations
agcttttgttgaaaattgtatttgagatgttttcaccttacatntaatttnttcactgcaaacccctgtagaacccataataactttttaaatggttatatcttaacaaacaagatggttgtaatgaaaaaaatagtctaacagaaaattgtctaattgataactcatttaacaattaggtaatcttctttattgcacgagtctgtgcaatttaatgagaagaggagcaaagtaagcgaaaagatagacatttattgattcttaaaagttaaatcatttgaagtcacggatactaacaaatattgacacgaatggtacgattgtgataatggtggttcccttaaattcgagattaacggcagtcttccagaggaagaaaggaaataccaacttaagcct

SEQ ID NO: 136270 - DNA, 495 bp, Glycine max
  unsure (1)..(495): unsure at all n locations
tgtagaatggctagacataatacatggcggngtttggtttggttcaaggataaaagggatgccccacattatttccatgacacaaatgcaaagatgatgatttggaaattttatgcaaaactggtcatgcatgcacctatgcggacactcaagtgtcaaatttttatggtcatgtgatgctagggctcaagattcatttcctctattttaaatcaacccaatgtttccaaaatatgttcttttatcaatttgtgcattcatcctagtccattttgggtactcgggaaaatttcacagcattcacccttcaggtgtacacacattttttcaaaaactagttatgatncagtgaatttttcanagaaaagttggaagtcatctcttttcaaaagcatgttggtttttcagctagacaacttatttattttttttttgaggtattttgctacctaaacatatataggttntgtgagatattnttgtatatacatgcgt

SEQ ID NO: 136271 - DNA, 270 bp, Glycine max
attggtgcagcatgcttagactgtcagaacacccaataccaaacgcaaaatatggcagggttggtgtgcccattaccagcatcgtgcaaagcctatgaagacctttccctagatttcattatcaacttgccagagattcgcggctacaccgccattttagtaggtggtggtcatttctccaaggggatacacttagggatgctcccaacttgacacacgacccacacaggcgccttgtttttcatagagattgacgggaaaattcatggc

SEQ ID NO: 136272 - DNA, 490 bp, Glycine max
  unsure (1)..(490): unsure at all n locations
ntactttgtgcaactgtntgtgcattagaccaccaagatctaaattttttatattgaatcatctcgtaaatagtcatttgggccttcctaaggtgattggttagacagagtggtatgggtagcggtctttnttttttaattcttttatctccaatgtactgaaaaaaataaaaacacttgtaaactaatataaatatgttgttttctagtaaatatagatgattaagttgatagtgatgatttccaactttcatttgaacaactgaaatctttaatgaaaattcaatcatagttnttagtagttgcgattcatgtaatagtcatcacaacagaaaaacgcaccaaattgtggttgctacttctatctatgggccaaagcaccactgtgtccttcttggtgtgtctcttctagattatggtttccatttctcttaggcatttgtggggtctgctaagagcatatatacactccagaaaacgatatctttca

SEQ ID NO: 136273 - DNA, 277 bp, Glycine max
agaacccaccgtatccgaacggcaagactgcaaaagaaaagaacagacgcgctaaaacaattactataaatcataaacaaagaaaaagaccgcaactctgaaaccaatcagaatataaacacagaacaaagcccccgcatagcaagataaataaacatagacctggatacaagagataacacctaccactgaacatcaaaaaaaagcacatgaggccacaggacagctgcaattcaagaacactcccgccacggggcaagagattccaaaaaaaaat

SEQ ID NO: 136274 - DNA, 251 bp, Glycine max
tactgatggattgctggcattagcatacactatctctcactcatgtggtctcaataaattgtagaactgatgtttatgtgaagtacatgccttactaccatctctatcttactaatgcatatattgctcacttatatctataatttaaacgttctggtccaaaatgtgttgcgaattaattgcataaataacttcttgcacggcttgttactattttgtcagctcaatctttgcattttattagatcttaa

SEQ ID NO: 136275 - DNA, 471 bp, Glycine max
tacaaagggagatcatttgatatgacaactgtggaaatcctcttatgaggctatacttttgaagctttgatattaacctcaaggtagcatgaccaagcttcttatgccatacccaatgatgctctttgactaagagtaagcatgaaacctttcaactggatagatcaataagtttaatcttatagagatttcctagtgtcttagtggagaagagtaaagacttgtccttgttctggacgatacacacatccttgttaaaggtgacattgtatccaatgtcacataattgacttatgctcaacagattatgctttgaccctttaacatgtaaaacattatcaataggaagatagggaggaatacaaaccttacctacactggttattagacctttcttattcccttagaaagtgaccaccctatctggcatagggcatagggattggaacatagacttttcacctgtcatgt

SEQ ID NO: 136276 - DNA, 355 bp, Glycine max
aactatgggcaagtcaaacacactctttattatcatcaggggagaaagctccatatgccaagatgacctatcatcagactggttgacaagaccttcaaccaagtgccaatcacactaactcctcacaagcattagagaagaagctttgcaaagtgaaaggaaacaccatcacatgggcaacaagacctttaatcagggtggaattaaacctaagatgacttcatgttatccactttcatgtttcacaagaccaccaaagtcttgccttcacactgacaaggtcttgttttctatgcagtcaaagatttcaccttcattatggtggcccaatcatactaccacaagtaatggagca

SEQ ID NO: 136277 - DNA, 491 bp, Glycine max
  unsure (1)..(491): unsure at all n locations
tctacttatgtggcagggcgggcttccttcactttcttgcctcaactgcgagctntgaccatcgctctttctttccgcgatgcttctctttatatccgcctgagtgggtttatagcctaaaccatacttcccacgatttcctttggcatttatcaagctagttatgccgccgttgtctttgcctaaacccattccgggttcgtaaccgttccccaacataactcgggccatcattactgctgcatcggacaggcaaggctgcccagaaaaggaatccacggaggaaatgcttaccacctcgaaagactggaaagcggtttctaatgactcctctgtggcctccacataaggcatagaggatgggcagctcaccaagatgtcttcctcgcctgacacgatgaccaaatgcccctccactacgaatntcaacttttggtggagtgtagagggaaaaactcccactgagtggatccacgggcgccccaacagac

SEQ ID NO: 136278 - DNA, 376 bp, Glycine max
  unsure (1)..(376): unsure at all n locations
agcttgaccaaactagtcatgcaatggggttggattatttttttgactnttctagntntntcttatcttttaccatatttgagttagcttctgccatagcatttgtggcctaacatgctctatataaatttgtatgctataatggcatttaattaatagaggataattcaatgaagtattactatgccttgttatttctcaactgtgtttagtttcaacaattgatatctatccaatggctttcacgggcttcagatttntttaaaacagtttgtttgatctgcgatggaattgagttataataataataacttatatggtcttatctgaagtttaaacctagatttttcagagacatataaggtcatttcttttt

SEQ ID NO: 136279 - DNA, 441 bp, Glycine max
tggctccaactcgataatccttatatccccatgttgttgaatgaatttcactccacgccacttggaggccatatgggagaaactaagaccttgcgaaggctcaaagaaaccttcttctaggacactatgcgccgcgatgttcgtcgcatggtatcggagtgtcgcatctgccaactcatgaagtacgagagcaagaaatcggccggcctgctccaaccgcttccaattccttcaattttgtgggaggatcttactctcaacttcatcacgggactgccgccatcccatgggtgcatcaccatcttggtggttggtgactgctactctaagggtacccatcttggggcactgccgtcgaaatactccgcccacaaggttgccagcctcttcatcgacatcgtctacaagttacatggtttctcccgtagcctgtgtcagata

SEQ ID NO: 136280 - DNA, 471 bp, Glycine max
  unsure (1)..(471): unsure at all n locations
gatctgatgatctggcctagactttttttattggaactngggagaccgaaattatgaagagattaatattaagaattaattaattataatagtcaaatagtagcctatgaatataatcaagtcaaaaacatgtaaccatgtgagaagtattgtaaaatttaatatcatattcaagctagttttatatctctactggaccaagtttagttgtcttcgttctcaaacacatgttgcgcgtggaatgcatttaatggtccgaggtttgcggttctaattttccaagccatgttaatacacatgtgtagtatgttcaccttccggtcaccacagcattatatatcttgtgtacaaattaactcacttacattggtagttcacccaagatcattgagctccttcaaaggcttcctctgtttcattacttagagagaaataaacatggatgtctctacagacggtcctcttcacagt

SEQ ID NO: 136281 - DNA, 487 bp, Glycine max
  unsure (1)..(487): unsure at all n locations
tatcananaccctaggtccacccttggttctcacatctctcatacccaaggtttgtccatggtatgaaaacccaaggttcaaccttggtacataattctacaaaacccaagatactcccttggtccactcacatgaagcaactacgacaaccaccattaagggtccaagttccactaagcgaattgtcaccccactattaagcaaaacctttacccaggtcgaacctatactcactcctcataaatatcagaggagtacttttgcatgtcaggatgacccaccaacgaattgcatgacaagacctttaattatgtgcagcttacacttactcctcacaaccatcaaaggacgaactcagcaggtcaagcgacctatccactcattggttaggaaagaccttcaaccaagggcaattcanaacaactcctcacaaccatctggngagaaactccacanaacaaaaggaagccccaccaaatgggtgac

SEQ ID NO: 136282 - DNA, 491 bp, Glycine max
  unsure (1)..(491): unsure at all n locations
ntgagggattggtctntgccagtgaaaggatcgatgtgtttatgaaaaaaggcaaatttagtcatcctgcttggacgaatgagaaaactggggcaaatgaagagggtgagaaagagggagaaacccatgctgtgactgccattcctatacggccaagtttcccaccaacccaacaatgtcattactcagccaataacaaacctcctccttacccaccgcccagttatccacaaaggccatccctaaatcaaccacaaagtctgtctaccgcacttccaatgacgaagaccacctttaacacaaaccanaaacaccaacaaanagggaatttgcagcaaacagcctgtanggttcaccccaaattccgttgtcatatgctaaacttgatcccatatccacttgataattcaatggtagccataaccccaaccaaggttcctcaacctnncattttctgangatacgactcgaacgtaacgtgtgcttatcat

SEQ ID NO: 136283 - DNA, 339 bp, Glycine max
  unsure (1)..(339): unsure at all n locations
tgcagctccccagggatattatcgcgaacttttttttttatcaaacacnaaacccttccctcaattctttagttcactgggacctatgcatatatttatatctcaaaaaattcacacacttttattaatgggagaagaattatttggcccatccttatctaccttctgggagcaccataaggtgctctatccaaaaaagggagcaagcgctatttaaatcatgccaattaacccgataccttaattatttatctcgtgtatataaaaagtggggcgtgaaatttttaaatggtacctatatttatgaactcttgtcgctgagagttctttgatggtcag

SEQ ID NO: 136284 - DNA, 426 bp, Glycine max
acctattcaagttttttctttgctgcaaagagatctttgacgtatataagaggtacaactgattatggtttgcatttcttaaaaactgaaagtggagaacttatatgatatgctgatagtgactgggcaggaagtgtttatgatccttatagcacctctggttatgctttctcatttggtagggctggtttttcatggaattcatgtaagcaagatgctgtggcccaatcctcagttgaagctaagtatatttcagctgcatctacagcaaatcaagctattttgctgatgaagattctgttagatgtgggtcaaattctatgatggagctactgtcatttgggttgacaataagtcaatcatttgtattgccacaatcctgtccatcatgtgagaactaattattctaggtgaatgtcatgacat

SEQ ID NO: 136285 - DNA, 116 bp, Glycine max
  unsure (1)..(116): unsure at all n locations
agcttccatcaataactggtgacacggatattttattctcggacataacgcgtctagactctcacaatngaacaaccgaagccctcgataattcgaataatcataacatctcactc

SEQ ID NO: 136286 - DNA, 460 bp, Glycine max
ggatgagaatcatgaaactggccaaatacaggctatttgttaagtggagaaggacaaagcccccgagtggagaaggatgaaggcccaagtggagaaggatgaaggcccacaggcagagacactatcaagactatcaattgttgctaaaggcccaaactacattgaaggcccaagttaaataagtttttagttataatttattcttattggtaatttgacccaaactgtttagaaggcccatgtctatttttatcttcttgttcagctacactataagtattggtttttgttttgaataagaaatactttggcatttgataaagttgggtgagagtttctctctgggttccttggtgaaccaattatcagacttatcaaggtaatccttgtggtgtctacccagacttatctttctttaccggaagtggcgtctaccctgacttatcttccttcaccggaa

SEQ ID NO: 136287 - DNA, 337 bp, Glycine max
  unsure (1)..(337): unsure at all n locations
atatagatgtcttcccctaaatccccatgcaagaatgtagttttaacatctaatttctccaagtaaagattctctacgagtacaatactcagaataactctgatggtagtcatctttacaactggagagaagatctctgtgaaatcaattccttgtttctactgaaaccctttcaccataagtctcgccttgtatcttcttctaccgnctgattcttcctttagcctattgacccactgtcgcaacctacccttttactggcgagtgaggtgaggctcatgggtgcgtcttccatgggaggaaaatgtgcggagtcgccaccaacgtttattgaagg

SEQ ID NO: 136288 - DNA, 266 bp, Glycine max
caaaggagaatgtatataaacacaaaggcgacgcgagggagagagagagccgcccgaaaaagcgcggggccgagtgaacagagagaaaagcactttgggtacaaacaaaagggggtgcgcccctcctactatgtgatacaagcaacgccacacgcgcccacctgagcggagcaaaaagggcccaccctccatccttgaccgcgacccacactcccgcacacaagagaggaaaacccgacccttgaaacagccaaaacccgccccgg

SEQ ID NO: 136289 - DNA, 470 bp, Glycine max
  unsure (1)..(470): unsure at all n locations
acactataaaactaagctgcttgggagctttatggggctgatctttagcttaatggngtcctttaatggtgattttccaccatggagatgcagcggaagacaaaggaaaataggtgagaggaggcgccatccattaaggaataagccatggaagaaggagcttcaccaccaagatgagccttggataagaagcttggagaagatgcttcaatggaggaaaagaaagagggagagaaagagagaggggggagcacgaaattgaaggaataaaagaggtatagaagtggaactttgaagtatgtctcacaagactctcattcatcanagttacaacaagtgttacacatgcttctatttatagactaggtagcttccttgagaagctttcttgagaaaacttccttgagaagcttctttgagaaaacttccttgagaagctagagcttagctacacacacccctctcataac

SEQ ID NO: 136290 - DNA, 352 bp, Glycine max
ggcagtgatattattgaccagccctccgaaaacttctaccgagatgtcttgggccacatgggcctcgttcagaacttttattagcagagcccgatgaggctcggagctcatgagttactccaacagcgagaccctggccggagttttgttgagctgctcgataaccttgaattcgctctgctgaattatacggaggaaactactggcttcctctagcgacacctcctttttaccatcctttttctccggaagacctttcgccggaatatctttattcgaagcgtggggtgcttcaccatcttgttcctccaccacttttccttctcccttgacgttctgcggttggactggt

SEQ ID NO: 136291 - DNA, 481 bp, Glycine max
  unsure (1)..(481): unsure at all n locations
agactggtgtgcaaccacaaatttacattgagtgttcttatttatatgttctacagaaaattatgcttaaatttctaattgtcataacatatgattcatggatatgatttaggctttctttctttacattttaagccactggccaaaaagctatcctaatgtatattattttaccatttgcaagcgctttgagccaaacactctgatatttgttggaacattaacctangataaaattttcctaccttaccttatgttaggagagcaaaggtattttgatggggatttctatcatttggtggctaatgtgatgcacatactttgtttttaatattggaattaagggaaaacagaatagataaaaaaaatataaaagataagaatagagaacacaccaaacaagttaatacaagttctttattggataaaaacaagtctgaatcatgtacatttnttatcatagtngttgtaatatcttaat

SEQ ID NO: 136292 - DNA, 317 bp, Glycine max
tctggaagggcaagcctagatattatgctggaacaccatatctatgaagcacgaacactccagccatttatcgtgtctggtgtccgacacgcgtctgtgttagtgtctgacaccgatatgacatccacactacgttctatattttggataatacaggcgttcacgtgtttatatccgtgtcgtgtccagtgttcatatcgatgctggtgtttcatagcatcagatattcaattaaaagattgttgttgctcttgggaagacttcaaggatgcaaaagatcccttgaataaagatgcccaattcaaaaagttagatgt

SEQ ID NO: 136293 - DNA, 472 bp, Glycine max
  unsure (1)..(472): unsure at all n locations
caatcactggtggaaaagcttgaagaggagctcacaccttcttatgtggcactcactancccggggtggcgcctctcgtcgggcatccatcatcacatggtagcactcacctcactatgatttgtttttcttttccggcaactccactatatcacttttctgcgaatccactaccaaataataaaaaagacattttaaggaagaaaatatataattattcttacgagtttaacatattattgattaaataattactaactttcttattttttttcaaaaatagtattaataaatataaaagcctaaataaaacgatcaattattatgtcactggtacgccaaaatgctataatctctaatatatgcccaatgctctatcattattgtatgttcggttntaaatctctatgtcctactataatattagtaaaatcatgtgtgcgtggttgaagtgtaaatacaaagttacaat

SEQ ID NO: 136294 - DNA, 419 bp, Glycine max
  unsure (1)..(419): unsure at all n locations
gcttagagaccgacgtgcgtacacacgaatctttcttttgtcatcatcatctacctctcgccccaacaatcttgcacaacactacaaggaaaatgacttatacctacagtcaaaatctgtcactagaagtccaaaatccgtaggtagatgtataaaggactttgtcctacagacgttttttgcgtcaactttgagggggtatacagtgacaactaatagtctgtcactataggctttacctatggatatatttttacctacagtcaaatttaactatcactataggtaacacctactatttcaaatgtgtaggtaaaagaatattaattatacctataatctctaactgtagggtaaagtcaatntacttgtacctacggtcttctgtagggtaatgtcatataataataataaaacta

SEQ ID NO: 136295 - DNA, 466 bp, Glycine max
  unsure (1)..(466): unsure at all n locations
ggacctatgaatactcagcttctgaatgcatttcgtcaactttatcagctccatcattcttgctaaatttctccttttggttcattggagatgtagtgcttttgcagtcctccatatgaaacttcttgagtatttcccttgcatacttcttttggtgaatgaggattccaccatgatcttgtttcacctccattcccaaaaagaaactcattaagccaagatatgtcatttcaaatgctttaaacatttcagctttaaactcctttatgagtttctcatcacttcctgtcacaagtaaatcatcaacatagacagcaataatgattaaatttgcatctaccaatttcacatataatgcaacctcacttggacttttgacaaatccaagatcttgaagatgatcatctatccntgctgtaccaggccctaggagcctgttaagaccatataatggctttttcaactt

SEQ ID NO: 136296 - DNA, 429 bp, Glycine max
  unsure (1)..(429): unsure at all n locations
ccgctgcagcttgcggatcaattggagaccgttttttttttttaaccacaaanatanactaacagatgatagaaaataatctttttttcattgtaagaaataaactcacatattaaaagatttacaattcttacatacagggttccattaataaaggtacacccgttaatgataattaagtgtagatagaatgatttcatatatctattctgtcaaaaagtttttatgaatataaaaatttataacataaggattatgtttcaaacaacttttttctcttttaagatgttttcatacttttttactagttaaaaatgattttattttttttatccaacaaaattaatgaactcaagaccacttgttaacaaacttactccgacgattttttcttaattataatctattataacaataatatctcattat

SEQ ID NO: 136297 - DNA, 469 bp, Glycine max
  unsure (1)..(469): unsure at all n locations
tagtcaatcttccttcatgcttgtcatgcttgctaactgtttttatctctntagctcaattgcacatgcttctatcttgaaatgtgacaaatgctaatttgggggagatattgattgataatgtgcaattatcttagttactgtagttgatacattctgaacaggccattaacctaacttagcatagttggtttcttttgcttgaggacaagcaaagctttaaatttgggggagtttgataattgatgtgcataagtagattattgttagtcgttatttaggagttagttttatgttgaatatttgcatggaaatagatctttacctccaaattatggttctttttgtaggaattgtacatatttttctgcttagtgcgagtttatagagtacatactccaattctatgaattaatgttgaatccaactcacgtttaggccaaagaagagatagtcaagttctgatgac

SEQ ID NO: 136298 - DNA, 355 bp, Glycine max
tcctcatccactcaaaatcacttgtgctaggggaattgcacgtggactaaagtgatgatcatgatgactccatttttgtcagcgacaacacacaataacaaattactagaaattagtgataagtgaagactagttagtaggtatagactcaaaccacttaaatgagaacacaaaagaacatgattgtaaaagaatttcactctaatatataaatagagttacaatcattaatacgaaaattaattggtaaaattctgttataatatataaaagggtgaagctctcaattagaaaataaaacaacaaaagctacgcctcatttgtaaatgacatgccacttgccaatatttatatt

SEQ ID NO: 136299 - DNA, 459 bp, Glycine max
  unsure (1)..(459): unsure at all n locations
gtatgttattgcctcaagatattngttgttcttattcatcttctgcctcccatgattattcattgacctttcattctaatctattattattctataaaaacaggaactagtacaaagtgcattattggagagcaacactgggagggatgacagaattctctataataagctactgcggatgagtgatatttgatgtccacccttgcgtctattttcattatctatggaacactggaattgcctgtgttgggattaatggaagttgcttctgtaaaattacagttggacacgtccggctttgaatttgttttatttgattggtgaaagggatggtagtctttggttttagcgagggtaaaacctttcttgtgctttaataaaccaagtgatatacttacaggtttgactttcttaacatcatcttatcccgttactttatgtatttattcttccctgagt

SEQ ID NO: 136300 - DNA, 448 bp, Glycine max
  unsure (1)..(448): unsure at all n locations
gcttaccgnctatcagctagctcttattgttttctatataaaaatttccaccaagcttgacgagcttttgtagaagatggcccttcttgaatccaacccctactcctcatcttcttcttctgtgcatccacaccctgcgtcttcatctctgactccgcaccatatgaagctagaggtgctgcacttcaatgggtcagactccttgggttgaatctttaagatcacccaattcttcgaatatcacttcactcaggaccatgaacgcctcaccatcgcctccttctaatggaggcacctgtgttggcttggctctcgtggatggccgcaatggccaacttacctcatggtgtggtctccttcaagcactcgagactcgttttgcacatcaacgtatgaggatccaccataactctgtnanactgatgcaacatgctccgcaatgatactt

SEQ ID NO: 136301 - DNA, 482 bp, Glycine max
  unsure (1)..(482): unsure at all n locations
nggtggtgtacctgaagatgctattaggctcagcctgttttcattntctttatctggngaggccaagagatggttgcattcattcaagggcaacagtttaaagacccgggatgaagttgttgagaagtttctaatttttttttcctagagtctaaaactgcatagggaaaagctgtaatttcttcattccatcagtttcccaatgaatctttgagtgaggcattagaaagattccgtagcttgttgcagaaaactcccactcatggtttttcagagcctatatagctgaacatcttcattgatgggttacgaccgtagtcaaagcagttactcaatgtttttgccagaggaaaaattaagttgaagacacctgaagaagccatgcacttaattgaaaatatggctgccagtgaccacacaattntgcataatagagttcatattcctaccaagaagagtttattggaactntcatcacaaga

SEQ ID NO: 136302 - DNA, 316 bp, Glycine max
catctagcaatatgttaccagtcttaatgtccctgtgaatcaccctttgctcacactcttggtgcaaataactcaacacagaagccaaaccaacagcaatgtttaccctatgattccaactcaacacattgttgctattattcccactttcacattcttggtaaagtaccttgtccaagcttccatttggcataaactcatacacaagcaacaattcacctttctcaacacaccaacctaggagttggaccaaattcttgtgcctcaaacctgctataacagaaagctcagccagaaactcggttcttccttcatg

SEQ ID NO: 136303 - DNA, 489 bp, Glycine max
  unsure (1)..(489): unsure at all n locations
ctttctcacacacattgtcgntcatttttttccaaattttttgtttctaaagccttctagaaaattcaaaatgctatgtgcttataatcattgtgtttttgttgtaactttttgtaatgttaggattatagatgttccatagactcttacaaatatccattgagaatgttaaatctaatgcaatggtgcaattcttcaaagaataatgcagaaattaaatatttaatatttgttgtggtaattgattgaatatcttgattaaaatttctgtagacaaaaaatgttgtagtgtatgatatatcagatatcaaagtttttattatagagaatagatgatgataatgattgcattatttaaactaatctagatattntactgngtgtttctataagttgaatgattaattaatgagtcanaattntaaaggaatgttgaagcttttttttaatatttacttgcagattcataatcatgtatgttactactta

SEQ ID NO: 136304 - DNA, 175 bp, Glycine max
ttcttctcgcagtcgtcctatcaaccaaaaaggggagggtgccgccactcgccagcgactagccgccagcagcgggtgttctcaaacaaccgctcggaggaaagtggagggccagcggcacgcggtgttcacccgtatacaagacccccctgtggcctgagatcttatcgaagta

SEQ ID NO: 136305 - DNA, 152 bp, Glycine max
aacccaaccgcgacccagcgaaaaaaaagagaccaggagccaaaccaccaagaaccagcccacacaagatcccacatgcaccaaaggaggagagagcgaagacgaagacagacgcacaagagaaccgcccataacgggcacacaaaaggaca

SEQ ID NO: 136306 - DNA, 481 bp, Glycine max
  unsure (1)..(481): unsure at all n locations
cttgcgagattcctcacggaaaacgttacggaaacgtttctgatgcgcctcggcttagattttcttcacggaaacaatttttccaagcaatttccaaagagagagaagtgtctaaggggctgggatcccttccttcttgctttcctcccctatttatagcaaaataggggaggtggttgccgcccagctcgcccaggcgagctcagctcgcccaggcgagcagggttgcttcctccagaagcaaccgccttctggaggaatcttctggagggcccaagtgggcctgggtgctatttgcacccccatatttactaagtacaccccctctgctgttttatggtgattctttnttcgtaaagttacggaaacttacgaatttcgtaacgatactttgtttctttccgtaatgttacggaaccttgcggattacataatcatccctttntgacttacggaaatgtacggaacctcacttaattat

SEQ ID NO: 136307 - DNA, 445 bp, Glycine max
  unsure (1)..(445): unsure at all n locations
ctattcttatttcttctctcatagatacaaggcatgggtggaatatagaatangaagttcaaactaatgaattggataaattntttgaattgaaatggataatcattaatccatttatgatccattaaaaatgtactacaaaaatctaatccatccataacttatttcataaaaaaaaagggtccaatccatccattatattttatttttctaaaacaaagtttaatatttatacacattcttacacccaaataccatagaatccaatatttgtctcataaagacaaacggttcattgtctatccaatagcaaatggtgatccaattcaactaatctattaagttntatttttataattgaatagatttgatggttgatttatacgtgatggattggacggctagtggataaacagaatgaatttccacatatgctaatgaatac

SEQ ID NO: 136308 - DNA, 180 bp, Glycine max
tgtaccatgttcaaattaagtcccatatgtatacacgctaataccttctagtgccttcaaaatcacaaaaaagttgtttaagagaaacaattatgttcaattccatattagattagcagaataaatattgatttgttacacataagaataactcacctggatctatgaattcctgggaat

SEQ ID NO: 136309 - DNA, 149 bp, Glycine max
gaatgtgctcaaatatgtggggcaaatctggtttggtttcttgcttgaatgggttgaattgggggtttgtattaaacggtcctaagcccataaagccctttgaagcaatgggacatgccccattgtccccgttctctttcctataatgc

SEQ ID NO: 136310 - DNA, 480 bp, Glycine max
  unsure (1)..(480): unsure at all n locations
tcttatccaagacactctcttggtggtgaaagttctccttctatggcttattctgtaatggatggcgcctcctctcacctcttcccctttatcttctgctgcaactccatggttgaaaatcatcattgaaggaccttattgaagctcaaagatccagcctccatagaagcttcttaagcaagcttccatcaaagtattccaccaaccattgacaactcagcaggtgataggatgtgattagttggattgactggaatgaacttagttatgggcatctagatgtatgttgatcttgttcttctatttaacttgtggtggctaacattcaacatatggatccatgtttcttttatcgaagatagagagtggtatgaagtcttgagtgctcgttttctttggcttcttctttagaatttctctttcctttattggttcttcatcttctgatggtcggcgtacacatnntgtatgtccatggat

SEQ ID NO: 136311 - DNA, 279 bp, Glycine max
cccctacaaagaataagatgcgtgagaaataacgctctattttaagagagaaagagattactgagcagagactttattttgaaaagaccccgactttcaactaatcattgagacaaataaggaaacataaaaatattagagccttgaagacaaacacacgtgaccaagaactaactattattaccagcacttggaacaagcactcacgcatccatagagccaaaaacctcatatcatcgtatcagttgagctcaaatctatctgcaccctttactcaaa

SEQ ID NO: 136312 - DNA, 430 bp, Glycine max
gcttctgggcaagaatgctcgtcatgtcatgtttatgctctctcagcaagcatctgcacttcataacaatgatttcgtcagtatgatagccttcttatttttcaacagcacagactattaataatgcagatatatatttgtagatggtgagttcattattgggacacagatgggtaatgcgtcccgttggtatttgtaacaagctaatggtcattctagtggaatctcaagtcttggcaataactcaatttacttacttaaatattgctgtgatgaaccactatttccaccatagtcttactagtaaatgaatgaagtgaaataaaaggaaatgctattctcacctgtgctttgctattctcacctcccatgtgctctaattattttcccaaatgactttcacataaatatgttttgtgtataaaatgca

SEQ ID NO: 136313 - DNA, 481 bp, Glycine max
  unsure (1)..(481): unsure at all n locations
gctgcaccagttctaatctatacgatgagacagtaaacatgtcttanagtttatttgaaatatatgtgcaggaatatgtataaatataattttattcaacaaatgcagcaggagggacacataggataatggttgatcaggacaaagttctgttttctactgagtgtgcagattgagattaagagtaaaataccttgacaccagcatctttagccaggcaaaaacaatcagctacagcagcaacagtgtgtcctctatttgtgtctcgagcaacatcttcattaggtgcttggactccaatctccaatcgtgtacaaccataagaaagcatttggcgcaagtgaggcccaagacaataatctggccttctgttaaatttaaaaagtgcagaatttgataaagctcatcatagatgtgttacaccacactattgccatgtagatttcccagaacgttgtcactaaatcaattaattatagat

SEQ ID NO: 136314 - DNA, 385 bp, Glycine max
  unsure (1)..(385): unsure at all n locations
agctttgatcttccaccaccgccaccactattatctcatatctatattnttatattatttggactttgattttcagccttgtattttggctatattattatggtatttgaacaatttactatttccctatttgtatggtatgtntgaacaaatattaagtatgttattcgactatatgggttttatagataatttatatatgattngtgcttcatgattcttgcttcatggnttggttgttagtttctcaataaatgtcgtatggatgtttagttatatttgattatttaaaaattgttacgcacttttgctcttttgtgatgccaaagggggagagaaatgggattaaaatcaagaactcacatgagtaatcaattttaattta

SEQ ID NO: 136315 - DNA, 460 bp, Glycine max
  unsure (1)..(460): unsure at all n locations
cttttggcaaggaagaacaagaagatgagtaganatgaattcttataagttctaaaaaattgttaaagagttgtaaaagtctttttttgaatgcaagtcaaggtcttacttttatagactcttcaagtttggtcaagaaaaccattggaagagttataaccttgagaaaattatgtcaagagttacaacttttgactttatattcaaaagttatcattggtaatcgattaccataatcatgtaatcgattacacaatgcattttatgaaaagttgtgactcttcacaattgggattgaattccaacgtttagatacgctgataatcgattaccaatatagtgtaatcgattacaccatttgaaaaatattttacaacgttgcanatcagttaanaacattnntgaaatcaaattggtcactggtaatcgattaccagagagtaaatactctggtaactta

SEQ ID NO: 136316 - DNA, 228 bp, Glycine max
tatgcgatcaatggtggtctggcaggtattatgccctggcatggtgattgttggcacggtgaaccaatcttaagaagcaaactatgctaagctatgctgaactacactcaaataggtactaaaaaatttctttctgctcttcattactaaatggggacttataagattacaggatgaagatatctaatcattatctacagagacaaatagaattggtatcaaattggg

SEQ ID NO: 136317 - DNA, 445 bp, Glycine max
ctcgtgctagagatatatgacaaggccaacttgttcttttcttaggattgctagctctttggctgtcttgatcattcggagtgtccttgttgcagctactattgttttcttatagtctttctcctgttattattgaaaatagaaattgaaatccaaaatttccagtacatatgaatttgaaaagaagaaaaaaatattataattttcccaaataaacaaacacatatgttatattaaaaattcatttaatatgaaacatttgaaagaggttatttgagcttgtaacagcaacttaataataatcttcctacatgctgttgcttcttctacgtcttttttgtgaataatcaatactctttcatgtatgttgttatttaataaatgcttaattaagtttaccacaagaacttgtatggcctgcaagttgcattgtattgtgaacaat

SEQ ID NO: 136318 - DNA, 402 bp, Glycine max
agaacattcattcttcttttttaataacaaaccacaacttagacatttttacaacaccaaccttattactttgctactcttttcagcacaactattttctttgatgatggtttaccccaactgttattcttttaaagtattttttcttttacatttatactgagttggagtaaaaccatatttagtgactcaatttaacttgtgttggttattcattttcctgcaaaagaaaatcacccaaaaacattgccccaaatttgggacaaatttgtctggatccatgagtactctcctacaacctaagaaagggtaggtagtaaatatttgcattttgggtttgaggtccaatgacccaaaatttacattatgctccaaaagggtgcaagggatgcattcattcat

SEQ ID NO: 136319 - DNA, 484 bp, Glycine max
ctatgaaactaagcttacaatattgtcactagcaacagagcattatttcattttataccaaaccctatgcttaactgtaaatgagccttaaataacccataatataaatgtcattgtctttttttaacctccaatgtaaactgtaaggtaaaccagttttaccgcagcctcatgaattaataactaaactagaaaatagaaatggatgatcccagttcagcattctaaactcaaaaatattccttacacataattttcaaagcacgagcttcacaatattgtcactagcaacagagcattatttcagtagagcacaacacagatgccccctctgaaagaaaccatgatagatgcaatgcaacccacacttatctcactctaaaacatcacataaataaataaaataatcaaattggtaaatgattatagggtttctattgatcattacctatagtaaaataaagaaagcactggcaacaaagag

SEQ ID NO: 136320 - DNA, 341 bp, Glycine max
ctgcagcttgtgttagacacattcaaaatcgtgatatttattatcattatctagggcataatattcaaaatgagtttatctcccttttcccccatagttttaaaaggttcatcataaagatcattaaagaagcataatattttttgataattccttgattgcacccctgatgtgagtcataaaaaacaaatgactctaacagtacaatgtgaaaatatgttacataataaaataaaaatggaagagtactttttagaatatttaaaagtggatgatgtagaagcaagacattttgatgtttgattatgccaagggtcacgcgcttctcaaagttaattcag

SEQ ID NO: 136321 - DNA, 495 bp, Glycine max
  unsure (1)..(495): unsure at all n locations
cgtaatggatagataattggatcgaattaatgaattcattaactaatgttacacttgcatatatgcatatgtatatttttgaactaaaaaatagtagtaatgtataagatcatagggcagagtaattggtgtgttgggttggagttagctggagctgggtttcttgtgtggtgtgttggtgttatggctgagggatgaagaaagataaggtgtctctccgactccgaataatgggaagaagctaaaggacaaaagcgatttttgacggtttgcattaattctactttccttctttnttttttccattaaaaaacagtcaatgatcctgctaaagaaaataaataaataaacagtccataattagtcattntagttccttcggcatctataatagaagttaattaatgacttctttaaaaaaaatattaatttgatgtatcatatgtgattntgaattctctagaattaanaagaattatttatataaacaattat

SEQ ID NO: 136322 - DNA, 397 bp, Glycine max
  unsure (1)..(397): unsure at all n locations
agctnttcccccattttctataaaagtgttttgttttgaagtanaaaagggttcaaccccttaggcacttctctctctctcgaaatagctgaggaaaattagttccatgaagaaaatccaagccgaggcgcttccgtaatgtttccgtgagtaattacgcgaagattctcgaccgttcttcaagattcatcgntcgttctttgttttcttcagtcttaaaagtaggaaacaacattgcatggtaaaccgtggccgcgttaccgttttaccttgatgggtttcggcctccaacttcatcctggcatctgaccatgaccagttgattctgnccctattatgacaaaatatgcatgtgtatgcgtatgcatgaatgcaaaaaattttagtgaaagctggt

SEQ ID NO: 136323 - DNA, 504 bp, Glycine max
  unsure (1)..(504): unsure at all n locations
cggacacaagaaactaagctatcaaattaagnaggacttaaatgtatttcataagattacaaaaaacttcaaggaaaacatgaagaagagatagataattcttcagaaatttccactcaatcatgtgatgactctgaatgtctaaagttaaagacaacatagcttcaccttgaatagtatgaggctatccaaaagcaaccttaagatgttgttgcgctccattaagagattgaatttttgagagaaactatatccaaatttgttggaagcattgagaaacttaacaaaatgttaagatacaacaaatgtccaactaacaaatcgagaaatggataaaatgganagaagtatgttcatgatgaagaaaccatagtatgttatttctatggataggttagagacatgaggaaatataatctttataagtntaatcttagttaactatcaaatcacaatgtaacatgtctattantcatcanagganattactgcgtatgacacaag

SEQ ID NO: 136324 - DNA, 329 bp, Glycine max
acctttaactacaataccatttttatctcaacaggaaaaaaataacatatgttttctatgcttctgatagacttgaattttatatatttgatcaaataaagagtacactagatgaatttctcaataaatattaatagacaaaaaaaataataaggtgaaatgaataaattttttttgtaagttatataacttcaactaaccagctaattttaactcataagtacttactgagaagtttatccaaataaggtttaaagcttaatcagataacttcaactaacaagctaattctaactccaaggaagttatataactttaactaaccatct

SEQ ID NO: 136325 - DNA, 491 bp, Glycine max
  unsure (1)..(491): unsure at all n locations
ntcanaccgactcctgcttcaagctttggtctctgcagatctttacatagcaaaatctctcaaaactctctggaacttggacctttctctctctagaaaccctagacatgcaaagctctgaatctcaatccaaactctctctctgaaatctgatttcaggcttaaataggtggccttgttcgtgctcgtgcgcttagcgcacttatggaccgcttagcgcacgttagtgaattctggcttagcgcatgactttctcgcttagtggatgaactgaagcagtgcgcttagtgagatgaagcggtgcgcttagcgaacctgtacagctcatcttcttccagagtcttcctcgcgcttagaccatgagtgttgcgcttagcggacgctcgctaagccagcagattgacttagcgagaaggtgaaaaacaacacttttcanagctntcctaattaaccttgaaatgagagagaatgattattaaacacacaaaatg

SEQ ID NO: 136326 - DNA, 421 bp, Glycine max
  unsure (1)..(421): unsure at all n locations
ttaagcaccgcggctgcagctgctttacatctcccttttgatgttacaccctgaaatcaagaaacacatacacattctttttcctagtcgatcactcacttaattctccatattctcccgctttgttnttgagtttaaccttcacttgaaataaagttatttaattatatgagttcttgatttaattcctattttctctccccctttggcatcaacaaaaagccaaagttcgtaagtaatataaaaaccatacataaatgactaatcatacaagagaatagcaaacaattaaacaagataacatagtgtcataccctaatttcgtccggggattattacttgatgacatgcaataaaagaagtcccgagacgtctcagaaattaaaaggaagcaggcttgcacgatcccgtgaatctgaat

SEQ ID NO: 136327 - DNA, 472 bp, Glycine max
  unsure (1)..(472): unsure at all n locations
tctacttatgtggcagggcgggcttccttcactttcttgtctccaacgcgagctctgaccactgttcttccttcccgcgatgcctcttttcatgtccgcctgagtgggcttatagcctaaaccatacttcccacgatttccttgggtttttatcaggctagttatgccgccattgtctttgcctaaacccatcccgggttcataaccgttccccaacataactcgggccatcattaccgccgcatcggacagacaaggttgcccaaagagggagtccacggaggaaatgctgaccacctcaaaagactgganagcggtttctaacgattcttctgcggcttccacataaggcatggaggatgggcagcttaccaagatatcttcctcgcctgacacgatgaccaagtgccgctccactacgaatttcagcttttgatggagtgtagaaggcacaactcccactgagtgggat

SEQ ID NO: 136328 - DNA, 293 bp, Glycine max
cgcgctgcactggttccccgagatcttttgtgtggccaaaaggagggaaaaaagacttgttggaacggtaggtaaagcataattcacccacccctgggggaggagattacattggggggatcgaggaacagattgggggggttgttacgaaggtatgttgtagcgggaaggaaggtagcattaagtggggacacgaagataaaggcggaccccatggggggaggaaccatgcacaggcagtgaggaatcaaggcaaaaaaaatccggaggagagcctataaacccacttccga

SEQ ID NO: 136329 - DNA, 325 bp, Glycine max
  unsure (1)..(325): unsure at all n locations
tttcattcaataaataaaatcattctttaggttactaacagaactagaatatatttaagcccatcctgtgatctatcttctcaaccttccccaagtacacacataaaaggatcaagtgagaaagaaaatcaaactatcaaacaccatacaaacaatgtttaataagtttcaatgaggagaaaacacaataaaagcacctttgaatccagcacactactccataatcatccacatgaatntattacttantcctcaaaggacgtttgaactccacaatgttggactgtccactcaaatgctgcatgaattgaatctccctcttcat

SEQ ID NO: 136330 - DNA, 496 bp, Glycine max
  unsure (1)..(496): unsure at all n locations
cgggctgaaccagtataaaaatcaatgtgcactctnntttcttttctcctattggcactattttgaacaaatttgtttactagttntgttaatctttaaaacagaaaaaactttcacaatacacaaaaaactgaactaagtttatcaaaatcttttcaaataaacaacctttttgaaacaagagctctgagtagagaattttttttctccaaaattgcttgcatctttgttctaaactcagaatagttcttcattttctaggattntaaaattttgtaaaactccaattcaaccccccttcttgaggtggttttgtcacttcattcaaaacgtaggtattgggttcgaccaaatagaacanaaagctaagggaatagtagctagcctatntaggaaaattgttttctttttttatcggcctatntaggagatccgtgacttggaaatggaagtacacttggttgggaggataatgactatatggggtgctagacat

SEQ ID NO: 136331 - DNA, 366 bp, Glycine max
atttattttatgatgttgcatgccatttttggtttaagagtaacatcccttggtaaaactaactttccaaatgtttgccttcgcaggaaatggccccgaggaagcttgcctcaaagaggtccaagaaggacaaggtagccgaaggaactaattccgctccggagtatgacagtcaccgctttatgagcgctgtacaccagcagcactttgaggccatcaaaggatggtcgtttctccgggagcgacgcgtccagctcagggacgacgagtatactgatttccaggaggaaatagggcgccggcggtggacatcactggttactcccatggccaagttcgatccagaaatagtccttgagttttatg

SEQ ID NO: 136332 - DNA, 492 bp, Glycine max
  unsure (1)..(492): unsure at all n locations
nntgcttctacagtgctatattggaanntttgaaaatactttccttgtgaagtcttgactgttgtttctcgatttcttctcttgaatcttgaatcttgagtcttgaatcttgatcttgattgttcttgaatcttgattctttgagacttgattcttgaagcttttttactcctgattctttagaacttgcttaactcttgattctttggcatcatcaaaataatcttggaagtcattgcttccacacattttggtcaaacttagcatccggtttcaaaaaatggtcttcttggcagcatccctggtgaaatacctactccaattgtaagggattggatgcaaggcaatgttgtcctttggactangatgaggcatangcttgttgcatggaggaaactttcctttcttcttcctaaggtccaatggaggcaaccttgaagtgatacaatctagcatgaactcgatgattatggtgggtctgatatgaatcct

SEQ ID NO: 136333 - DNA, 318 bp, Glycine max
  unsure (1)..(318): unsure at all n locations
aggaggaataaagaatattcactgttagcatttctgttaagcagataagcaggtacctaataacagaatgtataaaatgcaagaataaatgctcttgaataatatcagaaaacgcaatctctagttccttcctttatctctctatctctctacccttctccttccacggaggttgcttgcgcctcgaaagccaagcctaacattggtgctntcattgatactttccgccatggcccaagctacatgatccaagaccagtgttgatcgcttggaaaatgcattcctgaaaccttcagcatcaatgtcttcaaaggttga

SEQ ID NO: 136334 - DNA, 488 bp, Glycine max
  unsure (1)..(488): unsure at all n locations
tcaagctctgatgatatcgagaagaaatcacatgtttgtcatcatcaattttgtgggagaatgtgaatgtatgtatacatgattttgatgatgtcaaagaagaatctaacacggctgcttcaaatgataagcatttacttcaagaataattcaagattgcttcaacaaacaaagccttgtttcaagattcactaaagaccaagccttgccttaaaacaaagtgctttcaagacatgcaaggctctggtaatcgattaccacgaagtgtaatctattaccacaagacagggttgagaaatagctgttgaaaaggattntgagtttgaattttcaacatgtaatcgattaccatatgtctgtaatcgattaccagcaacgaaacttctgacattaaattaaaagcatgacccttcaattataactgtgtatcgatacacaacattgaatcgataccagggagagtttcagagatctgcacagtccatctt

SEQ ID NO: 136335 - DNA, 338 bp, Glycine max
  unsure (1)..(338): unsure at all n locations
atgtgaatnaggacgcatcaacaagaatcaagccaaggctattgtgcaagcaatcaatggggcaaaacacaccaaatgattataatgatggatggctcaaattctcacaaaggttaaatcatcactttcaaattgagctttaaaactatcatgacatgtagagaagaatcaaggatttcaagtcacaaaatgtcaagaacttttattttcaaaacaattacccatttcttgaacatatcctataattcaaagaacaacatgcaaagtcgtacgtgcacatgaaattgacccaaaatattaaactgaaaatccgacgaaactaacaacattaacaaatt

SEQ ID NO: 136336 - DNA, 384 bp, Glycine max
actaagcttctagtctcacatttgagcgtcttgatatatggcccaattttttttacatccgagtaaaaagttattggcgtttgaatttcctactagcttacgttttcaatttgcagcgtctcgatctattacatgactcacccggacatccgtgtataaagttattgacgattcaattctctcagagcttcggatctaaactctgagcgtcttgatattttatgggacttaaccggacatccgtgtatcaagtcatagtccattcaagctgctactagcttctagtctcttttttcagcttctcgagatattatctcactctatcggacaaccgcgaaaataagtatctgcgggttgaatctcctaccagctttggtcttccat

SEQ ID NO: 136337 - DNA, 308 bp, Glycine max
  unsure (1)..(308): unsure at all n locations
tctgtatggtgatctgcagaagaacatagaccacagactctngcaacagctgcagatttctgattcatggcaagctgagttactatgttaaccaaggcatcaattnttccctcaagctttttattttcaagagatgaagatgaatctgtggccacctcatggactccttgatgcaatcctaccccgcaagggcattggctagaagactccaagtagattgggctagagatccaaggaaaggccctagggttctcatgagccttatggtagatttcgagtccatgggctaaatatgagcccgcttatct

SEQ ID NO: 136338 - DNA, 496 bp, Glycine max
  unsure (1)..(496): unsure at all n locations
ngttcgcattntagtaaanaaaacactgagacntattttttctacaaaagaaagaagtacgtaggtattagttcctcatcacaaattgaggaaacgtaggagcaaaagccccacttttgtcgaccgccccacctattgctatcgtgacctgtgagtccaatgacatgtggagatacccaagtggttatccgcacaaacgatttttgttaatcctaacccgtaaagttaggtggcaagcggagatacccaagtggttatccgtataaacactctttcgctatccgtcagactcagattccggtagcatgcagagactaacatcgtcttctgcaccctttgtcaatcangggcaagcaaacccgttgacacgcggacacttatgtcgtcttctgcacctttgtcatcttgacccgtgaagtcaagtgacatgcgaagatacccaagcagttatccatacaaacggtttctgtcatcctaacccgtgaagtcaagtgac

SEQ ID NO: 136339 - DNA, 293 bp, Glycine max
  unsure (1)..(293): unsure at all n locations
cggcactcagagagaatggctaacagagagcgcccacatanttcttaacgagaccagaaccttcgacgacgacattttcctcacagcaaacatcctccacaacaggtgccacatcaactattacaacaggagcccgacctgtggactccgtgcacaccgccgatcgtntaaaccccataatgaacagttgaatacttggatggcgaaatgattcatccatccgcagaaagagaagccttcagggtgattccaactagtgaaccaaacacacctattagctaacataaccgaaa

SEQ ID NO: 136340 - DNA, 425 bp, Glycine max
  unsure (1)..(425): unsure at all n locations
gcttgaaattgaacaacggaagctgtcgatatattcaaatggtcataacttatcacacgaaagatcgattcaggcgcatgatatatcgagacgctcgaaattgaacaacggaagctctcgagaaattcaaatggtcataacttttcaaaccgaagtctgattcaagtgcataatgtatcgagaagcttgaaattgaacaacggaagctctcgagaaattcaaatggacataacttttcaaatggaagtccgattcacgcgcataatatatcgagaaggtcgaaattgaacaacagaagctctcgaggaatttaaatggtcataacttgttacacggaagtccgatttaggcgcataatatatcgagacgctcgaaattgaacaacggaagctctcgagaaattcanatggtcataacttgtcaca

SEQ ID NO: 136341 - DNA, 449 bp, Glycine max
  unsure (1)..(449): unsure at all n locations
ntacagcagattttagtaatgacccactaacctagaattaaaataacttaatgccattaaactagggaattaaaaaaaacttaatggctgagtgtaactgaaattgtggcaaccaaaagtcacccccaacagccaacaagtcagccaccatttggtctcccaaaaggctgatgcctaggttgccaattgggcccttattacaagttgaactaaacctaactaaagcccttttagttgattaacccaaaacatatttttggtcagccaactttacaaggattgggccattatttagacaaactaaacactctaacattgaaacaaagtggtgtcatttagtcctcctccatttgggccatgatacaactcacaaccttggactnttctccttgaaacttgngcttgtattcaaacagtatggacagcacttgntgaagagcttccttgga

SEQ ID NO: 136342 - DNA, 186 bp, Glycine max
gatttgactttttgattaattgggcaaatggtgaagcgaaaggtttccaatctcacttttgcaaattttgtgtgaatggcaccgaatttgtaaatgccaaaaagcctgtgttgggtggctgtggaaagtgtaatacacctgggggtccggacatttgctagtagatccccaccggccaaatgttga

SEQ ID NO: 136343 - DNA, 494 bp, Glycine max
  unsure (1)..(494): unsure at all n locations
ntgagccaaaatcctgactcaccataaaccttgacccattgtgataatgtcaatccttaccctcggaagcaaaaaaggaagagaaggaaaatttccaatcaaaggaaaaaagagaggaaaggaaattcccaatcaaagagtgggagaaagcaaaaagaaaagaaagaaaattcccaatcaaagaatgggagaaagaaaaaaaaaagagaaggagaagaaggaaagaaagctcctggtcaaagatcgaaagaaaacagaagaaatatgcagagaggtctttggaccagacaatatctgaacaatacggaattgtcaccaaatgaacaaaagaaagaaaaggaaaccataacctanaagtggtcttctccctttgattaccaaccaaaatcatgtgcatcggtgacttgttcgcctcgcgtcaaacaaaaacaganaaggaanaagccaacaaataatcaaaagccaaaaacacacaannagccgaaaaacccatc

SEQ ID NO: 136344 - DNA, 450 bp, Glycine max
  unsure (1)..(450): unsure at all n locations
tgcaagcttttgtactcatagcanaatatgatttttttgtctttatctttcctttctttggacattcttcttgaggagtgtttccacttagagcctcctttgtttctccatgtcttgtggatatttctagaaataaaggtgagctcatcttcatctgagtcttcctcatattcattatcagatgaatcatcaactttatgaaccttggacgaacttctcaagacttgttctctggttgatgatgccttcttattcttctgactactgagagccagagacttttctcttttggatccattgtcctgctgaagttcttgttcatgaaccttgagggtattaacaagttcctcaaaggacatcgagtcaagattcttatactctcgcggtgtcatacatctcatttctaacaacttctcaaatttgttattgatcatatatctaagtctacaa

SEQ ID NO: 136345 - DNA, 501 bp, Glycine max
  unsure (1)..(501): unsure at all n locations
cggatttcctttgctccggaaacctctcctttctcatgtgatctcaaacccaatctccgggttggaaaacaacctttntgtgccccttgtttgcttgtctagtatagctctcattcttcttttcaatttgggccttgactctttcatggagctttttcacatagtccactttggcttatccttccttatgcttaaaaactaaaatattaggcattgacaacaaatcaagaggagttagtggattgaaaccacaaacaacctcaataggagaacaactagtggtgttatacacaaccctattataagcaaattcaatgtgaggtaagcaaacttcccaacttttaagatcctttntcaaaacgacccttagcaaggtacccaaagtcctattcatgacctctgtctgttcatccgnttgagggtgacaagtagtagaaaatagtaacttattacccaacttttctcataaggtcctccaacaatggcttaggaacttggacg

SEQ ID NO: 136346 - DNA, 376 bp, Glycine max
  unsure (1)..(376): unsure at all n locations
gatcttaagcgacgccgctgcagcttgaacatatactggcttatttttatgttntgggcttggcggccacgctcaacaaattactttcgacacctactgtacgttgatttcaccaatgttgttatgggaatgttgcgacaatcctttaaaaccttattgatacattctgagaggttcgttgtcatgtggccatatcgacgtccttctctatcgtaagacatcgtccattnttcctttgagatgcgatcaatccatgttgctatggctggactcagttcacgaaatatttctaaatattgatcacaaatgtgtttgcaggagtgacgctgcataaattagttataataacaatnttagtaaaatgaagtaaataacg

SEQ ID NO: 136347 - DNA, 487 bp, Glycine max
  unsure (1)..(487): unsure at all n locations
ntagtgtgttgttcgaccttctctgcgaaacanataacatgcaagataagtttaagcaaagcaacatcataaagctntgaaggagatcaatataaacgcaaccgtacttataaaaatccaaaaattgaagctntagtgtgttcttcgagcttctctacgaaaccaaaagcatgcaagaaaactttaagcatgaaaaaccgcaacagatcggaataatagaaaacgcagaagacggngagggtaaacgaagcacatcaacatcgaagcaacaaagaaaatgcccatgtactcatcanaatcgtagctttagtgtgttcatccaccttctttgccaaacaaagaacaggggaaacaaaatggaaaaaaacaaaaagaanaaacgcagaagacgggtgggcaaatganaacttacgaagggtccgttcatcanaattacagctntaatgtgttcgtccaccttctctaccaaacaaagaacagaggaagc

SEQ ID NO: 136348 - DNA, 430 bp, Glycine max
  unsure (1)..(430): unsure at all n locations
agctntatactgctgagagntaacttcacattctcattttatggggnnncctttcttgggttgagttatcaccttcctccttttttgaactgacattgttgatgttcaaaccttgagacttgtaaaacctgtgttgaggaggatagccatgctttgtgtagcattcatcaatagtgtggttaatgaaaccacaatatgtacatagcttacttccttttcctcctgaatttcctctaccaaagccactttgacttcatgttcctcctctaggagcgtaattctgaggaaaaccattttttctataacacttacaaacaatataattatctttaccacaataggtgcatgaattttctgaatagaatgaatggtgaggttgtgtaataagctagtgttctcttatatcgtacttgcaaagtgctctctactg

SEQ ID NO: 136349 - DNA, 490 bp, Glycine max
  unsure (1)..(490): unsure at all n locations
tatatctaagatatgtccaatttcacacaaagacatatactactcacgatttatgccttgtatcttgaacaactaagcacatgtttgttcccccttcaaattgctttgacgtgaattctaaagaatctttaatataagatgaaaacaagtattcaataacattcaatgagtgaataagcagtaaagctcanataaaagataaacaaatgaaagcttaaatcaatcgtccttggatttcagcaaagttttgcttcaaaaatattttcgtaatgattntttcgttcttctttntgggtagagactatcttttatagacattcttgaaagattcgttacgggatcaatcttgattccttgaaaagaccgttgtctcacaccgggaaataagactacatggcatgctnttgattgtgaggaaatagtacagacaacgccatgtgctctntgtcctcatcaaaagtgacctctaaggaatattctatgaatacct

SEQ ID NO: 136350 - DNA, 490 bp, Glycine max
  unsure (1)..(490): unsure at all n locations
gctccgatacaatataaataaaaataattagacttgatagtataaaatagtatatgatatccncaatattcgtggtgtcttttatattgatacaattatctcaaactcataccttttttcccacttaacaataaataattaagagtataatagaaaaatatttaatactttaatttattgatcttgtaaaatgacaggaaaaataaaaccaaaatgacaaataaaattatataaaaagagtattaagattgaatttaattcccaagcttatattgttaccaagtggggaaaatattcggtttccctctcataacccaaaggaatgaaacataagcttatgcagttatcctaattgctcggaaaggtcaattctaattccaaggtttcaaaacaatgttctaaggaattacagaaatgaaaatagtttaccgagtgtgatgtgatcctctcacaattgacaacatctcagtatgaactctactancgtata

SEQ ID NO: 136351 - DNA, 301 bp, Glycine max
  unsure (1)..(301): unsure at all n locations
tagtcgaagagaagttcaagtccatagccatcacagtctgaaaagagtatgatgaactaagggacgtcaatatggtcaccgctgaagccttggaacgagaaaccacgaaggcccgaaaggaagaacaccaccaaagccaagttttgaggggctttatatggcagcaatagtgagctcaagctccgaagaggtgaaaggaatcatcatgggtcaaaggcatgatcttgaaggacgagcttaaagcccgcctcangtcgaaaagaaatttgtcccaacagttaagcgagactgaagggaatat

SEQ ID NO: 136352 - DNA, 487 bp, Glycine max
  unsure (1)..(487): unsure at all n locations
cgatagcatgtagagactaacgtcgtcttctgcaccctttgtttatcgcggccaacaaacccattgacacgcggagatttacgtcatcttctgcgcagacaatttctgtcatactggcactggagtcacatgacatgcggagatacccaagtggttatccgcacttttaaaaaattcttttgctatctataagactcaaagcatgataacatgcagagactaacgtcgtcttctgcgccttttgtcatccaaaggcggcgggcccgatgacatgcggttatccgcacgctcgatgattgataaatgcgcagagaaaaattctgcgccctttatcattcangagcagtgagtcgagtggtaaacgcgcatagacaaattctgcgcccattgccattcagattttgcanatngngtgataaacgtgcatagacgaattctgcgtcctttatcattcaagagcagcaagctgagtggataaatgcgcata

SEQ ID NO: 136353 - DNA, 265 bp, Glycine max
ttctgctccaaatcgcgaaaggaaggcattttcggtgtcgtgaagcgcatctctacgtgtgggacttcaaaatttcaggtttgggtagacttctttctcactttattttcgtgggtattgggttttgggagatatgatgggtagttttgctaggtttatgcttcatgataattaattgtgaagaaatttgttgaaagcatgttgaacttgccatgtttgggtgagtcaagcttacccattctgttttagggtttttatgatgatg

SEQ ID NO: 136354 - DNA, 483 bp, Glycine max
  unsure (1)..(483): unsure at all n locations
gtaagaggacacctgatcaaaatatatgtttctaacttaatcagtttctttagactctagtggtattagaggagggggaatctttacacacctactctagattttgcagattgaggtctaatccttgggagattgaagctaggctctgtattccccgcaaggggtttgttctgaatgtggaagcaaagcttcatgatgaatcaacaatgattcaaaggtgttttgatgataacaatgatgacaacaaaagatgatgacaaaagtgatgaacaaaaagctcaagtgaatcaaagaacatccatctcaagtgaatcaaagaacatccaactcaagagaatcaagaacaagtaaagagttcaagaatcaagaagaaagcctacaaacaagaatcaagattcaagattcaagatctcaagaatcaagatcaagattcaagactcaagattcaagaatgaagaanagactcaatcaagaatagtatta

SEQ ID NO: 136355 - DNA, 425 bp, Glycine max
  unsure (1)..(425): unsure at all n locations
gctgcttctacattactccctcaattttgtttgttcctgcattcngnnntgcctaggtccatcattaccccctctgttcccaccataatgtcttctagcattatgatttaggtggttctccaatccttcaatttttccacagagctcttcattgttacggttcaacaaacattgcatctgtgtagttatcacgtccagtagcaaatgttgagatccgtctagttgatgatattcaccaccaccatcactagttcttgccataattaaggaacagaaaaaatttacagtaatttaaacaaaggttttaggacctcaccactctctactcacatgtttctctctttgatggaagcacactcgtgcttgatgctctcaatatagactnttgtgtaatgtttcactctaccttttacactcactcctct

SEQ ID NO: 136356 - DNA, 480 bp, Glycine max
  unsure (1)..(480): unsure at all n locations
agatggcctcagcacattccttatttccttatggtatttctatcaatagacctccaatctttaatggagagggttaccactactggaaaacccgaatgcaaatttttatcgaggcaatagatctaaatatctgggaagccatagaaatagggccttatatacccaccacagtagaaagagtttcaatagatggtagttcatcaagtgaaagcataaccatagaaaaacctagagatagatggtctgaagaggatagaaaacgagtacaatacaacctaaaagccaaaaacataataacatctgccctaggaatggatgaatatttcagagtttcaaattgcaagagtgctaaggaaatgtgggacactcttcgattaacacatgaaggaactacagatgttaaaagatctatgataaatgcactaactcatgagtatgaattatntagaatgacatacaatgannatattcagagtatgc

SEQ ID NO: 136357 - DNA, 403 bp, Glycine max
  unsure (1)..(403): unsure at all n locations
gatggagcctgtgctagtcgaaagtactgtatgcaaaacgcatgcctatgatgttgacggtgataactccagaataacctgagtaacctttatcagagagaaatcatatacctattgagaatccatagagttgagtctaagacttcaacgagagaaagactgtgtcatgatgagaatactgagtgaccatggcagagtatcagaatacagccagtgcactgaatgatgctgagcatgnaggcatcactcaggagttctctggagccattacacctgcactaaatgggatatgcgtgaggatagacatgaccttgcaagaagccgctcgactcatgctttgtgccagagagctatcctattatctatgggctgatgcctgaacactgatgcgcatccactcata

SEQ ID NO: 136358 - DNA, 475 bp, Glycine max
  unsure (1)..(475): unsure at all n locations
tctnttggaccttgaacaagcaatcaactcctctttatttctatgctatgtgctcgcgactggtccctttcttcccttcgcaacttgagttcattattgctaccccatagagctccgcgaaatttgttccggccatactcttccttgcgagccctcttggtctcttgttcaagggctcttgcggtaattgcattctcttcccgtaacccggcgcactccttccgaacgtgtgtagcagccaacttgaacttctccttggcgagttttgcctttcctaactcgcttttgagagcttggacttcttcgtcctcttccggtgcttcaaaattctcttcgctgacgacttttaacttggcgagccaatctaaacctcgtatgcgaactttcagccattcgtggtacccaccaatgatgccattacgaatgcctctaagctctcgatctttccttaacggagttcccatgcgtatggatc

SEQ ID NO: 136359 - DNA, 373 bp, Glycine max
  unsure (1)..(373): unsure at all n locations
agcttctcaagaaggtgagcttagttattattgggtgtgtgtagctaagctctagcttctcaaggaagttttctcaaagaagcttctcaaggaagttttctcaagaaagcttttgaaggaagctacctaatctataaatagaagcatgtgtaacacttgttgtaactttgatgaatgaaagtcttatgagacacacttcaaagttccacttctctccctcttttattccttcaatttcgtgctccccccttctctctttcttttcctccattaaagcatcctcttcaagcttcttatccaaggcaattcttggtggtgaagctccttcttccttggcttatgccctagtggatggngcctcccttctcttctt

SEQ ID NO: 136360 - DNA, 494 bp, Glycine max
  unsure (1)..(494): unsure at all n locations
gttgagggtgtgtagcccaccatcttttcatagagagtatctataatgtgtctaccatcacgattatcgtctccctttccatcattgngggtaccacctgngccgccagatccctccaccttttgggcgtgttctttgaaagatccgtccccctttttgcacatgttctatagttgcatcctatccgaaaccatatcaaaattgtactgatattgcctaacaaaggcaaccattatgtccttccaagaatggacttgggaaggttccaagttagtgtaccaggtaacagctaccccagtaagactttcttggaaggaatgaatcagcaattcctcatcttttgcgtattcccccatcttctgacaatacatctttagatggttcttggacaagtagtccccttgtacttgtcaaagtccagcaccttgaacttgngaggggtgatgatattangtactangaacaactcttctacgttagcanaggcataatct

SEQ ID NO: 136361 - DNA, 448 bp, Glycine max
  unsure (1)..(448): unsure at all n locations
agctatcaccttgaccatctctaaggccttttatttttctatgacacctaaacatcattctctaacctttgaccagtcactaggatctcacttcattattacctaaaatggaaaatgtgtataacattttctttttctaactacctaattaaggctttcatcacctctctatcnagcatattttctctctacaagtcaattgcataataaccataagttagacccattgatacacataacagaaaattccaaccaaggaaaaaaagaaatagagctaggttttatatacttcaaaaacaaggcatataataataacagtttatgacctaactcacttcataaaaagttatcttataaatatatgtacatcaataaatacaagcaaaccanaatatcatagatcaatcaccaaacatcaccatgtgaattcaaacattaactatcaaaa

SEQ ID NO: 136362 - DNA, 441 bp, Glycine max
  unsure (1)..(441): unsure at all n locations
tatacttgcttagcttcgacggattaaanaatttgctctctattcgtcgaagcttagcttagcttctacttgcttgcttagctntgacggatagagagcaaattttttaactcactatgtacaacttactaatgagtcaacaagtttcatgggttctccccctctaagaaacttaaaaatttgggttgtcagcttgccaaggtggttgttaagttcgaagcccgactgaaagagtcagagtccaggctggaggagtccaagatgtgggtggctaaggagagggagaccaacaaggagcttgaataagagttgataatgtacaagaagttgtggagcaacagaaaaaggctttcanaaagctgtcaggcaggtcgggttttttgccaaggaccttgacttangtctttntgaccctttcaagaacatggaggataatgttct

SEQ ID NO: 136363 - DNA, 368 bp, Glycine max
  unsure (1)..(368): unsure at all n locations
atcctaanagacgacctgcggcatgcaagcttgtatggctgctgccgctaccactttattgttttcactctctatggcggacattagaatgctgactccctacaagaaccaggctgttatctaaaggagaggagttcattgcacgagtcttctttggctgccaacaagttagatacgtgtgggaagaagcatgaatctataacccggtagtttatatatgaaccatgcagaacccgctatggacgtaacttttcaccgtcgagaaaccctctccatggagcttaagtgtagattaagcatcacactttggtgcatctggagatgccccaccacaaaatatattactccccttcaatttattatcacat

SEQ ID NO: 136364 - DNA, 416 bp, Glycine max
aaatcttcatgatctacagagtaagcttatctaatctacctaattaaactaattacataaaacaaagcccaaactcgctgcccagttgttcaagagcagatattttgacttctaagcttaagttgaccctcgaaatggcagaattggccaaactttatttgtgaaacaattgaggatatttctcttagcttttgagggactactcacatgctccatttgtgcttgagtctctcaagaatcaagagataccatactcttgttcttataaaggatgccttacgctcttcaaaagtttaaacaaagaatataagaattcactctctacttagacgaatgttaccattgagcactataaggttctcttgatatatgatctggcaaaatctgacagaactgatattgaaagattttaacta

SEQ ID NO: 136365 - DNA, 376 bp, Glycine max
agcttgcctgcattgtgttgttagcaaggttcttttccagaacccaatagtaaatacaagaacaacccttgttcatgtccctttaaatgctctacaattttagacatatgaatttcattaatgtatgactaaggtcatcatatctgtgaaatttaaaagtcaaagaaataaaatgagtaagaaaagaactagaggatgagaacagaaacctgcaatgctcatgtgtatcacctaatacatatccagtgtctgtagaaaatccaattaatatcacctaaattataagacttgacatagcacatatgtaatgtagtataaaaaaacaaaatcaaagtaagcaattaatgtcacaaatgcttacagctagacatatcat

SEQ ID NO: 136366 - DNA, 492 bp, Glycine max
  unsure (1)..(492): unsure at all n locations
tcttatccaaggctcatcttggtggtgaagctccttcttctatggcttattccctagtggatggcgcctcctctcacctcttctcctttgtcttccgctgcatctccatggtggaaagtcaccattaaaggacctcaatgaagctcaaagatcctgcctccatagaagccccacaagcaagcttccatcaataatggtgtttaggacctcttagaattgcccaagggttataagagagttggttgcaagtgggtcttcaagactaaacatgactctcatggaaaccttatacgttacaaggctagagttggtgctaaggaatctactcacaaagatggcatagattataaagatgcattntcactggtctcccaaaaggattctttcaggagtatcatgtcattagtagcctattatgacttagagttacatcagatgaatgcgaaaatcggctttcttcatagagattaagaggagaatggttatatggac

SEQ ID NO: 136367 - DNA, 357 bp, Glycine max
  unsure (1)..(357): unsure at all n locations
agcttggtggtactatagctgcactatattttttgttgtggaatcaaatgcagatgcaatgcagtagaagggggtaaagacaatatattactacaattatatgaaattgactaggtaatactaagaacagaatattactagcatgaccaaaaataaaatagccgctgtgtcaaataacataacaattgtctcaaatataagaaaaaaaatactcctacgccatcattagcctttntacttattgctgtttttaaaaaaaatgttgcccatttctttcgaattgtggtgatgatgtcgatgtccaacggtgtgtcattagcaaaccactgcaagtattcataatggtaagttagtact

SEQ ID NO: 136368 - DNA, 466 bp, Glycine max
  unsure (1)..(466): unsure at all n locations
gcttataaacaatagtcagacttcatttttataaaatgtttatttgtttaagttnttttttaaaaaaacatactaacaaattaataattaagcagcttttcatgtgtttgtctaaattatttttttgttaagaaaacagaaaattgcttttttttaatagataaactttatctacttttagaaaaacattntaaaaacattcttaaaaaaattagtttagacaaatttgcccaaagtctaacgtacctattctttccctagttccctgccttgagtagtagttattttatttttataagccacatctaagtaaaaaaaagaatatattatgaattaaaaagtcagatntatgttntaaaaagaagtctataacaagtaacaagtcagacttaaaggccaaaatggatgntaaaaaaaattaggttacgtcaagcttaanaagaagtctataacaaataacaagtca

SEQ ID NO: 136369 - DNA, 257 bp, Glycine max
gacgatgcagatgcaatgtttatgattgtctactatgtactggagtcaatggcttcagcaagaaaagagggtattcagccgcatttaaagcttctgaggagctgagatcctagggccatgatccgggtcacgtcacctatgctgcagctatacatgcatattggcgtcttggcaatatagtaaagcagaacatgggtctttagagatggagcacaaggggtttgataaatgtgtgtatgcttattacaccatgattg

SEQ ID NO: 136370 - DNA, 282 bp, Glycine max
  unsure (1)..(282): unsure at all n locations
tgataaaatttttttcttccagaaagtggcataatactggtatggaacctgacacctgaagggtcatggtttcattggtgaactgctgtatggttctgtggtttggggttaccgcaccataacttaacaaatcaccaatctgcaattacctgggtgtgataatgacagggttggttgttgaagctcaatctttgcataaggaggcctttgtttccttctcagtctcgttggcaatagaaccggattacattcccagtattaantcaacacgcaaaatggtac

SEQ ID NO: 136371 - DNA, 494 bp, Glycine max
  unsure (1)..(494): unsure at all n locations
ctaagttctntccacgttntgtcttttgtttttttccttcctttttttaaatggggttntttctatggtcaaaaagtattggctttgcttattcatcatcaaccacttgattgggttttaattattttattccctaacaccaatgttcccttcctcttgaagctccctcaaaagtaagatatcatcaaccacagatcgacaaaagaatggaaccaaaagggttcatatgaagaacaaaatgactcctagagaaaaaaaaaaaaaaaagaataagaagaagtttgcattgtgcatttgtgctcatctggggtagaattatctgcttttttaaaaggagaaaattggcatacaatttcttatgtatcttttgtgtngtaatgataattaggtaggacatcaaatccataaaataaaaatttgtattaaatgttaataaaaatgttaaaataaaactcaagttttaattgaaaaacattaaaaatantatagaactt

SEQ ID NO: 136372 - DNA, 350 bp, Glycine max
  unsure (1)..(350): unsure at all n locations
atcaattggcaaaattntgttgtctaaagaatgaattggaaagatacttgaaatgaaaatcaaagccttgcttttatagactcttcatatctggtcaagagaaccattagaagagttatgacctttagaaaaacttaaaaacccatttaaaaaaaagttaaacactatttgaagagttacatcttttgatttgttcagaaactatcactggtaatcgattaccaaatcagtgtaatcgattacacaaagcttttttgtgaaaggatgtgactcttcacatttgaatttgaatttcaacgttcaaacacactagtaatcgattacaaaatcattggaatccattacaacat

SEQ ID NO: 136373 - DNA, 500 bp, Glycine max
  unsure (1)..(500): unsure at all n locations
ggggtctattgtttctgagtgcagatccctacaattagccatgtgttatgcatacaaactacacaattctttattggcataaataatgattccctctaactaaacatttgtagcagtctagcagttcaaattaaattgccacatagccaatggaagaaaagactgaaggttacaaggcttacctttgcttttgaagtagagaccggatgtggctagtcttctactaatgctggcttgtactgaacaacagtgggttacaatgctgcaatacgaacacagaatacagcttgtcattgttagacaagcggcctcagaaatattaagaagggggctgaattaagatttcgttgactattcctaatagaaaattntctctttcttaattattccctagattcaaatatttctttgttaacaagttactaaataataaatgaaggacaataacttgtggaaatggtaagataacaganagtaaaagagatantggaagagagaat

SEQ ID NO: 136374 - DNA, 436 bp, Glycine max
  unsure (1)..(436): unsure at all n locations
cttgtatttctgccttgatatctactaaattacnataatggctggctcgcactgtaactttttgttggggtttcagaaagaagtatcccgtctgcgtggtctagttggtggaggagaaattcaggataatgacatttcagttgtcagcttcccaggttctcctggatccttcaagagggagggtgtgcaaggatcattcagtccattaacctttggtaaaaggatatctcaggttgatattttttgtgtccaagaaatcattcactctcccataaccttgtttactgataagcatctttctctttttgcagaaaaaagactatgacattgcccttgttggggcctttacaagggaaaatgacatagagatggaattacaggcactaagagatgagattcaagcgtccatgaagctggtgtctttgaaaagccatat

SEQ ID NO: 136375 - DNA, 411 bp, Glycine max
  unsure (1)..(411): unsure at all n locations
agctntgatgttctatccaaagacaaattatttattattcttcagtctttcattctgatgtttctcatcaatatttgtcatggacaacttcttcattcaacaatattgcatttttttatgttgttgggtcttcctttctaatgtgtggcaacatatggaagttgaagaactgtcataacttagtcttctaattttgttcaagtgatgcattctgagtcttcttgaatcattctgaagntcaaaaactcaaagtcaaagtcttcatcattctgatgttgactctatatagcttcattataaaccatgacgttcttcatgtagcctttaatgaatcttctatataagggattgctattcagtatcttgccaagaactaatttctcaaagggaagcacagttcatcattctgat

SEQ ID NO: 136376 - DNA, 459 bp, Glycine max
  unsure (1)..(459): unsure at all n locations
ctaagcttaagtgaaaggatacgattnntgctgctctggaatttttgttagttgtgttctctatttgacttcaatagagagaaacctaataggaaaaaaggatatgatttttgtttgctctagaatagaataggaacataataggaaaattaaaagaaaaaggaaacctaacaggaaaaggaaacgttaacaggaataggaaagccaataaaaataatgaggaatataaaggggcacatgactcacacctaaattaaaggatatgatttttgtttgctttggaatangaacgtaataggaaagttaaaagaaaaaggaaacctaataagaaaaggaaacgttaacagaananagccaataaaaataatgaagaatataaatgggcacatgactcacacctatattaaaggatatgatnnttgttgctctggatatangaacgtataagaaagtaaaaga

SEQ ID NO: 136377 - DNA, 324 bp, Glycine max
  unsure (1)..(324): unsure at all n locations
atttatcatatttgataaatataatatttaataaaataaaatattaaatatacataatgagtaataatatatacattctactttttttgaactacctaattttagtgtggttcttgcattaatggttatggaggtttgaaaaatatgaattttcataaaaaaaataccattttccccatttcatataaataatgaaaaaataattaatgatttagattggtccatcaagtctcaactctaaacacataataaaaaatgttgttctaacaaaacgaanatcaatacaaactagaaaattcaaccccttcaaaagcagtgcaattt

SEQ ID NO: 136378 - DNA, 495 bp, Glycine max
  unsure (1)..(495): unsure at all n locations
taagctctntcaactgcacaaggctcttaatatttgattttatccttgnggaaccttcacccgacgaagacactgacaaaaacttatcnttctccttttggacaaagtatggcaggctgggggcaagtaaattttcttcccattagaccttggatgcaactgtgatcatatgcccatatcagctagatcttgacgggtattgaagccgtgcttcgtcttgccttaaatgttaaggagcgtcccaatcacactgtcacaaacattnttccccacatgcataacatcaatacaatgtctaacgtcaagatcagaccagtacagaagatcaaagaaaatgaacctcttcttccatatgcaactcttacttttatccttctttngggtcttcccaaattcagtattcaggtattgaacccgctcatatacctgctcaccagtcaacggtatcggcgcaatatcatgctcttgacttcaattaaaagctttttttagtcg

SEQ ID NO: 136379 - DNA, 243 bp, Glycine max
tatcgaaacgctcgaaattgaagaccgaagctctgagcaaattcaaacgacaataactttttgctcggatgtctgattgaagcccgtagtatatcgagaccctaggaattgaatgccgaagctctgagcaaattcaaacgacaataactttttactcggatgtctgattgagtcccgtaatatatcgagacgctccaactggaataccgaagctctgagataattcaaaccagcataactttt

SEQ ID NO: 136380 - DNA, 312 bp, Glycine max
  unsure (1)..(312): unsure at all n locations
tcggtcttcaatttcgagcgtctcgacatatttcttaattatatcgacatctgagtaaaacgttattgtcgtttgaagtttctcagagattcggtataccatttcgagtgtcacgatatattacgggactcaatcagacatccgagtaaaacagtgactgtcgtttgaatttgttcagagcttcggtattcaatttcgagcgtctcgatatattacgggactgaatcagacatccgagtaanaagctattgtcgcttgaatttgctcacagcttcgagattccattatgagcgtctcgaatattaccggact

SEQ ID NO: 136381 - DNA, 345 bp, Glycine max
  unsure (1)..(345): unsure at all n locations
nnagcttgtgtagtaaaaaaaaaaagctaattattatattttntaattattataaactaaactatatatatatatatatatatatatatatatatatatatataacttaaatattttaatatatataatattgaaatgaccatttattattttattaattataaaaaagataaaaattggccaatatgctatctcaactcatcacaaacctgcccaatttgtgctcgtaaaaattggagtggagcgagatcaaaataaggttaggcttaaattttcactttatacctttaccttaactcgaattctcactttatatttgattatttgttcgaatccatttagctc

SEQ ID NO: 136382 - DNA, 491 bp, Glycine max
  unsure (1)..(491): unsure at all n locations
ngtagctggttcgttgtattgtagatcaacatcttnttttctattggtattgngttatcatttgtctgggattatcatctgcttttctgtagtctctgagataacttcaatagatgcatgttaacttgaaactacttcaaaatgccaatcaaggtacttgtcactgtaacctttggaaaattcccctggatgaattgacgtttggttcttcaacacatgctgcctgtcatgaaccaactatccccaaaacttaagcttttggatgaagacacgtgaatggttntatattatatctctaagacgtccctcacacgagaacactntggacttgaagcatggataatgtacttgctcacctttgtgtcaaaattcaacttttcgttagaagaatgaaggtggaaaggattgaacgttcgaccacttagtcatagaggctctaatatcatgtcaaanaccaaattataccgtgaaattattttgtatattgctat

SEQ ID NO: 136383 - DNA, 343 bp, Glycine max
  unsure (1)..(343): unsure at all n locations
agcttgatgagactctanatcaantcatgtcttttttcatgtccaactataagagcatagagtcattcatcaagaacctatagatacaagtgggacaattagtcaaacaaatggctgaaagacccattatcagctttggagcatctntngagannancacgaaagaggaatgccacgtagtgtttactagaagccagaggagagcgcaagaagaagaagagaaagctgtatgagaccactctgaggaaggaaaggcagactaagaagaagagaaggaggaagatgagaagaagagggaagaagaagaagttgagaaaatggtcttaacctctaagaccaaaag

SEQ ID NO: 136384 - DNA, 491 bp, Glycine max
  unsure (1)..(491): unsure at all n locations
ntctcttttgtgcaactatctcatccttgtttcaagtgtttgtgctgctactggtggaggcacttgaatttggttgccagacctcaaggtgatgacactcacatttttcggattctgcacagtttgtgaaggcaatttttcagaattttgggactgagcttggttcatctgagtagccatctgccccatttgatttgtcagactctgaatggaggctcttgtcacttgctaaaattgcatattctggatggtcatttacctcactaactcttctaagaaaggttgaggaggagcctcagttgctggttgtctttgttgtgactgctgctgttgttgctgcattggaggaggaacatatgacttgctcggaccagcaacattctgaaaggaagggacatgctgttgttgttgtggaggacttgtccatctcanatttggatgattcctccaacctggattgtatnntgtgcttgaaagatcataattattat

SEQ ID NO: 136385 - DNA, 405 bp, Glycine max
  unsure (1)..(405): unsure at all n locations
agcttctgaagagtggagnggatgttaatantttatcttacaattcgaaagacgcatggggtataaacatgcctttgtgcttttaaccgaagtatgtaccggaaagcacaactctgctcttagaaaggtgaagaggatcttgcttgtgaaacacttaagaagcgtaaatcttatgcggcacattctcactttgttgaacagcttaatgctaatatttggttagaattcccacggcaggcgcttaataaagctgtttaatttgtggagcgtaaatgagtcaaatgaagatgtcgattcttactccttctttcatatggttatcaaatgatttggcaatatgtgctcctggcattgctgaatagtattgaaacatataatgctcgctattcttatattcccactcct

SEQ ID NO: 136386 - DNA, 378 bp, Glycine max
tcgacgacgacacaattctccaccgtatcagtatattattctctcatcgatccgccgctgctgcctgcggcggctatctcctccgtgccggagattactccctgcgtcgacgagaattctccaaggaggaaccagaaccatgcaaacgtgaattcagaggattgttttagggattttctgctgaagagatcgtactcgttcggatttgaacggagtctggcgtcggagaggatggtgatggaaccggcgacagcgtctccgtggctggaccggagagggagtactagtttctggagcaagaggccttctccgtttggatcgttggggaagccgagggtgttttcgtttaggtattatataggaatgaagtcaccgttc

SEQ ID NO: 136387 - DNA, 354 bp, Glycine max
  unsure (1)..(354): unsure at all n locations
ctcacggggtggaggttgtgccatgttctcagaatgtgcaaaatcagaatgcctcagaatcagaatgctcaaaattataatgctcaagatcaggatgttcaaaatcaccaataacagaatgcacagattcaccagtaatggaatgctcagaatgatcaaaaggtataaaatgatgcctaactaatctatgaaatgtcctatctatctcacgatcaaagggttgtaagtcagatggattgcctctagtcatacactacattcagcatgcacacaactagtttgcctattcatgtaataaaggtgtangtttgaactacagctacccttcaatgatatccaaatgacttgaaattt

SEQ ID NO: 136388 - DNA, 479 bp, Glycine max
  unsure (1)..(479): unsure at all n locations
tatgtattgatgaatgcatacctaactatagaagttgtttatatttgataaataccaagtaagggtaaatgtaagacattggatgatccatcattggatgacccatacatctcttacggtttggattaaaacaaagatataaatttatgttaaccattttgttacatgtaagtcaacacgtttaatgactggaaacaacactagaagaaacctatccattactagataactcgtttactagaagcatgaagcacttgtccaatgcatccaaacaacaagtggaataagcatttatttgaattatctatntactcccatntatatgattctatntaaaaggtgtcataccctaatttcgtcctgggatgtttgtttaccaccatttaaattcttgccaaccgagttgagatgcttaacactcttcgccatgtaatccataacatttcgcgatgtttcggaaggaaatgagcacaatacat

SEQ ID NO: 136389 - DNA, 377 bp, Glycine max
  unsure (1)..(377): unsure at all n locations
agcttgctgacttccaaatataagtattttttctgcacactaagntactcttctctaccaagcaggcttttacacttcaacatttcattgaaatatttccaaccaataaaaacatgaagtttcacttgtcttgtcaaaacttgaacaattgcacaatcaaatcaaatttggcttctcttattgaagtaatagtcttttatacagtaagaagtaatagaatgacaagctatattattcatttaactataatatttttttatcacattgggcaacattcaatgcagaaaaaagacaaaaaagatagttttattcacaatagaaaccatttacatgggggtgttgtaagttacagaatcatatgaaacaattaaaaatat

SEQ ID NO: 136390 - DNA, 491 bp, Glycine max
  unsure (1)..(491): unsure at all n locations
ggaactccactcatccataaacctatgtttaacatttgttatgaaaatttctaatgatgtatatcattaggaatattaattattactcaatgatatgaaatttacttacatcattgtgttggatttctcctacagttactttttgttccactttttcttcgtacaaatatgttcaagggaaatccggtttgctggaaagcgcaccagattgtcaagtatttaaaattaaaacggatgaatctgagtatcgaactcagggaactagtctaagactgggttaaattcagaaataagacattgttgaaagaaacattgataattgagtctagcataaaaacaataaaaatgcaagtaagtaaaagtgacagcagtaggtagaagtgttgggtctttctaacagaccaactgatgcatataaggatgtttctctaatcaatcatgctnnttgtgttctatgtgtagcctanattactaaacctcgatcccctagt

SEQ ID NO: 136391 - DNA, 479 bp, Glycine max
  unsure (1)..(479): unsure at all n locations
tatgcgcacacttctntacgaacgttcacttgcacaagatattcttatatctaagaaaaatgcacccatatacaatcaatgcaccttcgttacctagattattcacatgtacttccaaggtgtatttgttacctacatcacacacatttcctttgctaaattcacatacatgcatactctaagcactttggctatcaaaaattgcatacgtgcacatcttggtatttctcatacctatacatacacaaacttcatgatgaatcttgactatctacacaataaggtgctacatttcatgcttttttcaagtgttattactacctaaagccgcatgcaaattgaagtatatattctttngcttactaaaattgtattcaaattaaaaggtattcttgtaatgtatattctgtacataacatgcaacatatntatagaattttgtgagacaatttgactacaaanaattatatgtacataca

SEQ ID NO: 136392 - DNA, 370 bp, Glycine max
agtgcctcttaatttgaagcaatatgttacattcccataatgtattttccctgacatttcctttgccttgatacttcatgaaaatcaagttatgaaggagagtgcttgtttctgccttatcgctttttgcaaagcgcttttcaatttcagcaaggaattctttggcactagttatatcaactaaaacagtgcccctaaagacctcaggaatgccatgcttaatgatcataagactcatgtaatttgagtgatcccacttctcatgaagtttcctctgtttagaggtactggaattcgtaggagaagggggtttctcaatccttaatgcaaggtctagatccatgcagccaagaacacattgcatattctc

SEQ ID NO: 136393 - DNA, 464 bp, Glycine max
  unsure (1)..(464): unsure at all n locations
ctcccattgtgaaaacctagccgtcgttcccctctcttttctctaacgtcgtctcctctctcaaggtaactcccaatatcgttcattaacgctnttcatgcaggagcttgtgctgtgggataatcaattgaagcggcattttctttgcccattggtacctccatccatttcctcccttcactccttcccttatttacttaaacagcaatttgatgatgttgtttctttgtgtcgcagcgatttcgcggaggttctagacgtgtatgagaggggagatgggctctactagtacaccgaacgcaaaccttcctccgaagccatgcatttgggacacgtgattccctntatgttcactaagtgagtgagttctttgcgtttntcgattntaatttgaagaaatttgaaatggaatttgactcttaatttgtgaatctagtgtggtgttntggaaactatgagttgat

SEQ ID NO: 136394 - DNA, 293 bp, Glycine max
  unsure (1)..(293): unsure at all n locations
cagcttacttgaaccttagaaagcatacaatttttatctattattctttttcgagaatgatgatgaaaacgggaaaggtcttggtgacaaggttggctcctcctgtttagctaatacttaattacaagaagtaattacacatgcctctctcgaggtttaaggaaattacacatgcctcttctctttttgtaaaacctacacatgtctcccatgaggtttaatgaantttctcactcttctctactgttattcagatccctacgccattacctcaatgaagtatcttcttctta

SEQ ID NO: 136395 - DNA, 476 bp, Glycine max
  unsure (1)..(476): unsure at all n locations
actaagctactaataagtnttccctgagtgatgtatttggtacttgtctatatatataactcgtttaggattgngaacctcagaagagaaatcagtggattcttacttttaaaggtgatagagagttattcaaagagcataaggacctagaagcacttcatgagttgaagggtccaatgacaaggtctagagccaagcttctacaagaagagatgaccaagaggatcaaggatggactactcatcaaaggcaaggaaagagaaaatcacaaggagctaaattggagcacattgcagattgttgaatagcttgcttagtcgcaccagctcgctaagtgcaattccacaattaggcttagcgcgaatgtctagcttagtgcaattccaacccaaggagaaattacgcatagcccgagatattcagcttagtgcaattccaacccgaggagaattgggcttagcacaagatgtctagct

SEQ ID NO: 136396 - DNA, 445 bp, Glycine max
cgtgttcgtactgcaaggatctgagactggctttttttgtttatcccataactccgatatggctcccgattgcactcagctgcataatatgttcaagaaagagggcgaaacctttaaagaatacgcccaacggtggagagatttggcggcacaagtagctcttcccatggttgagagagagatgatcaccatgatggtagacactctgctagtgttctactatgagaagctagtaggttatatgccgtccagcttcgcggacctattgttcgccggggaaagaatcgaggtggggttgaaaagaggacagttcgattacgtttcctccacgagtgcgaatgccaaaagaatctgggcaacaggggcaaaaaggaaggaagaagatgtccatgccgtctcttaacgcctgcgtgggtcaaaccccgcagacactcatagtaccatc

SEQ ID NO: 136397 - DNA, 284 bp, Glycine max
  unsure (1)..(284): unsure at all n locations
agctcgtaagctatgatggctatgttcttttgttctcctacacatnctcggaaatcacgaatntactatggaccatataggggttatacatcaccttgcgtatgtgcgtggaatcatgtcacaaacacatggctggtgaatgagtctcttgagaagtatctccatgaggcatcttccttccagatgtccgatggagaaatgatcatacctctagatgatgtgtcttgtctactgcacttgctaagatcacgacgccgcatgatctatgccatcactctttgtca

SEQ ID NO: 136398 - DNA, 455 bp, Glycine max
  unsure (1)..(455): unsure at all n locations
tactaagcttgtaaacacatcctcaccatattcatttgctgttaaacttattccaacccaccagagaattatattacttttcttcataacagcattttcagggaaatgtaagagagacaacaagcaacgttttccaacatgatcaagtttgttacaatttacctcaatcatttccaactcctcacgttgtaggctcgaagggagttttcttgatgactgagaatcctctatattagtactttggatttcaccagcaggcagcaacttttgagttgattctcttattctcttgcgaatgtgtccctcctcttctgtcaacttatttatgtttttggtgcgaagatagccatccaggactgttaatgtgtcaaggagttcttcttcatctttcttcactaaggaanacaggtcctttatcctaatcaactcagacttcanatcattcagaatcactt

SEQ ID NO: 136399 - DNA, 227 bp, Glycine max
atcaactcaatggaagcaccccgcggccaagtatttgaattgcagcttgatggcttctccttttgtgtacctgggtatacccattggggccaatccgaggcggcgtagaatgtgggattccaatattcacaaatgcgagaaaacactctcaaattggaagaaaaggcatatctcattcgggggacgagtgacactgatccaatcctggctaactcccatccctatcc

SEQ ID NO: 136400 - DNA, 472 bp, Glycine max
  unsure (1)..(472): unsure at all n locations
gggttcgaggtacttactcgttgaagatcgaagaactatgttgaacgaatgaagaacgtcgaagaacggttgaaacctttgcgaaattcctcacggaaaacgttacggaaacgtttcggaagcgcctcggcttagattttcttcacggaaacaatttttccaagcaaattcgaaagagagagaagtgccaaaggggctgaacccttttcttcttcacttcctcccctatttatagcaaaataggggaggtggttgccgcccagctcgcccaggcgagctcagctcgcccaggcgagccaggttgcttcctccagaagcaacagcctactggaggaatattctggagggcccaagtgggcctgggtgctatttgcacccccatttttactaagtacacccctctgcttttttttggtgatctntttcgtaagtacggaacttacaattcgcacgatcttgttttttcgaatgt

SEQ ID NO: 136401 - DNA, 298 bp, Glycine max
acgaaaggtgagactaatttagcccaagctctgtactcagaaccctcttggtggactagacttagaccaaacagcattattggaacatcatatttaaaaccaaaacttaatccgcagataccctttggaagactaagggtcaattttgcttcactcaagttctatgcaacaatacatttcccaaagctaaagtaacctaactatgcacacaaaagggtgatcagaccaagagcatgcggaatttaagcactgtaagaagcattggacaccacaaacacaatcaatttgaatattaaat

SEQ ID NO: 136402 - DNA, 489 bp, Glycine max
  unsure (1)..(489): unsure at all n locations
ggggagggatgatggngacccggtgttgagagaaactatgtatatgggctacgtgggagtacgtgagctcagttggaggtgggcaacaggggatggtgggtttatgcgcgatttgtggatgtggaaaacttgtggtgcaccatcgcccgaccgccacctagtaccacatgtgatgggtaccccataatcctacaagcttgagaggaggaagtgtagaagggtgaaacttcctgcttttattcgttggccacagagtggtacctggagatatgtcgcgggggtcaagagaccttggggacgtcaggtggggtgctattgcccaaaaccaagcttgaccaatcccgacccatcccgggcatagtcggtcagtgagaacctgtgatgtacctaaacaggcgagctccttggagtcaacagattaaaggaacaaagaccacacagcaaggaggcttgtgtggtggctggcaactgtgaatctcgtgtgatata

SEQ ID NO: 136403 - DNA, 325 bp, Glycine max
  unsure (1)..(325): unsure at all n locations
ggctgcaagcntgcaccaattgggaagcangaaataatatctctaaacatgctaacacgggtgtattctttctaaaaaagcgaaccaatctgccggcgaaaagcatctatatatatgaaacacagaaaacgctaatatatgacacatgagcttgctttcacatactctcccaattgttacacaaagtatggcatttttaggagaaactatcagaccgacgattgtcaactcaagggtgggtttcattttttcataaggatcgaatatccacaaagatagtggggttcacttctaaacttgcacttcgatgaccattcgagtacca

SEQ ID NO: 136404 - DNA, 474 bp, Glycine max
  unsure (1)..(474): unsure at all n locations
ngcttctctngcagcacaacatacaagatatatctggttttactcaccatcatctattctttcccacgaactccttatgtaaaagaatgagctcccttcctttaggctctcatagnctatttactatggatataggttgaccctaccaattgaatgttctctttttccttccatatattcaaggagagtctttcggtgatgctgaaggctgacgtgccatgatcatcctcgctagctatagctcatcttccgttttgctactaaaaaaaaagaagagaacatgacgagaaataatagaagtgtatcattataccctctagtgtatgaaaagcgaaatgaacaataattgtgacaggcgggaaatgaagaaaaatgactccatatgctctntcatctctcattcttctactcagatgtcgaaatcagacaagaataagtatataaacttcatccacttcactgtccacaatacac

SEQ ID NO: 136405 - DNA, 346 bp, Glycine max
agcttggatttccttttagagggaatctattctttttaatatggagccaaacccagtcacccttattaaaaactagctcttttcttcctctattgcctttagttaaatacaccttgtttggttctctatttggttcttaaccctctcatgcaacttctttacaaactctgacctaaattccccttctttatgtataaaagaagtgtctagtgggaggggaatgaggtctaacgagttaggggattgaacccatagacatcctcaaaaggggactgcttggtggttctatgaacccccctgttgtacgcaaattctacatgaggaagatactcatcccaagacttat

SEQ ID NO: 136406 - DNA, 469 bp, Glycine max
  unsure (1)..(469): unsure at all n locations
ngctctanatntacattgatgtttgtatttatgggaggttgttatatgccatttttgctttaagagtagtgtcccactggtaaaattaactttccaaatgtttgccttcgcaggaatggccccgaggaagcttgcctcanagaggtccaggaaggacaaggcggccgaaggaactagttccgctccggagtacgacagtcaccgctttaggagcgctgtacaccagcagcgcttcgaagccatcaagggatggtcgtttctccgggagcgacgcgtccagctcagggacgacgagtatactgattntcaggaggaaatagggcgccggcggtgggcaccactggttactcctatggccaagtttgatccagaaatagtccttgagttntatgccaatgctnggccaacagaggagggcgtgcgtgacatgaggtcctgngttaggggtcagtggatcccgttcgatgtc

SEQ ID NO: 136407 - DNA, 429 bp, Glycine max
  unsure (1)..(429): unsure at all n locations
tctactatttagatcggctaaataaactaatctctctcatacttattacaanggactacagaactaacccactctaacttattcacactttaagactatagctagatgtgagtacatccaaacctacatacatgttgttgtgaaaattgttgggtttattaactatataacatctctttatgagcctagtgttagcttcgggtagatccaaacctatgtgtatattgttgtagaaaatgttaagttattcaacttttctacactgcgtatacatataagcaatgtaaaagacttgaaaagcctaatactttatataacaatatatatgtaggttcagatgtatctaaatctaactctgaaccaaataataacatttntacatcttactngttcgaaaaatagaattcttataatgatagtgtgaatatt

SEQ ID NO: 136408 - DNA, 307 bp, Glycine max
tctcaaccaattgaactataaaaaaatcatatctttggcacttgggtataagccttacttgggaacaaccacatttttggttaaaatatggttttctattttgaaaccttattataacatgaaattgtcataaaatgacaatttggggtggctttaaaaatcttaagaaatcaattacaaatattttacaagatcaacgacacaattactatttttttagtttagagacctaaataaaaactcctaaatagttgagggaaatataataaccttgaatgaaccaaaacaaacaaaatttcacatggat

SEQ ID NO: 136409 - DNA, 454 bp, Glycine max
  unsure (1)..(454): unsure at all n locations
ngctctanantacattgatgtgtgtatttattggaggatgttgtatgccgtttttgttttaagggtagcatttcttggtaaaactaactttccaaatgtttgccttcgcaggaaatggccccgaggaagcttgcctcaaagaggtccaggaaggacaaggcggccgaaggaactagttccgctcctgagtatgacagtcaccactttaggagcgctgtacaccagcagcgcttcgaggccatcaagggatggtcgtttctccgggagcgacgcgtccagctcanggacgacgagtatactgatttccaggaggaaatagggcgccggcggtggacatcactggttactcccatggccaagttcgatccagaaatagtccttgagttntatgccaatgcttggccaacagaggagggcgtgcgtgacatgagatcctgngtaaggggtcagtgga

SEQ ID NO: 136410 - DNA, 429 bp, Glycine max
  unsure (1)..(429): unsure at all n locations
agctnttgcggattggtcttcgccagtgatattatcgatgtgggtccgaaaagaggcaaatttgatcatcctactaggacgactgagaaaactggggcaaatgaagagggtgagaaagagggagaaacccatgctgtgactgccattcctatacggccaagtttcccaccaaacccaacaatgtcattactcagtcaataacaaaccttctccttacccaccacccagttatccacaaaggccatccctaaatcaaccacaaagcctgtctaccgcacttccaatgaagaagaccacctttagcacaaaccataaaaacaccaacaaaaaggaattntgcagcaaaaagcctgtatggttcaccccaaattccgtgtcatatgctaacttgatccatatccactaatattcaatgtagccataccccca

SEQ ID NO: 136411 - DNA, 503 bp, Glycine max
  unsure (1)..(503): unsure at all n locations
ggacctataaaactcagcttgaggattatggngtacccatcacatgtggtactatgttgcggtcgggcgatggtgcacaacaagttttccacatccacaaagcgcgcataaacccaccatcccctggtgcccacctccaactgagctcacgtactcccacgtagcccatatcctcttttctctcaacaccgggtccccatcaatcctcccaagctttcacaacatccaagcaaaacaaaattcaaacagcacaagctattacagccaagcaaaacagagcanaggcagaaaactctgccaaaacaccaaccaaatcacagcttttctcacttaaagaccccagtaacaattccttcgttccggttcattaaccgttggatcgactcgaaaattntactggaagtctctaatacttaagcctacattgtgaaccgtgggatctactagcanacatncagaactcattctgtactactctntccacagccaaccacacacaagca

SEQ ID NO: 136412 - DNA, 202 bp, Glycine max
gcgccccacgcggcacgacttttctacagagacaaaactggcaaaaagagccccagcgccgcaaaaaaagttctatggacaataaccgaacccctgccgcctacaaacgcaggaccgcccccagaaccccaccaacaagctgcccgcccgctcaccgccccgaaggaccgtccctgcccacaacccacgaccacacgccagc

SEQ ID NO: 136413 - DNA, 396 bp, Glycine max
  unsure (1)..(396): unsure at all n locations
tggctaaatttggtaaactaacacttttctttgttgaaactggagttgctgcacatgatgtcccacgctatgtcaaagaatcatatcgggctgcacaatgcacaaggcaagaacaaatggtcaatgaaaaattgaagctgccggatccacgatgtccgatacgatgtccatgacatcttgcccgaatatactggacacataaatctgttatatcttaaacagattaatgtgcagntagcaacagaattggcgatctatctttaggaacgaattaaaagataattaaagttcgaattacaaacttgaatagtttgtcatggattaatattaaagataaaactaaagatcagcttatctctttatctttagtgcagatttcatgaaatgaagatctct

SEQ ID NO: 136414 - DNA, 313 bp, Glycine max
gctttgagccaaaatcctgactcaccatattcttttaccttttgtgagaatgtcaatccttaccctcggaagcacaaaagaatagaagggaaatttccaatcaaagaaaagagaaggaatatttcctatgaaagacgattaaccaaaagaaggaaattccctatcaaagagtgggagatagaaacagaaaagatagataattcccaaccaaagaatgggagaaagtaaaaagggaatgaagctcctggtcaaagaaaccaaagaggtctttggaccagatagtatctgaacagttcataattgtcaccaaatg

SEQ ID NO: 136415 - DNA, 382 bp, Glycine max
ctctaaagcctatgcccaactatagagtcttttattccgtaaagggttacattatgcttgttgcgtaaatgccggtgcgttcctccactcgccaatttcccagctggaaatcatgagagcatggtcgtaccaaatccaaagtactcggaatatcatcttcgcatatcgcgaacgcttgaactttgtctcccgaacccgcacttataaagcttctacttatgtggcatggcgggcttccttcactttcttgtctgcaacgcgaactttgaccattgttcttccttcccgcaatgcttcttttcatgtctgcctgagcgggcttatatcctaaaccatacttcccacgaattccttgagtatttatcaggctagttatgccgcc

SEQ ID NO: 136416 - DNA, 399 bp, Glycine max
  unsure (1)..(399): unsure at all n locations
ctgcaacttcgtactactaactttttttttacaatgagataataaattctttcttaaaaaaaagatgcctccatttcgcttgctttaaagataaatgttttttatttgaaacattttaacttcaatcaaacattgaccataataattaagagtaatttatctattattattattattattattattataaactaaagcatgaattgtaaaatcgtcacaaaagtttctctttcacatcttatcttaagcattaattaacattaacaaattaaaggtaaacaatctttgcttctccttttctaactcttgtattttttgtaactcttgtattatacaaataataaggaattagaatttgaaaatattatttgntacgaaaaatatctcatgaaaagcatg

SEQ ID NO: 136417 - DNA, 450 bp, Glycine max
tactaagcttataccccatcacatggccagagaagcctttttttttttattgccggcagtcttgaaggtgattgtggtggtgccactgctgtctgtgcttaatgaattgcctgtggtgcagctcttgtaatcactttctttcacttcgtccactgtgtgaccagccccataattgaaaactgtcacacatgaatataaatgaggtgcctctctggaatcatctgagtgctttaaagtgtgctgaaattatgtatatacacgaatactaaagtatgaaattattaatttttggttaagatgtgtttcaagttgcttaattgttcattttttttttcttttttaacacaagattgacattttccaacaaattatttaatacaacagacttgaagattatcttataagtaatgttgtaagtcaaaattatctattcatcatactataccatat

SEQ ID NO: 136418 - DNA, 378 bp, Glycine max
  unsure (1)..(378): unsure at all n locations
aacccctcaattcaatggcttttctaggtttgaaaggtgaagtttacaatgaggtaaatttgaagcaaactctcacctcacaccaatccataacatcaatctaaacttgcccaaattggatttacacctaaaattccaccaaatcaaaatttgactcttcaacacccaaatttgccctagaaatggctctntgttcacttggtcatnttgttttctccctagcacagtccaagctttctcccaagtcctaaatgacatttcaagctagtattaactcactttaacctccatttaccacagaattcagacttaactttccaactcttaaaagcctactctttttccactcataacaccacattctcacttttcaaccct

SEQ ID NO: 136419 - DNA, 393 bp, Glycine max
aacagaacaattatgacctctccaacaacaagtacaatcccacgtggaggaaccatctcatccttaaatggtcgaatccttcacaacagcagcagcaacaacaaccttattttcaaaatgttgctggcccaagcagaccatacgttcttcgatcaatccagcagcaacaacagcaacagccctagaaacagcaaacagttgatgcccctccacaaccttcccttgaagaacttgtgaggcaaatgactatgaaaaacatgcagtttcaacaagaaaccagagcctccattcagagcttaactaatcagatgggacaagtggctacacagtttaatcaacaatagtcccagaattctgatagataccctctcaatctgtccagaatcccaaaat

SEQ ID NO: 136420 - DNA, 314 bp, Glycine max
  unsure (1)..(314): unsure at all n locations
agcttnctaataggtgtgctttttcaatcttatttgcaacctacaaaatcaaagtctaanaagggtgttagatttaaggaggtaccttatggatatcacaaacctacattggttgtacctttatggtactgttaaaccctaatttcatctaggtttaatgttttatcattcggatatgacgttttgatcattgctaatcgaattacattttttatcatcgattgtagtgcaaggtcaagggatcgctcaagttgatgtttgattgtcatatctgggaacaaaaactacaaagaaaggggggaaaatggccattt

SEQ ID NO: 136421 - DNA, 289 bp, Glycine max
ttttgaaaatgaaatgcgcggctgctactgggacatcaataatgcaggctatgggtggactgctatcaccattacaaatctatgggccttggggtgcatgcggagatatagatgaagtgagcaacgccgaagcctatgcttcagacatttatttgtgaacaaacctgaagaaaaccagcagcaactgacatgattggatgagttaaacataccaatcctgccatatgagatgaatgatgaagatcgggaatgggataagcctgcacagcaacaacagaacgtgcctaca

SEQ ID NO: 136422 - DNA, 377 bp, Glycine max
  unsure (1)..(377): unsure at all n locations
gacttcatcctcaatgtggctgaaactagagtcattgtatatgacaaagtcccttgcaaatcgactatgcttgaagcaacaattgtactccttcaagaagacagagtcaagaacagccactgaacaattggctgatttcaacaagattcttgatgatttggaaaatattgaagtaaagcttgaagaggaggataaagctcttttgcttttgaattccttaccaaaatcctttgaacatttcacggatgcaattctttatggcaaagatcaagacattgccctagaagaagtccaaacctcaataaggaccaaggagatgcaaaaacagcaagactccaaatctgaggataatggtgannagcctgatatntcaaggg

SEQ ID NO: 136423 - DNA, 231 bp, Glycine max
  unsure (1)..(231): unsure at all n locations
atttcttgcacaaattctgccttgtcattgggataatatggaagctgacacttatcaatccaagattactccagtnaggtgaattgagtctgattatatatcaatcttgaaatgtcattttctttcatctatttcatttcagatatatattctagatgaaatggatagtatgatcatttctatttgaattatcataatgttgatgaattcaactaattgctattaacatta

SEQ ID NO: 136424 - DNA, 292 bp, Glycine max
acaataatatacacatttattttttcaaccaccatatattccgaaccctacccacgaaattaagaaaaaagaagtcacccaacctgaaatttgatagtccctcgtagccacgcacttacgactcaaaaagctctctttacgattgtggcaaaacgggactaaagtgaagctttgatggagcctaatgggaatgaggagaagaaaggacgcggggagaagaagcgttcgaaaaaaatgaggctgtcgaagagaaaagcgtggggtaaaaaaggggacggtcgtattatgaaga

SEQ ID NO: 136425 - DNA, 234 bp, Glycine max
  unsure (1)..(234): unsure at all n locations
ctatacaaaacatcttgccaaacaaagtccggttagccataactcgcctgtgttttttcttccatgccatatgtagcacagtcgttgatcctgtcaagtttgatgaacaggaaaatgatgccgcaattatactgtgccagttggagatgtattttccccctgctttctttgacatcatgattcacttgatggtgcatctggtcagagaaatcaaatgtngtggtcttgtttatt

SEQ ID NO: 136426 - DNA, 388 bp, Glycine max
tcaagcttgagccaaaatcctgactcaccatattccttgacccacggtgagaatgccaatccttaccctcggaagccaaaaaaaaggagaagagaaggaaaatttccaatcaaaggaaaaaggagaaggaaaatttccaatcaaagaggaagcataaaaaggagagaaggaaaatctccaatcaaagagaaagaaaagaagaggaaaggaaattcccaatcaaagagtgggagaaagaaaaaagaaaagaaagaaaactcccaatcaaagaatgggagaaagaaaaaaagaagaaagctcctggtcaaagaaaccagaagaaatgtgccgagaggtccttggaccagacgatatctgaacaatacagaattgtcaccaaatgaacaaa

SEQ ID NO: 136427 - DNA, 407 bp, Glycine max
  unsure (1)..(407): unsure at all n locations
cttgcttgctttattggaggtttataataatccatacggttttangtcttagagacttaatttcttcttgttctttggtaagggagtattgtatcttcatcttcttccaccaatcttcatctcttaagctcatttttctcactactttcttgttttggtaaaaaaatggtggtttaggtgttgctacacactaaatgaagctttcttgatccacttctcattccatttccacttccaatccctacgtatggagaggtttctactctttcccataagccatgttgttttctatctactttgggttagaatgggttattgggattactattgtgccattgggctcttgaacttcctacaaaatgggaaaatgatgatttttcaagtgtggcctacacatatgttaatgg

SEQ ID NO: 136428 - DNA, 233 bp, Glycine max
gaaaaaaaaaggaaaagaaggaaaaggggaagaaaaaagcgggaggggaagagggggaacgaaagaggggagaaagaagggaagagaggacgaagaaaagggcagaaaggggaggggaagaacggagggaagaaaagaaaaagggaaaaaaggaaaacgaaagagaaagggggggaaaaaagaaaagaggaagggaggaaggggagaacaggaaaaaagggagggggaaaaag

SEQ ID NO: 136429 - DNA, 227 bp, Glycine max
agaaaaaaaaaagggcacgggagaaaaaagagaacagggcggcagcaggacagaagcgagggaggacaccaaaaagaaacggcggaaaacgaggggaggagggagcaggaaggagggggaggaccaaaaggagaaggggaagggaaagaaaaaaaaggcgggaaaagaacagggaaggggaaagaaaagaggaaaaaaagagggggggcggggagagagagaggaag

SEQ ID NO: 136430 - DNA, 391 bp, Glycine max
  unsure (1)..(391): unsure at all n locations
catgcaagcttaagtttacgagtngaaccgaccctctctggcctctttattttccctcctttcagctgaaggttcatgttcatcgtatctaaataaataaacaactcacaaatcataaggtattaatttgacgttttgtccttttaatcgtacatggcacatttattccctttgaaaaaggtattgttatttataaaaaatcaattatattttgaactctatttatacacattagcaattcctcacaaaaatgatcataatttgacaccagacaacactntcttgaattcaagaatctagaggatcagtattgcatatggaaatcctcctgaataagaatttttttacatggcaaaaggaaagctagctaggcacatatggtgataaatat

SEQ ID NO: 136431 - DNA, 449 bp, Glycine max
  unsure (1)..(449): unsure at all n locations
cttaatttcgcccnattaattgcagaaaatataaatggatttgttatttttgtataaatataacataataatatacatctgagtgtgtcatttcagtgtgtcatctcaaaatatatctgagagtgggctacagcaagctatcctcccaccaagaggttggaattcctatgattccttttgctggacaaattctgaagacgaatttttacaaagtgctgaaatggtttctcaacgtctcaaagctcacggatatcaagtatagatactgcaaagaacaataacttatggatgatttatctgtgttagcagagctttggttaaatatggactgatttctctcatcaactcttgagttngtcgtgggggttacctctggatatgaaaaaagcaaggtgcttaacctgttctcttggattgacctgatcgatgaatgggaaggatgatccctg

SEQ ID NO: 136432 - DNA, 305 bp, Glycine max
  unsure (1)..(305): unsure at all n locations
gagctattagtgcatcttgtgatgtgagctcaagaagactcttctttgtgggtgtgaaagcttgatcacaaaggataacatggtcactggctgccatgntttcaatcaactccatagcttcatcaagtttcttcagtttgatctttctaccattggaggcatcgagaagttgcttataatggggtcacaagccatcaatgaatgtgtttagctgaattgactcacttnacttattggtaggagtcttccagagtaaaccatgaaagcgttcagagccttactcattgattcttccgggaatggtg

SEQ ID NO: 136433 - DNA, 370 bp, Glycine max
  unsure (1)..(370): unsure at all n locations
agcttcccaattacggagagttataatcctcttttggttcttccttgnaggggggcggcttccggcaagggcaccggatcgcacaagtaatataaaacagtaagaatcgagtatcgaactctcggggaacttgtgttatttggtaagctatttcagcaaataagtgtttggtgtgtaaagataagtatgaatatgaacaggtgtataaaatgtctatgcaaaaagaaagaaaatcacgccagagaaatgatgtgtaaaaacaagtagaaacacattggtcttcctaataggtgcctgatgctgaaatgatattctctatctaacaatgctcatgtgttcttatgatgtctcctgagatactaaaccccga

SEQ ID NO: 136434 - DNA, 337 bp, Glycine max
aaactttaaccctcattttcttcttcttgcatgatggcttcaaggaggaaaaaatcgccattttcatcttcttccaaggtccatagtagtgtcttgagactccttctctcatagctttggtaagaaggaagagatcaccattttcatcttcttccaaggtccatagtagtgtcttaagactctttctctcaaagctttggtaagaaacttttatatcttttcttttctactcatttcttcatcatgtttgtgtaaaacccttatgtttggttccaaaatttgtttttatactttgaagctaagacttaagatctgaacctttcttcttgacaatttc

SEQ ID NO: 136435 - DNA, 422 bp, Glycine max
  unsure (1)..(422): unsure at all n locations
gacctcagagncacctgaggcatgcaagctaacanannngaagttatctagattagattagctgaaaccaacccaactaggatgccatggagatggccttctgtaccacaagttggtatatagccccagtactcatattttttcaagttccacaatcgggcaaaccaatccaaaacaccaacttcaaactgccgggagtggacaccatagttgctttcaataaatggatctccaaggttgtttatggaaaagtgctgaagttgcgtgagtgcaccataatcgaaatccaaattataggggtagcctggaataaattnttcataaattaagtacgaagtagacttaactccagagggtagtcaaagaagtatattggcatcaaaagttatgcaaaantctaataaaattatttccttaatgga

SEQ ID NO: 136436 - DNA, 402 bp, Glycine max
  unsure (1)..(402): unsure at all n locations
tctacgtttcatgtgtacatacgaacccaagttttgtaaacttgtttggggatcaatttggtcctcaactgcatgacaataacattttatgattcctatctattctgtaagttttcagtcgtctttattcttatggacagtactcgtgtagtggcaaaatgaacagcaaaaatggaaagggaagaataaagaacgaaaatttcaatacacattttcttgtatgcataattgtgcacaattatatatttaagtggttctgtttgagtagaacaagaaaaattntaacaaaatattagagtataagcatgaggtggtgaaatttcacattggatagaaacatataaatatataatgagaagaatgaactgatgatcctggctaatatgtaaatgtgatgtcatc

SEQ ID NO: 136437 - DNA, 454 bp, Glycine max
  unsure (1)..(454): unsure at all n locations
agcttncaagaatcaagatctttattcaagtctcaagagtctagaatcaagagaagaattaatcaagaatagtatgaaaaagttttttcaaaaactgagtagcacatggatttttctcaaaacctttttaccaaagagtttttactctctagtaatcgattaccagattattgtaatcgatttccagtagcaaaatggatttgaaaagttttcaactgaatttacaacattccaattgatttcaaaatgttgtaatcgattacaatgttttggtaatcgattaccagtgtgcttgaacgttgaaattcanattcaaatgtgaagagtcacattctttcacaaaaaagctttgtgtaatcgattacactgatttggtaatcgattatcaataatagtttctgaacaaatcaaaagatgtaactcttcanatagtttnntttttttttactttttc

SEQ ID NO: 136438 - DNA, 337 bp, Glycine max
acgattgtacgagctttttctttttttgttttcgtggctattacgagacatctttgcctatcaatgtcaagttaacgataactcgcccgtgccttttcttgcattctatttgtaacaaaagtcttgatccattcatgtttcatgagttggaaaacgaagccgcaattatactgtgccagttgatatgtttatacccctgctttctttgacatcatgattacatcgatgggcatctggtcagataaatcaaatgttgtgccctgtttatctatggtggatgtacccgtgttgaccattcctgaatatcttaaataggtataacaagaatctatatcat

SEQ ID NO: 136439 - DNA, 145 bp, Glycine max
aagcatacataatgaaaaataataataagtaattgaattataatcatgcttgcaaaatagaataagcaacttacattaaaaaaaaggattggtttgcaagtatatgacgatgacatttgattatgcttacgcttttgaacatttg

SEQ ID NO: 136440 - DNA, 335 bp, Glycine max
tttagcttcaatgaggtcctttaatggtgattttccaccatggagatgcagtggaagacaaaggagaagaggtgagaggaggcaccatccactatggaataagccatggaagaaggagcttcgccaccaagatgagccttggataagaagcttggagaggatgcttcaatggaggaaaagaaagagggagagtgatcgaggccgtacccgaatcaaataaacattaaaatgtagtaactaggaagtgatcctaggtcgttttccaacgagcaatgataaaccaaatgttcataacaaatagtaggaaatagtaacaaatttggtggggggggggg

SEQ ID NO: 136441 - DNA, 386 bp, Glycine max
agatgatgacaaaaagcccaagagaatgagttcaagattgaatcaagaacacttcaagaatcaagaggaaatttgatttcaaggattcaaagaatcaaagtttcaaagatttatagtttcaaagaatgcaagaatcaaggaataatcaagttgaagattcaagaatcaagaaaagactcaatcaagataagtactaaaacgtttttcaaaacattgagtagcacatgaatttttcacaaaaccttttagcaaagagtgtttactctctggtaatcaattaccagtttattgtaatcgattaccagtagcaaagaatgttttcaaaaagctgtcaactgaatttacaatgttccaatggatgtcaaaatggtggtaatcgatacaat

SEQ ID NO: 136442 - DNA, 402 bp, Glycine max
  unsure (1)..(402): unsure at all n locations
tgaagatgttgcacgtgatatatnttggagtcatcccgatgcagtgaaattaaccaaagcttgtaaattggtatttgtcatagatagtacctacaaaacaaatagatatagattgtctttacttgacattgttggtgtgacaccaactggataacattttcaactgcatttgcctatttggagggagaacatataaacaatgtttgttgggctcttggaacggttcaaagtatttttctaagatgtgatgcaatccctcaagttactgttaccgatagagattcagcattgataaatgcaatgaaaactgttgttcttgaagcaacaaacttgttggttggtttacattgatcgaatatgaggaaaatgttaaccctgtggtgaaaaaatgctgaaattttc

SEQ ID NO: 136443 - DNA, 348 bp, Glycine max
  unsure (1)..(348): unsure at all n locations
catgattctaagcacccacggtttgagaaaaaagggccctatacccgggttcatgggaatttaatgagtggaggtgaatctatcatcatgctangtctccgacttgcttgataatagtgaaacctcgtctagagctttctctctttataatgtgttgtcgctggtattccataccgccataatattattatcttgagtgatgatacctctaaaaaacaactgtgttagttataaattgttgggaagtagtattagagacccctagatattattctatatgttccatatatgggcaatagcaacacgctctgtgcattctttctatgcattttggttataattttgcta

SEQ ID NO: 136444 - DNA, 283 bp, Glycine max
ctgcagttatggaagctttataaagcttatctctatgtagaaacggggaaaacactggtaactgtaaatagccttatagctagcattttattaaaagcatttgtggataagtaacctacccattctaaaggataaaccttttaaattgtatcgtatgggcacctatattgtcacgcttaatgcattctacaaagaattttattggcagcctactcctatagttacagcctacttatagccattatgggtagtagcaaaccaattagaggataaggggtgtttg

SEQ ID NO: 136445 - DNA, 284 bp, Glycine max
tgagaagctatgacttatctacacacacccctcttattactaagctcacctccttgagaagctttcttgagaagattccctaagaagctagagcttagctacacaccccccctataatagctaagctcacatccctgagatgagaagctagaacttagcttcacacccgctattatagcttatctcacccccatgacaaaaaacatgaaaatacaaaaaatagtccttactacaaagactactctaaatgccccgaaataccatgctaaagccttatactacta

SEQ ID NO: 136446 - DNA, 294 bp, Glycine max
  unsure (1)..(294): unsure at all n locations
tatatttccattcagccttttatataataaaggtggtaatcgacatatatattcacttttttatgatttggagagtcatgagatgttctgtttatagattttattctgggctcttttggtatcattccttaagactattgaggtgtggaaagagctgcagactaaggtggattaactatctaaggcctgatatcaagagaggcaatntctcaagtgaagaagaggaaattatcattaacatgcatgagttgctggggaacacgtatatattcgtcgatttattcttccacataa

SEQ ID NO: 136447 - DNA, 306 bp, Glycine max
  unsure (1)..(306): unsure at all n locations
cgatattgtgaaattttttttttttgcncatccatcccacccctacagagaaaaaatttttccttacacctggaccgacagaactgaattgtcaatcatgacgattgtacacacagaggagatttaaaaatataatggcatagtgaggggaaataaaaatttcaatgaaaaccatatcctcgcaacaaattcttctactaatttacaaggaccttaccattggattgtcagtggtcacaccgtatgaaaagaaactcatgtcaagctatactattaaaatatagaaaatgacctcctagaaaccat

SEQ ID NO: 136448 - DNA, 88 bp, Glycine max
gctgaaaaaacgacaatttccgttcagaccgaaacaagtttatgaaaactctcaattacacatactttctggagcaggaccctatttt

SEQ ID NO: 136449 - DNA, 267 bp, Glycine max
tgctcttatacatagggcactaatgggctaataaactaatttttattttgagtggattgatctaggtacatattttacctgtctttgtccgtccatttattgcttgagctgtatgataatatccaaaaacagtaactcgttatgttatcttgtccataacacaagcaattgcttgcctactctgaatgttgatgccaattcttgttttcttggaacaaacatttatacatgtggatgactgattagattgattaccctctattcttc

SEQ ID NO: 136450 - DNA, 390 bp, Glycine max
  unsure (1)..(390): unsure at all n locations
tttatctaagctatgtaatttgctgtgcctctcactgtttcctttgtttgttaaattacaacgattgattatncagattagatcggaaattcgtataaactgatttaacttattttgtgagcctcattctttgtccagaacattagatatgccttttgttttcatttggtgttatcgctataatgtgatacactagtgatatatatgtatcattacatgtctctgatatttgaaattctttttaatgtcttagaatggataaagaatctatagatttgcaatgaatatatcttataaaatgtaatgtacaactagaatctagaacaatattacctgataactaaaagaaggacacacatgcagtcgtagcaacttcataagaaacaagtg

SEQ ID NO: 136451 - DNA, 405 bp, Glycine max
  unsure (1)..(405): unsure at all n locations
agtcacctgcggcatgaagcttaatgtcctcctgattctatccttgatgtgccaaaaaacctttccctttggttgagaagaatgacggttagagccatccggatgaaccaccatgttgagataagatccattaccaattctctcaaggcacaagccgtgaggaggactaatagaggtcccagttttattcagtgaaacaggttccccttcnaagcacactgatgaattatcagatgctccaccaaatgcagtgcaaaagtctgttttggactgccataaatcagagagtttggtagcattgctgtgagctggtgctcctgcttgaccttgtnatgaaggggcanatggagaattcactatagatacatcattgcatgttgtccatacttgagagcaaaatcttca

SEQ ID NO: 136452 - DNA, 264 bp, Glycine max
ctcctgcccatgggattagccattataaacggtgatcaaattctatgggctcacagactgggtggtaaatataggaggaatggatccacattctgattccataacattttgtaaagctcatgactgatcaactgaggtacttctcccaaaaacggagatatgggccattcataatggatctactgccaatgcctggcatgagatgtggttggatgagcgaacaatgttttttgatcaagctattgttgtccctgctcatattca

SEQ ID NO: 136453 - DNA, 459 bp, Glycine max
  unsure (1)..(459): unsure at all n locations
caagcttgactngagncatcattagattatatatacgtgaccatggcatgaatttcaacaattatcaatcatctttgaatcatctatctttcaatctttntcaacatcatctctcatccatctttcaatatctttcaattcatttctctttatctttcaaaaagtttttgttcaaacactttcttttccaagaaaagttctttgttcaaaaacttgtgctattcatctttttcattctcttctccctttgccaaaagaacgaaggacaaaccgcttggattcttttgtgtctcccttcttcctttccaagagaattcaaaggaccctgcctgagaattcttttgattcttcccttacccttaagcaaaagaattagaaggactaaccgcctaagatatcttttggttccccattataaagaatcaaaggactaaccgcctgagaatccttngtcttaac

SEQ ID NO: 136454 - DNA, 473 bp, Glycine max
  unsure (1)..(473): unsure at all n locations
ttgtgaatagacacatctcttcaaaccattttgaaaaggctctaatgacctatatatatgtgtgcttgacttcggaaagcaagagagagatattctaagagaacttcattgccaaatgcgctctcaacaactcttgggcaaacacttgcaaatctattcagagtttatccaagaacttcaaattgtattatcatctctaaaagagagaaatttctctaggaacttcaatttgtatcatccactctaaaggagaaaaatctttctgtttatctcaaaaagtcagttgtaatcaagagactggttgtttcttgaattgtgagtttcctgaatataagagaaagagattcctcgggtgttcaataattgtaaaaagaatntttacaaagttagtgaaaatctcaagtgggttgcatgaagactggacgtatgcacgggaagtgaccgaaccagtataaatcgagtttacatttttc

SEQ ID NO: 136455 - DNA, 436 bp, Glycine max
  unsure (1)..(436): unsure at all n locations
agctntaataaggataatactatgtnngaatatatgatccttgacatcaagtcgatcaacctataaattataagagtggaacttacttagtattagatacaacaagacataatcaatatataataatatataaaaaaacaaagagtcaaactagagtagtgcacaatattccaaactatgatgagttgcatatgatgttgtgacacataatacttgtttctatagtgttgatacttaataaaataaagaaaattaaataaaaaaatcattctagtttctcaggtgttacgtgaaaattaagtacaaacattgcaatacaaatattattgcggcctcaagaggccactttcaataataccttctcaagaaaacataatgtactgagtcctnctaaatgatngaaagagatgtctacaacaagatcttgtacaatgca

SEQ ID NO: 136456 - DNA, 377 bp, Glycine max
  unsure (1)..(377): unsure at all n locations
agttttccgactatgcnctcgngtggtgttttctttctataaaaggagagagcaagaaatgaagagccaatggttgatacatggacagagatgaaaaagatcatgatgaagcggtatgtgtcggctagttactcaagggacttgaaattcaagctccaaaaactaacccaaggcaacaagggggttgaggagtatttcaaggaaatggatgtgctcatgattcaagcaaatattgaagaagatgaggaggtaactatggctcgatttcttaatggtttgactaatgatatccgtgatattgttgagctgcaagagtttgttgaaatggatgatttgcttcacaaagcaatccaagtggagcaacaattaaaaaggaa

SEQ ID NO: 136457 - DNA, 372 bp, Glycine max
aagatcaatgacagtagaatagagaaggatgaaaggtgatgggagacgccacttcaaggagaagatgagtaaagagcaagctcaccaccataagaagccatggataagagcctgaaggcaggagaagatgagtggagggagagggaaagaggggaacaaaattttgagagagataagagggagaatgaggtctaaagtttgaagtctaatttctcaaattatcaaagttgcaaaatgcatacacaaggcatttatttatagcctaagtggtcacccaaattggagggaaatttgaatttctattcaaaattcacttgaatttgaatttgatttgtggagccaaatttcactattatgattagtgatttcagc

SEQ ID NO: 136458 - DNA, 204 bp, Glycine max
  unsure (1)..(204): unsure at all n locations
tattttcacccccatttttacttaatgcaccccccttctatttttttggaaatctttttccggaacggtaccaaacttttcgaattccggaaccatacctattttccctctgcnaggtatgaatccctacagattatggatttactcttttttaaccttcgaagaaagtacggaaacccccggattgcgcaaaaacaactcttt

SEQ ID NO: 136459 - DNA, 423 bp, Glycine max
  unsure (1)..(423): unsure at all n locations
gtgactcttcacatttgaatttgaatttcaacgttcaatggcactggtaatcgattaccaaaacattgtaatcgattacaactttttgaaattaattggaatgttgtaaattcaatttgaaaactttttcaaaaaaattttgctactggtaattgattacaacaatctggtaatcgattaccagagagtaaaaactctttggtaaacatgttttgagaaaaatcatgtgctactcaatttttgtgaaaaacttttcatacttatcttgattaagccttctcttgattcttgaatcttgagtcttgaatcttgatcttgattcttgagatcttgaaccttgaatctngattcttgactctaatctttcttcttgagtcttgaatcttcntgattcttatcttgaactctngaaatgtcttgatc

SEQ ID NO: 136460 - DNA, 300 bp, Glycine max
ggactactctaagcaaaaaggatgtacctctccataatacaactcatgtaattaaacagctatgccattttcttacaacgtctttgccagacatttacgaaaaatgcaccctatacatcaagagcttcgtactaattattacactacctcaggtattgtacttacatcacacacattttggtaatcaatgcatgctactcaacatttgggcacaaatgacatggcctttgggtttatactatcataccaactatgtaattgacatcaacataggcacttatgccttttcagttgtactaa

SEQ ID NO: 136461 - DNA, 167 bp, Glycine max
acccgaatttttcacaagagtactttaccacagagttgtactctctcgcaatcgatgaccagatagttgtaatcgcttaacagatgccatgcttgttgatcaaactgaattacaaagctgtgatcgattaccataataatgtgatcgatttccaatgtgttaaaacg

SEQ ID NO: 136462 - DNA, 195 bp, Glycine max
tctctatgttttagaaataattacaagacccgttgaaaatagcctatctaacttaaatctagagggttgtatgatacgattggtgagacttaaatcctcatctgcgatggcataccacttgctaatatctgtgaaggattccaatgtcttccgatatcaccaatttatcatatataaattgtcttcatatggact

SEQ ID NO: 136463 - DNA, 391 bp, Glycine max
  unsure (1)..(391): unsure at all n locations
tccttggattataggggtgaacccagctcatgcttttaccaaaagggtcatcanatcaaagttgaaaatatggaaagtaacacgtcttgcaaaattggggcaaaagatgaattgagtcacatcactgcttcgtctactgccaaacatatntaggattatggatgtccttgttacttccagtttcaccttgacaaagatgtcatggaccatgttgaaaatctaaattgattcaaccccatatcttgcgtaaaaattcgcaatacttcaactgtacatcattcgcatgcatccatgcttttcattggttgcattgctcgttgcattctctccttgaaaaataanataaaatgaacttaatcattggtataaaaaagaaagggacacactttac

SEQ ID NO: 136464 - DNA, 384 bp, Glycine max
  unsure (1)..(384): unsure at all n locations
acattgttagctgattcaaaataaagttatagcaattataccaaaattgtggttgacatttttcaatgctttaacacgaatgataggagaaaaattcttttttttcccaataatcatgatctttgaaaattatgaattttaacaattatattttctaaaaatttattaagattccaataaccaaccaaagagttatatgatatttttactacattaaataatctaataaagatacattaaataatttaataaagagtaagaagatattctcactgtattaaaaagaaaaatacttgtgaaaataaaattttaccctttttccattgaatagttttcatggaacactantttaaaaatattgtgaaaaatatcctttcccataat

SEQ ID NO: 136465 - DNA, 395 bp, Glycine max
  unsure (1)..(395): unsure at all n locations
atgaaaacaatgcacgaattctataatgcaacacttagcagaagggtcaatttgtaaagttcatatagcaattcaattctaatccatatataacatattttatatatattcatattccccaagagtctacttttcaaatataattttatgttcatcaaacggtatgtgaatcaaacaaagtaaaaaactgtgtgaagtatgtcaaagctgaaatttgtaaaacagcatgtgtgcacaaactttcaacaccaaataatatagaaataactcttagagcccatactcatggatgataacactccaaaccaaaattgacattaaagaaaatagaaactctcattaccctgagagaattgaagtcttctagaagtcaagaaaatgcanaacaaaatgga

SEQ ID NO: 136466 - DNA, 276 bp, Glycine max
actatcaaacttaagttttctatttgtgagttatttaatttatatcttcacatgtatgacaggttaaacacccacgcagttgttgagccattcatcataacaacaaacagacatcttagtgtgggtcatcctattcacaagcttctgcttccacactatcgtgacactatgaacataaattcactggcgcgaaatgtcctggtgaatgcacagggtattatataatcaacattcttgtggggaggatattctttggaaatgtctgctgttgtatac

SEQ ID NO: 136467 - DNA, 352 bp, Glycine max
  unsure (1)..(352): unsure at all n locations
attcttaccagctaaatatgattttttataaactctcaacctttatgatggaaaatatactctataaatataaaccattgcctacttagtggaatttggtgcaattggttcgtgactaggaaacatttatgtccttgaaccataacaaatcttgacccttttccgtctttgtgtgttctcttttggtaacacaaaccaaatcttgactttgaaatgctctggccaatacgaatagatatgatcttacaaattacagatttggattggtctattttgcatgggtcaagctcttgccccgtatgactntngttattctcttcttctggttaatgatatttttagttggtatctt

SEQ ID NO: 136468 - DNA, 217 bp, Glycine max
acactcgattaaagggtgtcatcccttgtgactggcacgtggggtgttaatacctttcccgtgcatatacaactcacgaacccttattctaaaaattggcataccttcggcgttatggcttttctaacagtttctctcgaataaacgttggtggagactctatgcgtgttcatcatgataagagaacacaccattttgtttcgcctcaccctcccgt

SEQ ID NO: 136469 - DNA, 448 bp, Glycine max
  unsure (1)..(448): unsure at all n locations
ggatcctcanagcactgagctgcagctgcanagcagactgtttattattttacattattcagcatgaaaacacgattttcacacctccctctcaaaactccaccaaaccaccctataaaatcctcctccaccacccacgaccaccggtggccgtcacgagctgttgttacttgctgttgaaccaccatatggagagaaatgttttaaacggagtggaatcctcagaatccatctcaaggatttggtggagaacaagctctcaattgaaaaaaatgtatcttttaaaaaacagttacaaaaaaacttttgtatgaatcgtatcacanacacatatatgaatagaatgtaatcaatatttaatcaagccttccttaaacatgatccttcattaacatcctttctttcacaaatattaaacttgaatctttatgaaaattttttattaata

SEQ ID NO: 136470 - DNA, 424 bp, Glycine max
  unsure (1)..(424): unsure at all n locations
acagcgcccanatgcatatgaagaaataatcatattcaacagtctgtttgcaacaagacttctccttggtatgagtacccttgattnaatatatatatgcgaatagggtgatcaaagaacacancgaaaaccagtattcacaagcctttcattggttggattattgttttgcattatgtaggcacaaaatcctaccactcacacgtcataatcctgtcagagaacaaggtatgagcaaaaaaacaaaatataaatgtcagataaatctttgtcaacatgataagaaatagaagtgagtcaaatcctgactgcagtgaaatgctaacactataatggttctttctattttccaccaatttgatataagcccattcccaagctagccttctgctacaaagtccattcccaagctagtcttctgcta

SEQ ID NO: 136471 - DNA, 239 bp, Glycine max
accacccatcacatctcccaaaaccccatacccacgaatatcaaaggagaaagatatccaccaaaacctgaaatttcaaagtcccactcgtagccacgcacttcatgactccaaaaatgctctccgttcgcgatttggagcagaaatgatggccaaaggtcgaagctcttgttggagcttcaatggagaatgaagaagaagagaatggcaacgtgagggagagagagggctgtctaaaa

SEQ ID NO: 136472 - DNA, 410 bp, Glycine max
ctgcagcttatacagggagcaaaatatacaagtttcattcaaggttagctaagtggtcaaaagagcttgcgtctatacaattcatggccttcatcatgttctgattaattcaaaaatttatgcaaagatcattattcacaggtagtcatttactcacagagtaaagtcacactctcatcgggttttggttcatgcttttctttcacaaccagtctatgtagtgactaaccattatattataagttcacactcttgttctttctttgttcaacatgcacatttgctcaaattcatgaaaggaaacacacatctcatcttaagcatgcattcaatttaaaacaatgcataccaccattttcacaaaacaaataaactacttcactgccataccatcaaaagttaagtaaact

SEQ ID NO: 136473 - DNA, 383 bp, Glycine max
  unsure (1)..(383): unsure at all n locations
attacctttccaaatgtttgtcctcgcatgaaatgtctccgaaaaagctttccacaaagagatctatgatgcacgtccggctgaaggaccgtgtcacccccaatttgatatccccatttatgatcgccgatcaccatcagcgcttcgatgccatcaaaggatggtcattccacagagagagacgcgtccagctcatggatgatgagtacacggattttcatgaagagatagctcgctgacattggatgtcgctggtgactcccatggctaatgttgaccctaagatagtcctggagttntatgctaatgctgggcccacagataatggagtgcgagacatgtggtcatgggtgaagggtcagtggattccctttacatatatg

SEQ ID NO: 136474 - DNA, 192 bp, Glycine max
aattataagtcttcttctgtctatctcttcacacaagctcagaaccccttgttcattactaaacaagctgaaattaatcataatctcaagcatgatatgcaaattacatgcaagacgtaagaatgaaagtcgaaaagggaaagaaatgctgggctgcctcccagtaagcgctcttttacatcattggccaac

SEQ ID NO: 136475 - DNA, 466 bp, Glycine max
  unsure (1)..(466): unsure at all n locations
ggatcttaagtgactgagctgcagccntatttttttgatgttactcttcacatttgaaatngaatttcaacgttcaatggcactggtaatccattaccaaaacattgtaatcgattacaactttttgaaattaattggaatgttgtaaattcaatttgaaaactttttcaaaaaaattttgctactggtaattgattacaacaatctggtaatcgattaccagagagtaaaaactctttggtaaacatgttttgagaaaaatcatgtgctactcaatttttgtgaaaaacttttcatacttatcttgattaagccttctcttgattcttgaatcttgagtcttgaatcttgatcttgattcttgagatcttgaccttgaatcttgttcttgacttaatctttcttcttgagcttgaatcttcttgatcttatcttgactcttgattgtcttgatacttgagtgtct

SEQ ID NO: 136476 - DNA, 355 bp, Glycine max
tgggacattactcttaaagcaaaaatggcatgtaacctcctcccataaatacaaacatcaatgtaaatttagagcaagcttatgcgcatatttccttacaaacgttctcttgcacaagacatttaaccgataaaatgcacccatatacaatcaatgcagcttcgttacctagattatttacacgtacctccaatgtgtatgtgttacttacatcacacacatctctttggctaaattcacatgcatgcatactcaaagcattttggggcaccaaaaattgcacatgtgcacatcttggtgtttctaatacctatacatacgcaaacttcatgatgaatcttgactatccacacaa

SEQ ID NO: 136477 - DNA, 341 bp, Glycine max
ttttccagacaagctgtttacctcccttttcaaaaacatagtgcttctctgtttctctttttcgtgcggcattgcctttggctcgtgggggtagcagcgttgaacgcaacggtgtatgttccggcgtctaacattgtggtggtccgtggcggaaaacgatgtacccattggtggtttgactgtcgcagacgtacggacgacccccagatcaagttgatctgtcttacaattacagatcaagttgatctgtaacatccttttggatcaaattgatccgtaagacgattcatttaggaatttgctgtcctgcatgttattccttgtttttttacatacaatct

SEQ ID NO: 136478 - DNA, 181 bp, Glycine max
tgatatctttgactgtacgacatgagttacctaatctatgaaacttgtgatgactattttcacttttagcgcagcccctcatttagtgcatattcttgactgttaaattacttgtctgttatataaggatagcgaggggaaaaaacggacatatttaagaatgattttgactattttttct

SEQ ID NO: 136479 - DNA, 223 bp, Glycine max
cattattgcaatgcggaaggtattctgcgctccactattcatgttcacatattattgcgcttggggttactcagcctgaactattaccatatataaatgttgttttacaaatgagcacatcttagacgcttactccgcacactggtggcctcttgggaatgaagcggctattcctccttctaatgacgcatgaccagtatccctgaccaactactattcgtgc

SEQ ID NO: 136480 - DNA, 244 bp, Glycine max
ttggaatggcttattcaactatcaatattttcaacataatcgtgttcctgtcctcaattctcaaggtgatgttttctcctaatggatgaaacacgaaattcctataactatttgttggtcataacttctcatgcctcacgatgatgctacgatgctcccaatgctccttgaatgaacttcatgtaagccaattctcatcgggataatagtgaatggaaagcaagaatggactatgcccatcctc

SEQ ID NO: 136481 - DNA, 252 bp, Glycine max
tctattatgaaaaatggtgggttacacacccttaaaccttgcggaattggtcttcaccggcgaaaggatcaaagtgggcctggaaagagggtaatctgatcatcctgctttgatgaatgtgaaaactggggcaaatgaagagggtgagaatgaatgagaaacccatcttgaggctgtcattcctatacaactaagattcctggtagtgcttaaccctactgagtggtaaaagaatggctaaaatttgtaaaa

SEQ ID NO: 136482 - DNA, 76 bp, Glycine max
taaagcttaaaacagtcatatctgcctactgcatttgttagatcgcaaggtctatgggcatttgtcatagttgtta

SEQ ID NO: 136483 - DNA, 272 bp, Glycine max
  unsure (1)..(272): unsure at all n locations
tcacctgaagctgcagctggctancgctaaagatgagtgctttcgcagttctgcacttagcggatagacaatttcaaaaaaaaaattctaagtctttctctgtctatctcttcacacaagctcagaaccccttgttcattactaaacaagctgaaattaatcataatcacaagcatgatatcctaattacatgccagaggtaagaatgaaagtagaaaagggaaagaatagctgggttgcctcccagtaagcgctcttttaacatcattaac

SEQ ID NO: 136484 - DNA, 353 bp, Glycine max
  unsure (1)..(353): unsure at all n locations
tggacttaccttgaattaattcctttgatttccctttttatccttgtttccctttccttgttttgaatctcactacaagccttaagtgaaaaaccatgatattaccatatccttaaggaattttggagctttggaattgttttgggaataaatgtggggggttttcgtttcattggacaacttgttntgttggctatgcttcatgatgtattttgggccatacttgatgtatattgtatanttggtaaatgttggacatgctgaatgaaatgttgtttctcaaaggctaaagagtaaaaaaaaaaaaaaaattcgaaataaaaaaaattccgaagaagaaaaagaaaagcaat

SEQ ID NO: 136485 - DNA, 266 bp, Glycine max
atagctccgcatgaatggggggcataaatttataaatttaaaagaattacaaaaatatttgcttgggaaagtttgccgttttccaaaccatctgacgttttccgcggtccatcggcaatgtgtgatttttctatttgatattttaattatctgtcttttcttaaactacatacgcataggcatcttatgaataagaatcataattcttcaagtggttctatatttaaaaatatattatataagaagttgatatagatttgacgttc

SEQ ID NO: 136486 - DNA, 275 bp, Glycine max
aataacataatcagcactacctcgcggtgatttgcttgtggcgaaaaagtatattccgtagtcaacatattgatcacagcagtaatcctatcatgatcaccagcaccagcaagcctctttcactatcccctcaacctataataataacacataacccttttaattcaccaacgccctctaatttcactatattggacaaccataaaaaatagaaaggaacaaaaaatcataattactgaagagagaaaaaaaatacctccagtgctgcattcttg

SEQ ID NO: 136487 - DNA, 407 bp, Glycine max
  unsure (1)..(407): unsure at all n locations
agcttccaagaatcaagatctatattcaagtattctgantctttaatcaagagaagacttaatcaagataagtatgaaaaagttttttcacaaactgagtagcacatggatttttctcaaaacatgtttaccaaagagtttttactgtaacgacccgcctcgtcactacggtatccacactctaatattcgatgatttcaattttttataaaaagaacttccttaatttttgcttatgaaaatagaagtgattntgtcacaacataaattcatccaacaacacaccattacttaagtgaatatgcataattacatagaaacaataattcggtacacgtcatacacataacgaanattaaatttgttcatagatataattaanatcccagttntacatctttaactcg

SEQ ID NO: 136488 - DNA, 333 bp, Glycine max
  unsure (1)..(333): unsure at all n locations
ttctcaaggaagttntctcaaagaagcttctcaaggaagttttctcaaaaaagcttctcaaggaagctacctattctataaatagaaacatgtgttacacttgttgtaactttgatgaatgagagtcttgtgagacacaactcatagntcaacttctctccctcttttattccttcaatttcgtgctccccccttctctctttcttttcctccattaaagcatcctcttcaagcttcttatccaaggcaattcttggtggtgaagctcctttgtccttggcttattccctagtggatggtgcctcccctcttctcttctactttgcttccact

SEQ ID NO: 136489 - DNA, 354 bp, Glycine max
  unsure (1)..(354): unsure at all n locations
caaactcttaccattcttccacttggagtctaagttctaaactctagcagctcctttgtagcaataagttcatcgactctttacctaatgtagtgtctttatctttaattatcctcgaaggctaactaaagcaatgcaaagtcgcatcttgtcagttgtaacaactttagttaacatatctgttggattctatgaccctaagatcttcaccaaagataagtctctatcatttatcaactccctggataaatggtatctcaattaaatatgctcgcatctagaatggaagactggattcttagcaagacttatagcaccttgattggcactgagcatngaacaatatctggtctt

SEQ ID NO: 136490 - DNA, 288 bp, Glycine max
aattttttagatgaatacataggttacaatcaaatcaagatgtccctacttaaccaaaaaaaaacaacattcatcattggtggagccaaattttgttataaagtaatgccttttagcctaaaaaatgcaggtgccacatatcaaaggctcatgaataaggttttcaaggaggagattggagaaaacataaaagtgtatgtagatgacatggtagtgaagtacctctcttctgatcaacatgctcgtgacttggctgagatctttgcagagcttaaaaaactcaacatg

SEQ ID NO: 136491 - DNA, 429 bp, Glycine max
  unsure (1)..(429): unsure at all n locations
agctatgnangccccaactgtcaacnagtttatngttnnaagnangcnngnnnatcttngcattgttgcacgtgtggtctgggtctgtgatgaccctgtatctagtgtatgtggataatagatgaataggaggcggtttggagacttcatatttggacgtaaagatgcgatatttggttttgttttcattaaaggtatgtatagggctgatcgacttataatttatgtagtttattcttatagtgtggtttaagtttatatgtatgttttgagaaaacttagaataatatgatgtgtgtgtgtatatatacatatatatcatgtaatgtcttattttggggagttgtgccatttagtttctggcctacaaaaaattattaatattttcataatccaattaatagaagagtttcaaatgaattataaata

SEQ ID NO: 136492 - DNA, 313 bp, Glycine max
gctggagtagaaaatatacacacttccacgacaataatgtaatattaacgcataatatcatactaacaattttttaaaaaaaaaaaaaataggctaaaaataattttggtagactatagatagtcaagaatacagcctaacgtcaactggtgttatatctgctgttaataggtaacataacacaagccatatgatataacatgttttgacttaacgacaacatttaagaaatattagccatcttgggatgatgaagaacattttactgtgggaaaattaacagtattatgctcatttactataacacccccct

SEQ ID NO: 136493 - DNA, 444 bp, Glycine max
gagctcaacgaaagggtttgcatcaacaacaatattagcgtgctcccatccaacaatggatcatgagctctaatggagagaagatagcaccctgtcttgaagagaatcaagcctcattcttatgaggtctttatctgcttataggcaaactttatagagaagaaatggagaaagctttgggtttttgagaagtgtttctaatcttgaagctttgaggaagggttttagatgccttttgggcccttctcaccaaaacccgacccaacctaaccagtgacggatataaggggggagaatattgttccttcttttttcttgtccatgcctccttattgtttcttaatattgtggccaattgcatgtcttaatcttttgtgtacaatgcctctgaccggatgcgtctcctcaattcttatcggtctcattctaaccttgtcgatatgc

SEQ ID NO: 136494 - DNA, 257 bp, Glycine max
tgtgcggtggtcgacagaagagcataaaccatagagtctggcgacaggtgcaaatttttgattcatggccagttgggttaccaagttaaccaaggcatctattttaccttcaagcttcttagtctcggctgatgaagatgaattcgtggctacttcatgcaatcctctaatgacaatagcatcacttctggccgtggtcctggaagcaaggaaatttttttctaaaaatactctcttgaagcatcccagctcgtgat

SEQ ID NO: 136495 - DNA, 372 bp, Glycine max
  unsure (1)..(372): unsure at all n locations
ttctctactattgcttctcttctcaatgagctggtgaaagagaatgtggcatttacctgnggtgaaaaacaagagcaagcctttgctttgctcatagaaaagcttactaaagcacctgttctagctcttcctgacttttctaaaacttttgagctaaaatgtgatgcctctggagtgggagttggagctgtattgttacaatgtgggcaccctattgcttattttagtgaaaaacttcatagtgccaccctcaactaccccacctatgataaagagctttatgccttaataagagccctccaaacttgggaacattaccttgtttctaaggaatttgtcattcatagtgatcatcaatcacttaagtacatt

SEQ ID NO: 136496 - DNA, 145 bp, Glycine max
aaaaaaaggggggggggaggaagccccccaaagcggaagaaagaagaaaaaaagaagggagaggagagagagggaaaggaaaaaaagggaggaaaaaggggaggaaggaaggggagaagaaagagaagaaggaaaagaaaaaagg

SEQ ID NO: 136497 - DNA, 275 bp, Glycine max
aaaagggggggggaggaaggaaccaccacccacgaggggaggagagagaaaaaaagaaggaggaggaagaagaagggcaagagaaagaagaagaaaagaggagagagagggaggggagaaggaaaggggagaaaaaaggggaaagagagagaaggaggaggaggagggggggaaaagaggagaaaagggagagaggggggggaaaagaaaaaaggaggaggggagggaaggaggaggggagagggaggaggacagagggaggagagggggggaag

SEQ ID NO: 136498 - DNA, 317 bp, Glycine max
  unsure (1)..(317): unsure at all n locations
agaggcaagtatgttatacaaaataacacattgcatgtacaaagttgttaacattaagaaaatcaaattatatactgtcgatatagaaaaaaaaatgatattgacctttaatcatatattaaccatcatatatatcgagtatatatataggatggttattgaattgtattaaattctataataatttaacttataaatcgcatcaattatgattgtctaattcattggcagtataaatgacatactgacaatgtataatcattagacttatattactcagcacantaaataacattaaactttttgttttactggaa

SEQ ID NO: 136499 - DNA, 245 bp, Glycine max
agcatgtttagtttttttttacacggaatttctattgtattggcaatgtatattattttaagaaagtttaactttattgatctttgggtgtataacctataattccttatatgctcatgtcataagataattatcatgggattaagactgccgttaaaattttcttttaagactggactagactatttattttttggacacaagaactttttatttgaatgggcttgaatttaactaatactagt

SEQ ID NO: 136500 - DNA, 388 bp, Glycine max
gctcccacagagttgctctatgtattccaactttgcattatctgtttgtctacaaggagtcttgctagaactacctaaaacatatcccttctaaacccgtagcagactcatgttcaatcccctttggcattctgtccaacaagtatcattcagacaaatccaattgtatgagatttctcaatgataaaatatcactatgtaacgtttctagattgtgacaggccttgagaactagaatttgtaggttctcaagttgacaaatgaaaggtggctgctcaaatactcttgatatcccacgaatgctaagatgcctcaaattcttttgaccccttaactccttcaggaattcttcaatctccacttcaatatgatgtctttgtgaatcttg

SEQ ID NO: 136501 - DNA, 293 bp, Glycine max
tcagtacaattctgatatggctcccgaccgtactcaactgcagaatatgttcaagaaagagggagaaacctttaaagaatatgcgcatcgatggagggatttggcggcacaagtagctcctcccatggttgagagagagatgatcaccatgatggtagacactctgccagtgttctactatgagaagctaataggttacatgcccgccagctttgcggatctagtgtttgccggggaaagaatcgaggtaggattgataagaaggatagttgattacgttttctccacaaatg

SEQ ID NO: 136502 - DNA, 333 bp, Glycine max
  unsure (1)..(333): unsure at all n locations
ttctgtctactcgaganggggacctttgccctctcttgagctcaagctcgccgttactgccccacatagcccctcaaaattttttgcggccgtgttcttccctacgagccactttggtctcttggtccaatgccttggtggtagctatatttacatctctcagttcggcattctcctttcggatcttaagatctggtgctttgaacctttctttgactggttgggcttgctcgagttttgccctaaaggcctgcacctcttcgtcttcctctggtgcctcaactttctcccctttagcgttttcatactcgggagccaatccaaaccttgcat

SEQ ID NO: 136503 - DNA, 438 bp, Glycine max
  unsure (1)..(438): unsure at all n locations
agcttccttaagaagaaacctaaagaagcttgnattttanctacacatacctctctaatagctaagttcacctccttgagatgagaagctagaacttagctacacaccccctataatagctaagctcacccccatgacaaaaaatatgaaaatacaaaaaaaagtccttactacaaagactactcaaaatgccccgaaatacaaggctaaaaccctatactactagaatgaccaaaatacaaggcccagacgaaggaaaaacctattctaatatttacaaagataagcgggctcatacttagcccatgggctcgaaatctaccctaaggctcatgagaaccctagggccttcccttggatctctagcccaatctacttggagtcttttacccaatgcccttacggagtaggaatgcatcatttccttcaccttggaaa

SEQ ID NO: 136504 - DNA, 287 bp, Glycine max
tccactaagcgcagaccttgctgctagcgctcagtcttcacgcgttaagccgagcttgctcgcgctaatcgcaaagacccctgattggttggctgaatagtttagctaagcgcacatcattgcactaagcccaacatcttcactataattgaacctcaatcagtgggcttagcatggatgatgcgctaagcgtcacttcttctttgaaaactttttattgtagtagcgctaagtgcgctatcctgagctaagccccatatccattctgtaacttgagcttttaagct

SEQ ID NO: 136505 - DNA, 401 bp, Glycine max
  unsure (1)..(401): unsure at all n locations
cccccacccttttatctgtttttctgtcaagcaannactaacattgatatgtttgatgcatggtgtgggtaatatctgcgggtaacgcttgtggatattatggattgatggctattctgcgttgtgtttaggtctgagattgtgtttgacgtttgtgtttgaagaaaaactcaaagaaaaagcgttgagtttatgtgttatattctcttcatanagtttggccaacgaaactgttctgacaagtgatgtatgtgattgtgcaatgacatccattctgatttagggtttaattcttccacaaacaatccaattagctcctgtgtattcctgtcttcattactaagaccgactgccgtttttactgactgaccatttggtgagttaacactgaatcttgcttc

SEQ ID NO: 136506 - DNA, 344 bp, Glycine max
taactctaatgctggccaccatttacatatttttttcttgttcatctattgttgaaagatattatactactttctatgagtggacactaaattaaataatttataaaaatctgctagccattcaataagtatttgaactaaccttactatacgatgtaaagagaagaaatataatcgtatgcatatcacactacattaaaaaacatgcttctaagccaccaagtaaaagtatatatttcggacttttcaaatatagacacattacatattaaaaatggggacattgacactgccacaagacaatatatttaaaaagagtgtaagaaaaatatgcctgtatacac

SEQ ID NO: 136507 - DNA, 418 bp, Glycine max
  unsure (1)..(418): unsure at all n locations
agcttcaagtttgtggtcatgtaacactaatgtctatgattcattnttcctatttaaaatcaacccagtgtttccaaaagatgctcttttantcaattttgcacacattcgagcccgtttaggcattcggaaaattttcacggcattcaccattcaggtgtacacatatttttccttttttaaaaaataccttttttgttctgatcgatgaaacctttttcaaagaaaaactggcagtcacttttttccaaaagtgtcttgggtttttagtcaaaacttaactattttntttttaaaaaaaacctttgcaaaattttactaccttcccggtctgcgcatgtttattttaattcctaggattatgaggaaactaagtgtattcaactatgacttaagaaacatatgtgaataacttata

SEQ ID NO: 136508 - DNA, 436 bp, Glycine max
  unsure (1)..(436): unsure at all n locations
tcgattcattctatgtacccgtagtggtccacattgtgttgcgtgcatttntattctcgntntgtttactttttataccccctgttgacgtgcttaagccattttacttaagtcatttctcgcttaacttaaaaataaaataaatttccaccgaacgtttgaattgtattatccattaacttcggttaaaataaattccgaccgttcggtcgtgccgtaaccacgttggaaataaaaaaaaaaggtaaaaaataatataataatcaaaaagacatcttttagtaaaataaagcggaaaatcaatcggacgttttctctttgggatttctcattcttaatcgaattgattaataactaaagtgaaactaaaggctgaaaatcaattcgcctagtcaagctcgtccataaaaatanggctttgaagtgtgcatttcat

SEQ ID NO: 136509 - DNA, 299 bp, Glycine max
gatcatgtgcttctccgtcattggaggagccacttgagctgccaagtctcttcacctttaggcgtattctttgaaagattgtgccccttttttgtgcacactttctgttgttgcatcctatccggagccatatcagaattgcactgatgcatgtaacagctaccccagtaagactttcttggataaaatgtatcaatagttcctcatcttttgcgtatgcccgcatcttccgttaatacacctttatactgttcttggtgctagtagtcccctcgtacttgtcaaagtccggtaccttg

SEQ ID NO: 136510 - DNA, 323 bp, Glycine max
  unsure (1)..(323): unsure at all n locations
tattctaatatgaagtgacttgacctcgtacaatttgtggaatatcccaaatctctttcatggtattcttcaattctttacaacattggataaaatcgagactacgtgccatntgctaagtgcaaattggcaactacattttcatccatctccttccacttttcattagtgatatttacgggtttgcgttcgattacatcttagcaattgtccttcctcaaggctggctttatcttcaattgtcacatggagaaattactcccattgactttttatcttgactttgggccacaattacacatttcaccggttagtttgctatg

SEQ ID NO: 136511 - DNA, 291 bp, Glycine max
ccaccaccatttaatgcaccccttgagttggtaactggcaatagtagtctacaaagggctggttctgctaatagacctgtgaggagaccacccaaaatgccatccacagcatgtgtgtgaaacacaccaatggtgtcatccacctgaatgaaatacatgttacaaaatttgctatggacaagtatatactaagcaaatccatgagtaatattatagtagggttggttaccaataaaaacatcaattaatgtaaaatagtatataaaatcaataattatacacttacataat

SEQ ID NO: 136512 - DNA, 288 bp, Glycine max
accaacattttcacaataattggctgcaacatttcaagtgttgagtaccttcataaaaactttttatagtgaaccttatatatatcatgccatgtatgcaatagagtataacataactgaatgtaaatagcattatttacagaccaaggttaaaaaacaataaagctcagatataacatgcgaagcatatttaaacatagaattatatcgtgttctcttcacccagtctgccatggccacataacatagttagccaaatgagtatcttattgcgcctaacctctacaa

SEQ ID NO: 136513 - DNA, 427 bp, Glycine max
  unsure (1)..(427): unsure at all n locations
catgcaagcttcagagacaccgaaccccctcctgtttttgtgcttcttcttaacgncannatatggagggggcgtnttgatttaaagaaaaatatatccttaatgaaaatgaatgagaaatcacttataaaagaagaaatagaatagaaattaattgatatgttatgttgatttttaagagaaataaataagaaactatattttaaatctgttcataagaataaattggaaatttgtgctccgacagcaccaatataaataattctttgtgaatatgtataccaaaaaactgatgtatctttgctaagcatatattttttcttatttaatcaaatctcatcttaatatctcttttattgcagactcaaataatatatattataaaactaatcatttcactggaaacttgtggtatttttaagttatt

SEQ ID NO: 136514 - DNA, 400 bp, Glycine max
  unsure (1)..(400): unsure at all n locations
actcacagtcacctgangcatcaagcttaggttgctcattgactccagattgttgcanagaatgatttagatctgnatagggatctgtagaagaacatagaccaccgactcttgcaacaggtgtagatttctgattcatgacaagctgagttactaggttgaccaaggcatcaagttttccctcaagctntttattttcagtaaaggaagatgaatttgtggccacctcatggactcctctaaggacaataacatcatttcttgtattaaattgttgggagttggaagtcatcttctcaatcaaattcctagcctcagcaggagtcatatcaccaagagctccaccattggcaacatcaatcatactcctctccatgttgctaagtccctcatagaaata

SEQ ID NO: 136515 - DNA, 197 bp, Glycine max
  unsure (1)..(197): unsure at all n locations
gctttacccaatggacttaccttgaattaattcacttgatatccccggtggctctatgttcctctttctgagttgtgaagctcattacaagccttaagtgaaaaaccgtgatatcaccttacccttaaagaattntggagctttggaattgttttgggaataagtgtgtggggggggggtggcntttttattgtttt

SEQ ID NO: 136516 - DNA, 490 bp, Glycine max
  unsure (1)..(490): unsure at all n locations
gatccttgagtcacctgcggcatgcaagcttatcacataaaggttaatttatatttaattggcaaaaatgctgctatacattccagtttaaaaatatcatgtccatctttgtgaaacaaatattatcagtacatgattggttgagttttttttaagtaatcatacttttttatatcaaatcgagttggtcacaaatttaaatcaaaataagttcaacttaaaaataaaatgtcataccaaacttaaatcaagttacaaattcaacaaatgcgaattgaagtgaatcaaataatgttcaactcaacttggttcattttgagcaccactcatgagcctctngaaatcatgtctctgtccanaacaccaataatatntctacaatntatcttcatagccactcatcanatggcttgaacatattcctggaatgatggagaaatcatcttcttctttttttcatttagtgatcgtgaattgngatgtaatgtat

SEQ ID NO: 136517 - DNA, 467 bp, Glycine max
  unsure (1)..(467): unsure at all n locations
tctccatacatgtgtgctactaaaaagtctcctcttttataattatgatatgcacaccatatggacactatgaacaatgaagaccacttctatcctgataggataccatttcaaatggagttttgatgtcaaaacacgcattccaaagcagttttagcatgagcaaaaacaattttgcagtagtgtaacagagattcagacaaactcttcatcccacagagataaaatggttaatagcaagaaattatcccanaactctatcattcctctctaaccataagcaccatgttataacatacatacaacatctacaacaacaaatgccttatcccactatgtgtgattggctacatggaccacacaatgtcattcagctcgattgaagaccaaatttcatagatataatctaccatgagatccctcttatcaacttccactaatgtccttcttagtcctcctctcttgct

SEQ ID NO: 136518 - DNA, 235 bp, Glycine max
atctgtaatattctttagatagaatatgactttcactcacttaaactttcatccacttttatttttagtccctaagcttttatttgacttgactgttgtatattattatttcgcatgtgttttagttcccactcttaagtctttccattaacaaagatgtgatagttatggtttgtgacaactctttttttatgattagaaattatttaaccaatgtatttaatacggattaaat

SEQ ID NO: 136519 - DNA, 388 bp, Glycine max
atcatcaacttcttgtgtggttctaattctttttttgtttttcctacttgtattgattttggtgtctctatggagactaagaccaaaaacctatggcatgctatacttggtcatccaaatttccatgtaatgaaacgtgtactacaacaatgtaatttacctctatccaataaaaatggtgttgatttatgtgcatcttgttgtgtatgaaagtctcatagacttccttcttctttgtccaatattgtttattctactcctttaaagttaatttgtagtgatatttggggtccctctcatgttacttcaaccaatgactacttatattacatagcattttttgatgccttttcaaagtatacctcgatttatcgcataaagagaaaat

SEQ ID NO: 136520 - DNA, 316 bp, Glycine max
  unsure (1)..(316): unsure at all n locations
actcctaattacttgctgcatttctctactcactgtgcttggcancttgtcatntaaaaaggaacttaattttaagtaccaacttatcattatctgtgtcacactgctcttacctgccctgcgtacctctcaagacttctttacatgctccagagcaacttattatggtagcacagaatgttatggaaacccaagtacgtgaggcgttttttctatctattattgcacttgttcatatatggtgtgagtaccaagcacatttttatattgtctgtgtatatttatacgacaacattaaactcgcataagttcattg

SEQ ID NO: 136521 - DNA, 219 bp, Glycine max
catcgtgcttcgtagtgtactatgacttcattcccatgtttatgaagcttgattatccaacggggcacgcaataaaatcatgctgattcaccccagcattataccacattgtatcaactaagtttggttcatttcttgttcatcattagaaaaatgttaaattgttggggtcggtgaaaaatctgggtgctaataatctcttatagtcatatgaaaaat

SEQ ID NO: 136522 - DNA, 392 bp, Glycine max
caatttgaaacacggagagaacacaaatatatcgtaattttaaaagtgtagagaagaatatatacgtgcccaatcatgaactagaaccagatacttttggtatacacacataccaccatcttaagtaatagacataataacttccttgtttaaccaccaatgcagtatcaaagctggtaaatcgaaccccgcatccttgtactgtagattattcagaaatgagctgatcgcttatgctttagcttattctttgcggtgtatttggctttcactcaaattatgcagagatacaaaaagtcctgacataattgtgggtgtcagctatgacaatgtgccaatgaaattattctattgacccgctacggtggttattctatctgactacatggaca

SEQ ID NO: 136523 - DNA, 329 bp, Glycine max
aatcttcataatatttatcaaacaaaaaattgaatatcttaaatatataatttatgaagtcttaaaatatctcaaacttaccaccattataatcaccaccattgttatgacggtttccattacaattgtcttggtcatcaccgcaattaccaccatgattgtcaaccgttgtcacaaccaacatgattgttattattgtcactatcaccgctactactatcaccaccaccaccaccgtgatcactaccatgcagtaatggcagtggcaatgacgatgatagtcatggcggcaaatgtggtgacgatcatagtgataatgatatgtctat

SEQ ID NO: 136524 - DNA, 283 bp, Glycine max
  unsure (1)..(283): unsure at all n locations
atgcacgctagccaataagggaagtctatctctttggtctgngaagctttatgagacnatttttaagggcatgatgaatagntgaagcattccaaacatcaacatctagagcaatatcttccagtaagaaaattgcctttctggttcaaacccttttattaaaagggaccagctttggaatggggctcacaaagctggaatacttttagatagaatatgactttcccttcctgaacctttcttgccctttaaggttaagcccttaagcttcatttgacttgac

SEQ ID NO: 136525 - DNA, 312 bp, Glycine max
  unsure (1)..(312): unsure at all n locations
tacactaacccttaaaatcttacacttttctacctaccacattggcattctcacatttaaccctaaattaactttccccctcatctctactaattttctatcaacaatttcagcacaccaacatcacaaagcatcatcataaaaccctaaaacaaaatgggtaaatttggctcacatcaaacattgtaagtttagcatgctttcaacaaattccttcacaaataactaccataaggcataaacctagtagaacttcccatcatatcntccaaaacccaatacccacgaaattcatgtgagaagaagtctacc

SEQ ID NO: 136526 - DNA, 425 bp, Glycine max
  unsure (1)..(425): unsure at all n locations
cccgagtcattcatccctatgagatgtggntgaagtattgtctgttctaatngccactccttggattatatggttgaaccaagctcatgcttttacaaaaaggttcatcaagtcaagttgaaatatggaagtaaccatcttgcataattggggcaaaagatgaatcgagtcacatcactgcttcatctactgccaaacatatttaggattattgatgtccttgttacttccagtttcaccttgacaaagatgtcatggaccatgttgaaaatctaaattgattcaaccccatatcttgcgttaaaattcgcaatacttcaattgtacatcattcgcatgcatgcatgcttttcattggttgcatttgcttgtgcattctttccctgananataaaataaaatgaacttaatcattggtataaaaa

SEQ ID NO: 136527 - DNA, 320 bp, Glycine max
  unsure (1)..(320): unsure at all n locations
cctgacatttcctttgccttgatacttcatgaaaatcaagttatgaaggagagtgcttggttctgccttatcgcgttttgcaaagcgcttttcaatttcagcaaggaattctttggcactagttatatcaactaaaacagtgcccctaaagacctcaggaatgccatgcttaatgatcataagactcatgtaatttgagtgatcccacttctcatgaagtttcctctgtttagaggtactggaattcgtaggagaagggggtttctcaatccttaatgcaaggtctagatccatgcaaccaagaacaattngcatattct

SEQ ID NO: 136528 - DNA, 188 bp, Glycine max
  unsure (1)..(188): unsure at all n locations
cctctctttccccaaattctttttctnctctctcaggggactcccactatcggtcattaacgctgttcatgcaagagcttgtgctgtgggataatcaattgaagcggcatcttcttttgccattggtacctccatacattttctccctttactccttcacttatttactttaacaacaatttgatgat

SEQ ID NO: 136529 - DNA, 313 bp, Glycine max
  unsure (1)..(313): unsure at all n locations
gtattcacctacagtaccaatttgcatcaatgtaaacaaagtggaccctggacactcattatcagaatgactaaaatccaacttgagggctcttgtaaaaacatgccaagaggaaaaaggattancccttctgatcttttggaaccagtgaatcacatcttggtcaagatgaactgaagcaatggttaaacgatcataatcagacattccataataatcaaagaattgttctactcgaaatatccaatctcgtaaattatttgcaccaaatacgtgggatatccagcttaactgagcacaccttgaatggtgc

SEQ ID NO: 136530 - DNA, 259 bp, Glycine max
aatacttgggtggtcttagattcaaaaggagtggccggacaaaatacttgtttgaattaaagtttgattagtagaattcttacagcacactaaggaaaatgaacttgctttgttaaatgactatattaaccaagtgtacccatctttcttattggtttattgagtattctttaagctatttgacccgttctcacagtgttacctaaaactttgggaatattacttattttctgacaacaactggtttattaactgtttc

SEQ ID NO: 136531 - DNA, 283 bp, Glycine max
taactccgatatggctcccgattgcactcatctgcataatatgttcaagaaaaaaggcgaaacctttaaagaattcgcccaacggtggatagaattggcggcacaagtaactcttcccattggtgagaagagagatgatcaccatgatggtagacactctgctagtgttctactatgagaagctagtatgttatatgccgtccatcttctcggacctaatgttcgccggggaaagaatcgaggtggggttgaaaagatgaaagttcgattacgtttcctccac

SEQ ID NO: 136532 - DNA, 390 bp, Glycine max
  unsure (1)..(390): unsure at all n locations
cctctagcttctcaaggaagttttctcaaagaagcttctcaaggaagttttctcaagaaagcttctcaaggaagctacctattctataaatagaagcatgtgtaacacttgctgtaactttgatgaatgagagtcttgtgagacacaactcaaagttcaacttccctcctttntttcttccttcaatttcgtgctcccgcctctctctttctctccctctttcttttcctccattgaagcatcctctccaagcttcttatccaaggctcatcttggtggtgaagctccttcttccatggcttattccctagtggatggcgcctcctctcacctcttctcttttgtcttccgctgcatctccatggtggaaatcaccattaaaggaactca

SEQ ID NO: 136533 - DNA, 372 bp, Glycine max
  unsure (1)..(372): unsure at all n locations
tggacttcgccggcagaaagatcaaagctgtttctgtaaagangcaaanntaatcatcccacttggacgaatgagaaaactggggcaaatgaagagggtgagaatgagggagaagcccatgctgtgactgccattcctatacggccaagtttcccaccaacccaacaatgtcattactcatccaataacaaaccttctccttacccaccgcccagttatccacaaaggccatccctatatcaaccacaaagtctgtctaccgcacttccaatgacgaacatcacctttagcacaatccataaacaccaaccaagaaatgaattttgcagcgagaaagcctgtagaaatcaccccaattccaatgtcttatgc

SEQ ID NO: 136534 - DNA, 160 bp, Glycine max
gagcaagattagattgatattatggacctgtgggaggtgagactatgcttcaaatttacctcattctaaatttcacttttccaaccctacacaccctttgaattgacgcgttgtggacacctaaatcctgagctgctgtgttctggaccttgactatggg

SEQ ID NO: 136535 - DNA, 329 bp, Glycine max
cataaaccacatattctggcgacacgtgtacatttgttattcatggccaatatgggttaccaagttaaccaacgcatctatgttaccttcaagcattttagtctcagctgatgaagataaattcgtggctactttatgcactcctctaatgacaatagcatcatttctggcactaaattgttgggagtttgaaaccatcttctcaaataaatttctggcttcagcaagggtcttgtctgcaatggctccaccactggcagcatctatcatacatctctccatgttactgagtccttcataaaatattggaaaaaagctactaaaaatct

SEQ ID NO: 136536 - DNA, 262 bp, Glycine max
  unsure (1)..(262): unsure at all n locations
tcacacatatgtgttttaatctcgagagcaacgactatatcgaatcatgctcatagcacctnctttggatcttagtccactcggtttcatagtgtgtcactctacaaactcaagtaccccactcaatgattacaagaaatgataacactcgcacacaaagatacttttctctcaacagagtgactgtgtttcacaatctctcttctcacacactctctcttcatgtgttccggttctctactaattctcttctctcattata

SEQ ID NO: 136537 - DNA, 343 bp, Glycine max
  unsure (1)..(343): unsure at all n locations
tactcaccctatgtagaagttctccattccttattgactgtgcttttttgtttctatccatggtggaggctttgtagcatggggaggatctgctccggctgatangaagatggagaaggcttgtcggttgtagctagaggagggatcaccgtatgtggatcgtctatagtggctcgggccctaccccaccttggcttcggggaagacacttaaagggtctgctatatttgcaactggcttgacttcatcttcttctagaaacacagacttcaggtgcctactcaaataggtagcttcttgcttaatgcctccaccttaaagcaagtcttgctatcacttgatc

SEQ ID NO: 136538 - DNA, 381 bp, Glycine max
atcatatcttaggcacttgagtatagggccttactctgagagcacaccgccttcattggttaaaaataatgtgtctgctatctttgaagccgtacagtaggatgaaattgtcgtaaatgacaattttggtggcttttaaaatcttaagagatcaattacaaaatttttgctagatcaacgacacaattactatctttttatttaaagagatatataaaaactcctaaatagttgagggaatttaattaaccttgaatgaacaaatacaaaacaactttcacatggatttgttattataacccaatattcttaattagaatgaagctgtgactttacggacaacctttcgtaagtatgtagagtaactacagatacctgatc

SEQ ID NO: 136539 - DNA, 282 bp, Glycine max
  unsure (1)..(282): unsure at all n locations
agcttttatagaatactacatgaagctgtctctggtaanacgctgcccagccttcgttaaccattggatcttctcgaaatgaggtctgcaacttcacaagacacttgtgcatgatctgaccgttgggatctttgagaagatgtctggagtctgctagaaatttccgttcccgagagcatctcttatttaagcatttcaacctttgctttcgtgtagcttacgaaaaacgccatttcttcttctttctttcttccaaagccatgtctaaagttccaagcactt

SEQ ID NO: 136540 - DNA, 263 bp, Glycine max
  unsure (1)..(263): unsure at all n locations
tatttacatgtacttacaaagtgtatttgttacctacaatacacgcatttacttggctttatttacatacatgcgtactcaaaacactttggatatcataaaatgcatacgtgcacattctggtattttcaatacctattcatacacaaacttcatgatgaatcttgactatctacaccataaggtgctacatctcatgctctntttaaaaggttatttttcactacctaaagacgcatgcaaatttaaatatttttcttagc

SEQ ID NO: 136541 - DNA, 201 bp, Glycine max
  unsure (1)..(201): unsure at all n locations
ttgaaaagattcgtgcccnctttttgcacatgttctgtnagtgcatcctatccgaagacattatactaacactgcctaacgaaggcaaacattatgtcctcccaggaatggactcgggaaggttccaagttagtgtaccagataacaactaccccagtaagactttcttggaaggaatgcatcacacatttctcatctttt

SEQ ID NO: 136542 - DNA, 282 bp, Glycine max
taccacaaaactcacatgtagcatagagctcagtgactttcttgagagccttcaagtcagccaacatgtgggaaataaaacataagccagcatccatacaggtgagagcagtcataactcaggtgatacttcaggcacactggtctaatggatggtcaccaacagagcacgacagatcaacattaatgttccagtttcctcacatcacaagcatattaaagtattcacttgaaatacttgcatcacatagaatcaaaaggggctaccaatctagaaaccaca

SEQ ID NO: 136543 - DNA, 228 bp, Glycine max
aaactgaagctctgagtaaaatcaaacgacatatactttttactcggatgtccgcatgagtcccgccatatattgagacgctcgtaattgaaaacagaagctctgagcaaatttcaaccaccataactttttactcggatgtgcgatggggtcccgcaacatatcgagacgctcgtatataaaacggaagctttgagacaaatcaaacgacaataacttttgactcgg

SEQ ID NO: 136544 - DNA, 344 bp, Glycine max
ctttctttttaaataccaacggtttgattactaccggacacaatccgacaccccagttaaaaagtattggcgcctgaatttgcctagagcttctgttttcaattccagcctcttgatttttaacggactcaatcgacatcccagtaaaattaatggccgttgattgtctcaaactccagtttcacattcgagcgctcgatatacctccggactcaatcggacatccagaataagtattgtcgttgattgtctcaagcttcctttcaataccagccgcttattattacgggaccaaccgacacccattaaagttttgtctttgaattcctcagcttctgttcaat

SEQ ID NO: 136545 - DNA, 372 bp, Glycine max
  unsure (1)..(372): unsure at all n locations
gtattctatctattaaatcaatatgtttatatttatatcttatatatagacacaattcaccttagacctatacctacctataacttaaaataaatgtatcatattcaattgttttttgatgatggagtttcttggtgtcaaataacatttgcagagatgaagaggattgtgaagatgccaaactaaaacccaatgattgaagctcaagacctacttaagcaatggagagatagacgcaaactctaaaattgattcttatgaagaaggtttcactcactggggctaggagccttggaatcactttggcttcgttatgtatcctggtctacaaaatanaaaataacttntctcttttgtctaacatttttcttt

SEQ ID NO: 136546 - DNA, 300 bp, Glycine max
  unsure (1)..(300): unsure at all n locations
aagtgatgcgaggttgtctccacgagncatggtcaaccanacgttcataatagatagtaataaaacagtaacgaattgggggggttgttttgtttgtaatttaaacaacaatcacaatttaattagaaaataaaaaaattaaaacatgttgtttcccttgattcataacaagtctcttatcctatgtacgaggatttatcctaaccagtcaacccttaatccaccataaattaatactaagagaaattacataggctatattatgtgataagcacacatcaccantaatcatgatgaact

SEQ ID NO: 136547 - DNA, 398 bp, Glycine max
  unsure (1)..(398): unsure at all n locations
ctaagcttcctaagaagattcctanagaagctagagcttatctactcactcctntctaatagctaagctcacctncttgagatgagaagcaagagcttatctgcacacccctaataatagctaagctcacccncatgacaaaatacatgaaaatacaaaaaaatgtccctactacaaagactactcaaaatgccctgaaatacaaggctaaaaccctatactactagaatggccaaaatacaaggcccaaaagaaggaaaaaacctattctaatatttacaaagaagagtggatccaaccttgacccatgggctaaaaaatctaccctaaggttcatgagaaccctatggccttctttagtagctctagcccaagcctcctggagtcttctatccaat

SEQ ID NO: 136548 - DNA, 407 bp, Glycine max
  unsure (1)..(407): unsure at all n locations
tcctgactcactatanaccttgactcagtgtgagaatgtcaatccttaccctcgggagcaaaaaagaaaagaaggaaaatttccaatcaaagaggaagcaaaaaaaaagggagagaaggaaaatttccaatcaaaggaacgaaaattccctatcaaagagtgggagaaagcaaaaagaaaagaaagaaaattcccaatcaaagaatgggagaaagaaaaaaaagagaagtaaaaaagaagaaggctcaagggtcaaagaaaccagaagaaatgtgcagagaggtctttagaccggacaatatctgaacaatacagaattgtcaccaaatgaacaaaanaaaggaaaggaaaccatgacctanaatggtcttctccctttaattgccaaccagaatcagtgcgctagc

SEQ ID NO: 136549 - DNA, 456 bp, Glycine max
  unsure (1)..(456): unsure at all n locations
ggaacgtatgtaagacacatcttcttaaccttggtgaatcttgactncatttcattaaagcgcatatccacttgtagttccaaagtggcaaacctttcaccaaccaagggttgaagaccatcaaacctatccaaaatctttgaaagaagagatgaatcttcttcgtcatgtccttcttcaccaacatgtcgagcacccttcttcacccaagagccatcatgctctttttgataaccaaaggatgctatgactgaagcgcctataaggaaggatctcttgatgggaacatagggtttagaatcaagagggatgtngaagtgttgaaggaaaagggtaacaagatgaggataaggcaatggagcattcaatcgcaatgccttatgcatgcgatatctaacaagatgtgcccaatcaatttgtanacctttatgaaagggccacataacaatgagatct

SEQ ID NO: 136550 - DNA, 381 bp, Glycine max
gcctgacaaaacctatacttctttattggcttggtcctttttgggaccatgaaaatctttggtacctttccccattttttaaaaacaagcaaaagatccttccaaattttttctaaaaaatcaataaaatagtaattggtgatatcctccctcgtcttggatgatcagagagccttgtccctctacaatgattctctctctaaacttctttctctctccaagctctctttctcctttctctccaccttctcattctctctctcaacgaaatataataataaaaagttcttgaatttgctaatgtgcattctttagttggagtggcattaataagtataattagaatttttttaacatgaaaccaaacacacactaaacatt

SEQ ID NO: 136551 - DNA, 474 bp, Glycine max
  unsure (1)..(474): unsure at all n locations
ntactatgcagagaatatccaaggaaaataccttctatcttacttagcatcaaatnttcctaagttatcttttccattattcaatacaaaacatttacaaccaaagatatgaagatgtgagatgtttggttttctgccattgaataattcatatggagttttctttaagatgggtcttataaagccctatttaaaatgtagcatgtagtgttaacggcttcagcccaaaaatattttgcttttcagacttctccatctttttcttgaagatgggacaatcaacccttaaatgtctaggttgattgcattcaaagcatnttagagtagaggatgaagtttctgtccttcttttagatttaaagttgggtcgcttttgatttcctctgactctcaggaactngttgaatcttttacannaagacttatatcttcatcattatccaagtcaattgaatcttctttatcactggcttc

SEQ ID NO: 136552 - DNA, 405 bp, Glycine max
  unsure (1)..(405): unsure at all n locations
acatggcaagttcaacatgctttcaacttatctcttcacagataactatcacaaagcatanaccaagtaaaactacccatcatatcntccaaagctccatacccacgaaaatttaggtgagaagaagtctacccaaacctgaaatttcgaagtcccacacgtagagatgcgcttcacgactctgaanatgccttcctttcacgatttggagcagaaatggctaccaaaggttggagctttgttggagcttcaatggtggaggaagaagaagagaatggcaacgtgagagagagaggaaagagctttctgaaattntggggctgagtgaggagagagagtgttactttntggtttaaaaaggcttntctcttttctattattntattntaagctatgccatatgtc

SEQ ID NO: 136553 - DNA, 456 bp, Glycine max
  unsure (1)..(456): unsure at all n locations
cacatgagagtattccagacttccatgctttttatttctcgcatacgaccactcatcggcaaaagagccctcgaaggaacacaatctctgttcacacatgtctcttccaccgcatctncttccacaatagttggtttcaaaccctgcagtcacactgttaataaaaacatctcacacaaaatgtgatactcaactttatcctagaattaacattcatcaatgactatcaatttcttgattccttatatatataaagattaaattccatatcaatttccatatgcacacttgaaattaattgtctttagtaacttagtaacaattacgaatatcaaagtatgaacttgcaataacaagttggcatggtattttggttcatgagatcaaacattcttgatagcatgaagcgcaacatcgtggtcaccaacgtcagtggcgataatcagcaaatcgtag

SEQ ID NO: 136554 - DNA, 150 bp, Glycine max
ggcgagcacaaaacttgttgacttagagggaaatatatctcagcataaaaatgttaaaaggtggaaagacagaaaaatggctaattaataaaaacagaagaatcaactaataattattataaaacagagaagagcatataagaaagtatc

SEQ ID NO: 136555 - DNA, 305 bp, Glycine max
tcttcaccgccacatcgttgaagtcctctcaccttgctccgcgttagaggaaatcaacaatcatcacccacttgggatatggatgcaagtgattatatcgatgggacactaagtcctgtacttgtgcatgacagactgcttcggaaacatgtcagggaatctggaaaatgaagcaaaacaccttgagcaggtgcttggaaccaagggatgttgaacaggccaccaaaaggcgcgagagcacaacaccaaaactgactgctcgccaagaagagaacgacgctaattgaatacaactatactgagac

SEQ ID NO: 136556 - DNA, 277 bp, Glycine max
  unsure (1)..(277): unsure at all n locations
cttacgtactcccacgtagcccatattctcgttctctcaacaccgggtctncatcaaatctctaaagcttcacaacatccaagaaaagcaacattcaaacagcacaagctatcacagccaagcaaaatatggcaaaggcagaaaactctgctcaacacaccaaccaaaatcacaggctttctcacttaaagaccccagtaacaattccttcgatccaattcgtaaaccgtggatcgactccaaattttactggaagtctatagtacatatgcctaca

SEQ ID NO: 136557 - DNA, 295 bp, Glycine max
acattaatggagcttcaaaatatattaagacttggcgggtatttatattaaatataaaaatattctttttggtatatactagctattatccatagaatacctaatgttcccgtatattgatggattgaaccatcgcactaagtccggcaacatctattgactatatactatatggttaaaaacatcatggtgtcatctcctttggacaatatccgtgaaaatcgattgcgtctaacccccaggtgagctcctattcctaccctcaattaatattatcttctcaacctcccttccc

SEQ ID NO: 136558 - DNA, 260 bp, Glycine max
  unsure (1)..(260): unsure at all n locations
ctctccatcactgcgtcttttgtatgccttgcttgtttgagttaccctcttcttcacagatctttaacaaaactctctggaacacttctgtcactatgttcttgttttttggccccataaagacacccctatgggttcttttggggttttntaatagcatggtgtgaaagttgtcttattcggctatgtaactttaagggatgtagatgctttcttgatccaccattgagttttcatccaatgctcggaggaaattgtca

SEQ ID NO: 136559 - DNA, 435 bp, Glycine max
  unsure (1)..(435): unsure at all n locations
tcagtcgacgcttatttctcgcgagctccatcacacagaaggaagtgtagatccacctggtctcttgctcacaagaagctcagtatgtccctcgaaacaagaaaggttggaccctccaacatgtcgacaaaagaataatctggtacaaagaaaagtcttatttttcatccatcaaaattaaaaccaattaagtaagaaaactccaatataccgatgacaaaaatacttacttacaaaaaacataggtcaattntaagctaaaatcatgaagccacaagcatcaatnttccatgtgccgcanagaacaatacccataaacaagacatgcacatctcacaacaatcaaataatcaaacaaataagagatattaacaatctccacccattaattgaaagcgcaaactgaatcacaaacaccctcttggtcaatcatga

SEQ ID NO: 136560 - DNA, 411 bp, Glycine max
  unsure (1)..(411): unsure at all n locations
actcaagcttatgacactntgtcctagtcctaactcacttctaactattattgccatctataactaagtctttctatttaataaatccttttntaaatgagttctgaccatatttaccaatatgccattgataagttggccatagtcaatccctttccattgacgctattggtctatggttaactttgtagactttctacaatcttcactaaaaatgagttctcttcctcattttctcatttcccctatagttctaatctattatatctctaatagtttaagtactttctcactaagctatcattgctattttctctaatagtaatattttctaaattcctaataattgaattttggaatgttacatgtgtngccttaatcatttattttctaagcagtctctttacttat

SEQ ID NO: 136561 - DNA, 219 bp, Glycine max
ctatctatttgggttgtaactgaaaaattccttctggtaatcgattaccatttgtgtgtaatcgattacaggggttaaaaattgaaacaggatgttcagtagcttctggtaatcgattaccattcgtgtgtaatcgattacacagtggtatatgccattggtaatcgattaccatgtgtgtgtaatcgaatacacagtggtatatgctattggtaatcg

SEQ ID NO: 136562 - DNA, 345 bp, Glycine max
  unsure (1)..(345): unsure at all n locations
ctactaaggcacctgttctagctcttcctgacttttctaaaactctngagctagaatgtgatgcttctggagtgggagttggagctgttntgttgcaaggtgggcaccctattgcttattttagtgaaaaacttcatggtgcgacccttaactaccccacctatgataaagagctttatgccttaataagagcactccgaacttgggaacattaccttgtttcaaggaatntgtcattcatagtgatcatcaatcacttaagttcattagagggcannagcaagtaaacaaaaggcatgcanaatgggtagagtacctagagcaattccatatgtatcaatacaa

SEQ ID NO: 136563 - DNA, 371 bp, Glycine max
  unsure (1)..(371): unsure at all n locations
ttcttctttgctaaaatgaaaaatgttcttccttaaacaatggaggtcgattgagagatgcaccctctttgaaagggatttgtttagagtccattttataaaaatagtgattntgagcaactttcaagttgtagctctaataccaattgaaaaagacgatggaactcacaaaccaatagggaggtgaattggtttctatatcaaatcagattttaaaaatcagagtaaaaaaatccaaggatcatatcacaaacttttgataaatcaatacttaatttcacccttaataaaaaaatctttgtaattttttttctgaaaacatttttntaaccttctgtaattgatcagactgaatgagaagaaagataaat

SEQ ID NO: 136564 - DNA, 438 bp, Glycine max
  unsure (1)..(438): unsure at all n locations
aaagatattgaagaagtttaatttatttgatgtgaagatgtgaaacttgtttctactccttatgactcatccattaagttaatgaaaaatttgagtaaaggaattttgttctcataaatgttctcaaattattggttctttgttgcatttgacaaacttctctagacctgacattgcatgtacaattggtagactaggaaggtatactaataatcctgatcattctcattggattgcattagaaacaatttttagatacttaaaaggaaccattaattatgacattcattatacatgttttcctgcagtaattgagggggttagtgatgcanattggatntctgattctgataaacanaatggacaagtggtatatctttactttagcagtggtgcatatcatggaatctgtaaacnaatatattcacgtctacatgg

SEQ ID NO: 136565 - DNA, 281 bp, Glycine max
  unsure (1)..(281): unsure at all n locations
ggttgctatttgcacccccatttttactaaatacacccccttgctctttttggtgattctttntccgtaatgttacgaaactttacgaatttcgtaacgatgcatgttttctttccgtaatgttacgacaccttacggactatgtaatcaacccctntttggtttccaggatgtcacggaactttacggattgcgcactaacatttccttataatttccggcatgtcacggaacttcacatattgtgctacaatgctttcttttgactttcggcatgtcac

SEQ ID NO: 136566 - DNA, 488 bp, Glycine max
  unsure (1)..(488): unsure at all n locations
ntcttggagaaacttccttgagaagcttctntgagatatcttccttgagaagctagagcttagctacacacacccctctcataactaagctcacctccttgagaagcttccttaagaagattcctaaataagctagagcttagctacacatacctctctaatagctaagctcacctccttgagatgagaagctagagcttagctacacaccccctataatagctaagctcacccccatgacaaaaaacatgaaaataaaaaaaaaaagtccttattacaaagacaactcataatgccccgaaatacaaggctaaaaccctatactactagaatggccaaaatacaatgcctagacgaagganaaacctattctaatatttacaaagataagcgggctcatacttagcccatgggctcganatctaccctaaggctcatgagaacnctannggccttccttggatctctacccaatctacttggagtct

SEQ ID NO: 136567 - DNA, 444 bp, Glycine max
  unsure (1)..(444): unsure at all n locations
aatcccggtaaggtttgtgttaattttatatggtcttgattcagctgaacgcttacaccaatgtgatttcactgaccctaacaacttanaatccagcttctgtntgcttattgcaaattttcttccatttctctgtcttggataggatgtgttgaagctacatgntcctttttgtgattcaagaaaagaccaaaaatatggagtcaggggtagggaaatgggtatcatatctcaaacgagagaagaagttggattcactagttggtcaccgtccaactgctcctccagctcctaaagggctttacatatatggcaatgttggcagtggtatttaccttactcttctttttggatgttatgcctcctatatgcaaactatttacctgattgattctaatatgaatgggacttatacaacatatgtatgctatgctaaatatagac

SEQ ID NO: 136568 - DNA, 332 bp, Glycine max
  unsure (1)..(332): unsure at all n locations
atgaacgtctgtagaaccgaatgactaattgaaaatacactatgctaatataacaaacaactcttcaattataatttatgatgcaagataaatttattgacttttataaaattatctatagctaaaaaatcatatcaatggcgatgattttttgtgattggatgatcatacatcacctttaaactcatgattgaatactataaaaatatatatgcacgcaagaatgataatatggttagccagtatagaaatggaggaaaacactacaggcttgcattctgaagccctattgatacatgtctcgngaggcctcttcatatagaaatcacttg

SEQ ID NO: 136569 - DNA, 306 bp, Glycine max
ttttcctctggcaaatatattttttggggaagatgatcgggatttacccctatggaacttccccacggtggagtctcaccagtacaagtgcttatctgtggaaagggggggtctgtctggttcaccactcggggaaggggcactggctatgctatatgctaataagaggactactttctgcaagttggccattacccgtgccaaatgtcttaggatctaacatgttattatcccacacatactcatcttattgtgacgccaggtctatacagggacattggttaactctctcgtgcctgagatttg

SEQ ID NO: 136570 - DNA, 263 bp, Glycine max
tttcaaatcgctttggcagattttgtggaaatggcagatgatttgccaatgcaaaaaactagcattgtggtgggaaaacatgcagatgattcggatgttgtatagacccaccgcaaaatgaggctttgtttaaacttcgtaaaattgagtcaccacggttacaatggaaaaaggaatgttactggggtctttagtgggaaacctgggattctggtgggccttggcagaaattctgcctcgcccgtttagcggaggggaaaccc

SEQ ID NO: 136571 - DNA, 327 bp, Glycine max
ccagacaaacttcttttagggtatttcctcacttcctttattctaaatttcaatataataggtcacttttatatgtaattggtcatgcatatcttcattaaaaaaacaagaacccttacaaccttattaggttcacccacacccactctagggttcttccttctcaaactctattagcttgaccctctcactccatactcaacattcttcaagcccccaaaagagtctcatatattatggtgcccatgggcattaaacttgccctccaaaatggccatcattgtccttgagcttcttctccttctgcaagtccctacaatggttgat

SEQ ID NO: 136572 - DNA, 381 bp, Glycine max
  unsure (1)..(381): unsure at all n locations
tgccatcctagctcaagaagctatccagttaatctccacatctataactaagaaaggttatatngatcttaaaattgacctatanaaggcatatgatagggtcaattggaattctctgaggataacactcattgnacttggcttcccatcttccattgtcaagcttattatgtggngtgtctagggttcttcccttttagttctttagaatggtatgaagctggagaaatttagccttgataaagacctaagggcaggtgatcccctctcaccttaccttttngtatcatgcatggaaagataatagagtattcaagatctcgtatctagaggtgtgtgggaaaccatcatatgtctangggaggtctatcggtgtccatc

SEQ ID NO: 136573 - DNA, 311 bp, Glycine max
  unsure (1)..(311): unsure at all n locations
caaacaccgccncacatgccccaagggctatcaataatcgaccgaagcactttcaagtcaattagttggaaggaaaataataaagaataaaaacgtccgaaataattacaataaaaagagatagtgtgccatccaagagaaattaagatataacttaccacgctctcttgctcagatgatctaccagcgaaacagactttctttattcttttaatggcaacatctgtgcctcgccattttccatgatacacagtcccaaatgtaccagaacccagtatcttcagctctgcaagagcgtcatcattatgacc

SEQ ID NO: 136574 - DNA, 382 bp, Glycine max
  unsure (1)..(382): unsure at all n locations
aatcaagccaaggctattgtgcaagccatcaatggggccaaacacaccaaatgattattatgatggattggctcaaatatctcacaaaggtaaaatcatcactttcaaattgagctttcaaaactatcatgacatgtagaaaaaaatcaaggatttcaagtcacaaaatgtcaagaacttttnattttcaaacaattacccatntcttgaacatatcctataattcaaagaaaaacatgcaaagtcgtacgtgcacacaaaattgacccacaatataaactgaaaatccgacgaaactaacaccatttacaaattaacacaacttacaaattaaccatacccacaaaactagcacaaccaaagaacactcccccccccccat

SEQ ID NO: 136575 - DNA, 503 bp, Glycine max
tacggacctatgatactcagctgtgcaattcaacgacaatactgtgtactctaatgttctattgtgtcccgtagtgtatcgagacgctcatacttgaaaacagaagctcgcagcaaattcatacgacaataacttttaactcagatgtccgattgagtactctaatatatcgagacactagaaattgaaaacagaagctcagagcatattcaaacgacaataacttatatctcggatgtccgattaagtcccgtaatatatcgagatgctcgaaattggaaacggatgctcgtagcaaatgcaaacgacatgctcgtatcatatgcaaatggatgctcgtagcatatgcatacggatatctccgttttccgattgtgtcccgtttatattgtgacgctatcatcgaaacataagcgtactaatcaaacgacaatatctatatgcagacgtccataagtcctgtatatatgagatgctcgaatggatacgagccctgacaattc

SEQ ID NO: 136576 - DNA, 464 bp, Glycine max
  unsure (1)..(464): unsure at all n locations
actaagcttacccgtcttctatctggtccaaggcttggtgttttaatctattccaacaatcattgtgggatagctctgataatntataagaaggagttgatcccatgattgtcgcaacttttgatagaccaatagtggcaaaatggaagcaccctttgcctcataaagcagtacaaattttaacttctaccgattctcttgcttgtcatcccatacgtaatccaaaacaagcaaatatctcttacttcgaagtagatcttanagttctgtttgtagaaaccctagatccanatcctcataggccctcttacttgatgctctgattatggctgttacctactgaaatcttccgatacacatacccaaattcttagctaanaatgactacactctcttgatngtaatgacttgngctagtgggtttttccaagtctgcctatccttagaattggatagaatcgata

SEQ ID NO: 136577 - DNA, 387 bp, Glycine max
  unsure (1)..(387): unsure at all n locations
gacactatgaaactaagctaaggatggaacacttacttgttggtgatgaataaaagcttctaacggaatcgaagaatgcgaanagtagagatcctatgggtgcaaactcgtaaattccgtggctatgactnttgaaaggggggaaaagaagttnttgaatgcaaaaacgccccccctttcgtcacttttatantttggtgcaggggttgctcgcccaggcgagctaacctgcactttttttttttgagaggaacattaactatgtcccctccttccttatgggttagcactttgcctaacttgaacttacttaagttagaattaggcgttgattacttattcttaatacaaacaaatagtaaataataactgcgaatacaaaggata

SEQ ID NO: 136578 - DNA, 173 bp, Glycine max
  unsure (1)..(173): unsure at all n locations
ccgcatgaactaccccagccgaacatagtccgccatatcccggnctcacccacacccgtaaaagaatctattccctttgcggaagataagggaaagatttgagcgcttgaagagaggttaagagcagtcgaaggcctcggcaattacccattctcggatttggcagatttatg

SEQ ID NO: 136579 - DNA, 477 bp, Glycine max
  unsure (1)..(477): unsure at all n locations
tactaagctgtctagcgttatgcaagacagagaccaacatgttatttctattcatcaataccaagaagaagtaagatctagccatgacccacaagcacacagtggcggacgactatgcccgagtgtacacggaaaaggaggctangggaagggtgatcgactcgttacatcaagaggcatcaatgtggataaacctatttgctcttactttgaatgagagccaagaacttccccgattgctggccaaggccatagcaatggcggacacctactccgcccccgaggagatccacagacttctcagctattgtcagcatatgatagacttaatgacccatataattaggaaccgctaggaagtttgtatttgcactcagatcttgactagttataactttctgaataaaatgagtttattctcgcattttactccanaaatcagtgcgaatcaaatcactcccngcatttatctctagc

SEQ ID NO: 136580 - DNA, 265 bp, Glycine max
  unsure (1)..(265): unsure at all n locations
aaaaaattcatacataagaagcttaagcacattgcagtggccacaccaggtgtgaatgtgatttgatatttcactctcaagctactagactaggtcttcctatgaacgagctaattaagctaatacgcactacgcagtcataatggcgctaaagcttcgttcacaagacacacgcctctgcattttcatgaatgcaccgatctcagtagntatacagatataatggcagaataaatatgcatgtcccacatcgatctaatctatc

SEQ ID NO: 136581 - DNA, 301 bp, Glycine max
tttttgttcccgctctatgtttaacctggcatgttgatattctttagctcatcacactttttctctgacccttagtgacctgccgtctttaacttctttttcaccactcttgtcttttcgagctctgcttcaaagcttgcacttcttcactttcctcaggaatttcagcctctttcccacttatacttttttaactttgggagccaagttatcccttgcgttctagacatcaaccacttgtgatagacgctgatgacgccattgctacttcccctaagctcttatcttttcttcccactct

SEQ ID NO: 136582 - DNA, 459 bp, Glycine max
  unsure (1)..(459): unsure at all n locations
aactcagcttctagcaatactaagtacccctttcgtctttttgtatagtaacggaagccttacggaagngagaagaatttgattctcatctttttttctcttccctttcgccaatgttaagtgaaatacgcgtacccaaggtttntggaaatttaacggaagcactacggaagccacggaagccccggaaaccatttttcaaaaacgtggaagagcttgccgccaagttgcttcctccttaagcaacccaacttctaaaatgtttcggaagggcctagattcgaattgctatttacacccctatcttgataagttcacccccccttttttgtgtgtgtggctggtctctttccgaaatctcacgaaactttacggattccgtaacgacatccattttctttacagaatgtgttcgaactttacagattacgcaacaatgctcttttgacttctggatgt

SEQ ID NO: 136583 - DNA, 501 bp, Glycine max
  unsure (1)..(501): unsure at all n locations
cctttatgtgaaggatgtgactcttcacattntatacttgtatttaacgttcaaaggcactggtaatcgattaccaaaacattgtaatcgattataattttttgaaattaattgattacaacaatctggttattgattaccagagagtaaaaactctttggtaaacatcgtttgagaaaaatcatgtgctactcaattcttgagaaaaactnttcatacttatcttgattaagccttctcttgattcttgaatcttgatcttgattcttgagatcttgaaccttgaatcttgattcttgactctaaactttcttctcgagtcttgaattgttcctgattcttttcttgaactcttgaattgttcttgattcacttgagttgttctctgattgatctttgactcacttgagttgttctttgattgatctttgagctctctgtcatcaccttatgcatcatcttttgntatcatcattgttatcatcaatacacccttgaatc

SEQ ID NO: 136584 - DNA, 368 bp, Glycine max
tgggcataaaattatatatatagtaccattacttggagcacgagcataagagggtgagagctggaaagaaaaatgctgaagaatcatagccagggcaaactttgcctctaggaaggcaatgttttgaagccctttagtaaatctaactgggttgaactcttcgggattctcccaatagttactatcataatgaagaagtaacaatggtaaacaaaactcaaccctagccgggatggacatgcttcctacccttgtttcacaccaattgtatttgtgaatggctattataggaaatatagtctcacaacttcattcaactatcattttttttatcattgacacctgcatatatataagtcaacatttgg

SEQ ID NO: 136585 - DNA, 301 bp, Glycine max
  unsure (1)..(301): unsure at all n locations
atgcccggttcttttctccttgattggtatccctctgaatatcattaaaaatcatatttgaatattnggatgattggttatgtactttgatagagtgagaattttcttatatctaagatgagacaatcatcaactcgtttttacgatataaacactcatatagaacaatgaagatgtatataagtacgactntcttcaggtcttcaatgatactgtctttgtgaacatggatcttgcgacctacctgacctaggaataaaaataggcataatatgccatttcttcggaggttaaatatatc

SEQ ID NO: 136586 - DNA, 266 bp, Glycine max
  unsure (1)..(266): unsure at all n locations
aattcatttcagagaagtattaatttggataccgaactcgattctaattctgaatgtaatggtttcgttgttagattctacatatgtatctggtatttaaaatcaactagtttgcaacccgttcgtatgcacgggttgtttgatttttttattcaatcagtattggaattntttattggatggtttcattggttctctttcttgaaggtattcattacttaagccatataagatgttgntttttacaataggtacataaacacata

SEQ ID NO: 136587 - DNA, 283 bp, Glycine max
  unsure (1)..(283): unsure at all n locations
caaaaatatgggaagaatttaaacatttgtggcaatacctatgctctcctgtatttggctatttactacatggaatgaaatatcttcaagattatactataaataatggacaaagtggtgaactaataaagntgaactagattggacaagcaaaagttcaggtcttatgtttgtcggtgaattaaccanagactttttttattatgctagaggcaagagttagatattaagtaatatgcgacgttattgaatggtgagaccttatctcttcatgaattgctat

SEQ ID NO: 136588 - DNA, 389 bp, Glycine max
  unsure (1)..(389): unsure at all n locations
cctttctttccttcgcaacttgagttcactattgctaccccataaagcttcgcgaaatttgttccggccatactctttcttgcgggccctcttggtctctggttcaaaggctcttgcggtaattgcattctcttcccgtaacccggcacactccttccgaacgtgtgtagcggccaacttgaacttctccttggcaagttttgcctttcctaactcgcttttgagagcttggacttcttcgtcctcttccggtgcttcaaaactctcttcgctgacgaactttaacttggcgagccaatctaaacctcgtatatgaaccttcagccattcgtggtacccaccaatgatngccatacgaatgcttctaagctcttgatctttccttaacg

SEQ ID NO: 136589 - DNA, 378 bp, Glycine max
tctatccttcctaagatggagctcttcccagtccccctcattaagaactagctcatttcttcctctattgcccttagttgaatacacctttgtttggttctctatttgggtcttaaccctttcatgaaacttctttagaaactctgacctagattccccttctttatgtataaaagaagtgtcaagtggaaggggaatgaggtctaagggtgttaagggattgaacccatagacaacctcaaaagggtattgcttggtggttctatgaaacccccctgttgtaggcaaattctacatgaggaagatactcatcccaagacttatggttgccttttagaagagcccttaaaagggtggataaagacctattcactacct

SEQ ID NO: 136590 - DNA, 463 bp, Glycine max
  unsure (1)..(463): unsure at all n locations
gctnttacatgcatgtgcacaccatatnttctatactttgatccactgatacaatctatttgattgaaaagataatttatactactcttctaatgtagnggacaactaaaattaaaataatataatagaaaatactgcttaagccattcaaatccagtcattttgaatctcaccattagtatcatgcatgtcaaagataaggagaatcangcatcgtaatgcataacacaaccaaacattaaaagaaaacatgcttcctaaagccaaccaaggtaaaaatgtattcatatttcatgaagtttttcaaaattatacgacacatataaccatatataaaaacatggcagaacaatctcaccccatgaacaacatagaccacacatttcagaaaatgagtggtaaggaaaaataataaagcactggttataaaaccgtagatacaccaacataacaagggtgtcat

SEQ ID NO: 136591 - DNA, 400 bp, Glycine max
  unsure (1)..(400): unsure at all n locations
ctgtttggtttgtgtttatgtttgagtntgtgtttgaggtttgtgttntggaagaaaaactcgaagaanaaggtttgagtttaggtgtatatttctcttcatagagtttggccaacgaaactgttttgaggagtgatgtangtgattgcgcaatgacatccattctgatattaggttttaatcctcccacaaagcaatccaatagagcttcttgtgtaattccttgtactcgattagctaaagccgtgaactgcacgtaatatgactgaactgaaccacattgagtgagtttaaacaactgagatctatgacattcacacggtgatgggccaaattctgtctctaaggctcgcgtaaaagcaatccatgttttgaaatgaatttcacgagtcatcatttg

SEQ ID NO: 136592 - DNA, 251 bp, Glycine max
  unsure (1)..(251): unsure at all n locations
ttaaccagtatggtatgaccaaaatgatgattcactacttgcataactcctcacggcttaagtgtttcccttgaggtaaatatttattgcatttgcaatccactcattggaaagtgagaattcactactacaatattgatatttaacatcaatttttttggacattcaacatcgatttcgaattgatgttgaaacgatcgtcgttaaaagtagattatttntaacatcgattataaaaattaatattaaaa

SEQ ID NO: 136593 - DNA, 299 bp, Glycine max
  unsure (1)..(299): unsure at all n locations
tcatggcagatgacattttnaagaatccgaggtagaattctcaaggatttctcgttgctgggttnttggttttattttattttatgaaattctaatattgcttggatgtgagttnntattgactaaacaagtttgttgagcatgttttttctcatgcttctaatatttggaatntcctttnttgaattaacatgcaggccttgtatttaaactgcccacaactcaatgatcttaatctaaattcttggtagaaattgcatccaggtagtcatattacgccatgctctattgtcattatc

SEQ ID NO: 136594 - DNA, 327 bp, Glycine max
agatcggttacccactcattaatacaactagcttattgctagcaaaatcgaggcatattcatagttctgatgctctcaatgttaatctccttattgtggaaatgcttcttctgatgatgagatggcttctgatctgaggatgaatcatctccacctcgaaaaggatcctgcagtgcaagattgaccaaagttgaccaaaaaaagtcatccgtgtccatatttcgacaaaggagtacactttttcgaatggagacgaccttctaaggagactgcattatctactagcaatggtgtgattgatattttagcccaattctattgttaaag

SEQ ID NO: 136595 - DNA, 485 bp, Glycine max
  unsure (1)..(485): unsure at all n locations
ttgtgacctgaaactcactcanagaggatctcatacagctattgtaagataaccggcccacaagcaaaatatgagcaaacataaggatcattgcttgctgctatgagacaaaaagattatgaaagcaggcttgatggtggcaacttaagattgcccaaaccacaaagataaagctagcaagaacaacatctttagtttgcaggcgaacaactaatttgccaacaaccaggataagatccataggagaagcaagattaaaaccatgaccagttaagttatagatgataaccaagaccaaatctaatctccaacccaacttcttctaanagagagcatactntgtgcaaagcaagaatggccaaaattctttgtaacatttcgtagaaatggaagacattanaaaaatatatggaannatctggttgtatactttgganggagtntatccatctttagtcatangacatgtangatgaagagagaga

SEQ ID NO: 136596 - DNA, 320 bp, Glycine max
  unsure (1)..(320): unsure at all n locations
ctcatgcaacaattggtagcggctataccagacatttttgccaacaaagtcagggtaacgataactcgcctgtgctttttcttccatgctatatgtagcaaagtcattgaactagtcatgtttgatgagttggaaaatgaggccgcaattatactatgccagttggagatgtattttccccctgctttttttgacatcatgattcacttgattgtgcatctggtcagagaaatcaaatgctgtggtcctgtttatctacggtggatgtacccagntgagcgatacatgaagatcttaaaagggtatacaaagaatctata

SEQ ID NO: 136597 - DNA, 435 bp, Glycine max
  unsure (1)..(435): unsure at all n locations
gctccggagtatgacagtcaccgttttatgagcgcggtacaccagcagggcttcgaggccatcaagggatggtcgtttctccgggagcgacgcgtccagctcaagacgttaaagaagcgctactaggaggcaacctagtaccttttaaatctctgcttgttatntgatcagctntgtttctcaagtcatagtgggacacacctagttgctcatgatcctaagaatttaaataaaacgagcacaagctcggaaggtagtcatacctcacaaaatatatgtatgcgtgtttaggtagtgaaaaataccttatgcatgtatgtaatntatgtagcaacaaactacctcacaaaatatatatatatgtatggttaggtagaaagataccttanatatgcatgtatgtaaacaataacacacttcacaaaatatatatat

SEQ ID NO: 136598 - DNA, 365 bp, Glycine max
tatatatacacgcctaaaatctatgctcctaaattatctctctttctctaacctttaacctcattatttttttaagaaaaaatttaatcattgattaagaaattaaaaaaatatttttattgagatatgtaaaaaaaatggtgttcatgcatgattcttctttacgtttttttattataatctttataataaatattttttttattttaattctttaattaatgtcttaagattacttattaacaatttttttagacacgaatgaatggttttttttaattaattttttcctatttggcatacagactttggagatcgactatctctgaaagcgaatgtctctcatataaaatggtaaaaaagct

SEQ ID NO: 136599 - DNA, 523 bp, Glycine max
  unsure (1)..(523): unsure at all n locations
gacactatgaaactaagcttcctggcctttaagacttaaggactcatgatcactatgtatgacaaactctttgggtaataggtaatgctgccaagtttgtaaagctctaaccaaagcatacaatttcttatcataagttgaataattaagggcagtggctcctaactnttcactaaaacaagctattggatgtccctcttgcaacaaaacagccccaatacccacatttgacgcatcacactcaatttcaaatgattttgcaaaattatgcatagcaagaatgggtgcattagttaacctatgtttgagggcagcaaaggcctcttcttgttcttaccccatttgaaacccacattcttcttaacaacttcagttagaggtgcatncaatgtactaaaatcattaacaaatctcctatagagactntgctaaccatgagatcccctcacctcactcacgggcttatgtggggcgcattcttgggatggctaaccttttccacatcacccgtactctttaacac

SEQ ID NO: 136600 - DNA, 256 bp, Glycine max
atggaatggctccactggcatatattctatggattttatctctaaccctggctcctaatgaacttggaagaccggctagaaaggtttctttccaaaaagggtggtgactatcttctctagtgtaaaccctaggtaggaaagtatctctataccacctaaagtctgctaagggtctacacttaacgtttgataataattctgcagacctatctttccacaacggtgggtctccaatgaaatgatgggctattgaaaa

SEQ ID NO: 136601 - DNA, 291 bp, Glycine max
  unsure (1)..(291): unsure at all n locations
actaagctgagggtaaagtctacgatgtacgtgcttatcttcttngttagccgtggctatacgagacatcttgccaaacaaagtcaggttagccataactcgcttgtgctntntcttccatgttatatgtagcaaagtcattgatcctgtcaagtttgatgagctggaaaatgaggctgcaattatactgtgccagttggagatgtattttccccctgctntctttgacatcatgattcacttgattgtgcatctggtcagagaaatcaaatattgtggttaatgtctatc

SEQ ID NO: 136602 - DNA, 327 bp, Glycine max
  unsure (1)..(327): unsure at all n locations
gcttctcaaggaagctttctagtctataaatagaagcatgtgtaacacttgttgtaactttgatgaatgagagtcttgtgagacacaactcanagttcaacttctctcccttttttcttccttcaatttcgtgctctcccctctctctttctctccctctttcttttcctccattgaagcatcctctccaagcttcttatccaaggctcatcttggtggtgaagctccttcttccatggcttattccctagtggatggcacctcctctcacatcttctcctttatctcctcgcacgcaagaggggttaggcaattgtgaaataacat

SEQ ID NO: 136603 - DNA, 299 bp, Glycine max
  unsure (1)..(299): unsure at all n locations
ngatcttgattattcctcagtgctgtaacatgctgttttctttatacatgtacntcatttaactgtctttgggctaggcggccacgctcaacacagtactttcgacacctactgtacattgattcaccaatgctgttatgggaatgttgcgacaatcctntataaccttattgatacattctgagangtcggatgccatgtggccctatcgatgtccttctctatcataagccatcgtccattttttctttgtaatgcgatcaatccatgttgctatagctggactcatatgacgaaat

SEQ ID NO: 136604 - DNA, 250 bp, Glycine max
cacttggtattctttgagagcaaacttcacgtttttggcgaagtgggtggtgtttgagaattgtcatttggtgttaggtagccaaatttttttaggtagcttttgagctcgcccacgcctctcaccctttgtcccttgttgatttccttgagttttcggagagttctggtgaatggatgctcggagacttctaaggttcttggctcaacaaagtgaaatggatcactacaaagaagtaaagacgggattg

SEQ ID NO: 136605 - DNA, 416 bp, Glycine max
  unsure (1)..(416): unsure at all n locations
acgcttgaaagtgtattacttgtataaacaatcatggcctaattcattcttaagaattaaaaaatcatttttaattaccaaaattaatgtgacattaaacagtcattcttacaattttagaattgaaataaaattttgtgaaatttttaaatgtacctgatatggtccgactaacaaattttaagccatcgtcattttacatgttctaatagaattagatttcaagtccatgaagctatntatcactacaaanaagtagtaattcatttgaaagaatanaaaaattattattattaagtaaaagtaacagttaaaattataattaaataaacatacatatataaacattgggtantatttaaacttcacatttaattgttcaattaaacttatatttaccaagaactttctatgtg

SEQ ID NO: 136606 - DNA, 378 bp, Glycine max
aatcaatggtaccaaatacgccgtggcattttttgaaataccatggcattggtaacatccggtttaaaaaaaatgatgttaacaaggccattgtaaccatggttatttaaaaatcgatgttgtcaaagcactcaccacattggtttttaaaaaaatcgatgtaacatgacgattttaagatcgattatttaaaaaccgatattgcctaagcactcgcaacatcattttttttaaaaatcaatctttcttttgttattcattgttcaccaaaaatcagttttaagaactggtgatgtttatttctatattaaaatcactatcaccctccctctctctccacttttctcctctattcttcttctcatcctcctgaaacac

SEQ ID NO: 136607 - DNA, 444 bp, Glycine max
  unsure (1)..(444): unsure at all n locations
atataatnttggtaactttatacataaattaagtgcgagtatgtatttaccggtacccaatgagtatgcagatattgttacctgcatgaatnttctttcagatattgaagaaaaataatataatactctaccatgactctacccattatcatccttaagtgcaatgancaataaaatggaacaagaatatagagaatgaatgaaattaaagcatggcaaattagtcaacacanaaccatttaggtagttatgggtatccaataaccactcaaagcccaaaaatatttgagaggtgtgaatcgaggaaagacatanaagaaataanattatttaatgcataccatattttatgctcgatgaccccaaaatcctaatattcctttttaccctttcttatgaagaaaccctanttgcatctcccaactttatgacactgaccctact

SEQ ID NO: 136608 - DNA, 336 bp, Glycine max
tgctaatttatggaatgaaagcgcagaatgaacaatcttaatggtttcattagaccagcgatgcaaatcatcgttcttatatattgaatgggccttccctggtcttttctcacactgcaaatatggtctaagagggaatgcttctggtggaagaacagttgcttcctcaatccagacaaacaacaatgaaatagtagtgcatacagtgaccaggtttttgcatgaactgagacacaaccctacagattctgagtgatcaaagagcacatgaggataacagtagttatatatcgtgtgaggatcaaaatatatcattatatccacctaatgtaattc

SEQ ID NO: 136609 - DNA, 459 bp, Glycine max
  unsure (1)..(459): unsure at all n locations
agcttctgaagagacatatattatctaaacatattttttgaagaaaaaacatcaattttaataaaataagaaattttctattttttagtgtgtttgcaaaattggttttattttaaaaatatcttttaaaaatttaaacaaacccgaccataaccaacacaataaagctaaaacaattaagtggaaaaaattaatattatttttataaatgaaataattatgtggcacaaatgtttattatctcatagcatacaagttggatttggcttatacaagttgtacatgtgtactgtattccaaagtatagaggaattgatctggtctccgtctccgtctccgtctccgtcntctaaattccttagctcatgtcacctttcaactatcataattcttcattctatatcatgaaagtatctgaggacttgtaacttgcaactgcaatgtctgcactactgcaat

SEQ ID NO: 136610 - DNA, 469 bp, Glycine max
  unsure (1)..(469): unsure at all n locations
taacggaattgattctgtgatattcctcttgcaccananatatattatattctgtagcagaggatagtataaataagtatgtaaataaaatcagaatcatgaatgagaatatattttccttgccttattccttctccccttctttctatggaggccctggtcctcgaaaccagctaattagatcttccccctatcagactagctagttaactaatgagattntaatttactcgaaagaattgagaaagctggtggtggttctgaaacccttttgttatatatattttttcattcaagagaacttgcattgtccaccaaggcctngagtactgttgcccatttctntatacccgacgaatgaaaaagctagctagtggttgggaaanactggatttaatttcaacgctggtttggtgttgaatactaagagaaaatgtatatatatctacatatatatatatatatatat

SEQ ID NO: 136611 - DNA, 370 bp, Glycine max
  unsure (1)..(370): unsure at all n locations
gtcttttgagtatgtgcattcgattatatggtgaccatctagagtgaaaactcatggtggaagctcatactttctcaccatcatagatgatttcacaagaagagtatggctgaatgttttgaaaaataagttataatcttttcaaaaattcacaatggtttatctaggccttttgagtatgtgcattctgatttatggggaccatcttgagtgaaaactcatacttcctcaccatcatagatgatttctcaaaaagagtatggttgaatggtttgaaagataagtcaaaatcttttcaaaattcagagaatggcatactcttnatggaaatcaactaggtacaaacataaaagttttatggactgacaat

SEQ ID NO: 136612 - DNA, 374 bp, Glycine max
  unsure (1)..(374): unsure at all n locations
cctcgttggaaggcaacgacaaagggatctcatattgttctggctagcttgccaagcggntctatggacccttccaagtcatagaatgcattgngctcgttgcatataagttacaattgccagaggaagttaaaatacaccccgtattccactgttccaagatgaagtcttttcgcgggttcaccgaaaatatggcgggaattacctggcacaaggagttactcaacgaccaacccctcgtgtttccattagctatcttggattaccgtagagcatccaccgaggatccctgtgaggtgttcatgcaatggaatggtatctcacctgatgatacctcgtgggaagactggaatcagctgtgtgaatactaccac

SEQ ID NO: 136613 - DNA, 457 bp, Glycine max
  unsure (1)..(457): unsure at all n locations
cttgactaattgtggactgttctgccacttctttttttttttaacgtgaaaccatggttgcaaactcaaaactttaattgcgtgttccattgtacccctcaaaattttatttagtttttctgctcgatattttctgctactgtattanaatatacgaacggatgtggatttggcatttttaatttataaaagttntgttacattgctcaatgttgtttcttatgtgatcttacttcagcantttgtcctgtcttatcatttcaatganaaatgaatcacgtggcttggtggagtttagtggttaattaatttgttcattcctttggnttctgttctattctaattagggaaactgcacaataaattctagcagttagggggttggttctgagcctgtntcctcatagctttctatggcagtggcaatagttactgaactgaatctgccatagcatct

SEQ ID NO: 136614 - DNA, 326 bp, Glycine max
aactcaaaagcattcaactcaaatctttgtggtttatgaacaagcatacacaacgattgcacacatactaagccttctttgttgaccacaaatttgttgttttgacgagaacctcattacaatcttcaagcacatattcaacctttttataaaatattctgataatgccaaaaagaaagtagccaagctatctgtatgatacagcatcatattcttgcaaaatcttgtttgcagaaggaaaaatgaaatgaaaataatggccaaacaataacatatatcacaaatcttaaaatgatgtcacagaagaataaactcttaaaataaca

SEQ ID NO: 136615 - DNA, 188 bp, Glycine max
  unsure (1)..(188): unsure at all n locations
aaaatcatcggtgtgactcactgatgcatcctacccccccagggcattgataaagactccaaaatattggacccgagatgcaagagaggccctaatggtctcatgagccttatggtagatttttgcccatgggctaagtatgagcccactngtctttgtacatattagattaggatttcattattttt

SEQ ID NO: 136616 - DNA, 423 bp, Glycine max
  unsure (1)..(423): unsure at all n locations
ctaactgcatttctgtcgatgtcatattcttaattattataggnttgatggatggtgtgggtaatagtgggggtaaacttgtggattttacggattgagggctattttggtttgtgtttaagtatgagtttgtgtttgaggtttgtgttttggaagacaaactctaagaaaaaggtttgagtttacgtgtatatttctcttcatagaagttggccaacgaaactgttctgaaaagtgatgtatgtgattgtgcaatgacatccattctgatattaggntntaatccttctacaaagcaatccaatagaagcttttgtgtaattccttgtactcgattagctaaagacgtgaactgcacgtaatatgactgaactgaaccaatttgagtgagtttaaacaactgagatctacgacaatcacacg

SEQ ID NO: 136617 - DNA, 429 bp, Glycine max
  unsure (1)..(429): unsure at all n locations
aaactaagctttacatgcatgtgcacaccatatatactatacttttgtcttttgatacaannctattgattgagaagataatttatactactcttctaatgtagtggacaactaaaattaaaataatataatagaaaatactgctaaagccattcaaatcaagtaattttgaatctcaccattactatcacgcatgtcaaagagaatgagaatcagacatcgtaatgcataacacaacaaaacattaaaagaaaacatgcttcctaaagccaaccaaggtaaaaatgtattcatatttcgtgaacttcttcaaaattataagacacatataaccatatataaaaacatggtggaacaatctgaccacatgcacaacacagaccacatattatntcagataatgagttgtaaggaaanataataatgcac

SEQ ID NO: 136618 - DNA, 325 bp, Glycine max
taacactaatggcattttacacaattgcagactggggccctttagttgatgttgctgggttttggttcttgagccttgcatcaaaagattaaccccgcgaagattcttgccatgttgatttaagaaagaccacctctatattaaaacattaatttgactggagaatatactttttctaaactccctgttcatgtaattggacataaagtaattcaatatgtatataagaattaatagtattccattattgttatggaatacctgcttgatttgccacatccacttaatagtatataagatatctacttagattagattacttctc

SEQ ID NO: 136619 - DNA, 457 bp, Glycine max
  unsure (1)..(457): unsure at all n locations
acacttaaatactcagcttgaaaacnagttacaaccttactgcattcttcttttctcttttgaaaaaactntttgtacattcttgtaaagattagataaactctcaaaacactttaaacatgtggtggcgggatgacaaaaaaataatgttttgaaaagaaaaaaaaagaattgccaccaacgtttattaaggaaaacataaaaataaacctctttagaaacaaaaatggtcttttggaccaaatttgagttcgggagtcaattacatatatgaaatgtattagcaccccacgatgtttggcctaaagatcggtatacctttaattaaatctacaaacatattctaactntaaatttatttattttacccctcacaacacaatgaatattgttagacatttaatctattaattttttaatgagaatctttatttatataagaaattattattattga

SEQ ID NO: 136620 - DNA, 484 bp, Glycine max
tggtaatgagatgccagatgagccagactcatggatattgttttcattgctcaactcctggaggaactaccgtgatttggaaattggagaggaaggttccagaaagttattagagcttgaaccgaataaagcagataatcatgtattgctatcaaacttgtatgctggattaagatagcgggatgaggtgagaaaggtacagcatagaatgaacgagaatggcctatataaagatgcacgctgcagttggatcgaaataggaggaaaggtgtatagaattcttgttagtgatggatcacgttcggaatcacaagagattcaccagacttggataaattggaaataaaaaagcgaaattggctataacccgcacaacgtggtgctatgaactggagaaagtcaaaattagatgtgaaagccttacgaaagccgcattctttggccattaaaccctaacgacaaggcacggttgcaaactaccatt

SEQ ID NO: 136621 - DNA, 440 bp, Glycine max
  unsure (1)..(440): unsure at all n locations
tgaagcgacttccaatatatatgcatggatcttgttgctttctttggattcanaaggggttgcgttaggtctcaaccaagttatctgttgggtctcaatcaagagaaggtagctattttgaagggttagatcttctacaatgatattttcattgtacaagacttttttaatagacaaataaaatatatattatataagtaaaagaattctggcaggatcatgaataattcccccacgaccccaggccactagacccttaattaacggcattgggaaagaatttagtcatagaaattatctaatttaatttaatttataaaacaaatgttttaaatataaagtttaatgatcttaattntatactattatctaattataaatcaacatatttcttacggtatgtctaaaatcatgaataattgagataaatctaattattc

SEQ ID NO: 136622 - DNA, 354 bp, Glycine max
  unsure (1)..(354): unsure at all n locations
gtgctacctacacctacattaatgttcagctttaccttctcctccatcgatggtcccttattattcttcatgtatcacctcacaagtcttgtgctacatgttggtaacatgattctttcaaatctcacccgagtaaacctgctatagaagctagactagattatctatggcgcaaattacttgtttatgttcttgaaccatgagatgtgttgagatcacgatactctgagtacattcacgctacttttagtggatgaaaccaacaccatcgaatgcttacacaaaccttatactatattcacaccttcatcatatagatngactttgccacctactgtacgtttctcataaaat

SEQ ID NO: 136623 - DNA, 354 bp, Glycine max
  unsure (1)..(354): unsure at all n locations
cattgtgtcgctaaactaacatgggacaaacgtctcgcttatcagcttatctcgcactttatgcgcaaccttgagacttgggctctgacgtatcccttggcacgcttagcgcgctgtagctgacttatcggtggatgcacgctgagacacacagagtctgcttagcgcgactgctccttttagcacttcaagattttagcccttttgacctgaattgaacagattatatctttaatcaaatggagaatattgtatagacagttttactgataaacaagattatttacacatccctcgaatgattttagataggaactcttctgtgtggaaatgtttctatctanagctagcgat

SEQ ID NO: 136624 - DNA, 182 bp, Glycine max
tcatgccttactggatgcgagaatacactaacctcatgtataaacttgcgtaattggtcaaactcctctacttaaggctatttggatgttggtattacctttgcggtaagatcgctacagatactgaatactttcatttgcgtgatggataatcaatcttctctcaactttcaggctaatta

SEQ ID NO: 136625 - DNA, 412 bp, Glycine max
  unsure (1)..(412): unsure at all n locations
ttattctgggacaaccctatctatcaattgctaagtgtgtattacgcatgggtaaaggtaagttggaacttattgtaaaggatcagaagatctcctttgacttanttgaggcaatgaaacacttagatgatagtgaagccagttttgaaaaggaaacattggagcaggagatagaattaacaaccatggtattataatcgcctctggaagaagaattcgacaatgtgacagaatacctagttagtgaaaatgaaggagaagagatagcttgtattgaagagctagatattccataagataagtctactagtcatgtgatgtttgaaaccttatataacagtagacatatggaatagcccaaagtagaattgaagacncttccagcacacatgaagtatgtatttttggagta

SEQ ID NO: 136626 - DNA, 340 bp, Glycine max
  unsure (1)..(340): unsure at all n locations
cattcgaggatgatgactcgctactaactatgccgaaagtatttgaattgaatgccaagaacacctttctattaactgcatagtccatgtcaattatttgtttgttgttgggtgtttttttttatttttagaaatgggtttatgatcccaacatggttggctcatggtgcctaacacatgcaactaagaatgtagtgtgaaatatcacgctttctctcttttggttttntagaggaaaacacaacgatgagcaaacatgaaaacaaatggtatgcaattntgtagaatcaaaagtttggtgaacgcatatgcatgatgatgccatgactcatgcaaaatt

SEQ ID NO: 136627 - DNA, 421 bp, Glycine max
  unsure (1)..(421): unsure at all n locations
ctgctctacaagatttatttcctcatctaatctcacttttgtgtaggagacaattgatgtggtttagggtcgattaacaccagaaatggtgaagattaacagatatttcattgaggaggcgaagacaacccttttttagatgcatcccacaaaggcaccagaactatgtagaacaccaacacttctctaccaatactattaggatctagttgggtcatatatgaaacacacagtgctgaatgttctaaatgagggaagagatccatccttaattaacaagacctatttagctctaatccccaagaagaagataccaaatcatgcaagtgtgttcaaacttattagtntgtgcgatgtggtgcttaaaatcgttacacagactataactaatagaactaaatgattatgctagatgcattag

SEQ ID NO: 136628 - DNA, 345 bp, Glycine max
tctggtaatgctgtctctagaacattaccattggatttaatgatgaaatctgtacattctcatgtgaaacagacgctatgttttgtattgccaatgtatcatctgggctaaactcaacaatgggcctagcacatacctaccgctaagcgcatctttagcgcgcttatcgcataggaggatctggcagagcatcatcatcaaagctgcatgctaagcgcgagatctatgtgctaagctaagtatgtgtgattgatgcctgaccctaatctaatcaacattataataacagtatctaggaagtgatcctaggtccgcctcccaacgagcaatggtctaccaaacgtc

SEQ ID NO: 136629 - DNA, 360 bp, Glycine max
aaaatacaccaacgggggggatattgcactgagagcctgtacggatcatcccaaattacgtcgtcatatgctaaacttgatgccatatccactcaataattctatggtagccataatcctcaccaaggttcctcaacctccatatttctgaggatacgacttcgaacgcaacgtgtgcttatcgtgtaggagccctgaggcattccattgagcattgtatgaccccaatacataaagtgtaaagtctaattgatacgggctggctgaaatttgaggagaatcgcttgtcgaatcataacattgacacgcaacaccatacatggcgcaatattgtaagctgttggtatgactatcaggatt

SEQ ID NO: 136630 - DNA, 191 bp, Glycine max
  unsure (1)..(191): unsure at all n locations
cattctgtgnaaacgactgcacagaggaatgggtcactggtaatccattaccacgtatgagtaatccatcacacagagcttatttcatgcctttatgtaacgtacacttgtgcgattcaagcttggcctctggctatacattacccacgctgagtaatcaatataccgatatgaattgccctaagacaccc

SEQ ID NO: 136631 - DNA, 259 bp, Glycine max
acaaattacctatgcttttacacagggaaggaaaccctcaacaattctatatcattcaaatctaggtcaaattacaaacccaaaaactcatttataaccaatcacataggattattgccttcaacacacaacttggatataacataggatgaataaaatgtaactccaaaatcccaattgtattaagatcttatatatcattacccaatggaaaccattttacttagacccttacatcctagggatttctttaaaatat

SEQ ID NO: 136632 - DNA, 292 bp, Glycine max
aggaagatgcatgacatgcttcaatgtaaaggataatagctggagtagtaatgaacttcttgagtatgcagtttaccatgacttcgtagacataggcgaatcattcaatttataaagaactggtcatcgatttgtcaaggactggaataaatatgctcagagcctaatttggaatattactaactggtggcgaacaatacttgtactgaccttttgccaattgcgcggtcttctctgactgatgtaaacttctaagctgctggtgacctatcacgaaaaattatgcatctca

SEQ ID NO: 136633 - DNA, 254 bp, Glycine max
actcaactgatgaagatgaattcgaggctacttcatgcactactctaatgacaatagcaacatttctggcactatattgctgggagtgtgaagccatcttctcaattaaagttctggctacagcaggggtcatgtctgcaaaggctccatcactggcagcatctatcatacttctgctcatgttactgagtcccttataagaatattggagaataagctactcagagatctggtggtgagggcaactggcacat

SEQ ID NO: 136634 - DNA, 371 bp, Glycine max
cttgactactttaattttgggaaggaatatcacgaaatcttacattagtactcactagtgtttaatgatatagtgatggctcgcatattcaatacttaatgatgcagttgctatggatcctatgaataccacagatagtaccaaagggaaattgctagattggccaaagcgtttccacataaatttgtggaattgctcgcgggcttatgtaccttcatcaagattctcgattgaggattatccatagagatctataagcaagtgatggtttactagacgacactttgaatcccacaatttcagatattggagtggctaatacttttggaggagagaatattgaaggagacacaaccagaattggtggacat

SEQ ID NO: 136635 - DNA, 464 bp, Glycine max
  unsure (1)..(464): unsure at all n locations
tgtgccttatcacgtctggaatatgaatgtagcatatatatcctataacncttatgtgctttgttgatggcttcttcccgatccaagcttcaattggagtcttgtcttttacagacttagttggacatctgttgagtatgtcaacatcatgtgtagacatgcttcagcctatgaatcgtgttattgtagtctccttctactatgagcatatgatctatgccatcttcattaactgtgcgattctatctctcggacacttcatttcgttgagaagaatatgcgactgtaagttgtcgctcaatgccttcatcctcacaaaatctcttaaactctcgagaggtgtactcttcgctgcgtatacttcttagtacttgtatccgtattccacttagattatcaacaatagctcttgacctgtatgaatactcgcagacttcttgattttcttttacaaatataccatg

SEQ ID NO: 136636 - DNA, 224 bp, Glycine max
aaccaaacttgaccaatcccgacccaacccgggcatagtcgggcagagagaacccgtgatgtacctaaacaggagagctcctggcagtccacggataaaaggaacaaagaccacaaagcaagggggcttgtggtggctggccacctgtgaattttgagtgatatgtggattatggcctctgggaatcgattaccaagggtgggtgaacgattacaaggcttaaa

SEQ ID NO: 136637 - DNA, 450 bp, Glycine max
  unsure (1)..(450): unsure at all n locations
tctcaacttcaaaaaaatggcctcagcatactacatatttctataattatattcaatcaatagacctccaatctttaatggagagggttaccaccaccggacaacccaaatgcaaatttttattgatgcaatagacttaaatatatgggaagccatataaatagggccttatatacccaccacagttgaaagacttgcaatagatggaagcacattaagtgacagcatatcaatataaaaacctatagatatatggtctgaagaggatagaagacgactacaatacaattgaagagccaaaaacataataacatctgccctgagaatggatgaatatctcanggttccaaattgttatatcgctaaagaaatgtgggacactctacaattaacacatgaaagaactacagattgtaaaagatctaggataaacacatttactcatgaata

SEQ ID NO: 136638 - DNA, 382 bp, Glycine max
  unsure (1)..(382): unsure at all n locations
tatattgagagcatcaaacacgagtgaactttcatctattatataaacacatgagtagagtgtggtgaggtcctgaatctttctttctaaattactacaaaattctttgttccttaatcatggcacgagctggtgacaatgatggtgtatatcatcaactggacagatctcatcgcttaatactggacgcgatgactacacaaatgcaacgtttgttgaatcgtaacaatgaagagctctacaggcgaatagaacgactagagcaccaaatgaatccatatgctgggagaccttatggnggcaactaaacggtcaatgatggatcaaaccgaatataggggcaagacaaaattgatggagttgaactcaatgtattctcttt

SEQ ID NO: 136639 - DNA, 251 bp, Glycine max
tgaattggagccttggaatgactggatggttttacctttttgataaaaatatgctatcattctggctctacctatgggatgaattattggatctatttgtacccttttggttggatccaaaggggaaacttgatgacttggatgacctagtgttaatgaagatctctatggtggctacatacgaaaatgcatgaaaaaactcatccatattgttgctgcaacaaaaaagaatgtggaaaatgacctgaata

SEQ ID NO: 136640 - DNA, 424 bp, Glycine max
  unsure (1)..(424): unsure at all n locations
ntgccaatnntagttttgctggcgaaaggattgaattgttttntataagaggcaaattngattatcctgctttgatgaataagaagtctggggaaaatggagagaataagaaggagggaggaacccatgctgtgattgccatccccacatggccaaatntcccaccaactcaacaatgtcaatacttagccaatattagcccttctcattacctaccaccctatcagccaagaacacctaatcatccacaaaggccacccctatatcagccacaaaaccggcctgctgcacatccgataccaaacaccacccttaacacgaaccaaaacaccaaccatggaaggaattntccagaaaagaagcctgtagaattcaccccaattccggtgtcatacgcttancttactccatatctactcaataa

SEQ ID NO: 136641 - DNA, 229 bp, Glycine max
tattgcagaccacagagagggacctggagatacgtcgcgggggacaggagaccttggggacgtcaggcggggtgctatagaccaaaaccaagctagaccaatcccgacccaacccggcatagacgggcaggagaacctgtgatgacctaagcaggcgagctcctggcggtcaacagataaaaggaacacaagaccacaagcatggaggcttgtgaaggctggccagctg

SEQ ID NO: 136642 - DNA, 426 bp, Glycine max
  unsure (1)..(426): unsure at all n locations
gttataatgaactttatcaatggaagaaaactctcccagcttcctttctgctctaagacacatgctcttaaaaggtcctccaatgactgaatggttcgttcagtttggccatcagtctgaggatggtaggctgaactcagtctaagcttgggtcccaatgctttgctcaagctctcccaaaatctagaggtaaatctaggatctctatcagatactatgctagatggcacaccatgtaacatgacaacctcacttatatacaaggtgatcaactnttcctaggaagatctgatattaatgggaatgaagtgagcagacttagtcaatctgtcaacaataactcagatagaatctaaacctctaggggttctaggtagtcctaccacaggatccatggtaatactgtcccactttcattgattgatc

SEQ ID NO: 136643 - DNA, 413 bp, Glycine max
gttggatttattgggggatgttatttgtcttttttgctttaagaagaatggcccagtaaaactaacttttcaaatggttgccttcgcaagaatggccccgaggaaacttggctcaaaaagggccaagaaagacaaagccgcccaaagaactagttccgccccgggataccacagtcaccgctttaagaacgttgtacaccaacagcgcttcgaagccattaagggatggtcgtttcttcgggagcgacgcgtccagcttaaggacgacgagtatacttgatttccagaagaaatagggcgccggcggtggggcccactggttactcccatgaccaagtttgactcagaaataactcttgagtttatgccaatgcttggccacagaggagggcgtgcgtgcatgacatccttgg

SEQ ID NO: 136644 - DNA, 350 bp, Glycine max
gacctgcagcatgcaagctttaagaaattgggatgtgccacagttatgctataatattacctggctgaacacatgtgaaaaggatccaaactttatcttatattattgggaggtgatgcctacacgaatctgcttttactgaattgaagtacttaccaaatacgcgcatatgatgctgatatgaaatttgaaagaggaatgcaaccagtctgatgcctacaaatttatcaaatctcaaaatgtagaaggctggaaatgctcattggtctcgaatctatattttggtctggattgtcaggcaggtgcacctaatactggcaatgctactgcaaagagaagaagatgctaag

SEQ ID NO: 136645 - DNA, 319 bp, Glycine max
  unsure (1)..(319): unsure at all n locations
aaatccgtctggtttatactcgtaaatctgcttccatagattattgcctacgaccctgcctatgttggccttttaatcattgcgaattgtgaccaaataccaaccataaaatggctaaaatttatttatattgaaatcttaatgcactatgagagcttgatcataaaaataanatggattatactttgtgctagagagagctgtgaccaatgaatgatcattgcaagagcaaatacaatcttacaatctatttcatcctaatgacagtagacctttttaacctagttacctgctaagtcacaatggaaaaccaaaaaat

SEQ ID NO: 136646 - DNA, 406 bp, Glycine max
agctctagcacccaatacaactttgcaagagtatcttctaatgtgacttcaatgataaaaaacatgcttcaacaacatcatgaatcagtgtagactctatactgatgacaatactaactgaacagccagaaaaaagggcaggctcactaaaagagcagctagattctatcactccagcactctcggacatgcgcttgaggaaagaagagaggttaaaccagttccgaactggacaaggtcaaactcaaataatctctgtaggaaatgccaggatactagacaatgaaccctccaccattgttgaaatgagaatgatctttcactaaaagactcgaggaatatcagaatgagtggctagaccttacaatgagaagggacctaaagccatttatgttttacccctcct

SEQ ID NO: 136647 - DNA, 333 bp, Glycine max
aactctaagctgacacgacaacaccacaaagtcaagaatccttcattttattttgctttatatccacacccttctttccaacttttctctgtctctcaagtatattttgcattcatgcatattgatatgcttatatgccaaaacttgtttcaaaatttaatcctgcatatgggggttggttaatatatgcataagttggcaatctttcttaaaaacttattttaataataatggtataggtagcactgacacagaaatgcttgatttattggccagttgaaatgttgataggagaagagatacttgagccattcgaagcttctaagtcttctg

SEQ ID NO: 136648 - DNA, 440 bp, Glycine max
ttttacaaaggttgtaaatacattcaaataatagcccctttcaaaaaggttaatggctcacattcacttttctaacatcataataaaacttctccaaataaataataaatcatctcggctcaaaacaaggttgtgcaagacttcatgcgattaatatataaacatataccctaatgtcacatcctatcagagcattgtgttcccgtgtcctctaacatgagattcttcatagtcatccacctaaccatctgctcccacgaacacgaagttcgagattatcacaggatccatacacatatagcacacgtggagtgagctatcacattcctagctaatagagagaaacgggacagcatagatatacatatcatatatatgagatataacttacttatacataacttatgtcattccaccactttgtcgcgtaacatcacatc

SEQ ID NO: 136649 - DNA, 241 bp, Glycine max
actagctattaatgcaagatctgctcctgcgcgcaaactcgtggggttatgctcctctggcgaccacaacacatacgctttgcacttcggtgcagctagtgtgtagcacgttgaacaagcctggagcttattgctacaacacatctacatgtagacctcctcaacctctagagcaaactcagccacatcagaacaattatgacctctccagcaataggtacaatctcgggtggaggagtct

SEQ ID NO: 136650 - DNA, 384 bp, Glycine max
agcatgcatgatgtacattctcctctctttttattcaattcttaaacctgcttgacatcatcagaatcttcatgagttacatttaattgagatgcaattggctttgatgatctgatgatgatcctgataatgcgttgaaatgatgcaatagggctcttccagattaaaattccaaacagttcttcaagattacaaggcacaacatcaagatgatcactagaatattaggaagggaattcctaattggattagcaaaggtttggccaagtgatctaaaataaagagtgtttttcacagggtctactcttctggtaatcgagcaccagaggatgtcatggatcaccagtggtctagtacatctcatagcacgtattaaatcttgat

SEQ ID NO: 136651 - DNA, 440 bp, Glycine max
  unsure (1)..(440): unsure at all n locations
agcttctggaatgagagngccttgcgtgtgttattttatgangncnnnggagacctcgagagaggtgagagcgaggatcctaccgggcaccgaaccgacggcggaagtgccgaagcctctgaagatacccggaatgccatcgctccggagaatgtgactgaacaccgacattcctcgcgaccccgccgccacttgcatgcgcgtcttcaccaccgcctgtggatggagcagcgctgattgaacggtgaagagaatggcgccaatcatgtggaactctgttttatccaacctaatatcattttcacacacacccacaaaaaaaaaaaaaaataccaacttagntcgtgatcaagttcacgtcatatatacctataccttcctgaatgcagtatagagttagagggttgaactttggatagttagagagaatgaagtagacg

SEQ ID NO: 136652 - DNA, 358 bp, Glycine max
ttttagtagggaagaagaaaaaggaagaggaaggaagagaggagaatggatgaagataaggagtgagggaaaaaagggaaggagggaagagggagaggagggggggagaaaaagagggagagaaaaagaggaggggaggagataaaggaagatagggaggggaaaaggaaaagaaaaaggagggggaaggggggaagaaaaagaaagaggaaggggaggaaggaagaagagaaggaagagggtaaggaaagagtaagaaagaggagaagaagaagaggaaggagaaggaaagaaaggataaaagaatgagggaaaagaagagaggaaagggtaagagaggagggaggaagggggaaaa

SEQ ID NO: 136653 - DNA, 309 bp, Glycine max
  unsure (1)..(309): unsure at all n locations
agcttgtcaattcattctatgtatctctgtggttgttcacatttcgnctcatgtattttttattctcgttttcatttaattattatacccccttctgacgtgcttaagccatttatttaagtcatttctcgcttaatctaaagataaaataaattttcaccgatcggttgaatggtatcatccattaatttcggttaaaatgaattccgaccgctcggtcgtgccgtaaccaccttggaaataaaaaagagatggtatattatatgttaataataataaataccttctagtaaaatatagcggataatc

SEQ ID NO: 136654 - DNA, 350 bp, Glycine max
  unsure (1)..(350): unsure at all n locations
ctaatatttaattgagaaaaaattattttataacaatnttacattaaccaaataaaatgggtacataaatgtcaaaccattctcttaaaatcactcattaaactaaaatagtcacctacaagttaatgaataagattgttttttattaaaaaaaatataatctatataaaaattacagcaattcttaaaatgatccattatcattgttattgttatgaaagaatcaatttatcctgttcgataaatttttatataagtatttattctaattatggctcatcatgattattattagaanaacgcaaccaaaattaacaaataaaacagtgctattatgtgttattgttgaa

SEQ ID NO: 136655 - DNA, 323 bp, Glycine max
atcttttatgtggctcctgaaaggctatcaaatgcctatatatatgcgacttatgaccacaacttgctaagagttttccagaacacataagtcttatcctcttaaaaagcaaatcggtttattctcttacaaactccttggccacactacttgtgatttaatatggaattattcgagtactcaaattgttcaatctatctctctcaagagagatatcttcttctctccttcttcattctgaaaacggattactagacccagggtctcttgtcgtgacagattcttaacacagacgaagggtcgtcatacttagatacacacgt

SEQ ID NO: 136656 - DNA, 422 bp, Glycine max
  unsure (1)..(422): unsure at all n locations
tctcaaagaagccacgaggaagcttcttgaggaagtctcttattgttgtttctcaaggnagctacatgaaagctgtcttggtaaaaatgcttcccagcttctgttaaccgctggatcttctcaaaatttgggcttcagcttcccaagacacttgttcacgctctgaccggtgggatctttaagagatatcttgagtgtgcgcgatgtttccgttcccgagagcattggtcacttgtgcgttttgagccttgtagtccaagtagcttaggaaaaatgccatttcttctccttttcttctttcaaaaccatttacaacgttccaagttctgtctccatcatccacaaccatcattaggcaccacaaaccgcgcgtgttctccgtggaaactccacaccgatagaaacccttcaatcaaagcgga

SEQ ID NO: 136657 - DNA, 403 bp, Glycine max
  unsure (1)..(403): unsure at all n locations
tactaagcctttcttcgtggggtgatgggttctgtcatcgtagaaaggcttgattttctttcttacatggnctcaattaactcaggtgcttcttctggggtcttcagatttatctttctcactgtaaaagcatctaacagttgcttggtttgtggtcccagcccatctataaacatattcaattggattggctcaaaaaacccatgagtgagaattcttctcaacaagcctttgaacctctccaatgcttcactcagagattcatcaggaaactgatgaaatacagagattgcagctntcccttccgcagtcttggactctaagaagtatttctttaggaactcttcaacaactgtttcccaggttttcagactcgtacccttgaatgagtggagccacctct

SEQ ID NO: 136658 - DNA, 334 bp, Glycine max
  unsure (1)..(334): unsure at all n locations
taagcgactgcagcatgcagcttaaaaaagcttacatacttagatatcttgtgatcatgaattccgatatatagggggagtaaacgcacatcatatctatatacaattgtttgtgctcgcttgaatcttgatttcaggtattgcattgacatcatcaaaaagggggagattgtagatgcaattgcctttgatgttttgatgatgatcatgatactgtgttgcaattgatgcaaatgggcttttcaagattaaattcaagacaatacttcatgattacaagtcacaacatcaagatcatccctagtatattaggaagggaatntctaattgaaat

SEQ ID NO: 136659 - DNA, 354 bp, Glycine max
  unsure (1)..(354): unsure at all n locations
tcaagttcactctgctcactatctcttggaggttagagaatttatattttacactcataatcacaattaaataacacattcacaactctattaatcaatcaactcaattcaaataaaaccccaaaattcataataagtaaaacataatgggtcgtaatgaggccatgcatgtaatgtaagggtgatactgaaaacaaataagctaatcaaagggttccactcattcatataaaatactcaataataaagggaactttcatctattnttgcaccttnctttttggtttgaaatttttatccctttttccttctttctcatattttctttggggattgctctcttttcctttttat

SEQ ID NO: 136660 - DNA, 284 bp, Glycine max
  unsure (1)..(284): unsure at all n locations
ggtgtgtgtttttcttttgccagaagggngcagattgccctggaactgaaaggagtccaatacacttactccgaagaagatcttaggaaccagagcgatcttcttatcaaatacaaccctattcacaagaaggtacctgtgcttgtccacaatggaaaaccatcggctgagtcccttgtgatccttgaatacattgatgagacatgggagaaccaccaccccatcttgcctcaacaaccttatgatagagccttggctcgattctgggcaaggttcattgatga

SEQ ID NO: 136661 - DNA, 324 bp, Glycine max
cacaccaaatgaagatgaagaaggatggctcaaattctcaccaaggtgaacccaccagcatgcaaataagctttcaaaactatcatgacaggtagaggagaatcaaaattcaagtccaaaagggcgaaaacttttatatgcaaaacaagtacgccacgtcttgaacatatcatatgattcaaagaaaaacatgcacaggccgacatgcgcacagaattgacccacaaactaaactagaaagctgacgaaactaacaacatttacaaagtagcaccactgacaaatgagacaaaccgacaaaactgacagaaaccaaagaacact

SEQ ID NO: 136662 - DNA, 456 bp, Glycine max
  unsure (1)..(456): unsure at all n locations
ttgatgcaccttcataacatattgtttcactgcatttttgttcttatctttactatcaaaatccatgccaacatataattcttgaccaacattaaaggtcgacggcatctccaaaccgcaaatgtccttctcatcaagataactccagctgatattggtataatgtgagacatcattccaaaatggattntcaattcgttgtgcacctaacagttcanaataaaataaaaaatcaaataatacttatttaacattaaatacaattgtcatcaaataataaatgtattgtctaatttttcatacaacaaattataccttctgctgggtgaacaattcttactggttgaggaatgtttgtgactccatcgtctgtatcagatataccagcaacactgtcatcttcgtctaaagactcttcaacggatgagttagacacaagataatcatcatcatcat

SEQ ID NO: 136663 - DNA, 227 bp, Glycine max
tgaccggaaacggtgctcataagaagaccaaaaagccacattaccaccgaggaagacacaagggtgaccgaaaacgctgctcacaggaagccgaagaagccaatgccgagaggaagagaaagaaacaacgcttcgaaatgaagagaagaagaagaaaatgtggcgtacggacaacacttacgctcttatattattatggtaaagggcatgtatgccttttcatcaca

SEQ ID NO: 136664 - DNA, 344 bp, Glycine max
ctgcaagcactctctatgtagacttttctcttttttgctgcattgtaaatacaaatggaaacatcttcaagttgtttctgtatatcgttttttctagagcacttattttggaaacagatttcataacttaatagactttaaatggtcgagcggttagaaaatctttttaaaaaaatggatagaaaatccatcttcccccgaagtaatctcgatagaactggtgtatatgataatgaattatgtatgcgaatgctatttgatagaaactagtgtgaatgctcttgcttagattatatgtatacactaatctcaagattgaacaccccggtcacatattgtaatct

SEQ ID NO: 136665 - DNA, 394 bp, Glycine max
gtcaacgagggaacataattttttttacacaattggttaaatattgaactctaataaatacttattgaataaataaaaacaatatttattgttaattttaagtgtaaaactaaggataagttccattagtagaagaaaattaagtaaatattaactaaaaaagagagtaaactagtagtaaagatggaaaatgtgagaaaatattacgtataaagaacagtatacatatagtgttccaaatttgtccttatctctattaataactgtatttttgttaaaggaaaataacttttttctttctgcttgaatttgaggaatataatttgatttcctttcgtaatggtgaatatcatctctcgtttggatttgttcaagtacctactctaacaatgtt

SEQ ID NO: 136666 - DNA, 338 bp, Glycine max
  unsure (1)..(338): unsure at all n locations
agcttcttaancttgggtgatatttatattttttggctactacacgcactccactaatgacaataatcacacttctggcactaaaacgctgggagtttgaagccatcttctcaatataatattctggctttagcaagggtcatgtctccaacggcttcaccactggcagcatatatcatactattctgcatgttattgagtccttcacaaaggagaagctgctcagaaatctggtggtgagggcaactggcacatagtttcataaatctctcccagtattcatacatgctctctccactgatgtgtctaattcctgatatatcctctctgatggtcat

SEQ ID NO: 136667 - DNA, 380 bp, Glycine max
  unsure (1)..(380): unsure at all n locations
atagaaactaaccttagcttcttaggaatcttcttaaggaagctcctcatggatgatatcttagntatgagtggggtgggtgtagctaagctctagcttctcaaggaagttttctcaaagaagcttctcaaggaagttttctcaagaaagcttctcaaggaagctacctagtctataaatagaagcatgtgtaacactcgttgtaactctgatgaatgagagtcttgtgagacacaactcaaagttcaacttctctccctctcttattccttcaaattttgtaacacaaaggcctttcattggaagtaagttgtgagccttcgctaggtcaccctacttccatttgtgtgtaataattttacgcacatttcccttacgat

SEQ ID NO: 136668 - DNA, 412 bp, Glycine max
  unsure (1)..(412): unsure at all n locations
agctttactttagacatatctatnatggtattgtgttttcaacagcaaagaatgggtgccatatatcgcactattatattggaaattctgctcaacatgacgcaaagtcaagttttatagaaaccgaatgccaaaccaaccatatttttatttcctaaaagcaaaacaatgtcgttatgaatctaaaaagcttcttaggccactcaatcaaatattctccatcttttttttgaaagagaaacatccatctcttatctcaaccaccaccattgaaactgaactgatcacactcccaaggaaacaacactaaaaccaatttctcatcttatgttgaagacaaacttctataatgacgagtaatttattcacaaagattatcatgcactatagattgcaacatcatttatgaatt

SEQ ID NO: 136669 - DNA, 395 bp, Glycine max
acccttacgagtcagtttagttaaagggagagccatcctggttttaaccttctatgaaaccccggcaggatcctgctaagcccataaaactcttaatctcaaaaacaaacttaagactcttccacttaagaacaacttctatcttagagggatccacaactatacccccttgagatatcacatgccctaggaaactaactttctctaaccagaactcacacttggacaacttagcatagagttgttggtccttaagggtatgcaacacaatcctcagatgttcttcatgttcctctctagtcttggagtataccaaaatatcatctatgaatactaccacaaaactatcaaggtaagggtgaaaaactctattcatgtagttcataaacactcct

SEQ ID NO: 136670 - DNA, 451 bp, Glycine max
  unsure (1)..(451): unsure at all n locations
ctgaggggtttgaaggagaataatggngattctntcacatatttttattatgagntntcaaagctttcagaacctattttttatgtgaagcatgagaaaaagaaggagaaaaaaaaaacacctggtgaaaggagaagaagaggaaatgttattaaaaattacagacaggaaagaagaaactaaacgttggtttaaaatataaaaatatattnttatggtattttaataatatcatgatataaaacaattattacattttaacatttcaatagcacaaaaaattggtttaaaatattaacgcaaaaaaataattaaattttatcctggatgtaaaagaaagataataagtaaacttgtaccaatctgtaatggaagaaagaaaaaacattaaatattgtcgtagaagaaagggtaaagaaagaaaataaaaatatcaatttctaataaaaaa

SEQ ID NO: 136671 - DNA, 289 bp, Glycine max
  unsure (1)..(289): unsure at all n locations
cttaactctgataatcatcatgttcaatttttgtaactatacaaaccacgnattgataaatcgattgaactcactctttactttagacacttgggtatggattatagaggcggtatcattaaataagagttttgtctgagataaactttctaacttagaacttttttcaacaaccatgtgatgctgagcatattgatatcatattactaagaggcaccccatacttcatacaatgcacttaggagtagcagtgaagtaaacattctaactgtgcatgttacttgactta

SEQ ID NO: 136672 - DNA, 398 bp, Glycine max
catcacgattatcgtctccctttttgcacatgttctgtagcagcatcctattcggaaccatatcaaaataggactgatactgcctatcgaagacaaccatttggtccttccaagtatggactctggaaggtttcaagttagtgtaccaggttacagctaccccagtaagactctcttggaagaaatgtattaacagttcctcatttttgcgtatgcccttatcttccacaatacatctttggatggttcttggggcaagtagtccccttgtacttacaaagtccagcaccttgaactcgggaggggtgatgatattgggtactaggaacaactcttctaggttagcaaaggcataatctttacctccttcaatggccctgagacctttctcttttcca

SEQ ID NO: 136673 - DNA, 484 bp, Glycine max
  unsure (1)..(484): unsure at all n locations
tcctctaagncacctgangcatgcaagcttctctccgtagcataagagagagagtgtctataatttctgtcactgcgcctcatccaatcctaataccttatctctaaattcattctaatggattcttctcttccccaaacctctgaccactggagtattagataatgtatatcctttgtgattctgaacctttntaatagggctggtgatctgccagccattgggggcccaaccatggctgccatcacttaatctaccttttcattttcatattataaagctcactcaccaaacatgatcttagtgaccaaaacaatcactgtttcaatccaagaactcaatcacatcacgccaagatcctctctctttctcttttttctctcttccaaaccttaggtaggctccaccacttcgatgtgtggtttcttcttagcgtattagagagatcgaaaaaccaagaaattactcgcttccgtttcatcat

SEQ ID NO: 136674 - DNA, 437 bp, Glycine max
  unsure (1)..(437): unsure at all n locations
ctatgaaactcacctcctattcaactgaagaagcatcttcaaattttttttttctttgtcctgcattcaaagaatcttctaattcctttcctctttcattagccgcttgcagagtagtttcgagggttgaggctcgtgcttgaattgcctcaagttctgatgtcagattagatacatcatcaaagtatttattggcttgcccttctgaagcaccacgcttctcttctagtgtgcttatttgttgntctagttcctgaattctgtatttctctgcttcaagtaacaactccaactcactcacctttttatcagaatcttcccatttggagtgagagctctggattaaatcttccagttctcggctacgctcatggntcatactggctcggtcttcgtgctcggcacatttttcgttgacattcttcaactcctcttct

SEQ ID NO: 136675 - DNA, 273 bp, Glycine max
ccaatatgacattgatattacctccccatttgcggcattgcgtgtaatcaagaaagattcatttgaatctgaagaaaacggtattctggataaaaatctttatgtgaattttcacacttttgtccaaattgagatgaatcaaactcaaccttggtggtggccatactcatgcgctttcaaagttggtgggcctattgtcccagcctaataagcaatcaagctgacagagtcaatacacgggtggggcaaactagctaactgagcccattgcat

SEQ ID NO: 136676 - DNA, 428 bp, Glycine max
  unsure (1)..(428): unsure at all n locations
agagcacgangctgcagcttcacaacatcagcgataactttttttttatgactatcaaaccaggaagacgggcagagcagaaaactttgcccaacacaaaccaatatcacaacttgtctcacttaaagaccccagtaacattttcttcattccaattccgtcaccgggggatcgactcgaaaattttactggaagtccctagagaataagtctacattntgaccggtgggatctgctagaaaatgtccagaaccccatatgtactactctntccacaaccagcaaatacacaacattttctgcacaaagccaaaattctgctgcacatatttgacagcataattctgcatatagtgcagaatttctaaaccacacttggcctcatccaatgttttgcccagattgagatctacaagtcgtatatcatg

SEQ ID NO: 136677 - DNA, 386 bp, Glycine max
  unsure (1)..(386): unsure at all n locations
aagctttcgaaagctacggaaaatctgtgacctagcctggtataatcnctccagaggccattgcctccctcgcccagtattatgatcagccgttgaggtgcttcatctttagggacttccagctatcaccaatggtggaagaatttgaagagatcctaggatgtcctctagggggaaggaaaccatacctcttctcagggttctacccctcattggccagaatttctaaaaaagtccaaatctcggcgcaggaattagaccgccaaaggcaagtcgaaaatggggtggaaggaataccgagaaaatatttggaggtaaaagcaagaatcttggcagataaaggcgagtggatcccattcatagatattctcacactcgtgatgttc

SEQ ID NO: 136678 - DNA, 455 bp, Glycine max
tctgaattctgctgagtgaagagagagaacgtggcttttatttttaaaagattttctctttcctttctttttttttaaaaaagctatgccacatgtctccttttgagtggagcaaaaagggggccacctcttccccttgatgtgacttcttactcagccacaaggagagaaaaatttgacctttcgaatgctaaaatcctgcctcggtttacatgtcatttctctggttccagtccctcgcgtttctctgcacatgtcggggcccgtttttgaaagtaagcaatatatatatcaaaacgctcagaatgaaaccctgagcgtggttcagaggttggttttgttaaattattagttgaatgcaaaacgataattttcagactaattaattgagaattaatctataactggccagttatcgattactctctcgtaatcagcctaacccgcgtatcttt

SEQ ID NO: 136679 - DNA, 452 bp, Glycine max
  unsure (1)..(452): unsure at all n locations
actaagcttgctaagagggtaatttggtccatatcagattctggagcgtatttgtttttctgcttataagcttcagntacctccagaaacccgtattcaccttatttttcattgttcattgctcaagcctttccatcaatctactggtgttactggacttccattacccttgccagttatgatcattgataatcagccagccctcaaacccctggtgatattaagcacgtgatggtaatctaccgataccctaaattgcagttcctagttcaatgggaaggactcttgccagatgacacttcatgggaagattgggaactgctgaagcgttagcatcaccttgaggacaaggtgcttctcgatgtcaaagggaattttagaaagaaggatctgtagaagaaaagttcaatcctattagaaaggcccaaaggagagtcataccaccaagtatt

SEQ ID NO: 136680 - DNA, 404 bp, Glycine max
  unsure (1)..(404): unsure at all n locations
agcttgtgtgtctacatcgcaatctccattttctatgcctttngngaatctgaatatcttgaatctggcctttattgtgtcccgaatatcgaacttcctggctattgtggaatttttgcaacggtggtatcaacactggcatcaagttttgactttgtcagatgggtcgggttcttctggaggtgcttcccacctatgggtttattatacatgtccttgctattacattcacaaattacagttttatcataccttgcttttctttgcaggaatactcgaatgaccacccccattattggatattcttaaagaacaatggtcaactttcctaccttaactcttttcttgcataacatgacggtgaacaaaactcaacaagtgcaacttatccatataagaatatt

SEQ ID NO: 136681 - DNA, 426 bp, Glycine max
  unsure (1)..(426): unsure at all n locations
ctaagctnttctttctaatcaacctgtctattgactaacaatnctaattgaatanttacattctcggnccttctttggcgaacatacatacttgctcaaacttacgaaaagaaacacaaactccatcacaatcatgcattcaattcaaaatcaattcataacaccaattttcataaaaagataaaagtgtttcattgcataattatcaaagtcaagtcaaactgttccatatgcttcaaaaaaagcataccaactaaccacaaacaaaaacaacagtgtatataaacattaaccaaaatcactaaaaacaatgtactgaaactataatcattataataataatccaaaaagcatcatcaggaatctagaattcctatgactggtcctgcgtggtctgtgtctgaacatcctccttatctattagat

SEQ ID NO: 136682 - DNA, 333 bp, Glycine max
  unsure (1)..(333): unsure at all n locations
ctgaatgccattaatctagggaattaaaacaacttagtggctgagtgtaactgataatgtggctaaccgaagtcacccccaacagccaacaagtcagacaccatttggtctcccaaaaggctgatgcctacgttgccaattgggcccttattatcactcgaactaaacctactaaagcccttctagttgattaacccaaatcgtatatttggtcagccaactttacaaggattgggccattatttacacaaactaagcacttctaaatngagacagagcggtgcgcattagtacttatccatttgggccatgatacaactcacaaactaggac

SEQ ID NO: 136683 - DNA, 82 bp, Glycine max
  unsure (1)..(82): unsure at all n locations
ttttttttttttctaattgaactaagctngaatttaaagttttctctccacttagtcttttttacacaaanacgagacgccg

SEQ ID NO: 136684 - DNA, 293 bp, Glycine max
ggcaaaaattggatgagggcaagcgtggtttccaaaatctgcactttatgcagaagtttgctgtcaaatatgtgcagcacaatcttggctttgtgcagaaaatgttgtgtatttgctggctgtggaaagagtagtacatatggtgttctggacattttctagcagatcccaacggtcaaaatgtagacttattcactatggacttccagtaaaattttcgagtccatccaacggtgaacgaattggaatgaaggaaatgttactggcgtctttaagtgagaaaagttgtgata

SEQ ID NO: 136685 - DNA, 404 bp, Glycine max
  unsure (1)..(404): unsure at all n locations
tactcagcttccatcagtggttgagaagaaacttcatgcttctgttgatgaatcaagattgattcatgatgatgaatcaagattgattcaaggtggtttgatgataacaaagatgatgacaaaaagcccatgagaatgatttcaagattgagtcaagaacaattcaagaatcaagagaaagattcaagagaagtttcaagtttcaagtttttcaagaatcaagaataatcaagaacaagattcaaaactcaagattcaagaatcaagaaaagaaacaatcaagataagtactaaaacgttttttaaaacattgagtagcacatgaatttttcacaaaaccttntaccanagagtttntactctctggtaatcgattaccagtttattgtaatcgattaccagta

SEQ ID NO: 136686 - DNA, 437 bp, Glycine max
  unsure (1)..(437): unsure at all n locations
taatattcacaatntccaggaagactatgtgctacatatcttattatcccgcatccaagaaagctcttggntctgccttctaaaactgaatttaatcttgcttttatatcatttcttatattcgttctgcgcaaaagccaacaatttctgtcaaattcaactggatattcactatacttacaagtaagcaagtagccctttaatttctaataaaacttacaatttattatttcccctatccttatggcatttttcaagaggactcgtatccaattcagtcctagtggggttgctttggtcaccaaaagtgggcatctatacagattaagttcattagaatttagttagaatacaaagtgtaactcttacactgtaatccaatcatagaatgtcatgcataataaaattatggaatttcataacaattgacacaaaca

SEQ ID NO: 136687 - DNA, 362 bp, Glycine max
tgcattggtatttaagtcttttgagtttcctttaccttgaactgaatgagtgaatgaacatgtttaatagatttgaaaaagaaataatgaacatttcctatatattaaatactttttattagtatattgtaggacatgactcaagcaacctctactcatgacagcaaaggatcttcatggatttgagtggaagtttaagcgtgcatacacatacatatatgggtaaattggtctgatatgagcaggaaattctagttgcttgttcaaattctgaatgaatgaatgaatattgtgatttgcatctaatgaagaatgctagagacatagatctcatatctgcttattactgggaattcttctta

SEQ ID NO: 136688 - DNA, 434 bp, Glycine max
  unsure (1)..(434): unsure at all n locations
gggtcttggatttttctaaggtctttaacaagctttgaactatatacttgtccttcatttaactgnctttgggcttggcggccacactcaacaaagtactttcgacacctactgtacgttgatttgaccaatgctggtatgggaatgttgcaacaatccttcaaaaccttattgatacattttgagagggtggttgtcatgtggccatatcgacgtccttctctatcataagccatcgtccatttttcctttgaaatgcgatcaatccatgttgctgtggctggacttagttgacgaaaattttctaaattttggtaaaaaaatgtgcttgcaaggagtgtacgctgcataaaatgagttatgaataacaattttaagtatatattaaataaacgtgaccatcaaatatgaaatcttacccaatttcttcaaca

SEQ ID NO: 136689 - DNA, 465 bp, Glycine max
  unsure (1)..(465): unsure at all n locations
agcttctgcagttcttcatcctgggaatttttgttctctattgactangggaatactgttgccattggcttccacccacgcatctccatttggagcctctacaatcttgaatggaaccattttcatctccttttgtggttgagcgtcatcanagcgcctacccaatcaccgcttggtaccaaagagagtgttngttggggtaattacagcttgacgcttaactggggtacctacaagcagctcccctttctggttgaaagcaaccacagatggtgttgttcgtgcaccttcagaaatctcaatgaccttgggggtctgagaaacatatnttgagtcagcacatatattgtcaatgganacacatacaaacaaaccaaaagcattaatgaggtaatgtgttactggtaccttttctttcataaccganacacnatgaatggtagtacccaatacaataccaatgac

SEQ ID NO: 136690 - DNA, 419 bp, Glycine max
tgaaagactgagagccagaaaactaaccatcagccaaccatatatttgttggtagtgctaacaacttacataaaacttcaaactaggaatctagaaaaaatctagaaaataactgaagcaaaattcaagtcaaattttttttaccggtgacatatttaaaacagaatagtaaaaaaaactggcttgcattttactccctggtgtcattttccagatgaagacttcaataatcaataatgagtccaatccatgaccacattatatattgcaggaagctttggagcttctttatgttaaacaatgtcggacttagtatttcttgagttgcatcacttgcacgtacaaggacactggtgcagtggaatttttttttttacgtatgatctaagattagtttcaatgagggaactaccttctta

SEQ ID NO: 136691 - DNA, 453 bp, Glycine max
  unsure (1)..(453): unsure at all n locations
actatanaaactcaagctttacagctaatcaacccacaggaaactattacatccaagtttctactctttaaaaaatatcattcatgctcatcccaccacacgaatctactgaaattttacaaactgagatgagaagcttcatgcctcaaggagcaaaaatgaaagtatagagcacatcaaggagcgaatttcacataaaatcatgttaaaccacatctcttgaatggagaactaaattccacgaaagttcatgctccataacatagataactaccatccaaataggcattagaaaagcacatttaatcttttacatctcagaaaaatattgaattaatttgtagaattaaataattgaacaaactaactatagtgtttacacaaaatgacctcacaatgctttgaccaaataaaaaattgaatgcaacgtgcattgtttatgcacagaataac

SEQ ID NO: 136692 - DNA, 261 bp, Glycine max
atgtattccttttatctgttgctgtctcaaacttacctgttgtgatgtactgcgtctttatagtgtatagtgatgctctcaatcatatataccatccttttatttgtgccggcaattcactacaaaactcgctattattgtgacactgacacaactatagactacataataacattaagaccattgatttggacatatgcgaagttaaaaggtcttggcacaacaaaaatctttaatttaatacatttgaaagatttatct

SEQ ID NO: 136693 - DNA, 408 bp, Glycine max
  unsure (1)..(408): unsure at all n locations
tctagattntcaatagatgtttttatggcattgggtctttttattatttagaggaaancattccaaggctttaacagaacatatgtactttgatgttactccttcattagatgctttgatgtttaaacctattagtggtctgtataactatcgactaaacattagatgctgcacacaagccactgctaccactgtttggcttttgccttgctttatcactttgtcagacccatccccaatcgcctctgttcactattccatagatggctccatttgggtgtgttataatcgatagtttgctaagttttgttaataaaagggatcgaactcgngatctttctctactatccttctttcttaatcaccaaactgaccttataatctcctttatggctatatagtgaggta

SEQ ID NO: 136694 - DNA, 295 bp, Glycine max
gaaccacaacacagaagacggcgagacccgtcacgtacccgcgacttaaaggaggggcgggattgaccatgactcagaaagactccatatacaccctccgaatcggaggaagacaagatgcaaatgcatgcatgcttgtgacatggatgcacaagcgcaacaattaaacaagtgtcactatgtgcaatgtcacttaaacgcttacgacacccttgtgacggagccaaacggctccgaactcagcgggcaaaacaggaagtgtacggtctaaagacagaaagacacaacacatgaa

SEQ ID NO: 136695 - DNA, 439 bp, Glycine max
agcttgttgaacgacagagtcttattatgtctatcttgcaagaactagctcagcaaaggccaattatgatttagatcaattcatagagaaggtggcctggcctgtagcccgaccttcttttgtgggggataatgaaagatttacagcccaggcaccttaacagcatgagctagaaccagaaaacgatcactcatttgaagccatcatccttggagctgttgattgttcataaagaagattatagacgagatccaatgatgctgctaatcttggaccagagccagtatcaacggatgtaccatttccaagagtggatccatcttcacctcaggacgcagcagactctatcactcctgtcttagagatacctgacggccaaaccataccagtcctggcttttgacacttcttctccagctactccagtattgcatcagaca

SEQ ID NO: 136696 - DNA, 434 bp, Glycine max
  unsure (1)..(434): unsure at all n locations
tgttgtatgacagttaagaatcagaggccatgagggtattttattgttagctanagagcatgtgagaaaggaattctcaaaatatcatatttgattaaacattaaaaatgagtaccgcattgctcttatttacagggaatgggtaaacactagagtgggcaactgattgccaactaattaacccatcttaaataataaactaactaatttaacaactattacattattaatatctctgttaacctgtttataaggttggttgtgttgaatgagtgaatgtaatataaatgcaagcaatggggggatggtgatgttcttgtcttttgttcattttgttgggattaatgttgtgtattgtcaaaaaacattggagtttctatggctattgaggctcgggttgaagctctatttgacagggtgcttcattctgattg

SEQ ID NO: 136697 - DNA, 379 bp, Glycine max
ctatatctaatcattctcttctttctttgccaaaaagaattcgcccaggactaaccgcctgaattattttagtgtctctcttctccctcttccacaagacaaatgattaaccacctgaattcttttgtgcctcccttacccttttaaagaatcaaaatgacacagactgagaattcttttgattcttccctttacctaaaacaaaatatttcaaagggctaaccgcctgagaattctcttgtttccccttcataaagtttcaaaggactaaccacttgagaactttgcctaaccattggagggacatccttttggtacagcagaggggcatccactgggttgtgtgatgagaacaaaagggacattcttgtgatctctc

SEQ ID NO: 136698 - DNA, 364 bp, Glycine max
agcttataagatgcccgagtcatttctctccctgatataggtgcagaagcattggcgagcagaactgccattccttggattatatggttgaaccaaactcatgcttttacaaaaagggtcatcaagtcaagttgaaatatggaagtaaccgtcttgcaaaattggggctaaagatgaatcgagtcacatcactgcttcgtctactgccaaacatatttaggattgttgatgttcttgttacttccaagttcaccttgacaaagatgtcatgtgaccatgttgaaaatctaaattgattcaacctcatatcctgctgtaaaattcgcaaaacttcgactgtacatcatccgcatgcattcatgat

SEQ ID NO: 136699 - DNA, 349 bp, Glycine max
  unsure (1)..(349): unsure at all n locations
atgcaaagctggcaggatttatttatcataggccaattatgagtgtagagcaattcattgagaaggtggcctagcctggaacccgaccttcttttgtagggaataatgaaagttttacagcccaggcacctcaacagcatgagctagaactagaaaatgatcactcatctgaagccatcatccctggagctgttgatttttcaaaaagaaaattagagacgagatccaatgaggctgctcatcctgtaccagtgcccataccagctaactcttccactcctatcttagaaatacttgagggccagaccatactagtcctgggtctgggcacttctcctnccaactactc

SEQ ID NO: 136700 - DNA, 345 bp, Glycine max
tctttgtttatgtggcgcgggacatcgccagtcgagagcgactttgaatggcaatcccaaaggaagaacaacttcaaaaatgggttttcgttgcctgcagtcatttacccagccacaaatttatccggtcagaagaatatgcgttctctttcctagtttcctgtattgatcaagaatcattctgcctctcctttgagctctttcttatactttcttccgagcttcgatcgggaagggcttttttccctttcttttcttctttacatgtcttcctttctgaaccttgaatggcaattcgggttaagcattcgtattcactctcctgaggagatctgggccttactc

SEQ ID NO: 136701 - DNA, 443 bp, Glycine max
tatgaaagcccaagagaacatgaagaagtactttgtccctctttacaatgactgccaaagaacctcaagtgggcttgggcaaactggcccagcgattttatggacctttcaatgttttggaatgcatcgacgaaatgtcttaccacctgcaattaccagaaagggctcggattcattcagtctttcactgctccttgcttaaaccattcaaagggtcaccgaagcagtcagaaatcgtatctttaccataacatttcattaatggtcaacctttagtttctcctctagctatcctcgattatcgcaaggcaccaggaccatccaatacttcatatcagtcacaggaaaggggatagttgcaatcacaagttctgtaggctctagatgtattgctgatgtcatatttgttcttgaaatgaccaaaactattaagtgtcggccac

SEQ ID NO: 136702 - DNA, 458 bp, Glycine max
  unsure (1)..(458): unsure at all n locations
gagctctntatatatatgaaatggcatatatttctacaaggacaaaagagagagcaaaggtgcagaatgaggcaccttataacagaggaaaataaagaaaaactgactactacaacaagacatactaatataaatcacaataatttaacactccccctcaagaaggagcgtatagattgtatgcttcaagcttggaacatttgaacaggttcgaggccctctcgaagatttggtcaaaatatctgcaagctaatcatttgagctaacaaattccgtactagtttccttggatagcagcgtttctttgacaaaatgacaggcaatctctatatggttgattctttcatgaaacccaggattcatagcgatatggagagttgcctaattgtcaaaatacaacttcattgtttaaatcagagaacttcactcttgaagtgcttgatcatactaactaaagg

SEQ ID NO: 136703 - DNA, 413 bp, Glycine max
  unsure (1)..(413): unsure at all n locations
tgcttctacattaaatgcatgaaaaacaaatataacagatatttttactgggttgcctcccaggaagcgcttctttaatgccattagcttgacgcttttacctcattgagtgatcttatgttttggttcttactttcaaaacctcttgacctccttccattacctgtgagcagacattgtgttctagagcaagcttgttttcaacaaacaaatcaaaatcaatcttctgatcttcaaaacctagctccagctttctcttccccatatcaactatgtagcttgcgatcaacatgaatggccttcccaatattatagggatgtcagtatcttcaaagatatccattaccacaaagtttgtcgggaagatantatgtattactctgaccaacacatcttcaattactccatatggc

SEQ ID NO: 136704 - DNA, 379 bp, Glycine max
  unsure (1)..(379): unsure at all n locations
agcttctcaaggaggtgagcgcagannntattttttgtgtgtgtatctaagccctagcttctcaaggaagcttctcaaggaggtgagcttagtttttagatgggtgtgtgtagctaaactctatcttctcaaggaagttttctcataaaaactactcaaggaagttttcttaagaaagcttctcatggaagctacctagtctataaatagaagcatgtgtaacacttctgtgtaactttgatgaatgaaagtcttatgagatacacttcaaagttccacttctttccttcttttattccttcaatttcgngctccaccctgctgtctttctctcccctcattaaagcatcctcttcaagcttgttatccaaggcaatac

SEQ ID NO: 136705 - DNA, 454 bp, Glycine max
  unsure (1)..(454): unsure at all n locations
taagaggtatgacggtgctaagggatgtttcccttgatatttgatatgtagaaagattgtttaagaaggagtgcccttttgatatcaccttttgttgcaaaatgattttccttcttaataatcttcttggaggaatccttctcctctttttccttccccttggcctttaaagacaaggccttactatccttgtttttctagtttttcttccttatccctcttacctttcatagttagttgatctttggccacctgtgaaggtgtttgaggatgcaacacaaatttagtgccaagatgggtgagggtaattccattagttaggccattgtaaatgatcttcctatcaaattgacatggccttcctaaaagaatatgtcctgcctccatgggagctatngatgtgtcattattttctcctatttcttacccctttctgtcaccatttaattactga

SEQ ID NO: 136706 - DNA, 356 bp, Glycine max
tgcctctaaaggatgcgtatgtgctaatagttacagtgagagctctcaactactaagatttcagcaaattttatcaaattctcgcaaatagttcgcccggaatatattaatgagaaaagagaaagtggatgctatttctatcccctaaaaaaattggatagcccaatgaatttggtgttctttcctctgtccctaaataaaacacacgttcaactcaaccattcattggaactacacttgaaagcgacttttgtgtctgacactcggaagttaataaaagacatattttactgactatataaaaaaacttcgtccccattgccggaagctcctcgtattcaaaggatggggaggat

SEQ ID NO: 136707 - DNA, 404 bp, Glycine max
accgttccacagcacgagctcagctgagagtgtcatggagattattttttatttagagagaggggcgagcaccaaattgaatgagtaaaacaaggagagaagtcaaactctgagttgagtcttacaagactcttattcatccgagtttcaacaagtgttcccatgcctttacttatagcctaagtagcttccctgagaagcttccttgagaagcttaagcttagctacacacacccatctaataactaagctcacctccttgaaaaagcttcttgagagacttcttcagaagctctcttgagaagattcctagagaaactaaagcttatcttcacacacccctcttatagctaagtccacctccttgagatgagaagctagagcataactacacacaatcccta

SEQ ID NO: 136708 - DNA, 413 bp, Glycine max
  unsure (1)..(413): unsure at all n locations
tacccttatgggttgcctccggacttcaccccccgtaccgctccagatttatttagccaagcccctaccttngaggggcaacttcctccttatgccgactattccctgcaagaagatgatgaaggagatgcccatctaggccctctacttcccctcaaagatccgaccccccatgaattgccccaaccaaacatagtccgccatgtcccgtctccacccgcacccgttaaagaattcgatccctttgcaaaagataagggaaagattgatttacttgaagaaaggctgagagcggtagaaggcctcgacaactacccgttctcggatttagcggatctgtgtctggtacctgacatcgtcattcctccaagtttatagtaccagattttgataaatacaaagggacgacctgt

SEQ ID NO: 136709 - DNA, 443 bp, Glycine max
tactaagcttgcatctggatgccatattcttacggtcacagcaatggcatttgtttgtgtatcatttactttcatcagctgtggcataatattcggaccagctctccatttatgaatttatgggcagggagcatttcgtgaattacgctattaacctagaaagttattttattaacaattggcctaaacatatcaattaaggaattaataaatgagaaataaactaaactgttcaatccaaatttaaagggtatgagtggaaggagagatataaaaaattataaaaaatgagtaaaaaattgttgagtgtgacaaatgataaaaagaaaaaaatatatagtcaaaatgggatggaaacaaatatgaatgtacgaatattataatcctaattataatagaaaatattgagaaataaggtatccatgtgaaaagcgttttaatta

SEQ ID NO: 136710 - DNA, 361 bp, Glycine max
  unsure (1)..(361): unsure at all n locations
agtcacctgaggcatgcaagcttgtangattatggggtatccatcacatgtggttctatgtggcggcgggcgatggtgcacaacaagttttncacgtccacaatgcgcgcataaacccaacatgccctgtggcccaccttcatctgagctcacgtacatccacgtagcccatatgcttgtttttttcaacaccgggtccccattaatccttccaagcttgcacaacatccaaagcaaacaacattcaaacagcacaagctattacagtcaagcaaaacagggcaaaggcaaaaaactctgctcaacacaccaaccaaaatcacagcttttctcacttaaagaccncagtaacaattccttc

SEQ ID NO: 136711 - DNA, 439 bp, Glycine max
  unsure (1)..(439): unsure at all n locations
tcaagcttgtccatatgttattccatatgctttcgatagaatctttatattctatntatactgggctcttgagggtgaaaaagcataccctgcagtaatagaagatatagtatttcacactatgttgtcataacatcaccaataattagcatattgtgtgaagaatcagaagactaactgtctaatgaacttatctacggggaacaattctacaatatcaaattcatgtctcagactcagactgatttgctattgattacctagagcttattaccaaccattttaagtaattagaaacaaaatcttaaatgtatttatgtagtgatactgcagataaaagaactgctgtaaaatcttctttgtcgtcctgccaacagttcaaaataactatagttgttaaagtgtgatcaaaagaccaatgggcaatgggaaacatact

SEQ ID NO: 136712 - DNA, 388 bp, Glycine max
  unsure (1)..(388): unsure at all n locations
ctcagagncacctgcggctgcagctactgctanacaaaattgttttttattttatctctcgaacgacgaatttgaagatgttttaaagtcacggaccagcagaagaagaatgaatgatgttatggtgaccatttttcccactgcatattttcttacactgatctttcgtgacagattttttttgataggtggaatattatatcatatttcaatgatgcttaactaattgtctgaacaggatgttggacaaaatccccgataatgtcatcagtgcatgaaaaagaagagaacattttgtgtgtcttgtactaaatgcccataaatgtactgtatgcgatgttgcaatatatgggatggcactttacatctaattaatcaattctgctga

SEQ ID NO: 136713 - DNA, 454 bp, Glycine max
  unsure (1)..(454): unsure at all n locations
cgttggctcgtggattggtttatgtcaaacaacatatactcatgtttattttccnaaaaataaaacaacaacaacatatacacaagtcttgtactctgtttctagcactcatcgcatactaataaaggtaagggcgagtgttaattactagcaacaacacagaaaagaaatcaaagatgaaatttgggagttaaaaagcgaaaaatgatttgatgtcatttggtgaaaaggaagagaaaagttgaagcttcttagatgaatttattatatagcttaatgaatttattatatagcttaatgtaatataactggcaaagtaaggcaaaaaagtaggcaaaccttatacttgaccttagtcttaccaattaaccacaagtgtacttactacttacttggtagcctcgatatatccgcatcctcatgtgaaataatgtcttttctttcacctttcttt

SEQ ID NO: 136714 - DNA, 438 bp, Glycine max
agcttgttgaaacatttgaggttctttctttgttttatccatatgctatattgctccataatatagctgcatattattgctattgaattgttccaagatatcaagatttgtactgcattcacgtgaggaaactggtacagtagctactgcttcgaagacaggacattgaggctatggaaggtaaataaaagctgttgagatacatttccttatgctgtgcttatgcttactatgttatgttttcccatttgtgtaaagctcaatgctggggatcatgtaaacaatcctatgagggttagggcttacaaaatctcgcgtggtcataagtcttctgtacagtgtgttgcagtgcagactgctggagagatggttcgtatagcttttctattgttaacttctccacttctttttctccttgatttatgagcagagtaatag

SEQ ID NO: 136715 - DNA, 444 bp, Glycine max
ctaaaataggatatggtagtttcgccaaccctttattgataatcgatagttatcatcttattattgaatctaagaaccaaacacaaccaatggtgctttgccaaagaaatggtgggatgaaattgaaccgtacgtaccatatgtgaaggccatttctgcattaaaggcccaacatgtatttaatgttggttaaaccatgataatgtaacatgctatagaagcttttctggcatgcctatcgtcgctcgtgataaggtcaagtgtcctattcacggcagttaaagagaacttgttaaagaaaaaaatagaaagtatttaataagataataatttttaaggaaagacttgactttctacttccttttggtttttttttcattttaatatatttttttaaaattgatcctatttgtcaaatgtgacacataaaaatgctataattga

SEQ ID NO: 136716 - DNA, 456 bp, Glycine max
  unsure (1)..(456): unsure at all n locations
agcttgttaagctntntcttaagcttttgttattttctttttctccccctttggcaacatcaaaaagccaaagatctcggaaatcaacacaattataacaatggagtagcaagatataagtatcagagtattaaagacaataagccaaactcataatcaagaaataatcaaaccagaattcaaataacataaaatgttaacaaccacaaaatatccaagactgaaatttaataacacaagataaataagcaaagtacttagcataatagtgtaaattctaaggaactaaaagctaaaatacacggcttagaaaagataaataatcagaatctaanagctaagaagacggaggaggtggtggaagatcgaaactctgacgaatatatccgacatcctcttcaagctgtgtaagacgaatgtncataccggcaaagcgtgaatctaacgagtcaaagc

SEQ ID NO: 136717 - DNA, 384 bp, Glycine max
gccagacttttatgttattttatccgagcctaaaaaaaagcctatgacagggtatgagccaaggtcaagccttacgtattcaaattaagccgagcttcagcctaataaaacttgggttggcttggcttagatgctcaaggaaggcagcagggaagaaaattaactataatattgaactttatcttttacacaaatgtatatgattttcccagaggtaacacttcaattttgattaaataaaaagtaaataatactaccttagaaacctcatacaatgtttgtcttgcaacacaatcatatgacacattcgatcttctgtctattaatacaggtatgataagtttctgtggcaattaaagataggtcatttaatttatttttttt

SEQ ID NO: 136718 - DNA, 451 bp, Glycine max
  unsure (1)..(451): unsure at all n locations
agcttgtcccctttcattatatctacttttttttgtgtgtaaattaattcattatatttactttggtatcttcaaacaaaatactaagtaacagtaacacgcttaacctataaaaaatggcagaccaagctaggtagctcaacatgctaaccaactgcctcgcctaacctaccaacctggtggaccaataacgggacacggcattataggttgggccactaaccattgtacatatatatatatatatataggaaaatgtaaatattataatgtatttagtttttaggctttcactctgtattttttttaaaaaaaatttagtgttcttaacaaatcaaaatacatatttattatctttcttatcttattnttcgaactcaattcctaatcctaatatanaagttatattcaanactaaatntaagatacgtaattgatatattttatgtta

SEQ ID NO: 136719 - DNA, 420 bp, Glycine max
  unsure (1)..(420): unsure at all n locations
gcgcttagcgcttgtgttaatttcataaggtgctcttttttcatcgtgctgcactaagcgcccggctctattttcagnttaatttttctgttttcttgagaataaccctatgctaatcttgcgtgttttgtcttacattttgcagatggcttctaagaaaagaaaggcaccatctacacctacccaagccagatttgaaaaatcaagattcacttcccaagaggcttgggaaagatacactgatgttattgtgcctaggaagctttttcctgagaggaacgtggtggtttattatacagagttcgatgagctcaaggaagaactcgaaagacgccattgggatgaggagttaactgactttggggacagcacatatgatgttggcattgcgaatgaattctactccaacctattatgacc

SEQ ID NO: 136720 - DNA, 387 bp, Glycine max
  unsure (1)..(387): unsure at all n locations
gaccttaagtcacctgagctgcagctgtcacaaattttttttgttgttttcactncaattcttaccaagntaagggatcatttttaaggtccaacacctttaaatgatcacctcttaagtaaaaagaaatcgtgtgagtcacccttaagaaagaactacgtaagtctgattttctcatcccaattgaggaatacgtgtgagcaaagggaaacacccttgtcgacacaaaaagagaaaataatataaaaagggtataaaggatataaggacataaaagggaacgtataaatcaaagtcatgtttgcacattcgattaaaggctgccgtcccttgtgacggacgtgtggggtgctaataccttccccacgcgttaatacaactcccgag

SEQ ID NO: 136721 - DNA, 398 bp, Glycine max
  unsure (1)..(398): unsure at all n locations
tgcatgtgaacgttaaaaatttgaacgttggggtttaagttttatctataaaaaaaatgcttgaaccttgattatttacgcttgcatttctccctactgagntctctttctggttcttcttgagtgtgagcttgtgcttgtgcttgctgtgtgcttcttgctttgtgctccttggttcaaatttggtgcgtgcttccttccttcaagtgtgtgcccttacccttacccttcctttctggtaagtgttttcaaagtaaataaaatttatatattctgttaataaatattataagtttaagttagttagtattaacaaatattctaagttagttagtatgtaaatagtagattagttagtattaacaaaaattctaagtttaagttagttagtatcagta

SEQ ID NO: 136722 - DNA, 404 bp, Glycine max
cgcagctgcagcttacacataattttctaacttttttgttattatcatactaattcttttctagctagatgattgagatgatgcatgtttatgtgtgcagccctaccatgccataaccatgaatcgacaattttacttaccaaacaactaaactcatgaaataatgcacgttcaatgtttaacatatagatattatccatcctttagccaatatggacaacctcaccagacatagcttaactaataagacaaaaattcttgttgaattcaattttgaagtccttgtcacaaagttgactaatgctcaagagggtatgctgctagtaatcaacatatagaacattctttatttgtgtcctgtactgattccaatatctccttctcccataatatttctttattgg

SEQ ID NO: 136723 - DNA, 286 bp, Glycine max
  unsure (1)..(286): unsure at all n locations
ccccccccccacgcaccaggtcaaagaggggtgcaaacgccgcccccaaacggaanaacannnnnagtgtgctccgaccgcccaaaannaccnccaagaccngaaaaaaaaaacacaccctgggaaaaccccccaaccggccaaaccgaatggcccccacgaaaacccggccgacccagagcccgccccccgcgccttaacacccccccaacaaaaaagcaccccaaaccggaaaaccccccccgccaacttgacggcccaccaatctggccggaacaacgaggga

SEQ ID NO: 136724 - DNA, 452 bp, Glycine max
  unsure (1)..(452): unsure at all n locations
tagaaagctaggcccagcgctcannagccagctcatgcttagcgngaagatagcctactattaagnccaaaagctcacttagcgcgaaagcacgtgctaagcacgaaggcgcatgaattataagctactttaggcctataaaatataaaaggagtaggaagcaaaggagaaatatacaccgagactcagagctctctaagcatctttcataggggaaaccctctctcttgccattctcccctcttcctatattcatctcttttcttctttcatccacattagcccctaaagtgtaaagtctctcatgaccatgagaggctaaacccctttattgggtgcctagcagctaacatccttgtaatgtaaattctcttactatctattaaatgcaatatctgttcttattgtctcttttatgctcttcattgcattgcattgtctgatcatccatg

SEQ ID NO: 136725 - DNA, 396 bp, Glycine max
  unsure (1)..(396): unsure at all n locations
agctnttttggttcggnaacgctctttanattantgtttgcagnncggctagggtccttcgggcgagctcaaccgaagatgtatttcggccgacaccggcattttgtcggacaggaaaacattagcccaccttggcaaaaaaaacatgattcactggttttgacagaaaaaaatgctggccttagtcggccaggagagatgaccgatccgggtctaaaaaagaagcacgaccggatcacgccgatcgaacatttcctaatagagatcctccaagtattattcatggattgaatggaaacaacaatagccgacatcggtagtaaatagtcgcgactgatatttttcagccgaactgcgcgaatccttccaaacgctgggcgaaatatttcttacagg

SEQ ID NO: 136726 - DNA, 351 bp, Glycine max
caatcaatttccagcgtctcgatatattaccggactcaatccgacattcgactaaaaagatattgtcgcttgaatttgctcaaagcttcggcattcaaattcaagcgcggcgatatattacgcgactcaatcaaacatccgagttaaaaggtattgccattcgaattcgctcagagcatcaacattcaatttccagcggggcgatatattatgggactcaactctgacatccgagcaaaagttattgtcgcttgaattagctcacaagcttcacaatacaattccgagcgcctcgataaataccggactcactcagacatctggaccaaaagcatcggcattcgaaaccgc

SEQ ID NO: 136727 - DNA, 444 bp, Glycine max
  unsure (1)..(444): unsure at all n locations
nnagctgaggaaantaatncaatgtgattaatgtttcttattagcgagaacagtnttcattacatgatcattaaggtgcattaacctagcatgctagaggttagcaacactggaagaatcaacaatagaattggaaactatactagagctattattaacagtaccagctgaactagggaagccaacatttgaaacagggaagggttgtcttgaagcttgagattgtaaaaagaataaagtccatcagcaccaacaactccttgaagaagatcttattggtctcctgagatttcacaagacatatatgacgatgaaattcaaagaaatcagagttatcattggcaaattgactcacacttcaataaattttctaaattgaaggaacatgtattaatttgtgaagtttataaggtatgccaacatcattatgagacacaatagatg

SEQ ID NO: 136728 - DNA, 432 bp, Glycine max
  unsure (1)..(432): unsure at all n locations
agcttgaagtgagaaagtgnggattattatttcttctactttnattcngtgaccacagagtggtacctggagatatgtcgcggnggtcaggagaccttgnggacgtcaggtggggtggtattgcccaaaaccaagcttgaccaatcccgacccaccccgggcatagtcagtcagtgagaacctgtgacatacctaaagaggcgagctcctggcagtcaaccgataaaagaacaaagaccacaaagcaaggaggcttgtgtggtggctggccagctatggatcttgagtgatatttgggatatggcctctggtaatcgattaccaagggtgtgtaatcgattataaggcttaaaaatgaagataggaagttaagatggtctctggtaatcgattaccaaggatgtgtaatcgattaccaggcctataaatggg

SEQ ID NO: 136729 - DNA, 436 bp, Glycine max
  unsure (1)..(436): unsure at all n locations
actcagctgtgcgtataaacttatttgacatcaagatgttttttatacaacttctgtgaaataacaaattcgtgtctcttaatctgtattagaacttgcagttggtgatacttataaggctcatatggtgggaacctgatttctttgttaatttggttgtatagcttgtttcttgggaagaaagagggtatctgacatcagataaaccaatgccaaggggagagattgtagttggaggatttagtgtgacagctggttactttaagaatcaagaaaaaactaacgaagtgttcaaggtaatttcccaagttacagttgtatgcatgacatttttcctttttaatttcctttaactgctcttaaatctgtttttgcatattactaagccactcgttacatcttttttttggtttttaacttantacacgttgatgag

SEQ ID NO: 136730 - DNA, 437 bp, Glycine max
  unsure (1)..(437): unsure at all n locations
tcagagtcacctgaggcatgcaagctngaaggaaaacttgatgcctttgtctttctttttactcagctagccatgaatcagaaatctacacgtgntgagagagtttatgatctatgttcttctgcagatcaccatacagatctttgtccttctgtgcaacaatctaaagcaattgaacagcctgaagcttatgctgcaaacatctacaacaaacctcctcaacctcaacagcaaaatcagccagaacagaacaattatgacctctccagcaacaggtacaatcccgggtggaggaatcatcccaaccttagatggtcgaatccttcacaacagcagcaacaacaaccttattttcaaaatgctgctggcctaagcagaccatacgttcctccaccaatccatcaacaacaacagcaacagccccagaaacaacaaat

SEQ ID NO: 136731 - DNA, 447 bp, Glycine max
tataagaacaaaattgcctaaatcatttccaaatatgcatgtttattatgaagcattaacaagaatcaagccaaggctattgtgcaagcaatcaatggggcaaaacacaccaaaagattatgatgatggatggctcaaattatcacaaaggtaaacttatcactttcaaattgagctttcaaaactatcatgacatgtataggaaaaacaaggatttcaaatcacaaaatgtcaagagacttttattttcagaacaatttcccattttttgaacatatcctataattcaaagaaaaatatgcaaagttgtacatgcaaacaaaattgacctaaaatattaaactagaaacccaacaaaactaacaaatttaacacaaacaaaactaacaaaactagcaaaaccaaaaccaaagaacactcgctcccccatacttaaacaacacatgg

SEQ ID NO: 136732 - DNA, 361 bp, Glycine max
  unsure (1)..(361): unsure at all n locations
tagactaagttcagcctaccatcctcagactgatggtcattctgaatggaccattcagncattggaggaccttttgagggcgtgtgtcttagagcaaaaacgaagttggtagagattccttccgttgatagaggttacttataacaatagttttcactctacgattggcatggctccctatgaagctttgtatggtagaaggtgtaagacacccctatgttggctagagcctggagaaggcctcaccttaagattggaagtggtacaacaaaccaccaagaaagtcaagttaatccacgaaaggataaggactactcagagtaggcagaaaagttatcatgataagaggaggaaagatctg

SEQ ID NO: 136733 - DNA, 485 bp, Glycine max
  unsure (1)..(485): unsure at all n locations
acctcagagtcacctgcggcatgcaagcttgaaataatcatcatacagatgggtgttatggtcttccttctcttatttaatgcacaaacatgctcaacgccttcaccaaacaatccctctctactcattaaaatgacttgatcttactttntatcataaatatctgacaatgatacgaaccataattcaattttatataagaaaaaaaattaaaagttatggatttaagattgtgtaagtaattcaaatttattagttaaagtgtttctagcttgacatctgaaatgggtggacattgngaccttgtaataaaaccagcaagttctttaaagtgcgtttggtaaattactttaattaagttnttatttgataaaaaatataatataataacttctatcataagcatttaattcaataagtatatagaatagttacacgttnatttcataaaatatcttcattttttagatgagatggttacatta

SEQ ID NO: 136734 - DNA, 448 bp, Glycine max
aactaagctctaaacataccgaagatctctaagcccccttttgtttatattcattgtgaatgaacccccgctctcgctatactgatagtactaaaaccctacactataaaactcactaactaactaactgttattttgttattgggccggcccaacccggcttatgtggcccaatttaagcgaacctatctatcttattccaaggtgtttctaaacgctgcgtgttgtgctttgcggcgaagcaatggcggaagaaacaattctgggattcttagagaagaacgacgagattagagactcgggtgagttcgcagctgaacgtggcattgagcacaacgagatcgtgaatgtgataaagagcttgcacggggtcagatacgttgacgcacaagacattaagagggaaacgtgggtcctcactgatgatggagaaacgtatgctactggt

SEQ ID NO: 136735 - DNA, 464 bp, Glycine max
  unsure (1)..(464): unsure at all n locations
ctgcagcttagaccnagaactaaaatctattctcttttctcttcaatgnaccggaatttgcaaggattgagaagtgaaaatgagaacggggtcaatttggagcaaactctcaccttagacatgtctatatcatcaatctaaacttgctcaaactgggtttacgcctaaaattccaccgaatcataatttgactcctcaacacctaatttttaccctagaaatggttcttgcccttcacttggtcatttgatntcctctcttgcacagcccaagctntatcataagtcctaaatgacatttcagactaggattaaccctcaaagcatcacactttttcactcagaggactacattctcactttctaaccctaggntaactctaccacttctccctagcagttttcattagcagattcagcacataaacatcacaagcatcgccataaaaaccctaaaacagaatg

SEQ ID NO: 136736 - DNA, 450 bp, Glycine max
  unsure (1)..(450): unsure at all n locations
tgttcttgattnttccccagttctttaacaagctntgaacaatatatcttgtgtcttatttaactgtctttgggcttggaggccacgctcaacaaagtactttcgacacctactttacgttgatttcaccaatgctgttatgggaatgttgcgacaatcctttaaaaccttattgatacattctgagaggttcgttgtcatgtggccatatcgacgtccttctctatcgtaagccatcgtccatttttcctttgagatgcgatcaatccatgttgctatggctggactcagttcacgaaatttttctaaattttgataaaaaatgtgcttgcaaggagtgtaggctgcataataacagttatgaataaaaattataagtattaatgaaagtaaaataaacgtgacaatcaaatatgaaatcttacccaatttcttcaacatctctttttg

SEQ ID NO: 136737 - DNA, 312 bp, Glycine max
  unsure (1)..(312): unsure at all n locations
cgaattccttctctcaaaaagagcctgcagaaagtcttctctatttaacgcagagctacagaccgtagctgattntgatgatgtaaaccatcttttttctgtttagaactattacaatgtatgaatcgatgtattatatctacgatcgaaagatagatagctaggcatagaattattcattctgtaaatctgtacatagaattattcattntcattgacttcaagtataaattttaattgtatcgagaaaatatcgatatgaatggcagaagtaattcatgttatgtcagctctgcattagacatatccagt

SEQ ID NO: 136738 - DNA, 272 bp, Glycine max
  unsure (1)..(272): unsure at all n locations
aagctngccttggattcttctcgtgacacccttaagagctaaagaccgctaatattttatatatctagaattgaaaacatagatatagcagcataagagtagctagcttccaatccatggacatcattactcaatactactatgactattggtctttacacatttcataatttgaattaaacaagacccagtttaattgtttcccccaagggctatatatatatatatatatatatatatatatatatatgtatgtatatatcaacagaacg

SEQ ID NO: 136739 - DNA, 358 bp, Glycine max
  unsure (1)..(358): unsure at all n locations
tatagnaatactaagctncaatatcttcctttgggataatntactccaaaacttaccttattgcacttcttcaaacataaacacctgctggctgcagaaaacaaaaatagttataaaattgggaggtagcaacatacccaccgaaattaacaaaaaaaaaggaaaaaaacgccagcacaatatttcacctcaacagggctcttaagtgaggcatctgaccccataagaagagtaataggaacactccagagtctgatactgagcacaaaatccaggttacaacagacaaattagctattgaagactaaatatgggagctagatataaaaaggcggaaattgaaaaggttgaatcttac

SEQ ID NO: 136740 - DNA, 449 bp, Glycine max
  unsure (1)..(449): unsure at all n locations
agcttatgtttgaagggtatacgaaagaatgtctattatattcaaanatttaatgactgcccacacctactgtctcgtggggggtatgaactgcttgacaagaaacttatggaggagaagaccaagcgttgacatgaggaacatcagtttactgaaaacccaacactcaacatcgaccctccatcccctatggcaagacacnttgagtggaagatcgcacgcacaaagagttatgaccaaatgacgtctgaagcggcacaagaaattgtagacaaaattgtgagttcatgtcttctttggttactgtcattgccaaataatggttagccaacatagtcaaatttattttattctaattcaacaactatacatccatgcaggattcattacaggaacaagcaacacaggggaagtttgttccgcatgggtgacaggacatactgaacacg

SEQ ID NO: 136741 - DNA, 406 bp, Glycine max
tcataagaccccatgacctctagaattgcggcaccaatgtcacagaggcgcacatcgattccagcttcctagatggcaggccataaattccataccatgttagaggaaccagcatatcgcctgatttaattggtgcatatcgaatacatctcacctcacagatctaacataattaatatggtggaggggtaaggatcagacaccatttattacgcttctgaagctttgccctaaatgagttctatctacagagatactgagataatctgcaaacataaagctgagtattcctattctgatttgcagaattctctggttcttattacacaggatataagctttttcacaagctcgtattaactgattgtacaaaaactatctctctacagatatataattgattgct

SEQ ID NO: 136742 - DNA, 417 bp, Glycine max
  unsure (1)..(417): unsure at all n locations
gaccatagaaactcagcttgagacttaatttantaaagcatcttaaggataatttatttgtactaacgaacggcggcggtataatatataattattgaaaccagaaaggattattttctatttgtaccaaaaaaaaaaaaaaggattatttcttatatattttttcaaacccaatgcttcaaattatacatcataaacgatggcaaccacggtgacaacattatattttgcacgtttctgtactatttctgagatcggaattcccacgccatattaaatttctctttttgtaacattaccttccaaccatcctttatgagaagaacaatggaaaggcttggagtagcaacataatcttccaccacttggacatgatactttgataatatagcagctgccaccatcttcatttgaatg

SEQ ID NO: 136743 - DNA, 357 bp, Glycine max
gaccgtaccagagggacactactcttaatacaagaagggcatacaacctccctccataaatacaaacattatggtaaatttagagccaacttatgcgcatgttgccttacgaacgattacttgccgaagaaatcctattaactaaaaaaaatgcacccatatacaatcaagggagcttcatgacctagaatatcgacatgcactcccacggcggatgtgttatttacaacacacacgcctccttggctgaagttacatacatgcatactcaaagcatttaggagaccaaaaccgcacatgcctctttaggattactaataccccacatatacaacgtacgacgagcttgctacctta

SEQ ID NO: 136744 - DNA, 451 bp, Glycine max
  unsure (1)..(451): unsure at all n locations
ataaaactcagctttaataagctctgaatccgcgacgctgtgcttagcgcgatttttggattgggcttagcgctagttctacactgagcgtgactaaagataaccatcgtgcttaatgagcggatctcgcactttgcgcacgaccttgatattgatgctctgccagattcttctgtcacgctgaagctgcacttatcaatggatgcgcactgagcccaaatggtgaagtgagcgcaactgctccctttagcacctcaagattttagcctcttttgacctgaaattgtgcaattttatcattaaatcacatgggagatactctagagactgctataacaatcaaacaagatttatttacaaatccctacaaaataactataaattatggaaactatacaaggttctgagaatgttntctatacaaaagttagtcatatatgacgactaacac

SEQ ID NO: 136745 - DNA, 67 bp, Glycine max
agcttaagtggtgtcaacaactctcatacatatgattatcgggagggaatcaaaagcgggtgtgctg

SEQ ID NO: 136746 - DNA, 443 bp, Glycine max
  unsure (1)..(443): unsure at all n locations
tgtactcccttgtagaacttgatacattggcttcctatcttatcatcttagagaaaaatttcttatatcgctgtgtgctagttaactctggatatttgatgtgaaacattttaagtcatctttgcatagcattntacataggatatattgcattttatctatatattttagcttgcttttgtttaatttttagtgtttcatacttttaggacttgtcatggcgttttccttgttttcattttagtttagtcattccaagatcaattctcacataaaggatttataaaggaaagtttgagcacaaaagacttgaaaacagataaaaacaatgaggttttgctataccttgtagagaagatcatgggatgtgattaggatcaagacccaatcatcagacactaaagctagagcccaaataatatttttaggaagatcatagcccc

SEQ ID NO: 136747 - DNA, 453 bp, Glycine max
  unsure (1)..(453): unsure at all n locations
agcttataataaaggtcatgtgataagagttttatttatattaacctaagaaaagaggtcattattctaagtgagagcgatcatcaatttaactgtatgagaatgaccacgtaacgaagttaaagaatctctatgattaccctcagttgcctcctcttcgtcttcagcattttcaagttttcattctctttcaaacttatgtcctagcaaatttatcaataattactcaataaaaatattatttgacaaatacaaaaataataattgtacttggaaaagacattaaattattggtttacaacaactacaaattttttaattggttcataaatcacaatcatattagatatattacaagaatntgttagtggggctgtgagagaagagataaaaagtatgagagtgtgaatcctctattttagaagaggagatagatgagggggaggatgaaga

SEQ ID NO: 136748 - DNA, 438 bp, Glycine max
cgcttagagtctctatgaaggtctctatctgcttgtcttttattcttgttttggctaagagcgcgtcttgtgacgtgagatcaaaaagacttttctttgtaagcatataatctcaatcacaaaggatggcatggttatttggtgtcatcgtttcaattaactccatagctttatcacgtgtcttcaatttgatcttcccaccaacggaggcattaagcagctgctcggaatgggattgcgtgacactaatgaatatattttgctgaaccggctcgctgaacccatgggtggaagtcttctatagtaaaccttggaagtagtctataacttcactcaatgattcaccagggaattgctagaataaagagatgtccaccttcccctcagtggtcttggactctggacaatatttcttcaaaaaattctccaccacctctt

SEQ ID NO: 136749 - DNA, 437 bp, Glycine max
agcttggaaggatgcttctatggatgtatttatgagggagagaaagagagaggggggagcacgaaattgaacgaataaatgacggagagatgtggaactttgttatatgtctcacaagactttcatttatcaaagttacaacaagtgttacacatgcttgtatttatagactacgtagctcccttgagaagctttcttgagaaaacttccttgagaagcttctttgagaaaacatccttgagaagctagagcttagctacacacacccctctcataacttaagctcacctccttgagaagctgccttaagaagattccctaagaagctagagcttagctacacatacctctctaattgctaagctcaccttctttggatgagaagccagaacttagcctcacacccttctatatagcgtagctccccccatgacaaa

SEQ ID NO: 136750 - DNA, 321 bp, Glycine max
  unsure (1)..(321): unsure at all n locations
cccaccatcccctggtgcccaccttcaactgagctcacggactcccacggagcccgtatcctcggtgctctcagacgccgggtgcccatgaatcctcccaagcttccacaacatccagggaatttcacatccaatcatcatggactaacaaaaccaagcaaaacagaggcaaggcggaaaactctgcccaaaacacaactcaaaatcacagctgtncacatacaaataccccagcaacatttacttctgtccaattctggaaccgttggatcgactcgaaacttttactgggagactctagtacataagtctacactttga

SEQ ID NO: 136751 - DNA, 225 bp, Glycine max
acgactaccaacctgttatcttcttctatagagagtgcatcattgaacactataggcttatcttcctccaagaacacatacgtcagatgagtgggcaatatctacaactctatcttcttcttcatcacagacggaacttgcgtctctagcacctcatatggcttccccctcaagaatataggcatgtcgatccaagtcttccaagccagccttcaaattttctcc

SEQ ID NO: 136752 - DNA, 431 bp, Glycine max
  unsure (1)..(431): unsure at all n locations
ttanaattngaattaaaacgttcagaaactgttggttatcttttaccatatatgcggaatcgattacacagggcaaattttgaattcaaattttaatagctggtgtaaatcaactttgggcactggtaatcgattacatcctctggtgatcgattaccagagagtaaatttcttgtaaaagaatttttaacttaattttcttggccaaaccttttgctacttcaattggaattcccttcctatttaatataccctttctaagactctatagattgtcttgatcatccatcttgaatatctttaattgctttgtcttgaataaagctctgagtcgcatgtgatcttttggcatcatcaaaacatcggcttgatcctctgtctacaatcttcccctttttgatgatgacaatccctgaaatcaagaccaacta

SEQ ID NO: 136753 - DNA, 229 bp, Glycine max
  unsure (1)..(229): unsure at all n locations
cgacaaagcacgagcagcacnaacnaaagcccatcttttcaagccaacagagactaagacagcaaaaaaggcgaggaccaaagccgacgccaagcagaaccccgtaaaccgagacagaacgaaagagacaccaggcaagaagcagtacagagcccatgaagaaagcctacaacagccccaccacagacccaaaccaagaagccccaaagaaccaccgaaaagaaacaga

SEQ ID NO: 136754 - DNA, 429 bp, Glycine max
  unsure (1)..(429): unsure at all n locations
actaacctcttctgttagagaacttgctggggaggatgtttgtgttatttgagtagggtcttcagnttatatatatgaatggattcttttatgtcattattttcgaacttttgacttacatccaatcgtgcgtaaaatctccctgttagtcttgtctaatgatcttaaacaatttcttcactttttactatatagaaaatgctgactggtgggttgggattgactgccccgctgacagtaatattatctccatgtttcccaagatgtttacatatatttttcaagaaaagaaatgtgaacactatgttagttcagaagtgtaaccttgaaatgcttatgatattgatatatattctctcttggcttttgtcttggtgtagtgctatgaatgaactggtggacaaatttaatattgcgtatgatatgcat

SEQ ID NO: 136755 - DNA, 419 bp, Glycine max
  unsure (1)..(419): unsure at all n locations
agctntagcggaatagctggcacggcgccttgttctatatatgtttatatccngncatctagagaccatgtcgaacagtctgtaagtaccaaatatatcctgtcaataatcaaggttcaagacacatattcatggcacctcaactacttaatgtattattaagttcatgcatgcaaaggtgttcatatctaactaataaatcaaaatgtgagtggtggacagaagcaaagagtgcaaataccccatgctctatagcaatatgctgatgtatatctgtttgatgatccctttagtgctgaggatgctcatacaggatcccatctctcaccccattgtttncatctattattggacatatatcattcgaaattgcagtcggagcacataaatttcatgatgattgtaaggtgcgacaatct

SEQ ID NO: 136756 - DNA, 295 bp, Glycine max
tcaccaaaaacaaccaactcagctgacaacatatcccaataaagggcgaacggaaggcgcatctgcctttggaccccagctgaatgcaaatggaatccgaccggaagacagcatcatgcccataagtcaggcgaaatggggtacgaataaatgataccttaagagaaatctacatgcccaaagaacttgagctaacgggttattccaattccccggctttagggcaacgcgcctcttaatcaagataattacaattttactggctgcttcgaccagaccattagcttgcgcgaaa

SEQ ID NO: 136757 - DNA, 398 bp, Glycine max
tctaaatttgttttcacaacatacagccatacccttcttgttttatatctatgatggtgagaaagtatgagctttcaccatgagttctcactctagaagggccccataaatcataatgcacatactcaaaagggctagatgaaacatgaataccagtgcccaagcttattctatgtgatttagccagcacacaatgatcacaaaattcaaggttatctagtttatcaccacctaatagattttgtttctcaagttcatgtaatcccctttcactaacatgacctaatctcaatgccaaagttttgtttatcaacaatggatactagctactgatgcatgtcatatagtggaccttcagaataacaagtatacgttattttgtaccctggcatgactaa

SEQ ID NO: 136758 - DNA, 333 bp, Glycine max
  unsure (1)..(333): unsure at all n locations
agtcatcgcacaacagaggacgatgatgattacttataccagtcccttgagggggtgttttcgcgatcctggctcatttgattgtggttacaaaggattcttcaaagagcttacaaaaactcctatcgagttcttgcttaaagatactctaaaatngaactaagctacaataaacacgtaggatttaacttaaacttatcataattcttatattagattctccaactacgttatgccacatgatatcttttttacatttaccacaacaagcttgattgagatctatttagaacaagttgcagaatttcagaacacatttccaaaaaatgacac

SEQ ID NO: 136759 - DNA, 374 bp, Glycine max
tcctggcgcggagatgatggtacagcgggtgaaccaccaacggaaggttcttttggtgaggaagccatggaaaaacagaaccggtggaatgatttccgaaatctcagaaactattgggaaatgctggagaaaacacgaatgccaagcagatataaatttgaatgaagaatgtataggggcgtgtgaagcaacagtcgaatctgctttgtggtgaacgcgctattaatgttaacagattcgttcgggcacgctcagagtgcaggacgagctataaatcctctagcaaacaaatgcccagcttggccctcaggtttctaaccgattcgcactcagagcctttgtgataaatctgctattcgtgcctcagaggcaac

SEQ ID NO: 136760 - DNA, 273 bp, Glycine max
  unsure (1)..(273): unsure at all n locations
agctttgagccaattcaaacgacactaactttgnttctttgatatccgagtgattcccgcaatattacgagaccctcgcaaatgaatgttgaagctcttagccaattcatacgtctattagtatttactcggacgtgcggatgtgacccgtcatatactcgagacactccgaaatagagtggtgaagctctgtagccaagtcacaccgacactaactcttcactcggatgtctgattgagatccgtagaagatccagacgcttgaaaatgaat

SEQ ID NO: 136761 - DNA, 440 bp, Glycine max
tcctagatatggagagctcaatcctctataggttcttactcgattgtacttgacgtaaatacttgtatatctatttaatgatgtttaatgtgttctctgtgctatcagtacgtcatttcagtgtgcttttgccttgatcatgtagatgcatgctttgttaggatcattcaatagtggaaactggtctgattcttataacttgataggacagggctagtttatcgtattatcacgagggattgaggtatggtaacctagttgtttgtatgttaatgcgggtttggtcgagtttagtccaacaagaggaatcggaggatgatgcatgatcaggattaggctatactatcatgaggaatcggggtgtagcatttcaggagacaccatagaacacatgagcactgttaagtagagaatatccttctaacatcacgcacctaata

SEQ ID NO: 136762 - DNA, 284 bp, Glycine max
  unsure (1)..(284): unsure at all n locations
aagcttgangagattgagagtgggataggctcctatgattttatttttccctagaagaggcaagcctagtggaactggaggcaaaggagatgaaaaggcggcttcattgcttgaattcttgaaccatcttatcaagcattgcacactgatcagtgtgactataatggtaaaattggatgcaagttgggggaatcccaacaccacaaatatggtcatgtgacacataatgaactcaacagcattatggattatgcagggtgaactaccttgtgtctgctagatat

SEQ ID NO: 136763 - DNA, 351 bp, Glycine max
  unsure (1)..(351): unsure at all n locations
cttctacacttgataacgtagctgtttgttatatctcttatgagagagatggtagctccaatgaaagttaagtttgacaaatattggggagaatgaaatctattgatggccatagctagtgttttagaccctaggtgtaaattgcacattcttcatgcttgctttcctcanatattcaactgtcaagaacttgctgaaaagaacatgaacaaagtgaagtcttctttgttgctttgagtgttgcataatcatcttctaatgaaaggatggttagtggcagcaacgcttctactaactatgtgaacaagtctttggtcaccactagaattgatgaaatactgaatattgtgt

SEQ ID NO: 136764 - DNA, 288 bp, Glycine max
  unsure (1)..(288): unsure at all n locations
acggatcaagatgaatcgtgttagtaataggatctgctttactcatacggatcaagttgatccgtatgactcatgcagatcaagttgattccgatgtgccttcttaattaaaaaaaattaaaaatagggtatttaacattttgaaaaatgtttttaattaggtattttatttgttagatctgttataaaaataggtattgtttgtgtcttaaaaaataatatgtatgattgcctggtgttatgaaatagttntaaatcttaatagtaaataaatgaatgttgtagttg

SEQ ID NO: 136765 - DNA, 406 bp, Glycine max
cagagtcgaccgcggcatgcaagcttggcaaacatagttgacacagaagggatatctcctctatatagaagcataatatcatctgcaaaagccaaatgagatagctgaatactcgcacagttgggatgaaatttaaaattggcatcttccttgaagctgctcatatctctggaaaagtactccaaacagagcataaacagataaggggagagaggatccccttgtctaagaccccgctgccctttgaagtgaccataaatggatccattgactgccacactaaaggaagtggaagaaacacatttcatgatccaagtacagaactgggctggaaagccaatggacttaagcatccaatccaagaattcccaggaaatggaatcataagctttatgcatgtcaattt

SEQ ID NO: 136766 - DNA, 381 bp, Glycine max
cttatttaatatatgccacacttcttctgttgacaaatactgcaggaaaccgaatcatgaattcatgcttaatttttcgggaacactaaagtaagtcaattgttttagctgttaacaatgaaggacacctaatgaaatatacaaaaacactctttacaacaagtttttcaaaaatcacgtctcctttcataattctatcaaattaaaatgtgcatacgcataggtcaatcgctattatattcctgaccattaatcctatcagcaagtcttttgatcagatctggtataatctccattactcacacaaactatgagttccaaaaatacatagcataatgacaaacctaatatcgagtattattcttataatacaacaatatt

SEQ ID NO: 136767 - DNA, 427 bp, Glycine max
  unsure (1)..(427): unsure at all n locations
agctntcttgaganagcttcctagagaaatctttcttgagaagctagagcttagctatacacacccctctaataactaagctcacctccttgagaagcttctttgagaagctttcttgagaaacttccttgagaggattcctagagaagctagagcttagctatacacacctctctaatagctaagctcacctccttgagatgagaagctagagcttagctacacaccccctataatagctaagcacacccctgtgccaaaaatacatgaaaatacaaaaaaggtccctactacaaagactactcaaaatgccctgaaatacaaggctaaaaccctatactactagaatgggccaaaatacaggcccaaaagaagaaaaaacctattctaatatttacccaagatagcgggctcatacttagctcat

SEQ ID NO: 136768 - DNA, 413 bp, Glycine max
  unsure (1)..(413): unsure at all n locations
agcttgctaacccatggaagctcctaatatctctctacactntntggggngggccattcttggatggccttgattntcccagggtccacttggaccccatttctaccaactacaaaccctaagaaaactatattatctacacaaaaggtacacttctctatatttgcatagagggtgtttttcctaaggactgaaagaacttgcctgagatgtcctaactgatcatctaggctcctactgtacacgaaaatatcatcaaaataaaaaactacaaatctacctatgaaatcccttaagacatgatgcataagcctcataaaggtgtttggtgcattagtaagcccaaaaggcatcactagccattcatacaaaccaagcttggtcttgaaagcggntttccactcatcaccctt

SEQ ID NO: 136769 - DNA, 328 bp, Glycine max
aaaaggaactgattttaaataatggggtccaacagctgtgatcaccgtcaatttatgacattttgcccctcaaaaatcaaaacatgattagattttggctaccatggaaaaggtgcacatgcttcaaaaatttattctcaagattggaatgataatactgatggcttaaatgaatagaaggtgagtgaagaatgtatcgttgctgtcaaaaaacacgatgatgcttcggcacctgggttaaaaaattattaaatggctgaagaaagatttctaaaattgttaccgaaatatctattgctcaatctgggaactgcttgtttttttcttt

SEQ ID NO: 136770 - DNA, 273 bp, Glycine max
  unsure (1)..(273): unsure at all n locations
aaaaaaggatgtgnatgaaagttgaacaaatgtgaacatacaagattcccaacaaaataccacaaaaacacagnttgataacagttatggttcattctactcagataatcacattcattcatataaatatatccagaatcaaaattgggcattaaaagtaatggaaaggttcaaccttcattcagaattgcagaactaagcattcaacaaagaanacagaaaacctgattatccagcattcgtgagaaatccttgagtacatgtcgccgatct

SEQ ID NO: 136771 - DNA, 390 bp, Glycine max
aaatttcattctaacatggaggcgaagacaaactatgtgacattcacaagaggaatactatgataagtccaagaaatattcatactttataacaatggtaacaagaagaagtatgcatgcagactcacacaactaacatattctaaggatgaataacagcaacagaaagatgaggacactaacatgcaatgcatactaagacaagagcaaaaatggatattcagaattcttacaaatgggtgtgggcctaacttaaccctacacaattggattgaaagatgagggttgcctccccacttatataccttattttgaccatatcactagttagagtaagatctcccacacacccctctgtccaagcgctactacacatctaagggggccagg

SEQ ID NO: 136772 - DNA, 367 bp, Glycine max
  unsure (1)..(367): unsure at all n locations
cttcatggtggaaaatcaccattaaaggacctcatttaagctcaaagatccagcctccatagaagccccacaagcaagcttccatcatctggtctctgtagatcttcacacagcaaaatctctaaaaactctccggaacttggacctttctctctctagaaaccctagacatgcaaagctctgaatcctagttcaaaatcccttcacaaaatctgatttcaggcttaaataggtggccgtgtttgtgctcgtgcgcttagtgcacttatggaccacttagcgcatgttnagtgattttggcttagcgcgcctttctcgcttagcggatgaactgaagcggtgcgcttagcgaacctgtacagctcat

SEQ ID NO: 136773 - DNA, 144 bp, Glycine max
  unsure (1)..(144): unsure at all n locations
caagcgagagcttatctacacacacccctctcataactaagctcacctncttgagaagcttccttgagaagattcctaaagaagctagagcttagctacacacaccttactaaaagctaagctctgttcgaccagaggccccag

SEQ ID NO: 136774 - DNA, 265 bp, Glycine max
  unsure (1)..(265): unsure at all n locations
gactagacnaagacatttgctgcccaagattcacggtctcgcaggtgaagatccttataagcatcttaaggagttccatattgtttgtttcaccatgaagccctcgtatgtccaagaagatcanatcattcctaaggcttttcctcattctctggagggagtggcaaaagattggctatactaccttgctctcaggtccattttcagctgggatgagagggtgttctgggagaaactctttcctggatctacgaccactgtcatc

SEQ ID NO: 136775 - DNA, 296 bp, Glycine max
  unsure (1)..(296): unsure at all n locations
ttaatgggggttttccaccatggagatgcagcggaagacaaaggagaagaggggagaggaggcgccatccactacggaataagccatggaagaaggagcttcaccaccaagatgagccttggataagaagcttggaaggatgcttcaatggaggaaaagaaagagggagagaaagagagaggggggagcacgaaattgaaggaataaaggagggagagaagtggaactntgaaagatgtctcacaagactctcattcatcaaagntacaacaagtgttacacatgcttctattata

SEQ ID NO: 136776 - DNA, 379 bp, Glycine max
  unsure (1)..(379): unsure at all n locations
ttgactcatacttggcactcggtgaagttagtggaacttggtgatttgtcctgaatcggcctaatctcgtagttgagacaaaccatataacctcctgggcctatccttcttgggtttctcccttatgctccaacctgactcacggcttgaatttaattttgccttttgaaaatctctatatgntttataaaatctgaggccatcgtctaacccatttgtgaaaattcgatctctgctccttacgcttttttatcagaagaaacgttgttttttagaaaacgtttaaaattctaatatcacaattcactcccttttggattttgccttccgctttaattaaaaatgttcagttgccttcgtcaatgacgcatggcttatg

SEQ ID NO: 136777 - DNA, 367 bp, Glycine max
  unsure (1)..(367): unsure at all n locations
aaaaaaacctcagaaaccaggcacttgaaaaaatgtgacttttggaaaattatatttcgaaatcaaacacttggtatcgattaccaattaaggggtatcgattacaccttagcaaacgtgactcttcatgttaaattttgaaaattaaaacatttaaaagctctagtaatcgattacacaagtttaaaatgattngaaaatgtttaaacacaaagtgtaactcttgaaaattgaaatcttaacattttaaaacactagtaatccgatactaccttctggaattcaataccagagagtaaactctttggaatgaattgtgaaacctcttggctactcatgtttgaaaactctntagtactatctgatg

SEQ ID NO: 136778 - DNA, 368 bp, Glycine max
  unsure (1)..(368): unsure at all n locations
ttgttttgcagccttgaaatgaataatgggtaaaatctcgatgtattggcttgataagactcccagaacatatataatgtttggtcttgtgtgtcaaatatcataaactacccaccaaactcttgaaatctatagcatccagttttcttgcttcgtcgaactttgataacttcattttgcactccatcagtgttccaattggcttgcatctatccatcttgaatttattaagcatcttctttgcgtagctttgcagtgaaatgaagaattcatcttctttctgctttacctcaatggcaagatagtatgacattnttccgatatcggtcatctcaaactncttcatcatttctttcttaaactctgat

SEQ ID NO: 136779 - DNA, 474 bp, Glycine max
cgctgcaagcttctcccctatttgctataatatttgttaagtgaagaagaaaagggttcagccccttagacacttctctctctctcgaaatagctgaggaaaattagttccgtgaagaaaatccaagccgaggcgcttccgtaacgttttcgtgagtaattacgcgaagattcttgaccgctcttcaaggattcatcgttcgttcttcgttttcttcagtcttcaatgggtaagtacctcaaaccaatctttttaattcattctatgtacccgtggtggtccacatcttgtgtcatgtatttttattctcgctatcatttactttttatacccccttctggcgtgcttaagccatttatttaagtcatttctcactttatctaaagataatataaaatttcactgatcgctagaattgatcatccgtaattttgggtacatgaattcaccgtttgtcggccgaaccacgtggaa

SEQ ID NO: 136780 - DNA, 232 bp, Glycine max
agagcttctcctttgttcttgggttaaagaaatttgtcgtgttggttctaccggcaggtcacagttaggatcatgctctcttaaataactttggttatactgacaagtcctgattatgatcaagttcctcttaaataatgttaaggcctacctagattgggaaatgaaggttgaacaactctttgcttcccattatattagtgaagagagaaaagtttcattggctaccctt

SEQ ID NO: 136781 - DNA, 423 bp, Glycine max
  unsure (1)..(423): unsure at all n locations
tgtaatcgattacacatatactgtaattgattaccagagcatatttcagaaatattctaacagtcacatcttttatgtgggtcttgaatggctatcataggcctatatatatgtgacttgagacacgaatttgctaagagtttttcagaacaaaaaggtcttattctcttataaagcaaaatcgntttatcctcttacaaattccttggccaaattacttgtgattcaataaggaattatttgagtgctcaaattgttcaatctatctctttcaagagagatttcttcttttcttcttcttcattctaaaaagggattaagagaccgagggtctcttgttgtgatagaattctaaacacaaaggaagggttgtccttgtgtgtntagaacttgtaaatgaatntacaagatagtggaactctc

SEQ ID NO: 136782 - DNA, 283 bp, Glycine max
  unsure (1)..(283): unsure at all n locations
cagcctgctcaagatantcatggttntctgatattcatgatccccataaaccagaaatcaaaattgtccttgtgactatcctatgaactttgnttggcttctgaccatttactctgttggtcaccacttgatctcttcaatgaatggcacctggaccaaccctgtatactatcagaacttcaccaatcttggatcaagaactgagaacatgaagagtttatgtataaatacttatgatgaccgatatatacctcacatgggccttttgataaaacttcatgat

SEQ ID NO: 136783 - DNA, 300 bp, Glycine max
  unsure (1)..(300): unsure at all n locations
ccacagactcttgcgacaggtacagatttttgattcaaggccagctgggttaccatgttaaccaaggcatctagtttaccttcaagcttcctagtttcagttgatgaagatgaattcgtggctacttcatgcactcctttaatgacaatagcatcatttctggcactaaattgctgggagttggaagccatcttctcaactaaattcctggcttcagcaggggtcatgtctccaagggctccaccactggcagcatcaatcatacttctcttcatgttactgagtncttcataaaaatat

SEQ ID NO: 136784 - DNA, 201 bp, Glycine max
caggtggggtgctattgcccaaaaccaagcttgaccaatcccgacccaacccgggcatagtcggtcagtgagaacctgtgatggacctaagcaggcgagctcctggcagtcaacagataaaaggaacaaagaccacaaagcaaggaggcttgtggtagctggccagctgtgaaacttgactgatatgtgagatatggtctc

SEQ ID NO: 136785 - DNA, 407 bp, Glycine max
  unsure (1)..(407): unsure at all n locations
tctgatggngatctgcagaagaacatatactatcttctcttgcaacaggtgtagatgtctgattcatggcaagctgggttacttaggtgaccaaggcatcaagttttccttcaagcttttttatttcagtagatgaagatgaatctgtggccaccttatggccctctctaagaataatagcatcatttcttgcacttgaatggtgggaagtggaagccatcttctcaatcaaattcctagcttcagctagggtcatatcaccaagagctccaccacttgcaacatcaatcatacttctatccatgttgctaagtccctcatagaaacattgaagaaggagttgcttataaatctggtggtgaggacagcttgcacacaatntcttgtatctttcccaatactcatac

SEQ ID NO: 136786 - DNA, 414 bp, Glycine max
  unsure (1)..(414): unsure at all n locations
tatgnctctagctaataaattgttaagattaagtaatgaggctcttcttaattgttcattagtggtttaaatcatgatattaaaagagatgttgttgctatgtgccctcctaccttattgcgtgcagtttttttaactaaactttttgaagaaaatggtcctatttctaagcgatttcgaaattcctatagtcacaaatattcccaaatttcttctaccccagtctctattaatgctcaacttaaaacacaaattaaatccagtatacctccgcttttacctactccaccaggccctccaattcggtccttgaatgtaaaaaggattactcctgcagaaatgcagttgagaagagaanaaggattgtgttattgttgtgatgagaaattctcttttaatcataaatgtcataat

SEQ ID NO: 136787 - DNA, 337 bp, Glycine max
  unsure (1)..(337): unsure at all n locations
agctntgacggagcttcaatggngatgaatttgattatattagcaccgagagagagggggaganaagcttctgaacttnttggctgagtgagtgaggagagagagaacgtggctttgtgttttaagaaaaggctttctctctctctttttttttaaaaaaagttgtgccacatgtctctttttgagtggagcaaaaaggggcccactttttctcttgatgtgactcatactcagccacaagaagagaaaaatctgaccttttgaaatgctaaaatcctgcctcggtttgcatgccgtttctctggttccagtccctcgcgtttctctgcactcgtcg

SEQ ID NO: 136788 - DNA, 332 bp, Glycine max
  unsure (1)..(332): unsure at all n locations
tggtcatcataatgctttttttaggcttcatttttttgtgctcccctttttcaaatgactgagaaagtgttaaataatttgagtaaattgtgaatagtgttgaattgggtcatgcatgaatggtagatcaaacttcaaagggtgtataataatgatttattttacttttatcacttttactggcaattgcattgtgagcatagttngacaagtcacagtttgatggatttggacatatcgngtttcattcatcttcatcagagctttgacttaattggagtatttttgagcaattaaactcattagcactctcttctgcttccattaccatc

SEQ ID NO: 136789 - DNA, 487 bp, Glycine max
  unsure (1)..(487): unsure at all n locations
agcttggactggttctgagaaaaaatcagcttaactgttttattttaagatctcaaggatgaaaatttgttgtctgttgattgagctgacgcagttctctgggggatgtgtgcaaattaatgtcatgcagagagaaacacaagatcagcttgatacaaaaataaggccacaagcacttggaaaatgtaataaacagaatcattcaaagagaatgcttattcaccaagtttgaacaataacactcaaactaaaccaatccttggttattttggaaaggaaacatttgaatgtttggacttcacagaagtgatagttatgaagaccacatctcaactntttaatagatcttctcaaaaggacgcgtattaccaggcagtgagatatagtaaaaaacgatcaagaaatccattattaacaagaaactcaaagactcaattctctctgtactagatttgatatattggatgccctgaagaatgatcttgac

SEQ ID NO: 136790 - DNA, 272 bp, Glycine max
  unsure (1)..(272): unsure at all n locations
ttgagcgaaaaacaatgcgtctaccggggaaggagagtctgctgatgaaatcttccataaccataaatgagaatttggatgttagcatttcgtttctaaatgaccatttagaggaaacactgggttcgacacaaataaaagaaatccactccaagtgtatcaatctcgcacaggtaagtgtttcatcctaattccgaaccatagatatgtcatgactngacttttgcaattaatttctatcaaatcaaaattacatgcgtgatcatggatca

SEQ ID NO: 136791 - DNA, 73 bp, Glycine max
aagtctctaggctcgctagcactgcatttcgctaagcgagagggtcaaaaatggcttaagggagtgtaccatc

SEQ ID NO: 136792 - DNA, 265 bp, Glycine max
  unsure (1)..(265): unsure at all n locations
gcttctatataagctgaaccatgngaccattttacataatttgagngnnacccacaaaattagagtttatctcttttatcttagtgagagtgattctcctaaattcttgagtgattcaagaacaccctgtctgtatcaaaggactctcacaacctttgtgttgtgccctcgctggaaagagtgattctttcctttcaatcatctccacccttgttctttccaaccacaattccagaaaatccacctctgtccaaaattatctcgt

SEQ ID NO: 136793 - DNA, 409 bp, Glycine max
  unsure (1)..(409): unsure at all n locations
cactattcaattcccctcttctagtgtgattgttgttattttaaggattggcgcaacaaatgaacaacaatgacttgagatatattcaaagagtgatgggaaggatctagaatccttgtggttgaatgcacaagcatatagggtggcaaggagagccaataagggtaatgtttatttcttacatgtcctaggagctaactacaaggtacccttctatgtacaagtgaacaagttgacatgactcanaaaagcaccatgttgtctagcatgccctcaaaaactaaattctctctatctctctcatcgatgtgtaatgtgtcattattttctcctaatttcttaacctttttgtcaccattttaattattgattagccttaattgtcaaattaattatgcaattttatcat

SEQ ID NO: 136794 - DNA, 480 bp, Glycine max
  unsure (1)..(480): unsure at all n locations
agcttgaagaggaggataaagctctcttgtttctgaattccttaccaaaatcctttgaacatttcaaggatgcaattctttatggcaaagataaaggagatgcaaaaacaacaagactccaaatctgaggataatggtgaaagcctgaatatttcaaggggaaggagtgaaaagaagggaacaagaggaaagaagtccagatcaaggttaagggattcaaagaatggccagaaaacaaagttcaaatgctctaattgtcacaaaactggtcatttcaagaaagactgcctagacaagatcaagaaaggatctttggactttgcagacatagttgaagcctctgaaggttatgagagtgcangtgttttaatagtttctaataccaaaacacaaaaagaatggattatggatgcttatatcacagcagcccgagaaaggactattntgataccttggaactgaaccagcaggagctgtact

SEQ ID NO: 136795 - DNA, 349 bp, Glycine max
  unsure (1)..(349): unsure at all n locations
atgaaattattaaagaattcgttttaatttttaaagcacagaactaagaataagtgccgaaaggtgcttatataatatttaagaagataaaagtattttatgggtattaaattatatatttattaaaaactcaaataaatttgataaaacaaaaacatgtacaattttgcatataataatttatataaaatattgcatatganattgtggaagtgggtagcttattatatggtggttgattggtgatgcctcgtgccttgacaggtatgggaggcaacacgaagtgatataagattatagaaacacctaatgtattggctgacatcacgaaaaatatctacttaactta

SEQ ID NO: 136796 - DNA, 256 bp, Glycine max
gcacttaatctagctaaacatgttgatgtttacttagtgattcctcccgctcattttcggaggaccttggacctcctgaccacttgttcccattgggtaaaatatgttttgtgggagaaggaacctttactaaacatctaggcccaccctcgaagaaacgccacaagctaagatacaactattgtagactctactgtagattatgatgaagagtgtatgtgctagatacgacgatcatgtcattgtctgttgttga

SEQ ID NO: 136797 - DNA, 313 bp, Glycine max
ctaggatgaaataaacttagtggtgaacgtaacttgaattgtgctccaaaagtctccccaacatcaacagtcagcatcatttggttccaaaaggtgatgctaagttgcaaagggccttatacacttgactatactactaagcctgtaatgataaccaaacaattttggcagcaacttcaggattggccttattagacaacaaacactctaaattgaacaaggggcattagtccctcattggcatgaacaactaaacttgacctccctgaactggctgataaatgatgacaactgagaagctcttgcttctgtc

SEQ ID NO: 136798 - DNA, 298 bp, Glycine max
agcttcggaagaaagtgatgaggtttcttttctattgcaaagcttgaaagagcccgggtagtcaaagagaagttcaagtccatagccatcaaagtctgaagagagtatgatgaactaagggacgtcaatatggccaccgctgaagccttggaacgagaaaccaagaaggtctgaaaggaagaacacgaccaaaacaaattttgaggggctttatagggcagcaatagtgagctcaaactccgaagaggtgaaaggaatcatcacgggtcaaaggcatgatctggaaggacgagctaaa

SEQ ID NO: 136799 - DNA, 89 bp, Glycine max
  unsure (1)..(89): unsure at all n locations
tggggactgagagctgcaggttgtcgcgacgcataataagctntaggaattaggtttttcaaattataacatttggggcgaatcggggt

SEQ ID NO: 136800 - DNA, 210 bp, Glycine max
caaagagcacacgacactctcgaacagcaaaaacgggcaaagaagagggagaatgagggagaaacccacgtgtgaccgccaccccaacagccgagtttcccaccaacccaccaatgtcattactccaccaataacaacccatctccttacccaccacccaggtaccacaaaggacatccttaaatcaaaccacaaaacccacctaccaca

SEQ ID NO: 136801 - DNA, 338 bp, Glycine max
taaatattggaagcatgtaataaaatattatattagtcgaattataccattgcatgttgaggcatatttgcatcaatagctgcaagtgcaggtgggtgtggcatagttgttgtgtgaacgggcaacacaagtggatctactataatatatgtatcatcatgcaccatgggttgatgtctaggaggctccccaagttgtggcagactcataagtgggtgagatatcttataaaaccactccatgtagtctgttgcacactaaccggtgcaaggtattgagaaaattgaagccatttatcgtcaatctcctatgtggatagagatagagtagtatgggat

SEQ ID NO: 136802 - DNA, 395 bp, Glycine max
  unsure (1)..(395): unsure at all n locations
ccctggagaccaatcagaaaccagttaaccaatccttgaacaaatgccaagtaccaaccatagcttgaataacaaaccaagtcaactatttcattatattgaaaatatccccaatcaaaaagctctaatcgatctattatagttaacaaatgaaaaagtacccaggttttgaaattcacataaactgaagcctgttatacacatattataagcattagaaaaagggattattttgcggtataacttcacataccagaaactgcaatgattcggatgcagcacacaaacaatntatttatctggatgattgactagagttgcatgcagaaatagttcaatgggagccccaaatttcaatgaaaatcccanagcatgataaatctccagcactcacc

SEQ ID NO: 136803 - DNA, 88 bp, Glycine max
ggaaatgtgcagctagagaaattatataaatatcacatgttttgagactggaattttacactcttggaccagagttcaaatcctacca

SEQ ID NO: 136804 - DNA, 187 bp, Glycine max
ctttaattcagctaaccaccttttggttgaattccctatatcaataataagtgtcattttaggtaagtacatataaaggaggtaacctaaggtaattaaggaataagacctacccaggtacctttcctaataagtggcggcatcttggcaattttccgggggtggaggaataagtccttcctaacct

SEQ ID NO: 136805 - DNA, 432 bp, Glycine max
  unsure (1)..(432): unsure at all n locations
agcttaatacccanaatcacatctacacatctcttgtctttcatatcaaaatttctagacaagaaaaatttcacgtcatttctgaaattcatttactaccaaatatcaatatgtcatccagatacataatatgacgcatccattatcatcaaattgtttcacatacacacatttatcactaacattaatttaaaaatcatacaaaagaataacttaatcaaacttttgtgtcaatgctttggagcttgtttcaaatcatacaaagatttaacaatttatttttcaaagaaagtcacatctctagactccataatagtacctttagaaatttcagatacttctgaattaataactaagaatctataagtagtattatgttaaaaatatcccacagaatataattaataatttttttcaaatttccttttctta

SEQ ID NO: 136806 - DNA, 246 bp, Glycine max
  unsure (1)..(246): unsure at all n locations
taagctcanattcttggagcttatttgaaataacatgtgtaagggttgggacttttgtattttgttaatatgccagagtagataagacaaaagacaagttaatggtttatctgacaaggttttcctgtccattatgtatgtagaatacagatgatgctcaaaattcttaccaaaaatgcatctccaatgtttggcctatggtgctatactgttagtagtatctaaatgttactataagcccacaat

SEQ ID NO: 136807 - DNA, 439 bp, Glycine max
  unsure (1)..(439): unsure at all n locations
agcttcanaccacagcaacacanaatctatttattcaaaacccctcaatttaatggattttctaggtttgagaagtgaaattgagaatgggacaaatttgaagcaaactctcacctcacacaagtttataacatcaatttaaacttgttcaaactggatttacgcctaaaatttcactgaatcaaaatttgactcctcaacacccaatttaccctagaaatggctctttgttcactttggtcatttgtttttctctctagctcagcctaacctttctcacatgttctaaatggcatttcaagctaggattaactcattttaacctccatttaccacaggatccagaattaaccttccaactctcanagcctcactctttttccactcataacaccacattctcactttctaaccctagggtaactctacccttcatctc

SEQ ID NO: 136808 - DNA, 388 bp, Glycine max
  unsure (1)..(388): unsure at all n locations
agcttacatatacaagacttgtaattanttcnttttaagaagactcgatgtccacaccacgatgtagtatcattttgagagcaacaaccaccattttgggatgcttgggattcttgttttggttttaaaacactccttttaattgttgttgatccttcttccaaaagactaggagcttccattatctaccacatggtgccatatttttcatgataggaaaaagaaaacacagcaaacaattcactcattcaaaatatcatctatgtcttatattttgtaggtaataattatttcctataatcaataatgaatnttttntagaataactagataacgtactcattcttcactattatgnctattcttacttataactaaagcacatatt

SEQ ID NO: 136809 - DNA, 139 bp, Glycine max
ggagacgtcccttctttttgtcatcagtgtctatgcacaattgtgcctgcaacaaaatcaaccttcattcagaaccatattatggttgggggaattggctggatttcaaaattttaggagtgaaaatcttacccaaaac

SEQ ID NO: 136810 - DNA, 211 bp, Glycine max
  unsure (1)..(211): unsure at all n locations
gcttctaattaccatgctttgggatgtcaaacattatgtgaaattgatttaatgttggtagtgcttagctctactgagctttaaaagattggctaagattttgttcanacataagcacttatacaatgaacgaaagctgcgggtgctgcacaagatgtccaacagtattgtcaggaattacatcgggctgcactatgctcatggcaagata

SEQ ID NO: 136811 - DNA, 348 bp, Glycine max
  unsure (1)..(348): unsure at all n locations
cttctggngactgggaagcatgntatncttttgtttttcagancgggtccttcgccaaggatgtgtatatgtgtattatattcgctggtctggttggtggttgtattttgttctgtgcagaacaaaaaaagaagaagtttagatgagagtcgtcatcactgacagggcaggacggacgaaatcaatgtcctatctttgctttcctgttatctctgatgagaggtaagtaaagaggggcaactgtcatacccttatttcgtccggtgattattacttgatgacaagcaacctttggttaaccgctttgagatacttggcgttctttgttgcacaataaatgaagtcccg

SEQ ID NO: 136812 - DNA, 440 bp, Glycine max
  unsure (1)..(440): unsure at all n locations
ctcttagatcttcaagaaatccattattattgattcgtacattgatattgctatctatccatttacactagaaaacacagacactgaattttacataattaacctcccaaatttcttcaatgacttcaaagtaaggcatgtaagctacacaaggattgtcgtcatgtacagtaacaaaagattgagattcagcccttagacttacaccacttttttacatagtgctcttgtcgtcttatgatttcgtgcaaaacgaatacttgttgatgtcatatccttgccaagttacaacatttattntaggctcatctactatcttccttaacgtttcaaatgaatcatggctaccgaagattatatcttntaaaccaattaggaaagtcttggtatgctctttcagcaccctattcttggtcatttntanggtactttccttgact

SEQ ID NO: 136813 - DNA, 388 bp, Glycine max
  unsure (1)..(388): unsure at all n locations
aaacatcaatatgcattaaatacctgatcatcagtggccaaaactggttcttgtatctcagttaatgcatctgccaataaagccactatctgcaagatattaagatagataaaacatactaagtgtatgcacaatatcaaaaaattcacaactacccatagtctccttttacagataaccagaaattntaatcaggatggtaacacagtagcattgttgcaattcatccaagacattttgtcaaaactgcactttgggttttaaaagggaaaaagcatttntgatataaacaagtgctagagaataatatgaatgataccgtcacatatntttacttataataatcatttgtgtgacatgtaatataaaacaaattacgtgtctcatt

SEQ ID NO: 136814 - DNA, 408 bp, Glycine max
  unsure (1)..(408): unsure at all n locations
gccttggtacttcgatatcaaatgatacatcaaagacaaggaatacccgcttgaggcctctaacaatgataagaggacattgtgaatgttggcgatcaccttcttcctgagtgggaatatcttatacaagaggaaccatgacatggtactgcttcgatgtatggatgccagagagactgggaaaatgctgataaaggtgcataatggatcctttggaacacatgccaatggacatgccatggcctgaaaaattctgagagtggtgtattattggctcactatggagaatgttngttgcatccatgtgatgaaatgccatatgttctacgccttcgctgataatggtaatgctccacccatacctttgaacatcttggcagcacctttggcattctctatgtggggcat

SEQ ID NO: 136815 - DNA, 433 bp, Glycine max
  unsure (1)..(433): unsure at all n locations
agcttcgtgatgaatcaagattgatttatatatgtttgatgacaacaaagatgatgacanaaagctcaaaagtcaagaacacttcatgataacaaagatgatgatctcaagaatcaaagaatgagttcaacattgaatcaagaacacttcaaggttcaaaaggaaatttgatttcaagaatcaagaatcaagtttcaagattcaagttccaagaatcaagatcaagattcacgactaaagattctataatcaagagaagactcaatcaagataagtattaagaagttttttcaaatactgagtagcacatgaatttttctcatacaccttttaccaaagagttgttactctctgataatcgattaccagattgttgtaatcgattaccagntgcataatggtttcaaaaagccttccactgaattacaatgtt

SEQ ID NO: 136816 - DNA, 427 bp, Glycine max
  unsure (1)..(427): unsure at all n locations
cttcattnntagcgctgcagaatcttctccttgatgtcctaaagttggaggcttcacatatgggggatttcctcttcttttgacactgctccttctcatntgaatgattgctcatgttggaagagatgaatattattttaaactttgatgggatttgtgattgtcaactcataaaaaagaaaggatgaaaggactttgagtgtttacactactagcatttttgtgtatttgtgaaatggaagtgaaggctcatttcccctttctttcaacatataaatggatttctcatctttgtcatagccagtagaaaggcattctctcattttcttttcaacagtatgaatgagataacaatctccaatgcctacaacttactgccatatcctttaatgaactatattctgtggagaacgacatgtgaaatttc

SEQ ID NO: 136817 - DNA, 388 bp, Glycine max
  unsure (1)..(388): unsure at all n locations
gcacgctatgactaaatnnttctaaaatgagaagaaataaaggagtttgatttactgtaccttctcacagtcttttccacagaaccaatttccaagatatcttgttgatatatctgcagctccattttccaggcacctaacatgatctacacaagtttgacaaagatgacaccaggtttacatatgcagacaaatatatactcaagatattcaggcatggataaaatattaaagtaaaaaaagagagtagctaacttacatttatgttcgcactgaatgcaaggaagtaattgctcaacctcatcatctctggcaatttnctttggcccanatcccacacaacatgatggacaaaccagtcccattatggatgtctatataataaaaa

SEQ ID NO: 136818 - DNA, 302 bp, Glycine max
gaaaggattgaaaacttgagaagtgatgggatctatcagatcttggtgaaagcttcttgatgatgtgatatcaagggcggtccaataagggtgatatcaagttcagggtccctctaaattgccggctaatggatacatctgagtaaataaatttaatttattgaaaagatgtgagacatcaattgactcaatttagagtgttatattcaagatatcatttagaatggtaaataaattttcttataaatttttctctaaataatgtcgcttatgaataagtgatttaataacccacatcttgt

SEQ ID NO: 136819 - DNA, 394 bp, Glycine max
  unsure (1)..(394): unsure at all n locations
ttagagtcacctgcagctgcagcttggttgagtgaaacatgactgttttgcttggtaangatccttccttgatatttgtcattcttactagcttatttcagctgtgtttcttaataatcatgttcacatctttgaaaagctgcatgtcttctgagaagctttggagcaaacaccttgtaaataaccattgtggttttgtcacttgaggacaagtgaactgttctttcttcgcttgaggacaagaaaaactgtaaatttgggggagtttgttagtcatcttatatgactaacttttgtatagaaaacttttacaanatgtacatattntccccacattatggttccttttgtaggattggaaataaatcttgctttctttttatctgtgcacaat

SEQ ID NO: 136820 - DNA, 400 bp, Glycine max
  unsure (1)..(400): unsure at all n locations
agcttctccccantntctataatatggttataagngaagngaanaagggttcagccccttaggcacttctctctctttcgaatttgcttagaaaaattgtttccatgaagaaaattcaagccgaggcgcttccgtaacgtttccgtaacgtttccgtgagtgatttcgcgatggttttcgaccgttcttcgacgttcttcattcgttcttcatcgttcttcggtcttcaacgggtaagtacctcgaaccaagcttttcgattcattctatgtacccgtggtgggccacattgtggttcgtgtattttccttctcgttttcatttactctccgtaccccttttgacgtgcttaagccattttatttaagtcatttctcgcttaacctataaataaaataaa

SEQ ID NO: 136821 - DNA, 300 bp, Glycine max
  unsure (1)..(300): unsure at all n locations
agcagaaataaatagtacacaccggaaaataaagagtgagggaagaaaaagacatacacacgatttattctggttcggccacaacccgtgcctacattcagtccccaagccaccaccgatcttgagatttccataaccttgtgaaatcctttacaagcaaagatccacaacggatgtatccttccttgttctctttgaacaaccaagtggatgtacgctccacttgaactgatccacaagagatgtaccctctcttgttctcagtatcacaacacaagntgatgtacgccttacttgtac

SEQ ID NO: 136822 - DNA, 406 bp, Glycine max
agcttgcctgtccgatgcagcagtaatgaagtccctatttatgttggggaacgggtacgaacccggaatgggtttaggcaaagacaacggctgcataactagcctgataaatgccaaaggaaatcgtgggaagtatggtttaggctataagcccactcaggcagatgtaaagagaagcatcgcgggaaggaagggcggtggtcaaaactcgcggttgagacaagaaagtgaaggaagcccgccctgccacataagtagaagctttataagcgcgagtctgggagacgaaggtcaagtggtcgcaatataagaagatgatgttccgagtacattggaattggtacgaccttgccctcctgatttccagctgggggatttggcgagtggacgaacgccccggcattta

SEQ ID NO: 136823 - DNA, 90 bp, Glycine max
  unsure (1)..(90): unsure at all n locations
cgtttttgaatggaagaaaagacatgttctttttcaatatataactnttattttaaatgaaggcattttaggaagccattcatttgctgg

SEQ ID NO: 136824 - DNA, 446 bp, Glycine max
  unsure (1)..(446): unsure at all n locations
agcttctttgagataactgccttgtgaagcttgatcttanctacacacacccctctcatgactaagctcacctccttgagaagattcctaaagaagctagagcttagctacacacacctttctaatagctaagctcacctccttaagaagagaagctagagcttagctacacaccccctataatagctaatctcacccccatggcaaaatacatgaaaaaacgaaaaaagtccctactacaaggactactcagaatgcctcgaaatacaagcctaaaaccctatactactagaatggccaanatagaaggcccaanagaaggacaaacctattctaatatttacaaagataagtgtgctcatacttagcccatgggctcgaaatgaccctatggctatgataccctaaggcttccttggacttggccacctactggagctttatca

SEQ ID NO: 136825 - DNA, 344 bp, Glycine max
  unsure (1)..(344): unsure at all n locations
gcttgtcaaatgagacgatatgccctcatttttcttagagactaanaaaacatgcttcttaatatgtcagtcgcatagagtgatagtcgacagatgtttgagcccactttgtgaaatacctttgggtaaattgcggtttcaaaatctattgttgtatgagcagcttaatctgattagattcacttttaattagctagaagattatactatgacaagtaaatgtttcctggacatctactttaggtgctactggtgtatacatgataagactgtatgaagtttgttgtgaatactaataatgctgcttaacatatcataacatgaacttaagaaagaattaacga

SEQ ID NO: 136826 - DNA, 306 bp, Glycine max
  unsure (1)..(306): unsure at all n locations
agcttctagcacaatggacttaccttgaatttatttctttgatatccctnttgagccttgtttccctttccttgttttgaagctcactataagccttaagtgaaaaaccatgatatcaccaaatctttaaggaattttggagctttggaattgttttgggaataagtgtggggggtttttgtttcattggataacatgttctgttggctatgcttcatgatgtattttgggccatacttgatgtacattgtatattggttaaatgctggacatgctgaatgagatgatgttctcaaacgctacaga

SEQ ID NO: 136827 - DNA, 193 bp, Glycine max
  unsure (1)..(193): unsure at all n locations
agctatgtaagagatacgccttagtctaatttttgcatacatcgctaagacantcttttaacatcctatggactaagtccatcgttcttctagaattacttgattcttgacttggatcaaacatgaatagcattcctcttaggcatcatcacaacttgatatcacacatgcttctacaaacattttcgcgaaa

SEQ ID NO: 136828 - DNA, 408 bp, Glycine max
  unsure (1)..(408): unsure at all n locations
agcttagtacccaccaagattatattcaattatatctacnggagatgaaagcgggttgttcctcanatatacacttatgaaagatcaacttgaggcgattagctaacactttggacaacagctaataaatcacattgcaaagtgaaattgatctcaaatctctcattgatttgggtgaaacattttacataaaaacaatattaatatcattaagattagttgggaaaaaaccttcttcccactatttacatgtcgtaaatacttcccgcataagttcctaaaccgtggatatagaaagtcagatctagaccgtgaattttctgaggatgcatccaaaaagtttagaatatctctgtcaataatgcattatcaacatcattcantctatcctgaacattatcaatgaca

SEQ ID NO: 136829 - DNA, 439 bp, Glycine max
  unsure (1)..(439): unsure at all n locations
agcttgttgttagtctttgttttctaatgtttaagtcatttattnttttatgcagcccagtctcaggtggatcaatgaatccagcaagatcattaggtccagcaattctctcatggaaattcaagaacatatggatatacatggtagcccctagtggtggagctgtagcaggagctgcaatgtttcgtttcctacgccttcgagaccaacattctagtattttgtcctccccaaacatcagtgatgttggtcgttccttacccttttgctcaagttagtgcaccaacatgaaatactgtgtatgcgcttttagaccaaactaaagaaactgcagaatcagtagtaatcattgcatattagatagctnttagcagctgaattcttagttgttcctttttcttttcttttctttttctctagggagaagtgggcccatgat

SEQ ID NO: 136830 - DNA, 353 bp, Glycine max
  unsure (1)..(353): unsure at all n locations
ctgatgaatntcattttatgtagatgatttgcttctgtttccataacatgaaatctgaacttccatggttcttaataagcgacgtgtcctatttcagaaataactaacgcattaagtttgataattactcctacgtacccattaaatatagattcttagttaaaggcatgtgagaaatacatactacatatgtataacaatcgctagaacaaagttctccttgttagagatcaataatggtcattttcagtagtaatttattttggtttaactaatatgtattctgtgcctatttggctactactctcattgacaattaaagccatactgtactaaattatgtatagctagcc

SEQ ID NO: 136831 - DNA, 458 bp, Glycine max
  unsure (1)..(458): unsure at all n locations
agctttggctgcgcacgagctcagatntttttagtatttatagaagatgacgcattgtaatcgattacaggtattggtaatcgattacaggcccaataagccttctggtaatcgattacaggatgttgtaatcgattacaggctgcctgttcatgtgtaatcgattacactggatggtaatcaattaccagagcctatcctaggctagtttctaagagaatatctatatttatgctcaaatacatcctatatgtctaattntcactactaatacactaaattcaatcattcaattactatatacacaagaaatcataaattctatcataaaaacaagaattcaaacaagatcaaccaaaataatctacaatcataacgtagaaagtcaatctaccaatcatatcaaccaatcaatcaaccaatcaattcctgatttgctaaatctcgtacatctaaga

SEQ ID NO: 136832 - DNA, 358 bp, Glycine max
aagcttgtaggcttgggtggtgcataccctaatttcattcttgggcgatcttttacaaacatttggattctcgccagccgaattgagctacttaacaccaattgtcatgcatttcgtaaggttttttgacgtttcagaagaaaatgtgcaaaatactcaaaaggagggcaaaagggtcacttttggggcatttttcatctcctgagccacccagataacttcatgatgaattaaccatcttgcctgggcgagcaaggttgcttcatcatgaagttatcaactcacctgtgcgagctaccttcatcccaaatggcttgttgtgctataaataagcgtgggaagactgaagtaaagggtc

SEQ ID NO: 136833 - DNA, 465 bp, Glycine max
  unsure (1)..(465): unsure at all n locations
agcttgtcaagtttatttttcttctcaatttatctcnttgntnactntntnnttggtgcgttagtaaacttatatgttttcgtgctgctatgtattttttattttttgggatcaaagcctaatatataacatatgaacactgtctgaacaggtttttaatgaagttgaacagtgagaccatatcaattgagctcaagaatggcactattgttcatgacaccattacaagtttcttttcttcctcaatattttnttttttggtggcataaaagtgttgaaccatttataaataacatatattagagttggattggaatagtgaggcgtctaattatttgcaagggtactctactccttctgaaaattttcatatcttgggtgctttatgttgtaagaattattggtggatgatgccttgatgctggttggcgattctagagcgctggtgtggaaggtttttggatg

SEQ ID NO: 136834 - DNA, 363 bp, Glycine max
  unsure (1)..(363): unsure at all n locations
ggagtcaactcaacgattgtctggtgtcaccaaataatatagacaatgtcgccgtaagagaagcagccatgttgtctctccttagttgtacacttttaagtagcccactcgacatctaattgctgtagctcacttcattctcaacaacatattgaaagagttgcagtttcgtacaaaagttccaacgaatgtttaactagcaagatgtgtaaagcgaagaaattcattaacttaacacatttgacagcaacgtccaaagcatgagaatttgacagcaacgtttaacaagcaagtgtntttcaagtgttttcctatcttatgggtggggcccatcttgcacattggtggataattccaccaatt

SEQ ID NO: 136835 - DNA, 465 bp, Glycine max
  unsure (1)..(465): unsure at all n locations
agcttagattaaattagtataaactntcttatagctatttaagctgagcctagtccaacaagagggatttgaggatgaagcttagtttaagttagtctaaacctatgagggctgtctaaattaagcctagtccaacaagagggatctgaggatgaagcttggattgattcagcctaactagggatcgaggtttagtatattaggctacaacatagaacacaaaagcatgattgattagagaaatatctntatatacatcagcttgtttgttagaaagacccaacacttctacctactgctgtcaatcttacttacctgcatntttactggttttagcctagacttagtttaattctgttctaaaccatcaatcgccaatgtttctttcaacaatgccttatttctgaatttaaccctgtctaatactagttccctgagttcgatacttggattcttctgttttaa

SEQ ID NO: 136836 - DNA, 363 bp, Glycine max
  unsure (1)..(363): unsure at all n locations
gctggacgaataatgtgatgcatctaggaaacacaacatctaacaagtatgaaaatngtaaatatatattggttttagggtttacacacgaatggataaaaataattgtttgtgttttacaaatgcagggttaagtttgcacattgggcctttaagagactactaccgtatagccttggagacctatgtagtgtttgagaagccatgaacaatatgatcactctacaacatattgaaattaaggcatcgtttgagacaactacacatgtggttgggcatgtttttaaagttaccttatacaagaaactatttggcatggtatcaaggtatgtgttaaaccagattgttgctgagtttgagcat

SEQ ID NO: 136837 - DNA, 424 bp, Glycine max
agcttgtgttcagcatccgctcactctttttgttctctccgtgcaaacattaaaacactgcatgctcgtatgctttttcagtcctagctgtttcattgctggcttcacgaatcataaatggaagccatgtggttgcttcatgagattaaaacactgttgttttcagctatttcattcttgcacattgactgaacaacacactacattaaacaaactccaagcaaaacaaaaatggtgtagtatacggctgaatattgcagcactttaactgcatgctgatccctgcaacctacgcacacaatatgagtgccttatgattaggaaaactacatgtcaatgcctgcattaaacgccctaaatctcactacattatggaatgaagacagcatttgcagatagacgaagtcgtgaagaagcaaacgat

SEQ ID NO: 136838 - DNA, 319 bp, Glycine max
  unsure (1)..(319): unsure at all n locations
ngcttgagataacttcctcgagaagctcctgcgagatttcttccttgagaagcttgagcttatcttcacacacccatcttataactattctcacctacttgagaagcttgcttgagaagctcgagctcagctacacacacccctcttatatctaagctcacctcttaagaagaaaagctggagcttatcttcacacacctataatagctatgctcacccgcatgacaaaatacgtgaaattacaacaaaaatcctactacaaagactactcataatgtcctgatatacaaggcgtgaaccctatactgctagaatgacc

SEQ ID NO: 136839 - DNA, 347 bp, Glycine max
  unsure (1)..(347): unsure at all n locations
agcttagngacttcagtgatgctcatanacgtttttattattatngtaaaaaatgattgtaaagcatggctaatatcagggttctacttaacttcaaatgccattcgttcgtttgtttacctttccttggatttcgggttctagtgccaacctgagttagctagcattttggggtatgttaaaaaaaaacgatgtaaaaaggcagggaaacgcctttaaaaagctgagcttatttctctcacttaaccttatagaaggctgttggataatatttacttatactctaaatagtaaagtaaagttattctttctcgatcagatttgtcatttctttataaatttgtgtt

SEQ ID NO: 136840 - DNA, 351 bp, Glycine max
  unsure (1)..(351): unsure at all n locations
tactaagcttcaactctaatatctgtccacattttggtgcgttttgtacancncacaccaacgaatgatgaagcataaagtaatgtatataagtgggggtgcaacacctcatctcacaagtcggttttgagggattaaattatgtccaaactcatattgtcaaattgtgtcccagatttataggaggactcttagaggtacctatgtctatcacttagacaaaaatgacgagtcacgtattgatactcatgaccattataatcataattaagcctctcccttagaaatatcactagctattggagtatagttttactcctatgtattttcgtatttgttcaatatttgaac

SEQ ID NO: 136841 - DNA, 466 bp, Glycine max
  unsure (1)..(466): unsure at all n locations
agcttgccatgaaagatggagagtttgtttatgacatgctaggaagacttcaagctcttctgaacaatctgaaagcccttggatagacatattctaaggctcaaataaacttgaaggtgttggaaaactttcccaaggtatgggaaccaaagaccatagctatccaagaagctagcgacctaaggaatcttgcatgggatgagttgcttggtattgtttcactaacaaccttttaacccccttctaaatgataggcttggaatgcagaactagaagcaacaatcaatttaatagtgttatttaaacatgcaagacaaaattgattgcaataatataaatgagataagaaaagagagaatgcaaactcagttntatactggttcgacaaagttcgttgcctacgtctagtccccaagaaaccctattgggatntccactatcttgtaaaatgaattntacaaaatct

SEQ ID NO: 136842 - DNA, 321 bp, Glycine max
ttgacataaggttttatggtttttaaatatatttcacttcagcttttagagaagttaaaatggaagcatctttattaattacaattgaagtatataagttggttttaacatataggagataaggttttattacaacagggagtggttattcaaaataacatgaggtggaaggtgggggatggaaatataattatattttggtaagataaatttatataatataatgaaatgattttgaataagttgcttattttatgattatattttgtttattgtatactggttgtatcatattggatttaatattttcatttcttcgta

SEQ ID NO: 136843 - DNA, 457 bp, Glycine max
  unsure (1)..(457): unsure at all n locations
agcttaaatctaaatggtctggaccattttctataagaaagtccgaccatatggagcagtggagctttgtgatcctcaatctaaagatcctgacaggacatgggtggtgaacggacaaaagttgaaacaataccatggtggagcaatagaaagattgaacattgttctatgcttggatccaggataataggatgatgcatcaagctagtgatgttaaagaagcgattactgggaggcaacccagcttttctttcccttctctatcttcatttntatttcttgcatgtagttaggacatcttgtttgtgattgtgatntatttcatcttgtttagtaatgaacaaaaaggggttttaaattatgtgtgaagagataagcagaatatgacttagaataattttcagattggctatccactaagtgcaaactttgcgctaagcgccatctcttcacgcgc

SEQ ID NO: 136844 - DNA, 354 bp, Glycine max
  unsure (1)..(354): unsure at all n locations
tctcccctatgttgctataaataggggttgaagtgattaataaaagggtttagccccttatgcacttctctctctctctcgaaatagctgaggaaaattagttccgtgaagaaaatccaatccgatgcgcttccgtaacgtttccgtaacgtttctgtgagtgatttcgcgaagattctcgaccgttcttcaagattcatcgttcattcttcgttttcttcaatcttcaacgggtaagtacctcaaaccaagcttttcaattcattctatgtacccgtggtggtccacactntgtttcatgcatttctattctcgttttcacttgctttttatacccccttttgacgtgcttat

SEQ ID NO: 136845 - DNA, 417 bp, Glycine max
  unsure (1)..(417): unsure at all n locations
agcaagcttggtattggaatgtagtttgggcttagttttctgcctctcccttgttttcttggctttggatagttcatgatgtctggatgttgaatagcttggatgctgtggaagctnggaggggttgatggggacccgatgctgagaggaacgaggataatggctacgtgggagtacgtgagcttagttgaaggtgggcaattggggatggtgagttcatgtgtgatttgtggatgtggagagtcgacttgcaccatcgctcgatcgccacctagtaccacatatgacgggtaccccattatccgacaagcttgaagtgagaaagtggggaagaagtcatcttcctacttttattcgttgaccacagagtggtttctggagatttgtttctggggtcatgagactcttgggatgtca

SEQ ID NO: 136846 - DNA, 333 bp, Glycine max
  unsure (1)..(333): unsure at all n locations
ngagatgaggaagtgtagaagggtgaatcttcctgcttttattcgttgaccacagagtggtacctggagatatgtctcgggggtcatgagaccttgtggacgtcatgtggggtgctattgcccaaaaccaatcttgaccaatccctacccaaccctggcattgtcagtcattgagaacctgtgatgtacctatacatgcgatctcctatcagtctacatataaattgaacaatagaccacaaagcatggatgcttgtggtggctggccagctgtgaacattgattgatatgtgggttatgacctctggtatcgattccaaaggtgggtatcaa

SEQ ID NO: 136847 - DNA, 450 bp, Glycine max
  unsure (1)..(450): unsure at all n locations
agctttgcatgtntcttcctacaccttatttcttgtcacgtatggccattttggatgaaaggttaccaccattattgttctacctacactctaccgtctatggagatgtgtattatagtaaaaatgaatttctttcataatagttgacatattatggtttctccatttaattcttagtgatgcctactattaatataattttttgctgagctgcatttagtttcacaggaaattgctgaacgaaaagaacaaagaagagtagaatatgtcttgaattttatgctgcccatagctaagaaatntaatttattcccttattattatagtagaagagtagaattactgtcttttcttttaacttgtaagttgattagtttgtagtaacctaacaaccttaagtagttgactggggtttgtagttatgacagctgtgggatatatcaactggaa

SEQ ID NO: 136848 - DNA, 360 bp, Glycine max
ctcagaatactaagcttattggttgggctttaaatataaacctgctatcttgtgtatactcactatcacactacattcagaatatagtgtaacctttttcaacggacaattttaaaatgatgaatgagtttttggactctataatatgggttatatatctcaataattatcttcacttgtctttgaaacttaagtatgaaaaacgagggaaaagtttggattaatctctttggcagccccttgacataaaattgtatatcaagatatgaaggcagatgtatttgagaaactatcaaaactagaatattggtgttagcaagctcttattattactctctgataaaggtatgcattttccat

SEQ ID NO: 136849 - DNA, 459 bp, Glycine max
  unsure (1)..(459): unsure at all n locations
agcttccagctatcaaaacttgcttagctttctccaataaacatcaataggaatacttttaggaccaatttcagtccaaataaatataggtatggttggcaaaagcttgaatacctgctgttaaaataggtatggttggcatcctctccccctttccatgtctgcataaaagaaaattctctgcactaattcaaagtgtttaataagattatttaatattcgcctaattatattaaaagtataatattcgcctaatatttttttaagtaattaaaagtgtttaataagattatttaatattcttatattatttagtactttatgttntaaaattatttaatactttctatatttaatgcttgtaaagaacctggcacaataatagatgatgaaatgaaggtcgtcaaatgataattacaaaaactatactagcaaaccaaatcaattagtaaatatata

SEQ ID NO: 136850 - DNA, 341 bp, Glycine max
tagcaacagtcccaaaacacaatgtttcccgtaaccatgtgtcatgatttctatattaccaattttactagttgttaatgttggaccatatttttgctatctcatctacccttggtctcatctctttatattataactccgtcaattctatcattaccctttttcaatatgcagaattaccaacatgcaaacatatctaatccatcaaattccaccactaatagtcagcctatgatccagaaccaacgaaatgcctcatatctgatttctttcatcttctaattttattgtagcttctgcagatttaaaacaagcatttggttcttcgtttgaacataaat

SEQ ID NO: 136851 - DNA, 454 bp, Glycine max
agcttatccttatggcctgcctcttgacttcatcccttcgtgccaccccagaagatttaagccaagcccctacttttgaggggcaactcccaccttatgaagactatcccgggcaagacgatggggaaggagatacccatcttggccccctcctccacctcaaagatccatccccgcatgaactaccccagccgaacatagtccgccatatcccggcctcacccacgcccgtgaaagaatctgttccctttgcggaaggtaagggaaagattgaggcgcttgaagaaaggttgagggcagtcgagggcctcggcaattacccattctcggatttggcagatttatgtctggtacccaacatcatcatccctcccaaattcaaggtaccagactttgataaatacaaagggacaacatgtccaaaagggcatctccggatgtattgccggaagat

SEQ ID NO: 136852 - DNA, 329 bp, Glycine max
  unsure (1)..(329): unsure at all n locations
tcaatggctcaatgagtaatgtgaaatgatagtcaatctacaagtaattctaccctnttctataggagactaatgtgatgaagttttatgtgatataatccctatggaagcatggcacattttgttgggtagaccatggcaatttgacaagaaagcaatccacaatggtctcaccaatgaaataaccctcacctatggaagcaaaaagttcaaacttgttcccatgacaacttcataagtggctgggtgttagtcatcgtttatgactaacttttgtatagaaaagttttccaaaatgtatataaatctcgcaatttatggttattttt

SEQ ID NO: 136853 - DNA, 470 bp, Glycine max
  unsure (1)..(470): unsure at all n locations
agcttatccttatggcctgcctccggacttatctctcttcgtgccaccccagaagatttaagcctatcccctacttttgaggggcaactcccaccttatgaagactatcccgggcaagacgatggggaaggagatacccatcttggccccctcctccacctcaaagatccatccccgcatgaactaccccagccgaacatagtccgccatatcccggcctcacccacgcccgtgaaagaatctgttccctttgcggaaggtaagggaaagattgaggcgcttgaagaaaggttgagggcagtcgagggcctcggcaattacccattctcggagttggcagatttatgtcttgtacccaacatcatcatccctcccaaattcaaggtaccagactttgataaatacaaagggacaacatgtccaanagggcatctccggatgtattgccggaagatgggggcgtattctgc

SEQ ID NO: 136854 - DNA, 354 bp, Glycine max
  unsure (1)..(354): unsure at all n locations
actcagcttaatggctcaatgagtaaggggaaatgatagtcaatctacaagtaattctacccttttctataggagactaatgtgatgaagttttatgtgatataatccctatggaagcagggcacattttgttgggtagaccatggcaatttgacaagaaagcaatccacaatggtctcaccaatgaaataaccctcacctatggaagcaaaaagttcaaacttgttcccatgacaacttcataagtggctgggtgttagtcatcgtttatgactaacttttgtatagaaaagttttccaaaatgtatataaatctcgcaatttatggttanttttggtaggattgtaataaaa

SEQ ID NO: 136855 - DNA, 474 bp, Glycine max
  unsure (1)..(474): unsure at all n locations
cactgcagctgcaagctgtataccaaatggtgaggtatcattcagtgctagctctaatacaaattagaagatttgtttgtttgttcgcacactgactaactttcaatcgtcttataaacagatatacaatctcaacacatagtcttttctctcaagttcatcaaagtgttttgagggtaattctaaactttaaaataatttacataaagctttttttatagaaagaatttgaatatgagcgcttcagttaatattacatgtcttcaaagtattaaacaaagtcttaaatttcatcatttaatgttgtatcagatcatgactntagcttgtaattgtctganatgtcaaacgcacattcgcaaagcatgttctgataccatgtaagacacaacttnttaaccttgcatttgtttgcattctaataaaatttggtccaacctattatgacgatcacgtatccagcaacccggtcta

SEQ ID NO: 136856 - DNA, 371 bp, Glycine max
  unsure (1)..(371): unsure at all n locations
cacttcaaactaagctggtatgtggctggactaacaaagaaatatgggtnttcttggaattcataacacttaaggttctaggaaagcactcactaattccctacttgcttaagaagcaaccactctgtctttgatctcccaaattcttatttacatcacatagaatgacggcacaaggaggaggatctttgttatgaattctctttccggttcttatttctatttttataagcatcaaaaggcacattgtagttcttttccaactatgtgtaacaaaattaccactaaaaaatgggaaaaatatgttttatttttacaaggataaaattaatatagaaaattttatgagaatgaaattaatatttttcaaa

SEQ ID NO: 136857 - DNA, 478 bp, Glycine max
  unsure (1)..(478): unsure at all n locations
ttaagcacctgcagctgcagcttaaacatatactgccttatttatctattttaggcttggcggccacgatcaacaaagtacttttggcacctactatatgttgatttgaccaacgctgttatcggtatgttgcggcaatccttcaataccttatttatacattctgagaggttcgttgtcatgtggtcatatcgacgtccttctttatcataagccatggtccacttttcctttgaaatgcgatcaatccatgttgctatggctggactcagttgacagaatttatctaaattttgatcaaaaatatgtttgcaaggagtatagcctgcatgaaattagttagcaacaataatttgaagtatacatgaaagttaaattaaggtgaccatgataaatgaaatcttacccaatttcttcaacaatttcttttgtttggcattattgaatntgcgaattgaaatacttgctatgtgtcgga

SEQ ID NO: 136858 - DNA, 376 bp, Glycine max
acacttcaaactcagcttacatagtttatctgtttcaaacttaagtgttgaagactaattaccatttctttcgtaactagatgatttaaatgatgcatattaatgtgtgtagttgatgtgtcattattttctcctatttcttaaccctttttatcaccactttaattactaattagccttaattgtcaaattaattatgtagttttatcatttgggcctacttgactaattttgtgtttttaatttaattttaggataattataagcaattgggcttggatccgaaattgggctgaaccggcttggacttgaagagaatagacaattttatttttttcaattttgggcttggacttaaaacatattcgtaagcttt

SEQ ID NO: 136859 - DNA, 461 bp, Glycine max
  unsure (1)..(461): unsure at all n locations
agcttataagaacaaaatngccttaatcatttcttaatatgcatgtgaattaagacgcatcaacaagaatcaagccaaggctattgtgcaagcaatcaatggggcaaaacacaccaaatgattataatgatggatggctcaaattctcacaaaggtaaaatcatcactttcaaattgagctttcaaaactatcatggcatgtagagaagaatcaaggatttcaagtcacaaaatgtcaagaacttctattttcaaaacaattacccatttcttgaacatatcctataattcaaagaaaaacatgcaaagtcgtacgtgcacatgaaattgacccaaaatattaaactgaaaatccgacgaaactaacaacattaacaaattaacacaactaacaaattaacaaaaccaacaaaactagcaaaaccaaagaacactcccnncccncatacttaaacaacaca

SEQ ID NO: 136860 - DNA, 298 bp, Glycine max
  unsure (1)..(298): unsure at all n locations
aaaacaaaaagcatgactggtgaccganaatggagacaagcatcagacagcacgatacgcatcctccaatgagggattgctagcttagagcttctaacgaattcaattaacatagtccaccaaatgtcgaagtggttggctcttgcgtctatggcgttggtgatcacctttagtggtatgttgaagtttaagggtttgtttcctagcattcccttcgccatcaaagctcatcttgtcctcaaggtggtaaacttctttcaaaacctcccaatcttcccatgttgtatcctcagctggc

SEQ ID NO: 136861 - DNA, 470 bp, Glycine max
  unsure (1)..(470): unsure at all n locations
agcttctatgaaggctagatctttgagcttcattgaggtccttcaatggtgattntcaaccatggatatgtagcagaagataaaggagaaaatgtgagagggggtgccatccactagggaataagccatggaaggaggagtttcaccaccaagagagtgccttggataagaagcttcaagaggaagcttcaatggaggaaaataatgagagagagaggggggggggcacaaaattgaaggagaaaaaagagggaggaactttgaactttgaagtgtgtctcacaagactctcattcatcaaagttatgacaagtgttacacatgtttctatttatagcctagcacatcggaagcttccttgaaaagcaaggattgaagctttcttgggaagttagaggaagaaagcttccttgagaagctagagggagaaaacttccttgagaagctaaaggggggatactcacacccct

SEQ ID NO: 136862 - DNA, 354 bp, Glycine max
acaccaagctggatataacctagtattctttttcctaccaagccattgttggctctatacaaatcaacaaatgtgttgtttgtttgcacaatgactaacttttaatcatcttataggcagatatacaatcttaacacttagtcttttctctcaaagtgttttgtgagcttttatgaactatacaagaatttacaaagagctttttacaaaatgaatttgaatgatagcgtataggttcgtgtcccatgtcttcaaagcttttgctatttacaggccttcatcttcaaatatttcttgtccctaaacaaatagtttccatcacttgagcttgcgtctgatgattgtggttgttgg

SEQ ID NO: 136863 - DNA, 450 bp, Glycine max
  unsure (1)..(450): unsure at all n locations
agctngtacaaacagaaggagtgatgaaattcatgtggtacagtaattagtaatagctcatggtctcttcatttaaactagcgtgcttggttttcttccgtggctagtggctaatggaccaaagacaagggagtaaggatttcacgactaagcttgttgaatttctatttcgcaggagatggtagtctatctttcttttctttattcctttggaaatatttactttcattggttggtctcagcatgcaaagtggaaccaacatttgaggaataactcaagtattgttaaaggatatcaaatcataaagaaaaatatgatactataacgatggaacctacctacaaatataatacacctatggctactaaaccctatagcccanaatctagcaaacttcctctctctgttngctctggacagagataaccaccactttcacgtgaatcatt

SEQ ID NO: 136864 - DNA, 341 bp, Glycine max
  unsure (1)..(341): unsure at all n locations
tccatttggcatataatcataaacaagtctttnggtctctctgtnngaacaaaatgctagtatcctcacaatgtacctgtgcctgattctccccaatgtttttatttctgcagagaggccattgtcatgggaagagcctttgttgattcctaagagcttcttcactgccacttcctctcccttatgcatggttcctctgtatacaacacctgatcctcctcttcctatgacattgctttcctttatgcaccctgtgatgtcctcactcccatattccagcttctggaatgctgttaacttccatgaattggagtgcctccttgtctttctactcttgatga

SEQ ID NO: 136865 - DNA, 471 bp, Glycine max
  unsure (1)..(471): unsure at all n locations
agcttgtgttttgtttaaatgacactcaaattattgctgacttnttgngngttaaatnggtgaaaacaaaatcgacaaacagaaaagaatgggtagatcaattaaaataaattaaactatacaataaagaaaagatttgacaagaacgggtgaagaaaagaatagtttacagagaaaatggttcgatgaagaaaaaataatccttagacagaaaagtaatttgacaaaataaatccacagaaaattaaaattgttagaaagtacatgaaaactgaaaagcaaattggattgctaattaatttaaaatgagagaaatttaaaggtgtaaaaatataaacggatagacaataaaagagtgtgaaacgtacaatgcaagaaaggaaataaagaccacanagagtgttaatattatttggtaatattattaacaaaatattntaatatttttggtaaataaatatgtaatatatt

SEQ ID NO: 136866 - DNA, 346 bp, Glycine max
  unsure (1)..(346): unsure at all n locations
tcgaagacgatgattaattgacctaatattagagcttttctgtatggctaagnttgtaatcttgtgcagatcgtgtttgtatacaatcaatttaaaatataatataatgattataatgagtaattaattttaatatcaatataagttcaatacatttatgcgtataatggcaatgaagaataaattaaactatttgcacaatttattcttgtataataagtgacaaaatttgaaatgtagcaaaacgacaactaacaacaatgttttattaaatgcaatgtacatggcaagggaattaatttagtttaatttaaaacgagtgcattttcttagccaatatttaaat

SEQ ID NO: 136867 - DNA, 465 bp, Glycine max
  unsure (1)..(465): unsure at all n locations
agcttacacaaatattcattaatccaacattctctaacanataatcatcatccatccatagttccaatcaatcatgctcagtatgatgcatgcacctgacctcaactctncaatgcaaatgtggtaccatccccaaggaaatagcctaagtgtgtccacacgacactctcacttaagaaaactaggcagtaagtgtcgaggtcaccctgtcgtgcataggcaactcctcccacagtgatcagcctgagtctcaagggagttccaaaccaagtgacatgcccctaagtacaagtatttttcctcatgaaaaactatgagtacttactgacaaagtttgtactatttccatgcaatatgaaatatgaaacatgggcaccatcaatgcactgaccgtggataattaaagattttaagccatccccctccagagatgcttaaaactctttaaccactatatttccccca

SEQ ID NO: 136868 - DNA, 352 bp, Glycine max
  unsure (1)..(352): unsure at all n locations
nganatgaggaagtgtggaagggtgagtcttcctacttttattcgttgaccacagagtggtacctggagatatgtcgcgggggttaagagaccttggggacgtcatgtggggtgctattgcccaaaaccaatcttgaccaatcccgacccaacctgtgcatagtcagtcagtgagaacctgtgatgtacctaaacatgcgaactcctggcagtcaaccgattaaagaacatagaccacaaagcaatgaggcttgtgtggtggctggccagctgtgaatcttgagtgatatatgggatatggcctctggtaatcgattaccaagggtgggtaatcgattacaaggcttaaaag

SEQ ID NO: 136869 - DNA, 470 bp, Glycine max
  unsure (1)..(470): unsure at all n locations
agcttggagaggatgtttcaatggaggaatatatttatggagagaaagagagaggggggagcacgaaattgaaggaagaaaaagggagagaagttgaactttgagttgtgtctcacaagactctcattcatcaaagttacaacaagtattacatatacttctatttatagactaggtagcttccttgagaagctttcttgagaaaacttccttgagaagctagagcttagctacacacacccctctcataactaagctcacctccttgagaagcttccttaagaagattcctaaagaagctagagcttagctacgcatacctctctaatagctaagttcacctccttgagatgagaagctagagcttagctacacacccnctataatagctaagctcacccncatgacaaaatacatganaatacanaananatccctactacaaagactactcanaatgcctcgaaata

SEQ ID NO: 136870 - DNA, 354 bp, Glycine max
ctttctttctcaatcaatctgtctactgtctaataattcttattgtaagctcatattcttgttctttctttgtctaacatacatacttgctcaaacttatgaaaagaaacacaaactccatcacaatcatgcattcaatccaaaatcaattcataacatcaattttcacaaaaagataaaagtgtctcactgcataatcatcatgatcaagtaaaactgtgttgtatgcttcaaaacatgcatactaactatccaccaaaaaaacataagtatataaacgtaaatcaaaatcactaaaaacaatgtactgaaactaatatagttataattattatccaaagagcaaaatcatca

SEQ ID NO: 136871 - DNA, 348 bp, Glycine max
  unsure (1)..(348): unsure at all n locations
agcttgtctcagcgtttatgcgagactgttctatcatgctagctatcatcgccaagtaccaagaagagttaggtctagccacggcccacgagcatagaatcacggacgagtatgctcaagtatacgcggaaaaagaggctagaggaagggtgatcgactctntacaccaagaggcaaccatgtggatggatcggtttcctcttaccttgaacgggagtaaagaacttccccgcttgttagccaaggccaaggcgatggcagacacctactccgcccccgaagagattcatgggcttctcggctattgtcagcatatgatagacttaatggcccacataattagaaatc

SEQ ID NO: 136872 - DNA, 348 bp, Glycine max
ctggaggaagaaggagatgaatgaagggatagggagagtatatcaccaaattttgtgctcaaaaagagctctgaaatctgaagttaatattcaaatgatcaaagttgaaaaaaatgcacacacatgacctctatttatagccttagtgtcacacaaaattggagggaaattcaaatttcacttgaatttgtggagccaaacttttgagccaaaatttaactaattatgattagtgaattttaattatggttcagcccactaatccaagatcaattccaagattctccactaaatgtgcttatgtgtcatgaggcatgaaaagcatgaatgacatgcacaaagtgtgac

SEQ ID NO: 136873 - DNA, 441 bp, Glycine max
  unsure (1)..(441): unsure at all n locations
agcttagttagaggtacttaccctttgtttactgaagaaaacgaagaacgatcgatgaatcttgaagaacggttgaggatcttcgcgtaatttctcacggaaacgttacggaagagcctcagcttggattttctttacggaaacaattttcctaagcaaattcgaaagagagagaagtgcctaaggggctgaacccttttcttcttcacttctccccctatttatagcaaaataggggagaagcttgccgcccagctcgcccaggcgagccaggttgcttcctccagaagcaacagccttctggaggaatcttctggaaggcccaagtgggcctgattgctatttacacccncctttntactaaatgcaccccttttctatttttttgtaattctttntccgtaacgttacgaaactttacgaatntcgtaacgatactta

SEQ ID NO: 136874 - DNA, 335 bp, Glycine max
  unsure (1)..(335): unsure at all n locations
tcaagaaaaagatggcctcaacaaactccttatttccatgaaggaattctattaatagacctccaatctttaatggagagggttaccattactggaaaacccgaatgcaaatttttattgatgcaatagacctaaatatttgggaagccatagaaatatggccttatatacccaccacagtagaaagaattacaatagatggcagttcatcaagtgaaagtataactatagaaaaacctagagatagatgttctgaagaggatagaaaacgagtacaatacaatttaaaagccaaaaacataataacatctgccctgngaatggatgaatatttc

SEQ ID NO: 136875 - DNA, 468 bp, Glycine max
  unsure (1)..(468): unsure at all n locations
gcaagcttcttacgganaagaagaatgattttcttgatatgtattccaataggattctagcaaggaaggacacaccttcaattataaaagcaagaaataaatctagacaacctgttttataggagtaatttaagagaaatagtatagatcacgtcaagaaaggcaataatagcaaatagtgagcacttagaaagacaagtattgggctttcatagccataaatataaatataactctgaagacaatatagtatatactgcataatcaaaagagttcatggtggcagcactgaccatgttttcagatggcaaatccttgtcaccttttccaggggccttaaagcaaatgaagttgtaaccatcagctcatatagatggcgtaaaatatacatcaaagagaaattaatctttaaaaaactattaccttcaagtaatcaaacaatataagacactgtacaagaacatggcg

SEQ ID NO: 136876 - DNA, 339 bp, Glycine max
  unsure (1)..(339): unsure at all n locations
ctccgcttaaatttgttttgatttacatatttttttaatattttcattatatgtgacaaaaaanaatgaccaatctcaagaataataatggggggactgttttggttttaccagtttgggcccttggagatattctatttgtgtgaatttaggttaattttcctgtctactattttatagatttatcaagctagctatgttccctcaagtgagaaattttaagcagttgcatgcacatgctttaaaaacttttgaggcttgttgactctcttcactgtcaggctcttaagaacaggtgatgaacagattatctatcatgctcatcacattacacacata

SEQ ID NO: 136877 - DNA, 469 bp, Glycine max
  unsure (1)..(469): unsure at all n locations
agctntntgtttttctagtagcattctattatctcttttcaactacttttatagctgttcaatttttttccaatgtttatcaataacaagttcgggtctaggtaggttcaaggttcagaagcttattggttttgataatatcacaagaaaaaatacatcttaaaaagcaatttaaacgtaaaataatgaatccttatactctgtctttttcttatcaaatcttattccaggtgattttatccatgttactgcaatcacatcaggccttcataggagcatgcttacaatttatatgcacaactctaatctntatttgatacttattcctatcttacgttctttagtggcaatcttttatgctacatttaaggttgattatactcttttatagctgattgcactctattatcaatntagttttattatgaagtacttaattgcctcttatgcttaaaagaaaatgttatgt

SEQ ID NO: 136878 - DNA, 334 bp, Glycine max
  unsure (1)..(334): unsure at all n locations
ttgatctatttgatgaagagaaacaacttctggaccatttgtctgcttgaagtttaaggagtgtggagaagagattctgaaggagggaaccaagtttgatccatacccttgaagattgatgcgtcaagctagtgacgtcaaaagagtgcatcctgngaggctacccattccttgttctatttgcattgcatttagttatagcttgcttgtttgtggttgcatgaagcattttcaacatgttttgcattgcataaaggggttggatgagcttctttgaatctggggatgaaaaataacttaagaaatttttcatgtagtccactcgctatgtgca

SEQ ID NO: 136879 - DNA, 461 bp, Glycine max
  unsure (1)..(461): unsure at all n locations
agcttgaagccacaatattgaaaaggatatgtgctaaggggtccccttgcctcaaacctctagtgggggcaaattcatttgaggggctgccatttatgagaatggatatagaagatgattgattgcaagcattgatccatttcctccatataggacagaaccccatttgaccatcatataatccagaaagttccatgaaacagagtcataagcctttgcaaagtccaccttaaacaccaaagctggtttcttacttcttttatcttcctctattgcttcattgagaatcaaagttccatgaaggatgtttctatcctttatgaaagttgtttgtctctcatcaatgagtccaggcaataattttcttaacctattggccagtaatttagcaatgatcttatacatacagccaatgagggagatgggcctatagtcatcaaaagactgtggatgatngattt

SEQ ID NO: 136880 - DNA, 354 bp, Glycine max
gcttgtgaagacattgtgtctaacggagcggtcaggttttgcatactgattttctaaatatagggaaaatatctatttatgcagccaagtcaaatttgctttagagttttgcataaagtacaccagttttgttgtttgagtttaaattgctcacataaacttcattttttataagtgttttaataaattgtgaaaagcttgaatagttttaaagtgaaaaatatttgtaaaaatagaaattaataacttaattcaaataataaaaatatactttaaataatttacttatatgttaacttttgatgttccctttaatgtttttttgtgaagatgaaagttaatcatggccatatt

SEQ ID NO: 136881 - DNA, 414 bp, Glycine max
  unsure (1)..(414): unsure at all n locations
cttgaataacctgtagctagcttntttgattcattagaactaacggagattctaaatntcacttaatatgtgaagttgtaccttttctgagaccttattgctactaccatttagtagctctggtgccatccaaggtagagttccacgaacaccaccagacaccaaggtatttcgcttaatctttgataggccaaaatcaccaacctggtgaaaagcaagtgtcttagctttatcacaatgaagacaatgtaatagaatgaataatccacagcttgaaaagataccttgcatattggccgcatatgatccttcaagttcacgagcaatatgtcacatctcaagtcaaaatgcacaatatatgtcgagtgtaaatattccattccaaaagcagcatccatggctattatcaatctc

SEQ ID NO: 136882 - DNA, 337 bp, Glycine max
  unsure (1)..(337): unsure at all n locations
tcctcagttctgtaacaagctgtgtttcatatactnggcctttatataactgtctttgggcttggcagccatactcaacaaagttctttcgacacctattgtacgttgatttcaccaatgctgttatgggaatgttgcgacaatcctttaatacactattgatacattctgagaggttcgttgtcatgtggccatatcgacgtccttctctatcttaagccatcatccattggtcttttgagatgcgatcaatccatgttgctttggctgtgactcattcacacaattttcttaatgttgaaaaaaaaatgtgattgaaggagtgtatgctgcataa

SEQ ID NO: 136883 - DNA, 445 bp, Glycine max
  unsure (1)..(445): unsure at all n locations
agctngcgaaatgactctaggaaggacatttatgttattctgagggctaagctttcaactattaaggaagagccagaattgtgtgatgagaacttagcatcaccaagacatgtgtgtatggccaagaaacaagggaagaaggttcaaggaaaagataaaacaggacggtgtttagtaccacatgttaatctgaagcaatcttatgtcctatttattacaggatttgcatccaaaggtgcctttgctgggtttcttcaacgctaacttgtacctccttagtccttactctattccaataagaacatgaagaagtctcttcttggcaaagaccagattgcacggttggctaatttcaattaatgatgtaatgttgtgtactacttagctattttaactatttatgtgncaatatgacagtttatttcttccgaatgaaaacactgat

SEQ ID NO: 136884 - DNA, 326 bp, Glycine max
agaaatttaatattataccattttcatgtcttcaccttcacaactaatgcttttgggactgctggttcttaatatggtatcaatgcctcttcgatcaagtgctcgagttggggtagaaatattatgcaatataatgctcttgcatgatgaatcatgtcacaaaatgaggaatcatgtcagaaattccaacctatataatgagctcttgggattgtaagttcttgatctgtcacaattgtgggatttttagcataggaaatgttaatagaaatatgtcccatatcaatgtgatcaataacagcatgtaacatgttcccaacaaactc

SEQ ID NO: 136885 - DNA, 463 bp, Glycine max
  unsure (1)..(463): unsure at all n locations
agctngaagtcgaaaggatacaccggacatactctttgtgattaacacacgactacaggatagtaatgaaatccgctcgtcttgtaaaaaaataatattaataatacccaaaaagataatataagtgtatatacatatatacgtccgcctatcaagcttataaggcttgttaacaagcctaagccaggtctatataatgaaataggctttcaaaaaagcttgagcctgaccttctaaataaataagtcaagccaggctaagcgttatgtacgccaagttgtatgcccctatacaccggcctaacctattctcacccctatctcaacgataaaaaatgactagaagagtcacttgtgttcataaacaaaagggttgtcccttctacttacgtgccaagaagatcattctagcgacttactggctggagtgacttagagagatgacattatagcttcaaactgtc

SEQ ID NO: 136886 - DNA, 466 bp, Glycine max
  unsure (1)..(466): unsure at all n locations
agctntgcttctacattattaggcaccattctcttatgataggtggtatgatgaatntgttgagtggtgtaacactcttttgaaaaatcactcatgcacctaacatcttcatgatttgtgtacatagggactcattaggcaggtttgttcttattttttgtttcaatgcaaacctaggtgctcatgtgggacaccttaggtttgtcgtaattttttgtaggaataatcaacatgaaaataaagaaaaaggtatattttattccattatgtcgcaaccgacccttcggcgggagggcgacgcgtgactcacgggtgcgtcttccaagaaaggaatacgcgcggagtcgccaccaacgtttatttgaggaaaacatcgaanaaaccacaaaagacgtggtctacgaactttaagtgaaaggttcgggagttgtatttacgcacggngaaggtattagcactccacatg

SEQ ID NO: 136887 - DNA, 277 bp, Glycine max
aacatagccatgcgcgacgatgttcaattatcatcatctcgatatgcaatgcacctcagtcgggcatctgagtgaaaagtgatgccatacgagttagccgagagcttcgctggtcaattaaaagcctgaaaaatattataggcctgaatgggacatctgagcccaaagttgcggcgagttagaccttccatgtgcttgcatgtataaatttgagcatctagagatatgatgctcctgaatgggacatctgatgaaaagggtgtgccattcgagtcag

SEQ ID NO: 136888 - DNA, 367 bp, Glycine max
  unsure (1)..(367): unsure at all n locations
agctggagaggaggcttaatggatgaataatatatggagagaaagagagaggggggagctctaaattgaaggaagcaccacggagagaagctaaactttgagttatgtctcacaagactctcattcatcaaagttccaactagtgttacacatgcttctatttatagactagagtagcttccttgagaagccttcttgagaaaacttccttgagaagcttctttgagaaaagttccttgagaagctagagctnatctacacacacccttctcataactaagctcaactccttgagaagcttccttaagaagattccttaagaagctagagcttatctacacatacctccctaatagctaagctcacc

SEQ ID NO: 136889 - DNA, 317 bp, Glycine max
  unsure (1)..(317): unsure at all n locations
aatttttaaagaaacangcgcgggtagtcttcctgcacatcttctccctcgtaaaaattcacttgttagcattgccacaccttttgggcttgaggttattcctcaagtaaagaagttgttggatgacggtttggttcaaagaagtaaatccttgcgcatttgttggtgcccaaaaatatgtattattatgcaccaaatccctaaaataagtgatatgatgaatgtgttgagtgttgcaaccctctttcgttatatactcatgcacccagcatctctgtgattcatgtttatatgtgatcattaagtaagtttgttcc

SEQ ID NO: 136890 - DNA, 177 bp, Glycine max
tggcggcgctacttaacttgccaacactaatcacatttaggcagatcctatgatggagccatgcctacgatgtgcgcatgtgctagacttgtatcgaatcagcagccaatatactgtaactggattacgaacgcacccgctagacacttgcgagaatgaactctggaatgagcatag

SEQ ID NO: 136891 - DNA, 253 bp, Glycine max
tagccttagctcgaaagagctctgcatacacctgtaacgccgtattctccatacttacctctggcatcgtaatcacatatgtaagacgcacctttgtagtctctgtgcgtttgatctaagacttattgagaaatatactgcgtctttgactagtcagacatgaccatggcgggtatatgaaaccagctgatatactgattctggcacctgaaggcatacatctgcacctgtgactcgtacacccgacaaattg

SEQ ID NO: 136892 - DNA, 343 bp, Glycine max
agcttagacattcactttcgagcctcacgttatattacgggactcaatcaaacatccgagaataaagttattgtcgtctgaatctgctcagaggttcaacattcaatttcgagcgtctcgatatatgacaggactcaatcagatatccgagtaaaacgttattgacgtttgaataggctcagaagttcaacattcaatttcgagcgtctcgatatgttacgggactcaatcagacatcccagggaaatgctattgtcgattgaatctggtcagagattcaacattcaatctctaacgtctcgatatattacgggactcaatcagacatccgagtaacagttat

SEQ ID NO: 136893 - DNA, 335 bp, Glycine max
  unsure (1)..(335): unsure at all n locations
tgagccaattcaaacgacaataactttttactcggttgtctgattgagtcccgcaatatatcgagaccctcgaaattgaatgttgaagctctaagccaattcaaacgacaataacgtnttactcggatgtctgattgagtcccgtcatataccgagacgctcgaaattgaatgttgaatctccgagccaattcaaacgacaataacttgttacttggatgtctgattgagtcccgtcttatatcgagacgctcggaattgaatgttgaagctctgagccaattcaaacgacaataactttttactcggatggctgattgagtcccgtaatatatc

SEQ ID NO: 136894 - DNA, 290 bp, Glycine max
  unsure (1)..(290): unsure at all n locations
agcttaatctatcaagttatttcnnttttnctctntcatgtacattcacaaacatatggtgctcacaacctacactgctagaaaaaagcgcttttacaacgatcgaatcggggatacaacgacatttttttaccgtcgtagaatgcgatgtcgtcaaagcttaaaaatgtcaacgacgagccccaaaacaccatctttgaaagtgaacaactttcaaagacggagtttaccttagcaacatctttgaaagtggggcatttcatttgactctgatagactctatataaatg

SEQ ID NO: 136895 - DNA, 353 bp, Glycine max
acacttaaatactaagctagctgaatcagatcgaatttagttatctttctctaccttggccagcttatcggaccaaatcagcctcagatgcaatggttgggcgctaagcgcttgagactctcaacttatcgcatgaacagagatgcgcttaacgcaagacttgcgcttagcgaaaggactatttttcagaaaatatttttctaagttatttttcagtcctttttccaagaaattgaaacccttatgttaaacatccaaagattggctgatatactcctatgtacagactatatagcaagttccaaatgatttaaatgcatgaaaaacaaacgaagataatagaatttaaaact

SEQ ID NO: 136896 - DNA, 456 bp, Glycine max
  unsure (1)..(456): unsure at all n locations
agcttgagaaagaaaacaccttagcgtcttggagcaaagcttggagctaggtcaggaaatgagggctttcgatgagtgcgggtttttaagtttcaaacaatgacgaggaccaccatgacgcgattagctcagcaatccagcactgcagcatgacagctatgacgacaaccacgacgacgcgagtagctcaacgaaagtcactttggggggttagtagcttgaacaaggtagagtgagtgagtagaaagagtcgcgagagtcattttcgagggttgttgtacgacgccgtttcgggttttcataaactcgtggactcgtagcagactcgcgagtctacccaaactcgtccgagtctacgtaaaatcggacgagtctactccggtttcgattcttacttccgattaactcgccaaccctttagtatttacgaattanatcgagagttaacaaccatgc

SEQ ID NO: 136897 - DNA, 340 bp, Glycine max
cagcttgctcgagagtgtttcactttatcaaagtattacattataacaagccttttacacttaagatcacccaacttgcgaagcccctttcaatgactctcaaattgaagcctccaatgtgaacaacacttgaattcaaaagaaaaatacaaaagtcgtttatcacttgcataatgaagatagtataacttgaagctccaagaacactttctgtctcaaccaagcatagactcaaagaatacctgatgatcaaatattccatctggcctggttactttcttacaaaataactctaaaaatcctaaaagaaaaaactattcacgagtgttaagtgttacaa

SEQ ID NO: 136898 - DNA, 479 bp, Glycine max
  unsure (1)..(479): unsure at all n locations
ttaagcacctgcaggctgcagctttactattatgccttcatctcttgntattgttgtctcacaatgattggattctntactatgatctttttctgaagtcttaagttagttggagcatttaatgcatcccttcttcatgccaagtccgtgccgataagataatgtgtcttgtacttcaacagggaagtcacttctttcatcatagcaagtctgcaacaacaaagcgtgccttttgatgaggatcaacatcctctagattgtgggctttatttattcttcataggactttgatagatcctagaagaatgttttttgtatgagagaatcttatatatagagtattaaatgaaggtcttaaatgttatattagattgtcttataagtgtatcgtctganaacttcgaatgcaaagagacacatcatganttgatagcatatcagatacaactnttatcatttatanttgattgcatctaatc

SEQ ID NO: 136899 - DNA, 373 bp, Glycine max
  unsure (1)..(373): unsure at all n locations
cacttcgaatactcaacgcttggagtttccaagtgccaattcgtcttcttctntagttcagtcttcttctggcttcaattcatcagtgggctttccttctgtgtccagcatcttgggatgttcccagcctttgatgacagctttccaggttctgctatccagtgatttgaggaatgccaccatccttgctttccagtattcatagttggttccatctatgattggtggtctgttcactggtcctccttctttctccatgttcatcagaatttatctccctagatctcactctgtgatttcgagtgttagctctgataccaattgaaattctgataccaggggacagatgtcgtaccggatgtcacgacatcac

SEQ ID NO: 136900 - DNA, 465 bp, Glycine max
agcttaaaggaagtgaacgaattagcaggtgcttatatgtctccgcattgattggtaaatctgttccccaaattcctgaaaaatgtaaagatccaggtacattcagcataccttgtattatagggaatagtaagttcgagaatgccatgctagatttaggagcttctgttagtgttatgcctctgtctatttttaattctctatctctaggtcccttgcagtcaactgatgtggtaattcatttagctaatagaagtgttgcctatcctgttggtttcatagaagatgtcttagttagagttggtgaactgattttccctgttgatttttatatttcgaatatggaagatggattttctcaaggatcagttcccatcattctaggtagaccctttatgaaaactgctagaactaagatagatgtttatgcatgcacactatccatggagtttggtgaataactgt

SEQ ID NO: 136901 - DNA, 356 bp, Glycine max
gcttgttaaatcaaaagtaatagccatggaaaacaacccctcaatgaattcccttaaaatggacttaaccctgtgtgctttccctaataaggcccccaaaacagcatcatactcaaactatatatgcatgattatctatatcttaatatgcacaaaggcattagtgtatcataaccccaaaagcttcaggactgaaaatgatgagaaatacattaccttaagcatgttgctcagaaaattaaagcaatagaccagtcaaatacaataaaaaaatatataccttaactttgagtagcttgcagcaagtccatttgtgttacatgatgatttacctacttaccaatgaaatatttaaa

SEQ ID NO: 136902 - DNA, 487 bp, Glycine max
  unsure (1)..(487): unsure at all n locations
gtcacctgcggcatgcaagctagggttattggctcagtcagagaatttattttaaattctntcgtctctacccgttgtctctcactatccctttgtgtgtgagatattaagatctaagggagcataagatgcaaggttgaatgtgattatactattcttatgatccatcataaagagaaaagtttattccatatgcagtgaaaagttgaatatccatgaaaccccatataaactgcatccaaatgaattgcagaaagaaatcagtatgcaaacaaaattccccanaagcactggttctattatcagtaataaacacaagtaaaaccaactttccaaaatcaaaactttaaagaataaccaaaatcccaattgcaagatagcgcctataaacacacctcaaaagtccatagataaatgccttgaccttgccacataagtatctagcanaagtatctaacatagatagataaatgagaatatctagcaa

SEQ ID NO: 136903 - DNA, 396 bp, Glycine max
  unsure (1)..(396): unsure at all n locations
aaaatttgatcctgattcgtaacttcaatctcagcttaaagactatccactngatcaaggtatacctataacttataaactattatggtatatatgtaaataaccagttattcaactggaatcaattagttagttattgatggaacatgtaacaagttatgaagataaagaggaaaactaggattagtaggggacttaaagaagaagaccagaacctagaatttttataccatcactattaccaatataaatcttatctggtccatcaaagtgaccaagctgatgaatattttgtggttctccagtcacatggaatgaagttcccgagtctgggatccatgttgaattatcattgtcctgagcaaacgagttatctagcatattgcactatgagta

SEQ ID NO: 136904 - DNA, 193 bp, Glycine max
  unsure (1)..(193): unsure at all n locations
agcttactntgctataagagagactngncgtcncgtctcacatgcgngagaaangcaagngcatatgatgntgctttgccaccctctnacaatggataacaacatttggttatgagatgacagagatcactaaacttggagagagggagtggacccatctgtgaaaacaacgctcacacgcctatcatcacct

SEQ ID NO: 136905 - DNA, 275 bp, Glycine max
ctaccttccacccatattcacaaaccaaatattctaactgctgcttaaactttccgctgctaccattctgaatcttcaacctgacatcctgatcagttgtgctgctgcatttgcacaaccaaccaactcgttctttcctttccactttattacatgcacctatgaaggacaatgtggttttgatttgacttccctgcgtggctatataaacacctaataagattgatggcacacatggcactatctaacggtgctcgccccatatcatattgacc

SEQ ID NO: 136906 - DNA, 394 bp, Glycine max
  unsure (1)..(394): unsure at all n locations
agttcaccgcngctgcagctatggctccttggtataagactttctttttgtaatanacctcccctgtcctgccacattaacattaaatgcatctagtcctgcatgtcttttccctttagcacaaaagaaaaaccttattgaccctagaactgctcccattgctattgttggtgccagtgtcggtgaatcaactacaagagaggtttatgcatccttctccctctgttgccttcttctccacccacctcaccttctagccatgccattgcttttgagccacccccctctacagtgtctactgacaactgatttgatgcttcctcatgatccttaaaacaacatctggcatcccatgtatatggttcttcttacaccatggttaccccaaatagtc

SEQ ID NO: 136907 - DNA, 467 bp, Glycine max
  unsure (1)..(467): unsure at all n locations
tgcagctttagagaagctcatgaagctgtttctgtaaaacgctgcccagccttcattaaccgttggatcttctcgaaattntgtttgcaacttcacaagacactttaccatgattttaccgttgggatctttgagaagatgactggagtgtgctagaagcctcttaatgaagcttctagaggaagcctcttaatgaagcttctagagaaaactacatggagctgcctcggtaaaaatgcttcccagcctccgttcaccgttggattttctcgaaatttggtttgcaacttcaaaagacacttgtccatgatctgaccgttgggatcgttgataagatgtctggagtgtgctagaagcttccgttcccgagagcatctcttatntaagcatttcagcctttgctttcttgtagcttaaganaaatgtcattnttttcttctttctttcctccanatccatttctaaag

SEQ ID NO: 136908 - DNA, 353 bp, Glycine max
  unsure (1)..(353): unsure at all n locations
tatatatatatatagatatgatgnggtacttattaaatctaaatacaattttgatatgtgttggtttatgtaattttgaaataaaaatatatagaaagataaaacttgaaaggttatatatagaaagttcataaagtcgtaaaagatgaatatataaaaatgcgtcaaaagtacatgatgaagatagggtgaacagaagttgggttaagtgaatttttgacaacggaaaccaaaataataaaataaaaaaaaaaagaaaaaagctatggaaaacttgcgtgtccccaaagctatggtttgtagtctgatgcagagctgctgagataaggatcatcaaatcgaatatcttcctc

SEQ ID NO: 136909 - DNA, 331 bp, Glycine max
  unsure (1)..(331): unsure at all n locations
agcttctcgatatatgagtgcacaggaagctgacttttttttgaaaagnnatgaccatgngaatttctcgagagcattcgttgttcaactctgagcgtctcgatatattatgcaccataatcggacttccgtgtgactagttatgaccattgtgaattctcgagagcattcgttgttcaatttcgagcgtctggatatattatgcgcctgaatcagacctccgtgtgacaagtaatgaccatctgaatttctcgagagcttccggtgttcaatttagagcgtctcgatatgtgatgcgccagaattggactgtctggggacaagtatgacc

SEQ ID NO: 136910 - DNA, 340 bp, Glycine max
  unsure (1)..(340): unsure at all n locations
cttctcgatatattatgcgcctngaagggtcttgcgngtttcatgttttgaccanncgagagactcgagagcatgcngggctcaangccaagcatctcggtatattatgcgtctgaatcggacttgcgtgtgataagttataaccatttgaatttctcgagagactgcgttgtgtaatttcaagcgtctcgatatattatgcacctgaatcagacttgcgggtgaaaagttatgaccatttgaacttctggagagcttcctgtgggcaactttgagcgtctcgatataatatgcgcctgaattgaaacttcgtgtgattagttatgaccatttgaatttc

SEQ ID NO: 136911 - DNA, 468 bp, Glycine max
  unsure (1)..(468): unsure at all n locations
agcttgtgtgagctagaaaaganatcttttttctttatatgtagaggataacaacttaactttcatagagttgggagaaagctaaaaggaagatgacataaagatcatgatgacactcctttgaagataacatttgaggatgcattgcgatacttatattatggattaggtcatactttatcccttgtttttatttcatcataagaaatttacaatttttctattttttcttaaaaaatttaagggagctttaggtagtcaaattaaatgtcaagttcagtaacttatgcatatatgtaagttatcttcgctaatttatgaatgaaacttatgcaattttctctaaggttggtatactttgatgtttactatttgataattcataaggcaccctanaatcatttgggatttttacttctcattctaattatacttaattgatgattggtagtttcttttgagtgatca

SEQ ID NO: 136912 - DNA, 352 bp, Glycine max
  unsure (1)..(352): unsure at all n locations
nggtgatgcctcaatggcatctacattctctgctaatcatgcatctgttgctcccaccactgacataattcgtcaatgtcggagtaccctattgacaaccctccagatgtttaaaattctgggtctcaactgtcttgctactgcatatgtgttgagtgttatgtatctggatggtgtcaagctaggtgacatacaagccacaataagtggtatcttcactgctgcatttttcctctttatctcacatgcacgccctcttcccactctttctgctgaacgtactcaccccaacatcttctgtgcttatgttttcctttccctcttgggacaattntctattcacctgcttttc

SEQ ID NO: 136913 - DNA, 491 bp, Glycine max
  unsure (1)..(491): unsure at all n locations
gatccttaagcaccgcagctgcagcttgaattctagtaaaaaactcctttacatattctaatactcatgcctcttttacattcaaaaccggaaacttagattcctaggcaagagtcatccttttggcactttagtctagcttctacaaactacccacacactcacaatgcgcataatttattttgcaagctaagttccacaaaatcatgcgcaaatgccattgaggcatttcaccgaacacttggtgggcgcatgtttaagcatgaaaatcaagggaatgggggcaatgtggcatgccccattatctcagaatgcaccctaggcctaaggccatcccctacaacccctcaattcaacaaaaacaagcaataattcaaagataaatccctcacgttttgagcaaatacatgcaacttagagcatcaaaatatatcaatgganagccaaagagcccaaaaatgaggtacttacttngtggagatgaataatag

SEQ ID NO: 136914 - DNA, 354 bp, Glycine max
tttccaattatcttcactataaccaaatctcttcacattcaaaacatcataaaaaccataaagctagaatgaaaatatgaattcaatgatcacctttcatctcccaccttcctgcaacaacgtctacactataatggtaaagattgtgttttcaagacccaaactatgggatgagatcaagattaaacataggtccaagataaaaaatcagttgagatacaaaccccatatcgtagatcacagatccagaaaatatagagttaaaaaaatcatatctgaaatacaaatctaaacattggtggtggtgtcgaaccagatcctaaaccccataccataatgtgggattgaagcaat

SEQ ID NO: 136915 - DNA, 445 bp, Glycine max
agcttgaaggctcagtcttcatgttgctctctctatttctaacacctccctagagaatggagaactcataaagacctctcattggataacataattggagaaatatcaaaaggagtgtctactcgttctagaaatatagatggagccttgtgcagtaaacattggttgatgaatgatggctatgcataaagagttgaatcagtttaagagaaatgaagtgtgggactttgaatctaaaccaacctctcacaagtcaatcggaaccaagtgggtgtttcgaaataaacttgacgaatcaagcatcgtagtaagaaacaaacctggattggttgaaaagggtcaaccaagaagaagtatcgctatgatgaacctatgcccaattgcaagtagaaccattaagtgctgctgcttttcatgttcatagattcagatattccaatggact

SEQ ID NO: 136916 - DNA, 339 bp, Glycine max
tggattacacaatttagatatgacaatgtttgatatttaaagagtctctgctttaatcgattatcaagagatatatcgattacttctctcttaaataatgtttcagaagtgatcaagaacactttaatcgattacattgttcttgaaagttttccagtttttgggagaaacactgtaatctattgaaatgataattaatcgattacttctttgaaataatcgattacattttatatttaataaattacaggagtttataaccgttttctctataaattgtccccttgcgttcttacttctaacaacttttgaatgagctagaattatgagctcatatta

SEQ ID NO: 136917 - DNA, 450 bp, Glycine max
agcttcagctttgtccccaaggcttcatgtatactcgtccaaaatcgcgaagtgaacctcggatccctgtcagatacaatactagaaggaattccatgcaaccttactacttccttgatgtacaactccactagcttctccattctatacttcatattcactgggataaaatgagcagatttggtaagtcgatctactatgacccacacagcatcatgtccacgactagtcttgggtaaactagatacaaaatccatagagatgctctcccatttccacttcagaatttccaatggcttcaattctcccgatggtcgttggtgctcaaccttagccttttgacatgtcaaacatcttgctacatattcagctacatctttcttcatgccatgccaccaaaaacttctcttcaaatcttggtatatcttagtcattccaggatggaaacta

SEQ ID NO: 136918 - DNA, 344 bp, Glycine max
  unsure (1)..(344): unsure at all n locations
ngttaaagaacttagaaaatttcaagaacatgcttgttctcacatcgttcgcgtgtatgatatccactccacaaggtttgaagttgaggagaccttcaatcctattacgcaacgtggcggacaaaagtgggctgttaacttgaatggtcattattgtcaatgcggaatgtattctgcgcttcactatccatgttcacacattattgcagcttgtggttacgtgagcatgaactactaccaatatatagatgttgtttacacaaatgaacacatcttaaaagcttactccgcacaatggtggcctcttgggaatgaagcggctattcctccttctaatgacgcat

SEQ ID NO: 136919 - DNA, 459 bp, Glycine max
  unsure (1)..(459): unsure at all n locations
agcttgtacatttaatgaatgactttnttatataaanaaagtaaataatcttgatttattgttatatttacttttataagctatatgaaatattatttattattaaactaaaatttaggcgattgttaatactaaaatttggtattttttattttcatagaatttgtaaaatcccccccccccccttgatgaaatttcctagttctgtccttgcaatcagaccaagtccagtgtctggagtagatgaacaagtgctcaatcttgtactgtatgaagaaaaggatgaagacaacatcagatacctttagagtatgtttggatggggaaatttaaaattctgagaaattttaaattctaagaatttcaaatacttcaattgaaattctnttattttcaaaattttgtgtttggataaaaaaattaaaattatgagggtgaaaaaaatgaataaaaaaaaaa

SEQ ID NO: 136920 - DNA, 339 bp, Glycine max
  unsure (1)..(339): unsure at all n locations
tgttatcgattacacacatattgtaatagattaccattgagattttcagaaaatattctcaacagtcacatcttttcatttggttcttgaatggccatcaaaggcctatatatatgtgacttgagacacgaatttgctaagagtttttcagaacaaaaagatcttatcctcttaaaaagcaaaatcgttttatcctcttacaaattccttggccaaaacacttgtgattcaataaggaattatttgagtgctcaaattgttcaatctatctctttcaagagagatttcttcttctcttctttattctgaanatggattaagagaccgagggtctcttgt

SEQ ID NO: 136921 - DNA, 467 bp, Glycine max
  unsure (1)..(467): unsure at all n locations
agcttatccttatggctagcctccggatttctctccccgtgccaccccgaaagatctaagccaagcccctacttttgaggggcaactcccgccttatgacgactatcccggacaagacgatggggaaggagatacccatcttggccccctgctccacctcaaagatccgtccccccatgaactacccccaccgaacatagtctgccatatcccagcctcacccacacccgtaaaagaatctgttcccttcgcggaagataagggaaagattgaggcgcttgaagaaaggttaagagcagtcgagggccttggcaattacccattctcggatttaacagatttatgtctcgtgcccaatatcgtcattcctcccaagttcaaagtatcggactntgataagtacaaagggacgacatgtccgaaggggcatctntggatgtattgccgaaagattgnggcgtattctg

SEQ ID NO: 136922 - DNA, 361 bp, Glycine max
  unsure (1)..(361): unsure at all n locations
tatgctntaaacaattgtgcttcaggaaccagtggcagaaattatggactttcttgatcttaatcttcctgctgctactaaggaagaaagcaatagccatgctgactctaacagtaacataccctggtggatagtagaagaaaaccacatacaggatgcactggtaggccttatctcatagccaaaggtgacatagtttattgttccatcagtgttgctgcaacttcagagtgaagattcaaactgtatagaaatgtttctgcattcattccattcattctttactggagatgtatcttcttcttcctcttcaaggtatttctgtttttgttcagatttttcaagtagttcataatatatt

SEQ ID NO: 136923 - DNA, 382 bp, Glycine max
  unsure (1)..(382): unsure at all n locations
cgacacttctaatactcacgctcgtacgcacatcgttcgcgtgtatgatatccactccactaggtttgatgtagatgagagcttcaaccctataacgcaacgtggcggacaaaagtgggcagtaaacttgaatggtcgtcattgtcaatgcggaaggtattctgcgcttcactatccatgttcacacattatngcagcttgtggttacgtgagcatgaactactaccaatatatagatgttgtttatacaaacgagcacatcttaaaagcttattccgcacaatggtggcctcttgggaatgaagcggctattcctccttctgatgacgcatggacacttatccctgacccaactacaattcgtgcgataggtcgcccaaat

SEQ ID NO: 136924 - DNA, 464 bp, Glycine max
  unsure (1)..(464): unsure at all n locations
agcttcaagagatcatccccttaacaacatcattggtgatatctcanaaggggtaacaactagacattctctaaaagatntatgcaataatatggcttttgtgtctatgattgaacctaaaaatttaaatgaaaccataatagatgatcattggatagttgctatgcaagaataactaaatcaatttgagagaaacaatgtgtgggaactagtagagaaacctgaaaactaccccatcataggaacaaaatgggtatttaggaataagttagatgaacatggcataatcattaggaataaggcaaggttagttgcaaaaggatataatcaagaagagggaatagattacgaagaaatatatgctccaattgcaagattagaagccattagaatgcttttagcttatgcatccataatgaattntaagctntatcaaatggatgttaaaagtgcttttctaaatg

SEQ ID NO: 136925 - DNA, 361 bp, Glycine max
  unsure (1)..(361): unsure at all n locations
gctagtcaatctggatcttngaattggttngccactgngttttagggaattgtgtcaaacaaacaattttttatttcaggaaataattagaggtagggcaggaagttttacttttttattatgtgtggttgaatgaaataaaaaatctttgatttgttttgtgctgaatttgatgagtttggttttctattttttaaaacattttcttgcatttcttaattgtcaaaaatcatttaacacattttaaacaagtcaaacaattatattttaaaaaatcttaacggtcaaaaaattaatcgcaacaaaatgcaataaaagtttaaggattaagattaattaaattcttggttaagaattaaaa

SEQ ID NO: 136926 - DNA, 470 bp, Glycine max
  unsure (1)..(470): unsure at all n locations
tgcagcttctccttctttcttataaatatttattgagtgaagaanaaaaatgttcaaccctcctggtatctgaggttcacttaaaattagtgagaaaaaatttttcagtgaagaaaatccaagccgaggcgcttctgtaacgcttccgtgatgtttctgtgggtgatttcgcgaagattttcaaccgttcttcgacgttgttcgttcattcttcgttcattcttcgctcttcaaccggtaagttcccgaaatcgaacttttgaattcattctatgtacgcttagtggtcctcgattgtttcatgtgctntatttttatttcatttacttttcgtacccccttttgacgtgctttagccatntatttaagtcattntctcacctaatcaaaaataaaataaatttccactgatcatntgtattataacatccttttaattctggtagaatgaattccgaccgttcggtcgt

SEQ ID NO: 136927 - DNA, 356 bp, Glycine max
  unsure (1)..(356): unsure at all n locations
gaactgatattgcaacgttccaaaatatttttaaatgatgtaatctattacaatattttggtaatcgattaccagtgtatctgaacgttgaaattcaaattcaattgtgaagagtcacatcttttcataaaatgcattgtgtaatcgattacatgattatggtaatcgattaccagtgacaagttttgaataaaaggtcaagagatgtaactcttccaatggttttctcaagattntctcaaggttataactcttccaatggttttcttgactagacatgaagagtctataaaagcaagaccttgacttgcattcatataacttttagaacttatttgaacaacttttgagcaatc

SEQ ID NO: 136928 - DNA, 465 bp, Glycine max
  unsure (1)..(465): unsure at all n locations
agcttcacattaattntctaagatggatgtttgtgaacaagggaatgcacctgaacaagtttgggaagtcatgtagtagctataattntggatataattaaactatcctgcaattatttcccatcctcatactcgtagtggaccactatgaccaaattattcatcccaagttaaagatagacttcttttcttccaaatccctagtatttctctcctcctataccttccctcacaccaagagtagacgtaatcaaacttcttaaactaacctccacatttatactatacgttacttcaattgtcacttctgcaaatttagtatttggacatatactatatcatactcatccaaaattcttattattggctttgcttctctttcctatgctctaaagaaaagaaaagctattattgcaaaggtaaatgagacatagtaggagcttccttgcaaatgttcaatccatg

SEQ ID NO: 136929 - DNA, 307 bp, Glycine max
aagggcaaaaaataaataggtgccataagtgttgttagaataataaattgaggctaaaaaacaaataagccttggttgaataagtagaagtttttctaggaaaaatgctatcttataaccctaatttttgaaatcccagaaaaaccataatttctttcgttaagccaagccacattacaagcacataaaagtccttagtgattcaccaagtgtaagcaggataactctaactgagatgaagtgcaaaattgggaacattaattgcaagtcatagaaattttaaacactaatccaagacacttgtgcg

SEQ ID NO: 136930 - DNA, 452 bp, Glycine max
  unsure (1)..(452): unsure at all n locations
agcttgtgactctgggcaatttctttatttctagtcacttaaaaagttgtgacttttgaaaaaatcttcagaaacaagtcacttgaagaattgtgacttttggaaatgtatttttcgaaatcagtcactggtaatcaattaccattaagtgtaatcgattacacatcaaaagatgtgactcttcattttgaattttgaaaattaaaacgtttagaagctctggtaatcgattactatcttctggtaatcgattaccagagagtaaaactctttagtaatgattttgtgaaaacttcttgtgctactcaatatnttggaaaactttttttagtacttatcttgattgagtcttctcttgattcttgaatcttgatcttgattcttgaaaacttgattcttgaatctttgngaattgcttaactcttcattctttggcatcatcaaaataacct

SEQ ID NO: 136931 - DNA, 355 bp, Glycine max
tcacgcttcggaagatagtgatgatgtgcaagcgctaaatgcttttcttgttagagcccgggtagtcaaagagaagttcaagtccatagccatcaaagtctgaagagagtatgatgaactaagggacgttaatatggccaccgatgaatccttggaatgagaaaccaagaatgcccgataggaagaacacgaccaaaacaagttttgaggggctttatatggcagcaatagtgagctcaaactctgaagaggtgaaaggaatcatcatgggtcaaaggcatgatctggaaggacgagctaaaggcttgccttatgtcgaaaagaaatttgtcccaacagttaaagtgagactgaa

SEQ ID NO: 136932 - DNA, 466 bp, Glycine max
  unsure (1)..(466): unsure at all n locations
agcttgacaaagacatataaattatctaatctatattgttatcgatgcaaggattgtactgaacattgagtcgcagtgtaatttgtctttgtgtaagtgaactctaagtacaagtatccctagtgttgcaacctgcgtcgcgacgagacgaaaaaaactcaaaacgataaagttttgaattgttaagaagtcgtcaccaatattttttactaggaaaacattgggaaacctttttatatgaagaatagtcttcgaaaaccagatttgggttcgggaatccattacgcgcaagagaggtgttagcaccctatgacgtccatatttttttaaaaatggtgacctttaattaattaaacaaataacttttaaaatatttatttgttaaccgattaacaaatgtaccaatnttatcacaagtagtaaagattaaaatggaagttcatatgtcgaatccacagggactatg

SEQ ID NO: 136933 - DNA, 354 bp, Glycine max
  unsure (1)..(354): unsure at all n locations
gtagacaccaagttgaaaacaaaagtagtttagaaatctcaattcanaattgtcaagtagcttattattattccaataactttgtgtgcggaacaataaaaataatactcataaacatattaaaaagcatttaacaatgaggaaaaaaatgtcatataccaaaaaagaaataaagccacaagataataaaaataaaatagtatttattttctaaatctacctccttattacctaattagctcaatcttgcaaatttgaaaatgcacaattgaccaaaaaataacttgattcaatttgaagaccccgtatctcccaactgaaagtggttacggacagatggatccaaaaaagaaa

SEQ ID NO: 136934 - DNA, 469 bp, Glycine max
agcttctacttatgtggcagggcgggctttcttctccttcttgtctccaacgcgaactttgaccattgttcttccttcccgcgatgcttcttttcatgtccgcctgagtgggcttatagcctaaaccatacttcccacgatttccttgggtatttatcaggctagttatgccgccgttgttttttcctaaacccatcccgggttcataaacgttccccaacataactcgggccatcattatcgctgcatcggacagacaaggctgcccaaagagggagtccacggaggaaatgctgaccacctcaaaagactggaaagcagtttctaacgattcttctgcggcttccacataaggcatggaggatgggcagcttaccaagatatcttcctcgcctgacacgatgaccaagtgcccctccactacgaatttcagctttgggtggagtgtagaaggcacaactcccactga

SEQ ID NO: 136935 - DNA, 351 bp, Glycine max
  unsure (1)..(351): unsure at all n locations
gtgnnaattgaattaaaatgttcaataactactggtattcgattaccatccaagtgtaatcgattacacattgtaaaatttgaattcaaatttctaatgactgttgtaaatattttcagctgttggtaatcgattacatgaggattgtaatcgattacatgctttcaaaagtattcaaaatcattttaaaagcatttcatgaagtgttttggccactggtaatcgattacatcatctggtaatcgattaccagagagtaaatctcttgtaaaaacattttagcttaaattcattggccaaacctcttgttgtttcaacttggaattcccttcctaagtctctagagattat

SEQ ID NO: 136936 - DNA, 472 bp, Glycine max
  unsure (1)..(472): unsure at all n locations
agcttttctttcacaatcagtctatctattgtctatcaattctactgtaagttcatacaattgttctttctttgttcaacatgcatattcgttcaaattcatgaaaggaaacacatatctcaaaataaataaactatttcactgccataccaacaaaagttaagttaaactgttccagatgcttcaggatgagcaactacactactcatgcacaaaactaataaaaagtaaataatgtactaacaccataattatactaataaatcaaaaagcacaaaaaatcaataggaatttaaaagtcctgtgattggttatgtgtgtcctgtgtctgaacttcctcctcttctgaaaagtataggagtagctacaggaacaataaaagaataaaaaataaagaaaagacaaataanaaacgagctaacttcccaaataanaagaagttccccggcaacagcgccaaaaacttgttcgc

SEQ ID NO: 136937 - DNA, 309 bp, Glycine max
tgtttctctcagtccaaattcatgacagatttttcattttactaaaggtcattaaatttattttatttgtaacttttgctaggaaaatccaatttgggtgaaatttaaggctaactctatgttttaacatgcaaagaactcattttttcatcaaaagctcaagcaaaatatctcatctcacatattctggacatgaaaacaagctcaaaaatttcaaagccacaatatgttcaaggaagttcaacaaaaagcatatggttcaagagttatagagacccctgtcatacccttattttgtccattgaccat

SEQ ID NO: 136938 - DNA, 426 bp, Glycine max
  unsure (1)..(426): unsure at all n locations
agcttaagtttccctacacacgtatatgatataaaagaataggttgcactcgaatagcacaagtaagggaatcccctttatgaaacatttaccttggattagatctttggatttcaaagcttcgacaccgtcaagggtaaagactcttcccgtggccttcagatgtccagtttggttattcatgcctttatcaggacaatttgaggagatgtgccttgacttaccacatttgtaacaagtgatctgagtggggaaagtattggngtttgctccactaccccccgcataccccatagcaacagtcctctgattggtagggcagttaccatatntcttatgaggggtcaagtacggttttcccaatgttagcgccatctttttgttcctatttacactgtcgcacctacccttcacgagaggcaatgc

SEQ ID NO: 136939 - DNA, 344 bp, Glycine max
  unsure (1)..(344): unsure at all n locations
ngaacctccggttgtgcaatgctagtgaattattattgtacactngaacttgaatagtcttcaagggtcactctccttggctgctcatccatgatagtgtctcctctaactcctgtatgagattgcccatgagtaggaaaactagaagatgccttagaagatcgaggttcttctcctggagttgttgctgcttctaagtcctgcaaaaattttctaattctctatgcgtttcgattcctgcaagtagcgttaatctccaaatctatgggaattaaatcacctacagcatatctcctttgcatacaaaacaagcagagcaacaattatcccattcaaagaacaat

SEQ ID NO: 136940 - DNA, 462 bp, Glycine max
  unsure (1)..(462): unsure at all n locations
agcttctaanaggagatcaacttgatgttctatgcttcttgaaggtggcagtccatgaggaatctccttgggaaagacatctttaaattcctgcaataagggttgaacactaggagaaacataaatagttaactaattagaattatcactctctctctctctcttgagtatcactccatctctcaagtgtatccctcttcctttttctattcctctgtggtgcctctctattgtctctctcttgttctctcttttctctccttctgatttggtcatcacacacttctctgagggatagaggtttatgaataattttctggtcatggtgctggaaagaaatcttgttggtgaagccatcatgcactgctttggtgtcctcttcaatgttggccttcactagtgcaatctccatctccttgtcctcaacaatcaaacttccctgagataacctctggagtttct

SEQ ID NO: 136941 - DNA, 338 bp, Glycine max
  unsure (1)..(338): unsure at all n locations
tcaatttgtaacctcaaatcatccactaccattgtttctcttgagacagaagacgaattagaaagttggttntcttcttcaacccattgaaataaccttcctgggttcctccttgttcttgcagttcgaatagctgcacgtcttccatggtggcattgccgaatgaaactaccagaaaatgcacaacaactgccacttgcagacatggagaaatcaagtgaacaagcagcagcgactgagcctcagagtagaagaagaagacgcaactcaacgtgggaaaccagcaacttcgtaaaccctaatttatttggggaagaagaagaagcaaccttgcatga

SEQ ID NO: 136942 - DNA, 394 bp, Glycine max
  unsure (1)..(394): unsure at all n locations
agctntccctctatgaacaaatacccaatgctcttattaatccatcttgngcttatatcccacaactctcgtaaatgggagagaaatattcatctaaagcatacaagtccctaatgttgtcaaatcctaaaatttgagctcctatggagcaaaacaatgtgtgtctcctagagagggcatcagctaccacattagttattccctttctgtatttgataacatatggaaattgctctaggtactctacccattttgcatgccttttgtttaactcgcttggccctctaatgtacttaagtgattgatgatcactatggatgacgtattccttggaaacaaggtaatgttcccaagtttggagggctcttattaaggcataaagctctatatcata

SEQ ID NO: 136943 - DNA, 359 bp, Glycine max
  unsure (1)..(359): unsure at all n locations
gcttgaggacttggtctttgcgagtgaaaggatcgatgtgtgtatgaattttgcatatgnagtcatcctgcttggacgaatgacaaaactggggcagatgaggagggtgagaaaagaggagaaacccatgctgtgactgccattcctatacagccaagtttcccaccaacccaacaatgtcattactcatctaataacaaacctcctccttacccaccgaccagttatccacaatggccatccctatatcatccacatagcctgtgtaccgcacttccaatgacgaataccacctctagcacataccattgaacaccatcacaatggaattntgcagcacaaaacctgtatggttcacc

SEQ ID NO: 136944 - DNA, 358 bp, Glycine max
  unsure (1)..(358): unsure at all n locations
agcttatntatcgtaatggacgggaatattctattcatacgcaaccaaagactcggaaatgtgagtatgatgggtctttttggtatagaatttgcagtggtgattgataattaagagttntactcggtaaaatgttgagaagatatgttgccatttccaatgcatggtgccaaaaagatggagggagtgaagcatgagctaatagagttcgaatgatattattaatggaacggatttttcgttcggcttttccattttgggatgaagtgtgaggacaagatatacaacataaatttccattatcttcacaatgacttcgataaggaccattatcatattctctaccattatcacattg

SEQ ID NO: 136945 - DNA, 326 bp, Glycine max
  unsure (1)..(326): unsure at all n locations
gcaggtttttttctcttgtcttngccacggaaagacctctcttgcttcataattacatctattatatctaattccaactgcagatttaaaatatcatttgtgtgttgtgatagatgagtttcatgcttgacccccattcttggaactgcctgagcttcaataaatggttctttggtagaaacctgaaaacattaacggaaaaaaataaatattatttcgcatgacacagaactatcatacataataaggggtaaagaaacaataaatgtgaagataaagaccataatgtgtatgatataaggtccatctccaaaagaattcacatg

SEQ ID NO: 136946 - DNA, 469 bp, Glycine max
  unsure (1)..(469): unsure at all n locations
agctngagatgaggaagtgttgaagggtgtttatctttctgcttttatagtagaccacagagtggtacctggagatatgtcgcgggggtcaggagaccttggggacgtcaggtggggtgctattgcccaaaaccaagcttgaccaatcccgacccaacccgggcatagtcggtcagtgagaacctgtgatgtacctaagcaggcgagctcctggcagtcaacagataaaaggaaaacaagaccacaaagcaaggaggcttgtggtggctggccagctgtgaaatttgtgtaatatgtggattgtggcctctggtaatcgattaccaagggtgagtaatcgattacaaggcttaaaattgaggacaggaggctaagatggtctctggtaatcgattaccaaggggtgtaatcgattaccaggcttgaaaacgaagtcacgatacttagggagcctctggtaatcgattac

SEQ ID NO: 136947 - DNA, 352 bp, Glycine max
  unsure (1)..(352): unsure at all n locations
tgccaacccatggaagctcctaatatctcccacactntttggggtggtccattcttggatggccttgattttctcatggtccacttggaccccatttctaccaactacaaaccctaagaaaactatattatctacacaaaaagtacacttctctatatttgcatagagggtgtttttcctaaggactgaaacaacttgcctgagatgtcctaagtgatcatctatgctcctactgtacacgaaaatatcatcaaaataaacaactacaaatctacctatgaaatcccttaagacatgatgcataagcctcataaaggtgcttggtgcattattgagcccaaaaggcatcact

SEQ ID NO: 136948 - DNA, 384 bp, Glycine max
  unsure (1)..(384): unsure at all n locations
agcttgcactagatatgagtgctaaggacgttttcatgagcaaagcaatgctgaggatcgcgcctgttgttactactcacttgatgcgctgtngaatctaatttgccatacctgtggccgatcatataagagtatggatgcgattccgacatgatgagccgacacgctcgatcgaatcgacgcacgcgcatgagattggtgcatgatgagtgcatacatcgaccacactgtgctagcgcttgcatcatcattgactaggcatagtctcctgatgactgatcgactgcgtgcgagataattgcacgcattactaatgacatccttatgaatctagtacaagcgaatactgtcaccactcgtataccagattgtcatcacacagat

SEQ ID NO: 136949 - DNA, 452 bp, Glycine max
  unsure (1)..(452): unsure at all n locations
agcttgtcgtacaccgagagcttnctagtccatcactttngnnaccgagacccaagagtccggtggcatgcggagacacccaatggttatccacacacacaccttttgttgacgtgactcaagagtccaatggcatgcgaaaacacccgatggttatctgcacacacaacatctattgatcctgatccatacgccaggttgcaggaggatatacccaagtgattatccgtacaaagacaacatctgctgatcctgacccaggcgtcaggtggcaggtggaaataccccgagtggttatccgtaaaaacacaacatctgttaatattgacccatgcgtcaagtggcaggcaaaaataccccaagtggttatccatataaacacaacatctgttaatcctgacccatgcatcaggtggccggtggatatacccaagggttatccgcacacacac

SEQ ID NO: 136950 - DNA, 328 bp, Glycine max
  unsure (1)..(328): unsure at all n locations
atgtctgtctattgccttacctcacatttatttaggattattcattganaaacataaataagtacatgggctttagagtaaatcattttgccctaaagaggtatgtggttcaaccagaacattatatcatcaccagaaacagttcatttctgaaatggttacccatatccagggcatatctgttgtgattggaaccacaatgagacagtttttatttgggagagacaacttaactgtttaaataaaaaataagcacacaaagaatagccaagtttaaaagaaataaaaaaaagttttgtgggggaccatgcccatcttctcatgctac

SEQ ID NO: 136951 - DNA, 469 bp, Glycine max
agcttcaagataaagatggcctcagcaaattctttatttccagaagggaattctatcaatagacctccaatctttaatggagagggttaccactactggaaaacccgaatgcaaatttttatcgaggcaatagatctaaatatctgggaagccatagaaatagggccttatatacccaccacagtagaaagagtttcaatagatggtagttcatcaagtgaaagcataaccatagaaaaacctagagatagatggtctgaagaggatagaaaacgagtacaatacaacttaaaaaccaaaaacataataacatctgccctaggaatggatgaatatttcagggtttcaaattgtaagagtgctaaggaaatgtgggacactcttcgattaacacatgaaggaactacagatgttaaaagatctaggataaatgcactaactcatgagtatgaaaatattagaatgaatg

SEQ ID NO: 136952 - DNA, 312 bp, Glycine max
  unsure (1)..(312): unsure at all n locations
ttaccaccaaaagagtgcctgggaaataagctacngtggaagcttcaatgaaggaagagaatgagagagatagagtgatgcaatcctaccccctaagggcattggatagaaaactccaagaagattgggccagaaatgcaagaaaaggccctacggttctcatgaaccttaatgtagatttcaagcccatgacatgggctaagtatgaactcacttatcttggtatatgagattaaagtttcattattatttgcccttgtatgtaagggctcataatatatgtaggggaccgtggaaatgtaagatttttca

SEQ ID NO: 136953 - DNA, 309 bp, Glycine max
  unsure (1)..(309): unsure at all n locations
cggatccttaagcacctgcggctgcagctttgtagggaattatgtgagtctctatgtatatactctntactatctatntaatgttgttttgatgtgttcactgtttctatctgcatttaattactgcatgcttgtggactgatcacccatgtgtgtgtaaagttaggatttttaacattgggaaatgttttgaatccttagaattggatagagcaaggctagatcactgtatgtctggacatgagatcgttaaaggtccaatgccttaatgcttctctcctttcaaaanaacaagaaatcattcaaaaa

SEQ ID NO: 136954 - DNA, 351 bp, Glycine max
tgtctgctacatatctgataccaaacaccgtccttatctcatatcataacaccaaccagggaaagaattttccagataataagcctgtataactcaccccaattccaatgtcatatgctgacttactcccctatctgctcgataatgcaatggcagtcataagcccacaaaaactccttaacctctatttcccagacgatacaaccccaacgtgacatgtgcttatcatgggggagttccggggcattccattgaccattgtatgaccctgcaacataaggtgcaaagtctaattgatgcaggctggctaaaatttgaggaggaaaatcgctcatgaattctaatgttgtc

SEQ ID NO: 136955 - DNA, 470 bp, Glycine max
  unsure (1)..(470): unsure at all n locations
agctngcatgtcatgtactacacatgacatgatcctctatggctaaattattggagttccttttttaaatgttatgaaaaagaaattgcagtgattgaaggagccgatagcaaagccaataaaaaatgactgattaggcaataggcatgaagctcaagtccacatcaaagggtttatggggagtgtgactactcccaaaacgcttgcaatgaatgaaatagttaggggggaaatattcttgttcacgtgtaacaaaagtggttgctgcaagctcataattttgtatgcataagtataacttgttggccctctcgcttgtggtaaatcacaccctgctntgattggtaatcttgttaattnntactaattttgctatacctcttcttggtttcactgtacaagataactccaatgatagtgagtgcatagccaagcattcctatcattgaaatggggtttntgaatatcaa

SEQ ID NO: 136956 - DNA, 350 bp, Glycine max
  unsure (1)..(350): unsure at all n locations
tgtagggttaaagtctaacgattgtcacgtgctcattctacaattgttagctgtggctatacgagacatcttgccaaacaaagtcatgttagccataactcgcctgtgctttctcttccatgctatatgtagcaaagtcattgatcctgtcaattntgatgagttggaaaatgaggccgcaattatactgtgccagttggagatgtatttcccccctgctttctttgacatcatgattcacttgattgtgcatctagttagagaaatcaaatgttgtggtcctgtttatctacagtggatgtacccggttgagcgatacatgaagatcttaaaagggtatacaaagaatc

SEQ ID NO: 136957 - DNA, 470 bp, Glycine max
  unsure (1)..(470): unsure at all n locations
agcttgcattaggaattgcgaaagcccttctccatcattaggatttgtgcctgccatctcaaacaaacaaatcaaacgtaacaagacaattatagttgttgtttgaatacctcacccactcaagtgtatcacacaattatggcttttctctaatgaaacactcttgccttttaccactctaattccccttgagttcttatgaaattcaagagattatggccacaacaaagaacaattcaccaatatgtgtaaggtaaggctagagagacaaggaaaaggttaaccaagaaaaaggctaacaatgtttttaggcacaaatgaaggaaataaaattcagaatttaggaattcaagtaacaatccttcattcaacaaatatattaccttaaagagaatttttttttaagttcttcaagcatgaaccattcaagcccaatttattttttnntttaatttgcttatacgaaaata

SEQ ID NO: 136958 - DNA, 350 bp, Glycine max
tctatagggtccatgcagcgcggtgagttgtgactctctcactctgtttataccgactcgcgggaacactgaacggtgactcactcttcgtttttctctccgtccctcgcatggagtgtaacactatttatagcgtcttgtgttaccttttatgatggtgtggaccctgcatgtgaatcaccgactcttgcagccgtttgattgtagggggaataaatcgagggtagagattgttcacaggtaaattttattttcttggcatgatttttatatgtaaagaaatattattttataccaaatacagtagataggggtgttcgaattgatttttagaaaaaaataatcatctg

SEQ ID NO: 136959 - DNA, 389 bp, Glycine max
ctgcagctgtgcctccacgagagactgtttgtttttgccaatgaagaacacaaatcacgggagggagaacactgctgggaagaacaacaatgaagaagaaggagcgtggaagggagggagactgctaggtgcacagaagagtaagaagcgcggaagaagaaacgttttttttttttaaatttattaacttttgatttttaaacgaagggcaattttggaagttcattgaattgctgggtgcacctagcaacagccaaaaacctattatcttactgttcaaatcgtgtaagagatctcactatcgccctggagggccacgacggcgtattcacaatataggttgggtcgtgttccgcgcgtgtctaagttcatatccaaacaaacaaaac

SEQ ID NO: 136960 - DNA, 307 bp, Glycine max
  unsure (1)..(307): unsure at all n locations
actggatgcattggttaacttggtaaccctgnctgttcttgaatcaaaaatctatacccggtgcaagggtttgtggtctgtgctcctctgctgaccaccatacagaccttttgcctttcatgcagcaacctggaacaattgagcagcctgaagcttatgctgcaaatatttacaatagaccccctcaaccctctttgcaaaatcaaccacagcagaacaattatgacctctccaacaacagatacaaccctggatagatgaatcaccctaacctcatatggtccatccctcatcaacaacaacagca

SEQ ID NO: 136961 - DNA, 458 bp, Glycine max
  unsure (1)..(458): unsure at all n locations
agcttgtagagtgtagactcatttcttatcatgaaacatgaacaaaatgaattacaatgatgattatttttggagcttcatcacaaatttcactaaattgttagatttgtaatatcccacgagatttgtagtatcaccatattgcaaaaaacaaggcagctataatagtgtaataaacttcagagatttgtgttgactacatttgtagatgagaccataattgtttgatattgttcaaactttaattagagcaaatgctaaaaacttaatgactgcattacaaagcctccttaatgaacatagatagaaaagcaagttccaaaatgaaaatggggtaaacaaaatgaaaacaagccagatataacattgtaataaacttcagagatttgtctngactacatntatagatgaggtcataattgttggatattgttcagactttaattacaacanatgct

SEQ ID NO: 136962 - DNA, 343 bp, Glycine max
  unsure (1)..(343): unsure at all n locations
ngaactacccgagcactcgtgcattcatccaatgttttattgttcccttctaaagccctttattggaccactagacactgtgcagattgagaaactgccaccaatggcggttgataatcatccagttcccatacccttggctattctgggccacaagactctcccgactaaccactggccatagcatctggtcttagtgcagtggcagggacttcaccctgacgaaacgtcgtgggaagactggtcacgctttatgagctntatcaccttgaggacaatgtgttgtttgaagcacgcgggaatgttacaagtagcagctatgaaccgcatgcaaccatgccca

SEQ ID NO: 136963 - DNA, 460 bp, Glycine max
  unsure (1)..(460): unsure at all n locations
agcttgtagaattcaccccaattccagtgtcctatgctaacttgctcccatatctactcgataattcaatggtagccataaccccaaccaaggttcctcaacctccatattttcgaggatacaactcgaacacaacatgtgcttatcatggaggaggcccagggcattccattgagcattgtaggaccctgaaacataaggtgcaaggtctaattgatgcgggttggctgaaatttgaggagaatcacttgtgaattctgacattggcaggcgacaccatacatagggcaatttgaaggttgttgttagatgtctctaatgactcattaggattttcaagtttatgccattattgtaaacaacagttgcaatgctaataatatnggataaattgacatccttgtctctcatcctctcacaattacatctttgcttattngacttctgctggaatgtgagt

SEQ ID NO: 136964 - DNA, 343 bp, Glycine max
  unsure (1)..(343): unsure at all n locations
gggttntgggcaatagcaccccacctgactttctctttgtctcctgacccccgcgacatatctccaggtaccactctgtggtcaacaataaaaaaaggaagtctcacccttccacacttcctcatttcaagcttgtaggattatggggtatccatcacatgtggtactaggtggcggtccggcgatggttcaaaacgattctccacatccacaaatcacgtataacccaccatcccctgtttcccacctccaactgagctcacgtactcccacgtagcccttatcattgttcctctcaacgccgggtccccatcaatcctcccaagcttccacaacatccaag

SEQ ID NO: 136965 - DNA, 468 bp, Glycine max
  unsure (1)..(468): unsure at all n locations
agcttcaacctagaggagacggaccatnctatgtgtttataagatcaacgacaatgcctacaagattgacttgcctagtgagtataatgtaagtgccactttcaatgtgtctgatctatctctttttgatgcagatggaggagccttggatttgaggacaaatccttttcaagaaggagggagtgatgaggacataaccaagggcaaggaccatgaagcacttgaatgtcccatgaccagaggcagacttaaacaagcccaacacgtcatagagacaaggctggtcatatgtatatctgccattgatgatgattgaacgcccacatgcagaggcactaccatgactactaattgttgttgaatgcccaaactcacttgaaggcccaagttaaataagtgtttacttataattgatcattattgttacatatgcccatactgttcagaaagtccatattgtattttatc

SEQ ID NO: 136966 - DNA, 286 bp, Glycine max
ctcgagagcttccgttgttcaatttcgagcgtctagatgagttatgtccctgaatcggacatctgtgtgaaacgttatgaccattcgattttctcgagagcttccgtcgttcaatttcgatcgtcgtgatatattatgttcccgaatcggacatccgtgtgaaaacttatgaccattcaaatttcttcgagagcttgcgttggtcaatttcgagcgtctatatgagttatgtccccgaatcgaacattcgtgtgataagttatgaccactcaaatttctcgagagc

SEQ ID NO: 136967 - DNA, 465 bp, Glycine max
  unsure (1)..(465): unsure at all n locations
agcttatattcacagagggtcctaganttgatgccttagtctcttttcctggggtgggaaatatatatcgattgtaattgcttgtaagaattctcgatgcatagtggaaatctaattcatgttgtggattagataactggattagcatctttataaatagagagtgaaccagtataaaagattgtatcattttctcttattcatgcctttcagtcattcaaggtttaatcaactcattcaagttttatcaaggttttaaagattcaagttttatgattgtgaaagaaaggaagttaatgaaggatcatgtgtaaggaagggttcatgaccttgtagcagggaacctattgggtgagaacttctaatctgtctctaggtttgcttcaggttcatgcacggtgcccctcattgccccaatgtaaggttttgaggtaccaatcgttgtcttggtttcacaacctcgta

SEQ ID NO: 136968 - DNA, 360 bp, Glycine max
tctccttcgaccactacattatcaatggttgtgaatggtgacaacacctatgttgcctatcatggaaatcaacaactgggacaagcattcaccatgcttgaaaatgcctgtcgtgggagtcgctaaagaagggaacccaatgaatggggagaatatcctgcatcatgagctcgatgatcatgctatgatagtggccatgcaaaaagagatgaacatgctcaagtgaaacaacgcacaagaaatggagaacctctaaaggaaaatgccacccttaatgaccagtacctgaagcttcacgaagaccatattgcaaccaggactgaggaggctaacacgacatggagagaaagaactccctct

SEQ ID NO: 136969 - DNA, 484 bp, Glycine max
  unsure (1)..(484): unsure at all n locations
ttaagtcacctgccgcatgcaagctnttaactgaatgtgcaacgttccaattgatttttaaatggtgtaatcgattacaatatattggtaatcgattaccagtgtatctgaatgttgaaattcaaattcaattgtgaagagtcatatcttttcataaaatgctntgcataatcaattactaatggaaatgattactagtgacaaattttgaataaatagtcaagagatgtaactcttccaatggttttcagagacaatcaagtccgatgtcatgcgtagacaaaacatggtcatccacacccttnttgttatcaacagacaaccaagttcgatggcacgcggagacaaaacatggtcatccgcaccctttttgctatccagagacaatcaagtccgatggcacgtgaagacaaaacatggtcatccaaaccttcgttgccatccagagacaatcaagtctgatggcacgtggagacaaaacatg

SEQ ID NO: 136970 - DNA, 367 bp, Glycine max
  unsure (1)..(367): unsure at all n locations
tactctagcttgacatgttcatgtgcatgtgcatgtgctgctactggttgatgcacttgattntgtgagaggtatgctcacctctacttttttaaggtctccaagatctccttttccgcttcttccatttttttgtttagaattgctataggtgggaatagaagagggataggaggctgcggtaagtcataattactagaagaaggtccacctgcatgaaaatttttgttaggaagctntctcttttgtgcaactatctcatcttctttttcaggtgtagaatgaagcttgacaggttcatgtgcaagtgcatgtgctgctactggtggaggcacttgaatttggttgccataccttaatgtgatgg

SEQ ID NO: 136971 - DNA, 490 bp, Glycine max
  unsure (1)..(490): unsure at all n locations
gaccttaagtcacctgcggcatgcaagcttcatggtgaatcaaaagtgattcaatgatgttntgatgataacaatgatgataacaaaagatgatgacaaaggtgatgacaaaaagctcaaaggtcaatcaaaggatgagttcaagatgttcaagaaggaatcaagaacaattcaagactcaagaggaaagattgaaggacacttcaagattcaagaggaaagttgaattcaagaatcaagattcaaggatcaagcttcaagaatcaagatcaatattcaagattcaaggttcaagaactcaagagaagacttaatcaagataagtatgaaaaggatttttcaaaaactgagtagcaaatggattttttacaaaacatgtttaccaaagagtttttactctctggtaatcgattaccagtagcaaaatgttnttganaaagttntcaaattgaatttgcaacattccaattaatttcataaagctgtaatc

SEQ ID NO: 136972 - DNA, 367 bp, Glycine max
acacttacatactaccttcaaacttttacagaatgaacttgaaccactttgtatacattggcctcagatatcttaagaatggggggttgaattaagatattccaaactgtttcccctaattaaaaatctatttcactttgtactcaagttatgaattcccttaatgacaatcttcttaaatattaattcaaatgaaacaatgtgaatatgaatataaagcaataataaataaaggagattaagggaagagaaaatgcaaactcagttttatactggtttggccacacccttgtgcctacgtccattccccaagcaacccgcttgagagttccactatcttgtaaattccttttacaagttctaaaca

SEQ ID NO: 136973 - DNA, 478 bp, Glycine max
ggatccttagagcacctgcggctgcagcttctcctattttctataaatatgtttgaagtgaagaagaaaagggttcagcctcttaggcacttctctctctctcgaaattgctgaggaaaattatttccgtgaagaaaatccaagccgaggcgcttccgtaacgtttccgtgagtaattacacgaagattctcgaccgttcttcaaagattcatcgttcgttcttctttttcttcagtcttcaacgggtaagtacctcaaaccgagctttccaattcaatctatgtactcgtggtggtccactttttgtttcatgtatttttattctcgttttcatttgctttttatacccacttttgacgtccttaagccatttatttaagtcatttctcgcttaatctaaaaataaaataaatttccaccgatcgtttgaattgcatcatccgttaatttcgattcaaatgaattccgaccgttcgg

SEQ ID NO: 136974 - DNA, 360 bp, Glycine max
tctatctatgctaaattatgctaaactttcgtaagcttctagatctgagtcttttctttctagagggatctgcggacaaaactcagtttaagttagtctaaacataagagggctgtctcaattgggcttattccaacaagagggatatgaggatgaagcttggattgattcggtttgacaaggaattgaggtttactaatttaggctacaacatataacacaagagcatgattgattagagaaatatatttatatgcatcagcttgtttgtgagaaagacccaacatttctacctactgctgtcacttttacttatttttcattttatagatttagcataaaagtttagtttaaattctg

SEQ ID NO: 136975 - DNA, 469 bp, Glycine max
  unsure (1)..(469): unsure at all n locations
agcttgccactagagctgacccattaacttctctaactcctttagactagtggtcccaggctcttgaccttgacttgatagaacctccttttaagtgaaggcatttgacttgatcccatgttttactaaagtgaacaaaaatctgtgcgaattaaaactccgacatctatcatgggtggaatggatgaatgcatgaagaaatgcatatagcacagatgcaatttatgaatacaggaaaccgagaaattttctccttagatacaacgtcttggggtagcaaagtgcctgacgtatgaatttaataaggtggcacggaccctcaaagagaggggatcaaaacagaatccgtgcgtgatgcatatgcgaaaggcgcaacacgggaatgtacagtatgacaatattcacaaaatataagcaaaagggtacatgacacttatgcatggcagntgtgaaaaatggcacgcagcgt

SEQ ID NO: 136976 - DNA, 340 bp, Glycine max
actttccccctaagactctcttggttttacaaatctcattcatgacaccagttgctagccaagggccattcaaatttttccctatggtagtcaaataatcctagaaagaagaaccaaggtttgggttatgcaacacgtacactactgaacaatactaactcacattgcacttctttattgcaaaagctatacattggggagttgagtcaaccaaagaaaacgagagatcataccttgaagtcaagatcccaatacctcccttgtgacctcgagcttcatacagaaattactcattcaaaatagttttcaatcttaataagatgttttttccatctactga

SEQ ID NO: 136977 - DNA, 459 bp, Glycine max
  unsure (1)..(459): unsure at all n locations
agcttaacatatcaaatggaacaattanatgatgtaataaaattaagtgcaaaattgtaattagattcatttaaataaatggattaaacttcactgggtcaaaacttaaattttaagtactcaatttcactatttagagccaccgacacaagtgcccaagtagacgtttctataataatggttcctatccgcatgattattggcttggaacgttctgaactggccactcaagtctaccattattaaagcatatagagtgcatcaagattttaatcaccatcaccttatactctctccaagagtgctattggttaaatgtgatgttagaaggggacttgccaattacggcgttggaggagtgatgctataatggcatagtattgagagaagcaatttcctaagacatctgtccttaatatcatctgcaatgacccaccaaaaatatagttcttgtctaag

SEQ ID NO: 136978 - DNA, 351 bp, Glycine max
gtacaataaataaatatttccaaatatatcgattatatttaaaatttataatgaacaattcatatggtggaataagaaaaatattaaaattaaatttagaaataaaaaaatagattgaaagagacaagaggttaataataataaaaatcctaaaatggctctaattgataagaaaaacagtaaaatggttctcacggaaaaaaaaatcctaaaatgttaacgcttaagataattattataatctatgtagagagattattttgatagttcatataaaaaaaatactgcaattcttttaaattttgattattttgtatacgtatcaagttaatttatttgttattattcaca

SEQ ID NO: 136979 - DNA, 470 bp, Glycine max
agcttgcctcagagagatctaggaaggatttatcggctgaaggacccagttccgctcccgaatatgacagccaccgtcttaggagtgctgagcaccagcagtgcttcgaggccatcaagggatggtcatttctctgggagcgacgcgtccagctcagggacgatgagtataccgacttccaggaggagatagttcgccggcggtgggcatcactggttacccccatggccaagttcgacccagacatagtcctcgaattttatgctaatgcttggcctacagaggagggcgtgtgagatatgcgatcctgggtgaggggtcaatggatcccgttcgatacggatgctctcagccagttcctgggataccctttagtgctggaggagggccaggaatgcaagtatggccagaggaggaaccggtccgatgggtttgatgaggaggccatcgcctagttgctatgtataccg

SEQ ID NO: 136980 - DNA, 352 bp, Glycine max
  unsure (1)..(352): unsure at all n locations
gtaaaattaagcataaattcaaaaagattgggggagatagggatgagtgaacggnagaacaaaacttgtatgcattctcttgatttcaagattgtcatcatcaaaaagggggagattgtggaagcaatgtcttccaaggttattttgatgatgccaaagaatcaagagtcaagcaaaatccatagattcaagaatcaagtttcaagaatcaagatttaagattcaagaatcaagtttcaagaatcaagatcaagattcaagactcaagattcaagaatcaagagaagactcaatcaacataagtactaaaaaagtttttcaaaatattgagtagcacaaaaagttttcacaa

SEQ ID NO: 136981 - DNA, 309 bp, Glycine max
  unsure (1)..(309): unsure at all n locations
agccgactttaatcataccagcacngncgaggnaggcnctgtaagggataaagcaagcangacacccaactcaaacgccagccgcaagaggagggcaacacttagggcaacaaagagaatccacaggacccgaaagatcgatctcgaacaatgaaggtagaggcaaagaacaacgaccggaagagggaagaaaacaacaaggataacaacaacaacaacaacaacaatgaaagcgacaacaaaatcaagaaatcaagcgaaggcctgagcaagcccaaacgacaaatgaagagaacgatccaagcccga

SEQ ID NO: 136982 - DNA, 357 bp, Glycine max
  unsure (1)..(357): unsure at all n locations
tgacactccagtatactcaatcttcacatggagctacataaccatagatcttttttcctctttcactaccgccatgttngcttagattgatgtntagtcataataattgtcacattatgtactatgtatgtgttgaatatcgatttcgttgattgaattctagatacatttgttcatgtattcttgacattccttgcctatcttttgatattggagcctaattctgctgccaatgaacatcaagaagcaaatgactccattgatgaagaaaattctatgcctacaagctgctcattgagctacattaccattgaaccgctccctcaaacactaccgccatgttgtcttatagttatg

SEQ ID NO: 136983 - DNA, 337 bp, Glycine max
tgcttctacaatatcacaactttttgatgatgtctactttgaaaacaagaaacacacacacacgctcactctttttccttgtcgatcactcacataaatttccattctccccctttgtttttgagtttatgcttcacttgaaattaagttaattacttatgtgagttcttgatttaatcactaattctctccccctctggcatcaacaaaaagccaaagtgcgtgacaagtatgaaacatacatatactactaatcattcacaagacaatcatggaagaatataaaccaatcatgaagcaagaaatatgaatagatcaaatatatatataaaccaca

SEQ ID NO: 136984 - DNA, 450 bp, Glycine max
  unsure (1)..(450): unsure at all n locations
ccggatcttaagcaccgcggctgcagctgatcatggagggtgttttgatttattcacatgacaaggaaaggcctaaagctgctcatgttataaaagttcttcagcttgaagaatcattgccggtgcttccacttgatatgcatgatcgttctcctncttctttaattacgaatacgcatgcacggcccacttattattcttcgcaatcactacccttcactaacagccttggaagtgttggacgttaatttgccaagtcaacctttgaattcatctatgttggcactaagaacttgtgacttttatgtagaactcattccgctgtatgtgttcgattacttctgtgtcttaatagatatataaatggtttgaagattatttcctcttgaatagtgtttattttacattgttcagttttacactacgctacactctactctgataactcaa

SEQ ID NO: 136985 - DNA, 346 bp, Glycine max
  unsure (1)..(346): unsure at all n locations
tcatgacagtgactcaccctcttatgaagatgaaacatcctataggagacttgttggcagactnttatatttaactacaaccaggcctgacattgctttcattgttcatcaacttagtcaattcatctctcatccattacaagttcatcactcatcagcaattagagtcctcaaatatctcaaaagtgctcctgccaagggattgttctattcttcctcctccacactcaaactctctggttttgctgactcaaaatgggcaagttgccctgctactcgcagatcagtgactggttactgtgtctttcttggcacatctatgttgtcttggaaatccaaaaagcaa

SEQ ID NO: 136986 - DNA, 360 bp, Glycine max
  unsure (1)..(360): unsure at all n locations
agcttagataggaaagtgatcatctcaatataacgactgagagcatatgcaagtattgattagggaaatgtaagtggtgaccgagtttctactatcatttggctttgcttatagtatacttcacaactttctttatttcctatatctaaatttnttttctttaccttcaatcaataactagaaattgtatgtattggttcttcaatcaggtacgtagttcttgcaatttgaggggggcactgtgaaacggaactcgtgaggcgcttgaagatgaaagtggaagaactgaggacattatgtgtattattttaacttgtgggcttgatccaattattgttntcattataccatcgtcaaata

SEQ ID NO: 136987 - DNA, 347 bp, Glycine max
  unsure (1)..(347): unsure at all n locations
ttgaatactaagcttataagtgcgggtttaattttgaatgccatgtctctcctatatgcgatgatgactccncgataagatctgatttggtacggacatgtcctcctggtctccgactaagaaattggcgagtggaggagaacccatacgttgacacgacaagcataatgtgatcctttgtagctgtaaaactctactgttgggcctatgctgtaaagtttcctcttgttaaggcatcatgtatgttgttcttgaattcataatataaagatttttgttcatctggtcttgcacctctacccattctcattcatttgcatgtttatttctctacgcgtaaaatgcca

SEQ ID NO: 136988 - DNA, 103 bp, Glycine max
aaaaccgggggaagaagcaggggggggggtttttccaaaacaaaaaagggccgcgaaacacccccccccccgccaaagaacgatagagaacgaccggcgcaga

SEQ ID NO: 136989 - DNA, 486 bp, Glycine max
  unsure (1)..(486): unsure at all n locations
gatccttaagtcaccgcagctgcaagctggtacactttaattgtcgaatttgttacatagctgcaagaagttgttgtgctcaaagtctttggatgaagcaacaatgatgtaagctccattggagcttgtaggcctaggatcttcttcatcaatggattcctttgcttcttggaagatgaatggcagcggaatggagaaaggaagagagagaggagacgccacttcaaggagaagatgagtctagaagaagctcaccaccataggaggccatggataagagcttggaggaagaaggagatgaatgaagggagagggagagaagagcacgaaattttgtgctctaaatgagctttgagatctgaagtttaatattcaaatgatcaaagttgaaaaaaatgcacacacatgacctctatttatagcctaagtgtcacacaaaaatggagggaaattcanattcacttgaattgaaattgaattgtggag

SEQ ID NO: 136990 - DNA, 370 bp, Glycine max
gacacttcaatactcaagcttctagtttagatgatgcagatgggtttgtagctacttcatgcactcctctaatgactatggcatcatttctggcgctaaactgctgggagttggaggccatcttctcaattaaatttctggcttcagcaggagtcatgtctccaatggctccaccactggcagcatctatcatacttctctccatattactgagtccttcataaaaatgttggagaagaagctgttctgaaatctgatggtgagggcaactggcacatagtttcttaaatcgctcccagtactcatacaggctctctccactgagttgtctaatacctgagatatctttcctgatggctgtggtcctgga

SEQ ID NO: 136991 - DNA, 467 bp, Glycine max
agcttataggaataaagaacggctacttttttttctacatacacgaatgattagaaaaataaaatcactgaatagaccatctctctagggactgaagatgcctataggagtatatatagaacagtaacatctgacacatgactgtacatttcaagaagaaaagattaaactaaataaagttgagaagaaggaagataattcaaatgacgtaataataaatccccaggatacttgtagatgtaacaaggacattgacttatcaaaatgatatccttccaaatgaaagatatattctataaattagatattcgttttttcttgtaagattatgatattaagtctatatatagagattcttaagatgagaagaaatttcactaataattgagaagaattacctacgtgaattaggggtcgtcatcttaagtgagagaggagtcatgtggaggaaaagtttgtaagtttat

SEQ ID NO: 136992 - DNA, 285 bp, Glycine max
cggctgccaaccacagacttcttgtggaacattacctggcgcacccccaactgatacactcacacatcctctatggttggtcagtgagttaataccccatacgcacccgcgtattgatcaattcacaccacgtcacaaaatgtactagagaaagggttctgagcgcatgccccgtgttcgataagagcacccactctagggtcgctgtattgctgctttgagcaccccctaattgatatgttcacccaactatgtggtcgatcactgattaacactgttggacac

SEQ ID NO: 136993 - DNA, 465 bp, Glycine max
  unsure (1)..(465): unsure at all n locations
agcttgttntaataggggatgaagagattgttgatatagataagaagaaggggaagaaggagggtgaaatgtttgacaataaagataaaatgattttttaaaaaagtttaagttttgcaaggataagaggaatgataagggccaatagtaataccctgttattaaactctattattgctaaatggatgaaagcctgngtccaacaatccgtataacagacttttttttagaggatccgtatagcattgatacattttaagggcatatttccccatctgtaccagtacgatcttaactctccctctcgaaggttgtcaagacatttaaacgtatgtgtttataattaaaccaacaatatttatttttgttgattctcaacttagattatacttctttctctctttcttcgngctgggcatgtgtagaattacaatttgctgcatgccctacacatttcctaccacg

SEQ ID NO: 136994 - DNA, 269 bp, Glycine max
  unsure (1)..(269): unsure at all n locations
actaagcttcctgcacattctgtattatctggtcgaatntgcttatcctcttcgtctttaataaacacatcaaacttcacatgtgtgtttctctcaaactcaatcccttcaatcaccaaaacctcttcctcctcttccttctacttcctgctcctcgacttgtttggccttttaaccattgtgctcacaactgaatccaacactagtgggaacttcacattccttgaagtctcaacaacacgtgctgcaccaacaccaaaattttgtgc

SEQ ID NO: 136995 - DNA, 397 bp, Glycine max
  unsure (1)..(397): unsure at all n locations
agcttgcaaactaagtgctcacctttgtatattagaatccttcaggttgtttcatgtaaacctcttcctctagatgaccattaaggaatgtcattttcacatccatttgatgtaactcanagtcaaaatgagctactaatgtcataattactcggaaagaatctttcttagatacaagagaaaaagtctctgtgtaatcaattcctttggcaacaagtcttgccttatgtctctcaatgttgccttatgagtctttcttggttttaaaaacccatctacatccaatgactnttacaccactaggcaactgtacgagatcccaaacttggttaaacgccatagaatccatctcatctttcatggcattatgtcacaagtttgattctttagaactcat

SEQ ID NO: 136996 - DNA, 344 bp, Glycine max
  unsure (1)..(344): unsure at all n locations
ctttaatctcagcttggtcgtatttcgactcatagcttgttttttcttgcttgtaacctcagttgntgttttagttttgcatatacctatttgttgggtactagtgtttgaactgggacttggacattatgaagcggccttatccattggaatttcgtattggctcagtgtcatgttacttatagtttacacagtattatctgtcatgtcagaaaacttaggtagctttaggtagcaatgctttaagaagcatcaaagagtttttcttcttatccatcccatctgcacttatgatttggtaagtttctagttttgcccctgtatgattggagaaaatattacat

SEQ ID NO: 136997 - DNA, 361 bp, Glycine max
ctgcagctttctttgatgatgaatttgtgttagtatgtcttatgtgtatatatgttggctttgccttagcaacactctgtacttgcggccgcatgaataggccgtcgtgatgtatacaacataggaagcaagaccttgtagaagtaggaccgcggttgcctggtaaagagtaaagtgacgcgaagtcatctcaggtttgagttcaacctgattaaaggtcttgtcctccatctagtggggcttccttcttttgtgtggagcttctcctttgatatatatgaggagttgtgcttgaatttcccgtggttgaagctcttgcctaaccaatgtggggatagtttgcttgcctgcattgatcctc

SEQ ID NO: 136998 - DNA, 206 bp, Glycine max
  unsure (1)..(206): unsure at all n locations
ngtgcgcaacattaaatgagctggaattttatgccttggaaaggatagaggaagaaaaggctgatgctagtgccccagcatattgctttgcacccatcatttatgttatggaaaaaatacccccttgggattttttaaacaaatgtgcacgcccctgattctcttttttttcttacagaatgtcacccatcgcctcctatttcttt

SEQ ID NO: 136999 - DNA, 468 bp, Glycine max
agcttgcaagtgtaatcgaattacttgacttattcacgaaacacaaagaatatgttgcactagaatcaaaaggtacagtcaaaagagtattctttatgaaatatatctcgatatgagtcatagaactatagagtatcagcattgctaagaataagaaaccacaaacaaccatactatctatgcaataaagatagaacaccatactacaagcatacttagaataataaggttcctataacaagtatataacgtacatataagaagtaagaattaaatagtcactaaggatgtatttaatgaatcacaagtctcaacaatcacgttttttatcacacacaaagaaaagaagggattagccaacacaagttaacacatagattaaacacacctattcacagcacacctgataattcaaggttctggacgacattaatacacacatcaagttttcaagacaactggtatcac

SEQ ID NO: 137000 - DNA, 326 bp, Glycine max
tcttagtctcggctgatgaagatgaattcttgactacttcatgcactcctctaatgacaatagcataatttctagcactaaattgctgggagttagaagccatcttctcaattaaatttctggcttcagcaagggtcatgtctccaagagctccaccactggcagcatctatcatactcctctccatgttactgagtccttcataaaaatattagagaagaaactgctcagaaatatggtggtgaggacaactggcacataagtttttaaatctctcccagtattcatatatgctctctccactgagttgcctaatgcctgaaata

SEQ ID NO: 137001 - DNA, 453 bp, Glycine max
  unsure (1)..(453): unsure at all n locations
agcttatctaattgttcctgagtaagtgtatgagtcatggcgacacttgtggtgttctgagatgcagttgaagattcaacacgttctcccccatcaactgcagaatgatgagcagaaccagagtgatttttcatcatgtgaggaggaacaccatgcttttgaaagcaattctcaacaaagtgattcgtcttatgacaataggtacagtagcgcttggaaccagaattagatcttccattagcagaaccttgagacttactagttgaagcattaacaagagcctttgaatcatcaagattaggaacacaattntgacgttcaaattgaatcaccatagaaaagatcttggtgatagaaggtagaggttcaatcagaagaatctgagaattaaccgcattgaattcatcgtttaaaccagtcaagatacgcataacatgaagcgtatgatgatga

SEQ ID NO: 137002 - DNA, 292 bp, Glycine max
gtgctagtgagccatatgtttatgctttggttatgaatttcttgagttttgtgatgaacttgctaagccggcatgcctcgcttagcgagttcatgcatttgtgtgctttagttcttgagtttctacgttattttttacatgtcatgcctgggcttaatgccatctactctctaatccccagtgtcttttcagcacctcattcatgggcttatcgagcacctctcgatctaatcccttatgatgttcttacatcattgaacctattacttcattgcatgaggcgatcacgcta

SEQ ID NO: 137003 - DNA, 476 bp, Glycine max
  unsure (1)..(476): unsure at all n locations
agcaagctttctttcacaatcagtctatctattgactatacaattctactgtaagttcatacaattgttctttctttgttcaacatgcatattcgttcaaattcatgaaaggaaacacatatctcaaaataaataaactatttcactgccataccaacaaaagttaagttaaactgttccagatgcttcaggatgagcaactacactactcatgcacaaaactaataaaaagtaaataatgtactaacaccataattatactaataaatcaaaaagcacaaaaaatcaataggaatttaaaagtcctgtgattggttatgtgtgtcctgtgtctgaacttcctcctcttctgaaaagtataggagtagctacaggaacaataaaagaataaaaaataaagaaaagacaaataanaaacgagctaacttcccaaataanaagaagttccccggcaacagcgccaaaaacttgttcgc

SEQ ID NO: 137004 - DNA, 335 bp, Glycine max
cgcttgatagaaaaaaaaaaaaaaaaaatttctgtccatattgttgttactctcagtccaaattcatgacagatttttcattttactaaaggtcattaaatttattttatttgtaacttttgctaggaaaatccaatttgggtgaaatttaaggctaactctatgttttaacatgcaaagaactcattttttcatcaaaagctcaagcaaaatatctcatcacacagattcgggacatgaaaacaagctcaaaaatttcaaatccacaatatgttcaaggaagttcaacaaaaagcatatggttcaagagttagagagacccctgtcatacccta

SEQ ID NO: 137005 - DNA, 464 bp, Glycine max
  unsure (1)..(464): unsure at all n locations
agcnttgagcaaattcaaacgactataactttttactcagatgtctgattgagtcccgtaatatatcgagacgctcgaaattgaatgttgaacctctgagcaaattcaaacgacaataactttttactcggatgtctgattgagtctcgtaatatatcgggacgctcgaaattgaatgttgaagctgacagcaaattcaaacgacaataactttttactcggatgtctgattgagtcccgtaatatatcgagacgctcgaaattgaatgttgaacctctgagcaaattcaaacgacaataactttttactcggatgtctgattgagtcccgtaatatatcgagacgctcngaaatgaatgttgaacctatgagccaattcaaacgacaataactttttactcggatggtctgatgagtcccataatatatcgagacactcgaaattgaatggtgaacctatgag

SEQ ID NO: 137006 - DNA, 342 bp, Glycine max
taaacattcaatttcgagcgtctcgatatattacaggtctcaatcagacatccgagtaaaaatgtattgtcgtttgaattggctcacaggctcaacattcatatttgagcgtctcaatatattacgggactcaatcagacatccgagtaaaaagttattgtcgtttgaattgtgtcataactgtaacattaaatttcgagcgtctcgatatattacgggactcaatcagacatccgagtaaaaagatattgtcttttgaattggttcagaggttcaacattcaatttcgagcgtctcaatatattatgggactcaatcagacatccgagttataagttattg

SEQ ID NO: 137007 - DNA, 456 bp, Glycine max
  unsure (1)..(456): unsure at all n locations
agcttcccagatatggagagctatacctctgttggttcttccttgtaggtacttgatgtaaatacctgtatatctatttaatgatgttttatatgttctctgtgttttcagtgtgccttttccttgatcacgtagatgcatgctttgttaggatcattcaacagtggaaaatggctgattcttagaacttgataggacagggctagtttatcgtattatcatgagggatcagggtatgataacctagttgtttgtcttaatgcagttctagtcgagtttagtccaacaagaggaatctgaggatgatgcttgatcaagattaggctagactatcatgaggaatcggggtttatcattttaggagacaccatagaactcatgagcattgntaagtagagaacatccttataacatcagacacctaatagggagaccaacatgttgtctacttgtctt

SEQ ID NO: 137008 - DNA, 338 bp, Glycine max
tgaccaatcccgacccaacccatgcatatcattcagttataacctgtgatgtacctaaacatgcgagctcctgtcagtcaaccaataaaagaacaaagtccacaaagtaatgaggcttgtgtggtggctggccagctatgtatcttgggtggtatttggaaattagcctctggtaatcgattaccaagcgtgtgtaatcgattacagggcttaaaaatggagatagtatgttaaatggcctctggtaatcgattaccaatggtgtgtaatcgattacacagagtaacagggcattggtaatcgattactagttgggtgtaatcgattacacatggaga

SEQ ID NO: 137009 - DNA, 440 bp, Glycine max
  unsure (1)..(440): unsure at all n locations
agctntaacttaatcaattcaaattccttttgtgcttgttcattccacccaaacacacccttcttcaaacattcggtcataggacttgctatagtgctaaaattctggataaagcgtcgataaaatgatgcaagaccaaggaaagatctcacctccgaaactgttgtagggctcggccaagtcttgatagcatccacttttgtttgatcaacggatactccatctttagacaccacatatccaagaaacaccacactttcaaccaagaaatcacacttttccctcttcccatagagtttttgtgctcttagggtctcaaatattngtttcaaatgagtgaaatgctcctctatagatntgctatacaccaatatgtcatcaagataaacaacaacaatacttacccaaaaaggctngagtacttcgttcatgagcctcat

SEQ ID NO: 137010 - DNA, 348 bp, Glycine max
  unsure (1)..(348): unsure at all n locations
tactaagcttctattaagctgaaccatgttatcaatattgacatgttgagttntattcagaaaattagagtttatctcttttatcttagtgagagtgattctcctaaattcttgagtgattcaagaacaccctggctgtatcaaaggactttcacaacctttgtgtgttgccctcgctggaaagagtgattcttttcttcctttcatcttcacccttgttctttcaaaccacaattccagaaaattcacctctgcccagaattatctcgtggccataactcccattttacgcactcaaattaagtgattcttgagcctaaattgaatttcaaaacgagacctttcacc

SEQ ID NO: 137011 - DNA, 394 bp, Glycine max
tgataacacacatactggtatcttttaccatacaagatttctagaatatgattctcaactgacacacattttcattctgttccttaaaggccaacataggcttatttatatgtgacatgagacaccaatttgcttagttcttttcagaacaatgaggtcttatcctcttacaagcaaaattgttttatcctcttacaaattccttgaccaaaacacttgtgatccaataaggaactatttgagtgctcaaatagttcaatctatctctttcaagacagactccttcttctcttcttctttattctgacaagggaataagagaccgacggtctcctcgtgttaataaattctaaacaacaggaatgattgtccttgtgtgtttaaaacttgtaaa

SEQ ID NO: 137012 - DNA, 421 bp, Glycine max
tggatgcattgcgtaactggtaacctttctgtgtcttgaatcacaaatttgcacctgtcgcaagggtttgaggattgagctcctctgctgaccaccatacatacctttgcccttccatgcagcaacactggagcaattgaacagcctgaagcctatgcttgcaaatatttacattagacctccttaacctgagcagcaaaatcaactcacagcagaacaattatgacctttccagctacagatacaaccctggatggaggaatcaccctaacctcagatggtccagccctcagcaacaacaacagcagcctgctccttccttacaaaatgctgctggcccaagcagaccatacattcctccaacaatccaacaacagcaacaaccctataaacagccaacagttgaggcccctccacaacc

SEQ ID NO: 137013 - DNA, 439 bp, Glycine max
agcttgaaggcgttcatgtaaaaaaatctaattattagagaacattctgagacgaaatgaacaagtgttgtaatgttgttagtccattggatgaaagaaacttgagcaaattgagtgaatcttagctttgctaagtttgcgagtttcattgtattcaagcttattgtgtaaacactctttgagtgattaagaatacattttctatcagacataaattatttgtgaaagccaggagtaacttagtgacaaagaatacttaggtcttaatctctctaacttagtgacaaagaatacttaggtcttaatctctgggagagattaagtgtagtgtcaggagtggcctatagagtacttcatgtaaccagaagtaacatagagaatatttgattgaatcaaagatttgattggtggaaccctccaaggttggaaggagaactgt

SEQ ID NO: 137014 - DNA, 467 bp, Glycine max
  unsure (1)..(467): unsure at all n locations
tcaacatcagaccacctccagggtgctggaactacttcacatgttcttgatggggcctatgcaagttgaaagccttggaggaaagaggtatgcctatgtcatccacaacagagtcacacttaaaagagggactccaaccactctgtatgaaatctggaaagggaggaagccaactgtcaagcactttcacatctttggaagtccatgttacattttggcagatagagagcaaaggagacagatggatcccaagagtgatgcaggaatattcctgggatactctacaaacagcagagcatatagagtattcaattccagaaccagaacagtgatggaatccatcaatgtggctgttgatgatctgtctccaacaagaaagaatgatgtctaagaagatgtcataacattgggagacaatgtagcagatgcatctaanagtggagaaaatgcagaaaactctgattttg

SEQ ID NO: 137015 - DNA, 374 bp, Glycine max
  unsure (1)..(374): unsure at all n locations
agctcgcccacagaacaaggcngaatttagttgtcattcctatttctcaccacgaaaaatggatcatttacaaggtccaacgccttaaaatgatcacctcttaaaggcaaaaagaatcacttgataagaaagaactacgtatgtcagatttcctcatcactattgaggaatacgtatgagcaaagggaaacacccttgtcgaccacaacaagagaaaaatatcaaatgggtatacacgatataacgatttaaaagggaacataaaaactcaaggtcatgttcgcacattcaacataacgctgccgtcccttgggacagacatgtgcggtgctaatacctatccagtgcgataaacaactcccgaacctttcact

SEQ ID NO: 137016 - DNA, 336 bp, Glycine max
  unsure (1)..(336): unsure at all n locations
ccactgcacatatntgaaactatgataaagaatcattcacaatatattaagctccaaacagaaaatgattcggtcccgagagcttaaacaacaagaaaatattgtataatctcatagaagtcaaaattgagactgtataaattccaagatatggagctcgactcctaatgtaagaattcatgcacataaaacgaaaaaagtgcacactggttatttaagcaaagatctaattaaagaacaatacaaacaatataagacattgtactcaattgtggaactgaaatatttgtcactaagattataaatcatacaagtctctaaaatttattagataaa

SEQ ID NO: 137017 - DNA, 442 bp, Glycine max
  unsure (1)..(442): unsure at all n locations
ntagattaaaagactcttaacaactaagataacatttgttatgtaagatatgatactggacatattatatatgcataaatagtacattaattgacatatgatatgtggaatgtcatttcttttttattattaattattatcttagttgttaagaaccatttaatctaaaaaaaatatgatttttaattgaatttccattatcactactttcaataacactagaaaatccaccaagagtacttaaaaagagaacatgagattgtgattttgaaagcaatgacaaaaggatgagttagtcattattattaataataataataataataataataaaagaaaaaaaaagatgagtattatttgttaaggattgttttgaactatggagctgatctaaggatatgttaaaaaatcaatattggtttcttatttttgcaaataaatg

SEQ ID NO: 137018 - DNA, 409 bp, Glycine max
agcttctttgttagacctcgatcggttatctttccatgccgaggtcgaccgtcatttttttcgatccatttcggagaataatatttttttgccgagatgggcaaaatgccactttcggccgaataaatgggaaaatgccagtttcggccgaaacgaaaagtcgggtgggctcgcacaaaaaaacctagccgacctacattttaaattttttatgcaacaccaaaacaagaaaacttcctgtgccgtaaataaaaaaacattacatgactacgagcgtttagaaaaacaaaattgcgcatcgtcggttgaaaaatatcagtcggggctttatcacaaccgaggccggttggtgagtttcttatccaattcgtgaccaaatttcattgatgtcggtcagaaatgttctatc

SEQ ID NO: 137019 - DNA, 425 bp, Glycine max
tcaccggatgacgccgatcgaacatttactaaccgatttcattttaatctcgctcagggattgaattgaaaactcgttatgcgacatctgtcgtgaagtagcgaccgatatttttcagccgacaatgcacaattctttatataaaagctcgctggtcgataatggtctttttaccgcagagtaagttttcttgttttggtgttgcataaaaaagatacaatgtacttcggctaagattttcgtgcgagttcaaccgacatattgtttctgccaggaaaacattatcccacctctgcaaaaaaaatatttgctaaccgtcttcatgcatatttcattcaacgaatgaatagaaaactcaatagccgacaacggtcgtgaaatagtaccgactgatattattcacgccgcatttgcgcattcttttt

SEQ ID NO: 137020 - DNA, 380 bp, Glycine max
tctctccctatttgctattaataggggaagaagtgtatattattaaggtttagccccttaggcacttctctctctctctcgaaatagctgaggaaaattagttccgtgaagataatacaagccgaggcgcttccgtaacgtttccgtaacgtttctgtgagtgatttcgccgaaattctcgaccgttcttcaagaatcatcgtacattcttcgctttcttcaatcttcaacgggtaagtacctcaaaccaagcttttcaattcattctatgtacccgtggtggtccacactctgtttcatgcatatctattctcgttgtcacttgctctttatacccccttgtgacgtgcttaagccatttatttaagtcatttctcgct

SEQ ID NO: 137021 - DNA, 363 bp, Glycine max
  unsure (1)..(363): unsure at all n locations
agctttggtattggaatgtgttntgtttttagtactctgccaacccctcgatgtcttggctttggataataaatgatgactggatgttgaattacttggatgctgtggaagcttggaggggttgatggggaccctatgctgaaaggaactaggataatggctacgtgcgagatcgtgagctttagatgaaggcgggcaattggggatggcgagttcatgtgtgaattgtggatgttgtgaatagacttgcaccatcgctcgatcgccaccgagttcctcattatactggttccccagtgtccgacaagcttgttgtgatataagggggaagatgtcatcctacctactttatttcgttgactc

SEQ ID NO: 137022 - DNA, 409 bp, Glycine max
agctattcctttggttgctttgctatggtttccaaacattaaagagaaagagaagggattgtagccttaatttcactatctctatgtgaggggcatttctcaattgcgagaatgttcgaaagggagttccagaggtggtggccaaatttcaggatgattcaatggttaacgacgccaagttcgtatctttactaggacaagttcgggtgtatgcgaaaaaaagagagagttttgagatgggaagaagggagaactaatttgggtggaagaaagagccgtgagacctatcataattataaaaacggacctaatatggctctaattattatttcataaaaagagagatcttttttactccctatcagataaataaataaaacatcattttttattttctaaaacaccatta

SEQ ID NO: 137023 - DNA, 345 bp, Glycine max
ggggaagataggcactaaaatatgacgtccactatattttgcctactatatgactaatgagacatgatgcagaaattatgaaaaatcgctatgctttgagttgtaagacctactgagagtgtgaccacttggcaatgaatgctgcataattatgaccataagctttattgaaaataaatcatcgcgtgctgtcaccatttgggattgggcccaggggtgtctgaccctcgacaaagaatatctatcgtagatgctgaatgatgttgaatgggtgtgttgcgcggcaccccgataaaaatttgatatacgatatcgtgagtggtgtatgccagtgaaccacacgcg

SEQ ID NO: 137024 - DNA, 283 bp, Glycine max
agcatatatgccaagcttaatacagtatctactgcggaacagctgaatattagtagtagaataaaaaatacaagcctcacttcagacaaagaaaaggactctaaccatatttatgcacattcaaatggatcagttactgcttattactaggcgggtgggaatgagacgatacatacagggtggtatacaacacttcatcccaggaaaaaggaggtggaatccccacccaatataggaataatttttactcttcgaaactgaagggattaaaaactaccctttt

SEQ ID NO: 137025 - DNA, 395 bp, Glycine max
  unsure (1)..(395): unsure at all n locations
ttaaactagntatatcatctgaggggtgttgatgtgttctagtcttcaacgacaagttttttgtgtgctgccttcattattattattattattaaatcattaaattgcatgcccataaaaccgtacttcttcagctagttaaaaaattaaactgataatggtgatgctgtaatctcatcggaattcgaaatcaactgctctaattatccaagactgtgtcgtgtaaatttagcagtacacaaagcaacaaacatgtgatattattgaagtcagtgctgaacttcacattggacaagaactccatttgtgatataagacataacgcacactcggatttctcaaacttgatttaattcattctcatatgtcaatctattgctgcatattgcacatat

SEQ ID NO: 137026 - DNA, 432 bp, Glycine max
  unsure (1)..(432): unsure at all n locations
cacgcatgcaagctccagacgngcaacaaaggagatttcactgttaaaagattcctcaccaaacactcagaggagacgggggacgattgctcatggaggagcccgagtgcctttataattatactgcccgaggattggtcgcagacaatcagcttaacaaacatggtgaagatgttgatggaggtgaaggtcatggaaaaaatacctccaactttcaatccaaggttcgacttcgtcgctaccaacattgaacaaaacaaggatctaaagaccatgactatagagcaacacatgggtcccttacacgcttactaagagaaacaaaagagagaaatttaccaataggaggctacggagcacctcatacaactaaacataaaggaaccaaactttgcaaataacaagagcctaataggaccaggcctcgccaaa

SEQ ID NO: 137027 - DNA, 438 bp, Glycine max
agcttaaaggagcactcaaaatcggttgtatttgcccccagtgtctagactccaaaaatttcatcatggaatttccttcctgattcaggtccaaccaagaaaacattttagcacacagactatatctatgaactatacaaaacatacaatttctcaattgctataaaattaattttatcttgttgcgcttgtgattgtatgtttgtatgattatatgattcatagctcacaactcagtgcatacaacctctcaatgcacatatatattacaagtcaatacatactcaatttatcatataaactcggtctcaatcacaatggtataatctcaatttaacatgttatcacacctcatgaatcatatacacttttcatatgaactatgcaatactcataactactcaattgtttttaaaatcattttaactcatcgtacct

SEQ ID NO: 137028 - DNA, 456 bp, Glycine max
attgtagcctcaaatcagccactaccattggttctcttgttacttaagacgaattagaaaggtggttttcttcttcaacccattgaaaaaattgacagttatctgggtctgtttggggtaatgcacaagtatagaataaccttcctgggttcctccttgttcttgtagttcgaatagctgcacgtcttccatggtggcattgccgaatgaaactaccagaaaatgcacaacaactgccacttgcagacatggagaaatcaagtgaacaagcagcagcgactaagcctcaaagtagaagaagaagaagcgactcagcgtgggaaaccagcagcttcgtaaaccctaatttatttgtggaagaagaagaagcaaccttgcgtgagagagaatttatacatgcagacctcagtgccacgttggacagtctacgtggcactgaattgccacctatacacc

SEQ ID NO: 137029 - DNA, 407 bp, Glycine max
  unsure (1)..(407): unsure at all n locations
agcttnttgagggtgccttattggctactatttttatcttcctaagacaattttttaccttaaccctcactcaaattaggggcatatcatgactaaaacccttatgctctcttaaaccctacaacaaggtaggaaataattaaagtaggcttaggggttttacataaaacatgattatcatttttggctcaaataaggtgcaagggataaattatcatcaaaggttggctttttggctaagtgactgaaaataaaaagaagcaggaccttgatcatttccacctcatgtaattaatctaacagtctaagaatgatgcaaaatcaggaagttaaaaatagacattctctcacaaataagtttcacacaactcaccagaaaaaactaagttgtggcttaccgcaccatg

SEQ ID NO: 137030 - DNA, 451 bp, Glycine max
agctcttgtcagtgtctgcatcacgtcaaagtcccacaatgttactttttttatattaagagccttgtgtagttgaaggatcttaacttggtagggttaaagtctcatgattgtcacatcttgatgcaacaattgttatccgtggccatacgagacattttgcctaacaaagtcaggttaaccataactcgcctgtgttttttcttcaatgccatatgtagcaaagccgttgatcctgtgaacttagatgagttggaaaacgaggctgctattatactgtgccagttggagatgtattttcctcctgttttctttgacatcatggttcacttaattgttcatctggtcagagaaatcaaatttcatggtcctatttttttgctgtggatgtaaccaagctgagcgatacatggagatcttacaatggtatactaagaatctacatcatcca

SEQ ID NO: 137031 - DNA, 395 bp, Glycine max
agcttcaaacttgcaacagaggagttttgcacttaatataagattcgcccctcaaactctgtagaggtgacttgtgaacgtctcgtctatgtgacgagtcctgactcaatactctaattatctatctcgagtattggccgtactcaactcaacttaaaacaaatggtgaacatgtcgatgaggtgaatgtcactggaaaaaatacttcgaacttcaaatccaagatttgactccattggtacccacattgaagaaaacaaggatttaaagaccatgactatagaacaactcatgggttccttacaagcataccaagcaaaaccaacgagaaaaattacccaaaacgaggctacggagcaactactacaacttcacatataggaagcaaatcatgc

SEQ ID NO: 137032 - DNA, 456 bp, Glycine max
  unsure (1)..(456): unsure at all n locations
tattagtggagaaataattcaccccttcttaagttattgatgtctctggtccaacatatgcaatatctaattctacttttaagttaagtaaaatgtagttttcaatacgtgagattatttgttttgtttgatgcaggctgatgataatggagatggaaagttgacactcttcccttatctcatttatttagttgcaatcaattttgtcttgtatgtttaaagaacattattaaattgattgctgcttcttctgcattcagagtctatcatttagaagggggttaaaagcttattagtggaaaaataattcaccccttcttaagttattgaggtcgctggtccaacatatgcaatatctaattctactcttaagttaagtaaaatgtagttttcaatacgtgagattatctgtntgtttgatgcacgctgatgattatggagatggatagttgacac

SEQ ID NO: 137033 - DNA, 348 bp, Glycine max
  unsure (1)..(348): unsure at all n locations
agctntataagtgcgggtctgggagtctaatgttttgtgttcgcgatatgtgaagatgatgttccaagtacttcggatttggaccgaccatgccctcctgatttccagctgggaaattggcgagtggaggaacgccccggcatttacgctacaagcataagggaaacctttacggttataaaagctctatagttgggcctaggctttatagtttcctttttgttaacgctttgtgtcttttgtttttgaatgtataatacacggatctttcttcatctgtttctggtctctacccattctcattcatttgcatgtctacttctttttctgaaacggcagattcgatga

SEQ ID NO: 137034 - DNA, 469 bp, Glycine max
tctacataatggagagttctagagagagaaaggtccttgtttctgagagtgtgagagaatttattgtgtgaagatctgtagagaccagagctggaagaggaaactgtcctgagtgttagacaaatggcctcagttatcttaagaagggggggttgaattaagataacaagaactattccccaattaaaatttcactctctctttttagattaacgatgcacccttaacatgaattactcaaaagacaattcaaaataaacttcttttaagccaaagataaatagcaataaataaaagaagtttaatggaagagagaaatgcaaacttgattcatactggttcggccacttcctgtgcctacgtccagtcctcaagcaacccacttgagattttccactctctttgtagaatctttacaagttctaaacacacaaggacaatccttcctttgtgtcagaattctttacac

SEQ ID NO: 137035 - DNA, 317 bp, Glycine max
catgcaagctcaccgcgataaacaacaagtttctactgatttaacaagttatcgcacatccctgtttgccacaccgcccacacgatgtattaccgcatactctttactacaataagtattcagatataagacaccacatgccagaacaaaaaaacaatggaagtgatatagtcaaacgcatgccatgccattaatacgatcacaaacttacataaaaaaaattgacctacgacaaataaaccaaaaaacatatcttgcgaaaaaattcatatattaacagcaacgaaaaacaattttaaacgccccaacaaaactat

SEQ ID NO: 137036 - DNA, 313 bp, Glycine max
  unsure (1)..(313): unsure at all n locations
accatggnttttcaaactttcatcatgaacggaagaaggcagagcacgaaacaaataggtcgncaccatattcgtgatctcctgcatcgctaactcggtgaacattgaattcacagacgaaacataatcaacaagctcaagtacagtttgccgcttaacgttcttctctttgagatgcttgacaggatcatttgaatcaaacacaacactagacatattcaatctttctgataaaaagattctcgctcttcgagctaggaacatccctgaaactaagcaaagactcattagctgccgaacgcattactgaacc

SEQ ID NO: 137037 - DNA, 430 bp, Glycine max
agcttgaatataatgaaacttgtatttttcaaagctaagattcactcatttctcgcacgtgtccttcatccattaaagttgatagcgctacacatggccgttactgtgaaaagagagatagtgggaactctaaacactttttgtagcatatcttcatagaactacaacttgccagtgtcgccttgcgctcaaagttgactttaagtgtacaaatcaaatataacgttaacaacataagacaaaaggaatcaagaatattaagacaggacaatttaaatctttccttttgagcgtcgtggcacgagttgcttattgaacctatggacgctactttctgatgattgctttctgtacttaaggagtagagaatggttcatcgcctttgactatgagcgaagtgcaaagcactcttcttctgaggactggatga

SEQ ID NO: 137038 - DNA, 416 bp, Glycine max
ttacctttcatttaacccttagaacttgctgtttattaatgtcataaatcaagcaatgttgatgttcaaaggacactttaaatccctttttaatcaattgacctacgcttaacaagttatggtcaatgttaggtacataaagaacatctgatattaatttgatacctgaacacgttgataatacaacagttcctcttccttttactggaatatagccaccattcccaattctgacctttgagacattagttggcttcaaatctttgaataaagtcttatcatatgtcatgtggttcgtacaaccactatcaatcaaccaaacttcccttgattcactactcaagaatcatgtggccacacacaattggtcctcttcttcttgaatagcaatctgagctccctcatcatggtgattt

SEQ ID NO: 137039 - DNA, 390 bp, Glycine max
  unsure (1)..(390): unsure at all n locations
agcttttgcaagctggaatcatntattctatctcctacagccaatgggtgagtcccgtccaggtagtcccgaaaaagactggcctcacagtgatcagaaatgagaagggggagctgattcctactcgggtgcagaacagttggagagtctgcattaactataggaggctgaaccaggttaccaaaaaggaccattttcccctgccattcattgaccaaatgcttgaacgcctggcaggtaaatcccactactatttccttgatggtttttctggttatatgcaaattactattgctcctgaggatcaggaaaagaccacattcacctgccccttctgcacttttgcttataggaggatgcctttcggcctatgcaatgcccctggtacct

SEQ ID NO: 137040 - DNA, 426 bp, Glycine max
  unsure (1)..(426): unsure at all n locations
gaggcgagagntaaacaagagaacttctnggtcaattttgaacttcttcctaagaatcctagaatcatgaaacctcttcacttactatgagtgaagtaagagtgtctcttaatatatatttgtatcattataaggatcactcactcactgggctaggtctacaagtttctttatttgctctcaatttttcatgcctaacttattacacatctcaatcaagcaaaaacaatggtattcacatttagcatttgagctcaactgcacaaagaaggatttaagcacaaaagtttgttttatttaatggcggatttgtaagaaaatggagatgcttcttaatcaatggcgtttccttatctttcctagaataaacatatttctaaactaccacacatatacttaacaacttaactgataaagtgaattaac

SEQ ID NO: 137041 - DNA, 407 bp, Glycine max
gcgcctgaagcttgccacacaagaacttttcgtctcttacagactcaccagctaactataaaacgatactgtgaacgtgggtttatcagaagtaatccatagctgcctgatctgacttcattagtaacacagagtatgtcgtgcgaccgctgccatccgactggagtattcaactggtgagagaggactgaggattgcgaaggtcatgtacaacatactccaaacttacaacccgcggtttgacttcatcgttgcctgcattgtagaagacggggctttaaagaccatgactatacaacagcatttcggctgcttacagcattggacagagatcaatgcagctgtcttcaacaaggcgaggctgccgccctactccaccttctcaacttcaacgaaccgatctttgc

SEQ ID NO: 137042 - DNA, 171 bp, Glycine max
cgaaactgcactcgaataagctatcttaatcttgaagagaagcggtcattacatatatgagaaacaagggcgagaaacacatattaatgatgcgaataatgagcggtgggggttaggatgagaaaagccatacatagaacgaagtagatacgagggtttcactgacacacc

SEQ ID NO: 137043 - DNA, 298 bp, Glycine max
tgctcacaagacgtgaagaacacgatccaagagagccggagactgaccgagaatgcccatatccgaccaccacctgaggaacacagcgagaaggaggaacgccgccggcatgtacgcaacttacataacgaaaccctgttcagcaacaagaccacttttagggagcgatggagaacatagtatgaactaagtaacgcgcatggattatacgcataaaacaaaagatacgcggagaatgactacaatagatgaagaaatgtacccatacttcaaccaaagcaagcacacttcatcacca

SEQ ID NO: 137044 - DNA, 397 bp, Glycine max
  unsure (1)..(397): unsure at all n locations
cttcgatgccctcaccacctgtgatcaccttcctctacactacgagctgggagtagatggcttattcttgctggccttgcttcacaaagacgctgctggttccaaccattcctacttcttaactggaaaacgagggatgctcctggtcgacgcaattggtgtataagtgacgctggatgatattgtgagggacgttttcgngcttgaaaaccaaatacccattcacgtgcttatggagataagcaaagtgaatatcaacagcacggaaagtgggggaattatagaggagcataacctgtgtgaaagcatgctataattctgtaggccgctctgtccacttggtcattcagagcaagtctcctcaaagaaagcagaagaccgcgctcatttatggatc

SEQ ID NO: 137045 - DNA, 377 bp, Glycine max
agcttctagccaaatggacttaccttgaattaattcctttgatagcccttttgagccttgtttccctttccttgttttgaagctcactacaagccttaggtgaaaaaccatgatatcaccatatccttaaggaattttggagctttggaattgttttgggaataagtgtggggggtttttgtttcattggacaacttgttttgttggctatgcttcatgatgtattttgggccatacttgatgtacattgtatattggttaaatgttggacatgctgaatgaaatgttgtttctaaaggctatagagtaaaaaaaaaaaaaatcgaaaaaaaaattaaaaaagaaaagaaagccataagttgataataaatcttaat

SEQ ID NO: 137046 - DNA, 420 bp, Glycine max
ctcgaatgggaagtgtagaaggtgagacttcttgcttttattcgtgaccacagagtggtacctggagatatgtcgcgggggtcacgagaccttggggacgtcaggtggggtgctattgcccacaaccaagcttgaccaatcccgacccaacccgggcatagtcagtcagtgagaacctgtgatgtacctaagcaggcgagctcctgacagtctatagataaaaagaactaagaccacaaagcaaggaggcttgtgtggtggctggccaactgtgaactttgattgatatatgggatatggcctctggtaatcgattaccaagggtgggtaatcgattacaagggctaaaaatgatgacaggatgctagatggtctctgggtatcattacctcggagtgtatccattacctgcttgaaaca

SEQ ID NO: 137047 - DNA, 396 bp, Glycine max
  unsure (1)..(396): unsure at all n locations
agcttagattgaggtatctactcgtttataactgaagaaaacgaagaacgatcgatgaatcttgaagaacgggtgaggatcttcgcgtaatttctcacggaaacgttacggaagagcctcagcttggattttctttacggaaacatatttcctaagcatattccaaagagagagaagtgcctaaggggctgaacccttttcttcttcacttctccccctatntatagcaaaataggggagaagcttgccgcccatctcgcccaggcgagccaggttgcttcctccagaagcaacaaccttctggaggaatcttctggaaggcccatgtgtgcctgattgctatttacacccccctcttactaaatgaccccctttctatttttttgtaatcctttt

SEQ ID NO: 137048 - DNA, 330 bp, Glycine max
aatgaatgatcacttacgaatcaaaaggggggaccgtttgtttttaccattagccccttggagatatccattagtcgaatctcgccaacttcctgtctactattatcaacatgtgtcaccccagcatgaatcctctacctgacatatcataacacttgcatgctcgtgcttaataactccacgacgctgtgtcactctctgtatgcgcgctctctaatctcggacgacatattatttacccctcacatatgctccttatacggtattatggtatccagactctctggatcagaattccatatcttttattaattttacgacaaaaaacac

SEQ ID NO: 137049 - DNA, 54 bp, Glycine max
actagtccgcaatgaaatgtaatcagtatgcttaatccattggaccttgcatga

SEQ ID NO: 137050 - DNA, 452 bp, Glycine max
cttaagcgaccgcggctgcagcttaaaccaagcactcaaatctggttttcaaacccctcaatttaatggatcttcaaggtttgagaagtgaaattgagaatggggtaaatttgaagcaaactctcacctcacacaagtctataacatcaatttaaacttgttcaaactgaacttacacctaaaatttcaccgaatcaaaatttgactcctcaacacccaaatttaccctagaaatggctctttgttcactttggtcatttgtttttctctcttgcacagcccaaactttctcataagtcctaaatgacatttcaatctaggattaactccctttaacctccaaataccactaaatccagatttggcctttcaactctcaaagtctcactctttctccactcacaacaccatattctcaccttctaaccctagggtaactctacccttcatct

SEQ ID NO: 137051 - DNA, 415 bp, Glycine max
  unsure (1)..(415): unsure at all n locations
gagaagcatgtgatccatgtgatcctttggcatcatctatttattcagctggatcctttgtctacaatctccccctctttgatgatgacaatccttgaaatcaagacaagctatatacaagatgatagcacgttcacacaacccttactccccctatcttttggcatgtatgcctaactttaatgattttaattaatctctaacccaagttctaagttctctccccctttggcaacatcaaaaagaactaagcaaaacaatcaatatctaaacagagccaaacataaaaaagaactaagataaacaatcaatatccaaacaaagccaaacattaaaccaaaataagtccatacattgtcataaccaaccaaagcagagtcgactaaactaagtactaatnagataatgaatgatg

SEQ ID NO: 137052 - DNA, 420 bp, Glycine max
aactcaagctcaccaccaaagagtgtttaataagagcttaatttgtttctttttggaggaagaaaatgagagagagagagagagagaaagtggcatgggattgaaggaaagatagggagagaagttgaactttgaaatgtgtctcacaagactttcattcatcaaagataccacaagtgttacacatgcttctattaatagcctaggtagcttccttaagaacctagaggacacccctccaatagctaagctcaccccatgacaaaatacatgaaggaagaaagcttccttgagaaacttccttgggaagcaagtgttacacctctccaatagctaagctcacccccaagggaacacacaccccttcaatagctaagctcacacttcccctaataaaaatacatgagaaaaagtctttac

SEQ ID NO: 137053 - DNA, 118 bp, Glycine max
caccaggaccccatgacaacaacaacaaacccaaagaaaacaacgacaacgacaccaagaaaagcacaacacacacaagagaccaaagaggagggaaacacacaaagactgaaagaac

SEQ ID NO: 137054 - DNA, 474 bp, Glycine max
  unsure (1)..(474): unsure at all n locations
taaaactaagcttccacacatccaagtattcccatccaatcatcatggactttctaaatcaagaaaaatagggcaaaggcagaaaactctgcccaaaacacaactcataatcacagcttttcacatacaaataccccaataacatttccttcttttcaattcgttaaccgctggatcgactcaaaatttttactggaagtctctagtacataagtctacattttgaccgttgggatctactagcaaacatccagaactcattctgtactactctttcctcaaccagcaaaacatagcanttttctgcacttatgcaaaattctgctgcacaatttcacagcaaaattctgcataaagtgcagatntcgaaaaccacactntccctcatccaatcttgcccaaatcaaatcctacaagtcccaaatcatgtatcaatcatgcctaaaccaagtcaagcttcaaacacagcaacac

SEQ ID NO: 137055 - DNA, 395 bp, Glycine max
agcttagaaatcaagtgatcaagtgttcatttttccaaatcttatgggggcatgaaatgagtgaacccaacattatatcttgcatatactctgcttgtatcttgatttcaagaattaaattgtcactcatcaaaaagggggagattgtatattcaaagactatgactttgatgatttgatgactgccatatgatcatgatgttttgatgccttatgaaaatgcgcttctcaagtttaattcacgacaaaaatccaagaatacaagatacaacattcagaagacctctagtgatctatgaagggaattccatattgatatatcaaaaggtttggccaagaaattaaagctcaaatgtctttttcaagagatatactctctggtaatctcttaccat

SEQ ID NO: 137056 - DNA, 475 bp, Glycine max
tgatcatcataccactcatcaccatcacaaacttgatttatatagcttggccctaccatgggtgcacactggcatggttgcgtgccacgccgcgtcatacttacatgcactagccatcaagtcaaactaggtgtgattcaattatagggattacgtcatgaaagtcttcacatgttctttctccaaatcctttcatgcatttcgcgacactctcttaacaccatccaacttgggagcttcaaccccctcaaaaccaaccttcgaagttcaccatcattctcttttactcatggatggagcctgtgcgtactgcaccttctctaaaccttgaaagtgggagatcgatggttttgctctatcggatgatcaaattttaaacattgtttgtcgaaactttcttcatttacatacccaattttagttcgcacaatatatatttgattctgtggttggtaccgtgtggattgatcttaac

SEQ ID NO: 137057 - DNA, 413 bp, Glycine max
attgtaaccttgtaattcttgatagcactttgatttccgaggctgtcgggataaaaatgattattgaccaattcctttctcataatataacccaattgtctaatgacggtgtaccatttgaaggtacactgtatgacgattggaaatatgattcatctgcatatgatgcccgccagttggtttgcaccacccatgcggatatgactggacgccttcttgccggttaattggattttgaaagccgcatccttcattaacttattgagcgtatttagcttccaagatcttccaaccttgtctaatgttttgaggaagatctaggtatcaagggggcctttcataccgggcgtaaactgactgggctcactatcacaaattctattgcacagcattgcaactaatgcccattgcat

SEQ ID NO: 137058 - DNA, 137 bp, Glycine max
  unsure (1)..(137): unsure at all n locations
aaaaccaacgacagagaanggaccacagccagcattcctcagagcgcccgacaaaaaaaacgaagtgaaacacacacaccaaaggtccactacaaaaaaagcacccgcaggcgccccaaagaaacagacaacccaca

SEQ ID NO: 137059 - DNA, 426 bp, Glycine max
agcttgcttagcaaatattcacttattctcgctcagtcagacatgctcgttgagcgagccttcggaagctgagaagtccatgagcctttaaaacactaaggttggcagaactcaagaggagaaccggtcaagggcaacaaggaaagcctagcttcttgaaaaacagagagatttatggttgagaggctggagaagacattctccatcatcttcttccattttctttcaccaaaaatagtttctttctttgtattttgaagctttatttgtaatggaaagctagagtctctttgttggggagtaactactgagactcttgatgtaatactcttactatctatttaatattattttctgatggtctttgcttctatctatgcttattttacatgcttgtgacttgatcacccatttgtatgtgtagta

SEQ ID NO: 137060 - DNA, 312 bp, Glycine max
agctagaggctcatatattgagagtgtgtataatagtacgagtagaggggtttgatggaaccaacatttatattaggtgaacatggtcgctggtccttgtatgtacgggctgatgtaaccttataaataattcccggcttgaagaataaagctgggagcttatagataatgttaaagataaaaatttgcttattgataaaaggttgaagataaatgttccttgctgataatgtgtacgctcatagataaataaagacctgtcaatagactacatattcaaacacatttgaatataagtatgctatagataac

SEQ ID NO: 137061 - DNA, 317 bp, Glycine max
  unsure (1)..(317): unsure at all n locations
agcttagacactatnggttttattctattatttgtgctggngctatgattntaattgatcataagttatatgtatcaactctcgagattctgcatcatttttacttgaggctagctttgtggaaagaacataaatcaattatatgctcgggttaaagaattgacatgagtcctatctcatgatattctaatattttattaaaagattctattctattctctttagattttgattactttattttttaattgcttctcaggatggtttgctcgcgatccatctatcctgcatcgtgttggacatgttttacttcaatt

SEQ ID NO: 137062 - DNA, 335 bp, Glycine max
  unsure (1)..(335): unsure at all n locations
tctcccctattttcctatatatagggggagatgtttttggtataatgttcagccctcctgataattcgagatcacttgaaattagtganaaaaactgtttccgtgaagaaaattcaagccaacgcgttttcgtgggtgatttcgcgaacattttcaaccggtcttcgaccttcttcggtcgttcttcgtcgttcttcagtcttcaacccgtaagttcccgaaatcgaacattttaattcattctttgttcccttagtggtcctcatttgttttcacgtgcctttattttcggattcattactttccgtaccctcttttgacgtgcttaagtcatt

SEQ ID NO: 137063 - DNA, 280 bp, Glycine max
agcttaatctatcaattatttctttatttctctttcatggacattcacaaacatatggtgctcacaacctacactgctggaaaaaagcgctcttacaacgatcgaatcggggatacaacgacatttttctaccgacgtaaaatgcgatgtcggcaaagcttaaaaatttcaacgacgagccccaaaacaccatctttgaaagtgaacaactttcaaagacggagtttaccttatcaacatcttagaaagtgggcattctcagatagaacatattgggtgt

SEQ ID NO: 137064 - DNA, 401 bp, Glycine max
tagctgaattcagatcgaatgaaaggtatcttatctctatcttggccagcttatcggaccaaatcagcctcagatgcaagggatgggcgctaagcgctagatactcgcaacttagcgcatgaacagagatgcgcttaacgcaagacttgcgcttagcgaaaggactatttttcagacaataattttctaagttatatttcagtccttcttccaagaaattgaaacccttactgtaaacatccaaagattggctgatatcctcctatgtacagactatatagcaagctccaaatgatttaaatgcatgataaacaaactaagataatagaatttaaaactgagttgccttctaagaagcgcttctttaacgtcattagctagacgctcttacctcactgggt

SEQ ID NO: 137065 - DNA, 314 bp, Glycine max
  unsure (1)..(314): unsure at all n locations
agcgtggctcttggnttatttaacttttataatgcatccagcataccgaggggtagttgcttagcgaaatatggagcgcttatcaatgacttgctgcaggaatgatctaacttgcatgagtggtgctttactcgattaaacccagattaagcccgaaagaatagagcttagttgccatgagtggcgcttatccatataatgcaatgcgcttaacgggatggtcatcgcttatcccaattcaaaccgaattgagatgggcttaactcatccctgggtagcttagtggaccaagtagtctgaaatcaaggggtgag

SEQ ID NO: 137066 - DNA, 440 bp, Glycine max
  unsure (1)..(440): unsure at all n locations
agcnttgagccaaaatcctgactcactataaaccttgacccatggtgagaatgtcaattcttaccctcggaagcaaaaaaaaaggggagagggaaaatttccaatcaaagaggaagcaaaaaaggagagaaggaaaatttccaatcaaaggaaaaaaagagaggaaagggaattcccaatcaaagagtgggagaaagcaaaaagaaaagaaagaaaattcccaatcaaagaatgggagaaagaaaaaagagaagaagaaagggaagaaagttcccgatcaaaaaaaaataatatgcagaaaggtctttggaccggacaatatctgaacaatacagaattgtcaccaaatgaataaaaagaaggaaagggaaccatgacctanaatggtccttccccttttattgccaggcaaaatcttgtgcgctagcaacactttttct

SEQ ID NO: 137067 - DNA, 469 bp, Glycine max
  unsure (1)..(469): unsure at all n locations
tgtagaatggctagacatgatacatgtcagggtttggtttggttcaatgataaaagggatgccccacattattttcatgacacaaatgcaaaaatgatgatttggaaactttatgcaaaactggtcatgcatgcacctatgtggacactcaagtgtcaaatttttatggtcatgtgatgctagggctcaagattcatttcctctattttaaatcaacccaatgtttccaaaatatgttcttttatcaatttgtgcattcatccgagtccatttcgggcgtccggagaaatttcacagcattcacccttcaggtgtagacacattttccaaaaattggttatgatcaatgaatttttttcaaagaaaagttggaaatcatctcttttcaaaagcatgtcggtttttcagctagacaanctatttttctttntccatctttttctacttgcttctttttcttatatgtctc

SEQ ID NO: 137068 - DNA, 421 bp, Glycine max
agcttttaccaaagagtttttactctctggtaatcaattaccagtttactgtgatcgattactaatggcaagttttgttttcaaaaagcttacaactgaatttacaacattccaatcaatttcaaaatggtgtaatcgattacaatatattggcgatcgattaccagtgtatttgaacgttgaaatagaaattcaaatgtgaagagtcgcatcctttcacaaaaatgctttgtgtaatcaattacaatgatttggtaatcgattaccagtgataagttttgaataaaaatcaaaagatgtaactctctcaatggttttcaagtttttctaaggttataactcttctatggctttcagaccagacattaagagtctttaaaccagaccttacttgcattttttacattgatacattattcat

SEQ ID NO: 137069 - DNA, 460 bp, Glycine max
  unsure (1)..(460): unsure at all n locations
tntctctcttggctctattttcggctatgttacgtctctccttctataactctcttatttttcctcaacttcagtcttttaagggctttttgatcctgaaggcccgcttagcgccattttcttgctaagcgcgagttagtgaattctcgcttagtgagctgggcatgctgagcgctagaagagacaaatgactcgctgagcgagctgatggcacgctatgcgtgtgcatgaatggcagattctcttccagattctccccactcgctaagcaagttgagtgcctcatttagcgaatgttactcgctaagcacatctacctcgcttagcgagacaccagcttcttcaaccttcttcttcttcatcctttagcctaaaactgaagttgaaccacactaattcacaatattgggaatatctactgagtgaaattgaactaaacataaaaatatgtacaaaccta

SEQ ID NO: 137070 - DNA, 472 bp, Glycine max
gccttaaaactaagctttggcaaggagagaaaagagaagaaaaattttctttgatattgtgaaagctattaaaatgcaagtcaaggtcttgcttttatagactctacttgtctggtcaagaaaaccattggaagagttataaccttgagaaaaacttgaaaaccattggaagagttacatctcttgactttttattcataacttgacattggtaatcgattaccaaactcatgtaatcgattgcacaaagctttttatgaaaagatgtgactcttcacaattgaatttgaatttcaatgttcagatactctggtaatcgattaccaatatattataatcgattacaccatttaaatatcaattggaacgttgcaaattcagctaaaagctcttttaaatcaaactgtgccactagtaatcaattacagtacactggtaatcgaataccagagagtataaactcttgtaactt

SEQ ID NO: 137071 - DNA, 357 bp, Glycine max
atagtaaaacttaatgcgcaggagagggctcttgtgctgacatccttgttcttttaacaagggatgcactctatctggtgagaaaactttgctaagaaccaaatgtcacatcatgcggatcctaaaccattcatatgtcttccagaattgacgaatgccgctcaagtagcttgcatttgcaagccctgactaatggtatacatacattctgcagtcaggatgacctacatgggacgttcctaaacgaccaaaggatggcacaacctctaaagccagcgaaaccacacaattaccagcgccaacctatcacttatcacaactgcggccgagctattctcaaagaggactgtcagggga

SEQ ID NO: 137072 - DNA, 419 bp, Glycine max
agcttgtcagaagtctataccgctgttttaatgtaataagattctatagatttcctttctctcttgttgtctgaaatctacctcattaaataaacaaagagatcttgtttcatctgttcttgcagttccaccttttctcatatcattttgcatgtttatgattctttggtcttgtttggtatatatatgagggtcgattctttgaggatccttacaacgagggtttgacaatcgatcttgatagagatataagccactcgataaacgatgaagaggaagaggacgtcctgtctccagagttggagaggttggtcccttatgaaaaacgtgaaatgaatccttaccaatatgacaccgaatctgtaaacatggggaccacggacgataatatagaacttaagtatgaccgatatgatcgc

SEQ ID NO: 137073 - DNA, 440 bp, Glycine max
  unsure (1)..(440): unsure at all n locations
tgttcaataattcactattgttgtcacccactccttctataagagacttgttctttcttagttccctaatcttctgtttagctttgtcgctaattttgaaaggtatgaataagggtttttctatggggatgtttgattgagattcttcangagatttttgtttggaaattttctttgttatgatagactctcctaaaacttgcaaatatttgttggtataatttgtctgttccattaggctttntgatatctttggaagttacttcttcgttgatatcttttgtcctaaagggactggccatgacaggtttatcattactgtctttgatctttggcagctgatattgtgttgtgagaggtaattccgattggatcactcaccatccttgatctgccaattggtaattacattttgtggttgattacctatgatatcttgt

SEQ ID NO: 137074 - DNA, 364 bp, Glycine max
ggagccaaatcccactaagttggtatagaacaaactcgggggcaaggaattaccgaatgtctactccaacaagtgtggaataggtgcataagtcaaagagagttcaagcaccaagttgaagtccacaaacaattcaaatgctacatgggtaacgaagctctacctgagaactgcaatgtctgtgatctcccatcaattaatcaagtcaacccacaaattcttacagaatacaaacaccaattgaccaagtaacttgagatactgaaaacgacctattgggtatacttgattaagtgactttaataaggggccaagaagactaaccctatggaggaccataaggcaacaaatgatcaccactttt

SEQ ID NO: 137075 - DNA, 360 bp, Glycine max
  unsure (1)..(360): unsure at all n locations
tcaggctgctcaatcgctccaaggtgctgcatttatttatattgtctgcatggcggncagcagaggagcacaaaccacaaacccttgcaacaggtacagatttctgattcaaggccagctgggttaccaagttaaccaatgcatccagcttgccttcaagctacttagtctcagatgatgcagctaagtttgtagctacctcatgcactcctctaatgactatggcatcatttctggcgctaaactgctgagagttggaagccatcttctcaattaaatctctaacttcagcaggagttatgtcttcaaaggctccaccactggcagcatctatcatacttctctccatattactgagtc

SEQ ID NO: 137076 - DNA, 405 bp, Glycine max
  unsure (1)..(405): unsure at all n locations
agcttaacaaagaaaagaggttcaatttaataggaatcaaagaggtccaaacattaccgacaagaataaatgtaaacaatatacgtttacacacacgagagatggaagatgagaagtcttaccacatgagtggtctcaagatacaaacatcggatatggaagacgacaaacttatcaaacgctcatgaggtctcttaggtcaagtgggtaacaaaccggtagccgagagcaaatcctaacccttcatttttaaaacaactaaacataagactcggattaatcaacacccaatttaaaataaaatggacaaacgtacggtgcaaaagttatttaactttcacaccgtagaccccgtactactctagttatcttttagcctttgacccctnagctcagacttttttc

SEQ ID NO: 137077 - DNA, 410 bp, Glycine max
atgaatctccatagatggattgcagatgttgttttatttgttttatggttcaagtgatggggtatacgcacgttagaatactatctttatctgtcattttactgaaatgatcatatttttggattttggagcataagcaacatgttgttttcattaaattttgaaaagaactttccaacacatatttaacttttggaaagtactttccagaatcaaaaaattaaattgtgttctagaaagcactttccagaacttataattatgtgttatgaaaagtacatttgataatgatgttcaaaattttgtattccataacttttcagagtacacaaatataaacatttttatgatatactttttggaatgaagatataacaataattctgatatcacgagtacttataattata

SEQ ID NO: 137078 - DNA, 356 bp, Glycine max
  unsure (1)..(356): unsure at all n locations
agcttcctttgtgcacttatggtttatttttngcattcctttcatctcacacaagtaagtaccatcgccattgaagtttacctttttcttgtggtatcttggtgctttattttgtatgttttttgcaatgtttgtgagataaattgtttgtgaatccatgacttgaatgcttgattaggggctggaatggatgtccctaggcctatccttgatcctattgtagattggcatgtcatgttgttctccattcatcatttttacatgcttaaacatgcgcccaccaaccattcgataaatgcctcatgaccatttatgtattgtttggaatttaggtggaatgatttatccaggacaac

SEQ ID NO: 137079 - DNA, 432 bp, Glycine max
  unsure (1)..(432): unsure at all n locations
actaagcttgataactcttaaagaagaagagtccttgcttttcttgtgattgagaaaagttccaaggaaagagctatttttctcaataactttcaagaattggaaaacaaactgaaagatcttcaaaaggatctaaaggagctgaatgaactttatgattataaaaaagaagaaaaatatgatttatgaagagaatgtgcacaagcacacaaatactatgaagacctcaaaatgggtaaacataatatttgggtggaatatgaaaacacagaaatccatgacattcttgaatgataagctcttgaagaatcaataatttataggtcaacttcaagatgttgtaaaacttcatgaggaaagaagaaccttcaaaactacattatccatattngtgaatggaacagataatcttaacaaacccattcaacacta

SEQ ID NO: 137080 - DNA, 287 bp, Glycine max
  unsure (1)..(287): unsure at all n locations
agcgtatgattaatggtttgcactaatttatcgagngacgagacaatctgacatatggcattgaacatggatatgtttttgatccctataaaatactcatattttgcacgtactcctataaacaaatttcctttgcggatgctccttacaaataaattattgttggttctatcacttgaaatatgatccatcaaatggttgttttgtggtctaacggcacgccatattgttagcaaacccttcatgggacttattaaaacattatgttcatttttaagattctattt

SEQ ID NO: 137081 - DNA, 450 bp, Glycine max
  unsure (1)..(450): unsure at all n locations
tgtggaaataataccacctttctgatataggctgatttatccactttaatcgaacctgcaagcagaaaacagcaccctcaggctcagatccacctaacttgctacttccagactcattaacatctacagcatctgcagaagaaccggacggctgactatccatttctgttgtgcaactgtccacattacacgatgcttttacttggttcttacctctacaaataagcagtgccaaatcaaattaacatttcagactaatcatagatactcatccacctaaaagaaacactacactatatacttacctgttaggtgacttttggactntgttatttgaaaaagagatccccttgtagtggtcattcatcaccattgatggtaatgaatcaagagaacatgtngaagaactgtctccattactaaactgctcctttctaaccattccatttt

SEQ ID NO: 137082 - DNA, 433 bp, Glycine max
agcttatccttatggcttgcctccgtttttctctccccgtgccaccccgaaagatctaagccaagcccctacttttgaggggcaactcccgccttatgacgactatcccggacaagacgatggggaaggagatacccatcttggccccctgctccacctcaaagatccgtccccccatgaactacccccaccgaacatagtctgccatatcccagcctcacccacacccgtaaaagaatctgttcccttctcggaagataagggaaagattgaggcgcttgaagaaaggttaagagcattcgagggccttggcaattacccattctcggatttaacagatttatgtctcgtgcccaatatcgtcattcctcccaagttcaaagtatcggactttgataagtacaaagggacgacatgttcgaaggggcatctt

SEQ ID NO: 137083 - DNA, 435 bp, Glycine max
  unsure (1)..(435): unsure at all n locations
ttcanacaattgtgcttcaggaaccagtggcagaaattatggtctttcttgatcttaaacttcctgctgctactaaagaagaaagcaatagccatgctgactctaacagtaacataccctgtgggatagtagaagaaaaccacaaacaggaggcactggtaggccttatctcatagccaaaggtgacatagtttattgttccatcagtgttgctgcaacttcagagtgaagattcaaactgtatagaaatgtttctgcattcattccattcattctctactggagatgtatcttcttcttcctcttcaggtatttctgtttatgtacagattattaagtagctcataatatattgatctcttcctctttatgttttttaatattatttttccgatctatatgtactacttcttgttatagaaaatttcatttttc

SEQ ID NO: 137084 - DNA, 454 bp, Glycine max
  unsure (1)..(454): unsure at all n locations
atacaaactcagcttctatcctgaaggactacggagaagaagggaattgtttattttatctcttcggntatttaatcctctttcttgccttggaggtgtgtgatgcgcggggtgtgagttgatgttttctagtttgtcagtgagttcggagcactgggactctattcaagagtaccttattggcttaatattgttgctggtttcattgggagtgcaattattatctctgcttcatgtgtcttgggatacagggccgctgcggttgttgaagaactattcgtgtttttcatgaagtggtgggtagcaagcacatgttcattacatggttgtgattttatcatattcttatgtgaagcagcatccttcttagtatttgctctcttgatcctgtatggacgccttgtgctcttccaagactcttttaataaattgttatgccgtcataaaaaaaaaa

SEQ ID NO: 137085 - DNA, 440 bp, Glycine max
  unsure (1)..(440): unsure at all n locations
ttctcgaaatccactntgaaaatcaaagcaagcttctttctattaacagctncatccaccacttcattgagaatcagaattccatggagaacgtgcctattatatatgaacgctgactgcctttcatcaattaactcatccagcagaatcctcaacctatgtgccaagagatttgctattactttatacatgcagccaatgagagagatgggcctataatcatttagagactggggttgggatatcttatgaataagagtcacaaaagatgcattgctgcctctaagaaagcttccatgagcatggaattcatccacaaatcttcgaaaatcaggtgtgagcagcccccaaaactccctgataaatctaaaaataaaccccatctggcccggacaattatcgccatcacaactccagatagcacctctgatttctgaatc

SEQ ID NO: 137086 - DNA, 394 bp, Glycine max
aacttccttgagaagcttctatgagatttctttcttgagaagctagagcttatctacacacacccatctaataactaagctcgcctccttgagaagcttccttgagaagctagagcttatctacacacacccctctaataactaagctcacctcttaagaagaaaagctagagcttagcttcacacacctattatagctaagctcacccgcatgacaaaatacatgaaaatacaacaaaaatcctactacaaagactactctaaatgtgctgaaatacaaggctaaaaccctatactgctagaatgaccaaaatacaaggcccataagaagaaaaaaaaacctattcttatatttaccaagaagagtggacccaaccttgacacatgggctcaa

SEQ ID NO: 137087 - DNA, 165 bp, Glycine max
gcaaaggggcgaactgaaggccatgcatggaagatcgcctcacaccatgcaactatgactgggtccgacagacactcaatatcagtgtaacaagaacactaactactgccaagggcttggataacagatccccgagacagaccacctgacactatctgcaagcgc

SEQ ID NO: 137088 - DNA, 409 bp, Glycine max
tcggaagaaagtgatgaggtgcaagcgctaaatgcaatgcttgttagagcccgggtagtcaaagagaagttcaagtccatagccatcaaagtctgaagagagtatgatgaactaagggacgttaatatggccaccgatgaagccttggaatgagaaaccaagaaggcccgaaaggaagaacacgaccaaaacaagttttgaggggctttatagggcagcaatagtgagctcaaactctgaagaggtgaaaggaatcatcatgggtcaaaggcatgatctggaaggacgagctaaaggcttgccttatgtcgaaaagaaatttgtcccaacagttaaagtgagactgaagggaatatgtgggccgtcatcgatgagtgcaaagagaagctaaatcttgcagcgactcacg

SEQ ID NO: 137089 - DNA, 417 bp, Glycine max
agcttaagtttccctacacacgaatatgatataaaagaataggttgcactcgaatagcacaagtaagggaatcccctttatgaaacattcaccttggattagatctttggatttcaaagcttcgacaccgtcaagggtaaagactcttcccgcggccttcatatgtccagtttggatattcatgcctttatcaggacaatttgaggagatgtgccttgacttaccacatttgtaacaagtgatctgagtggggaaagtattgggtttgctaccactaccccccgcaaaccccatatcaacagtcctctgattgttagggcagttaccatatttcttatgaggggtcaagtacggtttttcccaatgttaaggtccattctttttgttcctcattagacactgtcgcaacctacccat

SEQ ID NO: 137090 - DNA, 365 bp, Glycine max
  unsure (1)..(365): unsure at all n locations
agaacctccggntgagcaacgctagtgaaatattttttacactcgcacttgaatagtcttcaagggtcactctccttggctgctcagccatgatagtgtctcctctaactcctgtatgagattgcccatgagtaggaaaactaaaagatgcctcagaagatcgaggttcttctcctggagctgttgctgcttctaagtcctgcaaaaattttctaattctctatgccgctcgaatcctgcaaatagcgttaatctgcaaatctatgggaatcaaatcacctacagcatatcgtctttgcatacaaaacaagcagagcaacaattatccaattccaaagaacaataaattctacagtcactaaata

SEQ ID NO: 137091 - DNA, 238 bp, Glycine max
agcttgtgattggagattatctcgattatatatgcttctggcaagaggcagtccatgatgaatcaatctgcggaagacatcttcatatatctgcgttagtggttgaacactatgataaacattcatagtttggtaattagaaatatcacacgcgttttctatctcgcgtataactacatttattaaggggataccccttctttttctgttgctatgaggtgcctatatatagcctttc

SEQ ID NO: 137092 - DNA, 293 bp, Glycine max
tcaatctgcaacctcacataatccactttcttgtttctcttgagacagaagacgaactaggtatggtggtgttcttcttcaacccatgtgaaataaccttcctgggttcctccttgatcttgcaatatcgaataagctgcacgttgttccatggtggctttgccctatgaatctaccagataatgcactacatctgccacttgcagacatggagaaatcatgggaacaagctcactcgactgatcctcatagttcaataacacaacgcaacttatcgtgggagacctacatct

SEQ ID NO: 137093 - DNA, 373 bp, Glycine max
  unsure (1)..(373): unsure at all n locations
agcanaacgagagtgccgagacagaattagatttattctnctgccaacgcagaaaagaaaatagtgcgacataacattataacatacaagcatattagagtcaagaactgggtacataactagctggcaggggcagatactgcggaggatgctaattccacattgacaactaagtcaagttagatgactataaaaccataccaaatatatagggtgctgcaccaccagggaatttttcccaccctatcaacatattggtaacggaaggtaaaaatcaaccccgaagctaattaacgaatggaaactgaaatagggtgcaagaagaatatagctgaactggtggcatacacaagtctgcggtacttcgaaactt

SEQ ID NO: 137094 - DNA, 371 bp, Glycine max
ctacttatgtggcagggcgggcttccttcactctcttgtcttatccgcgagctatgaccaccgcccttccttcccacgatgcttccccttacatctgcctgagagggcttatagcctaaaacatacttcccacgatttactttggcatttatcaggctagttatgccgccgtagtctttgcctaaacccattacgggttcgtaaccgatccccaacataactcaggccatcattactgctgcatcggacaggcaagcttgcccaaagaaggagtccacggaggaaatgcttaccacctcataagactggtaagcggtttctaatgactcctttgccgcttccacataaggcatataggatgggcagctcac

SEQ ID NO: 137095 - DNA, 123 bp, Glycine max
aaaaacctatcattaacaccacaaagaccgacaccaaaacacaccgcggcccaccggacaagcacaaaacagaccaccgaaacccggacaagaaacgcaacaacggacaagcaccgccaaaga

SEQ ID NO: 137096 - DNA, 296 bp, Glycine max
cagcggctgcggctggagacacacccaaggcttgacctatgcaacttgctcgcaaatccactcggcacttggaacgttgccataaccccaggcaaagttccggaccctccagaatacccaggagaccactcgaacacaacaggtgcctagggcggaggaacgccagggcacaacactgagcatggtccgaccctgaaggcacacgtgcacagggcaaactgacgccaagagaacaccttgggaactctgaaagtggcgagcgacaccatacacggggcaatgacaccggaagagaa

SEQ ID NO: 137097 - DNA, 420 bp, Glycine max
gggatccttagcacctgcagctgcactagaaagaggtctatctttccaattacagaaggagtctatcatacacctccaatctttaatggatagggagaccactactggaaaacccgaatgcttcttttcttcgtggcaatacatctaagtatctgggaagccattcaaatagggccttatatacccaccacagtggaaagagtctcaatatatggtagttcatcaagcgaaagcatatccataaatacacctagagatacatggtctgaagacgataaaatacgagtcacttctgcttataaaccaatacacttaataacttctgccctaagaatgggtgaatatttcacggtttacaattgcacgagtgctgaggagatgtgggacactctttcgttatcacatgcacgacctacagat

SEQ ID NO: 137098 - DNA, 415 bp, Glycine max
agctttggtgaggacgagatgaagattcttgatggttatcctcacaacggggcgagaatgtgtaggtttgaatgcgacactgttgctgatctgcatagatgactcgcacgctggtggactgctctcccatgagtgcgtgatggttgcgacaatcacagcggggaatgttgatgatttcttaggcatggcttgagccaggctagataagtgtatggctgtacatggcacccgtaatcgatcaccgcctcatgtgcatctattctttcgcacatcaaaaagtgttatcaaataggcacagtgcgttatccgattctctatgttgaaaactaaaacatcattctctggtccgttgcctttaacaatttttgtgaagagacaacactgtcctggaaaaaaagattgtgatatcaacttc

SEQ ID NO: 137099 - DNA, 379 bp, Glycine max
  unsure (1)..(379): unsure at all n locations
agcttgctgtcatgacttacatttttgatcctctatggctaaattattggagttccttttttaaatgttatgaaaaagaaattgcagtgattgaaggagccgatagcaaagccaataaaaaatgactgattatgcaataggcatgaagctcaagtccacatcaaagggtttatggggagtgtgactactcccaaaacgcttgcaatgaatgaaatagttaggggggaaatattcttgttcacgtgtaacaaaagtggttgctgcaagctcataatttcgtatgcataagtataacttggtggccctctcgcttgtggtaaatcacaccctgctttgattggtaatcttggtaatattactaattntgctataactcttc

SEQ ID NO: 137100 - DNA, 438 bp, Glycine max
ctataaaactcacgctgagggttaaagtctaacgattgtcacgtgctcatgttacaattgttagctgtggctatacgagacatcttgccaaacaaagtcaggttagccataactcgcctgtgctttctcttccatgctatatgtagcaaagtcattgatcctgtcaattttgatgagttggaaaatgaggccgcaattatactgtgccagttggagatgtatttcccccctgctttctttgacatcatgattcacttgattgtgcatctagttagagaaatcaaatgttgtggtcctgtttatctacagtggatgtacccggttgagcgatacatgaagatcttaaaagggtatacaaagaatcattatcgtccagaagcatttattgctgagacgtacattgcagaagaagccattgaattttgttcagaatacatt

SEQ ID NO: 137101 - DNA, 397 bp, Glycine max
agcttgtagaatggctagacatgattcatgtcagttttttggttggctcaaggataaaagggatgccccacattatttccatgacacaaatgcaaaaatgatgatttggaaactttatgcaaaactggtcatgcctgcacctatgtggacactcaagtgtcaaatttttatggtcatgtgatgctaaagctcaagattcatttcctctattttaaatcaacccaatggtgccaaaatatgtgcttttatccatttgtgcattcatccgagtccattttgggcgtccggggaaatttcacaaatgttaccctttgggtggatacacattttttttccaaaaactatgtatgatcagcgaatttttcttatagaaatgtggaagtattttttttaatga

SEQ ID NO: 137102 - DNA, 388 bp, Glycine max
agcttcttgttattcattattatggatttgtccgatgattctccatatgtagtcgcggacttgtgttttcctatgctttggatgctagaaatgttatggtccatataaacagagcatgtctttcaaattaaagcaaaatttatgcatgaggcatttgagctgagcatccatccttatcggattataatttgattccccccgtttccccttttcaatactcgatatggagggaattaatttattatgcctggaatggttgacgaatatctcgggttttgtgtggcttcatctggatatggggtacaagtgttaaattaaataacgattcatgtctaatgtaaatccccggatcctgcttttttcatctgctattttttgcaaatccatt

SEQ ID NO: 137103 - DNA, 392 bp, Glycine max
  unsure (1)..(392): unsure at all n locations
agctngtagaatggctatacatgatatatgtcagggcttggtttggttcaaggataaaaggggtgccccacattatttccatgacacaaatgcaaaaaatgatgatttggaaattttatgcaaaactggtcatgcatgcgcctatgcggacgctcaagtgtcaaatttttatggtcatgtgatgctagggctcangattcatttcctctattttaaatcaacccaatgtttccaaaatatgttcttttatcaatttgtgcattcctccaagtccacttcgggcgtctggggaaattttcacagcattcacccttcaggtgtagacacgttttttttcttcaaaaatcggttatgatcaattgaattttttcaaagaaaagttggaaatcatc

SEQ ID NO: 137104 - DNA, 286 bp, Glycine max
agctagtataatacaccccaattcctttgacctatgctaacttgctcccatatctactcgataattcaatggtggccataaccccaaccaaggttcctcaacctccatattttcgaggatacaactcgaacacaacatgtgcttatcatggaggaggcccacggcattccattgagcattgtatgaccctgaaacataatgtgcaaggtctaattgatgcgggttggctgaaatttgaggagaaacacttgtgaattctgacattggcaggcgacaccatacatat

SEQ ID NO: 137105 - DNA, 300 bp, Glycine max
cagctcagacaaaaggtaattttttcttgctgacaagaacagcgagatgattattagacacatacgatgcagtgacatattatgctgtactgtgttgttcatagattgactacaaaacagacatacgggagctttattgaactaagggtgaagctctggtagaatgacgaatgaggtgcttttggtgaagaactctaataatgttgttgagtcggagctgttgagacttctttaaggtgttgtctcatgattgttgtgctagttcgattggagtcttatggaacatgcttctcggttcaa

SEQ ID NO: 137106 - DNA, 230 bp, Glycine max
  unsure (1)..(230): unsure at all n locations
tgctngagtagaagaagtgtagaatggtgaaattctctgctcttattcgcngaccacagagtggtacctggagatatgtctcggtggtcaagacaccttggggactaaaagaggggtgctattgcccaaaaccaagcttgaccaatcccgacccaacccggccatagtcagacagcgtaaacctgtgatgtaccctaaacaagcgagctcctggcactccaccaataaaa

SEQ ID NO: 137107 - DNA, 141 bp, Glycine max
agcatcagcatcagaccactttcttgtgctggatctactccacatggactagatggggcctttgctatttagaatgcacttggatgtaagatgcatccctatgtcgttgaggatgatatctccacatgtacctgcgtcaac

SEQ ID NO: 137108 - DNA, 309 bp, Glycine max
  unsure (1)..(309): unsure at all n locations
agcttngtacgacagacatattaagattgttatttaaatcgccttagaatatggattgtttatcaaagttactacaggttctattaaaacaccgccgaatttcaatggcgtctgggcttcaaccttttaatttaaacccttcacttactctttgttctcaccgcctagtcttgcctcctctgtactctctcaccaaataccaaactcctttctctatacacctctctcttagctcaaccccttcgtcgttcactgcattaccaaattgttcgatctcactccggtcgagattcgctcacacatgttcat

SEQ ID NO: 137109 - DNA, 417 bp, Glycine max
agcttacaactaagaacatctgtatctctaaggaaacctaactaatattttcattggcaaaaagggattcccttcgaaaaatgtgcaacttccattcccaacgaatacttgagggatccaatgcccatgataccaagctaatgatgtagaaataaattcaccttggaaagctcttactaagtttatgatcaattgatgattatatgaagtcgtggttaataaggaagaaataaagtctttcaaaccacttcttcctagcctgcttaagtctataaagggacttgagcaacttgcacacctttcctagttatggatagtgaagaacttgggaaaccaactaccgattaccatgttttcatttacaattacgtctttaatcattcataagctcttcttttaaaatttgtctcaaaccta

SEQ ID NO: 137110 - DNA, 278 bp, Glycine max
tgcaagctgagacttatggattgtctacatatttcacctttcattccagaccacagaatggaaccaggccactactttcgaggggcaagacacaccttatgacgactatcgcagtccaaacgatgaagaacgagattcccctattgggaccctgctccgccttaatgagtcaaccccaactgaattattcccatccgaacgtaatccgccttattccagcttaacccacgcacgtaaaacaatctggccccgttgcttgagataatggaacaaatgag

SEQ ID NO: 137111 - DNA, 330 bp, Glycine max
aacatgttgtagcatactgctggttggcgcaacgaccacacgatgctttaccggtatttctttagtaagagaagcatttagacataatatgccacatgccattctataaaaaatattggcgttatatattaaactgcaggctatgttatcattatgatgatgaagtttgattcaacaaactaacctatgaaaattaagccattaaaagtattttgagaaaaaattcatatatctacagattggaagacctatccaaagcccataacaaaatggggggtcgtacgcggcatacgattgttaatgatgaacactgaacgtacgctattataa

SEQ ID NO: 137112 - DNA, 298 bp, Glycine max
agcatgatctatgtgggtgttgggtttctaaaccaaacgacacggagaagcctaaggctgatcatatgaatatatgttatcaacctgtagaataattgcccgtgctttcacttgatatgcatgatcgatcttctccttttcttatatcgaatacgcatgctcggcccacattatcatctttggaaacaacaacgcttactaacaacccttgaagtggttgacggtaatttgccagtcaacctctgaattcatctttttggcctaaaaacttgtgctattttggaaactcataccgttt

SEQ ID NO: 137113 - DNA, 345 bp, Glycine max
agcttatcctatgcttctttggccgttgatgcgttggatatcttctcaaatgtatcttcatccaccgattggtaaatgagacagagagctctcttgtctctctttcttgactccttcaacgtcttctttacaccttggcttatcgaggctttatcttgctcctctaagccattctctaccatatcccacacatcttgagctcctagaagcgccttcatcttgatactccaattatcatagttgttctttgtgagcattggcatttggaaaggaaaacctccttctccatcttttgaggatcttgaagctctgttaccactttgttggaaataaggctttttatgt

SEQ ID NO: 137114 - DNA, 349 bp, Glycine max
  unsure (1)..(349): unsure at all n locations
catgcaagctncnaaaccaaagcacagcnaggtggagattctccttcttccatggctcataccctagtggaaggcgcctcctatcaccatatcacctatgacttccgaagcatctacatggcggaaaatcaccattaaaggacctcattgaagctcaaagatccaccctccatagaagccccacaagcaagcttccatcaataatggtatgaagaaaaaaaaggaaagaaatacgaatcattcattagagaggaaataaaatagagaattcgagtataaaataataaacaaacaacaaatagagtaaataacaagctgtgagtatcctatgaagaagcaacgccttcca

SEQ ID NO: 137115 - DNA, 339 bp, Glycine max
ccgcggcatgcaagcttggcgaacatagaagacgcacttgggtgtactttctctcgacagaagcagaatatcatctactaaagccaaatggaacatctgactaccggcacaggtgggatgaaactctatattggcatcctccttgacgcggcccgtaccttagaaaaagtactccaaatagagcacatacagattaagggagagaggaacccctcgtctaacaccccgctgccctccgaagtgactgtatatgtatccatcgcttgtcactctcaaggaagagtaagatcccctggacaagatcctaagtccaaaactgggcctggaagcccatggact

SEQ ID NO: 137116 - DNA, 428 bp, Glycine max
  unsure (1)..(428): unsure at all n locations
agctttnttttaattaaccctaacttttttaatatctttttgaataatcctcagcttaaacaaatttttaccacatcacagtagggtaaaaaaaaaccaagcctacctatcagatgttgacacgtggcaatcaacatctgaggctaacggtcaacgtccaattgggacgtttctgaccaacattgcagggatttaaaaaatgagagaccacatttgtgaattaaattatagggggaccaaatgcgaaactggagcaaaagtgagggaccaaaattgcaatttttcctatttacgaaactgtcacaaaagttcatattttggtgcttaatattatttacaatnagaatgttggaggcccctcatgaatttaatattcttaaacataaaatcttatttattatttaaacctttggacccttggtggtatg

SEQ ID NO: 137117 - DNA, 253 bp, Glycine max
tgccgatgatttgagtaactatattctgtagccaacctccctcatgagtgattcgaaaccgacctcaattaatagaccaagcgatcgggattcaatccgagattgcagattcacgataagacatctcataccgcctggtcctgaatctttggggatgtatggtatagatatgagggtcgaatctttgaggatcctaacaccgttggaaagaaaatctctcatgttttttatataacccgaacgatactctctg

SEQ ID NO: 137118 - DNA, 369 bp, Glycine max
agcttgctggtgttatcgttggctttttcctgcacgcagcacgcagactctggggcactgtaatgctatcgtacagacaaaacaggattctttatggaatatacttggaggtgagtcacaaaactatgaagtttcagcatcgctgagaatcagaaaccataaacgaccatgctatttatgcccgtcagatagggcaccctgctacaagcatactgagagtaatatggttcctgtaacaggaagttgacgtgggtataagaggctagaattgcatactcactacgcgatgtatttaatgaagcacagggctcagccattccgtgttctatgtcacacaaagaaatataggggttagccaacacgtgttat

SEQ ID NO: 137119 - DNA, 244 bp, Glycine max
ggaaaaccctggccagagctacttgaaagtatcttgacagcgatgtctcgcccacacactgatattacctgaaaattgcattcattctgagaagatgattggctttgagacaatgcatctctgggatactttatactgctaaggctaaaattgataatttcctttaataccgggccgaacccaccagtgaccatctttggatccaacgagaaacaatttcgaggaagagggatatgcacctgat

SEQ ID NO: 137120 - DNA, 322 bp, Glycine max
ctgcattctaatcaaccacaacctttttatattattgactagacaaatccccagctgaaacaacaattgaccacatcacggtcaggaagcaaataaccacgcctacctatcaggtgtcgcctctcggcaaataacatatcgagctaactgccaacgcacaaaagggacgtttaaccgaaccataggcggatgaaaaaatgagacaccactttgtcaataaatttaaggggaccaatgcctaacgcatcatatgctggacctaaagccatctttcttttacgaactgtcacaccaggataggtggtgtgacagtgtttaaatt

SEQ ID NO: 137121 - DNA, 309 bp, Glycine max
agcattggctggaggtggatactcttttagtcctcaaggcttttaagggtataaatgtggctccttaggatttacgaaatgtctggatgaatactttattctattgtggcccacatggagtttcgggtcttccatattttctgagatagtaatgtatgtgctcactatggcgtagaaatactctattatgtgggaagataaactttgaatttggatgaggtgttcaaggggagatacttggtattgcaaggaccgaaaaaaaaaggttacctcttggttttggatgggcaagccttgagaaaaaccatg

SEQ ID NO: 137122 - DNA, 309 bp, Glycine max
agcttgtattgtgaattacccacgttttacatcagctaagaataaagcccagtagagtgtatagtgagggacaaccctcaccccttaagctagcttttgaaggtgaggttggtttaaactcattctaagaatctaagatggtattagaggatatctaagcttaatccaaagggcgcacccacaatagttatccacgcaccacgcctattaagtgctgggcgtgactgaatggatttggaaaaatctaagtcacacatcaactatgaattaagtttagttaaagtgtataagtgaggggcaaccctcatc

SEQ ID NO: 137123 - DNA, 410 bp, Glycine max
agctttactttatattctatgaaccctcggtgggccacatcgtgtcatgcgtactcacactcccgcttcatttactttatatgccctgcgttgatgcgcttaagccatattactcaaggcatttctgagctctaacttaaaagaaagatcaattttcaccgaacgttggaagggtatgatccgtctagctcgcgttaaaatgaagtccgaccgctcggtcgcgccgtttccacgctggatatcaaagaagagggggacttacatcctataatactcactataccctccttacgtaaaataaatgggcaaatcaggccgacgatatctgttacggatgtctgattcgtaattgtattgactagttactcacgcgaaactcatgctgatatccactcgcctagtcaagctcg

SEQ ID NO: 137124 - DNA, 452 bp, Glycine max
agcttcttcacaatttgttaattagaaactctttctatatattattagttaagaaaaatcatacattttagcaaataacaacacatgtcaatgagtttattaataaggatctcaatttgattctaacataatatatctttaaagaaaaacaaaattttttaagtttgattaaattttgaacttagaattaattttataatcgatctaaaagattaaaattataaaaatcttacaaaatttcaaaaaagaaaaataaaaaatccttattattaatatggataaaaaattatatattaaataaaaaattgaattcacctcggttaataaatcttatatgaagttcaatcaataataaagtactgacaacagatgtattattagctgttaaaggatttttattcgatcacattagtccgaaaggtacataagtgagctctacatctaaacttcag

SEQ ID NO: 137125 - DNA, 445 bp, Glycine max
  unsure (1)..(445): unsure at all n locations
agctntatttttaattatgtacaagncaactttattttaattcttctttttattttattattctatattggagaaatttaatcaaacacacttaacgaaagttaattttataaatcaactgagtgattattcatacatgatcatatatatatagctataatttttttcagtctcatataaaaatcaaactatgttcatgtattcctgtcatcatttatgtcaaattttataaaaattataaaataataaaataataaaataataattaaattattcatattttgtgtatattttaaaactttatattaagtcaattttatcgtgtatatataaatgagatattaattaattttagattaatatataactttgtagacataatattaatgaaattttaaattttcacaatatcaaaaaaattaataatgtgataagcaatattacg

SEQ ID NO: 137126 - DNA, 451 bp, Glycine max
  unsure (1)..(451): unsure at all n locations
atccttaagcgacctgcggctgcagcttatgagatcacacgatcatttgtttttgtgataccggatgacaacaaagatgctgacaaagtgatgaacacacagctcaggtgaatcttagaacatccatctcaagaatcaagattcaagattcaagttcaagaatcaagaagaattctagactcatgaagatagcctacaaacaaagattcaagatctcaagaatcaagatcaagattcaagatctcaagaatcaagatcatgaatcaagactcaagatctcaagaatcaagatcaagattcaagactcacgattcaagaatgaagaaaagactcaatcaagataagtattaaaaagttnttttaaaactttgaatagcacatgagttgttgacanaacctttaccannagagttttactctctggtaatcgattaccatgttgttggaatcg

SEQ ID NO: 137127 - DNA, 187 bp, Glycine max
  unsure (1)..(187): unsure at all n locations
agcttgngctggatccgttagacaaattctattctattttatgcgcgcctaggccaatcagagggatcttgtgatgaggcatcgttccagttagactattggctatgaggctcatctgatcgaccgctactccaacacgaggaatatgaggacgaagtttggactgattcactctagactagggatc

SEQ ID NO: 137128 - DNA, 447 bp, Glycine max
  unsure (1)..(447): unsure at all n locations
agctnttcaaactcactaaacactccccctattttctgtttnttgtttattgnctcgaaagattgccagccactttacagacaataaacatcattgatgtgttaatggaatttgatttgaaaattataatctttatgtattataatccgaattgattgtttggcaacaggttcttgagatgtaagtactgaatttttcactgaataaggaacaagatactaccactgcatcatattattatagactcgaacagtatccaccacagtttgtaactccattctcgaattccttagaagagtgttggtatcgacaatttccatattatgcatgacgacgaagtaaggacatagatgatgagaaacaatttaaattaatgtgacatgcagaattcagtttcagaaacttnttcgccatctctctcggtgtatggattaacacgacaacact

SEQ ID NO: 137129 - DNA, 447 bp, Glycine max
  unsure (1)..(447): unsure at all n locations
agcttaggaacccaaacttgtagcttctttgcttggaaacatgcttatggctaggaatccaaaatttggttttagagttagaaaaacatgaaaattatgatttgcttgtgagagtttttgctcgaatttgggctgccccatgtttgatacttcacatagaggcagcgtggaaaataccttgcaatagtgtgtatacataggtaaatataaggagtatgaaattcctagcaaagtgtgaatgaatgtatgatagcatggaatgcccttttgaatgaaaatgtgtgcaggatgtaattagctttccgatatgcatataaataaatatgagagaaacaataaaaatttgtatggtgtacttcaaatgtatgtaggtagtttgtgatagcanaatgtntanggatataaatacgtgtanagtttgacacaacactctgagcatgaaagtgt

SEQ ID NO: 137130 - DNA, 373 bp, Glycine max
  unsure (1)..(373): unsure at all n locations
cccaagcaccgcagcagcagctgagagttaagttacgagcgacttgttattttatgtgcctgaagcngaaacncgagagatgagggatgaccattaaaatccctcatgagctttcatttttgaattacgagcgtgtagagatatcatgggcctcaatcgtacacccatgtctaaagttatggcacgatgaataggaccaaagctatcgtgatgaatttcgagtgtctctatatatattgttcctgaatccgacattcgagtgaaaagatatgaacatttgacatgcatgagagcgtccggtattcaatacctagcatatctatagcacatgggcctcaatcatacaaccatgtcaaaagataaggccgaatga

SEQ ID NO: 137131 - DNA, 436 bp, Glycine max
  unsure (1)..(436): unsure at all n locations
agcttggagtgcagtaagaacctttgtgtctattcatctatgcacgagcttatgggaattttgtttagctgttcatcaagtggaatgtagtttccattttccaccatatccatgaggttaatatgaatagaatcgaaatgagttatcatactttccttctagtagccatactttgctcctctaatagtggagatttgttggtggagcacccttcttccatttctttcatatattaggatcttcctctgtatttgttagaatattcaacccaagaggtcgagctttgatgacaactaanatacaataaatcacaatgcccgtgtgttagataaacttagaaatatttttgtaatggaaatgattntacaggcaaaacangttctcagaaaactatcgtctagtaacaaaactcaaagtttcacaaaggtgctatgga

SEQ ID NO: 137132 - DNA, 423 bp, Glycine max
  unsure (1)..(423): unsure at all n locations
agcttcctcggggccattcctgcgattgtattcttttggaaagtnaggttacaagaaatataccagtcattacaaacaggggccaaccaacacttttaatggcacgagtgtcaacatgcactttataaaataatcatatgggggtcgggctattttatgacacatacgtatttgcacacataaaaattttgtgtgaagcattttacgacacctattcatgtacatatttttttgacaaaccttttcatgctacatcctatgtatatatacacacatttttttggaaggcttcttttgttacctactcacaaatacacatantttgaaaaacactnttacgctacccatccaacacttttgaaggcacttcatgctatatatattcatattatggcaggcattttcatgctatatatattcata

SEQ ID NO: 137133 - DNA, 412 bp, Glycine max
agcttcaacattcaagttcgagcgtcttatatatgacggaactcaatcagacatccgagtaaaaagttattgtcgtttgaattggctcagaggttgaacattcaatttcgagcgtctcgatatattacgggactcaatcaaacatacgagaaaaaagttattgtcgtttgaatttgctctgagcttcaacattcaattttgagcgtctggatatattacgggactcaatcagacatccgagtaaaaggttattgtcgtttgaattggctcataggttgaacattcaatttcgagcgtctggatatattacgggactcaatcagacaaccgagtaaaaagttaatgtcctttgaataggatccgaggttcaacattcaatttcgagcgtctcgatatattacgggactcaatc

SEQ ID NO: 137134 - DNA, 395 bp, Glycine max
  unsure (1)..(395): unsure at all n locations
agcttgcttctacaaggtacatgctcgtttataacaattaaagaanaatagatgaaagagaatgagaaaaagtaaattcacctttttgcactccaagaatgaattaattgcttaaatgccatatttatccatagattcatgaattgattctagctatttagcaagattgtaacatgacaaagctatatatgaaaccagttctgatttgggcatctataattgttcacaagattttaaaataaataaatataagacccttacttgatgagcttggttgatatggtaacaccattttctactaatgttcagttaacctaacagagaagccaaataactaaaagagaagcaaaaatcaaactctctaaactttgaaaatcaaatgcaggaaaaacatg

SEQ ID NO: 137135 - DNA, 384 bp, Glycine max
  unsure (1)..(384): unsure at all n locations
gctgcagcttgcacagntctgccatcatcggtgttgtcttgtttagagagggactgtccattgaggtatgagtgtntatgatttactgcggtgctaataaattattgatatttgatgtttttatgatattacacttcctactacttctgggtttgatgttgtgataactactcttaaggattacattacatctaagagaggatttgattgctgatcaaacacaaaaggtctttgatacgatcctaacaaagttaggttgtactggcccaccagttcctaaattttgcatgcaaaaaggaggtaagaagctgcattttttataccatgcactatcataccttaggtgtgtatggaagctttcgtttttggcatcagacaatgaat

SEQ ID NO: 137136 - DNA, 404 bp, Glycine max
gacctctaagcaccgcagctgcaactaagctccttcaattgcacaaggcttttattatttgaagagtatccttgtggaaccttcacccaacgaagacactgacaaaaacttatcttctatttattggacaaagtatggcaggctgggggcaagtaaattttcttcccattagtccttggatgcaactgtgattgtgtacccatatcagctagatcttgatgggtattcaagacatccttcatcttgccttgaatgttaaggagcgtcccaatcacactgtcacaaacatttttctccacatgcataacatcaatacaatgcctaacgtgaagatcacaccactacggaagatcaaagaaaatggaccttttcttccatatgcaactctgacttttatccttctt

SEQ ID NO: 137137 - DNA, 435 bp, Glycine max
  unsure (1)..(435): unsure at all n locations
agctttatgtgaaaggatgtgactctttttatttttatntgaatntcaacgttcaaaggcactggtaatcgattaccaaaatattgtaatcgattacaatattttgaaattaattggaacgttgtaaattcaacttgaaaactttttcaaaacaattttgctattggtaatcgattaccagagagtaaaaactctttggtaaacatgttttgaaaaaaatcatgtgctactcagtttttgagaaaaacttttcatacttatcttgattaagccttctcttgattcttgaatcttgagtattgaatcttgatcttgattcttgagatcttgaaccttgaatcttgattcttgactctaaactcttttcttgagtcttgaattcttcttgattctcaacttgaactctagaattgttcttgagttacttgagatatt

SEQ ID NO: 137138 - DNA, 438 bp, Glycine max
  unsure (1)..(438): unsure at all n locations
agcttgcttgtggngcttctatggaggctgtttctttgagcttcaatgaggtcctttaatggtgattttccaccatggagatgcagcggaagacaaatgatattaggtgagaggaggcgtcattcactagggaataagccttagaagaaggagcttcaccaccaagatgagccttggataagaagcttggagagggtgcttcaatggaagaaaagaaagagggagagaaagagagatgggggaacacgaaattgaagaaagaaaaagggagagaaattgaactttgaattgtgtctcacaagactctcattcattaaagttacaacaagtgttacacatgcttctatttatagactangtagcttccttgagaagctntcttgagaaaacttcctcgagaagcttctttgagaaaacttccttgagaagctagagctt

SEQ ID NO: 137139 - DNA, 444 bp, Glycine max
atcttaagtcacctgcggcatgcaagcttcttttggaccttgaacaagctatttacttctctttcagaaccatgctatgtgcttgcgactggtccctttcttcccttcgcaacttgagttcattattgctaccccatagagctccgcgaaatttgttccggccatactcttccttgcgagccctcttggtctcttgttcaagggctcttgcggtaattgcattctcttcccgtaacccggcgcactccttccgaacgtgtgtagcagccaacttgaacttctccttggcgagttttgcctttcctaactcgcttttgagagcttggacttcctcgtcctcttccggtgcttcaaaattctcttcgctgacgacttttaacttggcgagccaatctaaacctcgtatgcgaactttcagccattcgtggtacccaccaatgatgc

SEQ ID NO: 137140 - DNA, 409 bp, Glycine max
  unsure (1)..(409): unsure at all n locations
agcttaanaacaaaatataataattttattttatatgagagaagcttatagaaatcaaacaagataataaattatcctcacattataatagaagcatatgcgcataaataacaaatacgtcataagtcatcaaaacataaatcatttgtctaagtcacttgcatctagaagtcttaattctcttctaatggtgtagaaagaatctttggttagtggttttgtgaagatgtctgcaagttggtttttagtatctacaaattttaaaaacacagccacctttttcctaagactaagtgctaatttactatcaacgcttaccaatatgagtttttattaacatagaaggttttatcatatcaaaataattttatttgaaataaaatataataattctgaaaaacataaaaaa

SEQ ID NO: 137141 - DNA, 392 bp, Glycine max
  unsure (1)..(392): unsure at all n locations
agctntgataccagatgatgtgaacctgatattgttctgatcgcttgatacaggctntagagttttggatgacgccacttccggtgaaggaagatattttatggtagacatcacttccggtgaaggaagataagtccgggtagacgtcacttacagtgaaggaagataagtcaggatagacgccacttccggtgaaggaagataagtctgggtagacgccacttccagtgaaggaagataagtctgggtagacgccacttctaatgaaggaagataagtcaaggtagatgccacaaggattaccttgataagtctgataattggttcaacaaggaacccggagagaaactctcaccaaattttatcaaaatgccaaaagttgtttcttattc

SEQ ID NO: 137142 - DNA, 425 bp, Glycine max
  unsure (1)..(425): unsure at all n locations
gcatgcaagcttatgcttttacaaaaaggttcttctttgctctgttgaaatatggnaagaaccgtcttgcaaaattggggcaaaagatgaatcaagtcacatcactgcttcgtctaccgccaaacatatttaggattattgatgtccttgttacttccagtttcaccttgacaaagatgtcatggaccatgttgaaaatctaaattgattcaaccccatatcctgcgtaaaaattcgcaatacttcaactgtacatcattcgcatacatccatgcttttcattggttgcattgctcattgcattctttccttgaaaaataaaataaaataaaataaaatgaacttaatcattgttatcaaaaagaaaaggacacgctntacggcgcccttaccgaactcgtgctagagctagagtaatgggtgaa

SEQ ID NO: 137143 - DNA, 400 bp, Glycine max
  unsure (1)..(400): unsure at all n locations
agcttgtcattgtctctccgtctgcttcttttctaccatcttcgcaatcgnctatgccactgttgtctcgcccttgtggcttatgtccttcaaaagacacttcccctgttgttcttgtgcctccagctgagccttaatctgatgtggttcatactgttccagcaggtcaccctatggtgactcgtgctaaagctggtatctacaaaacctcgccactttgcatatataactacttatcgaccatcttctcttttacatgcattattcaccacttctaagcctaaaggttttaaatctgctgccaagcatcctagctggcttgctgccatgaatgacgaactcacagccttacactccaacaagacttgggaacttgttcctcaaccacctaacactaaca

SEQ ID NO: 137144 - DNA, 424 bp, Glycine max
  unsure (1)..(424): unsure at all n locations
agcttgatgaggacttcagtcagaagagtatattagacatcatgnngcggtggtggagacgatgtacgctcatcgggaataggaggcgatatgtcttgattgcgcacccagtgaccgtccatgtcttttcggtaaccaaaagatgtaacagtaccagcaccaatagagaaagaacgtttaactttggcaaaaggttcatcatccaaggggacattgaaatgctggagaaataaggtaacaagatagggatatggcagaggtgcattggcccgtaatgccttatgcatttggtactgaacaagatgagcccagtcgatctgataaccagtttgaagagcccacaataagattaaatcctccttataggcttgggcaaggttaatggacctangaagcaaattcgacanaaatatagtgcatgatg

SEQ ID NO: 137145 - DNA, 395 bp, Glycine max
  unsure (1)..(395): unsure at all n locations
gtatccttatggaaccttcacccgacgaagacactgacaaaaacttatcttctactttttggacaaagtatggcaggctgggggcaagttaattttcttcccgtcagaccttggatgcaactgtgatcgtgtgcccatatcagctagatcttgacgggtattcaagccatccttcgtcttgccttgaatgttaagcagcgtcccaatcacactgtcgcaaacatttttctccacatgcataacatcaatacaatgtctaacgtcaagatcagactagtacggaagatcaaagaaaatagacctcttctttcatatgcaactcttactattatccttctttggggtcttcccaaatacaactatcagggtgtngaacacgctcatatacctgctca

SEQ ID NO: 137146 - DNA, 450 bp, Glycine max
  unsure (1)..(450): unsure at all n locations
agcttggcaagattctaaaattgacaatcatctcataaacacaagcacatgaggatcaaaaggtcttttaaggttgtaatggggccaaggacaaggtatttatataaatatggaataagtggctgaatcccaaaggaatagaggagcaatggggaataaatgcataataagaaaacataaaaaagaataaaaagaagtaaagataaaatttaaacataaagagtagaaccaagagtctcatcattcttttgtcatttaagatcttattcactcaactttactgcttttctttttctttttcgattttttttttactctgcagcctttgagaaacaacatcatattcagcatgtgcaacatntaaccaatatgcaatgtacatcaagtatggctcagaatatattatgaagcatggccaacaaaaatatgtactcaatgaaacaaaaaccc

SEQ ID NO: 137147 - DNA, 436 bp, Glycine max
  unsure (1)..(436): unsure at all n locations
agcttctaaggaggtgagcttangttttatatgggtgtgtgtagctaaactctagcttctcaaggaagttttctcaaagaaacttctaaaggaagttttcttaagaaagcttctcaaggaagttttcttaagaaagcttctcaaggaagctacctagtctataaatagaagcatgtgtaacacttgttgtaactntgatgaatgaaagtcttatgagatacacttcaaagttccacttctttccttcttttattccttcaatttcgtgctccccccttctctctttcttttcctccattaaagcatcctcttcaagcttcttatccaaggcaattcttggtggtgaagctccttcttccttggcttattccctagtggatggtgcctcccctatcctcttctcctttgcctttcgctgcatctccatggtgaaaaa

SEQ ID NO: 137148 - DNA, 329 bp, Glycine max
ctatatcctactcacccgctttatattatacaaggagaaatcaaaacagttgtccatatttacatatggactcagaaagagaaggcgggacgacaacatcttgttaaggaaaaggtacaacgtctcttgtataagcaagaaagaagcaatactcctaagagggaaaaagtgaaacaaagctcaagcttatcacaaatcagaatgaatcaaaactgccacaactcttgaatcaaacggagtcaaacaaagaggcaatatacaatatgtcacaaaaactaaagagcaagccaaacaacttgagaatgtacaaaggcacagggatgaacatg

SEQ ID NO: 137149 - DNA, 344 bp, Glycine max
taaacaaatggaaagcccacagtttttcccacaccgccacacacggatttatattagtgtaaaacccttttataaatctgccatttgatatctaataaagtcttaatccttaatattgacttttgcgatttcaaaaataaaatgaatattaccaccgacgttcaaaaagtcgattgtataagtatatatacaaaatatgtcatctattccttaaaaaaagttatttcatctattatagtctgaagattattgacatatattatattcaaaaaatgccttgtattgactttacaagttcaaggaaaaataacaatataaggattctatgtattgaggattaacat

SEQ ID NO: 137150 - DNA, 449 bp, Glycine max
taagcactgcagctgcagctaggccgtcgccaaagcctttttttttgtttccgggtatgctgaccggggagggaattatcaagaggtaacaaaaccgtggagagaaattataacttccgctcttacgatctccatgaagttcgatcacgtaacgcatacttttgaagggtacgtgggatacacaccctgaatgtgtaaaatactatcgatgatagtatgaacaattcatgaacctcactttcttgtggctattatcgatgtcataagataccttcacttgcatatatacaaacccaccctgataatgactttgtaatttcctgatcttttctgtttctaaccaatgacaccaacactttgtattggaaaataagcctatatatctggagagttgcctgtgtgacaatattgcagctagtcctttcgttgctataactatcttgcaattt

SEQ ID NO: 137151 - DNA, 435 bp, Glycine max
agcttataagaacaaaattgccttaatctattttaaatatgcatgtgaattaggacgcatcaacaagaatcaagccaagactattgtgcaagcaatttatctggcaaaacacaccaaatgattataatgatggatggctcaaattctcacaaaggtaaaatcatcactttcaaattgagctttcaaaactatcatgacatgtagagaagaatcaaggatttcaagtcacaaaatgtcaagaacttttattttcaaaacaattacccatttcttgaacatatcctataattcaaagaaaaacatgcaaagtcgtacatgcacatgaaattgacccaaaatattaaactgaaaatctgacgaaactaacaacattaacaaattaacacaactaacaaattaacaaaaccaacaaaactagcaaaaccaaagaacact

SEQ ID NO: 137152 - DNA, 430 bp, Glycine max
  unsure (1)..(430): unsure at all n locations
agcttncattcccgagagcattcttatttttctcttcagcctttgctttcgtgtagcttaggaaaaacgntatttcttcttctttctttcttattagtcatttctaaagtcccaagaactttctccatcacccacatccaccattagccaccacaaaccattgttgttctctgttgaaactccacaacaagaggaacccgtcgattggagcggaatcttccaacttggcctgcagtttcggtagagaacgaaaccctaatctgacctttcattttctttcaaggtaaccatggttctaagcttgtttcttgttattatcatcttgactttgcatcttcttcgactttggaaccgccattgcatgtcttatgcttccttagaaaaaccttatagaaagagactttgtaaacgttatccttacatgaaatgc

SEQ ID NO: 137153 - DNA, 389 bp, Glycine max
  unsure (1)..(389): unsure at all n locations
agctntaacaaatattnctttgtgggaaattatccatgtatggatgacatggtcaacaaacattggttatgctgaacaaacaatttcaaactatttatggcaatcatcgaaatgatccttagaaggacaatcaaccaaactcccccagacatccatcacataatcccatgcatttttttgaccaactagagatttacattttaccttgacattcttgtcaatgtgaaacctacacaacaagttggtacacccagggaatacagttntcactacattcatcaacgttaggtctctatcggtaacaataactccaaggaggacatcacatcttagaaaaagacatngaaaccgttctagagatcaaaccatnnatattagacgttctccct

SEQ ID NO: 137154 - DNA, 414 bp, Glycine max
  unsure (1)..(414): unsure at all n locations
agcttgagtctgacggatagtaaatgatatttttgcagtctcgaccggaacccgcatacatctccggggaaggtgcagatgacgacgtttgtcatcgcatgctattgggctttgaatctcacgaatagcaaatgagacttttttgcagtctcgaccggaagatgcctacatcacttgggaagatgcagatgacaatgttagtcactgcatgctatcgggcgttgagtcttacggataacaaaagagacttttttccagtctcaaccgaaagacgcatatatcaccggggaatgtgcagatgacaacattagtcactgcatgctattgggctttgagtcttacggatagtgatggcatgttatcaggctttgagtctgacgggtcgcanatgagatagtttcaagtctcggctgg

SEQ ID NO: 137155 - DNA, 434 bp, Glycine max
  unsure (1)..(434): unsure at all n locations
agctngaaataaactcggctattacacattttctttaacacatacaccctctttccttttgggcctagcccgtttccactatgattgacataaaatatattatcactatttacaccgaccttttttatatacatacacctttttcattttgggcctagcccatttttgtgaaatctaaatgagatgaatactgctagctatgccccctttctccatgtacggacccctgccacctaggctgatgataagacctgtcacgtcatcattccgtcaatgttgaataaggctaagtcaaccctttgactttaaaaataaaaataaaaacaaaaaaaggaataactaaaataaagtaataattataaataagtaggttattggacagntgttaatttaatttctttttggcttaattattaatttattcttcaatttca

SEQ ID NO: 137156 - DNA, 415 bp, Glycine max
  unsure (1)..(415): unsure at all n locations
agctttaattcgtcaatgaccaatatacttttattttagcaccttggctgggtgatctatggtggaatagtaaatgcaaaaacgttgccatcttgcaaattatttattggcaaaatatccctgggtatctgctacagcatgaccattcttcaaatgggtgaaaactaaagcgcgtacattatactgttcacatttcaaatttcaaattactttttatctataggaatcgaatatagatatcaaaaaatttataatgacttacacacttttttgctattttagaattttgatttttggttacttaattgaataaatgttcatgcttntttttaatcagtgactcaattaattagcatcaatgaccaaacgcacaataggcatgctcatatttatcttctcccacttttcggatcac

SEQ ID NO: 137157 - DNA, 435 bp, Glycine max
gcagcttgccttctatgatacattctccctttactgttgttctgacttgaaaaaaaaaaattatatcatgcaaatgctccaaatgaatgtggcacgtttttttatcaattctcacaaagttatgtaggatcatatctcccaaaaagaaaaagaaagaaaggaaaaagttaagttggatcatggtatgcataattgaatcaattgggcaaaaattgacaacacaacatgtgatcaataatgttttgttaaactatgaaaaagaaaggttttgttaaacggggcatagggagttctgctttcagaatctactactattttttctgatttcagaatcaaaaccataaaaggctacaaacaattacagctagttaaccaaacagcttgcttcaattcctcatctcatacggacccatcatctgccatcgcacataatgc

SEQ ID NO: 137158 - DNA, 431 bp, Glycine max
agctttacagcagaatttagtaatgaccttctatcctagaattaaaataacttaatgccattaacctagggaattaaaaaaaacttaatggctgagtgtaactgaaattgtggcaaccaaaagtcacccctaacagccaacaagtcagccaccatttggtctcccaaaaggctgatgcctaggttgccaattgggcccttattacaacttgaactaaacctaactaaagcccttttaattgattaacccaaaacatatttttggtcagccaactttacaaggattgggccattatttagacaaactaaacactctaaaaattgagacaaagtggtgtcatttagtcctccttcatttgggccatgatacaactcacaaccttggacttttctccttgaaacttgggcttgcattcaaatagtatggacaac

SEQ ID NO: 137159 - DNA, 434 bp, Glycine max
ctgggtttttctaagatcttttcaatcttattacaatatactgggtcttcatttaactgtctttgggcttggcggccaccatcaacaaaatactttcgacaccgactatatgttgatttgaccaacgctgttatgggtatgttgcgacaatccttcaataccttatttatacattcagagagattcgttgtcatgtggccatatcgacatccttctgtattataagccatggtccatttttcctttgaaatgcgatcaatccatgttgctatggctggactcaattgacggaatttttctaaattttgataaaaaatatgcttgcaaggagtgtagcctgcatgaaattagttttgacaatatatttaaatatacatgagacttaaattaacgtgaccatgataaatgaaatcttaccccatttcttcaacatt

SEQ ID NO: 137160 - DNA, 359 bp, Glycine max
gtaacataacataagactgtgtttggtggttaaaattgtgacaaacctgaatagattaattatccatgtctgctctaagagcaacaaaaggaggagacccagaaccaatttttgccaccacaccagtcccagccacaggccacttgtaaccaacacccaacaggtcaagctcacgccttatgatagcacttgttctgaactcttcatatgcaagttctgggtgctcatggatttccctccttattctcttcatgcatatcaccgttctgggactattagctagctccagaatctgctgcttcagagaagaacattgattcgagaattcattattgctcgaaggagtgtgaaatgagaaa

SEQ ID NO: 137161 - DNA, 385 bp, Glycine max
  unsure (1)..(385): unsure at all n locations
agcttgatttataggacatcacaacttctatgttctagatgncaacaaaatcgcttgagatagcagggaggccgaaaaccnggcaccgcaaaaaataattttctactgcgaggngaccctcatcacgggcaaaacttaaagcacacattacattggcagaactaaacaaatctctatatcttaatctgcctcactcttcaaacttgttgtaacgagcaaactcgcataaaccttcaaagagggatcctagacaaccaacagaactttgaattcttctaagctccttagttacaccatacatatttagaaaagagatggagtaaatgaaatgcgaggacattatgcttgatcagagaatggaacaagccagaagccactaatcttt

SEQ ID NO: 137162 - DNA, 404 bp, Glycine max
  unsure (1)..(404): unsure at all n locations
agctntgtgtaatcgattacatggttttttttatctattaccagtgacaagttttgaataaaaatcaaaagatgtaactcttccaatggttttctattttttctaaaggttataactcttctaatggttttcttgaccatacatgaagagtctttaaaagcaagaccttgacttgcatttgaagaacaattattacaacttttccaattaacttttgaacatctctttgaacttctccttcttcttcttcctttgccaaaagctttcaaagttttctggtttctaaactttcttctttcacagaaaacaaaagtgtgctattcatctttttcattctcttctccttttgccaaaaagaattcgccaaggactaaccgcctgaattctntttgtgtctctcttct

SEQ ID NO: 137163 - DNA, 415 bp, Glycine max
taagtcacctgccgcatgcaagcttgccaattttttaccaatctctttcttgttgtgagtaatgaatatggataaaaattagttaaaagacaaaccacaaaacatatttatttatgtatagggtgaactaaagttgaaacaaacatacacacattactcacaaactataccattattattatacttttgattcataggatggctttctcggagcaaaactggcatgatcagcatccacagcggtcaatatttgaggaatcgacacgccgtcagatataacaatttctgcatcacaataaaaaaaaatgcatgttgaaaattatcatgatatatgcgaccgagcatgaatttcataatccaacacaatcacatattagatggtcaacagctcttatacctatggcttcacgaacag

SEQ ID NO: 137164 - DNA, 349 bp, Glycine max
  unsure (1)..(349): unsure at all n locations
agctntagtttggtgcttcagacaagttgttttattatgaagatgaattgttccggtatcaaatgtgcttcacaggaaaatgctcaacatttgattctattaaaaacaagtttcgtgtgggaagcctaggtagttgtactactttgaagccccatttagaaggtaatggcaaaaagacttgtttgatgtggtttggaagttaagggttgaaaaataaagcactccttgttaggtataaatgcatattaaccttgtgctttcacaaagatatttgcctatgaatagttngggtaccactggtaccacttttgagttataatatataattttttgatttaaaaaaaaaaag

SEQ ID NO: 137165 - DNA, 329 bp, Glycine max
  unsure (1)..(329): unsure at all n locations
agcttatgcacggaaaatgttattatgattttgagangcccgaaaaaacaccatttcctaggggaccacgcattaggcaccatgcacaattattattgtttgccgccgngcgagccccccctccctacctaattgctcgccttaaacaaggcggtatcatcccaacccggtgggctgatggggccccacccagccaactaagaaagtcgtgtggagttgcacccctcccctcctcctgtttctgtgggggaaaccacagcgaggagcacacatgaacaccaatggtatgccaccccgcaaaacaaaaagagtgggaacgcatacgccgg

SEQ ID NO: 137166 - DNA, 398 bp, Glycine max
  unsure (1)..(398): unsure at all n locations
agcttattaaaggatgcctatttaaattcttataatgnctttccattacattgcattgttgcaaacgaggtctgcatttatcgcatttcaatataaaggttgcatgcatctgcatccctaaaaatcatgttaactgcatagatttcctacatctaatatccaatcttttgaatttgggatgactgaccctctcaatgagtcaatctcatgttttctcataagggtggaccatgagtactagtacccttaacttcagaggactacacgtcctcaccttcaaagggctacatgtcctcgccttcagagggccacacgtccttgccttcagagggctacacaccctcgctttcagaggacaacacgctctcaccttcagagggctacacgccttcgccttc

SEQ ID NO: 137167 - DNA, 442 bp, Glycine max
  unsure (1)..(442): unsure at all n locations
agcttctagagagttctatactactctagagttctncaggacgttctaaaaaaatctacactttntcagaaagctccagaattntctagaacctctccaattaaggaggaatcccaacaaatctccccctcccgacttaattggggggtagtagcaaaccggcaccttggataccttatgtcaatgtgctttggtcatcatgcaaggattggttctcttcttgcattgctcttctccactccaccaattcataggtgttattctcatgcaaggattccatctcttcttgcatggctattctccactccaccaattcataggtgttattctcatgcaaggattgcatatcttcttgcatggatcttctccatcactaattcataagtgttattctcatgcaaggatttcatctcttcttgcatgactattctccactccacca

SEQ ID NO: 137168 - DNA, 462 bp, Glycine max
  unsure (1)..(462): unsure at all n locations
gaccggaccttagagcaccgcggctgcagcttagatgaaatcaatgtctaattattcttcatttacataattaatatttttataaaatgaacactctacaaaagatntttttaaaaattgcattatgcatattttctatttcatcaacatcttttttttacgcaaataagaaaatgaatataataattattttcagaagttattggtttgtttagtcaaggactttgggcatagaaaagataattaaataggaaaattattcaaatcttaattaagtctagtccaacaaaaatttatcagcgggtttatttagcaattattaagctcaaactcaaatgtcagataaatacttggaatttgcacaccacatctactcagttatggagcccatcaccgatatatagtcaaaccaataagtccttaattcaccgccaagaccatttgcatcatttttaaatcttc

SEQ ID NO: 137169 - DNA, 428 bp, Glycine max
  unsure (1)..(428): unsure at all n locations
ccgcagctgaccaatgtgatagaaacatcttctatttttcttgtgtgcgacaaccttggtttaatccaaatgatttcttgcntgagacacaaacttttatttaagattctgacgcacaactacacccggtagaatattgtctagaaaatntcccacattattataaagtgatgtgataatatttagagcttttcttgtgaaaatactcttgcaggacaccaaaggaataataattatgaaaatagattctcgttattttgtttggcgtgagaaaaatatatgacatatgattaaggtgaaggacactcgctattaaattttataaaattcagagctggctagatatatttttttaaaatgtaaaaatagcatcttagaagaatgtcggtgttaaaattaaatctggaaacacacttcttgtatgagtt

SEQ ID NO: 137170 - DNA, 438 bp, Glycine max
  unsure (1)..(438): unsure at all n locations
agctnggagaggatgcttcaatggatgatattttgagggagagaaagagagagggaggagcacgaaattgaaggaagaaaaagggagagaagttgaactttgagttgtgtctcacaagactctcattcatcaaagttaccacaagtgttacacatgtttctatttatagactaggtagcttccttgagaagctttcttgagaagcttctttgagaaaaattccttaaaaagctagagcttagctacacacacccctctaataactaagctcacctccttgagaagcttccttgaaaagattcctaaagaagctggagcttagctacacacacctctctaatagctaagctcacctccttgagaagagaagctagaacttagctacacaccccctataataactaagctcacccccatgacaaaatacaaaaaaaaagt

SEQ ID NO: 137171 - DNA, 439 bp, Glycine max
  unsure (1)..(439): unsure at all n locations
agtcacctgcggcatgcaagcttctacaggctggatgttatgaagattgtatatatcataagcccatgaaggaaggcccaagaggagcactaccagagctgcatatctcaatgattctgtgtagtgtctgtaggaagcactagcagtggttatgcttcaggataatgccaaattctattataggttgttagtagtgttagtggaatatggaagctgttgttagtggagaatcaattcggttaggagtagcttgttatccctatataaacatgagtaaatgaataaagtagaaaaagatgaatttgagtaacgataattagtgtagtaaggaggcccccctgtcctcgaattcaaggaaccttccctcaccttctcccctctgtacctaacactggacgagaaagggtgctgaaatngcttattttaaagtngacacagt

SEQ ID NO: 137172 - DNA, 414 bp, Glycine max
  unsure (1)..(414): unsure at all n locations
agctngtgcaagtcaaatcactcctgttttttatctctaccatgcatactgtctttctttacccacgcctcacgtgtggttttttaggaaaaaacattataactaaacgcgccacaaggcatccctatcgcaccagatccaaatctagaacgaagggtgatcaagaggagacacaggaacaaatgaaagccgacatgtcgactctgaaagaacaaatggcctccatgatggaggccatgttaggaatgaggcaggtcatggagaagaacgcggncactgctgccgctgtcagttcggctgccgaagcagactcaactctgttggaactgcgcaccatcctccctcaaacatagtatgacggggaagggacacactgnggcacgacggcagccctcacctgggatacaaccgagc

SEQ ID NO: 137173 - DNA, 368 bp, Glycine max
  unsure (1)..(368): unsure at all n locations
agcttctaaactttatacaagaatgattctcttataccacttgntagacaagnggcctcagatatctgaagaaggggggggggggccgacaaaattatatttatactaccnccccaaccaacaacctatttcacctcctattcaagacataaattcccctaacaatgaacttcttaaatattaattcaaataaaaacaatttgaatatgaatataaagcaataataaacaaacgagttcaacggaagagaaagtgcacactcataattatactggcacggccacacccttgtgcctacgctcaatccctaagtaacccgcttgagagtgacactactctccacaatcccttcacaagtgctaaccaca

SEQ ID NO: 137174 - DNA, 435 bp, Glycine max
  unsure (1)..(435): unsure at all n locations
agcttatgcgcatatttccttacaaactttcttttaanaaaatgcacccatatacaatcaaggcagcttcgttacctagattatttacacgtacttccaaggtgtatttgttacttacatcacacacatctccttggctaaattcacatacatgcatacccaaagcattttggggtaccaaaaattgcacatgtgcacatcttggtatctctaatacctatacatacacaaacttcatgatgaatcttgactatctacacaataaggtgctacatttcatgctcttttcaagtttttgctacctaaagccgcatgcaaattcaagtatattttcctttgctgactaaaattgtattcaaattaaaaggtatacactttttggtaatgtatcttctntacataacatgcaacatatttatgtatattnttttgtga

SEQ ID NO: 137175 - DNA, 357 bp, Glycine max
  unsure (1)..(357): unsure at all n locations
agctttctcaaattttatttaatctttttattctttgaagtaaaaactgtaagttgggccaaattttctcacgcattcgtgcatttttatgcagcttaacttcataacattctagctctgtttgtgccttactattatgagatggatttgtataattgatcctaagtgaaaatttataattgaaattaaaactccatcttcattgatcaattgaaattaaaattttataattattaattaaaattatactaatacataatacatgtaataaagttataaaattaaaattacagttatatttcatttcctgccagntaaacttgcagtacgctattgtttgtagttcaaaaatataaa

SEQ ID NO: 137176 - DNA, 416 bp, Glycine max
  unsure (1)..(416): unsure at all n locations
agcttactaaaataatgatattngaatctctatgatatgtgtatcaagtagagtattaaatttgacatgttaaaaaaattacacttagagaagaattagtcccaatttttgtaacaacacttgagtaatacataacatcaaacacatggaataaaaatataaagtggcaaattatctttagtgacatccccgaagaaagagaaagcgtctttgagggacttgttgtccactgaccatgataaccctaaaacaatctcagagttaataaacactgaagaatgacataacacatatgtatgtacacatatataggtgtatcataaaatgcttttcaagaaaaaaaaataatgtatatatataggtatatcatgaaatgttnttcaagaaaaatgtgtggatgcatatcataaaataat

SEQ ID NO: 137177 - DNA, 431 bp, Glycine max
  unsure (1)..(431): unsure at all n locations
agcttaagtcacacacattgttttcatcttaactttagactaacatatatgattaagggggtgttggataagatttaaaaaatattttatttaaaaaagttttatgaattttaaagattatgtaagaatattatgacttatcaaatttctttataaaatttttatgataatttgtattttaatatatttatatcataaaaatgtaaaggatttgaaaagattttttagatttaaaaggattctgtgaatttttaaaaatacattcaaaatgaggtttggataaaaaaaagttaaagccaatgtagtttttgtaatcttttaataattaaattgattctaactttatattctcttatacgaacccttctttcaataacattttctcattctaactnttggaatngaacaatatgganttaaaatatatattg

SEQ ID NO: 137178 - DNA, 421 bp, Glycine max
  unsure (1)..(421): unsure at all n locations
agcttatgagttctgtttcttaccaagttttaatgtatcatttttaaggtccaacgccttaaaatgatcacctttcaagtaaaaagaatcactttattcacgcataagaaagaactacgtaggtctggtttcctctccaaaggagggtacgtaggagcaaaagccccgcttttgtcgacctcaaaaaataaaaagaaataaaagttaagataacacaattccacaattctaaaaaatagactgttgtcctttgggacaaacgtgagaggtgctaataccttcctcaagcgtaaatacaactcccgaacttagaatattccttttgacctcctttggtttttccgacgttttccacanataaacgttggtggcgacttcgcgcatctttcctcctttggaaagcgcacccgcgagcctcaac

SEQ ID NO: 137179 - DNA, 406 bp, Glycine max
  unsure (1)..(406): unsure at all n locations
agcttgaactatcagcaaattcattggggttanncatctccacgncccaatnanggcaggactggaatgatgtatanaagattggaaaacagggatgctttcttatggttctttcctctttgtaatttgttgaagatggtaacctccccatggctgctacagttatgaatttcttatattggtaagatggaagagctaaattcagttttgtctttatcttaggcagtgattatcattgtagagacaggttcaaatgcatctaacctaacagacatttaacgtgggaggttttttttttacatttcataatgcaggcttctggttgaatttagagtggtattgataggactgggagagtagacctatacatagaggccaggcccaagatgtggagggtgtatgtgag

SEQ ID NO: 137180 - DNA, 374 bp, Glycine max
  unsure (1)..(374): unsure at all n locations
agcttgttgtaggatcaccgatcttttgtttttgggactcctaacaagnctgagcaagcggagatggtttttgttgattctgacgcatactccgtgctctctatttgatcgccgcattgntgctcatgtcattaatcgattatatagtttgtatatttcagggtgatcaaattcatgctatttgtaaatcggaccacctcaagtcttggaaagctgatttgaaagagaattgcacttatgctatgcataatttcaaagttgttaagaatgatggccaatttagagtgtgcgaacatgagtacaagttattttttattggagtgacggttgttagagaagctgattggcatgaactgcctcttaaggaatttgga

SEQ ID NO: 137181 - DNA, 446 bp, Glycine max
ttaagcaccgcggctgcagctttagaacttggggcaatagtcattcttatgatctttgactagttaagaaatataagaattcctatcaaggataggataacaggagataacaacatgatctctacaggtgtttctaatgaaacactagcaatctttagataaaaaataaaccacaataatcatgaaatgtttaatactttaacaaaccatatgacctcaatcttaaatcctacgttaaagactaccaacgacagttatcaatagatgaatggtatcttaactcaaacaggagatactttggccattcctagaaacgaacctgtgaataaacatgcaattcaggaaatactagtacaagaggaacctattaataataataatcttgaaaacgaagttaatgtcccgtcacgaatagtgagtgatagagaacaaccaaatcctatttt

SEQ ID NO: 137182 - DNA, 375 bp, Glycine max
  unsure (1)..(375): unsure at all n locations
agctnggatagaccctatgcttcaagcttatattgttatgctaaacccttgctgggagaaccactccaagtccaaatacttgggtattctcaaattcttcatactgtatatcatcttgaagttgctcttcttactctcatctataaaccatgtatcaagcctattgagagtggatcgagagcactctccttgtttcctcttggaggacttggctgtcttctgagctctggaagggttgctagccattttctagaaaagaaatatagtgtgggcgtataagaaatgttgggttcaaaaatggctaattatacgaagtgtcggtgtaacttgtgaaaggggttagggctgtctgttataaagaggaaatgatgttct

SEQ ID NO: 137183 - DNA, 438 bp, Glycine max
  unsure (1)..(438): unsure at all n locations
agcttataagaacaaaatagcctcagttannattcaaaatgcatgngaatnaggaagcatcaacaagaatcaagccaaggctattgtgcacgcaatttattttgcaaaacacaccaaatgattatgatgatggatggctcaaattctcacaaaggtaaactcatcactttcaaattgagctttcaaaactatcatgacatgtagaggagaatcaaggatttcaagtcacaaaatgtcaaaaaattttattttcaaagaaaattacccatttcttgaatatatcctatgattcaaagaaaaacatgcaaagtcgtacatgcacacagaattgacccaaaatattaaactaaaaattcgacgaaactaatcaacatttacaaattaacacaactaacaaatgtacaaaaccaacaaaactaacaaaaaccaaagaacact

SEQ ID NO: 137184 - DNA, 358 bp, Glycine max
  unsure (1)..(358): unsure at all n locations
agctncgactgtngatgtgtatgatatatctcttttatgccacagngcgtctnagtatgctttcatgtttttgtcatactcttacacgcacatttatgttatctatgggctgcataggaagtgcatgattacttgagatgctaagcactggcaattgatgccccttgcctctttcttatggcttagtagggatcatactgctctttgaggcacatgcttgagggagagaattaccatgccgatcctcatccaggaaaccgtggtgcacaaaagaaggatctcttgcatatccgactttggaatgatgggggatagtccaaggcgataccggattgggcttattcaaatggggagaaat

SEQ ID NO: 137185 - DNA, 417 bp, Glycine max
  unsure (1)..(417): unsure at all n locations
agcttgctaacccatggaagctcctaatatctcccacactntntggggtgggcaattcttggatggccttgattttctcaaggtccacttggaccccatttcaaccaactacaaaacctaagaaaactatattatctacacaaaaggtacacttctctatattttcataaagggtatttttcctaaggactgaaagaacttgtttgagatgtcctaagtgatcatctaggctcctactgtacactaaaatatcatcaaaataaacaactacaaatctacctatgacatcccttaatacatgatgcataagcctcataaaggtgcttggtgtattagtgacaccaaaaggcatcactagccattcatacaaaccaaactnggtcttgaaagccggtttccactcatcaccctttttca

SEQ ID NO: 137186 - DNA, 367 bp, Glycine max
agcttcaatggaattaaattattaatttattttcttttctattaataatagagtgaaagcagaaatttaaatggaatggatagggtgggggcaacaatataataaaaaatacttaatgaaaaaaactaaaatactgtatggcaagtcgaaacaaaatatagtttgagaagataaaggagcttgttattgggtagttagttaaatgtaaaggggaaggctaacggaagggggataaagaggtattttagttggaaagggggttgcagtcccttgaaatgctgcttatcctgtattttcgtttcttttttattccattatcaattccttgtatggtctaggtcttccattgttcaccaaatattaatcg

SEQ ID NO: 137187 - DNA, 395 bp, Glycine max
  unsure (1)..(395): unsure at all n locations
agcttatgcttttacaaaaagggtcattattctctttngaaatatggaagtaaccgtcttgcaaaattggggcaaaagatgaatcaagtcacattattgcttcgtctaccgccaaacatatttaggattattgatgtccttgttacttccagtttcaccttgacaaagatgtcatggaccatgttgaaaatctaaattgattcaaccccatatcctgcgtaaaaattcgcaatacttcaactgtacatcattcgcatacatccatgcttttcattggttgcattgctcattgcattctttccttgaaaagaaaaataaaataaaataaaatgaacttaatcattgttatcaaaaagaagaggacacgctttacggcgcccttaccgaactcgtgc

SEQ ID NO: 137188 - DNA, 400 bp, Glycine max
  unsure (1)..(400): unsure at all n locations
agcttatcacttacaaattgtgttttctattctatcatgacatgtagaggaaaaacaaggacttcaaatcacanaatgtcaagagacttattttcataacaattacccatttcttgaacatatcctataattcaaagaaaaacatgcaaagttgtacatgcaaacaaaattgacctaaaatattaaactaggaacccaacaaaactaacaaaatcaacacaactaacaaaattaacaaaaccaacaaaactagcaagaccaaagaacactccccccatacttaaacaacacattgtcctcaatgtagcacaattaaaagattaaaagcaattaaaccatcaaatagaattggacaaatgtaataaatggtaagaaggagataggaaaagaaaaaaactcc

SEQ ID NO: 137189 - DNA, 388 bp, Glycine max
  unsure (1)..(388): unsure at all n locations
tgcaagcttctctcccttttcgcaactgcaattctcttatattcctagctnggctactcccactccacgcacctgcctaaccccacctgcctcagaagcttgttttataatctctcttatcaaaacacactctcttctctcacgcatgcccaatctattgtcatgcgcctccgcaatgagcgctagcttcaccacctcgacgccaactacctcagcctcctcgccatctccaccacccaggccaaccacactctctacaccgcttctctcctccgctccatgctccactccgactacctcccccacatcaaggcctagatcgtcgtcatcgcccgctttgcctcctcccctgaccatggttatgatcctatcgagaccctctgtgaaa

SEQ ID NO: 137190 - DNA, 379 bp, Glycine max
agagtcaagataagaagaaattcttcaagactattgaaaagaatggtcttatgagtaccttgtaggcctaggcaatacctcgtatgatgaagatgatgaggaagccaacatatgaatgatggtagatacaacttttgaggggtttgaatcaaaccatgaatatgaggtaaatttcaatgactctaaatatctttgagaagcttatcacgagcttccatccaactcatctattctctcaaaagcttaaaaaacccaatttttttttcaagaatccacccatagatcatttaaaacttgagaaaacccttcaggatcaagtagatgtttcattggatgagtccactcaaacatgtgaagcttgtacaactcttaaagagaa

SEQ ID NO: 137191 - DNA, 437 bp, Glycine max
  unsure (1)..(437): unsure at all n locations
ctgcagctntctggtgagtgggaatggaagttatgctgtatgtgtgagagatgttgggctttgcatatatacctagctattctcatgaattaaggtaaataaagcatacaagtgcctgtttttcacgtgcggtacaattgattgttgtggggttactattgacgtgaatggttgaagtgatatactgcaacaaaatgttatttgaaaccgggattagagtttaatttgtgtataagaaatatagctttaatgcccaaatcacatcttttgcatctgtgcagattattggtgaaagttcttcctttgttaaggtacgaaggtggaataagcatctcatgtttcaatttcaaaaagtaagtactattgtagaaactggacgttgntcctaatccttgacgtttattatgcacattagtgacccttatttaaattcagat

SEQ ID NO: 137192 - DNA, 370 bp, Glycine max
gcttacatggagctacatagattattgtttttgtgttcctctcatacatcttcatgcttcatgcgatttactatacactcttcgcaaaaggatttatgatagagaatagacaaattttgctcttcatcatgagggatcaagtatgagcgtcttaataaaggtgggtggatattatgaaagcgattaatacagaaaaacattaatattacatcaaaggtgagcaggcatgctatgccccatcatatttaaattgtgaaatcatcttttgcattaaagcttgtgtattgtattgctctttccttcttaacttcaaactctttcatatttattatctctatccgcataccctatctctggctctcaaattgag

SEQ ID NO: 137193 - DNA, 430 bp, Glycine max
tttagtaacctcccgctgcagctttgcatgtctaggtttttagaattttttgttcagtctagaagtttgagagatttgctgtgtgaagacctacagagaactagctttttaggtaaccatcctgagagcttgagatgagtttgtgagtgattgtgaggtcctagaggtggaggagacatccccaccacgtgtatttcttcaatccttcatctttttcttcttttgttgtaaaggaagcttcccagttaggaagagctaaatcctctgttggttcttccttgtaggtacttgatgtaaatacctgcatatctatttaatgatgttttgtgtgttcactgtgctatcagaacttcatttaccatgcttttgccttgatcacgtagatgcatgtggtgttatgatcattcaatagtgggaataggtctaattc

SEQ ID NO: 137194 - DNA, 400 bp, Glycine max
  unsure (1)..(400): unsure at all n locations
agcttgtagaatggctagacataatcttgtttgngtttggtctggttcaaggataaaagggatgccccacattatttccatgacacaaatgcaaatatgatgatttggaaattttatgcaaaactggtcatgcatgcacctatgcggacactcaagtgtcaaatttttatggtcatgtgatgctagggctcaggattcatttcctctattttaaatcaacccaatgtttccaaaatatgttcttttatcaatttgtgcattcatccgagtccattttgggtactcgggaaaatttcacagcattcacccttcaggtgtatacacattntttcaaaaactagttatgatcagtgaattttttcaaagaaaagttggaagtcatctcttttcaaaagcatgt

SEQ ID NO: 137195 - DNA, 416 bp, Glycine max
  unsure (1)..(416): unsure at all n locations
agctngcaaactaaatgactacctttttttctttcaaatcccataggttgagccatgtacacttcttcttcaagatctccatttaagaatgttgtttttatatccatgtgatgtagttctagatcaaaatgagctactaaggccatgattatcctaaatgaatccttcttagagacaggagaaaaagtttcatgaaaatcaataccctatttttgagtaaagcttttggctacaagtctagctttatatctttcaacattaccttttaagtatctcttggttttaaaaatccatttacaacctactatagagagtccctctggtaattctactagatcccaaacttgatgtctagtcatagattccatttcttctttcatggcttcataccagtaattagaatcatctctactcat

SEQ ID NO: 137196 - DNA, 382 bp, Glycine max
gctgcagcttacacaacattgtttttattttttccaatcaatagaattaagcgatccactccatttcacagaaccacgtttctctattattctttttgctgcatttactcagtataatcattcttgtacaagaaatccaaatgttgagttatagttttgattgtccttcctgtcaatattgtctttctaattaaatatttctagcatttctaattctttttctaaatcatcacaggtttgatagtgtaattgcacctggagaactgtgccatatcggcaattcacctgggggaaatggaattgatcacaataaacttttgattgaccccaatatttatgctggacacggagtatcttttcctctcacctagacatattcatt

SEQ ID NO: 137197 - DNA, 416 bp, Glycine max
  unsure (1)..(416): unsure at all n locations
agccttcaaccttggtgctcatttctgctttctttcgtgaaaggagagcattttcggggtcgtgaagtgcgtggctaccactgggacttcnaaaattcatttttgggtggacttctttctctcttaaatttcgtgggtatggggttttgggagatatgatgggtggttttgttagttttctgctgtgtaatgattatttgtgaaggaacttgttgaaagcttgttgaaattgccatgcttggatgagttagacatacccattctgttttagggttntgtgatgatgtttatatgctgagattgcctatggaaactgttagagatgaagggtagagttaacctatggttagaaagtgagaatgtgatgttatgaatggaaaaagagtgagaacttgagagttggaaggctaagtctg

SEQ ID NO: 137198 - DNA, 368 bp, Glycine max
cccggattcaaggcgggctgcaacaccggctccgcttccctaattttactggaggcggatgccgtggctttatcctatatggttttctggaagtttaacatgacttccaagatggaagccatttgatcttttaaggccgatagatcggccttcatctgttcttgcacgcccttttcattatccatttttttggatcgagcgttataagggcgccctggtgttttcttagttatgatgaaactcctaaagaaatacacaacagtgagtatgccaccaacacatgagtatgcaaatggatgatcggagcacttggatccaccccaagaattttagataacgtaatgagtccagaacttctcatttattaa

SEQ ID NO: 137199 - DNA, 353 bp, Glycine max
agcttataaggaagggtgctcattatttcttatcaaggaagctacctaacgcataaatagaggcatgtgtaacacttgttgccactgagataattgagagccttgagagacacaacgcacagcacaacttctgtgcgttctgcctccatcaattttgtgctcccccgtcggttgcactccttctatcgggtcctccattgaagcatgctctccaagcttgttatccacggctcatcctggtggtgaagcactttcgataagggcttataccccagaggaggacgcctcctctcacctggtctcctgaatgatctgctgcatctccggggtggaaagatcaccgttaaaggacc

SEQ ID NO: 137200 - DNA, 419 bp, Glycine max
agcttgcttgtggggcttctatggaggttttatctttgagcttcaatgaggtcctttaatggtgattttacaccatggagatgcagcggtatgttaaggagaagaggagaggggaggcaccatccactagggaataagccaaggaagaagaagcttcaccaccaagaattgccttggataagaagcctgaagaagatgctttaatggaggaaaagaaagagagaaggggggagcatgaaattgaaggaataaaagagggagagaagttgaactttgagttatgtctcacaagactctcattcatcaaagttacaacaagtgttacacatgtttctatttatagactaggtagcttccttgagaagctttcttgagaaaacttccttgagaagcttctttgagaaaaattcttgagaagc

SEQ ID NO: 137201 - DNA, 466 bp, Glycine max
  unsure (1)..(466): unsure at all n locations
atcctctgagtcacctgcngcactgcaagcttgagagggtttttgggacttactgttttcatagaagattcatttgcaactatggacaaatagctcgacccctaactgatttatcgaagaaggataatttcaagtggactagtaaaagtactgaggcctttacccagttggagcaggctgtcaccacagctcctgtactatcaatgccagatttcttaaaaaaattctccatagaatgtgatgcatcgagaaagggagtaggggctgtgttaactcaagaaaaaaggcctattgcttatttcagcaaggctttggcagattcaacactcactaaatcagtttatgaaaaggaattgatggccctagttctagcaattcaacactggaggccttatctctcaggtaagaaattctctgtgtttactgatcagaagagtccaaggtacctcttggaacaaagaataac

SEQ ID NO: 137202 - DNA, 434 bp, Glycine max
  unsure (1)..(434): unsure at all n locations
gcttgtaaaccccaaaatagagactctatttttttctgctttactactaccactgctggatattgttctcaaactaccacttgtaggccgtgcatttttttatttgtttatgatttgctgattatattaatcaagaacgtaggagatttgcattgttatccatgatatttctatttcattatttttctttatagatttttaatatgatatttaataatacatcttacttggctacatgctcacagtggtataatattctatatgcagagtttttttgatacaccacggctcatgttgaatcgcggtggatttccttatagggatgtcaaggtccgcgttgaaagtgctcggagctcantcaatctctatgaagtgctcataatcattnttgaccttcatagacatattaccaggtcaaaggttgattatttaaa

SEQ ID NO: 137203 - DNA, 493 bp, Glycine max
  unsure (1)..(493): unsure at all n locations
agctnnaatattactatgctgaagctgcttttttattgtcgtaccccgacatcaggggcctaaagatactgagctttaacacttattatcatctaaagcttatatattttggtgtgtgacgcacgccaacaatagatgtgaccgccataatgatgaccaaagcatgtatatagttaattagcagccctcaagctactacatcgcntgtgtaggtcagacncgtattgactaactatattgtagaacagacttatcgaagtacgtcatagtcactaatagtctactcactaagacgaaggcatgttcagatacacactgaattgtagaataccttataaggacttatggtgtctttgcatataacactacaacacttgcattatcatataaaatcctcaaaggcttacgaatatagtccagaatgtgagggggcattactaaactcctaaagctaacaacatgagttgaaaaacaatgaaataatgaactatgc

SEQ ID NO: 137204 - DNA, 335 bp, Glycine max
  unsure (1)..(335): unsure at all n locations
agcttatgccagacgcccaatgctccaattttttggttaccgggtatgctgccgntggagggaattatcaaaaggtaacaaaactgtggaattaaatgaaagcctctgctttttctatctccatgaagtttgatcaggtaacgcaaacttttgaagggtatgtgggatatacaccctgaatgtgtaaaatttgattgatgatagttggaagaattcatgaacctcacttntttggggctattatcgatgtcataagataccttcacttgcatatttacaaacccaccctgataatgtctttgtaatatcctgatttttctggttctaagaataac

SEQ ID NO: 137205 - DNA, 254 bp, Glycine max
tggtgaaggaccatcatcccgctgcagcaaaagataaattataagatgggctacgaggcataaggccccacggaagcagccctggaagaggaaccatcaccgccaagacagcgccaggaacaagatacctacagagaagcatcacgccggaatagaaagacagacacacagagacgcgggggcgccatcaaaggaagggcggaaataagggagagacgcggaccgctgaagtgcgatcacaatactctcattca

SEQ ID NO: 137206 - DNA, 370 bp, Glycine max
  unsure (1)..(370): unsure at all n locations
catcacgtgatagcagtcaatagacttgaagtcactacgaggcctatttgtatgagttgagcgcatcaatgttacaaaacgttatccatagccggatgatcatagagatagaacttgaactagccatgaaacatgtctatggatgcgaatgaactatcaatgatatgagcctccctcttacatattcggagttatgttgatgggcctctcaatagaacgggatgcactatgcccgtggccacacaaacatgggccaatatgacatatgggcaccattagagtttatgcgtccagctcagcatcaagaaatcaactactggacttaatgaggatgcctcatgttcgagcaagacantttgacgaagagaca

SEQ ID NO: 137207 - DNA, 425 bp, Glycine max
  unsure (1)..(425): unsure at all n locations
catgcaagctttatgggtgtaaccgacaccctattattcttataagacccgngatcaaggtggggaaccccaatgctctgttggacttttccgggtccactttatgtctgggaggcgcgatccctgcaaattggtaaatggtgttcgagattagctgggccanattaatactaacttgagtcaagatggcatagaccaactggcacttcgacaagggaagatcaaaattatgatcgctggggaggatgttgctgagatgcagtgtcatccagatctgtgtcaggggggacatgctagtgtgcatgatctgcacccgtctccctgtcacgctgcgcgcagagtcctgccctgagatgcataacaactggcgcatgacctcctcatcaaacctccgagcctaggtcttcctttgactgaactacaat

SEQ ID NO: 137208 - DNA, 397 bp, Glycine max
agctttatctaactgggcattcatatgttctcttgccgcagctccccaggcataggctccactgtgagccatgtcgtgacacgcctctagatgcactacatgcacattttttgcactctcgttagaaaaaagagtgcaaccgaccatgggcaatgagataagcacgagctactacaatccattgtcatgcctggcatctcatcttatatatctcccgaacccatgagaggtgtacatatgccccgcacgctcgtactgactcggctctagcctattgactggacacctcaagcaactccatcaacaaaaataactgctcagccacggaaagagcctctaatctgtggaaggcgccactgatagggagatggatgattgacaacacattatctagtgt

SEQ ID NO: 137209 - DNA, 418 bp, Glycine max
agcttcgcgctaagcgcatatttattcattctctaagccgagagtctcaagcgcttagcggccaacctttgcatctgaggctgatttggtttctttaagcaagccaaggctgagctaagccaacttcaatttaatttgaattcggctaagctgcagcctgatcgctaagcccatcatacacttcggctaagcgtgaggcattgccgccaagctcaattctttgcggctagaactggggttcatgaagctaagcgccagtcatggcggctaagctgaattccttgcgccaatgtgagcactaagtgagtccttatcagctaagcgcatgctcctctgtacttaagatgcataattttagctaagctggccagagcccggcttagcaagaagtaaaagttttctgatctgcagatctcgc

SEQ ID NO: 137210 - DNA, 415 bp, Glycine max
  unsure (1)..(415): unsure at all n locations
agcttctaagtttgaaaataaaaatattgattggattttgcaggatatagaattggcgaagactttgttaaggccagggtccctctttatctaagacttgtcccagataaaaaatttctctaaagagagatatgggtcagttcctcgtgcttttataatttgcactgacgaccttggaattccattgagtttccagctctggatgattcaaaaagctggcgttagtgacgttgtcgagatcaagggggcagaccacatggctatgctaagcaagccacaagaactatgcgattctttgttgaaaatagctactaaatacacatgaattcatgaagcaggctttatttgtngtgtttgaaattaacgtgtgggtagaatataagatctcgtnttaacaacgaggcatagcaacatg

SEQ ID NO: 137211 - DNA, 432 bp, Glycine max
  unsure (1)..(432): unsure at all n locations
ctttgaatctccggctttgccccagtacctggaaggcctctcattttgtacatgacaatcttggacgagtcaatggggtgtatactggggcaacatgacaaattcgggaagaaagagcgcgttgtttactacctaagtaagaagttcacgacctgtgagatgaattactccttgctcgaaagaacgtgttgtgctttagtatgggcatcccatcgcctaaggcagtacatgctgagccatactacctggttgatatccaagatggacccggttaagtacatctttgaaaagccagctctcacgggacgaatcgcccggtggcnagtcctgctatccgagtctgatatagtctacgtcacccaaaaggcgataaaaggaagcgccttagcaaattatttggctcaacagcctcttaatgactatcagcccatg

SEQ ID NO: 137212 - DNA, 308 bp, Glycine max
accatgtgtaacacttgttgtaactttgatgaatgagagtcttgtgagacacaattcaaagttcaactcggctccctttttcttcattcaatctcgtgctccccccttacactttctctccctctatcttttcctccattgaagcatcctctgcaagcttcttatccaaggctcatcttggtggtaaagctccttcttccatggctgattccctagaggatggcgccttctcatacctcttctcctttgtcttccactgcatcatcatggtggaaaatcaccattaaaggaccttattgaagctcaaa

SEQ ID NO: 137213 - DNA, 442 bp, Glycine max
  unsure (1)..(442): unsure at all n locations
agctntgcctttagggcttgtacctcatcactttcttccgaagctttaacctcattgtctctcacagtctttagatttgggagccaatccaatccttgtgtccggactctcagccacttatgatagccgccaatgatcccattactgcttcccctaagctctctgtcctttcttcacgctgcatcacatgccttgtgaactccttagagtaccctcgcattggggtcactgaaaccccgtgcaatgaaaggcgtgatgcttttgtctgatggcactcctctcatggggtagccaagctgtcttatggcgaggacgggattataattaatacaaccccttgttccatcaagggaacattnggacatccttcgcatgaagatagaatcctgattcttccttccttctagtgagggaaccaaataacagacgcccctccatgcta

SEQ ID NO: 137214 - DNA, 351 bp, Glycine max
  unsure (1)..(351): unsure at all n locations
aaagatttcaacaagaaaatgaagacatctgtgactgctatcaaaactatatnnncttttntcacatagacacacagatagacaaataataaactntcatgtgcanagtcctcatttaagcatcagtcgtgatttaaagtctttaaagacctcatatttacttatcaagcattgtatggaaaaaaaaatcataccatggttatcaaatcagcctcactaatgtagcatggtgttgaaaaaatataaaataacaacatctanctctaccctccttcacacactcaaaaaacaaagaaccagttcaccaatgtcatgaatcaatatagttaacaaaagaatgatcaggtcata

SEQ ID NO: 137215 - DNA, 355 bp, Glycine max
agcttgctctaaatttacattgatgtttgtaattattataagaggttgcatgcccattttgttttaagagtagtgtcccactggtaaaactttccaaatgtttgccttcgcaggaaatggccccgaggaagcttgcctcaaagaggtccaggaaggacaaggcagccgaaggaactagttccgctccggagtatgacagtcaccgcttcaggagcgctgtacaccagcagcgcttcgaggccatcaagggatggtcgtttctccgggagcgacgcgtccaactcagggacgacgagtatactgatttccaggaggaaatatggcgccggcggtgggcatcactggttactcccat

SEQ ID NO: 137216 - DNA, 262 bp, Glycine max
  unsure (1)..(262): unsure at all n locations
gcttattccctagaggaaggcgcctccactcacctcttctccttagcgttttctgcatcttcatggcggaaaatcaccattaaaggacctcattgaagctcaaagatccagcctccatagaagccacacaaacaagcttccatcaggtagtgtatgcgtgaatcctgctactgatgtttgngtgagtcgagcaatgaagctatattccctttatgacttccgggctttggcgcttcttgataattacaaagccctattccct

SEQ ID NO: 137217 - DNA, 463 bp, Glycine max
  unsure (1)..(463): unsure at all n locations
cgcatgtgtcacatgtaactgcatttaagaaattattttatatttgttaggtggcatttaataatttagtcaccacgagaaaatgtaaccaaagaaaagtaatgatacataaacactttaaaggtgaatgttttgcatgtacatgtttaaaatatttaaggcttaaaatgtagggaagatcccaataccagtgggcggcaaaacacataatttaactattttctgttaaatgaaaccaaatgatgtaatgaatagtgaaatttccaacttgcccaaattataccatggattggattagatcataaatgtttgagaaattgaccacctaataaaaaggggctctgattaacctaacatttattttgaccaccaaattacnaccttttattatatattatttctattaatatactctttacgtttcttttttaagataatttatcatcatattactattattaaa

SEQ ID NO: 137218 - DNA, 411 bp, Glycine max
ctcttgttctaagattagagttgctagcggggctaggttgtgtgggaccccacttttagtgggaagctcttttgcttgagtgggcactctttgctggatgggcgccggattggaatggtttcccacgtgggtttaaaagcttggttggtgtggggaatattggtaagtgttgtgaaaggtttgttggggtctatgccaactacgagttgaagttacagcatgggtgtccccttccttcttcttggctccacttgctccaaatcttccattgctctcgctggcatgagcggtatatttgaactttcctcttctcaagcctacctcaatcctctcgtccgcatatacctactctactatgctagactgacatgaacccaccatcttctaatatcacaacactggctgcatgta

SEQ ID NO: 137219 - DNA, 439 bp, Glycine max
  unsure (1)..(439): unsure at all n locations
caaacatggccttctttctcttctaactcatgcattcattccatactcagagattcatgcaaaaatcattcctcaatgttagtcgttctctcacaattaaatatcacactctcaccgggttgcggctaatgcgttccttcacaatcaacctgacaaaccaactaacattnttagtcataatcctaattccaatttcttctctcttctaatgactgcaaactcattcaaggcatatgatctacgtatttcaattcactcaattcatacaattgatcaattcaaaccaatcacaaacactgaatttcaaaaccaagcatcaaaccactggataatataagtgcactattcaatcaagctctatacaagctaccaaccacaataaaaactgtgactaacaattataagctgaactggaattaaaaactgaacataaacataa

SEQ ID NO: 137220 - DNA, 359 bp, Glycine max
  unsure (1)..(359): unsure at all n locations
ggtaagaaaaagtcaaataaaacaatcaaactntcccaaagagggcactctttctacagctactccaagatgctatagaataaagtcaaagagattagccaaaaataggacaaatgaataaaatgaatagttaacataaactcattgtcataatcttttatttatttttataattattacataactcccttgcttctaattccacttccaaacatatcctaaatatttttttatttataaaacattcttttataataattaatggatttaatcaacaaactactaaaaatagaattaataatttagttatgaaaaaatattatgagtaataatatttgccggttttatttgaaaggaca

SEQ ID NO: 137221 - DNA, 456 bp, Glycine max
  unsure (1)..(456): unsure at all n locations
agcttgtgcgaatcaaatcactcctgcattttatctctatcatgcatnctttntttctttacccactcctcacgtttggttttttagggaaaaacaccataactaaacgcgccacaaggcatccctatcgcaccagatccaaatctagaacgatgggtgatcaagaggagacacaggaacagatgaaagccgacatgtcggctctgaaagaacagatggcttccatgatggaggccatgttaggaatgaggcagctcatggagaaaaacgtggccaccgctgccgctgtcagttcggctgccgaagcagacccaactctcttggcaaccgcgcgccatcctccctcaaacatagtaggacggggaaggaacacgctggggcacgacggcaacccttatctgggatacaaccgagcggcttacccttatggattggcgcccaactactcaccacccg

SEQ ID NO: 137222 - DNA, 382 bp, Glycine max
tagagaccatacaagtttcctaacgatttctaactatgtgggccattaagtctatcatatgctgacaataaccgagaagcccatgaatctcttcgggggcggagtaagtgtctgccatcgccttggccttggctaacaatcggggaagttcttgactcccgttcaaggtaagagcaaaccgatccatccacatggttgcctcttggtgtaaagagtcgatcacccttcctctagcctctctttccgcgtatacttgggcatattcgtccgcaatcctatgctcgtgggccgcggctagacctaactcttcttggtacttggcgatgatagctagcatgttggtctccgtctcgcataaacgctgagacaagcttcttttgga

SEQ ID NO: 137223 - DNA, 377 bp, Glycine max
agcttatagccgacttaatatctcttttatatcttcactccatcactctccttgagtgtcaattcctcgaataatgtgtccaaccagatagcatgactatcactcattacagctacaacatactcagcttcacatgttggataagccactatggattgcttcttaaaacaccacgatattggcgctaccccatacatgaatatgtaacctgtagtgctctatctgtcatctctgtctccccaatccgcattaggatatcccactacatcctctgagttgctattgtctttatatggaaatagaaatctagtattgatgggcccttttatgaaccttaaaatcctcttaacagctaggagatgaggaatagggctttt

SEQ ID NO: 137224 - DNA, 415 bp, Glycine max
  unsure (1)..(415): unsure at all n locations
ttcagcagcaacatctgctttctttntttttatattntatttcgctatattatttatttttttatggtgtgtaatgagtggtttggtgttgggatatggatttattaggtaatgcttcacgttcgggtattaattggaagttttattataatgttgctgctgattttattatgaattgcgatgtcaatacatttttctagaggatatcaataatttcgcggcatattctttgtaactattgataaatttgattctaatttctatgtactatcaactattaatgtgagagagctttattatcagacattataatcagtacaattcttaagatacttttactacagtctatagacctattatatccaatactttcatattgcgcgattggtcgcaaatatattactcctctccgcat

SEQ ID NO: 137225 - DNA, 429 bp, Glycine max
  unsure (1)..(429): unsure at all n locations
aggcagtatcacttgacactccatggttttccttaatngtagagggaatggcatcgccattatgatcctgctgcgaacatataaatcaagttgaaatatttaagcctacgtttggaataccatttcaaactttcaaaattacttttaactcagaagttacaaaggtcatccttcctccaacggactttaaatatacgttcacttgtgaaatgggtacccaaacgagctactaattgtctgtgaaacttatttctgataaaatcttataaagaaaaacattgacaatgatctctaatgggtaaggtttgtttgatctgatgcaaacaatatgaattgcctatttactcgttcttactaatggtttttcaataacactctcaatttgcaatttgaaattgcttgtgcttcaaataattgccctgcatattc

SEQ ID NO: 137226 - DNA, 463 bp, Glycine max
  unsure (1)..(463): unsure at all n locations
agctntctncactaagttgcctgatgcctgatttgtctnttcttatggcagnggtcctaaatgcaaggaagaatttctccaagaacaccctcttaaggtcatcccagctgaaaatggacctgggagcaaggtagtatagccaatcttttgccactccctctagagaatgaggaaaagcctttaaaaagatacgatcttcttggacatcagggggcttcatggtggaacaaacaatatggaactcctaaagattcttatgaggatcttcacctgcaagaccatgaaacttgggcagagaaggattaaatggcaagtgcaccgaatcgcgcaagtagtataaaacggtaagaaccgaatatcgaactctcggggaacttgtgttacttggtaaagctatatcagtaaataggtgtctagtgtgaaaagagatgtgtttactatgaacaggtgtatgaactaacta

SEQ ID NO: 137227 - DNA, 330 bp, Glycine max
  unsure (1)..(330): unsure at all n locations
aatactacggatttcaaatcaacaatgttttctatctttgaatttattttttcgctctaaaattcttttaaaaaaacaagaaacggttatatatttgctatagcgaacctcagtctcgctatagtaaagttccttttttgaaaatataaaacttgatccattcgccacaatgaattgacaactcattacaccaaatgcttttaaatttttacttgttttagataacactctntgttggtttcctagatattgcactaagtttttgtggatatgatactcaatacttatcatttctttactactagacaatgtacacttacctagatcacg

SEQ ID NO: 137228 - DNA, 463 bp, Glycine max
  unsure (1)..(463): unsure at all n locations
agctntgaatgaggctgaagaagctgctgctcttgttcattatgatccggtggagattaatttatctcagcctcatttgtcacaagatagtgacatggagttgatggttaatatttgtcacaacaaagtagttttatctcaacctaatttgttgcagcactccatttttatatattacaattattcatgtttggcatttgcatgtaggtccctgcaactattgttccaccaatagcaaggaataagctaaccataacaagagccaaacaaaggaaggttgctgataaagatgatgcagaaaactgaagaagcattttttgttgcattttgaacgtagctgaaggtttctgaagacccatttnttgttgcattttgaagggtgctgagtttgaaggttgctgatgaagaaaaactgaaaagcatcttttgttgcattttgatattaggatgtatagttgtatat

SEQ ID NO: 137229 - DNA, 447 bp, Glycine max
  unsure (1)..(447): unsure at all n locations
tcctcggggccatttcctgcgaaggcaaacattaggaaagttatttntatttataaatgctactcttaaaacaaaaatggcatacaacctcctccaataaacacaaacatcaatgtaaatttagagcaaacttatgcacatacttctttacgaacgttcacttgcacaagacattcttataactaagaaaaatgcaccgatgcgcaatcaaggcacctttgttacctagatttatctatgtgtacttccaaggtgtatttgctacctacatcacatgcatttccttggctaaatttacatacatgtatactcaaagcatcttggctaccaaaaattgcacatgtgcacatttcggtatttctaatacttatgcatatacaaactttgtgatgaatcttggctatctacacaataaggtgctacatttcatgctttattcaagtgttt

SEQ ID NO: 137230 - DNA, 395 bp, Glycine max
agcttcttattcaacgctgataatggtgttgttgccttttcttccatggcttattccctagtggatagcgcctcctctcacctattctcctttgtcatactgtgtatctccatgggggaaaaccaccacttgaggacctcattgtagctctaagattcagcctccataaaagccccacaagcaatcttccatcatggcccatattattacaaaccgctcggaagctggcattatcactcagatcttgactagttataacttcttgaataaaaagagatggtcccatgtttttactgcagaaatcatatgcgaaacaaatcattctcgcactttatttctagcatgcatctatatgatgcatcgcataagcatatcgtcatggcatcataatgaac

SEQ ID NO: 137231 - DNA, 363 bp, Glycine max
  unsure (1)..(363): unsure at all n locations
agcttctcaaggaagttttctcaagaattctttttatngaagctacctannctataaatagaagcatgtgtaacacttgttgtaactttgatgaatgaaagtcttatgagacacacttcaaagttccacttctctccctcttttattccttcaatttcgtgctcccccatttctctgtattttaccccattaaagcatcctcatcaagcttcttatccaaggcacattcttgggggtgaagctccttcttccatggattattccctagaggatggtgcctcccctctcctcttctcctttgccttccgctgcatctccatggtggaaaatcaccattaaaggacctcattgaagctcaaagat

SEQ ID NO: 137232 - DNA, 410 bp, Glycine max
  unsure (1)..(410): unsure at all n locations
gagccatgttcttagtataaaaattagtagtggaatgttcaaaatcagaatattcaaaatcaccctcaacagaatgctcaaaatgcacagaatgaccaggatgcacactatgcctaactaatctatgaaaggttctatctatttcgggatcaaagggttgtaaatcacctggattgcccctagtcatgcactatatgcagcanataatgtgtttctcaacaagcacctaacaagggggtaaaactacagctatactcaaatgatatcaaaatgagatgaaaatttgtgaggaacaccctaaaatcatgaaaagatagcacanaaaatttcaaacaacaattcaaagtctaactatgaaaactacctaagcaaagtttagaanaataagacaataatacttaagaaataaa

SEQ ID NO: 137233 - DNA, 364 bp, Glycine max
actgacttaggcttggcggccacgctcaacaaagtactttcgacacctactgtacgttgattcaccaattgcgctatgggaatggtgcgacaatcctttaaaaccttattgatacattctgagaggtccattgtcatgtggccatatcgacgtccttctttatcgtaagccatccgccatttttcttttgagatgcgatcattcatgttgctatggctggactcacttcacgaaatttcttaaattttatcaaaaggcgctgcagggaaataggccgcataatcatgtttgataacacttgaaagttaaggatagtaaataacctgacctcaatttgaatgtacccattctccactttttttgt

SEQ ID NO: 137234 - DNA, 430 bp, Glycine max
  unsure (1)..(430): unsure at all n locations
agctcgaagaggaactcgagaaaactcatctctcttgtgtatcatggagganagagattggatctgaaatggctctatttgaatcacatattagaataggttattatgtgtaattttgtgtttggacctttgttaaccttattacttgttcggcctctattggagggtgtgagtctttcatgagaagattagtataaataagtctatctttgactttgagaggagtaacactcattttattgaaagaattatgaactttgtgtgtgagaacctctcttggatcttgtgagcactactttgattcttatcttgagatgctaattcaagtgactaatcctcctttaaacgcatcaattcatcatgaagtgaggggttgttcttcatccctaattgttccgaacttttgaactttatcttcacctttgattca

SEQ ID NO: 137235 - DNA, 319 bp, Glycine max
  unsure (1)..(319): unsure at all n locations
gcttaaagagctaaggagtattccagtctcttttactattggctactngcaagatgataaaactttatgtgatttgggggctatcattaatctgacgcattattttttctataagaagggggggttacaagaaccccaacccactaacatttatcctttactcgtaaacaaaaatcatgtgtatttggtaaagctgcaaaaatcatttctctagctgatttgtgattctatacatagaggacgatcgaaaaaccccacttattgtgggacgacccctccattacacaagaggggttttgattgaacttcaacaagaaac

SEQ ID NO: 137236 - DNA, 470 bp, Glycine max
ttagagtcacccgccgcatgcaagcttaacatcataccactattttgttttttgtttacttcacacggactagatggggcctatgccatttgaaagccttggaggaaaaaggtgttcttttgttgttgtggatgatttctacacgattacctgggtctactttatcagagataaatcagacacctttgaagtattcaaggagttgagtctgagacttcaaagagaaaaagacttgtgtattaagagaatcatgagtgaccatggcagagagtttgaaaacagcagggtcactgaattctgcacatctgaacgcattactcatgagttcttgcagccattcaccaccacagaatggcatatttgagaggaaaaacatgactttgcaagaggctgttagggtcatgcttcatgccaaaaaacctatcctataatctctgcgctgatgccatgaacacagcttgcttcattca

SEQ ID NO: 137237 - DNA, 451 bp, Glycine max
  unsure (1)..(451): unsure at all n locations
ggcaatgattaacagcagaggaggtttgtatgttattgaaaatctctgaaaacatgttaaagacaacaattttttaaaaacatttttctactcaaccaacagattttggatgacaagtttttaaaaaaaataaaatgaaataaaactaaaaatccaaacagacttatgtgttttatttttttaaaagcaggctatagaaattaaagtgttttcatgaatgcactataatttcatgtgtatatgtatgcatgtatattttattgcgatgctagatatttctttcatctgtgactgaatcttggggaaggattgaactatgtgtgtttctacttgtatgcacatgttgagcagtctttataaaattgttgtctcaggccctcagttactatgtgtaaaatacatccatcatttatgtagataagttaacaactgtngaaacatgcagacttca

SEQ ID NO: 137238 - DNA, 460 bp, Glycine max
  unsure (1)..(460): unsure at all n locations
tttncatctctcatctagagtctgcttcccattcaaatattattcttctttgtttccttgaaggaaatgcctttcttagaatgagagaatttcagtaacttttcccagctttggtctgatttctaagtttttcgtgctgtcattcctatgatgaccaagactaaacttccctgtaggtgtcatactgataattacatacacagaatggntctttgtattgtttgtactgaccccactggctgcatgtttgtggtgttcaaagtaatcattatatatatatatatatatatatattttaattctctattggtttcaataccatctgatgggtttatgtttttcttatttagactattgctaaaattcttttatttacattgctagttgcacagtagtattgcaccctttccagattactttgttttctgactgatgattattattcgaagtcagaattcgc

SEQ ID NO: 137239 - DNA, 427 bp, Glycine max
  unsure (1)..(427): unsure at all n locations
atgaacaccatggacagacctttttttgttttgctacagacatggcaatggatagcaaatgatatcatattcaatcatagaaaacaaggtgattttatatattctaaataaatattgtntactcataatcattatgtttattattttactaatcacaggtattcgccttactcaaaaggaaacaattcatttatgcttaactgagattgagaatatgctacaagccaacagaaggagcttgcgagattttccatccatgccatacccaataggatatgcacgaaaccaagggtgccaagtattgtgcaacaaagggtgccaagtatctcgaagcggccagtcaaaggttgtatatcatcaaataataatccccggacgaaattagggtatgacagntgcccctctttacttacctctcatcggagat

SEQ ID NO: 137240 - DNA, 400 bp, Glycine max
  unsure (1)..(400): unsure at all n locations
aacagagaganggactaaccccgactggcagncccaaaaagcgaaaaggtggagaagcaaccctgcatgaaaggaaaatcgcagcgggctcatcaaatctttggaatgtgccaatcccataaaagacactcttaaggaagctaaccaacaatccagagaccaattcgaagcctcggaataatgcgtttattgcccaaagactatcatgaggcacctgtcccaccataactgaatcatcagaggattggagaattgaggattggaactcttctccaacgttcatacctttgaatagtctatactccaccgtgctatgaaccgccccagtagaccttgagcagctatcaagaacataaatggtgacaacggagcaccctgcttcaagcctctagagccgaaa

SEQ ID NO: 137241 - DNA, 424 bp, Glycine max
  unsure (1)..(424): unsure at all n locations
agcttgcaacattngaagaaggcatagctgaatcatattactggattacatngnngggtacctacaaaaatcaaaatattaacaacatcattatctgtgaatcataacataattaacattcaatcaaaaaaatgtattatttacttttccaaatctatgaaggcgttgttttcaaagagaagcagctatagattccatggtttacgcttaggtactaacgtcaagaagaagttaaagaaggatgtatgagaatgagagaaagtgaggttgtgagttactgtacccatgacggaaatgcaatgcatgcattgtatttatagaaaaaatctaatagcagcacaactcattcagtgatatcttagttgttgagtttgtcaatgggatcttggtcgttcaatgtgcattactccaactagtgatatct

SEQ ID NO: 137242 - DNA, 449 bp, Glycine max
  unsure (1)..(449): unsure at all n locations
gggatgatgttgcgcgtactgatgtgtaccatgagaggtttgggnggttngacccatgcgggcgctgaagtgacggcatgggtatctccttccttcctttntgccccagttgctctgattattttagcattggcacttgtggagaaaagtaatcgaacttccctcttttcaaccctacttcgattctttccccggcgaatactaagtccgcgaagctggaaggcatgcagcctaccaactttncatagtaaaacactggcaaggtgtctaccatcatggtaatcatctccctttcgaccatgggaggtgccacttgtgttgccagttctctccaccgctatgtgtattctttaaagatctcaccttccttcttaaacatattctgtagctgagtgcgattgggagccatatcggaattatactcatattgccttaggaaagtagtaatc

SEQ ID NO: 137243 - DNA, 398 bp, Glycine max
ccacatatcgcttgctagctactaccacaaaaaacaaatttaccaaacttttaaaaccaaattattcccatggcttaccatttctctctattttttcctttcattccaacctggtttctccatcttcatgggtgctttcatctcattcatctttatcattagctcattttttaagcaatccaagaataactctcttctcatgaatattcatttcaagaacttaccaataaaaaaaaagttacatcctcttctatccgatacatgttaaacaacaaaaaatgaaccagtacatccttatcttagcaaacccatacaccaaatccaaagaacaaccaaaaacacaatgtagtgttcataccttgtatacccacaaccaaaaacctctcctcggttatctc

SEQ ID NO: 137244 - DNA, 334 bp, Glycine max
  unsure (1)..(334): unsure at all n locations
ngctaagctaatagcatacaaataggcttctatcataatcttatacagcatngtccattgcaatatgaaacacgggtaatactaacattgcatccctattaaacataaagtcatatacaccattaagcatggtacaaaaaacacaattcactcacaatatgaaaggtcggtggcaactcaagctgtgaaaaaagctagttaccatacacaaactacaaggtcctatactcttgtgcgtattttcaaatgaaattgtatttattccaccattaattatgaagagaaatctgcataatatgagcagccaaaatattttaacagaaattgactttat

SEQ ID NO: 137245 - DNA, 336 bp, Glycine max
  unsure (1)..(336): unsure at all n locations
agctngtctctggggattgaagaactctgttttcttattgttatgatagctggctgacataatatcaattagcgacagatgcctcttcatgggccttcaactatatttttccccctagcgacacatccaacagttgctcggttcgaggtctcaacccatctgaaaacacattcaaatgattggctcagagaacccaagggtgggagactttctcaaaaaacctcgaaacctcttgacgcaacctacccttcagggggagggccacacgtgactctcgggatgcgtgttacacaaaaagaatactcgcggagtcgccaccgacgataatcttaagaa

SEQ ID NO: 137246 - DNA, 448 bp, Glycine max
atcatcacgggtcgaaggcatgatctttaatgttttgctaaacgatcgccttacgtgtgtaagaaattcgaccgctcagataatcgatactgaagggaatatgtgggccatcatctgtaagtgcacacagaagctagatctatccgcgactctctagcattaggctagaggatgagttcgccttgatatcatctgaaagggaagcgagggatatggtatttgcttcattgcaccataaggctacacagtcgactgaccgaattgctcttactttgaacatgagtcaagatctttccctatagctaggcatggcctcagcaatggaggacacctactccgtccacaatgagatccacggacttctcagctattgtcagcgtatgatcgacgtaatggaccatatgattataaccgcttgatgtgtgtttatcggtcaatcttgctagta

SEQ ID NO: 137247 - DNA, 404 bp, Glycine max
agcttctactcacatcatcgggaattttttttgtgtgcttctggatctgcatgacatgagattcatactatatcttccaatgtctatatgccagatgaataatactactacttgagataattcatctttctactatatgtctgtttattttatatgtacaccaactatgttttctttctcttgggcgtatcatttgcctatccatcccacacttagcaagggagactgtatactactgctggagaatggtatattcctcattcatgtgttacacaaaatgctaaccacactctgcccgatgctaggatctactaacttttgacatatgccatattatacttgtttaaacccagctaccctttctctaccttgtgacccatcataaattaagttctgaaaacagc

SEQ ID NO: 137248 - DNA, 434 bp, Glycine max
cttactcatgttcagtacaccaactgagatactttatcggattttcttcaggaacccgaagaccaaccttcgaatgatgagtcgctcagtcctgcacatataccgataaacaaactatagtgagcatatgtttgatttggtggttaaacaagagaaaccatgaacaatcttcaaatggaactagatctactttgagtacagagataaataattcacatatttgtctattgataagcaatcatggtcttaataaatgtttcaaggccattgtgctttgcgtattatttgctctaattgacaacataagtagggatactctggctcgccggtttgcactctgtggcgaatatgttgcttcatggtcgatgctatccgactatctcacgagcgcacattcccaaacaagagggtgacataggtggctaagtaacaat

SEQ ID NO: 137249 - DNA, 156 bp, Glycine max
aagacacagggagacatttagatcgccaagacaagcacgggaacgaaaagatgaaaaccgcgaccaaacacgcgacgaatcgagcaacagcacaccggaacgaacacaagggacacgctgcaacatacacaaaacggaaggaggcaccctacgagg

SEQ ID NO: 137250 - DNA, 440 bp, Glycine max
  unsure (1)..(440): unsure at all n locations
ataaatactcagcttaaattcaaattgcaatttgttcataatgaatngttttctggtatcgatacgtcctctggtaatcgattaccacagagaaattccatatatttgaaatcacaaaatgcttttgtaaaatatcctttggccaaacctgtgcaacattaattaaggaattctttctaagatcctaggaactaagtacatcgctcttcttgaatttctggattcttgacttgaatcacgcttatttttggcatcatcaaaacttcacatcatatatgcttctacacaattgagcttataaatgtcattaatgaattgtttgtaatcaacctggatgtacttacatgttgtaattacatgtgaatatgacatgtagattntgcaattttccacaatcacaccatcgttcgaaaatgtgtacaacaaacatttctgggagt

SEQ ID NO: 137251 - DNA, 373 bp, Glycine max
tagctatcatcgccaactaccaagaagagttaggtctagccgcggcccacgagcataagattgcggacgaatatgcccaagtatacgcggaaaaagaggctagaggaagggtgatcgactctttacaccaagaggcaaccatgtggatggatcggtttgctcttaccttcaacgggagtcaagaacttccccgtatgttagccaaggccaaggcgatggctgacacctactccgcccccgaagagattcatgggcttctcggctgttgtcagcatatgatagactcaatggcccacataatcataaatcgctaggaaacatgtatggtctctcacaccttgactagatacgactttgtttgtgacataaaatg

SEQ ID NO: 137252 - DNA, 435 bp, Glycine max
  unsure (1)..(435): unsure at all n locations
cttaactgagagtgtatgattttctttgagtaatagtctctgcatcaatctctgaattttagaatgaaatgtatgaatgaggacatgatgaaggccatgattgtatatacaagccaattgaccaaaaagcttaccttgaattataattatatcctttgcaccctttgtgtgttgaattacactttcaaaattgaaccctaaacttgaatgaatatctccagataccttgtttagattctaggagagcagatagttcaaggaaaattaccccaaatttgggggagttgattgggatgtaaagtaaaagggtaagcattagcacacacaataaataagttgtgtntaanaaaaagaaaaagataagacatcaaagaaaatgtatgttgttgtaataaggtcaaatgcaaattaaagtgaaaggctggtgagaaacgt

SEQ ID NO: 137253 - DNA, 97 bp, Glycine max
actaccataatgcgtacctcgtttattccacgcgatgcattccaatcagaaaggaagaccccccgaaaagatcccatccagaagggagagacataaa

SEQ ID NO: 137254 - DNA, 361 bp, Glycine max
gagcatgcacttccctcccgtcgttacaagatcgtggggaaccccggcccaaaatttatattattattagcaccccaccctactgaatgaagtagtaaaaggctgaaacaaacagatgacaaaaagaagggaaacagctcacggccagcaaaaacattatatgtagatctcctctattgggggcaagtatgttcttagatacagtcagacattaaatgggcacctctcctaaaggagatttaaaccttaattcaccacattacaagaaactagcccctggtgcaaaacccaacaaccaccgtggataaaaacatcatagatataaaatgatctccatctgtgagcggataaatccttcact

SEQ ID NO: 137255 - DNA, 294 bp, Glycine max
tacaccacatatttgtgaggcactctcttcccttcactggtgtggggataatggaaacacaactctatccattctttaactcgctataaatgcatgtttaaacttcaacaagtctttctttccagggatggaaaccattgggtctgcggatgacctcttggatttttcatcagacatatgcgaggaagatgagtacgatgacaaacctaggaaagcctcgccttcacttaactcaaaaagcgccggcccatcgttgttaacccattggccaggttgaccaaaccattcatttct

SEQ ID NO: 137256 - DNA, 410 bp, Glycine max
  unsure (1)..(410): unsure at all n locations
tgaacaatctataaaatatgaattccattaatttaaaatcacacaaaaatatgaattccatcaattccatgaatttaaaatccagaggtatagaagaaggaactgagtttcttcttgtcgactatgaatagaagaagccatccaaaccttgttttgtctaagctctagtctcagattttctatatcaattctacctttttccttgactcctaaatcttctattactaaatgaaaagcagtgatgagacaagaatagcacagaggttgtcttaatcatttatcagtactgagtgtggcaaaggtgttacctgtggcttgtgttccaaacagctatgctngctagcagttgtnttcatttctagcatcacattggttgtatggtttatgctatgcacaagtgcttctggata

SEQ ID NO: 137257 - DNA, 293 bp, Glycine max
acaccaaaagccaaccatatcaggaacgaagatattaaacattgggctgacaacatgagtcttaagtaccgctcccattaacaacaaaaaagatctcactataggtgaactggataaagagtgttccaatacagcatgctgaataactcgattgaaggtaataaaatattacttttgaatgtcccgatatgcatgcaaagatagtagcagcatgcagtacatatcaatggttcgacttgcggaattgccataaacataacatggtaacgtgacattcaattacagttaaagca

SEQ ID NO: 137258 - DNA, 403 bp, Glycine max
acctttcaagtaacgaagaattctttttgcggctattaaatgaggagaggtaggagcctccataaagcgacacacaactcccaccgcatatagaatatcgggccttgtattggttagataccttaaactccccacaagactcttgaagatcgtggagtctaccttctctccttcatcaaactttgataacttcaagccaccttccatatgtgtgttcacgggattgcaatcaagcatattaaatttcttcaacacttcttttgtgtacctttcttgtgagacaaagataccattctccgtttgcttcacttccattcccaaataatatgacatgagtcccatatctgtcatatcaaattcacgagacatggactccttgaagtcttcaaacaaatttgggtta

SEQ ID NO: 137259 - DNA, 482 bp, Glycine max
  unsure (1)..(482): unsure at all n locations
acctagaaactaagctatagaacaaacctggtagactgaaagggattttttctaatatatcaagtctgatccgaaatctcacccgctataaatacaaacaaactataaaaagttctgacttctatctaaagatattggcgaaggaaacccttcaacagattacaaattgttaatgcccatcggcccaacaagaaagatttaaagtaagtgaaatttaagacaaaatattcagcttacgcagggctagccaaattcatgacaggttgcactatcaaacaagttacaatttctcgagctatagatcgaatgacaggacattgaacttctcgttttcttattactgtagctaataatccactcattaaccgctgaagaacctaaagaaagagaaatcatcagatggaggtatgagatgntatttgcaaaagaaaaacatagacgacatctagacactccactcacaccttgtactcactctctgg

SEQ ID NO: 137260 - DNA, 462 bp, Glycine max
  unsure (1)..(462): unsure at all n locations
ctgcagctttggtggataaaccttctcctgttcttttgttatttttcactgctttaaaaaatttgcttggaaaggtttatacataaacaattttcatatagttcttttcaggttctatatataaaaaaagtagtggttttaattaagcatattttcgacagtcatttgttttatttaattagatatgtctgtgaaatcaatgctcagtgcacttgtaccctgccaacctggagacacatttgtgaattatcccacacgtccagtggatacaacaacagattttgaagggacagccaacatgcaaccttcacagccggtatgcaaagatacctaaaaattctatagaaaaaactatatcatntctaagctgaaataatttgacttaatttatcattagcccctcttaanattgtaaagtctagtagaattaaaattttcattgagtagagcatatcagaacta

SEQ ID NO: 137261 - DNA, 385 bp, Glycine max
tagctaatacgatttgaggtcaacactaaatttataatcattgccatctctggctttcattcgatcatgctccgctgaaatctaagtttgaaggttatgattataattagtgaagttaaaggatggccaatatcgatatcagcttggccacattactttctactatgtctggatgagaggaagaacatcgaaaatgactagaacttctgctttataacttttttacaactgaaatggagggagagagagctgggaggaaataatttcaatccactgcttgaagaatggaataagggtggactgaattaacatgctcaggaataaagtatatccaccaatctaacgtgtggacaaggacaatacttgggtcttaccaggagaaggg

SEQ ID NO: 137262 - DNA, 444 bp, Glycine max
agcttggttcccaacgctctgttcaagctctcttctaatctggaggtaaatctaggatctctatcatatactatgctagatggcacaccatgtaacctgacaacctcacttatatacaaggtggtcaacttttccaaggaaaatctgatattaatgggaatgaagtgagcagacttagtcaatctatcaacaataacccagatagaatctaaacctctaggggttctaggtagtcctactacaaaatccatggaaatattgtcccacttccactggggtatctctaagggttgtaacttccctgaaggtctttgatgttctatcttagccttctgatagactaggcatgcatacacaaactcactaacctctctcttcatgttgggccaccaaaacatcgtctttaaatcatgatacatcttgtgagcaccaggatggatgctc

SEQ ID NO: 137263 - DNA, 410 bp, Glycine max
  unsure (1)..(410): unsure at all n locations
tcttagtttcagatgatgcagatgggtttgtagctaccttatgcactcctctaatgactatggcatcatttctggcgctaaactgctgcgagttggaagccatcttctcaattaaattccttgcttcagtangagtcatgtttccaagggctccaccactggcagcatctatcatacttctttccatattactgagtccttcattaaaatatttgagaagaacctgtcttgaattctgatggtgggggcaactggcacatagtttcttaaatctttcccagtactcatacaggctctctccactgagttgtctaatacctgagatatccttcctgatggttgtggtcctgaaagcagggaaaatttttctaagaatactctcttaggtcatcccaactcgtgatggacct

SEQ ID NO: 137264 - DNA, 227 bp, Glycine max
  unsure (1)..(227): unsure at all n locations
gcttcgcctttgccttttcctaaactactgttattatattanggtatggacgaatgggttatggtgttggggcacataaagttgggatgcaaatggttagcgtggcggtgtttgggttgggacgcaaagaaaactgacggacgagaatgagtacaacataataaggggaagggtttggggtgtcttgcgaccatgcaaaagacggtagggggtgggtttggggtgtc

SEQ ID NO: 137265 - DNA, 233 bp, Glycine max
aattatcggctggaacattcaacatcatggacttgtgtgatgccattctaatggataattatgaggactaccgacatatattcacgtcaattattcaagcacagatggaacctagattctgatatttcttatcagagcttatcaagttatttgatgattctgtcgataatatactgtgatgattaatatgtaattggacagtaaaacttggccattctttcattgggttgaag

SEQ ID NO: 137266 - DNA, 303 bp, Glycine max
cgaggcatgcgagcttagagccaggtaagacaggagtactatctatgaatctaggaggcgtaattcttaattaaggcggatgaagctcatctcaataggaacccaacatatatattctcctaagagctaagacacactttttttaaaataagaatcaatcagacagttgatctggctggtttaattcaaaaagagcgtaagatagcttttatagaaagttataaactaataacttgggatcgaaggaagggttataaaaatcatttacattctcggcataaccagcaatatgcccatgactga

SEQ ID NO: 137267 - DNA, 469 bp, Glycine max
tactaagcttgtgaacagattggccgcgtctatggcgaaagcatcagctctggatacttctctccattcagaggccatgtgatgcagactctgcatcgccaattattactccctcaatacaacatcacatcatcttcattttaactacgcatgccaatagaaacatcactagattagtgacttgatgataacttatttaaagtgtataaaatgagatcttctcccggatataccttatcaacccaacccaacccgttgccattaatattaagttagagtagaataatgaaaactgtgggcgcggctacgtatctatattgttgatctaagaataactcttcaaaatattaactctatcggatcttctttcacatgggagtgaaaggccgcggactagacgataccgcacctagctatggtgctgaatgttttaatattttatcctctatggaagccactatatatgata

SEQ ID NO: 137268 - DNA, 365 bp, Glycine max
ctcctgccatgtgccacatgatgcttacctaaatcaattgctaatttgttatcaatcaacaacctcataggactgcaatctcttaagttgagttcttccattaaagcttccagccatagagcttgacaagctgccatagtagtagcaatatattctacttcacatgttgacaaagcaactacacttttcttctttgagcaccaagagattcggcgtgttacaaagttgagaacatacccaaccatgcttttcttatgattcttatcaccacaccaatctgaattactataaccaaacacttcttcttctgaaatcttctgaccgtaatgatataaaatgcccagatccaatgtgtctttcacata

SEQ ID NO: 137269 - DNA, 320 bp, Glycine max
acacccctccagcgaggatcatctaatacaccgcaagctctcttggtagattatactaacagagacgatttcttgaattggtacctaagagataaatatagcgatcaaatagctacagactctaaatcgctagcaaatatgaggaaccgtctcggtagatgagcatcatgagtggtcgcatatgaacgttcttaattggacccaaatcgacggacaaagaattgggcacactccaaagtgtgtgaaaatgatgcacagatattggcgcacatgtgaaccggcccgcatagaagttagtgtgcctaatcattatgaagaga

SEQ ID NO: 137270 - DNA, 280 bp, Glycine max
agccccgcggaacccgcacccaacggagacaccgacaacaacccaccgacagctctttggacgaagtatggcaagcagagggcagaggaataatcaacccaacagaccacggacgcaacggtgagtgaatcccaaaaggcggaggaaccaacgcgcagtgcacgccgaccctgccaacgccgagacacaaatgagaataccccacacgccccgcggacacaacaacccacatggaaaggacagacaacatgccacccgcacagaccggatgcgaagagac

SEQ ID NO: 137271 - DNA, 183 bp, Glycine max
tactcagctccggatgatactactgtggtatgaacaaaacgtaatatggaatcaaaaaatgcgaataatgatgaccctatggctgcgaactcgtcactcccgtgggtatggcttttgaaaggggggaagggaagtctttgaatgcaaaaacgtcccccctctcgtcattcttatatattggtg

SEQ ID NO: 137272 - DNA, 449 bp, Glycine max
actcagctctgtcaattcacgctgataattatggcttttctttcattcattgataagctatgatcatttgaatttctcgagaacttcaacttatcaatttcgagcgtgtcgatatatcatgggcctcaatcgtaaatccatgtcaaaatttatggccgtcttaactagaccagagctttcatgttcaatttcgagtgtctcgataaattatgtgcttgaattggacatccgagtgaaaagttatgaccgcttgaatttctctagaacttccatttttcaatttcgaacgtctcgatatatcatgggcctcaatcgtacatccatgttaaaagttatggacggctgaattgagccagggcattcgtgttcaatttcaagcgtgtcgataaattaaatgcctgaattggacatccgagtgatagttatgacacatttgatttctctacaac

SEQ ID NO: 137273 - DNA, 427 bp, Glycine max
ttaagtcacctgcatgctgcaagcttctatgactttaacacctggctggtagttgtttttggctgtagtgaattaatacaggctttagtttgaggatttaaagccttttattagctatgactagcaagaacaagtattatttatatacatctttaacaacaataatatatggataatgataaatttaaagtgcttggtgaatctctacaataaataggtatgagaaagttattactactattattcatataattgcatgcctttacctctttcttttagacttttggtgaaaaaaaaattggtaagctggaatgttacctttcaaacctgtgcctaatactaagcatgggcactatacccgtttatgctagtcgcattgggaaacgatactttgatattcatttgggagttatattcacaaaacatt

SEQ ID NO: 137274 - DNA, 452 bp, Glycine max
agcttggatgaagttgaaaaccttctcctctcttctctctctctctcaagcttgtgtctagcttgaccacaaccaccaccacctccaagggagagctcctttaccttccttctctctagcactttttctctaggaaggtatgatgaactaagaagtggagagtggtatttataggctaagttaggagacaaggtgatgaataggacttatgatgaatgagaactcataagtcctatggttagtaagcctttaatttcctattaatctaacctcttcattttctaactcatctaagcctttaatttaattatccattattctttctatctcacctcatcattgtcaaactttttattttattgtattttattttaataattatatgttgtaattctaccaatggatcaacaatcaacaattgttataacatccaagattctgctattcacact

SEQ ID NO: 137275 - DNA, 369 bp, Glycine max
cacatgaatctcagcttaagggatattgtcgcagcactgaaaagtgtcttttttcttatcactgaccccgctgttttgcacactacttttatcatccttggactttgtgtagaaagaatgctaattgatatcatatctcttccaagttggaacattcatatttggacccacagctagaaatcttaatgtgtttgaagcactgtcatcggtgaagattgtttgtctaaaccagggtatgaaagttctattgtgctcttgcaacaacctcatcatgtttatgtttgagtgaatacgactaagatgttgtgtgtgagcatctatgtaagggattgtctcttccgtgttgtgaatacatatagatgagcttgt

SEQ ID NO: 137276 - DNA, 345 bp, Glycine max
  unsure (1)..(345): unsure at all n locations
tgaattcacgatacggaaggctaactctataactgttcagcaatttctagagtagtatatctcttaagaaaatcaaagctcttgcatatataaaaggtaataattggtacagttctgtcgaaatccaatttatttagaagatgtatttcaattcaaagtgacaaactggtgtatgcatacaaaattctggaatagtggaattggtaatccgaaaaacatgcgggattacccattctggaatctggaatgagtaattnggaaatgagaagtgctcattttgttgtctattccggactatccaatctggaattataactagatccgcagaaacaaaaagaaaaaaca

SEQ ID NO: 137277 - DNA, 391 bp, Glycine max
atatccaacaggagaaacaatgggccacatgaaattcaaggcatggaaattcaccactctattccaatgacactttttcaggtattgcttgcttctgcagactgcacactttgagttgtgctaaaatattgggcagaatgaaattgatctactcacaagaaattcgcagatgtatatgatgttggtgatgtcataatattcacaattctgtaaattgatcttctgcagcctcgtactgttcggctgaaccaccaataattgaagctttaaaatattggacatggcagatctgtgatgtccgtccagtatgtactgttctgatgatagcattacaactagtgcggctgtatccaactcggatgagctgagcattcaccatcgttctaacata

SEQ ID NO: 137278 - DNA, 390 bp, Glycine max
  unsure (1)..(390): unsure at all n locations
agcttgtgcattcaataccctgatgaggatgttttatatgttcttaanactggactgatccatttgctttcaaagtttcatggccttgcaggtgaagacccacacatacacctgaaagaattccatattgtctactccaccatgaaaccaccagatgtccaggaggatcacatatttctgaaggcctttcctcattctttagagggagtggcaaaggactagctatattaccttgctccaaggtccatgatggaagcttgcttgtggagcttctatggaagctagatctttgagctctaatgaggttctttaatggtgattttacaccatggagatgcagcggaaggtataggagaagaggagaggggaggcactatccactagggaata

SEQ ID NO: 137279 - DNA, 335 bp, Glycine max
  unsure (1)..(335): unsure at all n locations
gcttatgagagagtcaaagatccaattgagaggaanaataattgttattgctaacaagcccacaaatggagaaagaatgttgtcttcgaacccaaagattgggtttgggtgcacatgagaaaaaaaaagtttccggaacaaaggaaatcaaagcttcaaccaangggagatggaccatttcaagtgcttgaaagaatcaatgacaatgcttacaaagttgagctgcccggtgagtataatgttagttccaccttcaatgtctctgatttatctctttttgatgcagatggagaatcccgattgaggacaaatccttctcaagagggagagaatga

SEQ ID NO: 137280 - DNA, 395 bp, Glycine max
acatggacttgatggggcctatgcaagttgaaagccttggaggaaagaggtatgcctatgttgttgtggatgatttctccagatttacctgggtcaactttatcagagaaaaatcagacacctttgaagtattcaaggagttgagtctaagacttcaaagagaaaaagactgtggcagagagtttgaaaacagcaggtttactgaattctgcacatctgaaggcatcactcatgagttctctgcagccattacaccacaacagaatggcatagttgagaggaaaaacaggactttgcaagaggctgctatggtcatgcttcatgccaaagaactttcctataatctctgggctgaagccatgaacacagcatgcttcatccacaacagagtcaca

SEQ ID NO: 137281 - DNA, 473 bp, Glycine max
  unsure (1)..(473): unsure at all n locations
tctttcggaccttgaacaagcaactaactcctctttcagaaccatgctatgtgctcgcgactggtctctctcttcccttcgcagctagagttcactattgctaccccatagagctccgtgaaatttattccggccatactcttccttgcgagccctcttggtctcttgttcaagggcccttgtggtagttgcattctcttcccgtaacccggcacactccttccgaatgtgtgtagcggccaacttgaacttctccttggcaagtttcgcctttcctaactcgcttttgagagcttggacttcttcgtcctcttgcggtgcctcaaaactctcttcgctgacgacttttaacttggcgagccaatctaaacctcgtatatgaactttcagccattcgtggtacccaccaatgatgccattacgaatgcccctaagctcttgatctttccttaacggngtttcccatgccttat

SEQ ID NO: 137282 - DNA, 424 bp, Glycine max
agcttgctggtcatcatcgtctgttccaaagtttctgtccccaaactcacccatgccaggtatgacacggaatgcttcattcaaaccaatctcaatctcagatgtcacgatttttattctcggaaatcttttacagaccacatgaacaccttgaggtgcctggcaatatgagagcatgcatatatgcaaaacattaggtactaaaaaagacaagcaacagaaaatgacaaaaaaaatggctagatatatgatatacagaggaacaacagacacaagtaacttactgatacgagattgagaaataaaatgttggactctggtacacccttctttaaaagcaaagaaattgcttctactgccgaattacctaaagacgaagatattctaaagttgatcaaaacgacaaccaacacaataaatatca

SEQ ID NO: 137283 - DNA, 319 bp, Glycine max
ctataagtgcgggtctgggagacgaaggtcaagtgttcgctatatgtgaagatgatgttccaagtacttcggatttggtccgaccatgccctcctgatttccagctgggaaattggcgagtggaggaacgccccggcatttactcaacaagcataatgtaaacctttacgggtttaaaagctctataattgggcctacgctttagagttttcgctttgttaaggctgtgtgtcttttgttttgaatatataaaacaagagcattttcatatgttcctggtgttacccatttcattcatttgcatgttacttcttttttg

SEQ ID NO: 137284 - DNA, 459 bp, Glycine max
  unsure (1)..(459): unsure at all n locations
agcttctaaactntatacaagaatgaagctctattaccacttgntagacaagtagcctcagatatcttaagaagggggttgaattaagatatcacaaactatttcccccaattaaaattttactcctttttaaagacaatgccaatgcacccttattatgaagagaagatgtgattgttgggaaatattttcagaaattctcactggtaatcgattaccatagtggtgtaatcgattacagttatgtgtctgaagagttgtgattcttcactctgaaatttgaatttttaagactggtaatcgattaccaactcattgtaatcgattacataacttgaaatttaaattcaaatctcttaaggctgatttaaaacgttccatacctctagtaatcgaatacaagacttgtgtgatcgattacatgcttcttataatatttaaaagcatttaatagctttt

SEQ ID NO: 137285 - DNA, 336 bp, Glycine max
  unsure (1)..(336): unsure at all n locations
tgaccgcaataggcatacccaggtaatgaaaagggatatctttctgtctacaattcanaaattgggcagcatcatgaacccaattagcttgaaccccaaaaatcccaaagtgactcttggcaaagttgatctttagaccagaagccatttcaaaacctctaagcatggccttcaagacaatgacattctcccaagaacctcaccaacaaagactgtatcatcagcgtattgcaggatatttgtaggcttcttttgcttcccaaccagatagcttctataaagggttttggtaagagcctctctcatcataccggtgagaacttcacccactatatt

SEQ ID NO: 137286 - DNA, 357 bp, Glycine max
  unsure (1)..(357): unsure at all n locations
agctttaatgacagcaccctaaccttcgagtttttttactggataatgacctcntagnntcataaccactgcttgaggcatgtataatttagacaactcattttgatttttatagctacatgtcaacccttctagctctcacaatttaaaatcatgtaggcgggctatatgcagatctgttgtcgaaacgccacaaaattgaaatgtcatttcattcattgtttaatgtgagagagcaatgtcaaaatagacacagctctatggatatatacgtggacacagatgcagatgcccatatgctttagatcatataaacattcgatgaatggcgcgcgcagaagaaccttatacataata

SEQ ID NO: 137287 - DNA, 481 bp, Glycine max
  unsure (1)..(481): unsure at all n locations
agcttatcactcctccacactacacaactnttcccttntcttcataagcttattttggttgcagaagaagtaanaaacacgtttcattaatcagagaattgaagaagtaatgctcaaagggaacaccagagccaatagagtttgcttttcttcattgccatgttgcaacttgcaatgcaatgcactccttagtaaaagtagtatatgtgttaacatttgtcaatagttcatcataaatcataacaatggagctaaaaaatgagaagctagtcaggtaaactcgctaccatatatggtacctttatacttttttcttctttttcattcagtttcatttactcagatttggttaatggtgttgaaaactcacaggttcgccaatgatgaaaaacacactcttgaacctctttgggaaaagatagatgctcacaaacaccatgagaaggcattccatgtctacccagaattcaaaattagtaat

SEQ ID NO: 137288 - DNA, 268 bp, Glycine max
  unsure (1)..(268): unsure at all n locations
ccatacatgcggnaaggagtgctctattttcttcaactcggagtcaatcggatcttctaaagccacactttcttcttttttagagcatggtctataaactaacaacctattatagccttcacttgcatctaacattccaactagagtacggggggccgaataaaccaaaagggttgattattccgctgtggctggtggatacttccagaaagctgggtccaatgcaaggactactggactcaccaatgtcttgcctagccccctagct

SEQ ID NO: 137289 - DNA, 415 bp, Glycine max
  unsure (1)..(415): unsure at all n locations
agcttgaaggtgtgntaacccaccatttttatattataacactgnnaatgggtctactatcattgatatcatttctttctccgtcattgagggaaccacttggtctgccaaatccctccacctttgggcatattctttgaatgattcatgccccctcttgcatatgctttgtagttgcatcctatccggagctatatcagaattgtaccgatactgcctaacaaatgcaacaattatgtcctcccaagaatggactcgggaaggttccaagatagtatactatgtgacagttgccctactaagactttcttgggagaaatgtatcaacagtttctcatattgcgtatgccccacatcttacgacaatacatctttagatggttcttggggcaaataatccccttgttcttgtcaa

SEQ ID NO: 137290 - DNA, 418 bp, Glycine max
  unsure (1)..(418): unsure at all n locations
ctgcttatgtggcaaggcgggcttccttcacattcttgtcttcaacgcgagctttgaccactgttcttccttcccgtgatgcttcttttcatgttcgcctgagtgggcttatagcctaaaccatacttcccacgatttccttgggtatctatcaggctagttatgccgccgctgttnttgcctaaacccatcccgggttcataaccgctccccaacataactcgggccatcattaccgctgcatcggacagacaaagctgcccaaagagggagtccacggaggaaatgttgaccacctcaaaagactggaaagcagtttctaacgattcttctgcggcttccacataaggcatggaggatgggcagcttaccaagatatcttnctcgcctaacacgatgaccaagtgcccctccacta

SEQ ID NO: 137291 - DNA, 332 bp, Glycine max
cggatccttaagtcacctgcaggctgcaagcttcaacctttggtgcccatttctgttctctatctcgaaaggagggcattttctgagtcgtgaagtgcgtgtctacgagtgggacttcaaaatttcaggtttgggtggacttctttctctcttgatattcgagggtatggggctttgggaaatactgatgggtaatgttgctaattttatgctttatgataggtatttgtgaaggaatttgtcgaaagcatgttgaaattgccatgtttggatgaattaaacatacccattctgatttatgggttttatgatgacgcttgtgaagttcatgt

SEQ ID NO: 137292 - DNA, 86 bp, Glycine max
actaaaattataggtaggacgagggtttttttttccatgaatcgtcaaataactctatgtgaaactaatctatgataaaaaaaaaa

SEQ ID NO: 137293 - DNA, 407 bp, Glycine max
  unsure (1)..(407): unsure at all n locations
ccgggatccttgagtcacctgcngcatgcaagcttgcctcaaagagatccaggaaagtatttttctgtttatgaaccagtcccactcccgaatattacagccatcgtttcaagagcgctgatcaccaactacttctttaggccatccaaggatggtcattcctccaggagagacgcctccaactcagggacgacaagtataccgacttccaagaagatatagctctccggcggtggacattggtggttacccccatggacaaagtcgacccacacatagtcctcgagttatatgccaaagcttggcctacagaggagggtgtgcgagatatgcgatcttgggtgaggggtcagtggatccctttcgatgcggatgccttcagccagttgctggataccctttagtgc

SEQ ID NO: 137294 - DNA, 396 bp, Glycine max
  unsure (1)..(396): unsure at all n locations
gacacttgaatactaagcttgaggattatggngtacccgtaatatgtggtactaggtggtgatctggcaatggngcaaatcaactctcccacattcacaaatcaaacatgaacccaccatccccaattacccacctttaactgagctcatgtacccccacgtagcccttatcctcgttcctctcagcactgggtccccatcaacccctccaagcttccacaatatccaagcgatttaatattcaaacatcatgaactaccctaaaccaagaaaacagggcagaggcagaaaacttctgtccaaaacacattccaatacacaactttccctacttaaataccccagtaacatctttttgctttaattcgttaacacattgaccgactctaaaatttt

SEQ ID NO: 137295 - DNA, 427 bp, Glycine max
  unsure (1)..(427): unsure at all n locations
agcnttgacggaagaagagaacacgaaactgttgtatacaacttttaaatattaagggaagggcattttcgctcattcacttaaaatgttgggggcacttattttaatcgatggaaacgactaacttttgtgtctacaacttgtgtaaattgtatcaaactttcccaatttatgggtgttttgtagtattacaagtactttttgttaaatattgactatagatacttaatgcatctgttttgtatgcttaataatcaaattctctcaatttcatgttaattaggcaatttggcaaagctcgaacagcatccactaagcgcaacactcctatgctaagcgcgaggaagactctggaagaagatgagttgtatagggtcgctaagcgcaccacttcatctcactaagcgtactactttagttcatccgc

SEQ ID NO: 137296 - DNA, 454 bp, Glycine max
  unsure (1)..(454): unsure at all n locations
cgaacgaatgtaagacacatcttcttcaactntggtgattcttgtctccatctcattgaagcgcatatccacttgtaattccaaagtgtcaaacctttcaccaacaaaggtttgaagacaatcaaacctgtccaaaatctttgaaagaagagatgaatcttctccatcatgtccttcaccaacatgtcgagcaccctttttcacccaagagccatcatgctctttttgataaccaaaggatgctatgactgaagcgcctataaggaaggatcttttgattggaacatagggttcagaatcaagaggaatgttaaagtgttgaaagaaaagggtgactaaatgtggatatggcaatggagcattcaatcgcaatgccttatgcatgcgatatctaacaagacgtgcccaatcaatttgtaggcctttatgaagagcccacataataatgagatct

SEQ ID NO: 137297 - DNA, 431 bp, Glycine max
  unsure (1)..(431): unsure at all n locations
gcagcatgcaactncttaagctccagactttttcttatgttgctcccctatctntaacaagagtatccacttaaattattcattttctatccacggcggaatagatccgctatagtagacttcttgccatccctagttatatatggatcggttcggggattgagtcaattcccgcccacatgttctcacacagagggaggtagaaggaatgagatgggggtgaatgagtaggtgaaacaaacagagaaagaggcaactgaaaggggactcgaaatcatgaatcagctgtgtgagaggatgggaacacgaaatccaccaagaatgtgaagggaaacatcattcttatattgttatagttgagactaaacaacaataacaacaacagaaccttatcccaccagctatgttatgggtcaaccgactaaatattt

SEQ ID NO: 137298 - DNA, 300 bp, Glycine max
cttgggagtcaatttcttcactagatacttcccctgttgcttcttcactttcactagaggaaggtgaagtagtaacctcatcttggctactataaatgtctcggcccttcataatcatgggtttctttagttgccaaacggccatgtaaaagtttccatgtaaaaaccaagactttattcggagagccgcacttccaaaaaaactcaaacacaggttcattttaatcaacagttatgagagccacactagttctaatatgataggctgacgctacaaaaaatacatgacaattatatatg

SEQ ID NO: 137299 - DNA, 164 bp, Glycine max
cattaattttgtgctttaccttctcttccattggtgtttcttcatttttctccatgtatctcctcacatgtcttgttctcaatgttgtgtacctgactctttagaatttgcaccgcataaacttgctatataagctagatttgatttctattgttcaaaatctt

SEQ ID NO: 137300 - DNA, 442 bp, Glycine max
  unsure (1)..(442): unsure at all n locations
atcaagtatccattgtttctatatatatatatntcctctcttaagcttgcatttgataaatatggttgtcgaggcattaaatgcacacacttcttcatgctaagaaacctttctttgtcattggcatgttgaacactattgtaggaaaccacttccttttttgtcaaactcaatatgttgtagaactcttcttttgatggcgattgagtaatttcagagcttgacttcatttattcttcataagattcgatagatcttatgagaatgcctctgtaaaatagatctcgggcatagaatattaaatgaagtcaaaccattcttaatattgtatcagatcatgattctattttgctatcgtctgagacatcaaatgtagactttgcgacatgttctgattgcgcataagaacacaatattaacctttgtatttgttacatctaat

SEQ ID NO: 137301 - DNA, 364 bp, Glycine max
  unsure (1)..(364): unsure at all n locations
agctttccaaatagtccatagctacttngaagtcattatcagcctaccatccccaattaaatggtaaaacaaaagttgtctatatatgtttgggaacatacctgcaatgtttcacagggttcaagccaaagcaatgtccatggttgatgagtcaggctgagtgttggtacaatgctaattaccacagtttcaatatgatgtacccctccaaagctttatgtgaaagggaaaccccaaaatcatttatgcgttcaggagagttgcataagtggccgtagtgaatcaaacaaaaaggaatttggtgttagataagctgaacgacaattcggtgtgcctcaaaataaaatgaagctttgtgcagaaa

SEQ ID NO: 137302 - DNA, 447 bp, Glycine max
  unsure (1)..(447): unsure at all n locations
ngctngtggggcttctatggaggctggatctttgagcttttatgatgtcctttaatggggattttccaccatggggatgcagcggaagaaaaaggaaaagaggtgagaggaggcaccatccactatggaataagccatggaagaaggagcttcaccaccaagatgagccttggataagaagcttggaaggatgcttcaatggaggaaaagatagagggagagaaagagagagggcggagcacgaaattcaaggaataaaagagggagagaagtagaactttgaagtatgtctcacaagactctcattcatcaaagttacaacaagtgttacacatgcttctatttatagactaggtagcttccttgagaagctttcttgagaaaacttccttgagaagctagagcttagctacacacacccctctcataactaagctcacctccttg

SEQ ID NO: 137303 - DNA, 448 bp, Glycine max
  unsure (1)..(448): unsure at all n locations
agcttaaattctttgcatcttcgtcattactttttatttctttgcaatcttcctttgaagaactaactgtgagtgcaattccttttcttttcttttatgtttcttctgcatgagattgttgaatcaactcatgttcatatgcaagcaatnttctgaagagagcttccatcaacattgatgctaaatccttggattcctttatcgatgtgatctttggttcccaagctcttgtaagacagttgaggattttgatgttcagctcatcatcttcaaacgtttttccaagaccaagaaggtgattcacaatatgggtgaatcttgtttgaagttctgaaatggtttcttcattcttcattcaaaaagtctcatattcagatacaagagtgtgttttcttgctcttcttacatctgcagngccttcatgagtgacttcaagctatttcatatt

SEQ ID NO: 137304 - DNA, 464 bp, Glycine max
  unsure (1)..(464): unsure at all n locations
tgtccactcaatatttcttcaaatatagtaagtcatatacttgttcangaatttcaagaacctcatgttttttagttgtacatccacccaataaagcatcaatttattttcttccctatttttttattttctgattagagaaaaaataagaaactataggagaatataataataataataataataataaaacaaagcacacaaaaagaaacttgatcgttgaaatatgatacaatgattcaacaattaattacgtttatattaatatttaatgaattattatatatagtaatcaattattatatgttaataaatgtaatgaaagtcataatttcttgatgctgaatcattggatgttaagatgaatttgatggattacaattaaagtaattaaaaaaattcaattggaataatatgtttactattactattagcatcaacattggataaattaaataaatatt

SEQ ID NO: 137305 - DNA, 313 bp, Glycine max
gaaggaacaaacaaaccagaaggcactaataagatagagtgaggcctctagaggaagggatatatattagattagggccacctacacagtctaatgaaaccaaatacacaaaacaaagcccaaactcacaacccaatgattcaagtgactgaaacggccacgcttaattcgaccctggaaaatgctgaattggccaacgcttatagagggaaaaatagaacatatttctgttggactaccaaggacaactcacaagcgccatctggagtgctgtagtatactctacaccctgcactaggcagatagggcaagc

SEQ ID NO: 137306 - DNA, 465 bp, Glycine max
tgaaactcagcttgttagtgcccaatgatggctattttgtagtgagttttgttattttatcttgctgtatgggtaatggtgtctctagaacatttccattggatttaatgatgaaatctgtgcatttttacgtgaaaaagagactatagtttgaatttgcaaatgtagcagttaggcttagctcagtagttgggctaagcacatattctccgtcaagcgcaacttcatcgcgcttagtgcaaatgagaatctggcagagcatcagcatcaaatttgcatgctaagcgtgagatcagtgtgctaagcgcaataagtgccttcagccaggctaagctcgagactggcgcttagcccaatatcacttactcacgctaagcgcgagggtggcgctaagcgcagcgtcgcgatttcaagcctatttaaagcctctctgttgcagaataggggaccactttctacatcttt

SEQ ID NO: 137307 - DNA, 432 bp, Glycine max
  unsure (1)..(432): unsure at all n locations
agcttgcacccagctcgcccagcaagcttgtntgcttcctccagaagcaacagccttctggaggaatactttggagggcccaagtgggcctggatgctatttgctcccccattattactaagtacaccccctgcctttttttggtgatgattatttcgtaaagatacggaaacttgcgaatattgtaacaatacttgttttcttttcgtaatggtacagaaccttgcggattacataattatccctattttgacttaccgaaatgtatggaaccttacaaagtgtgcaacaatgggtccttttttatttccggtgcgtgacggaaccttacagattgtgcataatacttattttgattttcgccgtgacggaactaacaaatgcgtatgagggggcatcacctacaagaacaaaaaattgttgtattaacaa

SEQ ID NO: 137308 - DNA, 339 bp, Glycine max
  unsure (1)..(339): unsure at all n locations
agcttgaaagtctgtaactcaccatccttttatattttatatccggaaatgtgtctactatcattgtcatcatctttttatccgacatcgaggtgccaattgagctgccangtctctccacctttgggcagattcttttgaaagattccggccccctttttgcacaagttctgtaggtgcattctatccgaagacattatactgacactgcctaacgaacgcaatcactaagtccttccaagaattgactcgggaaggttccaagttagtgtaccaggtaacaactaccctatgaagactttcttggaaggaatgtatcaacaattactcatcttttgt

SEQ ID NO: 137309 - DNA, 429 bp, Glycine max
cgccgactatacctttgaccgaacacggccgtgttttgtctatgtcccgattcaaagcgggctgcaacaccggctccgctttcctaactgtactggaggcggttgccgcggctttatcctatatggttttctagaggtttaacatgacttccaagatggaagccatttgatcttttaaggccgataaatcggccttcatctgttgctgcacgccctcttcattatccatatttctggatcgagtgttataggggtgccttggtgttttcttagttatgatgatatttcaaaagaaataaactacggtgagtatgccaccaaaacatgagtatgaaaatggatgatcggagcacttatatccaccccaaggttgttagataacgtaatgagtccagaacttctcattctatataaagaacaaagctttca

SEQ ID NO: 137310 - DNA, 327 bp, Glycine max
cagctctttattttcagatgaagcagatggttgatgtattctcctcacgcactccattaaagactatggcatcatttctggcactaaactgctgacagtcggaggccatcttcccaggtaaatgctcggcctcagcacgagtgatgtctccaagggctccaccactggcaacatctatcacacttctctccatattactgagcccttcataaaagtatgggagaagaaatcgctcagaaaactgatggtgggggcaaatggcacatagttgcctaaatctatcccacaacacatacaggctctctacactgagtggactaatacctg

SEQ ID NO: 137311 - DNA, 345 bp, Glycine max
  unsure (1)..(345): unsure at all n locations
ataaatctggtcctggaggtcctttaactctattatgaaccatgaatagctcaacttatttacacccgcctatgtgcctgtccgcgcatgttttaatgatattcatgattgtcacatcatcaagaaattagtcatgatatgtttgcttatgttgncttattgctctttgtcggaatttgtccaggataagcctgcaagagagattgtgttgaaggcaatgggacaagcaatcagcaagacagttgccattgcagagatattaaaggtaaatttccttgcaagattctccctcgagcctctgatctttttaaattatgcaatggagctacaatgttcctcaaagtg

SEQ ID NO: 137312 - DNA, 355 bp, Glycine max
  unsure (1)..(355): unsure at all n locations
gcaaagcctagcaacaacagcctacgaccctttccgagtgtaaacctagaacaacttatatacttacgggcatacacgcatattcaaggtatattcgctacctaagaaatacacatgcacatagccaaggcattagctaattaagtcaacaaggcagttcgctacctaaattgaataagggatcttcgctacctaacacaacacacatacattgcatgagacatgtgctacctacacgcaacacacatacattcacgaggcacatgcaacatatatacattntatgaggcatgnttgctatcaaaatttacatacacacattcaagtatcttgctacctgaagtaatacatacac

SEQ ID NO: 137313 - DNA, 294 bp, Glycine max
  unsure (1)..(294): unsure at all n locations
aacatgaaaatgctgagctacacacaccctaatagctaagctaccccatgccataatacatgaaaatacaaaaaagtccctactacaaagactactcataatgccctgaaatgcaaggctaaaaccttatactactagaatgaccaaaatacaaggccaaaaagaagaaaaacctattataatatttacaaagaagagtggacccaaccttgacctatgggctcataaatctgccctgaggttcatgagaaccctanggccttctttagccactctagccgaatactgttgaag

SEQ ID NO: 137314 - DNA, 441 bp, Glycine max
  unsure (1)..(441): unsure at all n locations
aagaaagagagaatggtggagtactaaattgaaggaataaaagagggagagaagtggaactttgaagtatgtctcacaagactctcattcatcaaagttacaacaagtgttacacatgcttttatttatagactaggtagcttccttgagaagctttcttgagaaaacttccttgagaagcttctttgagaaaacttccttgagaagctagagcttagctacacacacccctctcataactaagctcacctccttgagaagcttccttaaaaagattcctaaagaagctaaagcttagctacacatacctctctaatagctaagctcacctccttgagatgagaagctagagcttagctacacacccnctataatagctaagctcacccccatgagaaanaacatgagaataacaaaaaaagtccttattacanagacaac

SEQ ID NO: 137315 - DNA, 372 bp, Glycine max
gaaggggaggcataatagaggcggagatctttcttcgctctggtcatatagaggaataatacttttctattaactgcctcatcttcgatctctctgtgccttttggctaaactcaaataaatgacactatgtaaatgcgcaatggggtacatccaaacgaaagaaatagcgaaaggattttgatagaatcgaaaaactccacgccagattatgtaaaggttattaagagaataacatcaacttagttcataatcattcaactggttaacgaatggttccaaaaggagggaaagcgaaagtacaatttactagtccggtgaagagtttaattagatgacggagaaaatattcttatcacaacaatgtatatat

SEQ ID NO: 137316 - DNA, 249 bp, Glycine max
gcttaaatcccattatcgcgcgatccataagaattcatgatctttctaaggaaatgagcaaaaactcataatggaggtgaaaatatcaatttagggggtgttcttcagtcttatgctcatttaagcccattatgaagcctcaacatgaagcaaatatctcgcctaggcgagcatgttgcttatgaactaagccactagctcacctgtgcgagttgggtggcaagctcctccctctatttctgtataaat

SEQ ID NO: 137317 - DNA, 459 bp, Glycine max
agcttatataggatttaagttatccgaataaattttactttattgtaagggtagctataatagatgtggagatctttcttcgctctggtcatataaaggaataatacttttctattaatttccttatctttgtatctctctgttcctttttgctaaactcaaataaataaaactatataaatgtgtaatttgtttcatccaaaagaaagaaattgcgaaaggattttgatagaattgaaaaactccacgccagattatgtaaagtttattaagagaataacatcaacttagttcataatcattcaactggttaagtaatggtttcaaaaagagggaaagtgaaagtacaatttactagtccggtaaagagtctaatttgatgacggagaaaatattcttatcacaataatctatatatgaaaggatgtcgcaaatggatgtaaattagaagaaagttca

SEQ ID NO: 137318 - DNA, 452 bp, Glycine max
  unsure (1)..(452): unsure at all n locations
tgtgaacagcnacaatcgtgcctataccgtggttggagctgtctgtgaacgctcgtgcatccagcccttataatctgaaccaaacccgccctctgccaagacactatcggcgcggaaatttcttgtggctgctcttagctcatgatagctgaagctttgcaagttggaagaatgcgagatctcaccctcactccgagacgtgacaggtatggaggctgatgagctcctgctatttgagctgatgtcatggccactcctgctgacacttctagaagggatccctacatccatacactgaataacaagttcacaaagactcatcacttatagtgccctattcacatggaatcccaaaagccccaaattatccttctgttgtcttaacagcaatttccctcatactgagataacactacttctctccagactaattacctagcagaanacattac

SEQ ID NO: 137319 - DNA, 405 bp, Glycine max
aaccccgatagtcgaagagaagttcaagtccatagccatcaaagtctgaaaagagtatgatgaactaagggacgtcaatatggccaccgctgatgccttggaacgagaaaccaagaaggcccaaaaggaagaacacgtgccagcaaagttttgaggggctttatagggcagcaatagtaagctcaaactccgaagaggtgaaaggaatcatcacgggtcaaaggcatgatcttgaaggacgagctaaaggcttaccttaggtcgaaaagaaatttgtcccaacagttaagcgagactgaagggaatatgtgggccatcatcgatgagtgcaaagagaagctaaatctagcggcgactcacgagcaaaggctagaggatgagtacgccaagatatcagcagaaagc

SEQ ID NO: 137320 - DNA, 466 bp, Glycine max
  unsure (1)..(466): unsure at all n locations
gtcagcttctcacccattntcctataaatagggggagaagtgaaatgtattttgttcatccctcctggtaattcgagaatcacttgaaataagtgaaaaaaattgtttccatgaagaaaatccaagccgaggcgcttccgtaacgttttcgtgggtgatttcgcgaagattttcaaccattttttgacgttcttcgtcgttcttcagtcttcaaccagtaagttcccgaaatcgaacttttcaattcattctatgtatccttagtggtcctcatttgcttcgggtgctcttatttttatttcatttactttccgtaccccttttgacgtgctttagtcatttacttaagtcattntctagcctaaatcaaaaaataaaataaatttccaccgatcatttgaattgtaatatnccgtaatntctgttaaactgaaatccgaccgttcggtcatgccgtaaccacgtt

SEQ ID NO: 137321 - DNA, 270 bp, Glycine max
tctaccaggcgacctgatttttttgttgcctgcctgtcccttctgttgaaggccccggcccaaatattttttgagtaccaccccttaggaagctgggctcggaatgccgggaataaggggggggttctgctcatggcaacacgattgtggcttgcccaggaggatgggggcccctggaggcatcgacctggtaaagccgaccagcgaggaagtgttctcaaaaaactcaaaaccaagactcccatcaaccgaggcatacgcgggataaac

SEQ ID NO: 137322 - DNA, 433 bp, Glycine max
  unsure (1)..(433): unsure at all n locations
ctatggaggctggatctgtgagcttcaatgatgtcatttaattgtgattttccaccatggagatgcaacagaagacaaaggagaagaggtgagaggaggcgccatccactagggaataagccatggaagaaggagcttcaccaccaagatgagccttggataagaagcttggagaggatgcttcaatggagganaagaaagagggagagaaagagagaggagggagcacgaaattgatggaagataaaggcagagaagttgaactttgagtngtgtctcacaagactctcattcatcaaagttacaacaagtgttacacatgcttatatttatagactacgtagcttccttgagaagctttcttgagaaaactttcttgagaagctagagcntatctacacacgcccctctcataactaaactcgcctccttg

SEQ ID NO: 137323 - DNA, 456 bp, Glycine max
  unsure (1)..(456): unsure at all n locations
agcttgtccttggtttagacatgattgatcatganttgggacttgnaggaattcaattgggcaaaattggatgagggaaagtgtgatttcgaaaatctgcactttatgcagaactttgctgtcaaataggtgcagcaaaattttggctttgtgcagaaaatgttgtgtatttgctggttgtggaaagagtagtacagattgggctctggaagtgttctagcagatcccaacggtcataatgtagatttatgtgctagagacttccagtaaaattttcgagtcgatccaacggttaaagaattggaacgaagagaatgttactggggtatttgtatgtgaaaagctgtgatattggtttgtgttgtgggcagagttttctgcctttcgcctatttgctnggtttgttagttcatgatgattggatgtggaatcacttggatgttgtgaaagcttggg

SEQ ID NO: 137324 - DNA, 468 bp, Glycine max
  unsure (1)..(468): unsure at all n locations
gtgtttgggcaatagcaccccacctgacgtcctttatgtcttctgacccccgcgacatatctccaggtaccactctgtggtgaacaataaaagcaggaagtttcacccttcaacacttcctcatctcaagcttgtaggattatggggtacccatcacatgtggtactaggtggcggtcgggcgatggtacacaacaagttttccacatcgacaatgcgcgcataaacccaccatcccctgttgtccacctccaactgagctcacgtactcccacgtagctcatatcctcgtttctctcaacaccgggtccccatcaatcctcccaagcttccacaacatccaagcaaaacaacattcaaacagcacaagctatcacagccaagcaaaacagagcanaggcaganaactctgctaaaacaccaaaaatttactgggatcgactccaaattntactggaagtctacagta

SEQ ID NO: 137325 - DNA, 397 bp, Glycine max
  unsure (1)..(397): unsure at all n locations
ataaaagaacctaaagccagtaacctagggaatcaaaaaaaaagaacttaatggcgtgatgtaactgaaattgtggcaaccaaaagncacctcccacagccaacaagtcatccaccaattggtctcccaaaaagctgatgcctaaggtgccaattgggcccttattacaacttgaactaaacctaactaaagcccttttagttgattcacccaaaacatattattggtcagccaactatacaaggattgggccattatttagacaaactaaacactctaaaatcgagacagagtggtggcatttaaacctcctccatttgggccatgatacaactcacaaccttggacatttctccttgaaacttgggctggtatccaaataggatcgacaacactt

SEQ ID NO: 137326 - DNA, 291 bp, Glycine max
  unsure (1)..(291): unsure at all n locations
ntcagcaacttcaaacgacaataacangatactctgatggttttatngagancccggaancaacgagacgctcgaaacagaaaggagaagctctcagcacacacaaacgacaataacggtgtacgcagatgaccgaatgagccccgtaatacgtcgagacgctcgaaactgaatgtagaagctctgagccaatgcagacgacaatgacggatgactcagacgcctgaccgagtcccgagaacaacgagacgctcgatgaagaaagcccaagctggcagcaaatcaaacgac

SEQ ID NO: 137327 - DNA, 353 bp, Glycine max
  unsure (1)..(353): unsure at all n locations
tgttgagttgcttaaatccaaatatcgcgtgatccataaaaattcatgatatttcaaaaggaaatgagcaaaaactcaaaatggaggtgaaaatatcaatttanggggtgttcttcagtcttaggctcatttangcccattatgaagcctcaacatgaagcaaatagctcgcctatgcgagcatgttgcttctgaactaagccactagctcacctgtgcgagttgggtggcaagctcctccctctatttttgtataaataggcggnggaggctcangggaaggggtgcagcacccttagtgagcaaattccactgaaattggtgagaagaagaatgaataagaggaaaaatca

SEQ ID NO: 137328 - DNA, 368 bp, Glycine max
  unsure (1)..(368): unsure at all n locations
tacatnngctcattcaagtcattcacaaacactcatttcatatcaaacaaaccactgaatcatgagtcaatcatttcactgttcaaacaagctttttgttcaagcaatccacactaaaacaacataaaattaaaaagactgaaatttaaagactaataaagcgtaaactaaataactgacatgaactaaatatctgataaaataatctgttcataatttggaaaaatttaaaaactatgcagaatttaaaactcctgatcatcctgctgctgatcttctgcatatctcgtcaaattcagcactggagcagctggtggatcttgaacaataggctgctctggctccaatgctggtgcaaatggctagga

SEQ ID NO: 137329 - DNA, 451 bp, Glycine max
cacttaaatctcagctgtactcaatcggctagcctattctgccctccttgattattggaaaccattctggaggacagaggatcagtggaggacttcaaccagttggtgggagttctcagccaattaacagggtgtctcagtctgtggatagaggtagtggtggtagtggtgctcctgctattgttactacaccactcaagtgtgggaagtgtggttggcttgggcatattgctagtgagtgcacagatagagaggtgacttgctttaactgccaaggtaagggccacctcagtaccagttgcccatatccgaggagggagaagaggagtggaagtctgaataatctgagtggacgaccaaggaccacagggagagtgtttgctcttagtggtgctaatgccgcacagtctgatgaactcatccaaggtatgtgtttcataagtcaagttcc

SEQ ID NO: 137330 - DNA, 370 bp, Glycine max
  unsure (1)..(370): unsure at all n locations
agctgcangctgagctcacctctgttctcattatttagaagcccaacgctaagntgaacgacaactcaaggatgccaacctcggagcacgaacatttattcgatctctcaactcacacctggataccttttcgttgcaacttcttcaaacccctttcattttttcaccatgtcttactataaacgtgctggtggatgaacacccatcaatctgttaggaggcaagtggcttgcgcaagcccataattcgattgatgaacacgaaaacgtgcccggagaagaaccatctataatatatcctaagaatgagcccttcggcgacaaagacaccatcactaagctcacaagccttaccataacctcgacttaat

SEQ ID NO: 137331 - DNA, 234 bp, Glycine max
  unsure (1)..(234): unsure at all n locations
attagagactctgcaactgcaaaacattatacacttgttcacattgaccaaaaccctaaggtgacaacggactaaatgcctcaaagaaccaacggtgcttcatcaagacttcatggttttgaagtacacactgatgacactatcactgatgaagggtaacttctgcccanagaatgatctcatgttgcactgatcgatgacgttgagcctgtatccttctcttatactattgac

SEQ ID NO: 137332 - DNA, 304 bp, Glycine max
  unsure (1)..(304): unsure at all n locations
aaaacggactgaccaatgaatcgggagaaaatatctggtccatgtttattgattcaaccgcagtctaactgtgattgaactaagacatgaaactgcacttttaatttaatcaataactcacagcataaagcataaccctatgacacaaagggacatgaaaatcataaactaatataaagtgttatgcattttataagataaatagtaacaattgacaatgacntatattgatgagaacatcttaaacgctcatattatctttaaaactcttagattaagtaacagtgaaggaaatggttttttt

SEQ ID NO: 137333 - DNA, 399 bp, Glycine max
  unsure (1)..(399): unsure at all n locations
tgtccctcgtaaggtatagaggccgctggccaacaagtgnatttttcgcanaacgngcctacaggacgtttgagtttaaaacccaatcacttagcctagacttgcgctaaacccaacctgatgttgtaatatccagtaagcatctggggcttaactgctgaagtagcgcttatcgcttcctgcaacaccataatgtactgcaagaagcgctggagcctgagatataagttttaccgtaccatctaactgtaacttatagagagcaatgcaagcttaacgcaacaagcgcgcttccaagaatttaagacccgtaagagataggcgcttagcgacttctgtgccgctgagcccagcttaaaaagataagttacagaatggatctggagcttatctcaagat

SEQ ID NO: 137334 - DNA, 442 bp, Glycine max
atgaggaagtgtagaatggtgaaacttcctgctcttattcgttttctacagagtggtacctggagatatgtcgcgggggtcaagagaccttggggacgtcaggtggggtgctattgcccaaaaccaagcttgaccaatcccagaccaaccctggcatagtcagtcagtgagaacctgtgatgtacctaaacatgcgagctcctggcagtcaacatataaaaggaacaaagaccacaaagcaaggatgctcgtggtggctggccagctgagaattttgtgtgatatatgggttgtggcctctggtaatcgattaccaagggtgggtaatcgattacaaggcttaacaatgaagacaggaggctaagatggtctctggtaatcgattaccaatgcgtgttatcgattaccaagctctgatacgacgtcaagaagctaggggagc

SEQ ID NO: 137335 - DNA, 458 bp, Glycine max
  unsure (1)..(458): unsure at all n locations
agacgtgcagtattgattgcggcttnttttttatattgcaaatgaataatcgccgtagcataagggaacaacaaattggatttctttttttaattggtactaatacgattcttgttgttaaaaaataaacgtaacggaaatttatgattcatcaagtctccagtaagaataaattttcacgaaattcattactctactagaacaaagaatgtatagatatatacacggtaaaaaaaacaattactccctcattacatgcattcaaccaattacatattcttgaacccaacagaacctattagcataactgttatgaaaaaactcacgtgaaaatgagcatatttccctacaaattgtttataatgaatattcgaaaacacttaataatgataaaatgttctttactagtactctctaaatggtaattttttattnttgaaataagttcatttaaacat

SEQ ID NO: 137336 - DNA, 354 bp, Glycine max
  unsure (1)..(354): unsure at all n locations
ctaagcttccgcacatccaagttattcaacattcaacagcgcaaactatcactgttaatataacagggcagaggctgaaaactctgcccaatacaccaaccaaaatcacagttcttctcgcttaaagaccccagtaacaattccttcgttccagttcgttaaccgttggatcgactcgaaaatnttactggaagtctctagtacataagcctacattttgaccgttgggatctactatataacatccagaactcattatgcactacccttttcacagtcaaccacacgcaagcatgtttttgcacagagccaaaatcctgctggacctatctgacagcaaaattcctcataagt

SEQ ID NO: 137337 - DNA, 369 bp, Glycine max
atgatgtccaacgttattgtcaagaataagatcgggctgcacaatgcacaaggcaaagataaagtgttcaatgaagaattgaagctgcaggattcacgatgtcggatataatgtccaggacatcctgcctgaaaatactggaattgctaaaagcattgaagctgcaggatccacgatgtcggatacaatgtccaggacatcctgcccgaaaatactggagttgctaaaagcattgaagttgcaagatccacgatgtcggatacgatgtccaggacatcttgcccgaaaatactggacatataaatctgttatatctttaacagattattgtgcagctagcaagagattagatgatctatctttaggaac

SEQ ID NO: 137338 - DNA, 473 bp, Glycine max
  unsure (1)..(473): unsure at all n locations
actaagctgactgagtgtagatcttggngngagatgcattattcttgttcagataatcaaatatggctctgggtcagatgtgtttgtgcagaatggccttgttgcattgtatgctaaatgtggccatattggtgtggcaaaagtggtgtttgatgggttataccatagaacaattgtttcatggacttccatcatttctggatatgcacagaatgggaaagctgtggaagcattgagaatgttcagtcaaatgagaaataatggtgtgaaaccagattggattgctctggtaagcattctgagggcgtatactgatgtagatgacttacagcaagggagatctattcatggctttgtcatcaaaatgggtcttgaagatgagcctgctttgcttatctctcttacagctatntatgctaaatgtgggctggtgacagttgcaaaatctttctatgatcaaatgaatacaacaa

SEQ ID NO: 137339 - DNA, 279 bp, Glycine max
caacgaggaaagaaacgaacaaaaaaatttttaagcgacaaaacgggcaacaaagaaaagggggagcacccgcacaccaaaaacgaaacccggaaggatgaagaagcaataccacaagcatgcagacggggaagagaggagcgcaaacaacaaaggcacagcggaaagaagcacgcgagcaagagagacagcaaagagggagcggcaaccaaaaccgcacagacattggggcacgcaaacgcaagaggggaggaggattccagagaaaacaaccaacac

SEQ ID NO: 137340 - DNA, 441 bp, Glycine max
  unsure (1)..(441): unsure at all n locations
acatagaaactcagcttccgctaaggctattggtatgcgcaagtttagagttctggagcttagcgctcaacccttgcatctcatgctgacttggtcggctaagctggcctgctcactaagcgcattgcattcactggctgagcgtaacacgtcgctgctaagctcatttccttgcggccagaattgggtttcattgagctaagcgaaactcatgccagctaagcccaattccttgtggcaatctcattgctaagcgctccataattcactaagtgcctacccctctgtaatcaagatgcattatttaagctaagccggcccagagccaggtttagcgagagttgcaagtattttgatctgtagaactcactaagcggccctatctgcgcgctaagccaagcctntttgtgctaaaaataaaaaatacaaaaataaaaaata

SEQ ID NO: 137341 - DNA, 271 bp, Glycine max
  unsure (1)..(271): unsure at all n locations
agctttctaaactatggttcntaacttttgttttctgcaagnggaaattctgcagaaaacaaaagngngctatcttttcatcccttcctcctcttttttatatattcaaaggactaaccctctgagaattcttttgattcatccctttcccttacataaaagaattcaaatgactaactgcctgagatatcttttgtttccccttaccaagattcaagggactaaccgcctaagaatggtttgtcttaacacattggagcgtacatccttt

SEQ ID NO: 137342 - DNA, 394 bp, Glycine max
tcttggacgcctactccagatacaaatagatcagaatgtattctccaaataaggagagaatgacattcatcaatgaagtcgagaaaacttttgctacaaggtcatgtcatttggcctcaaaaatgcaggcgcgacataccaacgattaatgaatcgagtcttcaaacaacagatcaattgaaacgtcgaggtatatgtggacgacatggtggtcaagtctcaaagcatacccgaacatgtggtagacctggaagaagtctttggggaactacgcatatataacatgtgcctcaaccctgaaaaatgcacttttggggtaggcggcggcaagttcctcggcttcatgatcacataccgagggattgaagccaaccccgacaaaccattgtcgtac

SEQ ID NO: 137343 - DNA, 458 bp, Glycine max
  unsure (1)..(458): unsure at all n locations
agcttggatgtggttcttgcattatntgcgattatatgtactctcgcaaccaaattgtgtattatattaggcaggggaaccggtttgctagtagctttacaattcgaacgcgttggctggaatggaccaaatgtttcatccgtgtattgcattcaccacattgcatcaaatttcaacaaatagttttaaaatgttgacttaaaaaaccaagtaatcaatatgggtatgtttcttcctatttcatccatcatattcttgccttattacatgttcactaaatttattactcattgttctatcttttcgcacagggtatgagatgaggaaagtacgatttgaggctaagttgctcgctatgcaagcagagtttccacaagcaacaaattgattggatcaaattcctaagagtaaatggactcangcctatgatgaaagaaaacggtatggccatatgacta

SEQ ID NO: 137344 - DNA, 464 bp, Glycine max
  unsure (1)..(464): unsure at all n locations
ccctttcctaaaactcggaagggacctgaaatgttttttctactcagatccaacaatgtcaaagatctcaaactaatccaattactaggtatcccaccactgatatcattaccttccaaccttatctcaacaagagaatccaactttgcaacagaaggactcaaagtcccactaatattaaacttttccaaaagaatcatgtccaccttcccatccncattgcaccttatccccaaccatggcccatcacaagggtcattcccactccactcatcaaccaaaatccgaggataccccaaccctccaagaaactccaacaacaccatcacctcaaaaccacacataaccccgggtttggccacacaaaattcattgttctcaaagctcactntactcgctgcgaaatccgggatcggacccacgaaatggttgttattcaaatccaatctatccaacttcattcc

SEQ ID NO: 137345 - DNA, 435 bp, Glycine max
  unsure (1)..(435): unsure at all n locations
agcttgctcgctaagccaattctgcaataatatatttttctatgttcactcgctaagcgtatggctatcacgcttagcgcatgagtagtttttggtaaggcgcgctaagcgctcagtctgattttcagttttattttctgctttttaatttgaataaattcctgtataatcttgtgttttgattcttttgtattgtagatggcttcccataagagaaaagccacaactttagtgtctcaggccggttatgatagatcaagatttgtatcacaggaggcttaggactgtcactcagataatgtgcttgctaggaacattctaccagaaagaaatgtcaagctctatatcactgagtttgatgatttcagaagagaatngattagaagaaatggacataaacagctgaccaacttggctgagggaagcattgatgtg

SEQ ID NO: 137346 - DNA, 443 bp, Glycine max
tctagagaaaactacatgaagctgctcgggaaaacgctttctatacttcgttaaccgttggatcttctctacatttggtttgaaactttacaagacacttttccatgatctgaccgttgggatctttgagaagcttccgttcccgagagcatctcttatttaagcatttcaacctttgttttcgtgtagcttaggaaaaacgtcatttcttcttctttctttcttccaaagccatttctaaagttccaagaactttctccatcacccacatccaccattagccaccacaaacaatcattgttctcgattgaaaacccacaccgagaggaacccttcaaccgaagcggaatctttcaacttggcttgcggtccggtagagaacgaaaaccctaatctgacctttcttttttttcggggaaccatgattctatgcttgtttcttg

SEQ ID NO: 137347 - DNA, 433 bp, Glycine max
  unsure (1)..(433): unsure at all n locations
agcttttcaaaaaatgtaggctccatgcanggtttattatgtattccaggctatgattggaggttggtatcctttttatggcgttatcatgtcttgtcaacaagaaatgcatgcacgtatatatagtcattcagttttgtattaacatagcaatgaattcgtcatctgacttgttccaaatgttagaaatcggagcatcgctttaacaactttagttaaagctgtaaattggtgatatcaccaattatcttcttcttcttctttttttttttactgaaatatcaccaattatcctaggactggctgttcaggagaaacattatatcttagaaattcgtccttggttgtcaaaaaaaaaaagtaatggttctctccccaattagaagaagtacttattactaatcaaacttgttgaaacagcgtgatacttctg

SEQ ID NO: 137348 - DNA, 319 bp, Glycine max
  unsure (1)..(319): unsure at all n locations
gattttccattcaagagaaagcctaaaaagaaaagaaggaaattcccaatccaagagtgggagaaagccaaaagaaaagaaagaaaattcccaatcaaagaatgggagaaagttaaaaaagaagaagaaggaggaaagaaagcccctgatcggtgatctaaggaaaaacagaaggaatatgcagagaggtctntggatcggacaatatctgaacaatacagaattgtcaccaaatgaacgaaaaaagaatgaaagggaaccacgacctataatagtcttctccctttgattaccaaccaaaatcccgtgcgctagcgac

SEQ ID NO: 137349 - DNA, 359 bp, Glycine max
  unsure (1)..(359): unsure at all n locations
aaccacacaagtgagcccacttatagataaaggatgagcctactgcaatttgactataattgaacatgtggagggatccttaaacgatcaaatacgggttttttttgggatgtttcctatattataaatctccctttacaagtataattatgaaatcgctatgtccgacccaccaatngatgccctgatgcaaattggcccgataagttgaatgttcttggcgatttcgtgtctttgatctatgatttcgatgcctttgattttgatatgaatacatgaaattgcttgattttaatcatatgaatataacatattaatattattagtgtgtggcatgtatatgactcatgaagcatgat

SEQ ID NO: 137350 - DNA, 459 bp, Glycine max
tcttatccaaggctcatcttggtggtgaagctctttcttaatggcttattccttaatggatggcacctcctctcacctcttctcctttgtcttccactgcatctccatggtggaaaatcatcattaaaggaccccattgacactcaaagatccagcctcaatagaagccccacaagcaagcttcgatcaagtggtcatcagagcacaagagcttcaagtaggtgctccttaaacttccattaattttgtgctgtaccttctcttccattgctgtttcttcattcatttctccatttatctcctcacatgtcttgtgataaatgtttttaacatgattctttagagtttgcaccgattaaacttgctatagaagctagatctgattttttatggttcaaatatcttgttcttgttcttgaaccatgaattgtgtcgagtttaagttcctttgagtttgtc

SEQ ID NO: 137351 - DNA, 384 bp, Glycine max
ctaaccttctgcaaagatcaggaggacgccggtactattgttctttgtccccccgaggagatagccaccatttaggagtgccaagcaccaccatcatttcgaggccatcaacagattgtcattcctcacagagagacttgtccgacttagggactatgagtacacatattttcaatgaagagatagctcgcctacattgaacgtcgcttggccactcctatggcttaatatgacccatatatagttcctggagttatatgctaatgcttggcccacaaaataaggactgcgggacatgccgtcatgggtgaagggtcagtgaattccctttgactttaatgccctcatcccttgtctgcgtgactcgcttgtgttgtaggaaag

SEQ ID NO: 137352 - DNA, 452 bp, Glycine max
  unsure (1)..(452): unsure at all n locations
agctttgaactcacaacttaaatatatttattgttatgttacacaattaaatcaaatcaatcactattgtgaagtgaatcaaatatataaagaattaaatctagacgtataatcaaatatggacggtaaaatttaatcttaacaagtcatgtgagttttttaaaaagtgtgtgactttttaagtaattatatcacataaaatcttaacctttcatgtatgattaaacaattcaaatttaatcttttcactttcatataagatattttatctcataacatatatcttatatatagaaagaatagatacccatcaatttatgtcatcatgggctcattggcagcttttttttnttttttaagtataatgggtatctaacaataaataaaaacagaaaacattgaagtctttgaaaaatataaaagcaaaagacgttaaagtctttgaaaaacat

SEQ ID NO: 137353 - DNA, 154 bp, Glycine max
  unsure (1)..(154): unsure at all n locations
tatactgttacaaaatgtaaatntaacatcgctatgtttttatctattttgngacataataaacgcggtggcataatcgtaaataacatgagnttgtcaacatcattttttcaacaaccgatgttaatgcacataggttaatattggctttttg

SEQ ID NO: 137354 - DNA, 464 bp, Glycine max
  unsure (1)..(464): unsure at all n locations
tataaaaacctacagagagatttcaagaatctatttatagtttatttaaaacttgtgaaaaccttttaggatcaagtagatgtttcactagacgagtctacttagacatgtcaagcttgtataactcttaaagaaaaagagtccaagctgtgtcttaagattgagacaagtgccagggaaagagctactcttctcaagaagtttcagaagttggaaaacaaactaaaagatctttaaaaggatttgaaagagatgaataaacttcatgattatcaataagaagaaagatatgatctatggagagaatgtgaacaagcacacaaagattatgaaaatctcanaataagtaaacataatatttggttggaatgtgaaaaacacgagatctgtgaaattcttgaatgatgagattntgaagaatcaagaattaaggggtcaacctcagatgttgtcaaacttcatga

SEQ ID NO: 137355 - DNA, 348 bp, Glycine max
  unsure (1)..(348): unsure at all n locations
atgattgggtacctttgtgaagctttatgaacattaattatggtttcttgggaatggggacttttgggaagctttatactcataaatgatggtttcttgtgattgggtacttttctaaatctttggtgtctttctaggactcccttccatgttaaatttatgccctttttactttntggagataccctgcatgatgctctattcangaatttggtctggcttactgtaattatacatcaaatcgagtgaatgtgatattaaattaatattttggatgggtacaaacatgagtaatctgatcatgtcatatttgtcttgcagcactgctggttgcccatttggtgaggg

SEQ ID NO: 137356 - DNA, 272 bp, Glycine max
atcattccaaaaatatgatttaaacttatgctaagttatttttagcttattaaaagaagtttatttcggcttttttcttcctaatttccttttttataaggatttatggataaaggtatctaaacattgtcttaagtctcaagacagcaaccttgtgtgcttgttattgtgcccagagtcggcttcacaaattgcacctttcttcaccgattaagaatgtagaaattgaacttacacattacatactttaaataaatatagtgccaatgttt

SEQ ID NO: 137357 - DNA, 141 bp, Glycine max
atcggctctatgctataatctttatgaattcggataaggtgcttctatttatttggtgtccatcttgcacatcttgttcatactaagttcaaggaagccaccaaccaaaatgaggaagtaagatttgaaatgttgatgcta

SEQ ID NO: 137358 - DNA, 276 bp, Glycine max
tattgaaatgattatggacccaatcactagatatgttatggttagccctcactttttctaaaagtagaaagatggatttattaagagaagctacgaatagaaccctaattgctttaagattgtctgatttaagcaaagagacctggagggcatatttagaaacaatagcctttgaagaagagcatattaagtacttacgaaaccaaaataagagaaaaacattgtgttttgcgtcaaaaacaatattcttcgtcttcatgtaagtggtgatgaaat

SEQ ID NO: 137359 - DNA, 194 bp, Glycine max
  unsure (1)..(194): unsure at all n locations
aaaaccggagagttatgagaaaaaaaggtatttataagggggaganatattgagaaaaaagggaaaattaatttttggtttaaaatatattttaagtaaaaggttaatgtttttttgatggagttttaaaaatttgaaaaatttttgaaagttctttaaaaaattcttagaaggagagttattacaaaaccctt

SEQ ID NO: 137360 - DNA, 193 bp, Glycine max
acatcggaggagacataaacatgctctctatctcaataatctgcctactcactggcaaaagattaatcattatagacagtacgagaactctcctctaggtggacacgcactaagatcttgtggtatgacgctttgactattgtacgcttttagctgagagctttgttacatgtgacggagtttgatatgcatc

SEQ ID NO: 137361 - DNA, 247 bp, Glycine max
aagatggggattataactttcatcgacttaaatgaaatacaaataacccaaacacttatgtgcttgagagaaacactaaccttgggaggagtgaaacatagttgatctttctgtgacacatgtcgtacctgctaacctacttcaatctctgagtgcattctttgcatgattccatcatgaaaaccatggcaagtgtgaacttgagggttggaagctaaaattggttgaaaaggatgcaaatatctta

SEQ ID NO: 137362 - DNA, 150 bp, Glycine max
atgcactacattatggtaggttagtgtaacgttagggtagtggaaccttatggtagaaaacggaaccttatggtagaagacgaaacctacggtagaagacgagaggatgtcggaaaaaatggcgcaaaaggctgacgaccgagtcttccg

SEQ ID NO: 137363 - DNA, 225 bp, Glycine max
cacccgagcaaaaaaaagggaacccaccacaaaaagaagaaatcccgaaccaaaaaaaaagaacccccccacagggggaacccaaaaaaaaggaaccccaccaaagggggaagccaacacaaaggaatccaccaaaggggaaggaaaagaaaaaaagaagaacccgacagacaagaacaaaaaaggcaaggccggacgcaaacgacaacaatgcccaagcaaaga

SEQ ID NO: 137364 - DNA, 315 bp, Glycine max
  unsure (1)..(315): unsure at all n locations
tgcgccgccagcaccacatnccctgaagtcggtgcgataattatctccgncggngaggcacaaatggcagcagctgcgccacgactgataccaacgtttaccatcaccggaaataggggtgccatcagcataacacccataccggttgcggaagagacggccagagacatcagacaggcgacaaaataggcggcaatcatcagcaggtaaggggagttaatatactgcaatggttttgacgccagcttgaccaccatatcattcgcgccgatatgggtcatgtaagcggcaaatccacacagcatcataatcatc

SEQ ID NO: 137365 - DNA, 311 bp, Glycine max
ataattaaaacaacatttcaaagtatgtcattttactttttaaccattagctaggctctgacaagtaaacaacctctgtatgtgtgtagtgtgcaaagaaaatatcaatggtcattttattagcaacacattgatagtgagcgatgcatcaacatgccaaaagatatcacaattgaataagctaacgtgaaagatatcaatcatacattcacatatcaggtcaccccattgtagccaaagactctgaacatgcattcctccgcaaaacagatatctgaggctcacaggtggcctgaaatggaaaaatgcga

SEQ ID NO: 137366 - DNA, 345 bp, Glycine max
  unsure (1)..(345): unsure at all n locations
ttaattaaaaaccacaatgtttattgattttattgtgaggaagatgtctttaaatatttgatttctctgtgattaattgtcggtaaatgtttgccagcaaactattntgttgtgaatgaattctttttaagagagaacatatatatatatatatatactatatatatatatatatatatatatatgtgggcattataatgtatttaataggattagctcacctaaacctacttaaaagataanaagagtggttgcacccaacaccctttctattatacanaaaaaaacatcattttcttattaacgataattagtgatttttttaaaaaaatccaaattccaatt

SEQ ID NO: 137367 - DNA, 276 bp, Glycine max
aagaaagagagaaggtttatcaccaaattgaaggaataaaagagggaaaaaagtggaactttgaaatgtatctcataagactttcattcatcaaagttacaacaagtgttacacatgcttctatttatagactaagtagcttccttgagaagctttcttaagaacacttccttgagaagctttcttataaaaactttcttgagaagtttctttgagaaaacttccttgagaagctaaagtttagctacacacacccatctaaaaactaaacttacc

SEQ ID NO: 137368 - DNA, 349 bp, Glycine max
  unsure (1)..(349): unsure at all n locations
actcaagcttctgcgtagccgtcttgggctcagaaatccaaagcttttctctcttattactagctattttgaattctttggttcctgaatgtacaaccttcaaattgttgctcgttcccctctttcttttctgcaaaaaagaaaatcaaatgctgtcaaaacatggatgaagtcctaagaaaatcaatatcaaagaaaacatggatgaaatcacattaataagcacaactacctatctttcagagtcggttggttaaattggcttgtctccttatgtggtgggggtttggttaataatcttatacttttgccttccaaanaaaaatatcactaatccttctttcattaa

SEQ ID NO: 137369 - DNA, 154 bp, Glycine max
acaacactaatactttaacattggccctcaagctggaccataaaataaatgctccaagcttggaacatgagttgaagcatctcaagctgcaccaccaaactggaaagaatgcctctgatggagtatgctttcaaaacaaaattgattaactggg

SEQ ID NO: 137370 - DNA, 203 bp, Glycine max
aatcagaaatttgcatctacgcctgttgcaagagtatgtggtctatgttcttctgcagaacaccatacagatctctgtgcttctttgtagcaatctggaggcaatgagcaacctgaagcttatgctgcaaacatttataatagaccctctcagtagcaaaaccaacaacagttgaataattatgatcttttcagcaacagata

SEQ ID NO: 137371 - DNA, 160 bp, Glycine max
gagtctattggctatggtcttctgcagaacaccatataaaactctggccttctttgcagcaatctggagtcaatgagcaacctaaagcttatgctggaaacatttataatagacctccttagcagcaaaacccaccacagcagaataattgtgacatttt

SEQ ID NO: 137372 - DNA, 222 bp, Glycine max
gctggcctccagtgatcagaaacgacaaggaggagctgattcctactctggtgcacaacagttggagagtctgccttgactatatgaggctgaaccacgttaccaaaaacgacccattttccctgccattcattgaccagatgcttgaacgccttggaggtaaatccccctactcgatccttgatgggtgttctggctatatgcaaaatactattgcccttg

SEQ ID NO: 137373 - DNA, 214 bp, Glycine max
taaagaagcaattaatctcctcctggacaatgaggaaaactgggcaataagaagtgagatgagggaaactccgttgtactgccttcatacgcctattttcaccacccacatgtcttattaccaaacaccatctcttaccacaccagtatcacaaggcctcctaatcacacaaaccgctccgccttcaagataacaccctttcccacccaacccc

SEQ ID NO: 137374 - DNA, 118 bp, Glycine max
atgaactaagggacgtcaatatggccacagctgaagccttggaacgaagaggtgaaaggaatcatcacgggtcaaaggcatgatcttccaagaggtgaaaggaatcatcaccggtcaa

SEQ ID NO: 137375 - DNA, 334 bp, Glycine max
tcctaacagcaacaatcttgcctattcctggcgtgggagcatcttttgtatgctcatcaatccagcccttaaaaactgaaccaaacccgccctcttccaagacactatcggggcggaaatttcctggggctgctcttaactcatgatagctgaagctcttcaaggtggaagaatgccagatctcacccccactcccaaaagagacgggtatggacgctgatgagcctctgctatttgagctgatgtcatgggcactcctgctgacacttctagaagtgatccctacatcagtacacagaaaaacaaggtcacagagactcatcacttataatac

SEQ ID NO: 137376 - DNA, 280 bp, Glycine max
  unsure (1)..(280): unsure at all n locations
tctcccactccaagtaagcctctggatcattctttcctttaaagggaggaaagttgagtttaataccatcaattacggtttgtctaggaacaccatcatttcctcttctcctcctttcttcttcattatgatctctattctccatttgatccaaaccctcatggagcgcatcatctcgctgtttcaataaatctcttcacatgttgcatcaaaagcttgcatttgcaattacgaangccccactccatcattaagatttgttcctgccatctacacaaac

SEQ ID NO: 137377 - DNA, 332 bp, Glycine max
gcccctaaatgaaataaaatatttgttagattagataagatctagatgaaataatatctaaataatatctagatgagatccgatctagataagacaagatttggtagaataaaatagtctgctctcttcaagtccaagcccaattctggattcaagcccaattgcctataattcttctgaaattaaattaaaaacacaaaaattaatccagtaggcccaaataataaaactgcatatttaatttgacaattaaggctaatcagtaattaaaatggtggacaaaaagagttaagatatatgagaaaatgatgacacgtcaaatctcctcacac

SEQ ID NO: 137378 - DNA, 273 bp, Glycine max
agatgtttcactaaacgagtctacttagacatgtcaagcttgtataactcttaaagaaaaagagtccaagctgggtcttaagattgagacaagcgccagcgaaagagctactcttctcaagatgtttcagaagtcggaaacacactaaaagaactttaaaaggatttgaaagagatgagataacttcatgattatcaataagaagaaagatatgatctatggagagaatgtgaacaagcacacaaagattatgaaaatctcaaagaaagtaaa

SEQ ID NO: 137379 - DNA, 309 bp, Glycine max
atgtcaatccttacccccggaagcgaaaagaatataacggaaatttcccatcacagaaaacgaaagaaagaagattttccatccaagagaaagctaaaaaagaatagaaggaaaatttccaatcaaagagtgggagaaagccgaaagaaaagaaagaatattctcaatcaaagaatgggagaaagtaaaaaaagaagaagaaggaggaaagaaagcccctgatcggggatctaaggaataacataaggaatatgcagagaggtctttggatcggacaatatctgaacaatacagaattgtcaccaaatg

SEQ ID NO: 137380 - DNA, 288 bp, Glycine max
  unsure (1)..(288): unsure at all n locations
tattctcaacagtcacaatctttcatttgattcttgaatgaccatcaaaggcctatatatatgtgacttaagacacgaatttgcagagagttttgattgctcaaaaagttttatcctctcaaaagattaagagagttttttttgaattaaaaatatcttatcctctcaaagattccttggtcaaacacttgcatattcaataaggaatggtgatngatcttcattgtacaatctatctctttcaagagagattacttcttctcttcttcttacttctgaanagggata

SEQ ID NO: 137381 - DNA, 111 bp, Glycine max
cttaattgtcaaaataattaggccactttattatctgggctcatttaactaatttgatggtgttaatctaatttcacgaattaattatgccatgggcctaatcccgatttt

SEQ ID NO: 137382 - DNA, 141 bp, Glycine max
ctcttacaggtgactttgagcgtttgtttatggaggagtcccagtcaatttctgattatttttctcgagtattggccgtagtcaatctacttaaaagaaatggtgaagatgttgatgaagtgaaagtcatggaaaaaatac

SEQ ID NO: 137383 - DNA, 306 bp, Glycine max
ttttaagcttctcaagaggcttctttgagaagctagatccttatctatgcacacccctctattaactaaattaacttccttaaaaataattaccgatgaaaataacgccacaaatattcaaacatcaaacataatttctaatagtatctatatatatatatatcagggtgttacaactctcccacccttttagaaatttcgtcctcgaaatttaccttactcaaacaaggatgggtgagcttctcacatctgactttctaatttccatgtggcatcttctcctgatgcaccttcccagatcacctt

SEQ ID NO: 137384 - DNA, 435 bp, Glycine max
agctttaaacctgctaggactggtaagtattggtttttatctgacactttacgtaattaagtactattaacctatttgttgttaactttagtaaatccttttccccatgcaactagaactgtatttaccagttttaactagccatgttgcttaaaatttgggcttagggcataacttaaccccacaataccaacttataaagtgaggactacccaagctttataagtactacttaggtcttatctctagttgatgtaacctttcaacctcttaagagtcgatctcctgatggctatacactattatgcttcacttagcctttttggtcaaacccttcatagtttccctttctaaacattagcaactactttgactcctatggataataaggcattttctaactacccttacaccttggatatgggctgggtgtga

SEQ ID NO: 137385 - DNA, 450 bp, Glycine max
agcttgtagtgaggtttggctacaaaattttatttttttttctaggattcaaaggattagattctaagagagcacaactcctaaacttatccaagtggtcattttaatacaattagcttgctcactagcttttcacttccatttgctgttgaccttattacatcagcacacattttctttgattgtttttttaacacaatttatttatcgtgtgtgtgcttatgcttttacctctttctttacatcccaattaactccacttccccaaatttggggtaaatttgccttgaaccatatgctctcctaaattctaaacaaggtatctggagataatcatttaggttcagggtttaattattgacaaatcattcaactcataaagagtgcaagggtacagttatcattaaaggttagctttttggtcaacagctcgtgatgacaatcatggtc

SEQ ID NO: 137386 - DNA, 455 bp, Glycine max
  unsure (1)..(455): unsure at all n locations
agcttcagttgacacctaagatggaggttatctgtttctgcagcttcagttggcacctgagttgtaagtcttccccacccagcctttgttatttttctagttgttagctaagcctagtattaatgatgattatgtctataagatgtgacttttgagaagtaatgatgaatataggaagttttttttagcaattcttgagtatttattatgtgtattgcgaattatatgatttctatctgctatcattagggtagcagctgttttacaatccactaaactgctagcattattggggttgaaaactcaacatcactacccaagattaaccatttcactactagctacaagttaatgaagntatgcagtactgtgctcacaatttccttggaaaacttggtacttggcagttatgttggagatacatttaatttaaacgcctgagggtagacacacct

SEQ ID NO: 137387 - DNA, 382 bp, Glycine max
agcttagcctaatcctgatcaagcatctgtctctgtatttctcttgtaagacttaactcaactaggactgtattaagacacacatactcaactaacttatcgcaccccgattccttgtgaaagctcgacaactcagccctgcactatcaaggactttagagtcagaccagtttccattgttgaatgaccctaacaaaacatgcatctacctgatcaaggtaaaggcatactggaatgaaaagcagatagcacagagaacacacaaaacatcattaaatagataaacatatatttacatcaggtacctacagggaagatccaacaaaggatttagctttccataccaggaagccttcttaacaacacagagaagaacaagatg

SEQ ID NO: 137388 - DNA, 456 bp, Glycine max
agctttataagcgcgggttcgggagactttagtctatcgttcgcgatatgcgaagatgatattccgagtactttggatttggtacgaccatgccctcctgatttccagctgggaaattggcgagtggaggaacgccccggcatttacgcaacaagcataatgtaaacctttacggttttaaaagctctatagttgggcctaggctttagagtttttccttttgttaaggctttgtgtcttttgtttttgaatttataatacaaggatctttcttcatctgttcctggtctctacccattctcattcatttgcatgtttacttctttttctgaaacgacagatccgatgacgagtcccccgaaggtactaatacctgggacccgtctatcgacttcgagcaagaaatgaatcaaacggaagatgaaggaaatgaggatgtgggacttccccagaact

SEQ ID NO: 137389 - DNA, 418 bp, Glycine max
agcttgtgaagtacactcaagattttctatgtaaacaaaagttttgcttttgccaatagaaacccgttctcgtcgttgcacttagagagttagacatgtgattggtttgcattaagtaataaaaaaaaatctagtagttagcacctagaatagaattatagaaacaaataagttggggataaaaaaaaaaaaagaatgttgaatccaaggcgaacgtggaatcaagagaagagagaaacataacgcatcatagaccacacaaggttgggcccaatatctgtttcagccaataacgtctcatccttccatatctttagtctttcattatgtgtctctctcattgctattttttctcttaaccaaattaacttcatcctcatacgaataatgacagattatataatataataaattaaag

SEQ ID NO: 137390 - DNA, 331 bp, Glycine max
  unsure (1)..(331): unsure at all n locations
agctngacgccggaaacttcatttttattttttcnttccccatgaaccagaggcaatgccgcacgaaaaagagaaaacgagaagcatagctttctgaaaatggaggtaagaagattttccggaaaaaaatggcatttttaaggaagaaaggtggtaggggcaattttggcatttaatagttttgctgggtgcaccaacaaaaatgctgggtgcacctatcaacattctatatattggaaaacttagaacgtccaaaagttagctctatagaaggttttctcctatcatcattcaatctattcttatccaccttataatgatcttacatttt

SEQ ID NO: 137391 - DNA, 337 bp, Glycine max
  unsure (1)..(337): unsure at all n locations
agctntgtcagtaagtacttgtatgtttttatgagggaaaatatttgtatttgggggcatgtcacttgatttggaactcccttgtgactcaggctaatcaccatgagaggggagttacctgtgcaagacaaggtgaccttgacacttgctgcctagttttcctgagtgtgtgtcatgtggacacactaaagctatttcctaactagtggtaccacattgcatttgagagttgaggtcaggagcatgcatcatactgaatataattgattggaattatggaaaagttgatcaatagttgttaagtgtatgttgaattgatggataattgagtatgatc

SEQ ID NO: 137392 - DNA, 445 bp, Glycine max
  unsure (1)..(445): unsure at all n locations
gcaagcttttatccaagctcattttgttgttttctccttctnccatggcttattccctagtggatggtgccacctcttacctcttctcttttgtcttccgcttaatctccatgggggaaaataacgattaaaggaccttattgaagctcaaagatccatcctccatagaagctccacaagcaagcttccatcattttgtttctcaagtcatatgaagacacacctagttgctcatgatcctatgaatataaatgaaacaagcaccagctcggaatgtattcatacctcacaacaaatatatatatgtatgtttaatgttgcaagataccttagatatgcatgtatttagccaaaatatctcaccataaatatatattgttatgatgcaagatacctttgatatgcttgtcctatcaaaatatttcacataacattatatgtttgt

SEQ ID NO: 137393 - DNA, 356 bp, Glycine max
agctcgataatcgattatggttttttgttattgattaattcaatatttctgggctgaatatcaatacaaaatggtttttgcgctcgtgttttcgtcttgtaattgattaacccaaatggtaatcgattagactatcaaaaacatgctttgcttccagaaacttatgaatcaagtgatcatgatgattatccttaagcatgtagaaggtatataaactactttaagcacacacatgcctatctagaacaatcaatacaaccccacatctattaaatgtgttgtggcatgtaaaatatcaaaatcaaacctcaactaatagataccaaattctgcgatctacaatctcaccctttttg

SEQ ID NO: 137394 - DNA, 432 bp, Glycine max
gaccttagagcacctgcggctgcagcttagctttttaggtttcttctctaggaagctcaaggaggtgagcttagttattagaggggtgtgtgtagctaagctctagcttctcaagaaagttttctcaaagaagcttctcaagaaagcttcccaagaaagttacctagtctataaatagaagcatgtgtaacacttattgtaactttgatgaataaaagtcttatgagacacacttcaaagttccacttttctccctcttttattccttcaatttcgtactccccccttctctttttcttttcctccattaaagcatcctattcaagctttttatctaagacacattcttggtggtgaagctccttcttccatggcttatcccctaggggatgggggctctcctctcttcttctcctttcccttcagctacat

SEQ ID NO: 137395 - DNA, 377 bp, Glycine max
attttaagacacctgcggcatgcaagcttgatctccacctcaccttctttatatctcagatggctattatgtgtaagatgattagtactttgagttctatccgtgtctttggctatattattatgacatttgagcaatttagactttctttcatttgcatagtgtgatagaacaattatgaattagtgctatatgactatgtggtttctatatatgggatctatacatgtttcgagcttcacgatgggattatattccttaaagaatgtcttgtgaacgattaataatgtctgtatgttttaatactagaaatgcactttggcttatacgatgatgcgcaagggggagagaacaaaggtttaaatcaagaacttaca

SEQ ID NO: 137396 - DNA, 360 bp, Glycine max
aaaagcaaataaatcagagttaattccaattcgttgatctatacatgtgcttgaattggatgtattaaaatctataccattatgatagaaccaggattagatagcccttgtatgtagtcttcccatctatgattctctctctgtactgcctccatacactttagagtatcataatccatctgcatccttttgcattcttaccagatgtatgcgttatatggcgatcgcgaatgaataaaccaattgcctagctattgccataaccaatatgctcacaaacgctacctacgaagaaaacacattagtgcactatcatgatttctaagcgatgccacctatactaaaccaacattcctaaac

SEQ ID NO: 137397 - DNA, 294 bp, Glycine max
  unsure (1)..(294): unsure at all n locations
taatcatcactcatctgtgaatcatctatctttcatcttttttcaacatcatctctcanacatctgtcaatcaatctttcaatgtctttctacagaattttctgaatcatttctcttcatcattctaaaaagattttatcaacactttctctttcaaaaaagatctttgctcaaaacctggctattcatcatttcatctcttctcctttgccaaaaaacaaggacaaccgncgaatcttttgtgtcttcttctccttacaaaaattcaaggacaaccgctgagaatctttgatc

SEQ ID NO: 137398 - DNA, 435 bp, Glycine max
  unsure (1)..(435): unsure at all n locations
agcttctagccaaatagacttaccttgaattaatttctttgataaccctnttgagccttgtttccctttccttgttttgaagctcactacaagccttaagtgaaaaaccatgatattaccatatccttaaggaattttggagctttggaattgttntgggaataagtgtggggggtttttgtttcattggacaacttgttttgttggctatgcttcatgatgtattttgggccatacttgatgtacattgtatattggttaaatgttggacatgctgaatgaaatgttgcttctcaaaggctaaagagtaaaaaaaaaaaaaaaaaaaaaaaaattctgaaaaaagaaaaagaaaaagcataaagttgagtgaataagatcttaaatggcacaagaatgatgaaactcttggttctactcttcatgtttaatttt

SEQ ID NO: 137399 - DNA, 248 bp, Glycine max
  unsure (1)..(248): unsure at all n locations
atgccccacattatttccatgacaccaatgccaaaatgatgatttggaaaccttatgccaaactggtcatgcatgcacctatgcggacactcaaatgcaaatttttattggcatgtgatgctaaggctcacgattncgttcctctattttaatcaacccaatgtttcaaaatatgttcttttatcaatttgtgcattcatcccagtccatttcgggcgtccggggaaatatcacagcattcacccttc

SEQ ID NO: 137400 - DNA, 420 bp, Glycine max
  unsure (1)..(420): unsure at all n locations
gagagagggggagcaccaaattgtaagaaaaaaaagggagagaagttgaactttgagttgtgtctcacaagactttcattcatcaaagttacaacaagtgttacacatgcttctatttatagactaggtagcttccttgagaagctttcttaagaaaacttccttgagaagcttctttgagaaaacttccttgagaagctagagcttagctacacacacccatctaaaaactaagctcacctccttgagaagcttcattgggaagctagagcttagctacacacacccatctaaaaactaagctcaccttcttgagaagcttccttgggaagctagagcttatctacacacacccatctaanaactaagctcaccttctttgacaaatacatgagaatacaaaaaaaagtccctactaca

SEQ ID NO: 137401 - DNA, 455 bp, Glycine max
  unsure (1)..(455): unsure at all n locations
ttaagcacctgagctgcactgctatccaaccaactttattttttgcatcgtacaaacttggtttaaatccctacttggttcacaaagcccaccaaaattagttgtgtccaaaaacctcatcttgaggccaatatcagtaatgaaaggatgaaccttgataaagttaaggacatcttgatcatggtatccaggataggtttctcgtgaagagtaccagaatttgtaaaactctattgacctattattggattttacatagttgaaccctccgttgggtctgttctgtacatcatcaaatctacctgtgaaatgatcacacgctatctggaaatctgcatcaaggtgaaacagtggaaaagggtccctgaaccacatgatatcagcatcctggaatatgaacaccaanataagaatctaattaagacacttcagaaatatctagattctctatgggt

SEQ ID NO: 137402 - DNA, 431 bp, Glycine max
  unsure (1)..(431): unsure at all n locations
agcttccagctcaacaattcttctatcatanatctgtcatgaggaaaagttttntacattctctactttagtgtagtatgaaaatgggaatttggcggtaaaaagagaaaccttttgataatgggccaagtcttcttgtgtgaggtttgcacactgaattcgcaggttatcaattttctgcttaataaaagcttccttgcgttcctcgttttgaaaatatttggatcctttgctcatttcataaactaccctttgaactttctccttgtcaaccaattccattcctaaagaacagaatagaaatttttattcattcaattcacagaaaccgaagcgaagaagataattaagaaagagaaagacctgctttggcggttgtgtaaacagtgttggtagaatgccatggacgatcgtcttcggtccctttcctt

SEQ ID NO: 137403 - DNA, 442 bp, Glycine max
  unsure (1)..(442): unsure at all n locations
gaccttaagcaccgngctgcaactgcttctttgatctcttttcttctctggacttcatttattgggcaacaaaggatgccaagtatctcaaagcggctaaccaaaggttgcatgtcatcaagtaataatccccggacgaaattagggtatgacagatggctatcaaactcaggggcggcactggacccttccgccgcggcgtccctcctagatctcttcgtggaaagttttttcggagccatttcctgcgaggacaaacgtttggaaagtttatttacaaggaaatgtcattttaaagcanaaatggcatactaatcttttcgacttagaacaaacttacgcacatattttcctgaagaagaacatttatgaatgtgcatacacgcaaaatatcttactatctatatcaatatacaaggatattccaaacattccaactact

SEQ ID NO: 137404 - DNA, 407 bp, Glycine max
agcttgcatgcgaggccatgtttatcttttaatgattactatgaaaagagtgccacacggtaatagagtttattatggcgttcattcgttaggattttctctgtttctcttgtacagttgcactttctaatgtaataaaagatatgcttctggcttgagattctctaatattgattctatgcaaagtgtgtccgtatatgatgattggtaagcttccagctagtaataatttaaggaaaaatagtacttggacactcgtgttatagcaagacaaggttgaggagggcaaattgcaatgccaaggtgcatccctagttaccaagcaggccatagcctctctagttaggctctcaaattggcaccctagaattgtcttcttattagagggtgttcttgttaacatattt

SEQ ID NO: 137405 - DNA, 384 bp, Glycine max
agcttgtcattcgtagagatgatagagatagtattttcatccccattagacacaatagtgtacttcaacatgcgttgtgcttcctccggaatgtactcaaatctgttgtttctcagtttcccacttcgccaacaaactttttcgcgtctccttatgaccagttcttgtcccttgggttcccattcaagactaaaggcaccgggatccaaaacaaaatcagtcaaaggtgaaaccagtacccattgatggccttttttttagtacctcaagggtgcgcttcttgcttgatgtcctctataactcaacttaatgtaggtattaattcaatataatggttttgttttttatttatgtaattctactattctcaaaatacaaccaaca

SEQ ID NO: 137406 - DNA, 306 bp, Glycine max
  unsure (1)..(306): unsure at all n locations
catattacaaaatattaataattaaaaattntattattatttaacccaaatcccaacaatccttattaaatcaactcctaaataattattcaaatataaacttactaaatacaacctataaacaataaacaatacaatactttaatggaagaaacattctaactcatatttatactcattcaaccacaccctttaccataaaacatatcccatctaccctcttatagtttaatttttgaaaancattaaaatttaaaaactaatttagcctttttaattcaataaattacacaaacacctcttctt

SEQ ID NO: 137407 - DNA, 420 bp, Glycine max
  unsure (1)..(420): unsure at all n locations
gaccttaagcaccgcggctgcgctctactagggttggctttctatcttaccttcttgnctccaacgcgaactntgaccattgttcttccttcccgcaatgcttcatttcatgtctgcctgagtgggcttatagcctaaaccatacttcccacgaattccttgagtatttatcaggctagttatgccgccgttgttttttcctaaacccatcccgggttcaaaatcgttccccaacataactcgggccatcattaccgctgcatcggacagacaaggttgccaaaagagggagtccacggaggaaatgctgaccacctcaaaagactggaaacaagttctaacgattcttttgcggttcacatagtgctggatgatggcagctaacaagaatttttcttgctgacacatgaccaatgccct

SEQ ID NO: 137408 - DNA, 282 bp, Glycine max
agcttgagatgaggaagtgttgaagggattaactttctgcttttatgggtgaccacagagtggtacctggagatatgtcgcggcggtcaggagatcttggggacgtcaggtggggtgctattgcccaaaaccaagcttgaccaatcccgacccaacccgggcatagtcggtcagggagaacctgtgatgtacctaaacaggcgagctcctggcagtctacagattataggaacaaatacccacaagcacggaggcttgtggcggctggcctccttgcaactt

SEQ ID NO: 137409 - DNA, 445 bp, Glycine max
  unsure (1)..(445): unsure at all n locations
ttaagtcacctgcacgctgcagcttaatacataaccttgttatctttcttttttttctccattacagttactaatattgtgatctaacaaattaatttggttttgtatgaagttaaagggttggtttggtggttgaagggagaaacaagattaagtcttgaattcaaatctctcacactaatattctaacaaaaactagcaattaacatttattgatataaaattaaaattggccttctgtaaatctgtagcttttcagtttcttccatatttttcaaatcacatctagtgaaaaatgtggaggcatttgttttattcttttactggttgaccaaaactaatttcactaataaatggtcctctacaagttcctgcttgtcgtatagtatctttcgngagtcccatgcgaagcaattttgaatcaataagatattttacatttagc

SEQ ID NO: 137410 - DNA, 295 bp, Glycine max
agctttaaccgatcgttaagctattatttactctttaaatgataaaatgaattgcaactgatcatttgtgttgtaatgtctcttaatcactgttaaagcaaaaattaaccgattattcacactgtaaccttagttaaataaaaaaaaaggtaaaataataataaaataatcaaaatatcttataaaaataaaaaaataattaaaaaatatctatcggacgtttttctttgatagtttccttgaatgaattgactaataaccaaagtgaaactaaggcttaaattaactcacaaac

SEQ ID NO: 137411 - DNA, 140 bp, Glycine max
taaaccaggggggagatttttttttttttgacagaaaagaggtgtctccattgattgaagcaactgttctttcacatcatacaattggttgctattggcattcattagctacaagaggttaacctaaatcactttcatgt

SEQ ID NO: 137412 - DNA, 351 bp, Glycine max
agctgctcaaagcgtgtcgatttttttctatttcctcagacatgggcacctgtgtgtcacataacccttgatctgaaaaactaagtcttcgccaaaaaatgtggattgtcttcagtggtatagagctaacaatatatttaaacaactcacatgctcatggaagaccgtgagtactcctcatgacacatccacattgtgaagggtttttgcctgcataaactacatgctcatactcagcagcaatctcatttaaagtgtaccttgtaccatgccaagttgtttttttttacaagattactttatacacattgtccaatgacgtacgtgcttgtctctaaaaatgccttaatc

SEQ ID NO: 137413 - DNA, 420 bp, Glycine max
  unsure (1)..(420): unsure at all n locations
agctttaagaagacaatttcttatcattctatcttatgcaangacgattaacaagtctcagggccaatcactttttatggttggactttattngccaaaaccagtctttagccatgggcaattatacgttgcattatcaagggtcaattcaaggcaaggattaaaagttcttattcatgataaagaccaaaaaaatatgacttctactactaatgtagtcctcaaagaggttntcaaaaaatcttacaaggtaactcttacatttcatacaacaaattgtcctatctattggcaacaattcccaactgttaatcttactatatacattctaacataccagcccaatattgatttcatttttacaagtgtaaatttacatcggcaggtttccatcttaataccacattatatcttccattt

SEQ ID NO: 137414 - DNA, 378 bp, Glycine max
  unsure (1)..(378): unsure at all n locations
aagcaccgcggctgcagcttgcctgagaaatgacttntttttgttatgtganggaggaaaagagactagagaataatgttctggaagttggaaccttgttggacccaggataacaggatgatgcatcaagctactaacattaaatgagtgcttactgggaagcaacccagttcatctttcccttttctctttttcattttgcatctcttgcatgtagctaggatagtagcttgtgattgtgattaatttttcatctttgttagtagtgaacaagggggatattaagtctatgtgaagagacagacagatttgtttgggccgtaccccaattcaatatacattaaaaatgccggatcttaggagtgatctcaggctgtt

SEQ ID NO: 137415 - DNA, 402 bp, Glycine max
  unsure (1)..(402): unsure at all n locations
agctngcgggcttttctgctgcgaatctctatcttgacgctggcactcttgtccatcttcatgtatggcttctttcccttcttcggcttcaaagatctcaccttcgatttgatcgactccaccaaatttcccaactgcatcctcctacgattcttcatttactcttttccactctcatatataactgcctttcctcaaaatgccctccctattgcaatgaatccccagctttgccattatcttggggaatggactattgacctctttaaaggagaaattaatttagattagacaattggaccggcgtgctggtgtccgcgtacataaaggcatatatcggaactcatcacttcagcgcacgcttgctcaattctttttcacctggctatctatctacctctt

SEQ ID NO: 137416 - DNA, 448 bp, Glycine max
agcttcactgcagtggatcactagggttttaatctctaactggaaggtggtggatcgtgatgatgataacagtgttttcggtgcttagtttgtggattggattctaggtctagaccatgatcaaagttgattccactataagagcccgattcattaagtttaatcaatttgatgagtttgtgtaaatggaacccgtttttatctctttttttatgaggatgttacttacgaaggctctatgtacgtgtttatttttagtgtaatttctttgtaaccacggtaatatactgtatatgggaagctgttcatatttttctttaaggataacagtgatgtgcacttgaggttattctttgcgatacacgcatctacatgctagcaaaaatattataccatttgtttggttttagtagaaccattggaaaaaatgatagaggtcattgagttg

SEQ ID NO: 137417 - DNA, 371 bp, Glycine max
acccagagtgacgcagctgcagcttttgagaaactgcttggatgttgatttatcttcacacacccctctcataactaagctcacctccttgagaagcttccttaagaagattcctaaagaagctagagcttagctacacatacctttctaatagctaagctcacctccttgagatgagaaactagagcttagctacacaccccctataatagctaagctcaccccgatgacaaaaaacatgaaaatacaaaagaaaagtccttactacgaatactactcaaaatgccccgaaataaaggctaaaccctatctactagaatggccaaatcaaggccaacgaagaaaacctatttatatttacaagatagcgg

SEQ ID NO: 137418 - DNA, 379 bp, Glycine max
  unsure (1)..(379): unsure at all n locations
agcttgatctcctcaaggagagantgagttgtttggaatgatttggggactatccgtgcgcagacaagacggatctttgcttagtacccgatgttgttatcccccgaagttcaaagtatcggacttcgacaagtataaagggacgacttgtcccaagaaccatcttaagatgtactgtctcaagatgggcgcacactctaaggatgagaagctattaatacacttttttcaagataacttggccagagccgcggtagtttggtacactaatttggaagcttcccgcatccgtacttggaaggatctgattactgccttcttaaggcaatatcactataatctcgatatggctcccgatcgcactcagctgtagaatatg

SEQ ID NO: 137419 - DNA, 420 bp, Glycine max
  unsure (1)..(420): unsure at all n locations
agcttgctaggtgacacgtactatcttttctttgcctccatttatgncatcatatcattgattgcattgatcagttaatgatgttaatgataatgaaatgataaaaatatttcccagtaataaaactggagttaataattattctatcaatatattgtatgtttcaaacccgcagagtacatttacttttttttttaatattgtctacgaagtattgagagtttgatacataaagttcaccaaaacaaatagtttaatacataacctctcgccccaatatctatctttttaaaacagtactgcaaagaatggtcgattaagcgaaagaaaagagacattgaataagaaatatttattaagcttaaattaacattgttattttnttttctaaaatgaattatggtaccttaattatgttat

SEQ ID NO: 137420 - DNA, 402 bp, Glycine max
  unsure (1)..(402): unsure at all n locations
ctgcagctgagctggttcaccttatatcctaatgtattggaaannccgatcgccaatactttgacaacatttcatggaggcgaaagactcgggaatacgtatgctatgcatggaaaatgtaattatgagattgagatgcccgtagaaacatcatttcctagttaaccacgcattaggtaccatgcccaatcatcttgatatgttttttttatttttttgagaaatgggtttatgatcccaacacatgcaacttagaatgcagtgcgaatttccatgcttccctattttattttcgcttcgcagaggaaaactcctggatcatgcatgagcaaacatgaaatccaatggtatgcagtttgtagaacaataagtatgtcgaatgcatatgcatgatgatgcaat

SEQ ID NO: 137421 - DNA, 262 bp, Glycine max
  unsure (1)..(262): unsure at all n locations
tacacaagggcaacatatggctcaatgatgacaatccattttgccctgtattgttaatagaatatcatgccaccccactaggtagacaccttggagttgccaaaactatccaccgcctgtaagctaatttcacctgggaccatctncggtgggacgtcaaggaattcattaagagttgccaaacctatcaataaaccaaacacgacacccgcanatcgacaggattattacaacccctcccaataccatcnggcatttggga

SEQ ID NO: 137422 - DNA, 443 bp, Glycine max
  unsure (1)..(443): unsure at all n locations
agcttcaataagcgcacttgcaagaatnataatttttaagagattggcgattagcgcttcctaccccgctaagcccagcttataaactcaagttacagaatggatctggggcttagcgcatgatagcacgcttagcgttgctacaataaaagttttccagagaagaagtggcacttagcgcatcatccatgctaagcccactggttaaagttcaattaccgtgaagatgttgggcttagcgcagtgatgttcgcttagctgaactattcacccaaccaatcaggggtctctgcgcttagcgcgagaaagctcggcatagtgcataaagactgagcacttagcgcatggtctacgcttagcggatagacaattgcaaaaaaanttctaagtcttttactatctatctcttcacacaagcttaaaacttcttgtcataaataaac

SEQ ID NO: 137423 - DNA, 418 bp, Glycine max
  unsure (1)..(418): unsure at all n locations
agctngataatcgantattttatttgtgttattgattaattcaatatttnttggctaaatatcaatacaaaatggtttttgtgctagtgttttcgtcttgtaattgattaacccaaatggtaatcgattagactatcaaaaacatgctttgcttccagaaacttatgaatcaagtgatcatgatgattatccttaagcatgtagaaggtatataaactactttaagcacacacatgcctatctagaacaatcaatacaaccccacatctattaaatgtgttttggcatgtaaaatatcaaaatcaaacctaaactaatagataccaaattcttcgatctacaatctcacctttttttggtttgattatgtcaaaccaatcctcaagcataaacaatttccatatncattatttgcaat

SEQ ID NO: 137424 - DNA, 325 bp, Glycine max
  unsure (1)..(325): unsure at all n locations
agcttggacataacaagatgacttgcttttattcccccattcatccagaaccaacagagactcgtgcctaaggtgagggagcacccagtgaagaacaacaaagtcatgttcaagttgaaccaaatggaacacaagtgcaaactgaagtgaacaccgaacatgataattgaacacatgaaatggaaattgatgcagtgattaatctgctaacacaagctagccaaacaaatccaaacaaggtaaaatctataccattctgagttagaagctattgtgtatntcactttcattttcagtctttaatgggccctttacacaaaaaaaa

SEQ ID NO: 137425 - DNA, 428 bp, Glycine max
  unsure (1)..(428): unsure at all n locations
agctngtatactgaattgagtatggcactcacattgcatgtctgatatgccttttagaggcttgaaaagtgcgagaaaacgagttttgttttctgcattctctggaaaacgtgatgaactcgctaaccgagaatactgcgctaagcgagttcatcaatactcattgtatataagatttatctgaagaaccagctaagcacacttattgcgctaagcgagttcatcctttgagaatgaacattcatcctcttgctgaactacctgtggctaagcgaggctaaatcgctaagcctagggtaacttaaccatttttttttgtgatagccacgcgctaagctgagcattcttgagccaagcacaggttgtggcatccgctgtgagtntcacttgctaagctcccataacttagtgaaatttttgctcagttt

SEQ ID NO: 137426 - DNA, 411 bp, Glycine max
agctttgagattggtcttcgccagtttttgatctatgtgggtccaaaaagaggaaaatttgatcatcctactaagacgactgagaaaactggggcaaataaagagggtgaggatgagggagaaacccatgctgtgactaccattcctgtacggtcaagtttcccaccaacccaacaatatctttactcagccaataacaaaactttctccttacccaccacccagttatccacaaaggtcatccctaaatctaccacaaagtctgtctaccgcactttcaatgacgaacaccaccttttacacaaaccataaaacaccaacccaagaggcgaattttgcagcgagaaagccttgtaaattcaccccaattcacgtgtctatgctgacttgctccatatctcttgatattca

SEQ ID NO: 137427 - DNA, 263 bp, Glycine max
cctttgtcgaatcccctctatctggatcaactcttcataaggcagtatttatatgtctattagccgtggacaagtagaggagaaactctctaacagcaagcgcacccttgattgtgcttcgaacaaaacgtaactcattccgtatgatcgctttcttataaaattatgggaaattatcccacacgggcgcggagaaggatctctattgcatgccactttaaggtacactctgtatgacatgcagtttcaacctgctgattggc

SEQ ID NO: 137428 - DNA, 436 bp, Glycine max
  unsure (1)..(436): unsure at all n locations
agcttgaaggcatttaacccactttcttcttatagtagaaccccgataacgtgtccactatcattgttatcatctccttctccatcattgggggcactacttgagctgccagatccctccacctttgggcgtattctttgaaagattcatgctccctcttacacatgttctgtagctgcattctatccggagccatatcagaattgtactaatactatctaatgaaggcaaccattaggtccttccaggaatggacccgggaaggttccatattagtataccaggtgacggctgccctagtaagactttcttggaagaaatgaataaaaaaatttcatctttcgcacatgccctcattttcctacagtacatcttcaggtgattcttggngcaagtagtccccttgtacttatcaaaattcgataccttgaacttc

SEQ ID NO: 137429 - DNA, 435 bp, Glycine max
ttagtcacctgcggcatgcaagcttggattatttgggcacgatcagatattttctgctactttccatttgtaatcctgatttttagatatttacactatataaacatctatttttttcttacagaactatataaatatcttatgaacacttttgtatttgttattttctcttattacatcaaataactaattatattaatcatttatctctgcttttttcttttctctttctagatgttgacactatctaaacaaccaatttagttaggataaatcataaaatcacaaaagttgaaaaataaaactgttaattacaagccactaataaataattttttttaccaaacacgtacgattaattaaatagattaatcaagaatttcaactaggaaaaacaattagaaactagttaagagagaagtacttttaatagga

SEQ ID NO: 137430 - DNA, 387 bp, Glycine max
  unsure (1)..(387): unsure at all n locations
agctnggcgtactgctttgtcataattttggattggctaccttccaaatcattatccataaattatgagatgaatttgatgagctcatggtcgaattcctcgtagatgttatgattctcattaatgaatgtcacgaacgaggatttataaatattaatagctaatggggagatttgtttctcatttataggagatataaagatagtggctgggattgaagaagatataattctcgagaagatattgaaggagagatagaacactaacaaggttttcagcagtcaaataagtttaaagtttaattgatttgtgtttcttcttacccctctgagctttatgactgggatgaaagaaacttaagatccctcttttggcttttccttttta

SEQ ID NO: 137431 - DNA, 324 bp, Glycine max
  unsure (1)..(324): unsure at all n locations
agcttgaccatgagtgctagatgacaatttatattagtatncggatgaggaacaagattcttctttctttgcgaggaaatttcataaatctatcacaaaaagatgaattgacaggcgtcaaagcttcaacgatggaagaaaatcgcatgaagattctcaagtccttacatgttacaaacgcaaccaaattggtcacatcaccgccaagtgtccttcaaatgaagagtggcccgagaaaagcgaaacgaaaagggttgacgacagactgactaagaaaggctacattgcatgggatgacgatgattcatctgatggttcccaaaa

SEQ ID NO: 137432 - DNA, 444 bp, Glycine max
  unsure (1)..(444): unsure at all n locations
agcttcttcctgagacattggaatgttttctccctgtcttggagcatctcgtctaccgcatccaattntgaagttcctgtgatataatctgggaaattgaatggttttcgtccaaaagtaatctcgtaaggtgtggatcccatcgcagcgttccaagaggtattatgagaccactctacccataagaggagcttcccccacacccgcggtctccggtgaacaaatgcgcgtaagcattgctcgatgattctgttcatcacctcagtctgcccatctgtctgagggtgataggcagaactcattcaaagttgcgtcccactcaattggaatagctcacgccagaaattgctgaggaacagggggtctcgatctgatactaagcttcgcggaatcccatgaattntccccacgatctccatgaacaggacagccaccatgtgaact

SEQ ID NO: 137433 - DNA, 407 bp, Glycine max
  unsure (1)..(407): unsure at all n locations
agcttggaaggatgcttcaatggatgaatatattgagggagagaaagagagagggggagcacgaaattgaaggaataaaagagggagagaaatggaactttgaagtatgtctcacaagactctcattcatcaaagntacaacaagtgttacacatgtttctatttatagactaggtagcttccttgagaagttttcttgagaaaacttccttgagaagcttctttgagaaaacttccttgagaagctagagcttagctaccacacccctctaataactaagctcacctncttgagaagcttccttgaaaagatatctaaagaagctagagcttaactacacacacctctcttatagctaagctcaccttcttgagatgagaagctagaacttaactacacaccccct

SEQ ID NO: 137434 - DNA, 420 bp, Glycine max
  unsure (1)..(420): unsure at all n locations
agcttngtgntaccttccttctctctctctctcactcttatcatgaaggngcaactgaaaacccacttgaccgctaagccgtacctcagctaccctgactccacagaattctcgctatgctcctgcaacactgactcttgggataagcccttcatgtcatggtcaaccaagctccccctcatgtgtagctaccatggccacatcaaggcaacttagatctcatgcccttaatgaacgaaggcgggtctgtttccttgaagaaattcatgaccacaaccttagcttgaggtagcacctcacttagcgaaacctatctttctcataacaagagtaaatcatgtagtatatcattgacacacatgttgggcaacctgggaatgaaatcaaaggttgtgtttccagcattatttgcatgacatg

SEQ ID NO: 137435 - DNA, 442 bp, Glycine max
  unsure (1)..(442): unsure at all n locations
agctttgaaatcaaacttcgccactggttatcttttacaaganactggtaatcgattaccagagagtaaaaactctggtaacttagaaaattttgagaaaaactcttttgaaaaacaaaactgtgctatgtttgttttttgaaaaatcttttcaatacttcccttgtgaagtcttcttgatttcttctcttgaatcttgaattcatcttctcttgaatcttgaaatcaaacttctcttgattcttgaatcttcttgatttcttctcatgaaacttgaaattaatcttgatcttgaacttgttgactcaatcttgaaatcattatcttgggcttattgtcatcatctntgtcatcatcaaaactacttgaatcaacttgattcatcatcatgaagcttgcttctacaactntaaatgagcgatcacttcatatcctttcatgt

SEQ ID NO: 137436 - DNA, 302 bp, Glycine max
agcacaaatatatggacaaaatataattatgttttcctttcgctaacaatttattgatacatgtgtgcgtttttaaggttgaagtaaacatatagctgccctcgattcagggtattatgtcccttcttgcttatgagaatccagtggaatgcccaatgtttcatctgatcggcttagactatcggcaacaagttgtggatagtttaaatcaaactattctcggttggttaacttcactatactccttatacttaatatatattttatttgcaatctcaatactttgttctatccctgctaaa

SEQ ID NO: 137437 - DNA, 440 bp, Glycine max
  unsure (1)..(440): unsure at all n locations
agcttcctttagtgcgtcacgtgaaatttgagttctatggnggngcgagcctttgatggtactcggctggaagtgatgggggaaatcgacattcccattcagataggcccccacatcttcaatgtggtgtttcaagtaatggatataaattctgcctataactgcctcttgagaagaccttggattcatgccctgggagtggtcccttcaacgcttcaccagaaattgaagctcgcagtgggtggagttttagtgatagtgtccggtgaagaggatatgttagtgagctgcccctcctctgccccatacgtagaagcggcggaagaatcattggaaacggctttccaatccttcgaagtggtgagctgcgcctctgtggaaccaagatcgttgctaccttttctcttcaacgctgacataatggtggcgcgtgtatgctc

SEQ ID NO: 137438 - DNA, 386 bp, Glycine max
agcttatgaccattataatttctcgggattttttttgttcaataaccaatgtctcgatatattatgcacctgaatcggaaatccaagtgaaaagttatgaccatttgaatttctcgagggattttgttgttcaattttcagtgtctccatatatggtgtgcctgaatcggacctccgtgtgataacttatgaccatttgaatttcttgagagatttcgttgttcaatttcaagcgtctcgataaatgatgcgcctgaatcggacatccaagtgaaaagttatgaccatttgaatttctcgtcagcttccgttgatcaatttcgagcatctcgacatgtgatgtgcctgaatcggacctccgtgtgtaatgttatcaccattataat

SEQ ID NO: 137439 - DNA, 452 bp, Glycine max
agcttcctctgtaagctcttgtatttcttggtttgctctttgatggtattagagctcttctcttgaaaagctctcatgcgcaactcatcatttgcttcttgttttggttgtttattttctcatcatgagtaccaatcgatcacatcaagatcaatccttaaatatacacagtcctttctatcttcatccaagagaaaatcctgtgattgcgctagtttctccggtgactgattcatcaaattacaattcatggagtctttcaatgctcattgcattgagtacgaagaacaaggttgagtctgtcgatagatcaattaatagatatgcatcaaatcatgcacttcacacaggttggaagacgtgcaataacatggtggtctcttgactcgttcattcagtctcacctttaattagacagaacatactttggatcgatgatgcttgagacatat

SEQ ID NO: 137440 - DNA, 418 bp, Glycine max
agcttgacacatgttcttccatgttggttttctcgcactgagcgtacatcagcgtgctaagcaagttacttcagctcattaaacatcttccaattcattgtcattgtacgaaaacaaatctaaaactataaaattcactaacattaacttccttaagctaaaaataacaaaaaacctaaattcctatctttttggatcacacaaagcattgaaaaagaagaaatgagataattgttgtgaaatttaagtgcaaaaaccaagtatgcataacacttaccacatacttgaatctagaaaattggcaagagccatttatgatgattggtaccataacttgaaaattgttctcatgccatgaaaaattattgacaacatgataagtttggtgtaactacatcaatagaccctgatgatgttg

SEQ ID NO: 137441 - DNA, 427 bp, Glycine max
ggattcttaagtcacctgcggcatgcaagcttctggtgggacatcttgtcttgctttcttatctgacattcaccacagattctgccttcttctattttcagattgggaatgcctctaacagcacctttgtcaatgattttcttcatgcctcttaagtgcagatgtccaaatctttgatgccatatattgacttcatcttctttggagactagacatgtggaggagtaactggtttcttgaggtgtccataggtaacagatgtcctttgatctgctgcccttcattaggacttcactcttctcatttgtcaccaagcattctgactttgtgaagttacattgagtccttcatcacacaactgactgatgctgatcaagttcgcagtcagtcccttcaccagcagtactttggtcagactaagaagtcc

SEQ ID NO: 137442 - DNA, 379 bp, Glycine max
  unsure (1)..(379): unsure at all n locations
agcttaagacctgtntccatattcaaatctttatagtgnnttaaaagctggtcttttatcaagtccatgcaaaaacatctgaattcatttggtttttgggaatgtccttcattgttttaaaaaaacaaatccttttgctgtgttctgatccaaaaataagtttcaaaaatactggttgctgattctttctacaacatgctatgttcaacaaaaatattctatttaaggcctaaaaagagttattatctatcactatactaacataatatcaaagcacgtgtaaattagtcaaaataaactggcgttagttttcttaacataaaattcataacattaaatattggtttataagagtactgagatttaattccaagcgata

SEQ ID NO: 137443 - DNA, 422 bp, Glycine max
  unsure (1)..(422): unsure at all n locations
agctnggacaaactactggatgtctctctttatttccctccaatataaatttgccgctattcttctgtatgtgcgatagaaaccggaatgaccaccttgatgagtagcatggaattcttccagaaattttggaatccaagttgatttctcacggatgactacgggatttatataataaagtaccccttgtttatatacaaatctagcattgatattttccccctgtcctttcttcacttcttcgattatatttctcaacttctcatctgcgtgcacctcagcattgatttcttggcaagtccaccatactgggaagtaaatcatattgttcagttccatttcatctctactacgggacagagcatcaactcctcggttctctttgcgagcttataaatatctcaaagtataccctagagctt

SEQ ID NO: 137444 - DNA, 446 bp, Glycine max
  unsure (1)..(446): unsure at all n locations
agctntccattctttgggaagttcattattggattngactncttctggaggatcttcattgcttcctttaccttttcctttagaatcttgtccatgaatatgcatttgttctaaagattctgcaatatcatcttgcatattctttcttgacaagatagcattagattcatcaaaagtaacatgaatagatttctcaatattcatagttcttttattatatatcctatatgctttgctttgtaatgaatatctaagaaagatgccttcatcagaatttgcatcaaattttcctagattgtctttaccattattaagcacaaaacatttgcaaccaaaaacatgtagatgtgaaatgttgagttttctaccattatataactcatatgagggtttctttaaaatgggtcttaataatgccctattcatgatgtaacatgcagtattga

SEQ ID NO: 137445 - DNA, 199 bp, Glycine max
agcttgtgctggatgaatcatggtatttgtatcaaacgcacacaccgacattgcgtggctttaataacaatcgtctcactctatcacgcaaagtccgctaccctgatcatatgccaccttacactagattaagcaccgggcctttaaagagatttattctccttgacgccatatgaacaaattgagggatcatcttgct

SEQ ID NO: 137446 - DNA, 462 bp, Glycine max
  unsure (1)..(462): unsure at all n locations
agctntactaggcttgagctcggcttgtgttgaattcgtaaggcttgagcttggctcattaactgtcataggctttttttaagactcggctcggcttacataaaagtctggcttggtccacgagcctatttaaaagcttgcttaaagacgtctttgatcaattaattattttaaaacctagtgaaatactaactaaaaaaaaaaacttataaaatttcttataagtaatgtataaatccaaaaataattgataaacaaaatcatattgaattcaagtcgttaaagcacaacgtatatcaaaagaaaataaaaaaaacataatattaaaaaaatgtatggattagagatgatttacactaatatagccaaacaaaaattattattagttaaattaacaatttttaatccaatttttgaatatatataagtatattaaatattnttttacaaaatatatctaca

SEQ ID NO: 137447 - DNA, 437 bp, Glycine max
  unsure (1)..(437): unsure at all n locations
agcttgacactngtggcatttccatacattgattatttcagttattctccatcgngagccaaaaatatccatcttttagaatatttcgggccttggcatgcccattggcatgggtgacaaatgagccttcatgcacctcccttagtatctgctcaacttcacttgcatccatgcatcggagtaaaaccatatcatggtttcttttgtatagcacgtccctattcaaaaataagttagccaccaacctccgtagtgttctcttgtcattctcaaaggccccatgtgggtactctntgtccttaatatatctctggatattgaaataccaaggtttgccatcattttcctcctatatcaaacaacagtgagcaggctcactgtgacatctaatttctatgcatggcaagtccccatgaaggctcaccttgaacatagat

SEQ ID NO: 137448 - DNA, 408 bp, Glycine max
  unsure (1)..(408): unsure at all n locations
agctgaagaaagagtcatagatgctgttatatattctataatttatagntgggaattgcagtaggtattattgaactcatcacctcacgaacgaattctattaattatgttaatacggttgaatctttggacataaaacataataacttgcatttgaaggatcaaatcattataaagcaaaataaaggagggtaataaggagaaaatgtttatctttgaaggacataatgagaaattgttaagaaaataatcaaatactactgcccagttagatactttgacttggtgcccaacagcaattagagtgcatcgacaatttctattctgacttagtgtgcatgtgcaacagcaattatagctttcaacggtcaaggttctcactggcacaataactattggtgcccaagt

SEQ ID NO: 137449 - DNA, 446 bp, Glycine max
  unsure (1)..(446): unsure at all n locations
gcttcagcatcttaaacagaggctgattatctgttattaagacaacataggagacctgtgcagcaaagtcaaacagcttcaacagaaactaaatgacttggagaattctatgccagctcaaccttctgaacaacaagtcaaggagctcaagaaaacccaagctgacctttgggaaaaagctactatgcaggagtctattgtgaggcagaaatcaagatgcagatggatcaaagagggggacaacaacacatcctattttcacagagttattaatttgaggaggaggagaaatgctttgagggggatgcagattggtgacacctgngtggaaaatcctaacattataaaggctgaaatccttcatcattttcagaacaggttcaatgagcctcacttgagcagacctaacctggatgggggttcgtttaaaagtctgacttctactc

SEQ ID NO: 137450 - DNA, 418 bp, Glycine max
acagaccaaaatcaagaaattatgtacatatagagcaacatacgtcttggaattgatacatacaaacatgtgtgggccatttcatacaccttcatgaaatggtcaacaatattttatatcattcatagatgattactccagatatgcatacttgtttcttatacatgtaaagtcacaatctttgggtgtgttcaaaacatttaaagttgatgatgaatattatggcagacatgacggttcaggtgaacaacgtctggggccttttgccaagtacctagaggaacgtggaatcgtcctacagtacaccatgcccggtgtcacctagcatgaatggtgtggctaatagacaaaacagaactcttaaggatatggtaagacgcatgatttgtcattctaacttaacagagtcactctgggg

SEQ ID NO: 137451 - DNA, 452 bp, Glycine max
  unsure (1)..(452): unsure at all n locations
taagtcacctgccgcatgcaagcttagacaactttggaattactttttatattgctgaatagattaaaacaaagagttttgccttctgaagaaacttttctaacttaaaaattttcttcccacttattcacaatgatgcatatgcacaaaagatatgatatggactaagatgcaacatttaataaaacaaccaatacaaattccactcaagggagtagggcatgtaaaagacaaaacattttcaagcttttctccaagcttcaagctttagtcttcatgttgttcatgttgctccccctatttctaacaatctcccccccccttnttgtctttgatgatgccaaacttgaatatgacattgagtgcatttggagggtctgagtcttgatattagagaaattgctttcttagtcaatcctgaanaatcttaactcttgagaaagtgatgcaat

SEQ ID NO: 137452 - DNA, 270 bp, Glycine max
  unsure (1)..(270): unsure at all n locations
agcttgacganaaatgagcctattgtttttattcttaccacactaaaagactggaaagctgtttctaatgactcctctgcggcttccacattaagcataaaagaggggcacttcaccaagatgtattactgggctgataccaggaccaaatgccccttcactaccaatcacaacttttggcggagtgttaagggaacaactcccactgagaggatacacgggcgcgccattcaacacctggagggggggtggttattcaataattggaag

SEQ ID NO: 137453 - DNA, 392 bp, Glycine max
  unsure (1)..(392): unsure at all n locations
agcttggatttccttttagtatggaatctattcttcctaagatagagccaaacccagtccccctcattaagaactagctcctttcttcctctattgcctttagttgaatacacctttgttttgttctctatttggttcttaaccctctcatgcaacttctttacaaactatgacctagattccccttctttatgtataaaagaagtgtcaagtgggaggggaatgaggtctaagggtgttaggggattgaacccatatacaacctcaaaaggggattgcttgatggttctacgaacccccctgttgtaggcaaattctacatgaggaagatactcatcccaagacttatgtgtgcctttcagagagcccttaanagggtggataaataccta

SEQ ID NO: 137454 - DNA, 401 bp, Glycine max
  unsure (1)..(401): unsure at all n locations
atgcaagcttgaagtgagaaagcatggaattgttantcttctctactcttgnnngnngaccatagagtggtacctaaagatatgtcgcgggggtcatgaaaccttggggacgtcaagtggggtgctattgcccaaaaccaagcttgaccaatcccgacccaatccgggcatagtcagtcagtgagaacctgtgacgtacctaaataggcgagctcctggcagtcaaccaataaaagaacaaaatccacaaagcaaagaggcttgtgtggcggctggccagctatgaatcttgagtggtatatggaatatggcctctggaatcgattaccaagggtgtgtaatcgattacaacgcttaaaaatggaggcaggatattaatatggccttcggtaatcaattac

SEQ ID NO: 137455 - DNA, 400 bp, Glycine max
  unsure (1)..(400): unsure at all n locations
agctngccacccagctcgcccagtttattatgntgcttcctccagaagcaacagccttctggaggaatcttctggagggcccaagtgggcctggttgctatttgcacccccatttttactaaatataccccctgccttnttttggtgattcttttttcataaagttacggaaacttacgaacttcgtaacgatacttgttttctttccgtaatgttacggaaccttgcggattacataatcatgccttttttgacttacggaatgttacggaacctcactaattgtgcaacgatgcttccttttgatttccggtgtgtcacggaaccttacgaattgtgcatcaatattttcttttgatttctggcacgtcacggaatttcacaaattgcctaatgatgg

SEQ ID NO: 137456 - DNA, 451 bp, Glycine max
  unsure (1)..(451): unsure at all n locations
agctngatgtgagaaaacgtggaagagttttctttcttctttgttngtngaccacagagtggtacctggagatatgtcgcaggggtcaggagaccttggggatgtcaggtggggtgctattgcccaaaaccaagcttgaccaatcccgacccaactcgggcatagtcagtcagtgagaacctgtgacgtacctaaacaggcgagctcctagcagtcaaccaataaaagaacaaagaccacaaaacaaggaggcttgngtggtggctggccagctatgaatcttgagtggtatctggaattcggcctctggtaatcgattaccaatgatgtgtaaatgattacagggcttaaaaatggagacaggaagttaaaatggcctctggtaaactactaccagaggtgtgtaatcgactacagggcttacaaatggagatatgatattaacgtggcc

SEQ ID NO: 137457 - DNA, 376 bp, Glycine max
agcttgaacctgaatgaaagaaatgaagtattgtatattatcctttgatgcaatccaagccatggacgcttggttcagattgttccggatgcaaattcaagaaccaccattgttgatcttccaagaactcaagaacagaaaaatagaaaatatggataagatgagaagatgaacggaacgatgccacgatccacggagaattgataagctgaaggagaattcaccacaaaggaatagcttccttgataagaaatcaattgattttcagccaaaaaccaaagaaaaggctaagctctttctaagcacaaacttaatttcaattatatcaaaagtttctcaatttaaaagttttgagtatttatagaactagcttaag

SEQ ID NO: 137458 - DNA, 432 bp, Glycine max
agcttcttatccaaggctcatcttggtgtttatgctctcttcttccatggcttattccctagtggatggcgcctcctctcacctattctcctttgtcttccgctgcatctccatggtggaaaatcaccattgaaggacctcattgaagctcaaagatccagcctccatagaagccccacaagcaagcttctatcaaattacctgtagccattaccatggcagaagagcatgaccagaggattacccttgaggattattcaagtagttcagtgccataatcttttaccagcattgcacgtcctgaagtgcaagctaacaacatcaactatccacattccttaatttatttagtacaggggaacttatttgaaggattacctaatgaagacccttatgcacacttggcaacgttcattgaaatatgaaacattg

SEQ ID NO: 137459 - DNA, 411 bp, Glycine max
  unsure (1)..(411): unsure at all n locations
gcacggcggaacacgagacttgcgagatgaataaacaaagattgatgacagttatgagacccatttattataacaacaactacaacgcataacagaacaacatggaatacttgaacgagcagatagcgtatcaaagaaaacaagtacagcattacaaggaagtttcactatggagccaaacattggacaaaaccgtcgggatcatggctaaggtggtttgcattgtctacgcttgaatatgttccgtttttggaggctacatttctaattgctactgctatgaaatcattgatgacaacaacatcaacaacaattgctggtgcctctnggaacaccgcgagttgtacaagaaaaattattggtcttacgatgaatcacttaagaagcgtgtacaagatccggtccattcct

SEQ ID NO: 137460 - DNA, 361 bp, Glycine max
  unsure (1)..(361): unsure at all n locations
agcttaaagtatgcccgtttcatttatttctatgagatgttgntgaagtattggcgatcagaattgccatttcttggattatagggttgaaccaagctcatgcttttacaaaaaggttcatcaagtcaagttgaaatatggaagtaaccgtcttgcaaaattggggcaaaagacgaatcacatcactgcttcgtctactgccaaacatatttaggattgttgatgtccttgttacttccagtttcaccttgacaaagatgtcatggaccatgttgaaaatctaaattgattcaaccccatatcctgcgtaaaaattcgcaatacttcgactgtacatcattcgcatgcatccatgcttttc

SEQ ID NO: 137461 - DNA, 406 bp, Glycine max
agcttgagacttaagtgctttgttcttcttataagcagtagtcagcagtgcactctcacccatctccattacaagcctttcttcttcctgaacacacatggtcattaattcattgatagaccatatatctttatgtgtgttggaagaaatcttaaatggcccatattcatgcggaagggtgttcaaaatgaaatgcactaggaaggactcacacatatcaacctctagtttcttaagttgagctgaaatatctcgcattttcatgatgtactcacgcacacctttcacactggtgagccgaagagaagaaaacttcatgatcaaggtgcttgctaaagtcttatctgaagtgatgaactggtcatcaatggccttaagcaagtctcggaccttctcatgctggtca

SEQ ID NO: 137462 - DNA, 302 bp, Glycine max
  unsure (1)..(302): unsure at all n locations
agctgcacttatgagctctactcggagttantacgntcaaagccacttaggcagtggaccatcgggagaccaaggtgtccgtgcgatctagacatcaaccacttgagatagccaccgatgacggcatagatacttcccctaatctcctcatgcttcctttccactgtactacccactgtactgaagcttcgaatgatattcgcattagggcctgagagacctcgcgggacgaacagcgcgaagatcttctccgatggcgcacccctcacagggtagcgtaagtgtcttatggtcaacatgaa

SEQ ID NO: 137463 - DNA, 421 bp, Glycine max
  unsure (1)..(421): unsure at all n locations
agctttccggctnnccagatgcacagngtttatgctattacacaagggcaacatatggctcaatgatgacaatccattttgccctgtattgttaatagaatatcatgccaccccactaggtagacaccttggagttgccaaaactatccaccgcctgtaagctaatttcacctgggaccatctccggtgggacgtcaaggaattcattaagagttgccaaacctatcaataaaccaaacacgacacccgcaaatcgacaggattattacaacccctcccaataccatcgggcatttgggaagatctctcgatggatttcattaccaatctgtccaactcccacggttatacagtgattatggtggttagtgaccatttttctaaaggggtacattntggagcattggcttcgcacattaca

SEQ ID NO: 137464 - DNA, 294 bp, Glycine max
  unsure (1)..(294): unsure at all n locations
gaccttaagtcacctgccgcatgcaagctttcacaagaggcggttattttgtttttgaccatggctcaaagctncggaggaggaatggtctgacttgaacagactcatgatcaggcggggatgtacttattctctggagaatatcagctcttacctctgggggaccaatgctaagatatcctgaaatgccctgcaagagggaggaaaccccacatggactgaggttgggacccatgagtgaatataactaccacgatgcggcagcttctggagcaggtatgagaccacagaacg

SEQ ID NO: 137465 - DNA, 409 bp, Glycine max
  unsure (1)..(409): unsure at all n locations
agctgtaggattatggggtacccatcatatgtgtgactacggggcggncgggcgatggtgcacaacaagatttccacatccacaatgcgcgcataaacccaccataccctgttgcccacctccatctgagctcacgtactcccacgtagcccatatcctcgtttctctcaacaccgggtccccatcaatcctcccaagcttccacaacatccaagcgaaacaacattcaaacagcacaagctatcacagccaagcaaaacagagcaaaggcagaaaactcttgccaaacaccaaccaaattatagcttttctcacttaaagaccccaagaacaaattcttcgatccaatatcgtaaccgttggattgactcccaaaatttactggaagtctatagtacaaaacctacat

SEQ ID NO: 137466 - DNA, 423 bp, Glycine max
  unsure (1)..(423): unsure at all n locations
agctttgtattctagatattttattctttctttattgangattaatattcttaattcactcttcaaataacataatatcgactaacaggagtggtataattttctttcttatgagcgaattttcttacaaattttggtttccaagtaatacggacatcaataatcaatttcctgccatttgcagcaaattgctttgtataaaagtcgaatgttaggaaatgttcagtagattttcacactaaaatatcctcaagcagatttatttgtagaaattttatttcaaaaattctcaactagctaggtgttctgcacggttcaaatcctcaaatagttctgcatgtaattttcacgtgaatctaaaatccacaagtaattcttcagcagattataaatcccatataatctttctatagatctaaattc

SEQ ID NO: 137467 - DNA, 430 bp, Glycine max
ttcggatgaggatgaagaagttcaagctcgtatattgattcttgaacggccagactcgctcaagaatgattctcgtttgtcgctacagacatccggcacgagtgtgcctgatcacgagaggaaaatgtggctaccgcaagaacccttgaacgagaaaccaacatggctcgcaaggaagagcatggcccagataaattccgaggagctctgtggggcagcaacaatgagctcaatcttcagagagaggaaagataccagtcacaagtacatggcgtggtctttaatgaggagttcgctgctcgctcaagatccaagaggagtttggcctcacactcatatgccacggagcatatcattctatctataattacgcacaccaaagaagattttagcgcttcttttgaccccttaacaaaaactagtataggac

SEQ ID NO: 137468 - DNA, 349 bp, Glycine max
catttgtagaatgagtactgtcacccatagaaagctccacgcaccaagctagaatttagaatgaccacttagatgtgtgtaaagccctcccatcataccacttaatgataagctaactgccactactttaaaagaggggttcaactgacgtatgcaattacactcactcaaggaacagctgaaagtaaaaataaggacaacatacactctatacctccctaagttttagcagaaattgaccctaaatgtttctgttttttgtgcatatgcagaccgtctttaatttatatatcaacatagcacatacactttctgctaaaacagagctacctaacttcatatgcactta

SEQ ID NO: 137469 - DNA, 317 bp, Glycine max
acaacatcttgtgtatctgataactgcatcatatggagcaaaactcactttggtgactggccaagcctattcttctcatctttactaactctcctacttctaccaagcttctgttttttgttcattttcaccaacaaacttcccctcatttacaatgtcacatctctacctcgtaagctatattatatatataggtaatggcacgtgaattataatcagaatgatgggcatatgaaaaagtgcttaccggtagtaatcttttgaaacttgatatcgcgcatactccaataatgaaggtttatttcatgatctttgat

SEQ ID NO: 137470 - DNA, 398 bp, Glycine max
  unsure (1)..(398): unsure at all n locations
tgtgcaccttngaagctcattaagagatatgtgcgctcatttttttattatcctttgcacgacttagctaataatttcaagtgatgttatgtttttcctcaatattgagctattgtcccattcaagggagtttaatattgagctattttcaactgcaacactatccctattggacttgctatcaactgcaacattaaatattgagctattttcatcccaacaatgatgtatggtacgtatttcggaacaatttgatattactaagtgcgaaggtctttatgttgaatccaccattgcaagggatgtgttgaagtattgaatccttggagacaatgtgaatacaaattgttccagtttgaaacactttcatatgtagtaagacaatttcttccaaattt

SEQ ID NO: 137471 - DNA, 395 bp, Glycine max
  unsure (1)..(395): unsure at all n locations
ntaagtgtgaggatngaaaatatagagcgaagaagagttgttatatcatctcattcttctcatggagaagatgatgggtatgaagaggatgatggacgaaggaggaatgaaatatttggagagaagaaatcatagaagatatggaggtagacaaaaagaggaaaagattgatggagtgaaggtgaagatccctacttcttaagggacttatgatccaaaagtgtatcttaagtggaagatgaaagttgataaagtcttttcttgctataacttccatgtagaaaaaaatgtcaaattggcctccctggagattgatggatatgccttaatgtggcggaatctagtgacgagtgatgtttagaggatgagaatgcccttgatttatacttgtcaat

SEQ ID NO: 137472 - DNA, 445 bp, Glycine max
ctgcaactttaaataagaaaattattatatttgtatgatagaaatgtgcataaatgcaagtctattaatgaatatatcacaccttaaaatcaaattaataaagaacatctaatacttttgtttctctataaaattgaaaatataatacaattagaatatattaataaaaattaatgacacgtataataattaattgataatatctccttttaaaaaaaatctgatagtagaataattcatcaatttctacatcaattatttattatataaacaaatataatgatcttgtatataaatagaacaaaaaaaaaataccatgaaaaaaaattacttgtaacgaataaaataaaattaaagaaacaagtctcaagaaaagagtgtatatgaatggaatgtgacaacaaaatatgcaacaaatgtattaaggcccaagtttcttggaatg

SEQ ID NO: 137473 - DNA, 295 bp, Glycine max
  unsure (1)..(295): unsure at all n locations
ccgagaatcctcattgctttcatctcttttccttttagaatccctttcatgagtatgtatctcttctaagaaatctgaaacatcatctaacacattccttcttggagaaataacattagactcaccaaaggaaacatgaatggattcttcaataatcatagttctcttattggatattctatatgctntactatgcaaggaataaccaaggaagattccttcatccaccttggcatcaaaccttcctgaggttcttttccattatttaatacaaaacagtttccaccaatgacat

SEQ ID NO: 137474 - DNA, 386 bp, Glycine max
  unsure (1)..(386): unsure at all n locations
agcatggttcgaggtacttacccgttttttattttataacgatgatnaacgaatgaagaacgtttaagaacggttgaaacctttgcgaaattcttcacggaaaatgttacggaaacgtctcggaagcgcctcggcttatattttcttcacggaaacgatttttccaagcaaattcgtaagagagagaagtgcctaatgggctgaacgcttttcttattcacttcctcccctatttatagcaaaataggggaggtggttgccgcccagctcgcccaggcgagctcagctctgccaggctagccagggttgctttctccataagcaaccgccttgtggaggaatattccggagggcgctaatgggccccggtgcaatttgcactccca

SEQ ID NO: 137475 - DNA, 230 bp, Glycine max
agccacctgcggcatgaagctttgtagtaagtacttgtaatattttttatggcaaatattgtaactgggggcatgtctacttattgggaactcccttacgactcatgctattttccatgagaggggaggtttctgtgcaatataaagtgaccatgacacttgctgcctttttttcctgaatgcgtgtactgttgacaccctaaaacattatcctaacttgtggtaccaca

SEQ ID NO: 137476 - DNA, 408 bp, Glycine max
actaagcttctttctggaaattccttctcgagtggtgttcttgttgtgtaaagttggtgtttggtttagatgtgtgacaggcatgctttgtggctgatttaagggtggcctttgtggttgattgggtggtgggtcatgagaaaagatgatcctggttgattaatgacatatgttagctggtgggaaatttggccatgtaggaactgcagtcacaacttacgttgcctccttctgctcattctctctatatgccccaagctctctatttgtcaatgcaggatgatcatattttccttttatagacccactttgatcctttcatcggtgaaaacttaataccaaatcttgaatgcggaacccaccatcttctctaatacaacaacggtacgtgtctactatctttgttat

SEQ ID NO: 137477 - DNA, 411 bp, Glycine max
  unsure (1)..(411): unsure at all n locations
agctntatcaccacaactatccaacattgtatatatgctacatatnggagcttgaaagtatctaagtttatgaaatataatacaatattatcttatatgttcttgaagaatcaaggttataatataactatgagttgacaggatatggaagctccattagtactaaatacttagtcagcttactctaaaaaatattagtacaattnttcattcaatccatacaacttatagtcagcattaatgggcatcattacaataaaagcaatacaaaatgaataatgtacccaacattaaacatattgactagtatgatattagatgacaaatgaacatgcattctagctagcaaactcactaaaatgagactactgagaaatctgaaaacagatcttagggatcatagtgcataca

SEQ ID NO: 137478 - DNA, 460 bp, Glycine max
  unsure (1)..(460): unsure at all n locations
ntcttggtgacttgaattctgtcgcttcaacttctttcttggctntgtttttcgattcctcttctagtttctgccaacttcaatgtttcaaagactacttggacgtttcagcttctgaaggcttacttagcgagactggctcactaagcgagagtaagtgaattttggcttatcgagctgggcatgctaagcgcgagaagagacaaacaacttgctgggcgagctggcgacgcgctgggcaagcaaatctctgactgatcctcttctatggtttcccaacacgctaagcgagttgtgtgcctcgcttagcggatgtcactcgataagcgcatatacctcgcttagtgagacatcagcttcttgaaccttctcttcttttagtctgaaatagaagtggtttcaacatttattcacataatgagagtatttactatataaaatcaaactaaacattaaaata

SEQ ID NO: 137479 - DNA, 433 bp, Glycine max
agcttaacaaaaggcatgcgaagtttgttttatttctatagccattcccttatgttatcaaacataaaaagggaaaaggtcatattgtatccgatgctctttctctgcgtcatgcattactttctatgcttgaaacaaaattgattggtcttgaatgtgtgaaaagcatgtttgaaaatgatgaaacttttggagaaattttttaaaattgtgaaaaattttcataaaatgggttctttagacatgaaagctctcttttcataaaaaacaaattgtgtgtgcctacctgttctactacaaatttgcttgtttgtgaagcacatgaaggaggttttatttgcattttggggtcaaaagactatcatacattcaacacatttttattggcctttttgataaagagttgctacaatttgtacattctttttgtaaa

SEQ ID NO: 137480 - DNA, 454 bp, Glycine max
  unsure (1)..(454): unsure at all n locations
ttctctgccgtaaaanagatattatcggccagtgttttttatataattgcgcaatgtcagctgaaaaatatctcgtcggggctatttaactaccgatgtcggctattgatttttctattccacccctgaattatatctggatgatgcctattacgaaatgtacggtcggggtcatccggtcatgcttctttttgaggcctctatctgtcgtctttactagccggccgacatcggctagcatttttttcgatcaatatctgtgtgaatcatgnttttattatccaaggagggctaatgttttactggccgacaaaatgaaaacatgccagtttcggccgatacacaattcctcacgaaaaaccctatccgacctacattgttatacttttaggcgatatcgagcgacaaaacttcgtctaccctgaagacatattatcggccgtgtgtgtaaaaa

SEQ ID NO: 137481 - DNA, 467 bp, Glycine max
  unsure (1)..(467): unsure at all n locations
ggctgagctntcctatggtagtatctggaacaggactctatattcccatgccagaaaagactaacccaacaacatgttctctcttggcatcacatgaaaccccatgccatgaacaaacagaagctgaagaaaagttgtagacctgggaggatgctaaatccatcttcttcaagaactctgacacaaagaaatcatcagtgtttggttgctgagatgccaagtgcttcaagaagagtgtcagaactagaacagaaccaaacacttccaaacccatcagtgagtgactgagtgatatcaaaaactgagaaaaatgttgcaaaaaactataccaccttgaaaaatgctcttctcagaactttaacaccacaacttgaagagaaaccaatgcttttctaccttccaaatttatctcgcacgatcttttgtttccaaggaaaatactggataaaaaagagaatacgaaagat

SEQ ID NO: 137482 - DNA, 335 bp, Glycine max
  unsure (1)..(335): unsure at all n locations
tgcaagcttctctcctattttgctattaatttgtttagaagangaaaacaaaaagggtcagccccttatacacttatttcttctttcaatttgctgaggaaaaatatttccgtgaagaaaatttgagccgaagctcttccgtaacgattccgtgagttattaccctaagattttcgaccgtgtcttaaagattcatcagatcgtcttcggtttctttaatcttcaacgggtatgttccttataccaagcttttcaatttacttcttgttcccgtggtggtccacacttagtttcgtgtgttttatcctcgcgttcaattactctttatacccccg

SEQ ID NO: 137483 - DNA, 490 bp, Glycine max
  unsure (1)..(490): unsure at all n locations
actatancaaactcaagctagcgggcatgatcgtntgttccaagggtccggtccttatttctacccatgccaggtatgacacggaatgcttcattcaaaccaatctcaatctcagatgtcgcgatttttattctcggaaatcttctacagaccacatgaacaccttgaggtgcctggcaatatgagagcatgcatatatgcaaaacattaggtactaaaaaagacatgcaacagataatgactaaaaatatggcaagatatatgatatactgaggatcaacagacacaagtaacttactgatacgagattgataaataaaatgttggactctgtgacacccttctttaaaagcatagaaatcgcatcaactgccgaattacctagagacgaatatcttctaaagttgatcaaatcgaaaaccatcacattatatatcacgtttattgtataaccttattatgctaactggtatgtaacttaagaatatcc

SEQ ID NO: 137484 - DNA, 484 bp, Glycine max
  unsure (1)..(484): unsure at all n locations
cgatccttgagtcacctgcggcatgcaagcttctcaaggaagttntcttaagaaatcttctctatgaagctacctagtctataaatagaagcatgtgtaacacttgttgtaactttgatgaatgaaagtcttataagatacacttcaaagttccacttctttccctcttttattccttcaatttcgtgctccccccttctctctttcttttcctccattaaagcatcctcttcaagcttcttatccaaggcaattcttggtggtgaagctccttcttccttggcttattccctagtggatggtgcctcccctctgctcttctcctttgccttctgctgcatctccatggagaaaaatcaccattgaaggaccttattggagctcaaagattcagcctccatagaatcgtcacaagcaagctgccatcagctgtcttactggtttagcctcaccctctaaatttatccgatgcatacatgtggat

SEQ ID NO: 137485 - DNA, 389 bp, Glycine max
ggattgattagagaaatatatttatatgcatcaacttgtttgttagaaagacccaacatttctacctacagctgacactttcactaacttggcattatatagtttcttagcgaaaaagttagtacaaattttgtgagatattataaatcacacatgttctctcaacagtgctttatttgagatcttactagccgccaacattacccccgtgtgcgcaatcctagaattcctccattttaattattaaatacttgacgatccagtgcactttctgacaaagtggatttcccttgaatatatgcgaactaaaaaaagtggaacaaacagcaaccgcgggggacatccaacagtatttatggcgctgttgccggagaactaagctgttagta

SEQ ID NO: 137486 - DNA, 459 bp, Glycine max
  unsure (1)..(459): unsure at all n locations
agctantggaaacctgcaagccattttgttttgtttcatatngangtaagaaactgtagttttttctgtttacattntgggctccatgtggataaacttctccataaatgattacgagagaagaaaataagaaggtaaaatgaattgggttttctcccataagttaaaatcaactcatgcatttcaacttttatagaagttttctcatttagcttatcccaaaagctgatttagcttatgcaatgcataaactaatttaaatttatgggagaagtttaagtcattntaccatcttattttcttatcttataagtgcttatggaaaagtttatccaactagggccttagttcttctgaatatgaacatagtgtttagcaaccataaataaacattcctaaatttatggaaaattaattctctgatcctctagtgccaaatggctgttaatatcttctaca

SEQ ID NO: 137487 - DNA, 496 bp, Glycine max
  unsure (1)..(496): unsure at all n locations
ctttacggaccttaaatctcagctgctggtcatatcgtctgttccaaagtaccggtcctcattctcacccatgccaggtatgacacggaatgcttcattcaaaccaatctcaatctcagatgtcacgatttttattctcggaaatcttttacagaccacatgaacaccttgaggtgcctggcaatatgagagcatgcatatatgcaaaacattaggtactaaaaaagacaagcaacagaaaatgacaaaaaaaatggcaagatatatgatatacagaggaacaacagacacaagtaacttactgatacgagattgagaaataaaatgttggactctggtacacccttctttaaaagcaaagaaattgcttcaactgccgaattacctaaagacgaagatattctaaagttgatcaaaacgaanaccaacaaattaaatatcaattnttttgtataacctttttatgctaactgctatgtaacttaagaattcgcag

SEQ ID NO: 137488 - DNA, 392 bp, Glycine max
tatcaattcacaatcttgaaacaaggtagcgccgacaccctctcgcctgaggatgaacacataaaacggcctccctatgttgccgcattcaccgaaccaaagagcactatcattccctagctgatatcatcatagaccctcacctaggctatacactaaaaaactggatcatcgggtcctttcctctaaaataatagatacaaactctattactatgcacttaacaagaaatatgcttatatcctgacccttaacgagaggcattgccttttgcttctcttgtgtctcacaaacgtccctcagcacacacgcaaaactacacccgcatacactaacggaccacatagaaatcgactaaacgctacctgaatggcgtggaaatgagtgatttt

SEQ ID NO: 137489 - DNA, 457 bp, Glycine max
  unsure (1)..(457): unsure at all n locations
agctngaaggtgcgntaccccaccattttttattataacactgggaatgtgtctactattattgagatcatctctttctccgtcattggaggtgccacttgagctgccagatctctccacctttgggcatattcttcgaaagattcgtgcccctttttgcacatgttctgtagttgcatcctatccggagccatatcagaattgtactaatactgcccaacgaaggcgaccattatgtctttccaagaatggactcgggaaggttccaagttagtgtaccaggtaacagcttctccagtaagactttcttggaagaaatgtatcagtagttcctcatcttttgcatatgccatcatcttctgacaatacatctttatatggttcttggggcaagtagtccccttgtacttgtcaagatccgcaccttgaacttgggaggggtgatgatattgggtac

SEQ ID NO: 137490 - DNA, 454 bp, Glycine max
  unsure (1)..(454): unsure at all n locations
ntataagcagagttaanaattatcatgataaanagctttcatttttgtaatttcaacctggttaacaggttttgttatttaattctaaattaagattgtttccaagtaagctgaaaaatggtctggaccattcgtcatcaatgaagttattgaaaaagatgatggtactcacaaaccaagagcagggtgaattggttttcaaaacaaaacaaacttttaaaatcagagttgtaaaaacttcttttgtatgaatcgtatcacaaaacttaataaaccaaactctatcaatactgatcaattcaccctttacacaagatccttgttaaagttctttctttcaaaaagatattttcttgaacctttattaaattgaccaagactaaaatgagaaagaaatattatatcaagagaangaagtaacaacctttttatgttggttcactctctatcacta

SEQ ID NO: 137491 - DNA, 438 bp, Glycine max
  unsure (1)..(438): unsure at all n locations
agcttgtaatcgattacacatatactgttatctattaccagagaaaatnttcagaagaatattctcaacagtcacatgtttttacttggttcttgaatggccatcaaaggcttatatatatgtgacttgagacacgaatttgctaagagtttttcagaacaaaagggtcttatcctcttaaaaagcaaaatcgttttatcctcttacaaattccttggccaaaacacttgtgattcaataaggatctatttgagtgctcaaattgttcaatctatctctttcaagggagattacttcttgtcttcttctttattctgaaaaaaggattaagagaccgagggtctcttattgtaaagaaatctgaacacaaaggaagggttgtccttgtgtggttcagatcttgtaataggctnttacaagatagtggaactctcaagc

SEQ ID NO: 137492 - DNA, 209 bp, Glycine max
cgtgtctgtctgctttatcctcatggatagataagagtcactggagtatattgtattggtgttgatgaatgattctttcacttttctaatttgttgttgtctttgattcctttctattatgcttccatgttttccatggatatatatatatatatatatatacttatctatgcatatatatatatctatatctatctatacatatatct

SEQ ID NO: 137493 - DNA, 354 bp, Glycine max
agcttgggactcattgaatgactcttagttctttctttgttcaattgagagcgtctcgatatattatgcgccttaatcggacctccgagtgaaaagttatgaccatttgaattactcaagagcatccattgtgcaatttcgagcgtctcgatatcttatctgcctgaatctgacctccgtgtgaaaagttatgaccatttgaatctctcgagagcttccgatgtgcaatttcgagcgtctcgatatcttatgcgcctgaatcggacctctgagtgaaaagttatgaccatttgaataactcaagagcttccattggtcaataacgagcgtctccaatagtcatgtgcctgaatc

SEQ ID NO: 137494 - DNA, 414 bp, Glycine max
  unsure (1)..(414): unsure at all n locations
tgttaagctggtgagggttgaaatctcagttgttattgcccagagaagaaattgtggctcaggttgagactagtgaggtttgtgaagatgatgaattgcttccctganaccacacctnccaatttcttcatggaaaggtctatggaagttacaatngttgagtcattgtacacttgatgccggaccaagaacatgcatanngatttccagttaattttcttcagaggcaccacccaatgtgcaagctgtgtatcatctacaagctcgatttaggctgagagtgccttgagtaagttcaatgctagactgctgagatcatgaagaagtacaagatagattttgatgtaaacatttgaatctcattgaacttgagacatacaggtaagaggacaatgtagtccctaacaaggcaat

SEQ ID NO: 137495 - DNA, 451 bp, Glycine max
agcttgccacccagctcgcccaggcgagttatgttgcttcctccagaaggcactgccttctggagaacttcctggaaggcccaaatgggcttggtttctatttgcacccccctttttactaaatacaccccttgtccttttttgctgattcttttttcgtaacgttacggaaacttacgaattacgtaacgatacttattttccttccgtaatgttacggaaccttacggattacgtaatcatccctttttggccttccgaaatgttacggaactttacggattgcgcactaacacttccttttaatttccggcatgtcacggaacttcacggattatgctacaatgctttcttttgacttccgaaaggtctcgaaacttcacgaattgcctatcgatgggtgcgaagtacctcgaagtggtcaaacgtgggtcgcatcccaacaatggat

SEQ ID NO: 137496 - DNA, 478 bp, Glycine max
  unsure (1)..(478): unsure at all n locations
actcagcttacaggtcanaatgacctatcaccagatngaatggttataccttcaatcaggtgcatttcatacttactctttataacaatcagcggagaaactccacaggtcaagtgacctacccccagactggttggcaagacctctatctaggggcaagtcaaacatattgctcacaaacattaggggacaagctccacaaagcagaaggaagccctaccaaatgggtgacaagacctttaactaggttgaaataaaacctgagatgatttcatgtcatccactttttaccagaccaccatggtcctacctctacttcgacaaggtcttgcttcctgtgccatcaaagattccacacttatcatcatgatgacctattcatactaccacaagtatggagcgttgcatagacaaaggcaaacacacaagacatacataaacagtgcaaaattcgtcatcgaaggaaagcttatgcatt

SEQ ID NO: 137497 - DNA, 411 bp, Glycine max
  unsure (1)..(411): unsure at all n locations
agctnggattcaagcgattcttgccttctttgttctctaagaagaagctctacaatattgtgtctcacgagattaagataattcagactattaatgggtgaaattcgagcttcaatactgcggtcctacacttatatttttagctttagcatttttgggcctaataagtaattagtggcacaattacactcttaagtagattttttgagagtttatgagtgagatttatccaaagatatttgaagatatattttatgtatttagtattgattattgacatttagagttaatatcattaggatatttntttttatctcatctttagaattgtttcctttattaggatgaggatttcatcttatttagagtttgttcctctattaagaacaatattcntatttatcttacctt

SEQ ID NO: 137498 - DNA, 472 bp, Glycine max
  unsure (1)..(472): unsure at all n locations
tgtaatcaattacagatcatccttgtctataaatacctctttttctctctctntgcgcagaccctcattcctccccttctccttaacagtgcccaacctccctaaaacttcaaatcctcataactttcttgtttcttaaccaaattacttcaaacaaagcccaatcttcttctttttcaattctctacaaagcccaccgattaaaattagctgaaacaaccttcaatggaagaatcttcgaacaaaacaaaagggatcctcctccaccaccaccactgcaagccaccaccgccatagaaccttcggtgacccaccagcaccaattcctccttctctttcatctccccagtcatccactntgttttccttcgatgctcaacatcagaggtattattctcaattctgcaattgtgttattcttcaccctaagtacttagatattgatttctttgatagtgaaacatttgattgt

SEQ ID NO: 137499 - DNA, 464 bp, Glycine max
  unsure (1)..(464): unsure at all n locations
ggagaatgcggcatgtntaagtagtaataataataatatttataataataattattattattattattattattattattaaataaaaaacttttaaaactcttcagattcttataaaatgataaatagaaaataaaagtatttttacgttgtattgtatacgcatttcacctctacgtacgtccctttgcacgttcatacatttattaatattatgctctttttttcattttttttatatattttgtgttttaacgacttgaattcaatatgattttttttatcaattattttttaatttatacattacttacgaaattttataagtttcttttttttagttaatattttactaagttttaaagtaattaattgatcaaatgcgtctntaagcaaattttaaatagactcgtaggtcaagtcagacttantatgtagactagctgagcctttgaaaaagctat

SEQ ID NO: 137500 - DNA, 382 bp, Glycine max
  unsure (1)..(382): unsure at all n locations
agctngattgaacagtgaattgatttatctttgttgcagtggcttgtttggtatggaatgagtgttcnaaagtgattgatcgagaaaatgtatgaattgaatggattgggatgattggatgattgttctgatcaagtttgtcgtcattagaagagaatgagcatatgattggaattatgtctgaatgtcttggaaacactcttttttaggcaaagcttgatcttgaattaatcttgaagcaatgcttatttgttgaagcaaccttgtattaatcttgaagcaatgcttatcatttgaatgtttgttgaagtaatctttgaagacaccttgtttgattatcatttgggcaaagcttgttcttgaattaatcttgaagcaatgc

SEQ ID NO: 137501 - DNA, 80 bp, Glycine max
  unsure (1)..(80): unsure at all n locations
ccacagaggagcnncatgaagaaaaaagagagttgaaggagcnnanaccaaccccgcgccgtaaaacaaccgcccccccc

SEQ ID NO: 137502 - DNA, 426 bp, Glycine max
agcttcaagttgctcgattgcttcttgtttctgcatagaagggcaaaggtctgtatggtggtcagcagaggagcacaaaccacaaacccttgctacaggtacagatttctgattcaaggccagctgggttaccaagttaaccaatgcattcagtttgccttcaagcttcttagtctcagatgatgcagctgagtttgtagctacctcatgcactcctctaatgactatggcatcatttctggcgctaaactattgagagttggaagccatcttctcaattaaatttctggcttcagcaggagtcatgtctccaaaggcttcaccactggcagcatctatcatacttctctccatttactgagccttcataaaaaattggagaagaactgcttcaaatctgatggtgaagcactggccatatttttt

SEQ ID NO: 137503 - DNA, 245 bp, Glycine max
agctcagaaatcaagtaatcaagtgatttatttgtgttttagtgatcatcaatcccaaaacatagggggagtattaaaagattgaacctccatatacattgctagtatcttgaatttaggaaataaattgacattatcaaataaggggatattgtagatacaaagacttcgccctagaaatatttatgatgccatattgtcgagaagcttttatgccttcaaaaaagccgcttcttcatgtttta

SEQ ID NO: 137504 - DNA, 347 bp, Glycine max
  unsure (1)..(347): unsure at all n locations
acccgggcaagacgatgaggaaggagacacccaccnngccccccggcgccaccgcgaagagcaggccccacgagaactaccccaaccgaacatagtccgccataatcgggcctcacccacacccgtaaaagaatctgttcccttttcggaagataatggaaagattgaagtgcttgaaaaaaggttaagagcagtctagggcctaggcaattacccattctcggacttagcggatatatgtatcgagcccaatatgggcattccgtcccaagtcaaagtaccggactttgataatacaaagggacgacatgttcgatggggcaacctcggatgtaatgccgaaagat

SEQ ID NO: 137505 - DNA, 118 bp, Glycine max
  unsure (1)..(118): unsure at all n locations
actaagaagaccaagccgccagnnaacngcccaagaggagcattatctttaaagcacctgcagcagacattggcacaagctgcatctagaaggactgaaggagagaaatggacctagg

SEQ ID NO: 137506 - DNA, 466 bp, Glycine max
  unsure (1)..(466): unsure at all n locations
tatgcgcatatttccttacgaacgttcacttgcacaagacattctattaactaagaaaaatgcacccatatacaatcaaggcagcttcgttacctagattatttacatgtacttccaaggtgtatttgttacctacatcacacacatttcctttgctaaattcacatacatgcatactctaagcactttggctatcgaaaattgcatacgtgcacatcctggtatttctaatacctatacatacacaaactttatgataaatcttgactatctacacaataaggtgctacatttcatgcttttttcaagttattgctacctaaagccgcatgcaaattcaagtatatnttcttttgctgactaaaatngtattcaaattaaaagggtattttgtaatgtatttcatgcaacatatttatagaatnttgtgagacattttgactaccaaaaattacatgtacataca

SEQ ID NO: 137507 - DNA, 436 bp, Glycine max
  unsure (1)..(436): unsure at all n locations
agcttgccaaatagcngagaagaatcctgtttttattttaagagcatgcacttccctcccgtcgttacaagatcttggggaaccctggcagcaatattgatctgattattagcataacactttactgaatgaagtattaaaaggctgaaacaaacagatgacaaaaagaatggaaacagcacatggccagtaaaaacattatatttagttctcctcttttggtggcaattatgttcttagatacagtcagacattaaatgggcacctctcctaaaggagatttaaaccttaattcaccacattacaagaaactagcccctgttgcaaaacccaacaacccccgttgattaaaacatcataattataatttgatctccatctgtgagccgtatattccttcactattctgtaatagtttagtgccaactgtacaacc

SEQ ID NO: 137508 - DNA, 453 bp, Glycine max
cttcatactaagctctagctgttagtgacgctcataataagtacttttatctctatctatcatattttatatgttgcattctattataaatgctttcctcttctattagggcttttaattatgctctaattttcttgtttatattgtgcttcctctaaatctatgatactgcctctgcttgcccaaaagtatctcttgtactaatagcacttgaggttggcttgtatattactatattctcatgagcctatggtatggtgtgaccccctattaaaaaggtgtgtaacagaagaaataagggaaaatggaatagagctgcctgagtcatttacataagtcagccaagttagttagaaataattacgaatgagagatgcttgtacgcagtatatataaatggagaaatgcttatgaaggggtttttacgatattgtgaattcattgtggggagga

SEQ ID NO: 137509 - DNA, 312 bp, Glycine max
agcttcttacctccattatcaaaaagcttttcttcttgttttctctttttcgtgtggcatagcctctggatcatgggggtagcaacgttgagcgcagcggagaatgtaaagtatccgacgtcaagctttgcggtggtcggtggcggcaaacgaggtatgcagatggtgttggtttcgtcacggacgtacggatgacttccggatcaagtttgatccgttaaagcttaccgatcaacttgatctgtaagtgtattaattttggtatttgcgtgttttcgcatattgcatctggtcttcattaattttcctttt

SEQ ID NO: 137510 - DNA, 234 bp, Glycine max
taaataacgcaagattaactgccaaaggcttctcacaacaagaaggctttaactatactaaaacctatgctcttgcttctcgtctagagggcatacgaattttaacatcatattccgctcataccaatgtgagactatgtccaatggactatgaatggatccctactataattaactgctgtcaaactacacatattgtttagtgtcggactatgtgctatatttaacaagacc

SEQ ID NO: 137511 - DNA, 419 bp, Glycine max
tcacgctctgacgcaacatttggagaggttaatgaagcaacgatttgtttcgctccatgagaggttggatcaaatggagaatagagatcataatgaagaagaaaggaggagaagagggaataatggtgttcctagacaaaaccgaattgatggtattaaactcaacattcctccctttaaaggaaagaatgatccagaggcctacttggagtgagagatgaaaatagagcatgttttctcatgcaacaactatgaggaggaccaaaaggtgaagcttgccgccatgaagtttaccaactatgctctattggatcaagtggcctcgatataattaaaaatgggggggggttgaattaattactaatgtaccttgactaattaatacttattcctcttaatgttactagtatcaattacgc

SEQ ID NO: 137512 - DNA, 332 bp, Glycine max
  unsure (1)..(332): unsure at all n locations
agctaataaaacagtagtgacctatttgttttttgaatnaacactgccaaagttaagactaatcatttcaattataaacgagtcgagacatttgaaactgataatttaaatattatgtcatttatgaaaacaatatcttatctctttgcagacaattatgaatatatcaagactcaatatcattaaaaaagactaattattataacatgtgattaatataataactcaatgttatgtataatttataatgtagatttaaacaaactatgatttcactctagataagttcattgatttactaaaaataaaatgaataagctcgaatggataag

SEQ ID NO: 137513 - DNA, 465 bp, Glycine max
  unsure (1)..(465): unsure at all n locations
cttgaccaaaccccagcagtagttgtttccttagagacttacctcaacaccttgtctccgagactgaggataattgcactgtgtgccttctacagtagtgttttcttatccccatcagccatcatcttttttgagtttggcttctccatcaagtgcttctaccaggccctgttgaacaagaagggctttcatcttcaattgccatagcccaaaatcattntgccctgtgaatgtttcaacctcatacttggtcgagcccaaaatcatccacgctcaccgcaccagtttgttgtgccaagatcagatttactcacaagaaatatgagtttcttgtttgaacaataataagcaaaatgcagaaaagggatgaacaaaggagaacttcatagaaatatgatttgactagagtaaaaattcaactctaaatctcctcacagcaaccacttttatttaaactttgcaaat

SEQ ID NO: 137514 - DNA, 316 bp, Glycine max
gatcctgaagttcgcacctcttcggaccccagataactagatgattgcatcttgctactttcacttaatgagtgtgttctgggatgtcacccaatacattatttcccatctcttcttttcattttgtatcttattgcatgttagttaggatatgtagcaggagagttgtgatttatattctcatctctgatcagatatgaaacacggtggatttttagccttagtgattagacacacagatttatgtgagtctgtctcctaatcaaattcacattacaattgtagtaattatgtaagtgtttcatagtcgttccct

SEQ ID NO: 137515 - DNA, 439 bp, Glycine max
  unsure (1)..(439): unsure at all n locations
tgccgcccagctcgcccaggcgagcaagaggtgcttctctttataagcaatagccttctggaggaatcttctggagggcccaagtgggggttggttgctatttacacccccctgnttactaaatgcactcctctttctatgtttgtgtaattcttttttcgtaacgttacgaaactttatgaatttcgtaacgatacctattttccttccgcaaggttacgaatccttacggattatgtatttactctnttttagctttcgaagaagttacggaaacttacggattgcgcaaaaacacctcttttcgacttccgccacattgcggaatttcacggatcgcgcaagcctgcttcctttagatatctgagacgtctcgggactttatttatcgtgcaacaaaggacgcctagtttctcacagcggcttaccaaaggttgca

SEQ ID NO: 137516 - DNA, 357 bp, Glycine max
  unsure (1)..(357): unsure at all n locations
ccgctgcatgcaagctgatgcatattacacttttttttctttattttcatgactaggaaggatgtaagtttctaactcaacccacactctnttcttctgctccattgagtctacaaataggtatgggaggatatttgcatattttaggacccatactatgatactagatagctataatttcatctcttcgatgattttgcatgttaaacaataataccataactcttttatcgtggaattctgaatgatgaaaattgtacttctagattatatgataatagatctgtccttgatacataaactttggaatccttataacgactcatttgcattgacgaaggtaatgaaaaaaaatca

SEQ ID NO: 137517 - DNA, 473 bp, Glycine max
ctacctgttatcaatgattatatcatgtgcacccttctttgttcttaactgtgattgcattgaaccgtgagccttaagttgtaattcctatttaccttgcttaggttttaagagggcacattggcttaggacaatttcaccccataattgggggtctgttaaatggttaatgtttaaaggttagaaacaactactcacacaacaaataaataaatttaaaaaaaagagttcaaataagcgtgtgtgtgtgtgtgttgttagaacaagtcaagtgaaaggctaatgagcaagctaagtatattaaaaagactaattggttaagtctaagatttgtgctcacttagaatccaatctttggcatcctagaaaaaccaatattcattataacctagcctcattacaagccaataaaagtccttctgattcaatctgtgcatttctgactttaacacatgagatgaagtcaaagattg

SEQ ID NO: 137518 - DNA, 452 bp, Glycine max
tcgaagaggtgaaaggaatcatcacgggtcatatgcatgttcttgaaggacgagctaaaggtttgccttatgtcgaaaagaaatttgtcccaacagttaagcgagactgaagggaatatgtgggccatcatcgataagtgcaaagagaagctaaatctagcggcgactcacgagcaaaggctagaggatgagtacgccaagatatcagcagaaagggaagcatgggaaagggtaattgattcattgcaccaagaggcaacaatgtggacggaccgatttgctcttactttgaacaagagtcaagaacttccccgattgctagccaatgccaaagcaatggcggacacctactccgcccccaaggagatccacggacttctcagctattgtcagcatatgatagacttaatggaccatatgattagataccgctaggaagtttgtattatcgc

SEQ ID NO: 137519 - DNA, 388 bp, Glycine max
acacatacttgcgacaccgtcccaaaattgcgaacatgatattcatctatcaaaggggccattcaccgctcccatcgtggcgcgtgtgcaaacataaatcgcgccaagattgggacaatgtggcatgcagcagtgcttcataatacagcctaagcctaaggccttgccatacaaattctcgacgcaataagcaatgatcatacctgacaaaactgcctcacaataatgacgtgtatacactatctggtgctctaaaagatgaagaatactcgtcatagtgaatcaacagacattaatgctaggctacttgcttggcggagtgaatcgaaacacgcaaatcgggaacttgacgctatcgagaacagcacatgggatcactaaccccaat

SEQ ID NO: 137520 - DNA, 463 bp, Glycine max
  unsure (1)..(463): unsure at all n locations
ngtagaagtgattggaatagtgttatcgaaactatggttttgcttntcagactatatgcttgatagtcataacttgtattagctagcctaaaattgctcaaccagacgaatgtatgaggtgcttaaattaaggttaacaattgcaaatgttgtgacacacaattcctgttgggcaaagtgtcaagattacaccaaaatggctggctcgttctgatgtcattgtaaagcatataagagcatgctatgggttagttatataaccaatgaagtaaaatagcacacacgtagaagttgtaagtttggtcaaagaatataacaatccagcaattattctatgcaattgaatatacaaacaagttagacaagagttatactttcaactctatgacatgcatgcttgatgcttctattttatcacagggatggatggatctcttgtatggtgcagcataaagaatatgga

SEQ ID NO: 137521 - DNA, 424 bp, Glycine max
agcttgcattcatgccatgtgccatggtgttttcttcacctggcgctgaaatgttcttaatctgaatcatagcaatatgttggggttcagagaaaatattacgaagatgttatcaactattaagagcaatgtgttagtaagcaatgtatggctttagtaggaccgatatattcaaaagaaacaccattccaaaattttaatgatgtttcttgagaaagagaataatctggcctgttatgtgtgagcaaggactgtgataagatgcttatttttaagttgacagattttgtggctaataagtacggttgcattggtgtgattagtgcaacagaaatgatggaacttaaagaaatcttacagataattctattaattatttagccatttaggtaatacattatttatgaactgccaagttaaatat

SEQ ID NO: 137522 - DNA, 458 bp, Glycine max
  unsure (1)..(458): unsure at all n locations
tgaaattcttctctgaaatacccttctttctcgcttcatttgatgaagcacctcttccagggaccgaaaatcgagggaagaggcgtggctttcaatgagggaatagaaagacaaatcgcccaatttgtaagaacccatttgggtacctgatttgaagatntcagatgaagggtggggtttgtgggaagaggaagaataagaggggagtgtaattaaggtttgggagaaatagcgatggagagttgttcgaagaaggtttgtgggaaatgatgagtgctttggcatgacatggatcatctcggaaaaaaaaaaagtggggttttgaggtaatgggcagtgtcactgactcagtgagttgagtttatagttttgagaatgttaatgttgtcttgtccgagatggaggcgattgtcttctcaagtatgtgcattttcatggagacgatgactgtgagtgac

SEQ ID NO: 137523 - DNA, 273 bp, Glycine max
agagcccaccgaacagacgcgaagaaaggcgccaaaacagaacagccaaaaaaaccgagaatgacaccggaccgcagaaaagaaaaagagagggagagaacaacacacaagcagaaaagccacgaaaacaaaaaaatactaaataaaatcgagcgacggtaggccaggagagtcccatgaatgaaaggacgaacaacgcaaaggaaacaaggcgaaactaacgcaaaaccaagggggggtcgcaaagtaacataaaaccaggagaagaccaac

SEQ ID NO: 137524 - DNA, 457 bp, Glycine max
  unsure (1)..(457): unsure at all n locations
aagagatacaatctactctcggatttgcatttttaaacatctttgtatctatctttcgtctgctccctgcctganaacatgcatgtatagcctggtaattggtcaatgtctttgctaaagtttatctgggctgttgactccaagcttttctaatttattcaataagatgcatgaataatttaatcataaatcataaattccatacatgatggaattattcatgtatcttattgaatatatagatcttatggttatctcatataattagttaattaactggtgattattttctgaccaaacctggtgattatttcatacgtttacttaattaattgatattgtctcatatcttatttattaagttctcataatggagatgaattctatacaattcatgtttgagacacaggatgcattgtttagtagcatttactttgtgatctgtgtctcactttgt

SEQ ID NO: 137525 - DNA, 447 bp, Glycine max
agcttgaagaggatgctctaatggaggattttaattagagaatgagggatcaccaaattgaatgaattaaagagggagagaattggaactttgaagtgtgtctcataagactttcattcatcaaagatacaacaagtgttacacatgcttctatttatagactatgcagcttccttgagaagctttcttgagaaaacttccttgaaaagcttctatgagaaaacttccttgagaagctagagcttagctacacacacccctctaataactaatctcaccttctcgtaaagcttcctttagaagaatctaaagatgcttgagcttatctacacaaacctttcttatagctaagggctccttctcgagatgatatgctaaagcttatcttcatccccactattatatttgacttcacccctgacgaactcattaaaagtcataaagtcc

SEQ ID NO: 137526 - DNA, 442 bp, Glycine max
tgtagaatggctagacatgatacatgtcatggtttggtttggttattgataaaagggatgccccacattatttccatgacacaaatgcaaaaatgatgatgtggaaatgttatgcaaaactggtcatgcatgcacctatgtggacgctcaagtgtcacatttttatggtcatctgatgctacggctcaagattcattttctctattttaaatcaacccaatgtttccaaaatatgttcttttatcaaattgtgcattcatccgagtccatttcgggcgtccgggaaaattttcacagcattcacccttcatgtgtacacacacattttccaaaaattagtgaattctttcagagaataagtggatatcatctcttctcaaaagcgtgttggtttttcagctagaaaacttattactcttctttttttccttttttatattat

SEQ ID NO: 137527 - DNA, 427 bp, Glycine max
  unsure (1)..(427): unsure at all n locations
agcnnttgaaaaatgggctatgaactcttttcacattcatttaagttcttgtgaagtttagaaatactctgaaaacactttaaatatcttcgaagattatactaagtgttgagatcgcatacttgtctataagatgcttacatagttagtcatcgtgcacacacaaacaatacatctttctgatttgtgtagagctagcaatagcttgatgagacaaagaatattgggttatatcaagcttggggtatagcctgatttgtaagacgcgaaagtggtcgtgatagaatacttgttactcttgagaagtgagtgaaacttatacgtagtcttagtggtagagaagaaccaatataatcttttgtgtctaatctatctacatttgtcttatgctttaactaagcctagatttgaatctgattatgtattt

SEQ ID NO: 137528 - DNA, 472 bp, Glycine max
  unsure (1)..(472): unsure at all n locations
tcagctttatggaggctgaatctttgagcttcaattatgttcttcaatggtgattntcaaccatggagatgcggcggaagataaaggagaagaagtgagaggaggcgtcatccactaaggaatacgccatggaaggaggagcttcaccaccaagagagtgccttggataagaagcttagagaggaagcttcaatggaggaaaagaatgagagagagatgggggcatgaaattaaaggagaaaaagagggagagaagttgaactttgaagtatgcctcacaagtttcacattcatcaaatttatgacaagttttacacatgtttctatttattacctaggtcactaactaaatgaaagcctccttgataatcttccttgggaagcttccttgagaaacttccttgagaagttagaacttagctacacacacctttctaatagctaagttcacctccttgagaagctttcttga

SEQ ID NO: 137529 - DNA, 450 bp, Glycine max
atgctgagcttggttcaaccccataacttaaggaatgtgaaatttgatcgccaatactttgacaacatttcatggaggtgaaagactcgggaatacgtatgctatgcatggaaaatgtaattatgagattgagatgcccgtagaaacatcatttcctagttaaccacgcattaggtaccatgcccaatcatcttgttttgttttttttttttttttgagaaatgggtttatgatcccaacacatgcaactaagaatgcagggccgaatttcatgcttcctttttttatttttgcttcgtaaaggaaaacgccaggatcatgcatgagcaaacatgagaacaaaaggtatgcagtttgtagaacaaaaagtatgttgaatgcatatgcatgatgatgcaatgactcatgcaaaatgtgatgttggaatatgataatggacaaatgcaggaa

SEQ ID NO: 137530 - DNA, 458 bp, Glycine max
  unsure (1)..(458): unsure at all n locations
ngaaccttgaatcttgattcttgattcttganatcaaatttcctcttgaaccttgaagtgttcttgattcaatcttgaacatcttgaactcattctttgattcttgaaatcatcatctttgttatcatgaattgttcttgatctttgagctttttgtcatcacctttgttatcatcaaaacttctttgaatcaatcttgatacatcatgaagcttgcttctacacattggagggtacatcctttatgatacaagtagagggtacatctacttgggttgttgtaactgagaacaagagagggtacatctcttgtggatcaattcaagtggagggtacatctcttgtggatcagttcaagtggagggtacatccacttggttgttcaaagagaacaagggagggtacatcccttgtggatctttgcttgtaaaggtttttacaaggttgaaagaaatctc

SEQ ID NO: 137531 - DNA, 367 bp, Glycine max
ggatccttaagtcacctgcggcatgcaagcttcttagtctcagatgatgcatcttttttgtagctacctcatgcactcctctaatgactatggcatcatttctggcgctaaactgctaagagttggaagccatcttctcaattaaatatttggcctcatcaggagtcatgtctcccagggctccaccactgacagcatctatcatacttctctccatattactgagtccttcataaaaatattggagaagaagctgctccgaaatctgatggtgagggcaactggcacatagttttttaaatcttctccagaactcatacaggctctctccaatgagttgtctaatacctgaaatatcctttctgat

SEQ ID NO: 137532 - DNA, 468 bp, Glycine max
tcattgcctaacaatccaacttacgacaacatgttcttatagactcagcataaggatgcacaggtcaaagttgagtatgtgaaaagattgtatgaccaagtgaaggtgcaaattgcaaagaagaatgaaagttgtactaagcaagccaacaagaaaaggaaggaagtggtacttgaacctggtgatgatcctggacatttgagggcaaatgttttccaagaaggagcgaatgatgagaatcttgaaattggccaaatacaggctaaaggcctaagtggagaagggcgaaggcccaagtggagaaggataaagcccccgagtggagaaggatgaaggcccaagtggagaaggatgaaggcccaagtggagaaggatgaaggcccagagacagagacactatcaagactattaattgttgctgaaggcccagattaatttgaaggcccgagttaaatatgttttttagta

SEQ ID NO: 137533 - DNA, 432 bp, Glycine max
accgcgaccttaagtcaccgcagctgcagcttacctatagtcagtgatttttcatatcgtagccaaagtgctcatcgataatggttccaatttgaacgtgatgcctaagagaactttggagaaattaccattcaatgccttccacttaaagccaagttcaatggtggttcgtgccttcgaccgcacccgccgagaggttaggggagagatcgatctcccagtacagataggccctcacacttgtcaagtcaccttccaaataatggatatcaaccccccctacagctgtctgttggggcgcccatggatccactcagtgggggttgttccctctacactccaccaaaagttgaaattcgtagtggaggggcatttggtcatcgtgtatgcgaagaagacatttggtgagctgcccgtctctatgcctatgtg

SEQ ID NO: 137534 - DNA, 414 bp, Glycine max
cctcatcgtccctcacagtctttagatttgggagccaatccaatccttgtgttcggactctcagccacttatgatagccgccgatgatcccattactgcttcccctaagctctctgtcctttcttcacgccgcatcccatgccttgcgaactccttggagtaccctcgcgtttgtggtcactgaaaccccatgcgatgaaaggcatgatgctttcatctgatggcacttctctcatggggtagccaagctgtcttatggcgaggacgggattataattaatacaaccccttgttcccatcaagagaacatttggacatccttcgcatgaagatagaatcctgattcttccttccttctagcgaggaaaccaattaacagacgcccctccatgctagccaagagttggtcccaat

SEQ ID NO: 137535 - DNA, 51 bp, Glycine max
tgcagctctaaccgatcatttaagttcttttttctctctaataaaagataa

SEQ ID NO: 137536 - DNA, 423 bp, Glycine max
  unsure (1)..(423): unsure at all n locations
tagccgaattcagatagaattgaagttggcttattcttattcttggccagcttagcggaatgaatcagcctaagatgaaggggttaggcgctaagcgcttgagactcatggcttagcgcatgaataatgatgcgcttagtgtgagacttgcgcttagcgaaaggagtatttttttataaaatattttctgagttatttttcagtcctttttccaagaaattgaaacccttatgtttaacattcaaagataggctaatatactcctatgtacagattatgcagcaagttcccaatgatctaatgcatgaaaacaaaaactacagaaattaaaactgggttgcctcccaggaagcgcttctttaacgtcattagcttgacaattntacctcactgggcgatcttatngtttggttcttactttca

SEQ ID NO: 137537 - DNA, 361 bp, Glycine max
tggctaaatatcaatacaaaaaggttcatgcgctagcgtttccgtctcgtaactgagtaaccccaatggtaatcgattagactatcaaaaacatgctgtgcttccagaaacttatgaatcaagtgatcatgatgactatccttaagcatgtagaaggtatataaactactttaagcacacacatgcctatctagaacaatcaatacaaccccacatctattaaatgtgttttggcatgtataatactaaaatcaaacctagactaatacataccaaatccttcgatctacaatctcacctttttgtgttctgactatgtcaaaccaatcctcaagcataaacaacttccatatccacatat

SEQ ID NO: 137538 - DNA, 442 bp, Glycine max
  unsure (1)..(442): unsure at all n locations
atgcacgtggaccttcttctatttgtgctgacttaccgcagcctcatatccctgttccattaccacctagagccattccgaaataaatggacgaagcggatatagagatcttacagaccttcaggaaagtagaggtgaacatacctctgctagatgccatcaagcagattccaagatatgccaagtttctaaaggagctatgcacccacaaaaggaagctcacaggcaatgaaaggattagcatgggcacaactgtgtcagcattgataggtaaatctattgctcacattctagagaaatgtaatgacccaggtactttctgtataccttgcattattgngaacaagcgattatagaatgccatgctacatctaagagcatcagttagtgtcatgcctatgtccattttcaattctgtatctctcggacctttgcaatctac

SEQ ID NO: 137539 - DNA, 376 bp, Glycine max
  unsure (1)..(376): unsure at all n locations
agcttgatcaaaacaattatcttatcttttcttccactcaaatcataaaatttctcattcaaatcattctcaaacactcatttcacacaaaacaatccactacatatcattttcaataaattcactggtcaaacacgctttttggtacaagcaaacaactcaaagtgctgaaatttaaataactaaaatttaaagaactgaaacataaaacaaactataaagcaagctaaatactgataaactaaaatattcatgctgtgcagaaattaaactaaacacaatttaaacatcctgctcatcctatggctaatcttcattaagatccagtgctggagctgctgatgaatcctgnataagctgctctggctccgtgatt

SEQ ID NO: 137540 - DNA, 471 bp, Glycine max
  unsure (1)..(471): unsure at all n locations
ctgctatcacctntaaaagtcttatccattttcagtgtttacattctggcgtccaacacattttcaaaacgtacaaaaccaaattgttcaccccttttatctcttttaccaggaatgaacaattcggagattttcccatatctcctggacacattccacatatcttttgctttataatcttcaggaaagttcgtgaagaaaaaagaggattgaccgtccccttctaaaggcatcttggaattttttccagccacatccgctttggcctcttcatcaacagtcttcttacctgtatgccctgattccttcttctatgagaaaatgatataattgatttcctttgataaaaatttaattttataaaaataaattaaatataaaaaatgtaatttctcttattatctttatttatgttaataaattaaaaatatgtaaccaacaaaagtaaacccaaatttttataaatatatt

SEQ ID NO: 137541 - DNA, 458 bp, Glycine max
actggatgcgttggtcaacttggtaacctatctggccttgaatcagaaatttgtacctgtcgcaagggtttgtggtttgtgctcctctgctgaccaccatacagacctttgcccttccatgcagcaacctggagcaattgagcagcctgaagcttatgttgcaaatatttacaatagacctcctcaacctcagcagcaaaatcaaccacaacagaacaattatgacctttccagcaacagatacaaccctggatggaggaatcaccctaacctcagatggtccagccctcagcaacaacagcagcctgctccttccttccaaaatgctgctggcccaagcagaccatacattcctccaccaatccaacaacagcaacaaccccagaaacaaccaacagttgaggcccctccacaaccttccctcgaagaacttgtgaggcaaatgactatgcagaaca

SEQ ID NO: 137542 - DNA, 291 bp, Glycine max
agcagcagctaagattgggaaccctttttttttttccctcgcctcaaattcctaatttttagaggaaatgaccaaaccccttcccgtaccaccctattactccgactccccctatccaaatctttttctacacggacccatcatctttcatcttcccacatcaacacacacaatccacatacaactttcaaccatactaacacacaagccataactctgccaaaccccacctaatccagtttttccttatgacccaaaaccacacttcgtccggaaatacccgtggatcta

SEQ ID NO: 137543 - DNA, 446 bp, Glycine max
  unsure (1)..(446): unsure at all n locations
aactatataacagcaccaaggttctattttatggcccccccccctctctccctcacgggagactctctctctctcctctctctcttctatttttcgtttttagttatagtctctcttctctttctcttttattttcgttgtttttcaattccagttcagacttttagttttatcaataaaatttcattctctatttgattaatggaaggctaagtccgcagcgttgttttcccttgaggatcaagcacagttctctttgaggttctattattactgttaaattctgcttagnttttcctcttcactaattactttngaattgttgcttttaattcatgcatgcttagtgcttgattaattgtctctgcgcttatttacgttcatgcttaatgatcgtttatgaagtaatggtgtatgtgatgcttaatcacataatgaatgcctta

SEQ ID NO: 137544 - DNA, 393 bp, Glycine max
  unsure (1)..(393): unsure at all n locations
ctaacaacaatatcatttccatttaatctgtattgtcttgtaataaagaagtcattgatatctggcatttccgtttgggtcatcctccatatgataggatgcaagttgtgaaacaaacttatcctatgttgacttgtgataaaacctttgtttgcgatacttgccataaagcaaaacagaaaatacttccatttcccaatagtgactcctatgcttctagtcctttctcttngatacatgtagatatttggggtcctcgtaccacaactacgttgaatggacataagtattttcttaccattatggatgatcatactagatctgtttggattcttataatgaccttcaaagctcagactctaacttcattacatgcctttgctttctatgttg

SEQ ID NO: 137545 - DNA, 373 bp, Glycine max
cacctgcggcatgcaagcttgatggggaaaccccatttatttattttattaccttcagaaagcacaggctgtcatggaactttctggtcttgacgacattgaagcagccactatggcaggctatttcgtcgaaaaagggcagctaattataatgatacctgtcctctgatgataagatccgagaagaaactatgtgtgactgacaagttgtccggcctgactgaaagagcagaaacatgccttccagatggccttgagagacctcgtagggtgtagtgagcatgccctgtcgaaagatcggggaaatctgaacccaaatatttgcagcagcccatttcttaaaactattattcctgttgaataaacccgtctt

SEQ ID NO: 137546 - DNA, 396 bp, Glycine max
  unsure (1)..(396): unsure at all n locations
ggatcttaagcacctgggctgcagctgagataaaatgaaatttattttattgattanaccggcgttgctaaagttgttaaatttacagccactaaacatgaaanttgggtaattgaagttatcttataagtttccgtgtgttataccaattattatttatttatttatgggtgcccctacctgtcataatttcttgattaactgcaagatactacttcaagtcttaaccatccggttaaattaaacattacttgttaaattacatttattcaagccaatttaacggaacttgcaggttatgatatctttgggtatcttaagataactttcggtgacttgtcatgtttgcatacttcggtgctaaatattatagttatggttgattacgaaatcagt

SEQ ID NO: 137547 - DNA, 465 bp, Glycine max
  unsure (1)..(465): unsure at all n locations
aaaactcagctttataggcttgttcaataaatgaatntgaactttctttttttacaaactaagcctaattttttaatgtttaactcatttacacccctggtggtgtgactaatatttgttacaaaacctcgcattacacttatagtgatgtctcattttttaataatatttttttcatctgaatgactcaaatccaaaacttatttaaagagattaagcccaattttaatttaatcaacatgttgctatttctaatataaatttgatattatattttgaatttttatatatcacatcaataaagatgatgtcttacagtagttttaaaaatatttttataattntcttgagtttaaattaaattattatctctctaatatatccttactcaatataataaatattatatcattattaataaaacgctcactattctttcgatatatttttatgtataaagtatta

SEQ ID NO: 137548 - DNA, 372 bp, Glycine max
  unsure (1)..(372): unsure at all n locations
agcttgcctcatagaggtgcaggattgtattgtggccgaaagaactatttccgccccggagtacgacagtcaccgctttatgagcgttgtacaccagcagcgcttctaagccatcaagggatggtcgtttctccgggagcgacgcgttcagctcatggacgacgagtatactgatttccaggaggaaatagggcgccggcggtgggcaccactggttactcccatggcgaagtttgatccacaaatagtccttgagttttacgccaatgcttggccaacagaggaaggcgtgcgtgacatgagatcctgggttaggggtcagtggatcccgttctatgccgacgctatcanccagcttctgagatatccgat

SEQ ID NO: 137549 - DNA, 449 bp, Glycine max
  unsure (1)..(449): unsure at all n locations
tgcccatttctgctccaaatcgcgatttttgtgcttttcggagacgngaagcgcgtctctacgtgtggaacttcgaaatttcaagtttgggtggacttctttctctcttgattttcgngggtatggggttttgggagatatgatgggtagttttgctaagtttctgcttcatgatagctatttgtgaaggaaattgttgaaagcatgttgaacttgcccttgttggatgagttaagcttacccattcagttttagggtttttctgatgatgcttgtgatgtttatgtgctgaaatcgcttatggaaaactgttagagatgaagggtagaactaacctacggttagaaagtgagaatgtggtgttatgagtggaaaaagagtgaggctttgagagttggaaggttaaatctggattctgtgataaatggaggttgaaatgatgtaatcct

SEQ ID NO: 137550 - DNA, 252 bp, Glycine max
  unsure (1)..(252): unsure at all n locations
agcttgcttctacaagttttatactcggttcatcttcanncccgngcctncataacagtctccatgtgacctagggtccctgaaatttctttacaaccgcgtgaaaacctatgcatgacaagatccaccagggatgtaccctcccttgatctctttgaacaatcaagtggacatacccttcacttgaactgatccataaaagataaaccctctcttattctcagttaccacaacccatgtatatgctccctc

SEQ ID NO: 137551 - DNA, 455 bp, Glycine max
  unsure (1)..(455): unsure at all n locations
atggcctccgtgatagaagccatttgatcttttaatgccaataggtcggccttcatctaatcttgcactccatcttcattatccatctttctggatcgagtgttataagggtgcctttgcgcttttttagttatggtgagttccctaaagaaacaaacagtggtaagtatgccaccaaaacatgaatatgctaatgaatgatcagagcacttggatccaccttaaggccttttttagataacgtgatgagtttcagaacttctctttttataaaaaaggaacaaagcttttttctagccaagatcatacaaaagtgttacaacagaacctaacggtttctaattatatgggccatcaaatctatcatgtgttgacaggaattgattagcccgtgaatttccttgngggctgaacacacttcaacgatggcctntgctntggctagtagtcgcggg

SEQ ID NO: 137552 - DNA, 381 bp, Glycine max
  unsure (1)..(381): unsure at all n locations
agcttacctgtcagagcatatggttggtctctaatgnctcatgggatagcgttccctcaattcacacttttgggggattactatgcttatggaataattctgtttttgaagtacacagctgggtgaaaggcaacaacttcctaatgctggcaggtagatggataaaggatgatcagaggatatacatttgtaatatatatgctccttgtgacctacaagggaagagagctctgtgggaagagatgaggcatctaagaatctctcacactgatggtctctggtgtttccttggggacttcaatagcattagaagccccgaagatagattatgcacattctcaagaatgggaaatagctctgatatctctgaattcaataact

SEQ ID NO: 137553 - DNA, 467 bp, Glycine max
  unsure (1)..(467): unsure at all n locations
tgatgtgagaaaacgtggaagagtcagtcttcctactttcgtttgntgaccacagagtggtacctggagatatgtcgcgggggtcaggagaccttggggacgtcaagtgaggtgctattgcccaaaaccaagcttggctaatcccggcccaacccgggcatagtcagtcagtgagaacctgtgacgtacctaagcaggcaagctcctaacagttaaccaataaaagaataaaagaacaaagtccacgaagcaaggaggcttgtgtggcggctggccagctatttatcttgggtgttatctgaaaattaccctctggtaatcgattactattcgtgggtaatcgattacagggtttaaaaatggagacaggatgctaagtagctactggtaatcgattatcaattgtgtgtaatcgattacatagtgctacctgccactggtaatcgattaccatntatgtgtaatcg

SEQ ID NO: 137554 - DNA, 442 bp, Glycine max
agcttcttgagatgcctattggctatcttattatattgtcttggtaaagtctacaatctcattagatacatcgatattgaaataagcaatgaatcttgaggtgaagactgcatatggaaattcataatccaccatctgatgacttttcaacataatatctttaatcagtagtacccaattcatttgaatacctgatttcggcccatatatgatttgcaagtcatcgtatgtgacttgagcatgattgttggatgttggtgccacaatatacgtaatgatatagctaacattatgtcttaagctattagaccaccaacacctagtttgttccttaaaactctcgccgggtcaaagagcacacctctataatgccgcatttttgctatagccatccacagattcctctaacctacggactccacccatatctattcctactact

SEQ ID NO: 137555 - DNA, 461 bp, Glycine max
tctatttaagtccaagcccatagacaaaatatatattttatctggacaagataagataagattggatgaaatacaacctggacgaaataaaatctagatggaataaaacctggataagataagatttgataaaataaaattgtctgctctcttcaagttcaagcctaattccggattcatgcccaattgcttataattctcctgaaattaaattaaaaacacaaaattagtcaagtaggcccaaatgataaaactgcatcattaatttgacaattaaggctcatcagtaattaaaatggtgacaaaaagggttaagaaataggagaaaataatgacacatcagagggcaaacccttgaaagctaagggtagccaacggaacttttctctcttcactaatatgatggcaagcaaagagttgctcaacctttatttcccaatttaaataagactctacatcgt

SEQ ID NO: 137556 - DNA, 445 bp, Glycine max
  unsure (1)..(445): unsure at all n locations
agcttgtagttacaaaatagagatatttatttaactaaaaagcttcctttcgtatttaatcatttaattagattatgtaactactaccaactaactttaattaaagaaagttttatactctntatatatattcctcatcctatatcactacttattttcttggtatttaaaggttctaaagaataattgatcttgacaaatattatggaaaataagtgctctaattctctcacaaattatgaaatgaaaatttggattttttttaggttcaacagcaacaccaaaggtaggaaccaccatataatggcggttccattctgatttgatctcaaattttgtttcaaaaaccaacttggaaatgttaacataaaatattaaagaacttgcagacatataccatcttgctgggaatacattgtaattgcatataaaaacatacagttac

SEQ ID NO: 137557 - DNA, 473 bp, Glycine max
  unsure (1)..(473): unsure at all n locations
actcaagcttgcattgntataccgagccacctctgtcttatttacaaactatctcccagcttatccaagcaatcttctttagatccctcccgcctccccaaaggaatctccgctggatctttactaatttagctaccactgattgaggtatcctgaacaagacaagaaatatatntgaatggatgttagaatagattgaatcaatgtcactctcccctcagatgagatatgcctatgcttccaatttgagagttttctctcacattcgcgaatgatagagtcccacatcctaccccgccttggattagccctaatgggaatacccaggtagacaaaaggaaaagccatcaaactgcaattcaaatacttagctgctaggtgcctccaatgggctcatactccaaaagctctaacagaactcttatcaaaattaatcttctagcccgatgccaactcaaaagaccttagcataa

SEQ ID NO: 137558 - DNA, 456 bp, Glycine max
ttaagacaactgcagcatgcaagctccttcaatgagtgcaatgatatattgtgtcttttccttacatgacaagctcttagttttgtgccttgcacactctggaactaatttccaattagcagtggacaaatctattctaattccaaatgcagactactacaaaggtgagaagatgattgatgaagatgaagatgcacccccaacacactatgttaaagtaagaccaagaatattctgcaaatatgaagtagatgctttgcatcaaaaatgaaaaagataatggaactcacaaaccaagataatgggcgaattattttcaaaatcaaatcaatacttgaaaaccacagttaaaaaaaacttcttttccgatgctcttatcattagcttgcaataaacccatatttaatcaaaaaccattaacaccgacatcgttagttacagttctttcttactaac

SEQ ID NO: 137559 - DNA, 490 bp, Glycine max
  unsure (1)..(490): unsure at all n locations
gctttcggccttaaatctcagcttactattcaggaatagccaaggaatataccttcattatatttttcatcaaacttacctaagttgccttccccattgtttagcagaaaacacttacatccaaaaacatgaagatgagaaatgttcggttttcttcctttgtacaattcatatggagttttctttaagaatggtctaattaaagctctattcattatatagcatgcaatattaacaacttcagcccagaaatacttaggaagatttgtatcattaagcaaagttctggctatttcttctaaagatctatttttcctctcaactacttcattttattgaggggttctaggtgcaaaaaaaattacgttcaatgtcattttcatcacaaaatgattcanattccttattttcaaattctccttcatgatcactcctaataaatgcaatattgagaattttcttgttctgaattatattagcaaatttctta

SEQ ID NO: 137560 - DNA, 261 bp, Glycine max
  unsure (1)..(261): unsure at all n locations
agctttgcttaagacctgcacagttcaatatttattctggaggtggttcaaacctatgggagactntcatgcatttctagctagcacttttaaacccaagcaccaatcatcctccgattctgttcctttcagcttagaacagatagtgcacccgctccaaatgtttcacacccattcatataagcaattctatgtcatctagttcaacaggtcagataggtaatctttcactgatatcgcagcttatgctcattctaatgg

SEQ ID NO: 137561 - DNA, 404 bp, Glycine max
atccacataaggccttggttgtttgatccatcctgtattgtgatcttgactcatgaatacttacatcttcttaaaactcatcctgagattttcaattacctctcctgtgatagcatgtgttcctaccaccgatttcaactctttattactgacaaagattgcggtgcttctaacactaactattgcagctgcacggagttagcgcctagcgttgaagctctgcaatcttgagacaatctccaggtccattgcatcatctttggctttgtccctaccacccatggatgactcaaaagctgttccgagagataaatcaacagtgttagtgtgctggggttattgatctatgactattctataaaatatattccaactttgtacttgaaaataatatgatgcacaat

SEQ ID NO: 137562 - DNA, 122 bp, Glycine max
cgcacgtgtatggcgggcccaacaccgatgaaactattgtgtatatactctcgtcatgaccagtgcatttgccaactgcaattcttcaaggcctaaccgcccgaattgtcttttagcctctc

SEQ ID NO: 137563 - DNA, 361 bp, Glycine max
  unsure (1)..(361): unsure at all n locations
agcttcatccaactcaagcatggttatattacattntatacgaaacaccaaagatgtctgaaagcttttcacccttattgatgattgaaaaaatcttttaatggaagtcatgagaatgaaggccccccataaccattaactggaaaccaagttcatgatcgggtaaaggacaactgtaaccgtgtttgggaagtcatataagaagacatcatctcccaacaacatgtggaagagacgctcaatattctttgatcttccatactggtctgatctacatgtgcatcattgtctagatgttatgcatgtggagaaaaatgtgtgtgatagtttaataggtactctccttaacattaaaggggtg

SEQ ID NO: 137564 - DNA, 486 bp, Glycine max
gcggaccttgaaactctgcttctgatgatgaatcaagttgattcaagtagtcttgcatttgacaaagatgatgacaaaaggcccaaagaatgatttcaagattgagtcaacaagttcaagatcaagtttaatttcaagtttcatgagaagaaatcaagaagattcacgaatcaagagaagtttgatttcaagattcaagagaagatgaattcaagattgaaaaggagaaatcaagaagacttcacaagggaagtattgaaaagatttttcaaaaaacaaacatagcacaattttgttttttcaaaagagtttttctcaaaattttctaagttaccagagtttttactctctggtaatcgattaccagtttcctataatcgattaccagtggcaaagtttgatttcaaaagttttcaactaaatttgcaacgttccaattgatttcaaaatggcgtaatcaattacaagatattggttatcgattac

SEQ ID NO: 137565 - DNA, 372 bp, Glycine max
  unsure (1)..(372): unsure at all n locations
tgagatactgacctatgtatgcttcaatngcagccacaagagttaagaagagagctgctatacaggttgaaacatgcataaaaattactngaataagcatatgttgcctttgaaaaccattcagaaataaatcaacggtacaatgggaatgaagattaatctaccataaggaacaagaaaacaattcaacagggacatgtcgttgacagatgaagaagatgaataccatcttcccaaagtggctgaggcgcttgctacctgcacattcctgagagagatgaatataactatattccctgcggtatctattattaatgataaaagtaaactcaccagggagcaatccactttaaaaaaaacgaccctaaaaaa

SEQ ID NO: 137566 - DNA, 455 bp, Glycine max
  unsure (1)..(455): unsure at all n locations
tatccanatactgttttagatattcgtgaatgatttcttgttnacgcggacagtctaatacagcgacaaaatctccctcccagtgataatagtcggaaatctgtggctaaattacatgatgattttccgacttatcaccttgatgacaaggtgagtcttttatgcgggggtattgataagcataagccacacatcaccaatgtgtacacccagatacaacgagcaagagaagcattaaccatggaccaccaccagcaacagggcgcacaacacccaaggggtgcaaaccacccaacagttacgactcacccaaaggatgcaaggtcaaaagatgtgaatcaaggggacatgatccttgggaacagttacaaccaaccgttatgatccggccaatgggtgcaaggataagagatgtgaatcaaggggacatgacccttgggaacagtcactaccaa

SEQ ID NO: 137567 - DNA, 387 bp, Glycine max
  unsure (1)..(387): unsure at all n locations
agcttctggtgggacatctagacttgctttccaatctgacattcaccacagattctgccttcttctattttcagattgggaatgcctctaacatctcccttgtcaatgattttcttcatgcctcttaagtgcagatgtccaaatctttgatgccatatattgacttcatcttctntggagactacacatgtggaggagtaactggtttcttgaggtgtccataggtaacaagtgctctttgatctgcgtgccttcattaggacttcactcttctcatttgtcaccacgcatttctgacattgtgaagttacattgagttcttcatcacacaactgactgatgctgatcaagttcgcagtcagttccttcaccaccagtatctttgtc

SEQ ID NO: 137568 - DNA, 474 bp, Glycine max
cttaaactagctgtgggcaaagggctagatcattataattttttttgcctcttggccaggttgtccttagtaggaagtctatcccataacaacctccagacaaaggatcccatatcagccactatatgatttctttgagaggaaattgagtacaaatctggaaattgatctttgagtggaattccatcctcagcccaggcatcttcccagaacaaaatttgatcacccctacccatcttccagcagaattgtttagagacggcagtcatattgtgatcttgattgagtgcctttaggtcagcccaccaggtggagaaatgttgtttgtgaggcccctgatccaatcctctccagccctgatatttagaaatcaggatcctattccacagctgttccggttggtgaaacatgtaccatttccacttgattagtagagaattatttaaaattctaaaatctttgatcctcaatcct

SEQ ID NO: 137569 - DNA, 426 bp, Glycine max
  unsure (1)..(426): unsure at all n locations
agcttgatcaaaacatacatctacttattctattccacttaaatcatatagttgctcattcaaatcattcgcaaacactcatttcatacaaaacaatccagtgcatatcaaattcaaccagttcactgttcaaacaagctttttgtacaagcaatcaactcaaagtactgaaatttaaataattgaaatgtaaagaactgaaacataaaaactaaaagttaaatgactgaacataaatcataaaataacttaaataaactaaaatgttcaaaatgcacaagattaaatgtcctgctcctgtgaatgctcttgtgcatgctcattgagatccaacaatagagcagctggtgaattctgagggatatgttgctctaactcanatgctggtgaagattgcatggattcatcaagtatgggtactgggga

SEQ ID NO: 137570 - DNA, 471 bp, Glycine max
  unsure (1)..(471): unsure at all n locations
cttttgcagtagaaacatgggaccaactcattntattttttttagaaagtcgtatctagtcaaggtctgagagaccatacaagtttcctaacgatttctaattatgtgggccattaagtctatcatatgctgacaatagccgagaagcccatgaatctcttcggggacggagtaggtgtccgccatcgccttggccttggctaacaagcggggaagttcttgactcccgttcaaggtaagagcaaaccgatccatccacatggttgcctcttggggtaaagagtcgatcacccttcctctagcctctttttcctcgtatacttgggcatactagttcgcgatcctatgctcgtaggccgtggctagacctaactcttcttggtacttggcgatgatagctagcatgttggtctccgtctcgcataaacgttgagacaagcttcttttggaccttgaacaggcaactaactc

SEQ ID NO: 137571 - DNA, 133 bp, Glycine max
ctctagactgaaacgatgcacaatgaacattacctacctgacatgcctcatattagaagctcacctatgatgctagaatgtatcatgcatgcatggctagacatattgaagagggagcacatagttgaactat

SEQ ID NO: 137572 - DNA, 254 bp, Glycine max
agcttattctacttacaaaatcgtgtgtttattcttgaacaaagtatgaagaccacctctctgattttaccaatttgataatcgagaacaaaggctcaagattcttctatggtctctaagatgttttgctatgttgacaaatattacatgtaactctaaagctaacttgttatctgtttaaataaataaacctcttctcaaccttgcattttgtaatggaagaaaacaaatcaaaatatgcgatgatatagaaa

SEQ ID NO: 137573 - DNA, 459 bp, Glycine max
  unsure (1)..(459): unsure at all n locations
tacccncactattacccacaaccacccaccatatctatcttgttaagaaaatgacatcggcagacatgcagttgagaagagaacggggcctatgctttacttgtgatgacaagttttcccctagccatcgttgacctaataagcaatattttgttccacagtgggaagaagaggatgaacctgcattacaaccatatccaccagacgatgttgagacagctggtgaccccagtttgcaagatcatcatttgtcttataatgctttaaaaggctcatcatgtcttgggacaatgaagtttcaaggatcaatacatggattgcgagtgtagattctactagatagtgggagttcagataacttcctccagcctagactatctcaatgcctgaagttacctgtagaaccaagtcctaatctgcaggtttggttgaaatggaaatgccttgactgctgaatga

SEQ ID NO: 137574 - DNA, 357 bp, Glycine max
  unsure (1)..(357): unsure at all n locations
agcttaagtgtctcttatgatccatttatagacttgangttatctggagcacgtgccataattctgcaacaacaacatgatcgataaactttgaatagaaatgcacatgggagaatcaaagaaggtgcagcacggcagcaagacatatggcataaaacaaaggctagcgagcaaggtagctggcaaaaaactaacggcaaaacgggaggggtcaaataggcatttcaatggcctgcttttgttacttacacatccaataaatgatccaagaaatggccaatcatggccacgacaaaccgaaaagtntattgatcagtcagaaacaaaacatgaagttggaaatgtggtgacaatgac

SEQ ID NO: 137575 - DNA, 395 bp, Glycine max
tttctcaccatgtaaaatgggtcattttaaggtccaacgccttaaaaggacctccttccaagtaaaaagaatcgcttacttcgccctttagaaagaactacataggtctgatttcctctttgatggagggtacgtaggagcaagagccctgcttttgttgacctcaaaaataaaaaagaaataaaagtttaggtacacaatttcacacaattctaaattaaggctgttgtcctttgggataaacgtcagagatgctaatacctaactcaaacgtaaatacaactcccgaatctggaataatcttcatgaccggtttcctttggtttttccgacgttttcaacaaataaacgttggtggcgactccgcgcatttcctcctttggaagacgcaccct

SEQ ID NO: 137576 - DNA, 315 bp, Glycine max
tatcatcctgcttactcattgcatctctggtgcccttatccactgcttcgattatgcctcttccctttctcttactctccttcctctcctgtcattttcctccttacccctccaatgtcattactctatcattctcttaccccctccttaccctccacccaattatccacataggccatccctaatattatccacaaagcctgtctacctctctttcaatgacaaagacctccttttgcccaacctgaaaaactccccccttaaatgactttgcacaaatagcctgcagattcccccttacccggtgtatttcct

SEQ ID NO: 137577 - DNA, 447 bp, Glycine max
  unsure (1)..(447): unsure at all n locations
agctngacacttgtggcatttccatacatgaattcatcagttattctccatcgtgagccaaaaatatccatcttttagaatatttcgggccttggcatgcccattggcatgggtgacaaatgagccttcatgcacctcccttagtatctgctcaacttcacttgcatccatgcatcggagtaaaaccatatcatggtttcttttgtatagcacgtccctattcaaaaataagttagccaccaacctccgtagtgttctcttgtcattctcaaaggccccatgtgggtactctttgtccttaatatatctctggatattgaaataccaaggtttgccatcattttcctcctatatcaaacaacagtgagcaggctcactgtgacatctaatntctatgcatggcaagtccccatgaaggctcacctggaacatatatgacaaagtagc

SEQ ID NO: 137578 - DNA, 472 bp, Glycine max
  unsure (1)..(472): unsure at all n locations
tgttgttctcgctaagtctatgcctcgcgctaagtgcttgatacgtgctaagcacgccccttcatcaaatttccaatttgcttctttgggctttactttactcattaaacatcataaattcatcaacttttaatattttagacacaaaaacttaaatgatgttaaaataatagttatttgcaccaaaaggaagaaatatgagaaaaaaaattaccaatatctatataatttaatcacagaacatacctataaatagtcgttacagttacaagtattaaattaattttttataccaatacatttttatgtataaagtatccttaacagatacataaacttattatatacctcaatcaatatcatataataaaaaggtacaaataagaaaatcctaccatatgtaaaaaaaagggatgaaaaattaaaattttatcttanacaagaaactntaaaaaagaaatctactaaatat

SEQ ID NO: 137579 - DNA, 455 bp, Glycine max
  unsure (1)..(455): unsure at all n locations
agcttccttacccgccttagataagtttttctattatganaaattcttgattggactgatttctatggaataaatttaacggtctaactcccattgaaccgatgctttactcgtgtaaatttgcggtatcatggttaatgctactgtgttcaattcttataaataaaaaaaatataacaaacttcataatttttttttaaagaatgttgaatttaccaatgtatctatcttttgtatagtcattacattgccacccctaatataatagtgttaagctatcatttgacaattaaaaatatctatattaaattctaattcatttttagaaaaatttgaaatcgttcttgatggctaagttatcataatagagagaaattttatcccatgacactgtgctaggtcggactctcttgacacgctaatgtggagtcgtgcactccatgtcaatcgtctat

SEQ ID NO: 137580 - DNA, 475 bp, Glycine max
  unsure (1)..(475): unsure at all n locations
tatgagaccaanacatgacanagaacgtgtccaagaatctatttctcaagctaatctagtaaatcttgacaaaacacacacgaattatacagaaatacttgtcacaacatgggagtaaaacccctcaaacaatttcacataataatatcaaaatcaaaggaatcaaaatcatatgcgcaaaaacacgaaaacaccaagagcactcaattttatcaaccaattcgcattaggacatcaattggtctgtcaaaaataaaaatctcatgattataatcataaaggcagaattagaatatggtaagcatcccaaaataaaccccaaaataaactcatcccttacctctaagtgggctcacatgtgtagtccgacaatgatagtggtatctctatcaattccctaagattctccaagcttctcctctaattcctctgctaaggcttccaagcgttagagaaaaggagaanggattggagc

SEQ ID NO: 137581 - DNA, 396 bp, Glycine max
agcttataagcaacatcacccacacgatttatttctttatagggaccaaaatatctatgattgatcttagcattggccctctgtgcaacaaaaacttatccggtagaatgaagcttgacctatacaaggttcccaatggctaagtgtccttttaaactgtgcttatcaacaagatgctttatattattctgagcttgctataaatgaaactgtaaaactctaagacattttctccctcttgctaaggctgcaatccaccaaagaaaccttggattcaccaataagctaattgttcgcatactgttactacttgttttgtggatgtgagatctaaccggctagtgcaccaggtcatcaagtaaatcattataaaggtgttgaaccgattttgaactt

SEQ ID NO: 137582 - DNA, 478 bp, Glycine max
  unsure (1)..(478): unsure at all n locations
gacacaatactcaagctaggcggattatggggcacccgccatgtgtgagactatgtgtgtttcgggcgatggcacaaatcaactctcccacttccacaagtcaaacataaacacaccatccccgtttgctcacctttcaactgagctcacgcactcctacgtagcccttattcgtgttcctctcagcaccgggtccgtatcaacccctccaagcttccacaatatgcaagcaattcaatttcatttatcatgaagctacccttagccaagacaacagagtagaggcagaaaactctgtcgcgaacacattctaataccacagcttttcttactcatataccccaggaacattgtcttgggtccaattcaattgaccgtggatcaccttgaaaaatntactggagggttctagcacataaatctacattttaaccgctgagatctgctagagaatacctggaacccgatatgtactaat

SEQ ID NO: 137583 - DNA, 371 bp, Glycine max
  unsure (1)..(371): unsure at all n locations
agcttgtanggttaaagagtcatgattgttatgtgctcatgcaacaattgttagccgnggctatacgagacatcttgccaaacaaagtcaggttagccataactcgcttgtgctttttctttcatgccatatgtagcaaagtcattaatcctgtcaaatttgatgagatggaaaatgaggccgcaattatattgtgtcagttggagatgtattctccccctgctttctttgacatcatgattcacttgattgtgcatctggtcacagaaatcaaatggtgtggtcctcgttatttgcggtggatgtacccggttgagcgatacatgaagatcttcatagggtatactaagaatctatttctgccaacagca

SEQ ID NO: 137584 - DNA, 468 bp, Glycine max
tgtacaataaagttacgactgctaattaatacctatttagctttcgaaacttgatgtttactcggcatatatccatctttagaataaaaaattaaaatctcttaatccataaatggtatggcatgtgcaccgtttgaaacgagatcatatttaaattgtatgtaagttacaatgttgaataaaaaaaaaattattagtaaaaatgccatcggaagaatttgatgaaaatacgttaaggtaaaagattttatacaattaagtaattgaaaataaacttttgtgtgaattttaaagtactcccttcaatgtttattataaggttgaaattaaaataatagcttagtttaatagatatacattgttaagggtaaagaatttatacaattaattcatggagaataagctttggtgtgaatattaaacttctccatcatgtgtttattataatgtccaaattaaaagaatcac

SEQ ID NO: 137585 - DNA, 324 bp, Glycine max
  unsure (1)..(324): unsure at all n locations
aactctttaccttcttgtttttcttcatgcaatgcttcccattttcatactttgttnacacttaattntctgatcccaatctcgttagctttctatcaacacaaaatgagcgccatctctttcagtttcacccatttgcacagttggaaaaatcccaaggtactctatatatatatatatatatatatgtaatcctaatgttgttttgtaaaatgttgtttttgatgccatacaatgtttcgttagtaattattagcatgcaggacacgattatgtnttgattctgttactttattcttattctctttttggagggtaaatgtg

SEQ ID NO: 137586 - DNA, 468 bp, Glycine max
ctttatttatgaacaccatggacagaccagaatatgtttttcaacagacatggcaatggatagcaaatgatatcatattcaatcatagaaaacaaggtgattttatatattctaaataaatattgtttactcataatcattatgtttattattttactaatcacaggtattcgccttactcaaaaggaaacaattcatttatgcttaactgagattgagaatatgctacaagccaacagaaggagcttgcgagattttccatccatgccatacccaataggatatgcacgaaaccaagggtgccaagtattgtgcaacaaagggtgccaagtatctcgaagcggccagtcaaaggttgtatatcatcaaataataatccccggacgaaattagggtatgacagttgcccctctttacttacctctcatcggagataagaaggaaagcaagataagacactgatttcgt

SEQ ID NO: 137587 - DNA, 449 bp, Glycine max
  unsure (1)..(449): unsure at all n locations
agctngcccagagaatgagcccactgatgaaatgcttaccacctcataagactggagagcggtttctaatgactcctctgcggcttccacataaggcatagaggatgggcagctcaccaagatgtcttcctcgcctgatacgatgaccagatgcccttccactacgaatttcaacttttggtggagtgtagagggaacaactcccactgagtggatccacgggcgccccaatagacagctgtagggggggttaatatccattatttggaaggtgacttgataggtgtgagggcctatctgtactgggagatcgatctctcccctaacctctcggcgagtgccgtcgaaggcacgaaccaccattgaactcggctttaagtgggaagcatcaaatggtaatttctccaagagctctttgcatcacgttaactggaccatatcgtgacact

SEQ ID NO: 137588 - DNA, 474 bp, Glycine max
tctcagcttatgtgtcatagtatcttgcagttgcacaaatatgtcatagaaagtagaggctatctgaaggaaattcttctatcaataaagaagttaggtccaactgcacttacagtggtagagcaagacacaaaccataatggccctttcttccttgggagatttttggaatcactgcactattactcggccatatttgattctcttgaggcaagtatgacaagaaatagtcaacacaggatgaaaatagagagattacattttgcagaggaaattcagaacgttgtagcttatgagggtccagatagaatagaaagacatgaaagggtagatcaatggagaaggcaattaggccgagcaggatttcaggtaatgccactgaagtgcactagtcaagttagaatgatgctttctgtttatgactgtgacggatatacattgtcctatgagaaaggaaatcttttacttgggtgg

SEQ ID NO: 137589 - DNA, 401 bp, Glycine max
  unsure (1)..(401): unsure at all n locations
agcttggatttgcttttagtatggtatttatatcttcctagatcgagccgctcccagtccccctcattaagaactanctcctgtcttcctctattgccgatatgtgaatacacctttgtttcgttatctatgtgggtcttaaccctctgatgctacacttttacaaacaataacctataattcccttctttatgtataaaagaagagtcaagtgggaaggggatgatggttaaaggggatacgggattgaacccatatgacaacctctataggagattgccagatggttcttcgatcccccctgttgtaggcaaattcttcttgaggaagatactcattccaagacttatggttgcctttcagaagagcccttacaagggtggatgaaaacctattcacta

SEQ ID NO: 137590 - DNA, 476 bp, Glycine max
ggacactatgaaactcagctgtatggtaaagcctcacgatggtcacatgctcattcttcgattgctagacgaggctatacgagacatcttgcctaacatagatccgttagccatcactcgcctgcgctttatcttccatgctatatgtaacaaagtcaatgttcttgtgaagtgagatgagctggtaaatacggccgcatatatactgtgccagttggagatgtatatgacccctgctcactatgacatcatgattcacttgattgcgcatctggtcagagaaatcaaacgatgtggtcctgtctatctacggcggatagacccggttgtgctatacatgaaaatcttgaaaggggatacagacaatgtatgtcgtccacaagcatcgattgttgagaggtacattgcgaaagaagccatggaatcttgacagaagacagcgagaacgctaaacctgtgggcccttctgagtctcg

SEQ ID NO: 137591 - DNA, 381 bp, Glycine max
  unsure (1)..(381): unsure at all n locations
agctgaatgaacctggcataaatgtataatatataaataaaaactagctttagtaccattaatntaaacatgtgatgttacatgcctttctagaaggaatgaaaagatataccttagcttgacggacatgatatataagtatatatagtagagtcatcaaagcaaataccaaatatattatctttgggatagtaggcaagagatgttactataggtggtggagacattatatttgtcaaagtctgcgtaaggcaaatgtgtgacatacattaagttaaatataaaattaacatcattttttttaacaataacattaggttaaatataataacaaaaacatcattgtaagtagcaaaataaaagcaacaagcgtgatctcaa

SEQ ID NO: 137592 - DNA, 466 bp, Glycine max
  unsure (1)..(466): unsure at all n locations
ntaanaattgaattaaaaacgttcagaaattgctggttatcgattaccatatatgtgtaatcgattacacagtgcaaattttgaattcaaattttaatagctgttgtaaatcagttttggccactggtaatcgattacatcctctggtaatcgattaccagagagtaaatttgttgaaaaatactttttaacttaaaattcttggccaaacattttgctacttcaattggaattcccttcctatttaatataccctttctaagactctaaagactgtcttgatcatccatcttgaatatctttaatttctttgtcttgaataaagctctgagacgcatgtgatcctttggcatcatcaaaacatcagcttgatcctttgtctacaatctccccctttttgatgatgacaatccctganatcaagacaagctatatacaagatgatagcacgttcacacaaccctta

SEQ ID NO: 137593 - DNA, 458 bp, Glycine max
agcttccttaagaagaatccttataaatctatagcttagctacacatacctctctaatggctaagctcacctccttgagatgagaagttagggcttagctacacaccccctataatagctaagctcacccccatgacagaaaacataaaaatacaaaaaaatagtccttattacaaaaactactcaaaatgccccgagatacaaggctaaaaccctatactactagaatgggcaaaatacaaggcccagacgaaggaaaaacctattctaatatttacaaagataagcgggctcatacttagcccatgggctcgaaatctaccctaaggctcatgagaaccctagggccgtcccttggatctctagcccaatctacttggagtcttctacctaatgcccttgcgaggtaggattgcatcaatatcctccaagggtctcattttctcattcttatcatt

SEQ ID NO: 137594 - DNA, 464 bp, Glycine max
  unsure (1)..(464): unsure at all n locations
gtcatacctcacaaaatatatgtatgtgtgtttatgtagtgaaaaataccttagatatgcatgtatgtaatttaggtagcaaacaactacctcacaaaatatatatatgtatgtttaggtagcaagataccttggatatgcatgtatatagcaaaagtacctcacaaaaatatacacatgtttaggtagcaaaatacctcatgaaaaaaaaaggaaaaaaaaacaaaaacaaacgagaaaaagaaatgaacaaatgaaaaaaaaaagagaaaaaagaaaaataagttatctagctaaaaaaccaacatgcttttgaaagagataacttccaacttttctttgaaaaaaaattcactgatcataaccaattnttgaaaaaatgtgtatacacctgaagggtgaatgctgtgaaaattttcccggacgcccgaaatggactcggatgaatgcacaaattgataaaa

SEQ ID NO: 137595 - DNA, 358 bp, Glycine max
atcacaatatgaatgaagaatgattgcccacgtgatcttgcttcgaaccacccctacaagaaccaagggagatcgttttatatgtggagatctaggacatcatgcaccataatgcaagaattgagtgataagaaatgggaatgcgtccaagcctagtactaacttggctgaaagagatgacataatcgttgtagtcaggtctcaagacaacgttgtgacaaatgtgagcaaaagggtggtaggctaaggctactggccacatctgggctaatagcaatgaagtcacctctgagctctggtgagggggatggagaaaaacaagtctaacttgatgattctaggactatacgactgctac

SEQ ID NO: 137596 - DNA, 382 bp, Glycine max
  unsure (1)..(382): unsure at all n locations
tgccgcatgcnatcnnttnggatattaatactttttcttcttatttattctcatgcntacctatacacacgcatattaataatcttgagacaagagcaggatccttttatgctatagtctaataccgagccaaatccaaagacaaacacgaattatggttagcggtaacgcggccacgatttgctgggcaatatcattgcctgctatcaggtacttagggacgggcacgaatggaggttagtccaatgataacgggtcgtcggctacattcagctccatacaagcgagaagcgctactgagaggcatccttgtattctttaaattctaacttattatagtcgcngttattttaacgagattggtggatgcctaatttaccct

SEQ ID NO: 137597 - DNA, 347 bp, Glycine max
cttgagccaagatcctgactcaccataaaccgggaccctatgttataatgtcaatcctcacccgcggcagcgagcccacgaggagaggaaatctccactcactcgatgatacacagaggagaggagatctcctatctagacaaagaatagaataggataggagatccccaatcaaagacggcgataaagacaatagagagaacacacagtccgaaccagcgaacgggagaagacgagaacagaatagacagaaaagacccacgcaaagaacgggagaagcaacaaaggacggaaagaaagaggcagatcaaagaaacagaacacatgcgcacgaaggtcctgagacc

SEQ ID NO: 137598 - DNA, 470 bp, Glycine max
  unsure (1)..(470): unsure at all n locations
cttaagtcacctgcggcatgcaagctttntagtgggatgtgagctaagttattttattcatgtctatcatggatgaaaagaaaacttacaaaggaagctaaagagaaaagaaaattgagaaaaatctgattagcatagaatgagaattatcttacaagagtgttgactattacaatttatatagttggttacaggagtagttaacttgtaactaactaagataactctagttacaatgtgatcaacctgaattaattatgataaaaaataatatctatgttaggatccccctcccccctcaagttaggaatgaatattggacattcctagcttggaatacaaaaatagaagatcaccaagcagcaaaaccttagtatatatgtgtgcaagttaattagcagaggtgacacgaagcaatttcacagttcctttctgcatcttcttccgaactagatgacaatcaatctcaa

SEQ ID NO: 137599 - DNA, 460 bp, Glycine max
tctcatgtgatctaacagagaatgagcatgcaacctattttattcaagtcacacccacggaactctggcacaagagacttggtcattgccatcttgaaagaatgctaaacatgaaaaaaaggacatgtcaaaaggtctaccaatactttctgatagtttgccaaactataatgcttgtcaatttggtaaacaaaatagaaaatcattccccaaattagcttggagaacctctcaaaagttgcagctaattcacactgatgtggcaggacctcaaagaacaccatcactacaaggtagtctctactttattcttttcatagatgactttacaagaatgtgctggattttttttcttgaaattcaagcatgaagtggctgaagtatttgtgaagttcaagaaaatggtggaaactcatagtgactgcaagattcaatgaaaatgggaaagagtatacatcaa

SEQ ID NO: 137600 - DNA, 459 bp, Glycine max
  unsure (1)..(459): unsure at all n locations
agcttctacatgtctagggttntctagttatataaatgtccaagttccaaagagtttgagagattttgttgtgtgaagacctgcagagaatcgagcttgaagaggaagccgtcctaagagcttgagatgagtttgtgagtgattgtgaggttctagaggtggaggagaaatcctcaccacttgtatttcttcaatccttcatctttctcttctatttngtgtaaaggaagtttcccagttatggagagctaaatcctctgttggttcttccttgtaggtacttgatgtaaatatctttttttttatctatttaatgatgttttgtgtgttcactgtgctatcaaaacttcattctaccatgcttttcccttgatcacatagatgcantgtgttttaggatccttcaacagtggaaactggtctaattcttagaacttgataggatggngctagtttatc

SEQ ID NO: 137601 - DNA, 458 bp, Glycine max
  unsure (1)..(458): unsure at all n locations
tccagaatggtataccatgctacagctgcaccggccaatctgtcttgaaagaaatggaccaacaacttttcgtccgcagaatacgcccccatctttcggcaatacatccggagatgcccttttggacatgtcgtccctttgtacttatcaaagtctggtactttgaacttgggagggatgacgatgttgggcacgagacacaaatccgccaaatccgagaatgggtaattgccaaggccctcgactgctcttaacctctcttcaagcgcctcaatcttttccttatcttccgcgaagggaacagattctnttacgggtgtgggtgaggccgggatatggcggactatgttcggttggggtagttcatgtggggacggatatctgaggtggagcagggggccaagatgggtatctncttcctcatcgacttgcccgggatagtcgtcataaggtgggag

SEQ ID NO: 137602 - DNA, 249 bp, Glycine max
agagacgtcgcccaaagaacactcaccacaagagggagcccccgcttatatgggtaaccaacccagcggtcacaagggaaaaagtaatggagaactgaagaaccccatgacaatcggggcaaaagacgaaacagaaaactgcctcgacttctgtctgacgaatttccgagagaagaagtccttgtgagtttcactcaaaacggaagcaataggcccgggcacgagctccaacacacaagggacaacccc

SEQ ID NO: 137603 - DNA, 319 bp, Glycine max
  unsure (1)..(319): unsure at all n locations
gatcggccatactgtcactagattcctctggatgaatgacatacgcatactgttatccatgcatacgaaatgctagtatgaaaacgagatgcccgataacacatccatacttactgtaacattcattacgttccatgatcgacgtcgcgagctcattgaaatgggttgatgatcccatcatggcgtgctcatggaaccgaatttatgcctcttgaaatgcgctgagaggcggcaatacccccttggttatgncgatgaactgtagaggaaaatgcaaagataatgcctgagcacacgcaaagactgtcgtatgcatatg

SEQ ID NO: 137604 - DNA, 430 bp, Glycine max
agcttagtcaacatggtgctcccttatctcttacaaactccccctttgtggctttgataatgtcaaacttgaattgtcatttgagtgcatttggagagacttgagaatagcaaatattcttaaaaaacctgagagtttctgaacaataataaaagtgtgaaatcacatcggcgtcatcattaagtagagttgtgtacaaatgtatgtatgaaatgcagttcttcctaatccaatgctagtgcaatgcttcttcctcttttgccataacaaggccaaaaagtcacaactactcattgatgtaacagacaaatatatgatgtgaataggcgaatgattatatgctttctttcatagaaaaacattactacttaatcatgacaacgtttatgagaatgcattactacttaatcaaacatcatgaaacaagtga

SEQ ID NO: 137605 - DNA, 477 bp, Glycine max
aaatctcagcttaaggaagtgaacgaattagtatgggcagatatgtcttctcattgatcagtaaatttgttccgcaaatccctgaagaatgtaaagatccaggtacattcagcataccttgtattatagggaacagtaagtttgacaatgccatgctagatttaagagcttctgttagtgttatgcctctgtctatttttaatactctatctcttggtcctttgcagccaattgatgtggtaattcatttagctaatagaagtgatgcctatcctgctggtttcatagaggatgtcttagttagaggtggtgaactgattttccctgttgattgttatatttagaatatggaggaaggattttctcaaggatcagttcccatcattctaggcagaccttttttgaaaactgctagaactaagatagatgtttatgccggctcactatctatggagtttggagatatcactgtccatt

SEQ ID NO: 137606 - DNA, 445 bp, Glycine max
  unsure (1)..(445): unsure at all n locations
agcttggttaacaaaaacatatcatccattgtaacatacccccccacacttattcccaaaacaattccaaagctcaaaaattccttaagggtagggtgagatcatggtttttcacttaaggcttataatgagcttcaaagcaaagaaaggggaacatatgctcaaaggggctatcaaaggaattaattcaaggtaggctcatttggctagaggcttataaaaacaaaatgcctaaatcatctctcaacatgcatgtgaagtaagaagtatcaacaagagtcaagccaaggctattgtgcaagcaatcaatggggcaaaacacaccgaataaaatagatgatgatggctcaaattctcaccaagggtaaatctatcactttcaattcgaaccttcaaaactaacttgacatgtagagaanaataaggatttcatttcacaaaatgc

SEQ ID NO: 137607 - DNA, 460 bp, Glycine max
  unsure (1)..(460): unsure at all n locations
aacaacacanaatctaggtgtccaaaacctttcaatttaatggcttttctaggtttgaaaggtgaaatttagaatgaggtaaatttgaagcaaactctcacctcacaccagtccataacatctatttagacttgttcaagctggatttacacctaaaatctcaccgaatcaaaatttgactcttcaacacccaaattttgccctagaaatggctcttggttcactttggtcatttgtttttctctctagctcagcctaacctttctcacatgtcctaaatgacatttcaagctagtattaactcactttaacctccatttaccacagaattcagtcttagccttccaactctcaaagtctcactctttntccactcataacatcacattctcactttctaaccctaggttagttctacccttcatctctaacagttttccatcagcaatttcagcatata

SEQ ID NO: 137608 - DNA, 451 bp, Glycine max
  unsure (1)..(451): unsure at all n locations
agcttcttatccaaggcactctcttgttgttaagctctnccttccatgacttattttctagtggatgatgcctcctctcacctcttctccttctccattccattgccattaaacttcaagaagcacaagacttcattgatgaagaagatccaaggcctacaagctccacatggagctacgtcatgtgttatcaagagcatcttcgtctaggtgatgtttttttgcttcctctatctttttgttcggacaattcactttaatttcatattctttgtcttattctccatgtatatcctccattgtctcgtggtgtggtgctgtttagagtatattcaaaaaaataaaccgattaaatcttagatctacacttgttcttgcatctctatggttcaaattttatagatctactctcgaagtctgtttttgtgtagatttaagttctatctatttt

SEQ ID NO: 137609 - DNA, 470 bp, Glycine max
  unsure (1)..(470): unsure at all n locations
tctaaactntatacaagaatgaagctctgataccacttgttagacaagtggcctcaaatatcttaagaaggggggttgaattaagatattacaaactatttccccaattaaaattctatttcactttctattctagttacaaattcccttaataatgaactcttaaataatgattcaaatagaacaatctgaatataaatataaaacaataataaataaaagagtttaagggaagagaaagtgcaaactcggatttgtactggttcggccacacccttggcctacgtccagtacccaagcaacccgcttgagagttccactatcttgtaaaatccttttacaagttctgaacacacaaggacaatccttcctctgtgttcagaattcttttacaacaagagaccctcggtctcttaatcccttagagaatttagaaagaagagaagaatgaatctctcttgaaagagata

SEQ ID NO: 137610 - DNA, 433 bp, Glycine max
  unsure (1)..(433): unsure at all n locations
agctnttcacaaagcttacgggatatattgttttcttatccatggnagaagtctccacggaggccattgcctccctcgccctgtattatgatcagccgatgatgtgcttcacctttggggactttcagctatcacctatggtagaagaatttgaagagatcctcggatgccctctagggggaaggaaaccctacctcttcttatggttctatccctcattagctagaatttccaagatagtccatatctcggcgcgggaattagaccacagaaagcaagtcaaaaatggggtggttagaataccgagaaaatatttggaggcgaaagcacaaatcttgtgcaggtcaaggtgagtgggccccgttcatagatattctcgcactgttgattatcggaggaggtctctttcctgatgtggatgggtggtggacct

SEQ ID NO: 137611 - DNA, 473 bp, Glycine max
  unsure (1)..(473): unsure at all n locations
tatgctgcanacatctacaatatacctcctcaacctcttcatcaaaatcaaccacagtagaacaattatgacctctccagcaacagatacaatcccggatggaggaatcaccctaatctcaaatggtctagccctcaacaacaacaatagcagcctgctccttccttccaaaatattgctggtccaagtagaccatacgttcctcccccagtgcaacaacaactgcaacaacagcatcaacagagacaacaatccactactgaggcccctcctcaaccttcattggaagaattagtgaggtaaatgacaatacagaacatgcagtttcagcaggagactagagcctcaattcagagtttaacaaatcagatggggcagatggccacccagctgaaccaagctcaatcacaaaactctgacaagctgccttctcaatctgtctagaataccaaaaatgtgagtgccattacatt

SEQ ID NO: 137612 - DNA, 386 bp, Glycine max
agcttatattgagagcatcattcacgatttaactaccatcaaagagagaaacacatgagtagagtgtggtgaggtcctgaatcttttcttttaaataactacaaaattctttggtccttaatcatggcaggagctggtgacaatgatggtgtatatcatcaactggacagatctcagcgcttattactggacgcgatgactacacaaatgcaacgtttgttgaatcgtaacaatgaaaagctctacaggcgaatagaaggactagagcaccaaatgaatccaaatgctgggagaccttatggtggcaacaaagggtcaatgatggatcataccgaatagaggggcaagacaaaattgagggagtaaactcaatgtatcctctttta

SEQ ID NO: 137613 - DNA, 446 bp, Glycine max
  unsure (1)..(446): unsure at all n locations
atcctatctcaacagcttatgggtgagtcccgtccaggtagtcccgaagaaaaccggcctcaccgtgataaaaaatgagaaggatgagctgattcctactcgagtgcagaatagttggagagtatacatcgactataggaggctgaaccaggttactaanaaggaccattntccactgccattgattgaccagatgcttgaacgcatggcaggtaaatctcactactgtttccttgatggtttttctggttatatgcaaatcactattgcttctgaggatcaggaaaagaccacattcacctgccccttcggcacttttgcctataggaggatgtctttcggcctatgcaatgcccctggtaccttctagcggtgcatgattagtatttttagtgatttttttagaaaatggcatagaggtgtttatggatgatttcactgtatat

SEQ ID NO: 137614 - DNA, 453 bp, Glycine max
  unsure (1)..(453): unsure at all n locations
agctngccacccagcttgcccagttgatcttacctccanaagcaaccgtcttctggaggaagaatctggaaggcccaagtgggccagattgctatttgcacccctatttttactaaatacacccccttgctcttttttggtgattcttttttcgtaacgttacgaaactttacgaatttcgcaacgatgcttgttttctttccgtaatgttatgaaaccttatggattatgtaattatccctttttttccttccggaacgttacggaactttacggattgcgcactaacatttccttttaatttctgatatgtcacggaacttcacggattgtgctacaatgctttcttttgacttctggcatgtcatggaacttcacgaattgcctaacgatgggtgccaagtacctcaaaagggtcaaacgagggtcgtatcccaacaacggatggtcccc

SEQ ID NO: 137615 - DNA, 449 bp, Glycine max
taaactaaaaaacaaagggggagaatatggagaatttattgagtgatcgactaaaaaaactgtgtatgtgtttcttgatttcagggttgtcatcatcaaaaaaggggagattgtagaagcaagcttcatgatgatgaatcaagtagttttgatgatgacaaaaagcccaaaagaatgatttcaagattgagtcaacaagttcaagatcaagattaatttcaaaattcaagaaaagacatcaagaagaatcaagattcaagagaagatgaattcaagattccaaagaagaaatcaagaagcaacaagtcaagaattcacaagggaagtattgaaaaggatttttcataaaccaaacatagcacagttttgttttacaaaagagttttctcaaattatctatttactctctggtaattgatcaccagtttcctgtaatcgattaccagtga

SEQ ID NO: 137616 - DNA, 449 bp, Glycine max
agctttgtattcttgataaaaaatactttctttattgttgattaatattcttaattcactcttcaaataacataatattgactaagaggagtggtataattttctttcttatgtgcgaattttcttacaaattttggtttccaagtaatacggacatcaataatcaatttcctgccatttgcagcaaattgctttgtagaaaagtcgaaggttaggaaattttcagtagattttcacacgaaaatatcctcaagcaattttatttgtagaaattttatttcaaaaattctcaactagctaggtttcctgcagggttcaaaatctcaaatagttctgcatgttattttcaggtgaatctaaaatccacaaagtattctccagcagatttataatccatataattttctatagatttaaattcgcaagtatttcttggaattaaaatatcc

SEQ ID NO: 137617 - DNA, 448 bp, Glycine max
tgttgctgaagaagctattgttgtttgtttgcagcacatgaaaacagttcaacctgtcggggtactgaaaactcgtcatgaccggacatgatgaggttaagggacacaaggatacaatgttgttaccatgactcaacaagcgcatttgtatatcttgaataacacacaggaggtcgttccatacatacaaactcacaaagaatatctaacatctattcacccaaaaatgaacttgatgaaattgttgcaagagcataatagaactgtcataaactggtttaacgaaacaatcatcagtgatgataatgcttccaaaacattaagattgttgactattggtccaaatctaaatgtccccacttggaagaggtatgatataaacaattattctttctacacaaagttacaagatgataaaagtagtgtgcaaaatagtgggtcattgtag

SEQ ID NO: 137618 - DNA, 374 bp, Glycine max
  unsure (1)..(374): unsure at all n locations
ctgcagcttaaattgaataaacgctcttgaactgctagtaatcaattacccgtccatgtgtnatcaattacacattatataattttgaattcacaattctagtgactgtgacaaacattttcagctgctggtnatcgattaccagagagtaaatctcaatttaaaatgatttagatagaattctttggcccaaacctttttgctttttcaatttggaaacttcttcctgagaatttagagatcaacttgatcatatatcttaattttcttgggatccttggattttgtcttgaataaaacttaaaagcacttgatcctttggcatcatcaaaacatcaaaacattttgcttctacataggagtcatttgactta

SEQ ID NO: 137619 - DNA, 450 bp, Glycine max
tgcttgtggggcttctatggaggctggatctttgaacttctatgagatcctttaatggtgattttccaccatggagatgcagcggaagacaaatgagaagaggtgagaggaggcgccatccactagggaataagccatggaagaaggagcttcaccaccaagatgagccctggataagaagcttggagaggatgtttcaattggaggaaaagaaagagggagagaaagatagaagggggagcacgaaattgaatgaagataaagggagagaagttgaactttgagttgtgtctcacaagactctcattcatcaaagtaacaacaagtgttacacatacttctatttatagactatgtagcttccttgagaagattttttgagaaaacttccttgagaagcttctttgagaaaactttcttgagaagctagagcttagctactcacacccc

SEQ ID NO: 137620 - DNA, 449 bp, Glycine max
  unsure (1)..(449): unsure at all n locations
agagtcacctgcggcatgcaagcttcccatntgggcttatgggttggattgcaaggaatccctgcatagtattagaaacatgagttgtacatccaaaatcaatccaccatgtattatgggaaactntagttaagtttgattcaaagcatacaagagcattaagcccgcctttcttttccaagacttacgctntcgacaatccttctagaagtatccagatttcccacaaaattgacaattattgtcctttgataccttcttctaaatttgtaaagattcatcattgatccttaatcgccccttgcctttacatgcttctccataaatttctttttagctccttgattcccttggtggcttacataatggactgagtgacttcttagattcttaagccttgtttcttcctgaactaacatactgtgcaatttattgtcattccatttatc

SEQ ID NO: 137621 - DNA, 434 bp, Glycine max
  unsure (1)..(434): unsure at all n locations
cgtatgcaggaannattgatgagaactttctcttctttctttcttcaactatggctagaaatgagagaaaattggagctttcaacttctctctaagtgttatgttgtgttttgtgagacaaaaatggtgagtgatggggttgggtctgataatgcatagactaagtgaatgaggctgatgctatgtgcacccaacattattgctggtgcacccaacacttaagggttaaagtcaaaaataccctcgcttatttttttaaaagttattcacccatgaggcttttcttcttccatgctttttcttccgcgactcttcttctgcgaccctgttcacctagcatcagcatcctcttcttgagcttggatttggtcttcaacagctccgtttcgtacattcctttctttcttcgcggcacattgaccatcttcttcttc

SEQ ID NO: 137622 - DNA, 437 bp, Glycine max
  unsure (1)..(437): unsure at all n locations
ngaagagtntcttatccatactcaaaggtatattcaatctctttaactgatttctctattgtaatttgatcttggatagggtttgcaagagattgagttgatagggtttcaactcttgaggttcttgtcataaggttcaacaaggttttgtgattttcgcttgtagggttcaagttggaaaggtgttctttgaattctttacatgtgcataatgttcatattgcattgaaattcatagtggaaatatctaactggagttgttgggtatgactagatgtaggttctcttgagggaagaaccagcatgaatcttgtctttgattctctctttctctatccctagntttgcaaccaatcttgatattggaatggtatttcttttgatctaactctgatttactatgattgaataattgttttcatgtaataacattgttg

SEQ ID NO: 137623 - DNA, 424 bp, Glycine max
  unsure (1)..(424): unsure at all n locations
acctgaggcatgcaacgcttgaacaacttttacaactcacatatcttaattttcagttcttggagatttctaagcaatgtttctctgaaggttatgtgattagcaagttgtaaacatacttgagatcaagagaggtccattcaatcaagtcttttattcttgcatttgaaagtaaaggttgtatctctccgtgactntatttcatatggtttttacacattgttattacatgtgcatgagtttttacaatatgctagagtaggtgtttctagttttaagctaagagtatgtntcttttaggcttatattaacaaatgaccctagggttgggtgcctaagtttcattttctaggtnngaatttgaaatncttgtgattgcttgttaaactcacattgcatagtgaaaatcaaattctgggtgaat

SEQ ID NO: 137624 - DNA, 307 bp, Glycine max
  unsure (1)..(307): unsure at all n locations
ttatgcagggaagctaagtgtgaagtatgcaatcctgttttgattttcgctgcaaactgggtacccaccaatcacacttccactgttgccacaagtgtgggtaaatttctgtatgctgttggaaccaagtccaaatttaatattggaaactataattntgatcaaactgttaagcattcagaatctttgctgtcaaataccccattgcttcccaactgtattgtgtggatttgtgtgagtaacattccatatcttaaacaactttgacttgtgatgaagagagatctcctctatcctgcattacaac

SEQ ID NO: 137625 - DNA, 349 bp, Glycine max
  unsure (1)..(349): unsure at all n locations
gtagtgttccttaaacctccattaatttnttgctttaccttctcttccattgggtgttcttcatttttctccatgtatctcctcacatgtcttgtgctaaatgttgttaacatgattctttagagtttccaccgattaaactngctatagaagctagatttgattttctatggttcaaatttcttgttcttgttcttgaaccatgaattgtgttgagtttaggttcctttgagttttgctttttattttttgtggctgaaacctaaaccatacaattcttacaaaaatattaaagtagaataaaacctcanaaatctagagtgacttgtcacctattgtagtttgtcat

SEQ ID NO: 137626 - DNA, 339 bp, Glycine max
ttctatgctgccagttaacaaggtatgagctcttctcttagttttttgctcttcttagtaagctcttaatcagtgctgtggcattgtccgaaggttcttatcaaattattgggtcattttatccacttggctaagcatataaaagtatcaatcagaattgtcatgtggggtctcattttgttgtggcagaagattgtgctgtacgtggttttcaagctagacaagagttacacccccatcaaagtttctcatccgagccagtgattgtcttcacaacttgaacgttaagttatattatatcgctcgaagtatgattgacaagattatgcctaattattt

SEQ ID NO: 137627 - DNA, 350 bp, Glycine max
tgaccacaatattgggcccagacacagtatacacaccctgttccaccatgtcataccctaatttcgtccggggacctttgcttgatgacatgcgacctttctctggtccttgtgaggtgcttggcacccatcattaagcaatttgtgaaattccatgacatgccggaaaaccaaaaaatattgatgcccaatccgtaagtttccttgacacaccggaaatcaaatggaagcattgttgcctaattaaggaggtgccgtaacattccgtaagtcaataatgggatgataattaatccgcaaagttctgctcatttctgaatgatacaagtatcgttccaaattcgaagttt

SEQ ID NO: 137628 - DNA, 343 bp, Glycine max
  unsure (1)..(343): unsure at all n locations
tgcaagcttgactcggtggtgccatatctgttccaaactcattatcatatntacaattaaatgtgtcaggcagcgttagaagaaagggaaatactttcatttaaggtacatgctcgaagttttaccaatggtgaatggtgatatttcngtttcgtggaattgattctaaaatttttttgttgacgctcaagttagatatcgaattatgcatataagataataatgataattaatagttggttgtccttgagaattaacaccctccttcaaacattgtaactctgactttgtgtgtgtacaaaggtgcttcaaaatttaaacggaatattttngtgtggatttt

SEQ ID NO: 137629 - DNA, 400 bp, Glycine max
tctacttatgtggcagggcgggcttcctttactttcttgtctccaacgcgagctctgaccactgtccttccttcccgcgatgcttcttttcatgtccgcctgaatgggcttatagcctaaaccatacttcccacgatttccttgggtttttatcaggctagttatgccgccattgtctttgcctaaacccatcccgggttcataaccgttccccaacataactcgggccatcattaccgctgcatcggacagacaaggctgcccaaagagggagtccacggaggaaatgctgaccacctcaaaagactggaaagcagtttctaacgattcttctgcggcttccacataaggcatggaggatgggcagcttaccaagatatctttctcgcctgacacgatg

SEQ ID NO: 137630 - DNA, 265 bp, Glycine max
acaagaaactaagctttcgatatatgatgggcctgaatcggactttcttttttagtatgaccatgtgaatatctcgagagctgtcgttgttcaatttctagcgtctcgatctattatgcaccagaatcggactgtcctgttacaagttatgaccatttaaatttcacgagagcatacgctgtataatcttgagcgtttgtataattgatgccgctgtatccgcttcttgtgacgagagcttgccattttaattattcgagaccat

SEQ ID NO: 137631 - DNA, 156 bp, Glycine max
  unsure (1)..(156): unsure at all n locations
agcaccgcaggcacgcagctatataggataaagaaaattttgtcgttgtancnnnccccaaaaaataattttaaaagaaaatgaggccaatgaccttatttttgctctcttcttggtccctccttatatctctttaagtttgcattaccccaaata

SEQ ID NO: 137632 - DNA, 279 bp, Glycine max
  unsure (1)..(279): unsure at all n locations
ctcaagcttgctcgtcttgctgagatctatcgtgcagactcttctgttgattttcgaggaacaactacggatcaacttgaaacttatgtgcttcaagtgagaagaaatgctttctttttccacttgtgaagatgttcaaagtttggctatgtagatggtccaacagagaaacatttggtattccattggtttataaactgatgagctagctttgatattgccggggctgacagcctcnctttgtaaacttttttcatctcggacaatattctacatttt

SEQ ID NO: 137633 - DNA, 306 bp, Glycine max
agcttataatatatcgatacgctcgaaatatatcattgtaatctctcgggaaattcagatagtcataacttttcacacggatgtccgattcgggtgcataatatgtcgagaggctcgaaattgaacaacgcaagctcttgagaaattagactggtattacttttcacaccgaagctcctgtgaaagtcatatggtcataacttttcacactgagggccaatttagcttataatatatcgataccctcgaactaaacatccgaatctctctataaattcatatggatataacgattcacacagatgt

SEQ ID NO: 137634 - DNA, 338 bp, Glycine max
tgaatcggacatccgtgtgaaaagttatgaccatttgttatttctctagagcttccgcagttcaatttcgatcctctcgacatattatgcacccgaatcggacatctgtgtgaaaagtcatgatcatttgaatttctcgagagtttccgatgtttaatttccagcgtatcgatatattattaccctgaatcggacctcagtctgaaaagttatgaccatatgaatttgacgagagctttcgatgttcaattacgaatatcactggatgtcatgcgccttaacttgacatttgagtgagatgtaacgaccaaccatatatcttcacagctatcgttgta

SEQ ID NO: 137635 - DNA, 330 bp, Glycine max
  unsure (1)..(330): unsure at all n locations
taaaactaagctnataagtgcgggtctgggagacgaaggtcaagtgttctcgatantctaagatgatgttccgagtactgtggatttggtacgaccatgctctcctgatttccagctgggaaattggcgagtggaggaacgccccggcatttacgcaacaagcataatgttaacctttacggttttaaaagctctatatttgggcctaggctttagagatattccttttgttaaggctttgtgtcttcttgttttgaatttataatacaaggttcttacttcatctgtttctgggctctaccccttctcatttatatgcatgtttacttc

SEQ ID NO: 137636 - DNA, 342 bp, Glycine max
acacctatctatattactcaatttctgcaccttctgtgtgagtgctaatggttttgaccatgcgccattattttgaagttttctggtttggaaacctaatattcatttacactaaacaaggtaaattgcttaatccaaacatgggaattcagaaccctgttacaaatcctatctattttttcaaggaaaccacttgccaaaacaaggaattagacaagttttgaaaagtgaaaactatcgttccttaatgttctgttaaaataccaacagcatataaaccaacttgttttcaattccctattataaatgtgaaatggatgccacatatctttaccatttaaa

SEQ ID NO: 137637 - DNA, 338 bp, Glycine max
cagggaaatttttttttttttaaccaaaaccagattaggccgctttttgagggatggccacccaataaaaaataactatttctaattattttttataaggaaatatatcttcttttaaagcggcttaatatcccttttagtaaataaaattatatcttcaatattaggataaaaattattcaccggtaaaataaggattatccggcaaactaacaatggcttaatttctgaaataaggcttttccctgacctgaaaaaaattttttagttaattgcgcacccctacatagagaacagtcttattattatatataggacaatttgtggcctataagaat

SEQ ID NO: 137638 - DNA, 319 bp, Glycine max
atggggggtcaaagcatcgaagtgagcaccctttgtcaagagatcgacaaccaatagaatgtgggtgtacccatgccatgggggaaggccaataataaagtctaacgagagatcttctcatggtgacgaccacactgtgaaaggctaaagcagacttgccgatttctgaggttcatacttggcttgttggcaagtagagcattgtctgtcgaacaagataatccattgtccatgatgggcctgcataagttactctatatatgatgttaaggtttttgcaaacccatgtggcctccataatgatttgtattgaaatcct

SEQ ID NO: 137639 - DNA, 393 bp, Glycine max
  unsure (1)..(393): unsure at all n locations
agcttttcctctagttgctctgttatgtgtttcaagcattagagagaaagagaatggattggagcctcaatattattgtctctgtgcgaggggcatttttttctctacaaacattattttgcaaatcccaacggtgggaatatgcggaaatgagttccgaaggtggtgtccaaattttaggatgctccaatggttaatgaatatgggatcatagttttacttaaacaagnttgggtgtatgcaggttttgggagaggaagaagccataacgaatttgaaaggaagaaagagcgcagagacgtatcgtaagtgtaaaaactgacctaatatggtccattattactaggagtccaagnctactatatattccaattttttctttattttaataat

SEQ ID NO: 137640 - DNA, 457 bp, Glycine max
tccatcaagtggtaatcagagcacaaaagctttatttgtgctccttaaacctccattaatgttttttctttaccttctcttccattgttgtttcttcatttttctccatgtatctcctcaattgtcttgttctaaatgttgctaacatgattctttatagttttcaccgattaaacttgctatagaaggtagatttgattttctatgggtcaaatttcttgttcttgttcttgaaccatgaattgtgttaagtttaggctcctttgagttttgtcttgttattttttgtggctgaaacctaaaccataaaattcttacaaaaatatttaagtagaagaaaacctctaaaatttagagtgacctgttcacctattgtaggtttgtcatagaagtcatgtctaatcatgagacatgtcacatacgattcttatgttgtgccgaatttatttcctgttct

SEQ ID NO: 137641 - DNA, 415 bp, Glycine max
  unsure (1)..(415): unsure at all n locations
agcttgntctgngtatgacctgtatgttatattatgtccaaaatctatgtacttgcctgcattaaaaagtctgcatctcgaatgtattcagtttactgcaactcataatgactttgttgagcccttctcaaactgtcatgcgttacatactttgtaccttccaaattgttctttgcataataaggcacaaggcctctgcatttctaattctaccctttccagtttgaaaatacagttacaatatatttgctgaaatcagtcaaatcaaacaaacacttatgtataaattgtttctataactgaaaggaaatanggtanaactatttcatatagttgtaagttgtttcataagtattattgagagttattgaaataactgaaacagctatggcatatataaactatttataactct

SEQ ID NO: 137642 - DNA, 437 bp, Glycine max
  unsure (1)..(437): unsure at all n locations
tgtactcccttgtagaacttgatacattggcttccaatcttatcatcttagagaaaagtttcttatatcgttgtgtgctagttaactttggatatttgatgtgaaacattttaggtcatctttgcatagcattttacataagatatattgcattttatctatatattttagcttgtttttgtttaatttttagtgtttcatacttttaggacttgtcatggcgttttccttgttttcattntagtttagtcattccaagatcaattttcacataaaggatttataaaggaaagtttgagcacaaaagacttgaaaacagataaaaacaatgaggttttgctataccttgtagagaagatcatgggatgtgattangatcaagacccaatcatcagacacttaagctagagcccacataatatttttaggaagatcat

SEQ ID NO: 137643 - DNA, 457 bp, Glycine max
  unsure (1)..(457): unsure at all n locations
cgcgaccttaagtcacctgcngcatgcaagcttatgcgcatatttccttattaacttttactngcacaagacatcctattaactaagaaaaatgcacccatatacaatcaaggtagcttcattacctagattatttacatgtacttccaaggtgtatttgttacttacatcacacacatctccttggctgaatttacatacatgcatactcaaagcattttggggtaccaaaaattgcacatgcgctcatcttggtatttctaatacctatacatatacaaacttcatgatgaatcttgactacctacacaataaagtgctacatttcatgcttttatntcaagtttttgctacctaaagccgcatgccaaatcaagcatattttccttcactgactaaaattgtatcaaattaaaaggatataatctttggaatatgtttcttacatacatgcaac

SEQ ID NO: 137644 - DNA, 386 bp, Glycine max
  unsure (1)..(386): unsure at all n locations
agcttncttaagaatattcctatttaatttatagcttagctacacacacatctgtaatagctaagctcacctccttgagatgagaagctagagcttaactacacaccccctataatacctaagctcacccccataacaaaatacatgaaaatacaataaattccctactacaaagactactcaaaatacctcgaaatacaaggcagaaaccctataatactagaatggccaaaatacaaggcccaaacaaagcaaaaacctattctaatatttacaaagataagcgggctcatactttgcccatgggctcgaaatctaccctaaggatcatgagaaccctagggccttcccttggatctctggcccaatctgcttggagtcttcta

SEQ ID NO: 137645 - DNA, 380 bp, Glycine max
  unsure (1)..(380): unsure at all n locations
ngcctgtctgatgcagcactaatgatggcccgagttatgtttgggaacgggtaccaacctggaatgggtttatgcaaagacaacggcggcataactagcctgataaataccaaaggaaatcgtgggaaatatggtttaggctataaacccactcacgcggatataaatagaagcatctcgggaaaaaagagcggtggtcaaagctcgcggttgagacaagaaagtgaaggaagcccgccctgccacataagtagaagctttataagcgcggatctgggagacgaaggtcaagtggtcgcgatatacgaagatgatgttccgagtacgttggaatttgtacgaccatgccctcctgatttccactgggaaattggcgagtg

SEQ ID NO: 137646 - DNA, 299 bp, Glycine max
  unsure (1)..(299): unsure at all n locations
agcttctatctttagaggngctcccattttgcgacagtacatcttgagatggtgtttgggacaggtcgtccctctatacttgtcgaagtccggtactttgaacttcggggggataacaacatcgggtactaaacaaagaaccggcatgtctgcgaacgggatagccccaaaaccttttatggatctcaatctttcctcgaggagaacgagcctcctcctttctttagatgccgggggtggtccttcccgggacaaaactattgggtgtgtcgccatgtttggttgaagcaacatgctgg

SEQ ID NO: 137647 - DNA, 472 bp, Glycine max
  unsure (1)..(472): unsure at all n locations
tcccttacctatatttgagaagaagaagagaatgtatttctttatctccaccacaggatatcattcaatcttcatccacaacatcatactcatggaaacacaacaaaaacaacacccatgacggtctctacatcaaaacccattatatataggtcactcccagaaaagcaaaagaaaagaaaaatggaacaaggaggtcaaacacgaaggatgtgagcttacccaaaccaaagtaaagtgaagaaactctatggaagaggaaaacaagccacttaggatatataaatataagttcaactcaagaggaatgagagcttatagaggaaggaagatgagaatgaatgaatgggagaaagaatgacacttttcacatctaaagctcttggggcatcttgtggttttctaattacacctatgntttcgctcgccacacccgtcattctatgtgaaaacctaaaagctacttacaagg

SEQ ID NO: 137648 - DNA, 425 bp, Glycine max
  unsure (1)..(425): unsure at all n locations
agctnntggtgaaagaacaagggataactctacgatgttggagaccttgctcacgattatcagggtggagatagtagcctcatgcaagaaaaaaggaaagcatcaagtagttgttcacatgattcggaagagattatccaactcatacaattattttcacaaagggaggatgagattcgtctagtgagacactataatgagcaaatgagtcgtcaatttcaacaacaatttcagcggtttcaatcaattgtcatgcaattcctaccacccaacacacattctttgaacaaaatcagcagcaaaacaaccaccaagaggaaaaccaacaacaaattgattagcatgagcaataggaacaccaacaacaactagactctcctgatatgacaattagtagattgtagaanagacttattacttgtcct

SEQ ID NO: 137649 - DNA, 343 bp, Glycine max
  unsure (1)..(343): unsure at all n locations
agcttgccttgaattgctactgtgtcagtanttgtttgttgagcntatatagncgggtaaatctcatttattttaaacttattcctcttaaactatagggtgacaaaataaggagaagaaatgattggaggagatggatcatgcctggtggtcaggttcctaatgttagaggttctcaaaccgttggacagctggctgaacgagtncaaaacattactctggagagaactaacaataacgatgctggagtattagatgtttcacagaataaaccttttgtggatttgaatagtcaatatcttcattccactagcgagggtactgctcaagtcggtattcaagt

SEQ ID NO: 137650 - DNA, 434 bp, Glycine max
cttacattcggaaacacaacagcacgtggcacgcataaaattcatttctggtccagatacatacataagcaccatcaattctctctcaccacttttgcattatccttccttaccctatatatatatatatacagctctttaatccttttatttaagaggatcagaatcaaacaacacccttattaccaaacttcgcttagccaaagacacttacttctcttcatgggttctattggaattgagaggattgtgggactacttctctcttaaacatttttacttttggcttatatatagtttcgagacataccctttacatgtagcataactgatagttatattgtccataccatacatttttcaataatagtaattcctgttctatatatccttccttataatactatctcacaattgtacttttcttcctatct

SEQ ID NO: 137651 - DNA, 307 bp, Glycine max
  unsure (1)..(307): unsure at all n locations
agcttagcaatggccttgtaactcgcactgttcctctgtctattgtgctnattattatgcctcactctcaaaacatgctccggcaatctcaacgtatacttgtcatcatcctttccctcatctccctctgctctaatcaaaactatcgagtgccccgtcgaatgcgaccgtgccaacatctgttccccctgttgatgaatcatgacctcgtgaatgccataaccatgttcgtgttcatgctcacggtcatgctcttgtcttggatttccatcattatcatcaccaccaccgcagtcgttgccttctg

SEQ ID NO: 137652 - DNA, 316 bp, Glycine max
gaaactaagctatacttatgtggcaggcgggcttccttacctacttgtctctcttctcaaacttcgacccttggactaccttcccgcgatgctacttaacatgtctgcctgagtgggcttatatcctaaaccatactttccacgattacccagggtatttatcagtctagttatgcccgccgagtactattcttaacccatctcaggcgtataaccgttctccaacataactttgaccatcatcaccgctgttctagaagactaagctgtccaaagatggagttcactgaggaaatgctgaccatctcaaaagatt

SEQ ID NO: 137653 - DNA, 101 bp, Glycine max
  unsure (1)..(101): unsure at all n locations
ccgctgtctgctcgccccgaanaacatagggggataaagcaagcaggtattttttacccagccaaagtcagccaccagtctaacctacaacacaaggaaag

SEQ ID NO: 137654 - DNA, 380 bp, Glycine max
  unsure (1)..(380): unsure at all n locations
agcttgatcgaggagggtgtttggtgtttttacaactctagcagactggattagacaatccatcttgctcatcctttatggctgcatcctataggtcctaagaatggaactcttgtaggcttgatcaattcgtaacttagctgagtaacatatcctctgccattatataaaataaaatctaatttatttatgcatctgcgccaatgacccattctcttttttatgtttgtgttcgcaagagtttaatatcattatgagacctagtcggtttcttgataaaattggtctatgttaaaaatcatcttatggatgagttatcgcttgcaaggcatatgaggtntccttgtactctaatgaaatccgtccttacgtaaatcaac

SEQ ID NO: 137655 - DNA, 270 bp, Glycine max
gctgaaggctcctctggagaggggtttaacagagaacaactgcgaattgtggtggctactggtggctgtgggtgattggaaaagatcttggaacattggaaatggtgttggaattatgaaagagatcatatggcgttcttcatagctacttggactccaaagcttatacgcacatttgacttatgctcttgaaaatagaagcatcgttcacactttatatgtctttgtatatatctaacgctctaattatggacaggtgttcttgtagtt

SEQ ID NO: 137656 - DNA, 263 bp, Glycine max
gtctggagaggttacttccttgatgacatctcctgtcttgaatggaatagcctgacaggttattgctactgtctctgatattcggtagttgatattgtgtcgacgaggtaattcccattgtgattaactcaccattcttcactttccaatttagtatgacatttgttgtgtatcacctatgatgtctctgtttccaagtggttattttatattactctcttgatggcaatatgccatgaaacacaatcaaataaaattgacat

SEQ ID NO: 137657 - DNA, 308 bp, Glycine max
actaagctcaacatagacccctccaagtgctggaacttcttttatggacttatggggcctatcaagttgaaagccttggatgaaagatgtatgcctatgtcatccacaccagagtcacacttataagagggactccaaccactctgtatgaaatctggaaaggaggaagcccattgtctagcacttacacatctttcgatagtcatgctacattctggcctattaagtccaaagataaagatggatcccataagcgatgctcgaaattatcttgtgatctctacatacagcagagcatattgatgttt

SEQ ID NO: 137658 - DNA, 257 bp, Glycine max
agcttaataaatctatatattgtttaatactatcttctcgtcagtggtaccttaagtttcatgggataatttcttcatttggttttgatgacaaccccatggatcaatgcatataccacaaggttagtgggagtaaaatatgctttcttgttttatatgtagatgatattttacttgcagccaatgatcggcgtttgctacatgaggtgaaacaatttctctctaagaatattgacatgaaggatatgggtgatgca

SEQ ID NO: 137659 - DNA, 237 bp, Glycine max
taagcattatgattgcaacccaattccaagaattctaaccgttggaaattttgattattatgtctgggctgagataaatatccctccgcatcgtaaccttttcctttcccgtagaaacccagagttgtcttggtaaaactacaatcccgggttcgttaaccgctagattatcgtgaaattcttatattttgttcgtgatccaattacgcacacctccccattgggattagcacaaca

SEQ ID NO: 137660 - DNA, 362 bp, Glycine max
  unsure (1)..(362): unsure at all n locations
tgacgtgtatatgtcaatcagtatatatcttattgcgaagatcctataatgctngccttgaccgaaggtggtcatcaagtccacatagcctctggtctctaccatctcacttgtaaattcaaggaattgacctgcattaggatggacaatgatgtgggagatgtctctggaaagttttccaatataggatatcaattgaacctccctggtctttaaggacccctgacaccattaagtttgtaataatgatggagtctaccacgatgtcgtcttggttgatgggttgtactccttaacctttatctgtaagtgtattgaggaaactcgttgagtgtgctaaataaatattgtttacgttttga

SEQ ID NO: 137661 - DNA, 440 bp, Glycine max
  unsure (1)..(440): unsure at all n locations
ggacacaagaaactaagcttaaaattaaattcaatgtctaaggctgtttttattcgtntaaaacttctggtaatcgattacaagccttgtgtaatcgattataggctttaaattttaaattcaaaatttgcaaattagtttctgaaatgaatctggccactggtaatcgattataacctctggtgatcgattaacagagagtaaatatcatatttatgaaatctataaactttgaaaaatatcctttggcaaacctgtcatcatctataagaaactcttcttagatttaggaactaagtcatcaatatctgaattctggatatagactggatcaacaaaaaagctttatcttggctcatcaaactcataaacttctatattttgttctcaatgataatattaatattatatattattgtttgagttaaaagataataata

SEQ ID NO: 137662 - DNA, 431 bp, Glycine max
  unsure (1)..(431): unsure at all n locations
cagctntaatgactaggagcaatcagactatgtgccttatcttagnaatgaaatatctgcttataaggaagaaattagatcaagaagagcttcattcaaaaagatcgaaaaactcaacactcatatgcctttcatgcttaggtcacaattctcctacctagctactctagacacttgattttaaatagtagtttacaagccaattttataccaagttaattgctacaaaggcaaagagttgttaattgaagaagatgaagatgctccaccaactatatatatgaaggcttgcccgaaaaggatctttaagcatgagcttgaagctctgatgaataagaccaagcttacgagtctagattggtctactataaaaaggttctacatacttaaagctcattgctctagtctggaaccttgatagagcccattgc

SEQ ID NO: 137663 - DNA, 480 bp, Glycine max
  unsure (1)..(480): unsure at all n locations
ctaaatactaagcctttgaacatgaactgtatccaattgaagttaatttttgttgttatcttagagtgagattttaagtaggatggaatcttcatcctctaacaaagtgataaatgcatgttatcatgtatgcacagccataggatgtggccaaaaaatagatgtttagccaaaaccttttccctaagctatgctgcagagaattttgagttcaactgaaaggtaatttgctgaattaaaggaataatattgccagtaattataatgtcatcaacatacccaaggagatgtacaggacaaattgaccaaattgggttattatagaataacaaaacttgaaacttttgggaaaaatcggtggttgaatcttaaatcctattnttcacctacttagaggccgtttttttggaataatgagttgaccaaatactcttttgtcaggagagtcccttcttcaatttcttggattttgacataata

SEQ ID NO: 137664 - DNA, 202 bp, Glycine max
ttttccctgtttttagattttttatgttttgttttttttgataagttttgttttatttttgtttttttaatttttttttttatttttttttttattttttttattctttttttttttgttttttttttttttttttttttttttttttctttttattttttttagttttttttttttttttgttttggtttttttttttttt

SEQ ID NO: 137665 - DNA, 292 bp, Glycine max
tactctgcttaataactaattgtagccttctgtaaaaaaaaaatctaattggagccttctgtaaaaaaaaaaaaaaaaacctaactatagccttctgtaaaaaaaaaaaaactaattgtagccttgttagtaacggtttaaaccatagttatgatatttttcacttaaacctttttttttgttcacattttagcctaaaacgtttatttgatatttttttctttggggtggggggaggatggaaaaacttttcatcctttaatttgttaaaaaaaattgagtgctaaaaagt

SEQ ID NO: 137666 - DNA, 433 bp, Glycine max
  unsure (1)..(433): unsure at all n locations
aaaactcagcttaagaatgagctccgaggatctagacagaatgttatttattgtgacanntaagtaactgctcacaagtaacaactataatcccatcttgaaatggatcttaaatcattaattaagtgaagatgtgactaattaacgaaatatgtcagatcattaataggccttgaccgatcataattactaaaataaaataaaagtaaaattatgatagcaaaattaaaatgaattatattataattatgaaaatatatttaaacctaacaaatttatcaccttgaacacaatttccaaacattggcaattcttcattgttcgctggcttgttttacagcactaaatcaattttctacatagatttgggtagattatgaccatgtagatgattnncgaacccaaatcatattcacacgagtatatcacaacg

SEQ ID NO: 137667 - DNA, 339 bp, Glycine max
caatttgggcaaaattggatgagggaaagagtggttctcgaaatttgcactttatgcagaattttgctgttgaaatgtgcagcagaattttgtataagtgcataaaaatgcttgtgtatggctggttgtgaaaaagggtactacatatggggttctggacattttctagcagatcccaacggttcaaatgtagacttatgtactagagacttccattcaaatcttcgagtcgatccaacggttaacgaactggaacgaagataattgtactggggaaattgaatgtgaaaagctgggatgttggtttgcggtttgagcagagatttctgccttcgccct

SEQ ID NO: 137668 - DNA, 438 bp, Glycine max
  unsure (1)..(438): unsure at all n locations
acacaccacaagaccgaccctttgaagcaanaaagaacagaagggagaagcccaaacaaagagaaagagaacgaaacaccccaacgaaagccgaaaaagaaaagaacgaaaaggccccacccaaagaacgggagaaagcaaaaaaggaagaagaagaaggaaagaacgcccctgancagggatcgaaggaaaaacagaagaaatgcgcagagagggctttggaccggacaacatctgaacaacacagacacgccaccaaatgaacaaaaaagaaggaaaggaaaccacgaccgaagatggcccgctccccntgaagaccaaccaaaagcccgcgcgccagcagacttttcgccccgcactaaacagaacaacagaaaaaagaagaagcccacagaaatcataaagcccaaaacacacaaaagccggaagaccaccaaa

SEQ ID NO: 137669 - DNA, 219 bp, Glycine max
  unsure (1)..(219): unsure at all n locations
ctcaagtcacctgcggcatgcaagctagtccaaagggattaccttttatgtcntggagaggatcaatacaatgcctatatgtttgaccttccagaagagtatggagtcagcacccactttaacatttatgatttaattccttttgcaggtggagaaaatactgaggaggaggaactaacagatntgaggtcaaattctcttcaaaggaactttctttct

SEQ ID NO: 137670 - DNA, 370 bp, Glycine max
  unsure (1)..(370): unsure at all n locations
agcttagacgnctatctattttgttagtgtctctaacactacaaggnaangcaatgttggatttcattttgtcatttttgctattgcaagattaaaataagataaccatgaaatttgatagattctagtcaaggtaaactgcttgattggcctaagccgttctgcattataaatggaattgctcggggactactttatcttcatcaagactcaagactaatgatcatacacagagatcttaatgcaagttatgttttattggataatgaaatgaatccaaaaatttcacattctggctcggctcgaattgtgggaggtgatcaaattgaaggaaaacaaacagagtatttgtccatagtaagtacctatt

SEQ ID NO: 137671 - DNA, 273 bp, Glycine max
agcttctggacttaacacctggcttgtatctgtatatggctgtagaggttaatacaggctttagtttgtgtatttaaagccttttattagctatgacaagcaagaacaagtattatttatatacctctttaacaacaataatatatgtgtaatgataaatttaaagtgcttgttgaatctctacaataaatagttatgaaaaaagtattactactattattcatataattgcatgcctttacctttttcttttagacttttggtaaaaaaaaa

SEQ ID NO: 137672 - DNA, 173 bp, Glycine max
tgcaagctttgcctgatatgcacgcaccacatttatattgatcatttatatatatagcatactaaaatataagggaggaaagtgattattcgccttgacttttagtttattttgacaacatgcaggcaaagcaaaaacactcctcatcgggagctgtgctcggtaatgatgct

SEQ ID NO: 137673 - DNA, 424 bp, Glycine max
  unsure (1)..(424): unsure at all n locations
gcttagtctaagtgcattgacatgttcttggtcacttggtaccctaaaccaagtacaatgtgaagctgaggagttccatgaaagagcactggtaggacccgtcaccgaagcttggaaggttagtagcacaccatctgagaaagaggttgcatggagtaattgaaaaaagagaaagagcaacatcatcgtggacaagaagaggaagagtcttgtgagaatcaacagaataacgaacacattaactttnttttcattttctaattntcaaacaaaaacgatgaacataaagacgaaaatgagaaaaaaaattgaataatttttttgtttagcgaaaaaaattggatctgcaattctatttatataattagtattnttatttgcctatttaagcatttatttgaattttttatgttttagtgtaatt

SEQ ID NO: 137674 - DNA, 435 bp, Glycine max
  unsure (1)..(435): unsure at all n locations
ntaggaataagattaagagacatcattcttttgatagatttctaattcacatgtccaagcctagcatgccacatataagaacattcaacatttgcaacaaaagaagaaatgcttgatattttatcaatagaaagaggcataagacttaacttaaacaaaccatcacaaatgtagtctttaccaacaaaaacactatgtctagtaataacaactctattggactcaaaaacaaccttgtacccatgttggactaacaaagaagtacctattaaatttttcctcctaatatcataaatgtgatagactccatctaaaacaagaaaattcattgaagatatctctagcttcacttgaccttcacctaacacatgtgccatactcccaaaacattttaaatgatagtnagaatttgtatagagataggtaaaatatcta

SEQ ID NO: 137675 - DNA, 268 bp, Glycine max
agcttctcctttgtttaacaagagaggttgataaagaatccttatccttcatttcatggcgtatttagactatcacatttaaaagcattaacttatcaagatgggtttatctttgagcatttaaagtcgttaaacgcattgaacatcccctgtacctgagctggcataatgccccatgcccttgaaatgaaagtatgaaataatggcttaagaaacatttctcaataaagataagatataactcatgagaattacctgagtatcccct

SEQ ID NO: 137676 - DNA, 126 bp, Glycine max
agaaacatttctctcacatctcttaagtagcattcaagatttctatcacctctcatgtttgtatgaaaatgctatgcaagggattcttctttgctattttgtctgaaacacacaggaaagagaaaa

SEQ ID NO: 137677 - DNA, 155 bp, Glycine max
  unsure (1)..(155): unsure at all n locations
gatgagttagacatacctcttctgttttatggntctgtgatgatgtttatatgctgaaattgcccatggaaactgttagagatgaacggtttaattatcctatggtttcgaagtgaaaatgtggggttatgagtggaaaaagaatgagacttttt

SEQ ID NO: 137678 - DNA, 376 bp, Glycine max
  unsure (1)..(376): unsure at all n locations
acctgaggcacgcaagcttcctcgtcaaagtttacattatttgctcattgtttattcatgaacatgagttgcagaacatgggttttttttttttttttnttaatctctttatagggattaaaattaaaacaatttactagtcaaatgtatcaccgcttgnatctatctctttctttctggcacacccccgccccccctgtgtatatatatatatatatatacagggtcatctaagtgtgaaagtgccctgccagtttgaaaaaacacaagtgagagggactccctggttgttggtacatnctntgatcctacatgtgatttggtagaaatgggaagatataataagaattagaatagtctttataataagttttag

SEQ ID NO: 137679 - DNA, 406 bp, Glycine max
tctaagctaagaaagctctacttctgcacttcctttacttggtttgtcaacggagtatcaccttctatgcgtgacccgaactacatcacaatgaaatcaataaggccactgcaatatttggccataacttttacacctaggccttaaattaaatgccttctcccgaattttttgaaattgttgtcagcctgtaatatgatacctggcataacaagtatttgataaaaagttataaaatgttgtgataactgattgtttttttattgattgacctgataattatcagcaaacaattatttttctactccaacgacctttctgcaattttgctatataaaactctcgctatgaaattttgttattaataaaaccattaaatatactctatcgtaagattattcattta

SEQ ID NO: 137680 - DNA, 449 bp, Glycine max
  unsure (1)..(449): unsure at all n locations
tctatataagctgaaccatgttatcaataaactttagttttgtnttattcagaaaattagagtttatctcttttatcttagtgagagtgattctcctaaattcttgagtgattcaagaacaccctggctgtgtcaaaggactttcacaacctttgtgtgttgccctcgctggaaagagtgattctttccttcctttcatctttacccttgttctttcaaaccacaattccagaaaatccacctctgcccagaattatctcgtggccataactccgattgtacgcactcaaattaagtgattcttgagcctcatatgacattcaaaacgagacctttcacctcgtgttggaatcaccttatttggagccctgttgcttcagtatggccattgctatatttcctgtccgccaccgcttactctacatttaccatccatttatccatttttt

SEQ ID NO: 137681 - DNA, 427 bp, Glycine max
agcttcaggctgctcaattgctccaggtttctgtatggaagggcaaaggtctgtatggtggtcagcataggagcacaaaccacaaacccttgcgacaggtacaaatttctgattcaaggccagctgggttaccaagttgaccaatgcatccagtttgccttcaagcttcttagtttcagatgatgcagatgggtttgtagctacctcatgcactcctctaatgactatggcatcaattctggcactaaactgctgggagttggaggccatcttctcaattaaatttctggcttcagcaggagtcatgtctccaagggctccaccactgtcagcatctatcatacttctctccatattactgagtccttcataaaaatattggagaagaagctgttctgaaatctgatggtgggggcaaactgcacat

SEQ ID NO: 137682 - DNA, 362 bp, Glycine max
cttagcttctttaagaatcttttaaggaggtgagcttatttattataggggtgtgtgtagctaagctctatcttcttaaggaagttttctcaaagaagcttctcaaggaagttttctcaagaaagcttctcaaggaagctatcaagtctataaatagaaacatgtgttacacttgttgtaactttgatgaatgaaagttttatgagacacacttcaaagttccatttctctccctcttttattccttcaatttcgtgcctccccccttctctctttcttttactccattaaagcatcctcttcaagcttcttataccaggcaattcttggtggtgaaactccttctctcttgcttattccct

SEQ ID NO: 137683 - DNA, 271 bp, Glycine max
  unsure (1)..(271): unsure at all n locations
agctnggatggattcagcctatctaggtatcaaggggttagaatttaagctacaacatagaacaccaaagcatgattgattagagaaacatctttatatacatcagcttgtttgttagaaagacccaacacttttacctactgttgtcaatcttacttacttgcatttttactctttttagcctagacttagtttaattttgtctaaaccatcaattatcaatgtttccttcaacaatgccttatttatgaatttaaccctgtctaatact

SEQ ID NO: 137684 - DNA, 437 bp, Glycine max
agctgcttaaacacagacatactcagttatcttggtgtgttatgtaccaacattttaaaatatgatttaacatgcttatacaagaaaagtgagtgcctcccaattgatcacaaaaatagcacacccaacttagtattctagctagatcataacacacttcttgggaaacattagcagaaaggaacatacaaggaactcacagtcacaggtcatggtaggtatcttgtattctttctattgcagagggtgtctatttatctgtaatactcttctgtttctaatcagcagtattgcatgacatatggaactaacttttaaatgtcagtatgtatgtcttgaaatcttattctggtttaattattcatttggtcttatagttacaaaactttcccttttagtccttatactttaaaacacccccttttagtccctacaca

SEQ ID NO: 137685 - DNA, 241 bp, Glycine max
  unsure (1)..(241): unsure at all n locations
ctttaaccttgacttggtagaacctcttgccagtttgatttgttcccatgcttgctaaagtgagacaaaagctggtgcanatcaaaactccgacatctcatgggtggaatggatgaatgcatgaaggaatgtatattacacagatgcaatctatgaatgccggggtccggggaattcatccccttctatacacaacgtctaggggtagcnaagtgccccaacgacatttttaagaagcgac

SEQ ID NO: 137686 - DNA, 324 bp, Glycine max
agcttatgcgcatactattttacgaactttcacttgcgcaagacgatattattactaagaatattgcacccatatacgatcaagcgccttggctacctaaatgaagagtatggactatcaggagcttctgcaaccgacagcacacacattttctctgctgaaattacatacatgcatactcaaagcactctgtctatcagaaaacgaacacgcgcgcattctggcttttataatacctgtacatacacaaactctctgacgaatctagactatctacacaataatgcgctacaattcatgctttatacaagtgtttatgctacc

SEQ ID NO: 137687 - DNA, 337 bp, Glycine max
tgtgacggatagcatggaactggagtacatttcatatatattgaatggagcgagaaagcacaacaaagccttgctattatagactcttcatgtctggccaagaagaccattgcgcagactcatatcgtaccttaaatcttaagacctacatgaaaaagccttgaccgtttagaagagttacatctcttgagtgattcagaaactggcacaggtaaacgagttccacatctgaggaatcgattgcacgaggcttttctgttggaggatgtgagctctcacatatggaagtggagtttgtacgtgcacagacactggtaattgattaccaaatcattgt

SEQ ID NO: 137688 - DNA, 336 bp, Glycine max
agcttgccctggcgagctgttgcttcttctcagaaggcaccgccttctgttggaacaccccggaaggcccaagtgggcctaatttctattttcacacccttttttactaaatacacccccttttgctttttttgttgattctttttccgtaacgttacggaaattttcggattatgtaacgacacttattttctttccgtaatgttgcaaaagcttacggattacgcaataatccccttttttgacctctggaatgttgtagaactttacggattttgcgacaatgccccctttcgacttgcggcgtgtggggaactcacaaattacctaacaggg

SEQ ID NO: 137689 - DNA, 272 bp, Glycine max
  unsure (1)..(272): unsure at all n locations
cgcttgccagacgatgatgaanagattttcacaatagacaatatcagatataagatctaaaatcaaattccaaccccttgtcaattaaaacaaaggaaagaagttaggaaaaacacacaaggtttatactggatcgtctctgccattgagaatacatccaattcttgggaacccacaaaggtccactaactttaaaagtacaagtattcttcactactgcttttggctcttgcaacacaagctttaccccaagcttgattttaaacccagta

SEQ ID NO: 137690 - DNA, 440 bp, Glycine max
  unsure (1)..(440): unsure at all n locations
agctntgaagttagaaagtgtggccatgttatcatgcttggttctcaatgaacttattagtctttaattagctatgatcattaataaatgaagtcgagcaaataaccgccctggttcacaattctcacagaccataaaccactttcttgttaaatagataaccttttcttaccacaaaacattgaagaactatacaggtctcttacttataagtaagtgtattcttagttactttacatccactccaaatgcaattttgtttaaacgtatgatcctcacattctctcactggctgcatattccaaaactatacaaacaccaaaaattcaatgtgaggaaacatgtctctcttacacatgattggtcgcaacatggtatagttaacctactctgaaccagaaaaccgatatggacaacgatccgtttacctcttttttgaa

SEQ ID NO: 137691 - DNA, 350 bp, Glycine max
  unsure (1)..(350): unsure at all n locations
tgaactaaagattataagatgggtctgaaacctatcttatcgttttntgttgggcttattgagacaatcgccatcgggttgtgattgaaccactatgagatgtcaagtcatgcaaactttatacttgaaatgcccaatcctcaatgtgtaggggtgtattgaacatcccacattgattaggaatatggccaacataaagtatatatgtcagggcnncccggggcttacatgctagttttgtgggatttagttacgcttgaatctaaaatctaacatgttattagaacttatcatatcaatgttaagcctattaggccatctaatatcgggttgttttcaaaccactgtag

SEQ ID NO: 137692 - DNA, 340 bp, Glycine max
atagcgaccattatcaaaaaccagttgtttttattcgaaattagagttatctctttatcttagcgagagagattctcctaaattctagagtgaatcaagaacaccctgggtgtatcaaaagactttcacaacctcttggtcgtgcctcgctggaaaaagtggatccttccttcctttaatcttcccctaggctttcaaccacattccaaaaattcactctgccagaatatctcgtggactaacttccgtttacgcactccagtaagtgatcgtggccccaatgaattcaaacagaccttcactcgttggaaaacctcatggagccgggctcagtattgcc

SEQ ID NO: 137693 - DNA, 254 bp, Glycine max
ccaagttaccgagcctgcgcttgtagtaggaccaaggtacttttttcaccgaacaaattcaaaatataatacttatggactttttaattaatcattggaggtaaagattttaactttaaattaaaccctttataaacgaataacaaataacgaaagggttcaagttattaatttacctttggaaaaagctcctgtttagtacggataataaaagtattcgtagacatgagaaaaaaaatcgagggaagatcatg

SEQ ID NO: 137694 - DNA, 300 bp, Glycine max
ctaactcacctgaatgaggaaaaccaaaaccttgtttttgcttctagaacgcgcactactcctcagtgtccgtgaacccacaccagggatttggctggttgaaactcagctgacagaggcaccataaggaactgaactctcgaactcctaccaatggcccatatttttggccgataaacttttggtgatcgtttcttaaagccattagcctcttgaaaggaataagctttggatccacctattgcctcattaaaattgacccgtgaccacctttaagaatgttgcctgaaaaaggttttt

SEQ ID NO: 137695 - DNA, 273 bp, Glycine max
  unsure (1)..(273): unsure at all n locations
actaagcttctaaatttgctacctgctgcaatctcattttttttgtttcgtagncatccacgtattttgggctactaattctcctttttgcccttgcttcttcttctatgtattactcacgtcttggtgctagttctgaagtcataacatccccgcagactttcaaaacaaccttggtcttaaagttgtagcttctcttaaagactcccattggtcctatgatgtgtcttcaagaactaatcttgcccattgaaccaaaactagtaattgtct

SEQ ID NO: 137696 - DNA, 458 bp, Glycine max
  unsure (1)..(458): unsure at all n locations
aagctggagctgatcccncatgagttcactcaagcttttcattattattctacgtgcctggtagctcaatttgggggagcgggcttgtactggcactgctcaaaaccncaaaagacatgcctgtgatgaatccattcaatacaccgcggagcagatacaataaagataccaagaagatataaatacaaagatccttcgtaccctagctttcgtaattaaaagattatggtaagcctacatgcaaggaatctagacagttaaaatactttgcaaaaagcgacacttgatatccaaacatggacaccctgctttttgagaaggaaaaaaaaaaaaaacaagccgcacagtgtgcagttatggatctcacctttaaactaactattcgttgctttattgactataaataaacnaaaggccgagatccttggcgattatttaaaatataggggatacatatg

SEQ ID NO: 137697 - DNA, 423 bp, Glycine max
  unsure (1)..(423): unsure at all n locations
agctcgttcttgatatatcctaagttctgttacaagcttagaacaataaatttggccttctcttaattgtctntgggcttggcgaccacgatcaacaaagtactttcggcacctactatatgttgacttcaccaacgctgntattggaatgctgcgacaatctttcaacaccttattcacacattctgataggttggttgtcatgtgaccatatcgtcgtccagatgtatcagtagccatgctccatttttcctttgaaatgcgatcaattcatcttgctatggctggactcagttgacgaaaattatctaagtttgatcaaacacatgcttgcaaggagtgtacgctgcatcaaattttttatatcaaaagttgaccgtgacatcaactcaaataaattaatgtataaataaaccttaccaa

SEQ ID NO: 137698 - DNA, 463 bp, Glycine max
  unsure (1)..(463): unsure at all n locations
gaaactcagcttgaggattatggngtacccgacacatgtggtactattgttgatcgggcgaaggtgcaaatcaactctccacatccacaaatcaaacatgaacccaccatccgaagttgcccaccttcaactgagctcacgtactcccacgtagcccttatcctcgttcctctcagcaccgggtccccatcaacccctccaagcttccacaacatccaagcaattcaaaatccaaacatcatgaactaaccaaaaccaagagaacagggcagaggcaganaactctgcccaaaacacattccaataccacagctttctctactcanataccccagtaacatgttcttcgttccgaatcgttaaccgttggatcgactcgaaaatttactggaggtcctagtacataaatctacatttgaccgtgggatctgtagtaacgtcagacacatatgactacctttca

SEQ ID NO: 137699 - DNA, 358 bp, Glycine max
  unsure (1)..(358): unsure at all n locations
agcttgcctcaggaggttaggaatgtcttgcggccgaaggaactagttccgctcctgagtatgacagtcaccgctttaagagcgctgtacaccagcagcgcttcgaggccatcatgggatggtcatttctccgggagcgacgcgtccagctcanggatgacgagtatactgatttccaggaagagatatgtcgcccgcggtaggcatcactggttacccccatggccaagttcgatccagaagtagtccttgagttttatgccaatgcttggccaacaaaagagggcgtgcgtgacatgaggtcctgggtgaggggtcantggatcccgtttgatgcacatgctattcgccaactcct

SEQ ID NO: 137700 - DNA, 99 bp, Glycine max
  unsure (1)..(99): unsure at all n locations
actcacgcttctggtgactgggaagcacgttattctggggttttctcttatttgttctttcgccaagnatgtgtatatgagtatatctgtattatattt

SEQ ID NO: 137701 - DNA, 410 bp, Glycine max
  unsure (1)..(410): unsure at all n locations
agctntaatcgattatttaagctgttatctcgctnnaaaaatgataaaatgaatttcaaccgatcatttacgttgtaatctcgtttaatcactgttaaaacaaattctaattgatcgttcacattgtaaccacggttaaaccaaaaaaagcaaaataataataaaataatcaaaatatcttcgaataaaataataaaaaaaatcaatcggacgtttttctttggaagtttccttgaatgaattgactaataaccaatgtgaaactaaggctaaaatcaactcacaaatcaagctttgtctgtaaaagtcacttaaaaccgttntaaggtccaacgccttaaacggtcctctttgcttttatcggttaacatnggaccgttcaaaagcataaaacaacccattaacttact

SEQ ID NO: 137702 - DNA, 418 bp, Glycine max
  unsure (1)..(418): unsure at all n locations
cttgatgatatggtcttcaccgaagaaaggatttatgtgtttctaaaaagaggcaaatctgatcatcatgctttgataaatgccaaaaaaactacggcaaatgaagagggtgagaatgagggagaagcccatgctgtgactgccattcctatacagccaagtttcccaccaacccaactatgtcattactcagccaataaccaaccttctccttacccaccgcccaattatccacaaaggccatccctaaaacaaccacaaagtctgtctaccgcacttccaatgacgaacatcacctttagcacaatccanaaacaccaaccaagaaatgaatnttgcagcgagatagcctgtagaattcaccccaattccagtgtcctatgctgacttgctcccatatctacttgataattcaatg

SEQ ID NO: 137703 - DNA, 402 bp, Glycine max
tcaagctttgaagctgtgaatatttatcttatctccgacagccaatgggtgaagtcccgccaggtaatcccgaaaaagaccggtttcacagtgataaaaaatgagaaggaggagctgattcctactcgggtgcagaacaaatggagagtctgcattgactataggaggctgaactatgttaccaaaaaggaccattttcccctgcccttaattgaccagatgcttgaacgcctgccgggtaatctcacatactgcttccttgatggatttctggttatatgcaaatactattgctccgaggatcaagaaaagccacattcgcctgccctttggcacttttgctataagggatgcctttctgctgtgcatgcccttggaccttcaacgctgctgaatagtatt

SEQ ID NO: 137704 - DNA, 388 bp, Glycine max
  unsure (1)..(388): unsure at all n locations
agcttctattggattcatataccagagcttttctcttgcgaaattttgggnataattgggatgctttagaaacttgataagatttgaaactnttcttcctggatcattcacacaaaaagttacctctgattttacctctggtatgggattttttttttcttgaaaagtaacttctggtttgatcttcattccattatttctacaaacttcccagtatatgtttcaccaatatttatctaaagtgctattgtctctttctacataatctttcattgttttaactccattactattctgatattgatcctaaatatggggaaaattggatcataatttaatcataactcctttcgtatgctcatttgatggatcctatatctctcaatca

SEQ ID NO: 137705 - DNA, 367 bp, Glycine max
  unsure (1)..(367): unsure at all n locations
gaccttagaaactaagctttgtggcaacaatggtggatgagagaaaagaagaatttgtttgtttgagagagagggagagcttctgaatttcttttggctgagtgaggagagagaacagcttttggttttaaaagggttttctctcttcctattattttatttaagctatgccacatgtccccatttgagtggangcaaaaggacccactttctcttttgattgtgacccatactcagccacaaaaagtgagaaaaatctgacctttgaaacgctaaaatcctgcctcggtttgcatgtcgtttctctggttctcgttcctcgcgtttctctgcgtccattggggccagttttcgaaagtattctata

SEQ ID NO: 137706 - DNA, 302 bp, Glycine max
tctaggaagctacctagtctataaatagaagcatgtgtaacacttgttggaactattatgaatgaaagtcttttgagaatcacttcatagatccacttcctttcttcttttataccttcaattacgtgcccccgccttctctctttgttttcctccaataaagcatcctcttcaaacttcttattccaaggaattcttggtggggaatcatcctcttccttggcttattacctatgtgatggtgtctcacctaccttctttctttgtcttcccgtgcttttcatggtgataaacacaattga

SEQ ID NO: 137707 - DNA, 375 bp, Glycine max
  unsure (1)..(375): unsure at all n locations
ggaatcggacctcagtgtgaaaagttatgacgcattgtatttctctatgagctcccgggnncaattccgagcatctcgacatattatgtgcccgaatctgaccttcgtgtgaaaagttatgaccatttgaaattctcgagagcttccgatgtttaatttcgagcgtctcaatatattgtacgcccgattcgtagctcagtgtgaaaagttatgaccatttgatttctcgaatgcttccttggttcaatatccagcatctctacatattatgcgcccgaatctgaccttcgcgtgaaacagtatgaccatttgaatttttcgagagctctcgttgtacaacttccagcctctctaatattatgcccccgaatcgga

SEQ ID NO: 137708 - DNA, 337 bp, Glycine max
  unsure (1)..(337): unsure at all n locations
agcttgatcaaacaaaatctatacatttcaatccactcaattcatacattngctcattcaagtcattcacaaacactcatttcatatcaaacaaaccactgaaacatgagtcaatcatttcactgttcaaacaagcttnttgtgcaagcaatcaacactaaaacaacataaaagtaaaaagactgaaatttaaagactaataaagcataaactaaataactgacatgaacaaatatctgataaaaaattggtcataattggaaattttaaaacttgctgatttaaactccgacatcctgtgtgactttgcatactcttaaaatcacactggagcagt

SEQ ID NO: 137709 - DNA, 298 bp, Glycine max
ggtgactcacagtcgtgctaagccatattctgccgcttctgggtattatggaaaccattctggaggacagaggatcagtggaggactttaacctagtggtgggagttctcaaccaattaacaaggtgtctcattctgtggatataggtaacggtggtagaggtgctcctgctattgttactacaccacttacgttgtggaagtgtggttggcttgggcatattgctagtgagtgcacataatgagaggtgacttgcttttactgccaatgtaagggccacctcaataccaggtgccca

SEQ ID NO: 137710 - DNA, 378 bp, Glycine max
  unsure (1)..(378): unsure at all n locations
ctgttgaatngcttcagattgttgcactaaagggcaaaggtctgtgtggtggtaggcagaggagcataaaccatagagtctgtcgacaggtgcagatatttgattcacggcccagttggttaccatgttaaccaaggcatttagtttaccttcaatttcttagtctccgctgatgaaaatgaatttgtggttacttcatgcactcctctaatacaataacatcactcttggcactaaattgctgggagttggaagccatcttctcaattaaatatttgtgtttcaacaagagtcaattctcctaatgctccaccactggcgcaattttgcatactctctccatgttactgagcccttataaaaaattggagaaaactt

SEQ ID NO: 137711 - DNA, 290 bp, Glycine max
cttgaaataaataactaaccagttaaagatcgacgaacgttgttttatggatgaagaacgacagagaacgttcatgtgaattggtcacggaaacgtcacggaaagcgtacggaagtgcctcggccttgagtttctccttctttcttcttctcctcactaattttaagtggaaatctgaatactaaggggtggtgaactctttcccctcagcctctcatgcccatttatagccaaaataggggaggagcttgccgcccagctcgcccacgtgagctcaggtcgcctcaacg

SEQ ID NO: 137712 - DNA, 357 bp, Glycine max
taagcttgaagagttatatagcacaatactagacgtttttttatgttcatccacataacgggacatatatagtaaccctctagccaagaccgagagagcttgagtactctccctctatttgacttcccatttccacaactaatatatggttattttctttgagaagtgtgactgtgtttataaatccacgataaaaacacctaatgtaaaagaggagtgtcgttaaaatattttcacctaaacgaattgatacatgttgtagtaagacgagctttcaccttggtgacatgcaatgaatgccattctagtactgcgagcttgctgaaaccttctgactttgacagggaagaacatatg

SEQ ID NO: 137713 - DNA, 98 bp, Glycine max
cacggggaacccaaacagagaccacgcaacgacaaccgaggagaacaccacagaggccacccaacacaccgccgccgctacaaagcacggccacaaca

SEQ ID NO: 137714 - DNA, 435 bp, Glycine max
  unsure (1)..(435): unsure at all n locations
gctggtggattatggggtacccgtcatatgaggtttttgttgcgatcggncgatggcgcaaatcaactctcccacttccacaaatcgaacatgaacccaccatccccagttgcccaccttcaactgagctcacgtactcctacgtagcccttatcctcgttcccctcagcaccgggtccccatcaacccctccaagcttccacaatatccaagcaattcaatttccaaatatcatgaactaccctaaaccaagataacagggcagaggcagaaaactctgcccaaaacacactcacatattacaactttccttactcanataccccagtaacattctcttcattccgaatcgntaacagttggatcgacnttgaaaatttactggaggttcctagtacataagtctacattttgaccggtgggatctgctagaaa

SEQ ID NO: 137715 - DNA, 339 bp, Glycine max
  unsure (1)..(339): unsure at all n locations
agcttgaacatgcactntcgagcctncctatatattactggactcaatcaaacatccgataaaaaaggtattgtccgctgaataagctcacacgatcaacattcaatctcgagcgtctcgataggttatgggactcattccgatatcccgagtaacaagttattgtctttcgaactggctccaagcctcaccaatccatttcaagcgtcttgatatgtgatgggacgcagacacaatatccgagcaacaaggtatagtcgtttgaattggcacagagctcgacattaaatttctgagcggctcttatacgacgggactctgtctaacatccgaatgaaa

SEQ ID NO: 137716 - DNA, 433 bp, Glycine max
  unsure (1)..(433): unsure at all n locations
gacacaagaaactcagcttgtaagggaaggccctcaagagagctcctcaatgaagttatttattctataaacagaagcatgtgtcacacttgttgtaactntgatgaatgagagtcttgtgagacatacttcagagttccacttctatacctcttttataccttcaattacgagctcccccctctctctttctctccctctatattttcctccattgaagcatcctctccaagcttcttatgcaaggctcatctgggtggtgaagctccttcttccatggcttattccttaatggaaggcgcctcctctcacctattttcctttggcttccgctgcatctccatggcgggaaatcaccattagaggaccccattgaagctcagagatgcagcctccatagaagctccacaagcaagcttgcatcaagatgact

SEQ ID NO: 137717 - DNA, 411 bp, Glycine max
  unsure (1)..(411): unsure at all n locations
catgcaagcttagctcattcaagtttatatttttttacataagncaaagaaaattttgttcacataaaacttatgagtaataatatatgattcttagaaataaccatcaataaaaaacaggtaacctttatttatatagacttaaccacctgattaatagtatggatacaaaggttcatcatatgatgtgtctaaatttaaaacaatagtaagagtttatttgataataacgacatttcattgtcgacanatgatttaattacgacaacattaaaattttctgataggaaggtactttatatattgtgaacaaattacaacaaagtattcttatgtacacaagatacaaattttgtacaaccttcgtaaggggattataccttgttttaccactcaaaacaacaaaattta

SEQ ID NO: 137718 - DNA, 364 bp, Glycine max
  unsure (1)..(364): unsure at all n locations
agctntgttagtttccacctaagaactattctatctatgtntagtgtagnctctcttttcaatcatgttcttgtatatgcaaaactcgaatctgagatgctggttaatggatctaaactccgtttcactagaaccaacataatgttggttgagattcattgcttgaatttatntctagaatgaaaaatctaataagaattattgatattaaattaaaacatctattaattaagatatttaactttattgaaaaaattaaacaagtttatggtacctgaataatatatagaatattaataattgttctattaatgtactttttaataaatagcacagacatgtcacaaaaatgttttgatgaaaa

SEQ ID NO: 137719 - DNA, 374 bp, Glycine max
cttgagccaaaatcctgactcaccataaaccttgttcttgtgtgttatatgccatccttaccctcggaagcaaaataaagaaaagaaggaaaattccccaatcaaagagtgggagaaagcctaaagaaaagaaaggaaaattcccaatcacagaatgggagaaaagtaaaaaagaagaagaagaaggaaagaaagctcctgatcaacgatcgaaagaaaccataagaaatgtgccgagaggtctttggaccacacaatatctgaacagtacagaattgtcaccaaatgaacgaataaagaatgatagggaaccacgacctacaatagtcctctccctttgattaccaaccaaaaatccgtgcgctagcgacttt

SEQ ID NO: 137720 - DNA, 430 bp, Glycine max
  unsure (1)..(430): unsure at all n locations
agctggactcattatctgtcatatgctttttttaaaggcttggctcgacttacataaaagtctgatttggcccatgagcttatttaaaagcttgcttaaagacgtctttgattaattaattattttaaaatctagtgaaatactaactaaaaaaaacttataaaatttcgtataagtaatgtacaaatccaaaaataattgataaacaaaatcatattgaattcaagtcgttaaagcacaaagtatatcaaaagagaataaaaagagcatgatattaaaaaatgtatggattaggtcctcagccccaaagcttacaaatctattttaagttcaagcccataaacaaaataaaataaaatctggacaagataagataagattggatgaaataaaatctggacgaagataaanttagatggaatataatctg

SEQ ID NO: 137721 - DNA, 378 bp, Glycine max
  unsure (1)..(378): unsure at all n locations
tccatcagatcatatgcctggaacatccactatcctatatccacaactattncttcttgatgtcgagtagatgtaacgcccctaattatcgacttcttgatagctctcacacggtgacacttcgctcaacatccttgttggtcagaaccttctaccagatagaatcctttgtacgtagcccttttatagacctcgacaaccaaatttgacactacttgattgctctcaagatcattcgctattaccacaaaccaacacaagatttttcaacgtgatttgacctcactcacatgttttataggaaatntcccagaaggtcacccattccataactattctaagtcaaggatgcttaacaatgaagttcttaagtgatag

SEQ ID NO: 137722 - DNA, 413 bp, Glycine max
  unsure (1)..(413): unsure at all n locations
gcttctttggaccttgaacaggcaactatctcctttttcaaaatcatgctatgtgctcgcgactggtccctctcttcccttcgcagcttgagttcactgttgctaccccatagagctccgcgaaaatttttacggccatactcttccttgcgagccctcttggtctcttgttcaaaggctcgtgcggtggttgcattctcttcccgtaatccggcacactcctttcggatgtgtgtagcggccaactcgaacttctctttggcaagtttcgcctttcctaactcgcttttgagagcttgtacttcttcgtcctcttccggtgcttcaaaactctcttcgctgacgacttttaacttggcgagccaatctaaacctcgtacatgaactntcacccattcatgggaaccaccaat

SEQ ID NO: 137723 - DNA, 450 bp, Glycine max
  unsure (1)..(450): unsure at all n locations
tgtcctttattgtacattctccccacactgcaagttctgttttgataaaaaaaattatatcatgcaaatgctccaaatgaatgtggcacgtttctttttcaattctcacaaagttatgttggatcatatctcccaaaaagaaaaagaaagaaaggaaaaagttaagttggatcatggtatgcataattgaatcaattgggcaaaaattgacaacacaacatgtgatcaataatgttttgttaaactatgaaaaagaaaggttttgttaaacggggcatagggagttctgctttcagaatctactactattttntctgatttcagaatcaaaaccataaaaggctacaaacaattacagctagttaaccaaacagcttgcttcaattcctcatctcatacggacccatcatctgccatcgcacataatgctttgccattaataaatttcag

SEQ ID NO: 137724 - DNA, 330 bp, Glycine max
  unsure (1)..(330): unsure at all n locations
catgcaaccttgagatgaggaagtgtagaagggtgtaacttcttgcttttactcgnngaccacagagtggtacctgtagatatgtcgcgggggtcacgagaccttggggacgtcaggtggggtgctattgcccaaaaccaagcttgaccaatcccgacccaacccgggcatagtcagtcagtgagaacctgtgatgtacctaaacaggcgagctcctggctgtctacagattaaaagaacaaagaccactaagccaggaggcttgtggtggctggccaactgtgaactttgattgatatgtgggttatggcctctggtaatcgattacca

SEQ ID NO: 137725 - DNA, 202 bp, Glycine max
  unsure (1)..(202): unsure at all n locations
agcttgctgggcctttgctatatatctttaacttatgtttagncatcagacttattaagagggagacactaattgtttcttataaatagccttgtactctcttgcttttgggaaaagtggaataaaaattgaattcaactcactttgcaagtttgaaagttatgctttgggggggtcttatactatggtttctttaaaaata

SEQ ID NO: 137726 - DNA, 352 bp, Glycine max
  unsure (1)..(352): unsure at all n locations
gggctacgntatatacttatatttgatttcatagcgttcacttttatcttcaatttatagaaaaggcccaagctaatctggtggaactttttaaaacctgtatttaaaatgtgtgaatattntcgaagatcatttttcttgtccaagaaagcttgcatttgagatttctaccatcaaattctctcagttatgacttacaaatcctagtctgaagttctctaacagatgtattttgccatgtgacacgtcatcccgtggtcttactggcaagcaattcacaagatcagtggtcctgattcatggtagaggatgataacctcttttaaaagatatgctcaaagcctttatatgt

SEQ ID NO: 137727 - DNA, 429 bp, Glycine max
  unsure (1)..(429): unsure at all n locations
agcttgagagggggtcaccttattggtttgtcaaacttgnngatttccaggggctatccaatggagagacatcttaacaatagttggctacactggacgagcctattatggaggcgaaaaatgaactattacatctttatatcaatggcccttaagatatgcagactaagagggtaggcaatggcttgatctcttaagtacatttgttcatgcagtttaccaagagatgaatggtcttcttaagagagattaagatcagctagatgcattgctaaaagttttgtgattgggaatcacatatgcacctttttatggaactcgtctttgggggctccacttctttgcaaagggtcccttctattgtttctcaacagatccctcaagatgttgttttgggagctctttnttgtctttaacttttaaagactc

SEQ ID NO: 137728 - DNA, 462 bp, Glycine max
  unsure (1)..(462): unsure at all n locations
ngatatgaatgtcttagttcatttctgttaaactttgtatctttaaagaagagaagtggatacaaatttgttctgcaagaactatgactcccaatttatattagntcaaatttatgttgacgacattatatgtggtgttatttttgaacctctctgtgaggatttttctaggctaatgcaaaatgaattcaaatgagtatgatgcgaaagctgaacttcttcttatgactacagataaaacacaccaacattgacatctatatgcatcaaaccaagtatgtcaagggacttctcaagaagctcaagatggaagacgcaaaagatatgaagactcttatgcattcaacaacatgtcttggattggacaaggaaatccacaaagtggacatctccaatacaaagccaatgatggggtccttctatatctaattcatccaccttgattattattcaatgtggact

SEQ ID NO: 137729 - DNA, 317 bp, Glycine max
  unsure (1)..(317): unsure at all n locations
agcttgttatgagatcgactgtttggcattcatcttctcatagctgngagggaggagattgttggatatttttgggctccactaatgatgactgaatttgaaatgtcaaacttgggtagattggcatatttcataggcttggagttgtaacaacatcaaaaataatcgttctacctcaaaagaagtatgttagtgatgtactaaagatgttcaatatggcggattattaccctgcaacaactcctgcaaaagtgagttttaagctagacaatataaatgaagatgatagattcggtgatctcacattgttcaatcaa

SEQ ID NO: 137730 - DNA, 355 bp, Glycine max
  unsure (1)..(355): unsure at all n locations
tgaaaagattactatgtgctctagtataataattgtgcnatgattccaatgtgcccgaaaggtttcaaaatagtcgattaacatgattattttacttttcatacccgatggatatgcatgtgatgatcacgtgtgttgctaaagttacaaatgcttttaatgggtctgtccttcttgggtggnttgtggctattacttatttgtgctatgtggattaatgccatttgttttgtctcttctttcttctgaaggttttgctcatacagcccaacaagggctgacaatatccttagtttggaggatttgccacattctatgttggagaaattgaaatgcatctctgaatttttgtcct

SEQ ID NO: 137731 - DNA, 368 bp, Glycine max
gccataaactcagctgacatggaacggatattgcacttttttactggaattccaaaagcaagggcttatttacacatggaaaaaacgtgtttgaagctcgaaatgaatttaatagatgcttggcctggttagatcaaactggcccctggccagccaaacaacggctttctgaagttgctcaaggtgggaataaacattcgagtgggtcacctgatgttgccatgaagagctcaaatacacagctttctgcatccaaaactgcctctgcaaagattgtcccaggagagaatacaagatctacatctgcatctccagggtctacgaaatcagtgccttcacctgcacccgcaactgcaaacttgaaagat

SEQ ID NO: 137732 - DNA, 393 bp, Glycine max
agcttccttaagaagattcctaattaagttagtagttagctacacatacctctctaatagctaagctcacctccttgagatgagaagctagagcttagctacacaccccatataatagctaagctcaccccatgacaaaatacatgaaaatacaaaaaaaaatccctactacaaagactacttaaaatgcctcgaaatacaaggctaaaaccctatactagtagaatggccaaaatacaaggcccaaatgaaggaaaaaccaattctaatatttagaaagataagtgggctcatacttagcccatgggctcgaaatctaccctaaggctcatgagaaccctggggccaccccttgaatctctggcccaatctactttgagtcttctatctaat

SEQ ID NO: 137733 - DNA, 348 bp, Glycine max
  unsure (1)..(348): unsure at all n locations
tgaagcttggagaaaagcttgaagatgntttgtgttttttatgcctaactgacgcaatcctaccccgcaagggcattggatagaagactccaaatagatgtggccacagatccaagggaaggccctatggttctcatgagccttatggtagattttgaccccatgggcttaatatgagcccgcttatttttgttaatattagaatagagtttttcctttctttacgccttgtattttggccattctagtagtataaggttttagccttgtattttcaggcattttgagtagtctttgtagttgggactttttttgtattttcatgtattttgtcatgggggggagctt

SEQ ID NO: 137734 - DNA, 410 bp, Glycine max
  unsure (1)..(410): unsure at all n locations
agctttgagcaaattctaacgattttatttttntactcggatgtctgattgagtcccgtaatatatcgagacgctcaaaatggaatgttgaagctctgagccaattcaaacgacaataacttcttactcggatgattgattgagtcccgtaatataatgtgacgctcgaaattgaatattgaacctttgagccaattcaaacgacaataaatttttactcggatgtcctattcagtgacgtaatatatcgggacgcttgaaaatgaatgttgaacctctgagcaaatccaaacgacaataactttttactcggatgtctaattgagttccgaaatatatcgagacactcgatatatcgagatgctcggaattgaatgtgaaccctcaagccatttaacgacataactttt

SEQ ID NO: 137735 - DNA, 393 bp, Glycine max
  unsure (1)..(393): unsure at all n locations
cattcaacttcgagcggctcggtatattacttgtatttattaacatnccgaataaaagatattgttgtttgaatttgctcaaagcttcaacaatcaatttcgagcgtctccatatattacgggactcaatcagacatccgagtaaaaaggtattgtcgtgtgaatttgctcaaagcattaacattcaaattcgagcgcctcgttatattataggactcagtcagacatccgagtaaaaagttattgacgtttgaatttgctcagagcttcaacattcaatttcgagcgtgtcgctatattaccggactatttcagacatccgagtaaaagttattgtcgttgaattgctcaaacttccacattaatttcagcgcttcatatttagggactcat

SEQ ID NO: 137736 - DNA, 239 bp, Glycine max
  unsure (1)..(239): unsure at all n locations
agagcttatctacacacacccatctaaaaactaagctcacctcctttggaagcttccttgagaaggttgaaggttgctacacccccctatataagcaagctcacccccttgcaaagaaacatggaaataccgnnaataatccttcttcaagactactcaaaagccctgaaaacaaggctaaacccttactactgaatggccaaatacaaggcccaagaaaaaacacctatttacttttt

SEQ ID NO: 137737 - DNA, 335 bp, Glycine max
acctataaaactcagctttaagaaattcaaatggtcatgagctttttacactgtattttctattcagacgcatcacatattgagacgcttgaaattgaacagcggaagctcttgagaaatgttaatggtcataacttttaactcggatgtcccactcaggcgactcacatattgagaccgccgaaatttcatgggcatacctttcacactaagtccgattcaagcttatatatatcgagatactcgaaattaaaatctgaagctctccgaaattcaattgggcttatttttcaaacagatgtccattccaccgctatatgttgtgacaattgaat

SEQ ID NO: 137738 - DNA, 276 bp, Glycine max
aacaaaaagaactcactagggagtgtgattcaagtctccacgaacatcacatctatgtcagctgcttataatcatgacggagagccgcccattcgaacaaatcgaccagcaaccgtttattcaaatatacaaggttggcaccgagctcactttcgaagcatcattagcatctaattttgaagcactactactgatgctaatcacaatatggaagcatcattaacatctaactatacactttgcggctctgccaaagcatccttaagatcctttcgt

SEQ ID NO: 137739 - DNA, 439 bp, Glycine max
  unsure (1)..(439): unsure at all n locations
agctngctaattaacctgaaattgagagatatatgattattaaacacacaaaatgaaaatactaagtatttattacctatacttaatagaaaatacttataacactacaaaataaccataaattgggagagtttgattcaatttatacaagttttatacacaaaagttagtcattttcaccgactaacaactcccccatatttatagttttgcttgtcacttgtcctcaagtgacaatgacatgcagtgaactatgtacaaaggtgtatgctacaaagttattgattgcatgatgagaaagatgaagcaatgtgtacctataacttgtcttcacaaaatatgcggatattcaaagagaagaataaaatgtgaactgaacaaatagaaggagttaggcataagacatatattaaggaaagtagcttanaccatagtctca

SEQ ID NO: 137740 - DNA, 449 bp, Glycine max
  unsure (1)..(449): unsure at all n locations
actacgctgcttataagctgaaccattttatcaataaacacaagttgttttttattcagaaaattcgagtttatctcttttatcttagtgagagtgattctcctaaattcttgagtgattcaagaacaccttggctgtatcaaaggactttcacaacctttgtgtgttgccctcgctggaaagagtgattctttccttcctttcatcatcacccttgttctttcaaaccacaattccagaaaatccacctctgcccagaattatctcgtggccataactcccattntacgcactcaaattaagcgattcttgagcctaaattgaatttcaaaacgagacctttcacctcgttttggaatcacctcatttggagccctgtagcttcagttattggcatttctatatttctgtccagccaccacttaacctacgttttaccattccattca

SEQ ID NO: 137741 - DNA, 444 bp, Glycine max
  unsure (1)..(444): unsure at all n locations
agctntcacanattacaatcgagtgattgtgtgtttctcacgaacttcatgcatgtgtttagtattataggagcaaaatagtaaaaataaaaaggttaaattaataccaatttattatctcttcgctataactttctacattcttctaaaaaaatattctctctagggaaacacctgttttttatgggagcaaaatctttttttatcaaatacatataagaaaaaaaaaattattgtggggtaattgcccccttagtccctaacctacatccttccctgctactactactttttctaagccacataatgggagcagagttaatcgtgtctgcaataagtttggcacacatgattcgtgccccatctttagcaagattgttaagagttgaggatattttagttcttatattttatttgtaatatgcgtgtatgtctgtaacttca

SEQ ID NO: 137742 - DNA, 481 bp, Glycine max
  unsure (1)..(481): unsure at all n locations
cgcaagtgtaatcgagttacttgacttcagtgtgcaactgattattatgggttgtactaaaactgaaaggtacactcaaaggagtattccttatgatatatatatatatatatatatatatatatataatgtccatcaaactataaggcattaacatttctacgaacaaggaatcgtaaacatccatacaacaaacatacatagacttataggctcctaccacaagcatataacgtacatacaagaaataagaattgagctgtcattaatagtgcattactaaatcgcaagcttcaacaattacattcatgactacacacaaaataaagggagttaagtagtcatgcgtttacacatcaagagagacacactcatccaaggcatatatatacggttcanaagaatttcacaacactaatccacacatcaatagagaaataagcttattaacaacatacatgaaggaagatagggctcatta

SEQ ID NO: 137743 - DNA, 464 bp, Glycine max
atccttatagtcacctgcggcatgcaagcttattactttcacagaaaaatatattttgttgaaacctaagaggttgagacttgtaaacagtccattacgtaagtcattcagaaaagcattatttacatctattttaccaagatcccactgatttgtaatggctaaactaacaacaattctaatagtaactgattttactagtagagaaaaaatcatacccttgcacttgattgaatccattggcaaccaataatacttatttatggaaccatttgcattttctttcaccctaaatacccagttagagctaatagccttcttgttagatccaagaggtattagatcctaagtattattcttcatcaatgcttcatattctagttacataactaacaaacaattctgagaagccaaggtatgtctcatattctttggttcaatatgagttaaaagaagtataggat

SEQ ID NO: 137744 - DNA, 483 bp, Glycine max
  unsure (1)..(483): unsure at all n locations
tgtaggattatggggtacccatcacatgtggtactaggtgtgttgtcgggcgatggtgcacaacaagttttccacatccacaatgcgcgcataaacccaccatcccctgttgcccacctccaactgagctcacgtactcccacgtagcccatatcctcgtttctctcaacaccgggtccccataaatcctcccaagcttccacaacatccaagcaaaacaacattcaaatagcacaagctatcacagccaagcaaaacagagcaaaggcagaaaactctgccaaaacaccaaccaaatcacagcttttctcacttaaagaccccagtaacaattccttcgttccgattcattaaccattggatcgactcgaaaattntactggaagtctttagtacataagcctacatnttgaccgttgggatctactagcaaacatccagaactccttctgcactactctntccacagccagcaaatgcata

SEQ ID NO: 137745 - DNA, 474 bp, Glycine max
  unsure (1)..(474): unsure at all n locations
cgaccgggatcttaagcacctgcggctgcagcttttatccaggcaattcttggtgtgtgaatctccttcttccttggcttattccctagtggatggtgcctcccctctcctcttctcctttgccttccgctgtatctccatggtgaaaaatcaccattgaaggacctcattgaagctcaaagatccagcctccatagaagctccacaagcaagcttccatcaagtggtaatcagagcacaagagcttcaagcaggtgctccttaaacctccattaatttttttgctttaccttctcttccattgttgtttcttcatttttttctccctgtatctcctcacatgtcttgtgattaatgtttttaacatgattctttagagtttccaccgattaaacttgctatagaagctagaatttgatttctatggttcaaatntctagttcttgttcttgaaccatgaattgtgttgagttt

SEQ ID NO: 137746 - DNA, 212 bp, Glycine max
  unsure (1)..(212): unsure at all n locations
tcagaccaaagcaactcaaaatctaagtatctaagacctctcaatttagtggattntcaaggtttgagaagtgaaaatgagaatggtgtataattggagcaaagtgtcacctcacacaagcctataaccttaatctaaacttgctcaaactggttttacgcctaaaattccaccagatcaaaatttgactcctcaacacccaattttaccct

SEQ ID NO: 137747 - DNA, 435 bp, Glycine max
agcttatgatagtgactccacatttttttgtttagctgttattgatcgacagccttcttgcaaattaattagttgtatgaggaagagagaaagtgcatacaaaggatcaagccgaatgtttggaagacgccatacgattacatgcagcatatgcttctcaaagatttactacataccaagccattagagatattcaagagggatgagcacgacagtctatacagactgataacgggtatatcaaatatgataggaattccgatcgatatctcgcaaggaatggccagtactatgaagataaaaagcctttattcaacaagtttactctctggtaatcgatgcaccacacgatgtgaactatactcgcggccgagactgatttacaacagcgtttagaatttgaattcaaaacttgcactgtgtaatagactacac

SEQ ID NO: 137748 - DNA, 349 bp, Glycine max
tatacatttattggcatggtgagctagtaccaagtatgtacatttatctctaagatgagtcatctgaatcgattggtaagagttgatacacaccttaggatcatgaccctcgtcagcagtgagagactcaccgccatacaccagatggagacaatatgtatgtgcgagtgcaacatgattatgtgaactctacagcgacttcaccatgtgatgcgtcaaagcaatgaagaattaaagtaggaactcctcaatatacctactattctgattggagcaactttcttggccactgatacgtgcgctaattgctctctgaatcgaagatgattctctgaacctacttctatga

SEQ ID NO: 137749 - DNA, 211 bp, Glycine max
acctagaactaggctcataatcactctcgacaaaggcaatgccacctcgtgctagcgctacttggagatatatgattcctatcaatactattttgcatgccattataactatcatacatacactgcttgttccccacagatgccatgcaggcttggaacatcaatattaaaggcccccactgtcgctgaactatgttgtgacagcgcttca

SEQ ID NO: 137750 - DNA, 277 bp, Glycine max
  unsure (1)..(277): unsure at all n locations
tgcgcagataagatcgngggcatggaaaagggtgtatgatttacaaaagaagaaaaggtgtgtcttgcattcactccaaagtcacacaattcaagcacttgttgtgagcttgagacaggaaatgctaatgtggttcaacccttttaaaccttaatgtcggntcaatataattgccactaaatcatattctctttgtagtgattcatgatacctcatacgaatatgctaggtctatgtttaattggactaaaggaaaggaaataaatgaattcatact

SEQ ID NO: 137751 - DNA, 440 bp, Glycine max
  unsure (1)..(440): unsure at all n locations
agcttgtaaacaaattgtgcacatgtttctgtcattgtgagtatgtgggcagttttgtagaagcaagactaaagtgccggaagcatgacttacacctaggaatctaaacttttcgttntgaatgtaaagatgcatgaatattaggacatgtttgagaggtttttgactagaatttgggtaggctgcctcatgaggaataccttgcatctaggtagcatggaaaatacctttcaatggtatgtatatatgtgaatatgtatagcatggaaaatacctttcaatggtatgtatatatgtgaatatgtatagcatggaaatgccttacaaagtgtgtgaatatatagcaaataatgcctttcaaaattntgtatatgttgaattggtagcgttaaaatgccttcaaaatatgtatattcgtgagtaggtagcataacgagcct

SEQ ID NO: 137752 - DNA, 473 bp, Glycine max
  unsure (1)..(473): unsure at all n locations
cttcattntcagtaaatgaagatgaatctgtggccacctcatggactcctctaagaacaatagcatcatttcttgtactgaattgttgggagttggaagccatcttctcaatcaaattcctagcctcagcaggggtcatatcaccaagagctccaccactggcagcatcaatcatactcctttccatgtttctaagtccctcatagaaatattgaagaaggagttgctcagaaatctggtggtgagaacagcttgcacacaatttcttgaacctttctcagtactcatacaagctttctccactaagttgcctaattcctgaaatgtcttttctaatggtagtggtcctagatgcagggaagaatttctccaagaacaccctcttaaggtcatcctagctganaatggacctgngcgcaagatagtacaaccaatcttttgccactcccttcagagaatgaggaaaagccttt

SEQ ID NO: 137753 - DNA, 441 bp, Glycine max
  unsure (1)..(441): unsure at all n locations
agcttgcttctacactcaggaagcattatttgccatcaacatgttgtggtaggttttcaattccttgcgtcttctcctcttttgcgatgcctctatccttcttcgtttgcctcgttttcattgcaggagaaattccttgagcaattcatgcaggaagcttatgctttttgtgttcgggaccgcaagaaatgcctcaggtatgatcacctaggtaatgttttatccataagtgagttcaatgatatttaaaattgggtcgatactgtagtctagtagtgtttgttgtaatgtagtgtataattgtgaaccctagaaagaacataattgctgcctgggggtgattttgtaaattagtgtgtatatatattntgctgcaatcaattgaatgctttataatgtatcattctttttacatctgatatacgtgttcatgttcaatcc

SEQ ID NO: 137754 - DNA, 479 bp, Glycine max
  unsure (1)..(479): unsure at all n locations
tattctagccgcaacctcatccttccaggggaggccttgttctccacagtgagcacaagcttctcctcanagggctctgctgccacaaacaccaaatcctcattccacattgngtttggtgtttttgttggacacaacttagtcttgagcacttgttgtccaacttgacccttcacaaaaacttggggtggctggcttttgtcatttggctccacatcttgagcctcaatcacattaaccctcaaataccacaattttgggttaacataaacctttgaccttatgttataaaccccatctcccttaactgaagcagaatctgaatgccaagcctcaggaaatgcttcatcagcttgtgtccccatccaaacagcaagcatgatctcccctctacttcttgcttcacccctcanattctcaagcctataccatngaggagccaaagggctatctgggggcacccttgttggcacctcatg

SEQ ID NO: 137755 - DNA, 435 bp, Glycine max
agcttgtgctaaacacaatactttttttttttatctctagcatgcacccattggctttttacccactcctcacgattggtcttttacggataaacaccataactaatcgcgccacaatgcatccttataccaccagatccaaatctataacgatgggcgatcaacatgagacactagaacacatgacagcccacatgtctgctctgaaagaacagattgcttacctgatcgaagccatgttaggaatgacgcacctcatggtaaaaaacgtggtctccgctgccgctgtcacttctgctgtccaaaaccacccaactctattgaaaaccgcgcgccatcctatctcatacatagtatgactgggaatgaacacgctgttgcactactgatacctctatctgggattcaaccgagcggcttaccacttaggattgc

SEQ ID NO: 137756 - DNA, 331 bp, Glycine max
  unsure (1)..(331): unsure at all n locations
tgttggagtaganacatgggaccaactcatttattttttatggaagncgtatctagtcaaggccttagagaccatacaagtttcctaacgatttctaactatgtgggccattaagtctatcatatgctgacaatagccgagaagcccatgaatctcttctggggcggagtacgtgtctgccatcgccttggccttggctaacaatcggggaagttcttgactcccgttcaaggaaagagcanaccgatccatccacatggttgcctcttggtgtaaacgagcaatcacccttcctctagcctctctttccgcgtatacttgggcatattcc

SEQ ID NO: 137757 - DNA, 408 bp, Glycine max
  unsure (1)..(408): unsure at all n locations
agctatgactcggnggagccatatctttttctaactcattatcatatttacgattaaatgtgtacaggcagcggttgacaaacagggaaatacttccattttaaggtacatgctcgaagtttttaccaatggtgaatggtgatattccggtttcggggaattgattctaaaatatttttgttgacgctcaagttagatatcgaatcatgcatatgagataataatgataattaatagctggttgtccttgagaatntaacaccctccttcagacattcgtaaactctgactttgatgtgtgtacaaagggtgcttacaaaatttaaaacagaaatatttttgctgtggatttttgtatgtgagaacatgtttttgatgtagattttgtacaacgacatgtgcttgtgt

SEQ ID NO: 137758 - DNA, 396 bp, Glycine max
tctacttatgtggcagggcgggcttgcttcactatcttgtctccaacgcgagctctgaccactgtcctttcttcccgcgatgcttcttttcatgttcgcctgaatgggcttatagcctaaaccatacttgccacgatttccttgggtttttatcaagctagttatgccgccattgtctattgctaaacccatcccgggttcataaccgatccccaacataactcgggccatcattaccgctgcatcagacagacaaggctgcccaaagagggagtccacggaggaaatgctgaccacctcaaaagactggagaagcagttctaacgattcttctgcggcttccacataaggcatggaggatgggcagcttaccaagatatctttctcgcctgacac

SEQ ID NO: 137759 - DNA, 313 bp, Glycine max
  unsure (1)..(313): unsure at all n locations
atggaattctaatctcggtatcacttactttttatacccccttttgacgtgcctaagccatttatttaagtcatttctcgcttaaccctaaaataaaataaatttccacccaatcgttgaattgtatcatccgttaactttggttgaaataaattccgaccgatcggtcgtgccggaaccacgttggaaataaaaaaaaagggaggtaataatgatgttataaaacaaataccttttagtaaaataaagcgaanaatcaatcggacgttntctctttgggatttctcattcttaattggattgactaaataac

SEQ ID NO: 137760 - DNA, 455 bp, Glycine max
gatcttaagcaccgcggctgcagcttcgccagtgacctggccacgcttatattttcttcagaacgcaaccttggaacctgcatctgctcaaattccggcagggaactttcacttcccaagataaggccaaacagagctttcaaacactccgaaagaacagctggactagtgtcctccatctcagccaatggggtacccacttcattgtccccttccttgtggattgaattctggaagtgcggcatcttctctgacaaattacatcttcttaagattgcatcagcttctttttccacgagaacacacaaatgattatctatcattgctccaagtcttttcacgtaatcagcaacagcctcgtatccagatagaggttgttgaatggcacacaagcagttaatgagaaaaatctttgaaggggtttcactagtctgtcaaaacaaacatggcataag

SEQ ID NO: 137761 - DNA, 464 bp, Glycine max
  unsure (1)..(464): unsure at all n locations
tatcatcacttgatatcatgacatctatgtccaatcctttctttttatcctaaaataattacaaatcagatatgctttaaccatcaattaaatgtagtagcaagtaaattaacattccatgggcaataatgaggttatgcatgctctcggtgataccatccattgagtgaaggaataattaaagcttttgcttttcccactaagccaagatcatgttgtgaaggttattctttgcattaagctttgagcttcaaatactccccctttgaatatgcactcattcctcacaagccaaatgttccacgcaatcgctacccacaccacaatccatctttcgttgtctntgttgttttgtaagaagtgatcatgttggctcatacgtgcttncggtgagttcggtaagaccgattntatgcccaactaccaatagcaagctttccatacttncaccactcccttgcatg

SEQ ID NO: 137762 - DNA, 457 bp, Glycine max
  unsure (1)..(457): unsure at all n locations
ttaagcgacctgcggctgcagctaaataggtgggttggttcgtgctctcgtgcttagcgcanatctaaatcgcttagtgcgcataagtggattttggtttagcgcgcttctctcgcttagcggatgagctaaagcagtgcgcttgatgacctggaacgatgcgctcagtgaacctgacagctcatcttcttctggattcttccttgcgcttagccactaagtgttgcgcttagcgaatgcttgctaagccagcagattggcttagcgagaaggtgaaaacaacacttttgtcaatttgcctaattaacctgaaattgagagaaattgattattaaacacacaaaacaaaagtataaataatctattacctatatttaatagaaagtacttataatattacaaaacaactataaattggagaagtttgatacaatatacacaagttttatacacaaaa

SEQ ID NO: 137763 - DNA, 358 bp, Glycine max
  unsure (1)..(358): unsure at all n locations
ccggtgagagtgtgaccttactctatgtgtgttctactaactgtgagtaatgatctttgcatgaatctctgaattctagaatgatatgtataacttagaacatgatgaaggccatgatttgtatatacacaagctcttttgaccaaatagttgaccttgaatgataactgtatcttttgctccttctattagctgaatgatttttgtcatgaattgaaccataaacttaaatgattatctcctgataccttgtttagattctaggagagcatatggttcaaggcaaatttactctaaatatggnggaggaaagtcaattagaatgaaaagaaaaaggttaagcatcgacacacacaac

SEQ ID NO: 137764 - DNA, 444 bp, Glycine max
  unsure (1)..(444): unsure at all n locations
agcttaactcaacgcatggtgtnttctatttctgttgcgtttgagggtatgaattattttgggaaattaaaattaaagcaaaacatgtatgtttatatttggacgtcccttgatttcatgtactatattttagagacacggagtttctcgatttggtgttcctcaatccatttatgatgcatatcaaacatttcctacattaagataataaattaacatcaatcttgtcttccacacggcaagcacgcgaaagcatttaaacattccctttcctcatttgggctgaggctcctaaagagaacaagttaaaacaaagggaagagtaagccggtctaacatgattttagcaaaatatctatcggatnttgtttctcttccctctctanttttcttttcgcaaccaattctcacactttgcaagcagtgtcattaaaatattcaaaa

SEQ ID NO: 137765 - DNA, 495 bp, Glycine max
  unsure (1)..(495): unsure at all n locations
cacttaaaactaagcttacaacctacatttaanagacaaaaatatattaggttcattatattcatgtcaaaactacaaaccagatcaggacatggcaaatacatttatatatacatatagttcaacattttgacaacattaagtgatatgacaaacaatcatgagtttcagcaggttcttagttgaaccatgagttttttgacaatattttccttgtactaaggattattttgattaggcaatcaaaaaaatttgaatgtcaaagaaagtgcgttgatggagcattggagctcaagattgtgccatttgtagaacaagttgatgaacatcttatggacaatttgaacaacaatctcttatttgaaaaaaattcatctgataacaattccagcctgaacatgattttcatttgtgaaaccatggagttaaaaaatntatctccttgtctgtcttctanggttggaaggatngcttctaaataatcatttcatcgat

SEQ ID NO: 137766 - DNA, 446 bp, Glycine max
agcttgccatccacatacaagcatatattgtttcaatcatcattcatagacttcgtgtacacacatctatcaacatcactagaggaaaaaccatcactaagcaaagtctaattaaacttttcatgccattgtttttgtgcttgtttcaaacgatatggagattttaaaagttttcacactttgttttcttgattagtgaatttcagctatggttcaacccactaatccaagatcaaatccaaaattctccactaagtgtgcttaggtttcatgaggcatgtaaagcatgaaggacatgcacaaagtgtggcaatggggtgtcacaagcaaatgctcacctcccccttaggctggtccaaaatttaattggattgaacttctcccaattaaattaaatatctctcccaacacacacatcaaatagtgcacttaatgcatgtgaaatt

SEQ ID NO: 137767 - DNA, 438 bp, Glycine max
  unsure (1)..(438): unsure at all n locations
agctatggttgaaacacaggtcatcttgtttgttctcttgctganaatgcagggnttcaaaccccataaatgttttccaatgccaaaagtagagggaaaatcatgaaaaagtaatatgaacgataggaaagcacagaacatggggggtactatggattttttttcctgtttcaatataataccttcaatggccatgacatttccaacatagcagcaacaatcacaggcacaacaaaacacaatgggcaccctgaaacagactcatgcctctcctctacagtgcactattgtgcatgattgaattcttattctatcctcaatgataataaataagtatgtgccctgtgccgatatggccttttaaatagagaaagataagaatgaatgactataacattcataaggatgaataaggacatttagtattcagctcacttg

SEQ ID NO: 137768 - DNA, 475 bp, Glycine max
  unsure (1)..(475): unsure at all n locations
tattaaatataaaaaattaatntaatttttataaaaaatacttcatgtataatctttattccaacctaacaaaataacttacaaaaaatgtgtgatactacataaatttcgaaaatcacctaacaaaataacttacaaaaaatatgtgatcttccaaaaccatctaacaaaataacttacaaaaaaaattgatatcccagaaattatcaaacccacgaaagcaaaaacgaaagcaactgcaacagccaaaacaactgaaaaaaaatggtgaatgagggctgtatttaaagaccctaaaacgccaacaccatttgcgcttcctccctgctcctggtctgccaaagctgttgtgcttgctgcaaacctaaaancgccatttgactggcgcccctggtctccatgcacaacgcgccagtgcaccttgcgcgtcccactccacgtaagcagaaggtcaagccgcagctgcaactagcgc

SEQ ID NO: 137769 - DNA, 438 bp, Glycine max
  unsure (1)..(438): unsure at all n locations
agcnttttatncaaggcttatcttgttttgaagctccttcttccatggcttattccctagtggatggcgcctcctctcacctcttctcctttgtcttccgctgcatctccatggtggaaaatcaccattaaaggacctcattgaagctcaaagatccagcctccatagaagccccacaagcaagcttccatcatggcccatataattagaaaccgctaggaagtttgtattatcactcagatcttgactagttataactttttgaataaaatgagtttgtcccatgttcttactccaaaagtcagtgcgaatcaaatcattctcgcattttatttctagcatgcattcatatcatgcatcgcataagcatctcttcatggcatcataatgaacatatcgtgcctgcatatgccccgtatcataattcaacatgacatt

SEQ ID NO: 137770 - DNA, 384 bp, Glycine max
taaggatggaatacttacttgttggtgatgaatatttgtgtctaacggaatcgaaaaatgcgagaaatagtgatcctagggctgcaaactcgtaaatcccgtgggtattgcttttgaatggggggaaaaagtttttgaatgcaaaaacgtccccctccttctttttttttaattatggtgcagggggttgctcgcccaggcgagctaacctgcactttttttttgtgtagtttatcaacatcgcccaaaaccttgattggacaacatcccatggattattttttttaaagtcgattgattttatgagacgactgtacacaggaatgactcgcgtgaggggaccaaagcttttgatgctccgctagccactccgtaaggtactga

SEQ ID NO: 137771 - DNA, 456 bp, Glycine max
  unsure (1)..(456): unsure at all n locations
ggatccttaagtcacctgcggcatgcaagcttctcactntatataactacttgtgttttttcatctagancatgccctcgtaaaaatggtaaattagatgtcactgtgaataagagaaacaaacaaaaaccaagaagttttatctgatcccatttaatgtctgtagttgttttcctcgggaaaattgggaaacatggcacttgaaagctgcatttgcaggcacgtatggtggtggcactttgctaaccttcctttttgtcatctttcatttagcatgatgtcaatcaaaatgctgcaaaaggtactgattctgttttgaaatgcattcacattatcttggaacaccgaaaaattcatacaaattgtcatatcttatataagtatctcaatctctcaatttttattaccttcttcctatacgtgcatttcaaaaatacatgtcaaagccaaagaagc

SEQ ID NO: 137772 - DNA, 478 bp, Glycine max
  unsure (1)..(478): unsure at all n locations
tcgacattaattcgtcccattntctcgatagacttggcttatttctcanagaatccttgagttgattgaagttgtctatcgataatagaccttgtgataggactagtaagaaattcagcatctgactgaaacaagccccttctcttaacaacttgtttataaaatccaagatcaaatgtatcgcgacttccaggatccatctcaataattgtattatcattgatgttcttacacttaaaagttttgatattttttgcatattcactgtctagtgttgggtctatgtcacccttgccagtgaaattgtatagacgagttgcaattgatgaacaatgggcaacaccaattgtgtgagcacctganagaatagaattttttataattagagacaaagtttaaaatgtagaacataaaagaggaaaaaacttagatatannatattggtgtttctggtattattttcaatcattaatagagt

SEQ ID NO: 137773 - DNA, 443 bp, Glycine max
  unsure (1)..(443): unsure at all n locations
agctacctcggngccatttcctgcttatgttaacatttgaaaagttagttntaccaagaaatgctactcttaaaatgaaaatggcatacaacctcctccaataaacacaaacatcaatgtaaatttagagcaaactcatgcacatacttccttacgaacattcactcgcacaagatattcttctaactaaaaaaaatgcacccatgcacaatcaaggcaccttcgttacctagatcacttatatgcacttccaaggtgtatttgctacctacatcacatgcatttcctttgctaaatttacatacatgcatactcaaggcactttggctaccaaaaattgcatacgtgcacatttaggtatttctaatacctatacatacacaaacttcgtgatgaatcttggctacctacacaataaggtgctacatttcatgctttattca

SEQ ID NO: 137774 - DNA, 454 bp, Glycine max
  unsure (1)..(454): unsure at all n locations
tagaggggttgatggggacccggtgccgagaggaacttttataagggctacgtangagtgcgtgagctcagttgaaaggtgggcaactggggatggtgtgtttatgtttgacttgtggaagtgggagagttgatttgcgccatcgcccgatcgccacctagtaccatatatgacgggtaccccataatccactaaccttgatgtgagaaagcgtggaagagtcagtcttcctacttttgtttgttgaccacagagtggtacctggagatatgtcgcggggtcaggagaccttggggacgtcaggtggggtgctattgcccaaaaccaagcttgaccaatcctgacccaacccgggcatagttagtcagtgagaacctgtgacgtacctaaacaggcgagctcctggcagtcaaccaataaaagaacaaagaccacgaagcaaggaggcttgtgt

SEQ ID NO: 137775 - DNA, 435 bp, Glycine max
  unsure (1)..(435): unsure at all n locations
agctagaagaggaactcgagaaatcttttctctcttggggagcatggagtagagagattggatttgaagtggctaaatttgaatcaaatattagaataggttattatgtgtaattttgtatttggacctttgtaaaccttattacttgttcggcctcttttggtgtgtttgagtctttcatgagaggattagtataaataagtctatctttgactttgagaggagtaagactcattttattgaaagaattatgaactttgtgtgtgagaacctctcttggttcttgtgagcacttctttgattcttatcttgagatgctaattcaagtgactaatcctcctttaaacgcatcaattcatcatgaattgtggtgttgttcttcatccctaatgtttccgtccttttgaattntatcttcacctttgattcatttct

SEQ ID NO: 137776 - DNA, 483 bp, Glycine max
  unsure (1)..(483): unsure at all n locations
tactaagcttctaagacttgttctttagacaatgatgtctttatgttcttttgactgctaagagccaaaaacttctctcccttggatccttcgtcctattgaatttcttgttcatgaaccttaaggatactaacaagttcttcaagggacatggaatcaagattctttaaagatcttagcgtcgttacctatggtctccattttctagacaaacttctcaaaattttgtcaatatgatcatagttatcataagttctacctataaatcttaattaattaagaattgtttgaaagcgtctgaacatactttgtatgtctttgccttcttccatagagaagatttcatacttatgagtgaggagacttagtttgttcttctttacccgttacgttccttcatacgttacagctagagtgtcccacatntgtttgacactnttaaagttgtgtaccttggtgtactcctcttctgatagagcatat

SEQ ID NO: 137777 - DNA, 440 bp, Glycine max
  unsure (1)..(440): unsure at all n locations
agcttaaagatctagggagtattttcttcttttgtactatnggctacttgcaagttgatagaactttatgtgatttgggggctatcattaatctgacgcattattctttctataagaagttggggttacaagaaccccaacccactaacatttatcttttacttgtagacaaaaatcatgtttatttgttaaagttgcaaaattcatttttctagctgattttgtgattctatacatagaggaggatgaagaaatcccaattattttgggacgacccttccattacacaagaggggttatgattgatcttcaacaagaaacaataatatggaggctaggtgatgagcaagaagtgtctaaagtgtttaatccagaaaataattcatcctcctctcctatatgtaattgtgtgccagcctccaacaagatgaagactattg

SEQ ID NO: 137778 - DNA, 442 bp, Glycine max
  unsure (1)..(442): unsure at all n locations
ntattcaagacacagcaattaaagatattcaagatggattatcaagacagtctatagagtcttagaaagggtatattaaataggaagggaattccaattgaagtagcaaaaggtttggccaagaaaattaagttaaaaagtcttttacaagaaaattactctctggtaatcgattaccagaggatgtaatcgattaccagtggccaaaactaatttacaacatctattaaaatntgaattcaaaattttccatgtgtaatcgattacacatatatggtaatcgattactagcagtttctgaacgttntaattcaaaatttaaagcttgtaatcgattacacatatactgtaattgattaccagagcagatnttcagaaaatattctcaacagtcacatctttttatgtgngtcttgaatggctatcataggcctatatatat

SEQ ID NO: 137779 - DNA, 427 bp, Glycine max
  unsure (1)..(427): unsure at all n locations
agcttacaccacggnggncttttattttatgtgggcggnnatcttgcaacgaaggatatgtaaaggcggatctgtgttatggatataacaacactggagggtgccaaagatggcaagatttaccaaagtgtaagaatcctggcgatttgtttgtgaaaaagactcttttccccgattatgaaaatgtaacttttgaaatgaatccggcttttggctacagtgattgtgaggccagttgctggagcaattgtagttgcgatggattcagtgcattatgggttaatgaaactggatgtacattctatcattggaattcatcgaaaaattttgttgacactagtgttgctggtgtagagctttacatgctggagaacacaggcaacataaccccgcataacggtaagtctaatgtcaacttgcctgtgga

SEQ ID NO: 137780 - DNA, 447 bp, Glycine max
  unsure (1)..(447): unsure at all n locations
ntntgtttctctctcgtggatgtagccttgatctttgtttaaccacgtaaaactgagtgttggtcctcatctttctctctttctttttctctgcaaaaatttgtgtgtatgacatagctttttgctgcttctgttgctgctattcttgtttgttcttcatcacttccataataaactggtatcaacagatcaagttgcgatcaagggaattcaagattcttgtctgaatacgaagatcaagctgtgggagtcttgtttctggttcttttgctgcttcactgtgatcaagaacactcaagaaatcatgtcaaacacaatcaagattgagaaattcaatggaaagagaagtttcaatctgtggcgcatcaagatgcgtgctttgttgaaggaaaaccgtgtttgggctcctgtngcttctgcatctgtgaagaaagaagtggcttctta

SEQ ID NO: 137781 - DNA, 438 bp, Glycine max
agctataacatcagaccacttcttttgtgctggaactacttcacatggacttgatggggcctatgcaagttgaaagccttggaggaaaaaggtatgcctatgttgttgtggatgatttctccagatttacctgggtcaactttatcagagaaaaatcagacacctttgaagtattcaaggagttgagtctaagacttcaaagagaaaaagactgtgtcattaagagaatcaggagtgaccatggcagagagtttgaaaacagcaggttcactgaattctgcacatctgaaggcatcactcatgagttctctgcagccattacaccacaacagaatggcatagttgagaggaaaaacaggactttgcaagaggctgctagggtcatgcttcatgccaaagaacttccctataatctctgggctgaagccatgaacacag

SEQ ID NO: 137782 - DNA, 467 bp, Glycine max
  unsure (1)..(467): unsure at all n locations
tgactaggcgagttgattntagccttagtttcactttatttattagtcaattcaattaagaatgagaaatcccaaagagaaaacgtccgattgatttttcgctttattttactaaaaggtattttttattattatattattattttacctcttttttgatttccaacgtagttacggcacgaccgaacggtcggaattcattttaaccgaaattaacggatgatacaattcaaatgatcggtggaaatttattttatttttagattaggcgagaaatgacttaaataaatgactgaagcacgtcaaaaggggatatagaaagcgaatganaatgagaataaaaatacatganataaaatgtggaccaccacgggtacatagaatgaattgaaaagctcggtttgaggtacttacccgttgaagactgaagaaaacgaagaacgaacgatgaatgttgaagaacggtc

SEQ ID NO: 137783 - DNA, 432 bp, Glycine max
  unsure (1)..(432): unsure at all n locations
agctngtanggttaaagtctcacgaattgttcgttgctcttgcaacaattgttagccgtgactatacgagacatcttgccaaacaaagtcaggttagcgataactcgcctgtgctttttcttccatgttatatgtagcaaagtcattgatctagtcaaatttgatgagttgaaaaatgaggccgcaattatactgtgccagttggagatgtattttccccctgctttctttgacatcatgattcacttgattgtgcatctggttagagaaatcaaatgatgtggtcctgtttatctacggtggatgtacccggttgagcgatacatgaagatcttaaaagggtatacaaagaatctatatcatccagaagaatctattgttgagaggtacattgcagaagaagccattgaattttgtttagaatacttagag

SEQ ID NO: 137784 - DNA, 499 bp, Glycine max
  unsure (1)..(499): unsure at all n locations
cactctgaatctaagcttaggtccttcaactgcacaagactcttaatatttgaagatgtatctttatggaaccttcacccgacgaagacactgnacaaaaacttatcttctccttttggacaaagtatggcaggctgggggcaagttaattttcttcccgtcagaccttggatgcaactgtgatcgtgtgcccatatcagctagatcttgacgggtattcaagccatccttcgtcttgccttgaatgttaagcagcgtcccaatcacactgtcgcaaacatttttctccacatgcataacatcaatacaatgtctaacgtcaagatcagactagtacggaagatcaaagaaaatagacctcttctttcatatgcaactcttacttttatccttctttggggtctttccaaatacaatattcaagtgttgaacacgctcatatacctgctcaccagtcaacagtatcggcgcaatatcatgctcttgactggcataaaag

SEQ ID NO: 137785 - DNA, 439 bp, Glycine max
  unsure (1)..(439): unsure at all n locations
agctntgcattncaattggagaagtgttttttataactcagtcggtggaagaggtacaaaattggttgacaagattttcaggtgtgtgtgtttgactgagtggctgggtggatatacggactggactcaggtccttgatcggtgcgttaagttcatgaatttagtagattttatgttaaaatttacctctctaagttaggttgttattattattttgatatggttaaaatattggtatattttaattcgatagattttaacttaaaagtgaaatttttgttttttaattttatacattttttcacttttttaaaatattattttataaaaaatattcttttcaaattaatattntggttcgtaggccaatttatttatatgtgaatttttatcggctggatatgaatcttaaaaaaaggttcatttattttatagaccg

SEQ ID NO: 137786 - DNA, 420 bp, Glycine max
  unsure (1)..(420): unsure at all n locations
ccttaaatctcagcttaccatgtcttgggcaactctaagaggctctctaatctatttgttgatgaaccactgggcttgtccacttcagttttttgtgaaagaaaaggttctaatgacagtggatttttgttccatcaccatattatcttatttttggtaggaaatagctgttgaaaatgataagaatcttgttgaaatcctagaaaacttgaatccaatagatgttgttaaatacatgaatttttcagtgcccccaagctggtgctatagctacattttcaggcacaacacatgacaactttgttggaaaatcaatcttagagttaagatatgaagcttatgttatgatggcaatatgttgtatcaaatcaatctgcacatctgctagctcatcttggaaaaatngatgccacaaataga

SEQ ID NO: 137787 - DNA, 461 bp, Glycine max
  unsure (1)..(461): unsure at all n locations
ggatccttaagtcacctgcggctgcagctttgccataatctttaagctgtgtttttgtctagtcttccttgacgtagttcccgaaggagcatctgaaggtggaggggaacttgatgggggtgttgccatgggtcttgtccaaaattaaaataagaattaggaaacacaaagtaattgcaacaacatgtaagtatcaaattgtaaataagcagaattgtaaaatgtaaaatagttaatattttgagttaaacattatttgggtatataccgcagttaaatagccatattctcccataaaccttcatcatgatcattatgacttgcatgtatatcatcctcctcatttttagcatttatggaaggcatgtgtggggagaaggtgggcatatcgttaacatcaagtgttgaagcatacatatggtaagggaataccacttgttcccctgtaaanaactgaccat

SEQ ID NO: 137788 - DNA, 470 bp, Glycine max
gcaccctgaaactaagctctaacttgtacagaagaagctctgatcacttgtttgattttggcctcagatatcttaagaaggggggggttgaattaagatattcgatactttttcttctaattaaaaatctatcttactttttacttaagttatgaattcccttaatgacaatcttcttaaatattaattcaaatgaagcaacttgaatatgaatataaagcaataataaataaaggagattaagggaagagaaaatgcaaactcagttttatactggttcggccacacccttgtgcctacgtccagtccccaagcaacccgcttgagagttccactaacttgtaaattccttttacaagttctaaacacacaacgacaacccttgctctgtgtttagagattctttacaacaagagactcacagtctcttaatcccttagagaatgagaagaagaagaggaacaaatctc

SEQ ID NO: 137789 - DNA, 443 bp, Glycine max
  unsure (1)..(443): unsure at all n locations
agcttcataaagaagatataactgatctttttattgtaacatgctatcttcctttatcatagttcagcattaaagttgtttagtatgctatgtaactcattagcgtaagaattaatcgtgcttttgcattctaattttcaaaatgcagtttgatagggtcagaggttagtcctaaataacataggtctcattttctgtggctgttgttttgcatccattgtgaaattaattttccctttgggtctgaactagcagagagtgaaaagaatcctgttcattctaaggaaaagccagttcaagcaactacgggatcaaaaactgatcaaggttccctcttaattctctacttgttgcatagtggtttatgctgctttagaaccaaatggaaatactgccttgccttgctntgctntgagataactaactaatgtctgttctctagt

SEQ ID NO: 137790 - DNA, 479 bp, Glycine max
  unsure (1)..(479): unsure at all n locations
cggagggagttggtggattgtccttctgagcaacagttcgtttattgccttaagaagtttgaaattgctgctcattgngccttaaaaagactactacggaatagccttagagacctatgtagtgtttaggaaaccatgaataacatgatcatgctgcaacacactgaaattaagacatcttttgagacaagtacacatgtggttggacgtgtttttaaagttaccttatacaagaaactacttgacatggtatcaaggtatgctttaaaccagattgttgctgagtttgagcatgtacattatgttggcaaaaacccttatcattatggatgtatcatgagaactactcatggtcttcaatgtgcatgtgagctagctaaatatgttgttggtaccataccacttgacacaatccatatgttttggtggaggctaagttttttagaccaagggttatctgagcccgatgccagcataac

SEQ ID NO: 137791 - DNA, 454 bp, Glycine max
  unsure (1)..(454): unsure at all n locations
accctaagcgacctgggctgcagctagaataatcttagatgaattttttattttttcttgagtggaatccttcctgtgaggtgaaaatctatattctgtgcaatcaaacacaaatctatttctctgtaaaactccagcattagctatcaaaggtgaaatcgagtggtgtagctggtctagttaaggctaggattgatgcccacttgaaaacttatataaaaatagcccacagctgggatgaacctatataaaaatatcttttcactcttctctcttcttacttatgacttagttttgtatagatatgaaaaaaattcttttgtccagtacattaaatctattaacctttcatcttaacaattgaatcgaactttgttttatcaaaaacgtttaagtttaacattatctttgaaacaaatagctgtaaacttgcaaaagaacttntttccaaaac

SEQ ID NO: 137792 - DNA, 480 bp, Glycine max
  unsure (1)..(480): unsure at all n locations
taagcttacacactctaggtacgagggatntcaatcatggaccatatgttatatatacgcgacgcgacatacctgtcatgaaaggttcactccaccattccacgacctatatggaagcacattgttatggaaacacattgtgtgtgtgtgtgcttgttttaaggtgaagctgcacattctaatattattttatgcataattaactatgcatgcacgaggcangcattaaagaatttgagtttattgaattttaaaactagtaaatttaagaatttaatttttatcccataattttgtttaaaaattaatttggcatttactaatattttgcatagtgtaattaataaatttaacaacatattaaatattaaattatatgatattacatgatttatatatgataatntagactctctatactattttcaaatgaagacttttctctttaaaaaatgaaaaataaagtaaattattatatta

SEQ ID NO: 137793 - DNA, 437 bp, Glycine max
agctagtgagttgtaaccccacttttttcttattcgatgaagacttcattgttgagggtttatctttaacattattacattgtgtcatttgttcgattaataaggatacacatagacaacaccaaaattaattatcacaatccatccttatatcatgattgacgcataaactatgattcacttatcttgactagcttgtgagaccctcattatcaacatatatgaatactgtatctaagaatcaaacaggtcatacataataatcttcataattttttaaaacattgtagttatataattagcattatcacatttacatggtataatcaccaacaactgaaaatacatagattggctctatctctatctttattcatatctctatgactagcatatatgggagtggacgacataaatgggtgtggagacgtagatct

SEQ ID NO: 137794 - DNA, 479 bp, Glycine max
  unsure (1)..(479): unsure at all n locations
ctaattatggtaaattctgtgaaggcaattcgagtatttgtttctacaccaaaagccaaccagatcagtaacaaagatattaaacattgggctgacaaatgagtctcactaaccgctcccatcaacaacaataaagttctcactataggtgaactggataaagtgtgttcaaatacggcatgctgaaaaactctattgaaggtaataaaatattacttttgaatgtcccgaagtgcatgcaaagttagtagcagcatgcactacagatcaatggtttgacttggggaattcccagaaacataacatggtaaggtgaattccaattacaagtaaaagcagttacgaanatctctaagactggtaaataatttagctttgcagatttatatagttggtccagaacaatagtgcttaaactggatatcnactgatcaagacaggcaaactgtcaagataaggtagttatatgtggctctatc

SEQ ID NO: 137795 - DNA, 434 bp, Glycine max
  unsure (1)..(434): unsure at all n locations
agctatagctcagctccacaatattttttgtgtttcgtcccaaatnggacgngcaggaaataatactttttcttatacaaagacgatgtagacattgttttgtcatgcttctctctcctttgaaggtatttatctcatttttgcatacatgtnttttttatatatattttatttttgcacattcaaacgtgagataagagaaaaaaaatcttcttctactaaacaaattaaaaagtatccttttttttcctactctttctttttactctcttaaacaaagtaaaactttatataactttactctgcatacacaatacaaccataaatctaaaattctccccttttcttgcataatgtgaaataactaatgcagttgcacatgaacacatgcctttggtacaaatttagctcccccaaagctttcatacgtttgc

SEQ ID NO: 137796 - DNA, 441 bp, Glycine max
  unsure (1)..(441): unsure at all n locations
ctgaagattatgcaatttctgtaatagaggggattagttagttttatgttcttatgtatagacaagcacacctgttgcatgtgttttagcatcctgatatangtcttcttgtattacggaacatattgattttctttaactgcgggatatgccccatntattattgtatcattntgggtttaatataatttacattttttcccaagtaggcgtgtggtactggtggcatgggattgagaagagggttcacatacagcttgcatatntnttttctttttctttcttctttctttcttttcagtatagcttttgattattgcatatagtatttgttcaataaaatgttcctatttttttttttttttggctctttgacaattttcttttgggctaattaataatttacatgtacatgtacatatagagtctctgctaactata

SEQ ID NO: 137797 - DNA, 439 bp, Glycine max
  unsure (1)..(439): unsure at all n locations
agctattatttatgaacaccatggacttatcanaatatgnttggcaacagacatggcaatggatagcaaatgatatcatattcaatcatagaaaacaaggtgattntatatattctaaataaatattgtttactcataatcattatgtttattattttactaatcacaggtattcgccttactcaaaaggaaacaattcatttatgcttaactgagattgagaatatgctacaagccaacagaaggagcttgcgagattttccatccatgccatacccaataggatatgcacgaaaccaagggtgccaagtattgtgcaacaaagggtgccaagtatctcgaagcggccagtcaaaggttgtatatcatcaaataataatccccggacgaaattagggtatgacagttgcccctctttacttacctctcatcggagata

SEQ ID NO: 137798 - DNA, 462 bp, Glycine max
  unsure (1)..(462): unsure at all n locations
tgctcttccatattgtgagtcttttctgaaacttgatatantctggttcccaagttgatcagagagttggactaaccccgactggcagtcccaaaaagtgaaaaggtggagaagcaaccctgcatgaaaggaaatttgcagctggctcattaaatctttggtttgtgccaatcccataaaagacactcttaaggaagttaactaacaatccagagaccaattcgaagcctcggaatattgcttttattgcccaaagactatcatgagtcacctgtcccaccataactgaatcatcagtgtattggagaattgagtattggaactcttctccaactttcatacctttgaatagtcttttctccaccgtgctatgaaccgccccgttagaccttgagcagctatcaagaacaaaaatggggacaacggatcaccctgcttcaagcctcttaaagctgaanactc

SEQ ID NO: 137799 - DNA, 435 bp, Glycine max
  unsure (1)..(435): unsure at all n locations
agctatgcaacatatgaagaaggcttttcttattcatatgactggattacattgtttgttacctacaaaaatcaaaatattaacaacatcattatctgtgaatcataacataattaacattcaatcaaaaaaatgtattatttacttttccaaatctatgaaggcgttgttttcaaagagaagcagctatagattccatggtttaggcttaggtactaacgtcaagaagaagttaaagaaggatgtatgagaatgagagaaagtgaggttgtgagttagtgtacccatgacggaaatgcaatgcatgcattgtatttatagaaaaaatctaatagtagcacaactcattcagtgatatcttagttgttgattttgtcaatgggatcttggtcgttcaatgtgcattactccaactagtgatatctangccattga

SEQ ID NO: 137800 - DNA, 472 bp, Glycine max
  unsure (1)..(472): unsure at all n locations
tgaaccataaccagtgagagtgtgatcttaaactgtgattgtatgactagctntgagtaatagtctttgcatcaatctctgaattttagaatgaaatgtatgaatgaggacatgatgaaggccatgattgtatatacaagccaattgaccaaaaagcttaccttgaattataattatatcctttgcaccctttgtgtgttgaattacactttcaaaattgaaccctaaacttgaatgaatatctccagataccttgtttagattctaggagagcagatagttcaaggaaaattaccccaaatttgggggagttgattgggatgtaaagtaaaaggtaaagcattagcacacacaataaataagttgtgtttaaaaaaaagaaaaagaaaagaaatcaaagaaaatgtatgttgttgtaataaggtcaaatgcaaattaaagtgaaaggctggtgagaaacgtaattgtattg

SEQ ID NO: 137801 - DNA, 394 bp, Glycine max
  unsure (1)..(394): unsure at all n locations
agcttctcccccaattttctatatatttgtttataagngaagcgaaaaagggttcagccccttaggcacttctctctctttcgaatttgcttggaaaaattttttccgtgaagaaaatctaagccgaggcgcttccgaaacgtttccgtaacgtttacgtgaggaattttgcgaaggtttccaccgttcttcgacgttcttcattcgttcttcaatcgtcttcgatcttcaacgggttagtacctcgaaccaagcttttcgattcattctatgtacccgtggtggtccacattgtgcttcgtgtatttttattcacgtttcatttactttttatacccccctttgacgtgcctaagccattttatttaagtcatttctgtgctaacctaaaaat

SEQ ID NO: 137802 - DNA, 375 bp, Glycine max
tactcagcttctttggaccttgaacaagcaatcaactcctctttcatttctatgctatgtgctcgcgactggtccctttctttccttcgcaacttgagttcattattgctaccccatagagctccgcgaaatttgttccggccatactcttccttgcgagccctcttggtctcttgttcaagggctcttgcggtaattgcattctcttcccgtaacccagcacactccttccgaacgtgtgtagcagccaacttgaacttctccttggcgagttttgcctttcctaactcgcttttgagagcttggacttcttcgtcctcttccggtgcttcaaaattctcttcgctgacgacttttaacttggcgagccaatct

SEQ ID NO: 137803 - DNA, 367 bp, Glycine max
agctagttacgtgtctttctattatttttcacagtatgacgtgcatatgtcaatcagtagatatcttattgcgaagatcctagaatgcttgccttgaccgaaggtggtcatcaagtccacatagcctctggtctctaccatctcacttgtaaagtcaaggaatggaccggcatgaggatggacaatgttgggggagatgtctctggaaagttttccaatataggatatcaatagaactaccctggtcgataaggaccctagacaccatgaaagttggaataatgatggagacaaccacgaggtcgccttggttgatggggtcgatacccttgaagtccctatctgtaaagtgataggagggaaactt

SEQ ID NO: 137804 - DNA, 469 bp, Glycine max
  unsure (1)..(469): unsure at all n locations
ttaaaatttanattcaaatttctaaaggctgttaatatcgtttaaaacttctggtaatcgattacaagccttgtgtaatcgattataggctttaaattttaaattcaaaatttgcaaatttgtttctgaaatgaatctggccactggtaattgattataacctctggtaatcgattaacagagagtaaatatcatatttatgaaatctcaaaaacttttgaaaaatatcctttggccaaacctgtacatcatcaattaagaaactctntcttagattctaggaactaagttcatcaattatcttgaatttctggattattgacttggatcaaacgagaaaagcgtntatctttggcatcatcaaaacttcataaaacttcatatcatatttgcttctacaatgtataaatattaaatatttatataattattgggtttgaagtaaaaagataaaaaaataatatcttca

SEQ ID NO: 137805 - DNA, 433 bp, Glycine max
  unsure (1)..(433): unsure at all n locations
agctactactcaaagtatcttgttattctcttgaatgcttctgtattttcatttcatgatatttatactatnttttccaatgtctatattctagataaataatactactacttgaaatagttcattattttactatatgtctctttattttatttgttcatcaactttcttttctttctcttggacttatttttttcctatcaatctaacacttatcaggggagactgtatagtagttctggagaattttattttcctcattcatgtgttacataaaatgctaaccaaactttgccccatattgtagtctacaaatttctgacatatgccatattatacttgtttaaacccagctaccctctctctaccttgtgaccgatcatgagnttaaattctgaaaacagcttctttgcttgtgggtaagactatgaca

SEQ ID NO: 137806 - DNA, 455 bp, Glycine max
  unsure (1)..(455): unsure at all n locations
ntactcatgtacagtacaccaactgagatattttttgtgtgttattcaggaacccaaagaccaaccttcgaatgaagagttgctaagtcctgcacaaatacagataaacaaactagagtaagcatatgtttgatttgatggtagatcaagagaaaccaggaacaatcttcaaatggaactagatttactttgagtacagagataaataattcacaaatttgtttagtgataagcaatcatggtcttaataaatgtttcaaggccattgtgctttggttattatttgctntaattgaaaacataagtagggatactctggcttgtcggtttgcactttgtggtgaatatgttgcttcatggtcaatgctatccgactatctcacaagtgcacattcccaaacaaaagggtgacataagtaactaagtaacaatatttcattntccatcatattact

SEQ ID NO: 137807 - DNA, 431 bp, Glycine max
  unsure (1)..(431): unsure at all n locations
agcttcacgagcgcatccaattccctctgtgagctgccaccattcccaatcgcaagcaacgcatcatccctcancatttncgcttttaccctctccttcgttctccccaaagcttcttcaattctcttccccaactcgctagcttctggaattaccttctcaccctccgcggcgcgaaccgccacgcccaactcatccaccagaagcttcgcgttcgtatactgatccgcacccatcggccacgtcagcatcgccacccccgaaatcaacccttccaccaccgagttccacccgcagtgactcacgaaagcccccaccgcgcggtgactcagtataaccaactgtggggcccatccctctatcacaaatccccttcctttcaccctatctgaaaacccacgcggcaccgtaccgtgctccttcgccacgtg

SEQ ID NO: 137808 - DNA, 472 bp, Glycine max
taaccatactggttatagaacatccaagtgatccaacatattatattaaataactcataatagaggagcctatatgataaacaagatacataattggcaagaaaatatgctttgcatagactacgaagtcaataacgaggcaagaacaacaaacaaaggcatagacccaccactaaattgtcaacatacgtggtaaactcggatccaatgcctcggagttggtagaatgtaaataagcacaaacagcaccccaaacaatggttttcagagctaaatcaataagtgtgatgagctcctctgaaccataattgttatagaagtaaaagtaacttagtaagcacaacacaaggttgagcacacaaataactaagctacaaaccaaattgtgtttgtagtacaagatcaatgcttgtgagcacattgacatgtatcattcaagtaggacccttaagaattgatgcattgtactatc

SEQ ID NO: 137809 - DNA, 428 bp, Glycine max
  unsure (1)..(428): unsure at all n locations
agctantagatttgattttttttattttttttattggagataggtaaacacaagatgtacaggttcttaaggattgttcgatttgcgttccttgcaggtagttttggacacttattggacccaatggatgtggaaaatctaccctcttgaaggtattttgcacgattttggtcatctttttgctatttttttatgttcacttttagttttattttgtattcaaattgcatcacctttttgttgtgtttttttgcggttttgattcttttagtggagataggcaaacacaggatgtaccgattctttaaggattgttcgatttgcattccctacaggtagttttggacgcttattggactcaatgggtgtggaaaatctaccctcttaaaggtattttgcacgaatttggtcatctttttgctggtttt

SEQ ID NO: 137810 - DNA, 455 bp, Glycine max
  unsure (1)..(455): unsure at all n locations
ggcttctacagaagacacattatccattnntggttctcttttaagttatgtttatatgcatgtattgagaagatttaagttactatgatgttgtatatatatatcacgtgatgtttctttttggtgttgtgcatttttagcctttggcctttgagacgcgaaaagtttacaaatactttcataaataaattaattgaagagttttaaattgattaaaataaagtcttccgcttgagatagttcataggtccatgtaacaatgttggatcttacatatatcctattagaatcaattatgtcttttgggaacaaaccttggggaataggtctgttatatcttctattgtatagctttgatggtttgttntgttacaggtacccttcctatagtcaagtatgatgatttanggggtcccaattgtgtgttggatctctaacttgagttagaaaatctt

SEQ ID NO: 137811 - DNA, 444 bp, Glycine max
  unsure (1)..(444): unsure at all n locations
agcttgttagtgganaatttgtaagacttatttcacccctctcttaagttattgaggtctcttgtccaacataaagttgtttaatgatgaatttgaggttgtttaattgaaatctattataatttacttgcttaaaagaaattgagcatttgataaaatgaagatgtttcttggagaacaatttttccttgatgggcatttaatttcacgtatcacgagctaatgaggataatcttcctttcaaaaatttcatgcgagacaattgatatacgagtttcaaatagggaaacatatttctatgtacttgaaggatttttaaatacaagtttaaattactccacaaattttgaacatgatcagaanaatcctttatataaagaagggtcttacaatntaagttgagaggaacaacaaactttgaaatatctatagtcacactagaag

SEQ ID NO: 137812 - DNA, 490 bp, Glycine max
  unsure (1)..(490): unsure at all n locations
ctatgatactaagcttgtactataaatgatgttctgttgaaaaagtattggttatgtcttgttctattaaatccttggcaagtgtaccacatcgtccaagtaatattttaaaacgataagactgagtgtcaagtccacaaggactttgactgtatttagagtttgtatatgcctaattttaagcaattaatgaattgaattgaatatttgtcaagtgatgacgcataaatataaattcgatgtaaattaaactacaaagaaaagcatgtgcaagggtgagaaaacaaacactcagagtagtgaagtgacgaaagatgcaaaattacggacatgtcaggggctcagcccaccaaaactactcttgatgcagcatcaaggatttttctctatttaatgttattccaattattacctacatccactaacctactctagccatgattcctcacgtgtgagaagtctaaatacttgatntcactccgaattcctt

SEQ ID NO: 137813 - DNA, 441 bp, Glycine max
  unsure (1)..(441): unsure at all n locations
agctaggacaaactgtnggacatctnttctttatttccctccaatataaatgtgtcactattcttctgtatgtgcgatagaaaccggaatgaacaccttgaggagtagcatggaattcttctagaaattttggaatccaagctaatttctctgggatgactaggcgatttttataataaagtaccccttgtttatatacatatccagcattgatcttctccccctgtcctttcttcacttcttcgattatttttctcaacttctcatctgcatgcacctcagcattgatttcttgccaatgcagccatactgtgaagtaaatcatattgttcagttccatttcatctctactacgggacaaagcataagctcctcggttctcctttccaggcttataaattatctcaaaattataccctaagagctttgccaaccaattct

SEQ ID NO: 137814 - DNA, 477 bp, Glycine max
  unsure (1)..(477): unsure at all n locations
tattattgttagggtttcctctgtaatggctggctaatctctcttgttggggatttttaatgaacagttgatgtaattattttcatatctaattgattgtgtttcttgtgttcaatgcttcttttagtgcttaaatttgtatggtcttggtctgatcaaccatttgtgtgcctagataggtgattttaacattggaaaatgtattgttgccttagaacttgaatgaagcagaattggaaacaaacaccatttttgagtgatcactgtagcttgtcccttgaggacaagtgaactgttctttctttgctcgaggacaagcaaaactataaatttgggggagtttgttagttgtcttatacgactaacttttgtatagaaaacattntccaaaacttgcatagtttccccaatttaatggttatttgtagtcattntgtaaataaatcttgttntatggntaaagttgtctctagaata

SEQ ID NO: 137815 - DNA, 345 bp, Glycine max
ttataaccagccttcagacaccacatcttataccctttcactccctctagatatcctacaaaaatgcacttgaaagtataggttccaattcgtcttgcctaatatgagcataagctacacagccaaataccgtttgctgttttacactcggtggatggccaaaccacatctcctcaggggttttaaaattcagagttgttgaaggacacttgttgatgagatatacaacagtcattgctgcttcagcccaaaaaatcttgggtaatcctgcactcaacaacatacatatcactatctccaaaatggtactattgagtctttcaactaaaccatattgtgaggggt

SEQ ID NO: 137816 - DNA, 432 bp, Glycine max
agctatgagcaaattgaaaggattaatactttatacacggatgtccggttgagtcccgtattacattaagacgcttcaagttgaaaacggagactcttagaaaattagacagcattaactttttactcggatgcccgacagattgaggtaatttatcaagagatgctccaaattgaaaacagaagctcgtatcaaattcaaacgacaataactttttactctgatgcccgacagatcgtcggaatttatcgagagatgctcctaattgaaaacagaagctcgtatcaaattcaaacgacaatatctttttactcggatgtctgattgagggccctaatatatcgagacgctcaaaattttgatccgaagctctgagaagattgaattagcgctaactatatacatggatgtccgggtgagtcctgtaatata

SEQ ID NO: 137817 - DNA, 392 bp, Glycine max
aatctcactggaggttgtggggcctgtgctggaggattttgtatttggctacgtacgagtgcgtgagctcaatttgaaagcgggcaactggggatggtgtgtttatgtatgacttgtggaagtgagagagttgatttgcgtcatcgcccgatcgccacctagtaccacatatgacgggtgccccataatccaataagcttgatgtgagaaagcgtggaagagtcactcttcctacttttgtttgttgaccacaaagaggtacctagagatatgtcgcgggggtcatgagaccttggggacgtcaggtggggtgctattgtgactaatcccgacccaacccgggcatagtcagttagtgagaacctgtgacgtacctaagcaggcgagctcct

SEQ ID NO: 137818 - DNA, 461 bp, Glycine max
gatccttaagtcacctgcggcatgcaagctactagacttggaaccattgcttgtttctattaagtccagccttcaattatcaggccctctcttattgcccttgttgggaaagaaaatattgaatcagagggtgagttctgctactgttttttcatgtgaattttgtaaaagatattatattgtttgttcaaaacttagttgtccatgttggataacctatatatacatgtttaggatttttagactaatttatgatatgtatcaaatttgtactgaaggttatattatgatttaaatcatgcagaaccgatcattgttgctacgtttactattctactaagcattatatcatgatctactgaaaccaataattaatgttacttgttcattcttttcagcattaacagaatcattgagaagtatcgtcaatgctgcttcaacatgtctcagactggcaacgt

SEQ ID NO: 137819 - DNA, 453 bp, Glycine max
  unsure (1)..(453): unsure at all n locations
tgaagttcggattgtggacctgtggtttgtccaagcgcgtcttatgtctangcaccttgaaatggtcttgatggatgcaaaggtatgttgtgatttagcttttgctttggttaataatgtgatacggtttatgctctgttttgctgtttgggtgttttgatcccctatattgagttgtaatttatgggatttggttagtcatttcagagactgggttttaggttttctttctgggattttaagttggcttttcttgttctataatgtttattgtgatttgattgttaaataaatttgtttttctttcttggtccatatgacatgttgaatgaagaaagttgttactattgtgtgtttaaggtggcatttgcgacatattgttgcattcttattngcttattattaagtttgttgggacatgttcaaagttcattgatggagtgtgatatacaa

SEQ ID NO: 137820 - DNA, 437 bp, Glycine max
agctatcatctagccaagattaacaatgtgttttcaagagaacctaacgatttctaattatatgggccatcaaatctatcatgtgttgacagtaattgattagcccatgaatctcctcgggggccatacacacttcggccatggcttttgctttggctaataaacgcgggaggtcttgacttccattcaaggtcaaggcgaacctatccatccacatagtcgcttcttgatgcaatgcatcaatcaccctccctcttgcttctttttcggcgtatacttgtgcaaaatcctccactagcttttgttcatgggccacagactggttcaactcttccttgtattgccctatgatagctagcatgctttgctccgtggcttccaagtgttgagccaaactccttttggacctcgcacaaacaactaactcttcttttaag

SEQ ID NO: 137821 - DNA, 432 bp, Glycine max
  unsure (1)..(432): unsure at all n locations
ntatgatcaaactctnttctctctgtctctctcatctattcttcattcttcttcttttcactattgttcttccttattcttgcacaaattttgtggcttttccactagtgatgatcatggaaggctaaacactcaatcaattgaaggatccactccaagcaagactaaatttgagttatggtctagtatttttaataggtgtgaatgttcaactttttcttcaatcctattttcaattttcatgattatgaatgggcttaagattgaaaatgaattagtttagggattaatttcctaacttcaactntaatcacatattatttagacgatattccaacctaatgttttatctaaatgaatcttgggattaatttgaatgaataactctaataacattgattgaaccttcacaacttgatcattctctacaaa

SEQ ID NO: 137822 - DNA, 440 bp, Glycine max
  unsure (1)..(440): unsure at all n locations
agctatacaatggagtagtatattaatgttatattcattnttcaatctctttctacttaattaattaataaatctttatttgagtttttttttttataaaagaaagtacttaatgtagtagcacaaaagcattaataaagacaaactttccacaagatctctgtaaaaaggatcagatagtaacaatgataatgaatccaacaaacaatcaacaaaaaagtttttattaaaaaatatattaattaatgttattaattactcagaaaaattgaaacaaataaatattactgactctccaagttcagtgtaatatccaatactttttattcactaattcattttggagatatcacattatatttcacctctcctcttattatatataagatgtaattacctaattcattaatattaagagaaaatattaattctgttgatag

SEQ ID NO: 137823 - DNA, 467 bp, Glycine max
  unsure (1)..(467): unsure at all n locations
tgacaatatccagttgcaggagaaaagcagtctgtttcttattatacattacattggtgtttaactgtttgagtatgaatgccatatccaatgtcagaaatcatctgaatagaatgtgtgcaacgtataggtggaaccaaaattctagtccatgaaatattgaaattctagtgcctttcaaataatctataagagcattaaatccatttggtctgcaactgatagttgtttttagaaatgtttgtgaggaatatagaatcaagtatactctaataagattattgtctaactataatgtgatatcttgatggttggatgatttttgcctcatcgcttgtgatgagattatcttggaggtcaactaanatttttatgagatcttaatctttgggatcatctggctntgatgccttatgaaaaattaggtggttcaaatataattggttgatctatccccttatgaattc

SEQ ID NO: 137824 - DNA, 426 bp, Glycine max
  unsure (1)..(426): unsure at all n locations
agcttcccaacatcaaagtaatacatctttcttacagcacaaactatcacagccaagaaaacagagcaaaggcagaaaactctgccaaaacaccaaccaaaatcacagcttttctcacttaaagaccccagtaacaattccttcgttccaattcgttaaccgttggatcgactccaaatttttactggaagtctctagtacataagcctacattttgaccgttgggatctactagcaaacatccagaactcattctgcactgctctttccacaaccagcaaatgcctagtatttttctgcacttgtgcaaaatcctgctgcacaatttcacagcaaaaatctgcacanaatgcagatntcgaaaaccacacttcccctcatccaatcttgctcaaatcaaatcctacaagtcccaaatcatgtatc

SEQ ID NO: 137825 - DNA, 299 bp, Glycine max
  unsure (1)..(299): unsure at all n locations
tganatgaggaagtgtggaagggtgagacttcctacttttattctttgaccacagagtggtacctggagatatgtcgcgggggtcaggagaccttggggacgtcaggtggggtgctgttgcccaaaaccaagcttgaccaatcccgacccaacccgggcatagtcagtcagtgagaacctgtgatgtacctaaacaggcgagctcctggcagtcaacccgataaagaacaaagaccacaaagcaaggaggcttgtgtggtggctggccagctgtgaatcttgagtgatatatgggatat

SEQ ID NO: 137826 - DNA, 420 bp, Glycine max
agcttaatccaccgtcactctatctaatatatgaaataatattaaagtaatagatactatattaatcatataacagtgaatttgagatccatcttacctcataaccaatggatatgttgggttgcgattaactcttgttgttgtgaaggacatgtgatatcatgtccaagattgcaacaatgatgcacacccacccatggttttcgcctcaggttcagtagccctacacatttccctatatagcattgcaagacaagcagagccccaactatagtgtctgactcgttcaagatcagccaacatagttagatacatcaaatgaacctaacttcccatcttgcctggcattaaaaccccactaattaactgcaaaatgtaaactctacaatgtgcttttaattgttgttatgttggttccat

SEQ ID NO: 137827 - DNA, 469 bp, Glycine max
  unsure (1)..(469): unsure at all n locations
tgccttgtgaagccattgtggaactagaggtgtgtatttatattggccaaattaataatttgagctggaaatatatggatggtaatgccttaattttttgttaatattcacgggattactaggtcttgtgtagtagtattttttttatgatgtcccttcgatatgtttaattggtagttatatatctattcctgcattttctacccagtttcatgtattgaaataattaagttggactatctattttctttgtatttttgtagtctttctacaagatcgatgtggatggaacacttaccatagtttctccctctcatgcaacaatgtagtacctactagctagttatgttcctaattgaaaatgtgcattgtgtggtgtataatgatcaatgctttattcacaaaaataaaatagcaataattaacccgatcaagtgaaagcatatatatacattnntttaaaataaaa

SEQ ID NO: 137828 - DNA, 438 bp, Glycine max
  unsure (1)..(438): unsure at all n locations
agctactaggactntaacacctgtctgttatctgtatntggctgtagtgttttaatacaggctttagtttgtgtatttaaagccttttattagctatgacaagcaagaacaagtattatttatatacatctttaacaacaataatatatgtataatgataaatttaaagtgcttgttgaatctctacaataaatagttatgaaaaagttattactactattattcatataattgcatgcctttacctttttcttttagacttttggtaaaaaaaaaattggtaagctggaattctaccttccaaacctgtccctaatactaagcatggtcactatacccgtttatgctagtcgcattgggaatcgatactttgattttcatttggtagttaatttcaacaaaacattgagtgttatctatacactctnttaatctacc

SEQ ID NO: 137829 - DNA, 434 bp, Glycine max
agcttgtgctctggtactaaacctgttttttgtatcctatgtagctgacctcacttagtgggataaggataaggcttttgttgttgttgaaggtttttgctcttgtaagacagggtaaaatctgtgacttataatgtttgtttcagggtggtgagcctgacttgatgactgcggcaaagatgatacttcatgactggcagaggggtcgaattcccttttttgttccccctcctaggcaggaggacttgtctgaggaacctaatgttaatggtgttgacctagatgattcagttgatggcaacgaggcttctgctgctatgaaggctatcgcagatgttctttcatcgcagcaacaaataaatgtacctgttcagaatgatttatatagtgagaaggagtcgaagggggaagctactgatcaacattcaaacact

SEQ ID NO: 137830 - DNA, 465 bp, Glycine max
  unsure (1)..(465): unsure at all n locations
agaatggccatatactaaaattgcagctgtaaatgttatgtattacatgcgatgtgataaagtggaggaaagatttctgagctatagagttacctaacatggcccggggggatactaactccctgtacagacaaaatagaaaaaaaggggcaaaataaaagaatcaaatattcttaatgatgctttgacagcatcgggttctacaactcaacgaccagaaacaaataatgaattggttatctggttcccctcagtttggagtcttctcatctttgccttgtccaaccgcgctcttcgaaccacctcttggatttggcggtcatggtccttcaacatctgatcatggttgcttgatggaactagcagaggaccagaatgatgaatnttatggcccttggagccataaccaacctgcaggattgtgaatacatagtagagtaagcaagcaagcataagacaaaacta

SEQ ID NO: 137831 - DNA, 430 bp, Glycine max
  unsure (1)..(430): unsure at all n locations
agcttagtctaagtgcattgacatgttttttgtcactggttacactaaaccaagtgcaatgtgaagctgatgagtttcatgatagagcactggtaggacccgtcaccgaagcttggaaggttagtatcacaccatctgagaaagaggttgcgtggagtaattgaaataagagatagagctacatcatcgtggacaagaagaggaagagtctcgtgagaatcaacagaataacgaacacattaactttattttcattttctaattttcaaacagggactatgaacatatagacgaagatgagaaaaaaaagtgaataattntttttgtgagcgaaaaaaattggatctgaatatctatttatataattagaatatggatttgcctatttaagcatttatttgaatattctatgttttacgtaatttaaatg

SEQ ID NO: 137832 - DNA, 435 bp, Glycine max
cgaagagttagattaagagacatcatacttttgatggtatttatattcacatgtgcacgcctagcatgccacatatgagaacattctacattcgcaacatatgaagaaatgctcgatattctatcaatacaaagaggcataagacttaacttaaacaaaccatcacaaatgtgatctttaccaacagaaacactatgtctagtaataacaactgtattggactcaaaaacaaccttggacccatgttggactaacacagaagtacctatcaaattttgcctcctaatatcataaaagtgatagactccatctaaaacacgagaattcattggagatatatctagctgtacttgaccttcacctaacacatgtgccatactctcaaaagattataaatgatagtagaatgttgtatagagataggtaagatatcta

SEQ ID NO: 137833 - DNA, 442 bp, Glycine max
  unsure (1)..(442): unsure at all n locations
agcttgtcctttgtttaacatgagaggttattatttatccatnatccttcatttcatggcgtatttagactatcacatctaaaagcattagcttatcaagatgggtttatcttgtagcatttagagtcgttaaacgcattgaacatcccctgtacctgngctggcataatgccccatgcccttgaattgaaagtatgaaaaatggactaaagaaacatttcacaataaagataagataaaactcatgagaattacctgagtatcctcttcagagacaacttcaaatataactccagtataataatagtcaagacctcgggcaagactcatgtcaaaaaccactttatcaaggcattttgatgtatctagaagtttaaataaaattccaggtcattcaatgcagcaacgaattcatcatcttttaagaaagcactgcattctg

SEQ ID NO: 137834 - DNA, 378 bp, Glycine max
  unsure (1)..(378): unsure at all n locations
agaatactancgctcgactcacattatntgtacgtgaattaaggcaatagtagtgtgtatttcagtctgtgggatataagtattaggttaagttatggaactcttcatatgatcaagaaatactagtatcatataaaactaatctgtacacctatctacntggttcaatctgttgatctcgctctacctatggcgatgcagctgagaagcggactacctccggatatcctaggaatcggctcatgtgcgatgttctatgaggctctgacacacgcctctctctattaatagactgacacgctgcatgatactatcatgtaacttaaccgccactacgttctatctattaatatgataatagtaagatgttagaatact

SEQ ID NO: 137835 - DNA, 414 bp, Glycine max
agctagagatgaggaagtgttgaagggtgattcttcctgcttttattggtgaccacagagtggtacctggagatatgtcgcgggggtcaggagaccttgtggacgtcaggtggggtgctattgcccaaaaccaagcttgaccaatcccgacccaacccgggcatagtcggtcagtgagaacctgtgatgtacctaaacaggcgagctcctggcagtcaacagataaaaggaaaacaagaccacaaagcaaggaggcttgtggtggctggccagctgtgaactttgattgatatgtgggttatggcctctggtaatcgattaccaagggtgggtaatcgattacaaggcttaaaaatgaggacaggaggctaagatggtctttggtaatccgataccactgcgtgttatcgatta

SEQ ID NO: 137836 - DNA, 462 bp, Glycine max
  unsure (1)..(462): unsure at all n locations
ctacataattgtattagttntaaaaaaagatgcagttaaacttgtttggattagtataactaaagatatagttnttacacctcagagaggtcatagacgcacaacgaaaaatgatagaagtaatactcaaaacttaaaggatgttatatcaatcataatacaaagtaggcatatgctacaattgatgtgtggtctatagttaagatgtacatgacttgattgaaggatgatattgaatacatttgttgatgcaataacttgaatggtgatttatgagtcttgttgaatcattaaatgttttgctttatctctaaattgtgaatngtaatgtacgatatttgtgtgtacatggtgaatcaagtgatgtcatgataatattttgaaaagatntatatgcggcctaagttcatgtggagcacggaccaccatgttatgatgagttgggttagatgccactgagat

SEQ ID NO: 137837 - DNA, 438 bp, Glycine max
  unsure (1)..(438): unsure at all n locations
agctatgcagattggtcttcgccagtttttgtatctatgtgggtctgaaaaaaaggcaaatttgatcatcctactaggacgactgagaaaactggggcaaataaagagggtgaggataagggagaaacccatgctgtgactgccattcctatacggccaagtttcccaccaacccaacaatgtcattactcagccaataacaaacctcctccttacccaccacccagttatccacaaaggccatccctaaatcaaccacaaagtctgtctaccgcacttccaatgacgaagaccacttntagcacaaacaaaaaaaaaacaccaacaaaaaggaattttgcagcaaaaagcctgtagggttcaccccaaattccgttgtcatatgctaaacttgatcccatatctacttgataattcaatggtagccataaccctagc

SEQ ID NO: 137838 - DNA, 387 bp, Glycine max
  unsure (1)..(387): unsure at all n locations
ccttgaaactcagcttccatacacactcatgcatttcattctanaattcagatatttatgcttagactattactcaaagctagtcgtttactcgcagtttaagatcacactctcaccagttatggttcaagctttcctttctcaatcaacctatctactaactaacaattctaattgcaagatcacattcttgttcttcctttgtctaacatacacactagctcaacttttgaaaagaaacacaacttcatcacaatcatgcattcaatccaaaatcagtctataacacccatttcacaaaaagataaaagtgtttcactgcataatcatcaagatcaacttaaactgttccgtatgcttcaaaacaagcatactaactattcacaa

SEQ ID NO: 137839 - DNA, 439 bp, Glycine max
  unsure (1)..(439): unsure at all n locations
ctgcagcttaaccaaggggagatggactttttttttgtgctngaaagaatcgatgacaatgcttacaaagttgagctgcccgatgagtataatgttagctccaccttcaatgtctctgatttattctttttgatgaagatggagaatccaatttgaggacaaatcattctcaagagggagagaatgatgaggacatgaccaagagcaagggcaaggatccacttgaaggacttggaggacctatgacaagggctagagcaaggaaagccaaggaagctatacaacaagtgttgtccatactatttgaatacaagcccaagtttcaaggagaaaagtccaaggttgtgagttgtatcatggcccaaatggaggaggactaaatgtgatgaggacatgaccaagagcaagggcaaggatccacttggaggacctatgacaa

SEQ ID NO: 137840 - DNA, 478 bp, Glycine max
  unsure (1)..(478): unsure at all n locations
actcagcttttatccaggcaattcttggtggtgaagctccttctttcttggcttattccctagtggatggtgcctcccctatcctcttctcctttgccttccgctgcatctccatggtgaaaaatcaccattgaaggacctcattgaagctcaaagatccagcctccatagaagctccacaagcaagcttccatcatcctggtatttgagattcacttgaaattagtgagaaaaattgtttccgtgaagaaaatccaagccgaggcgcttccataacgcttccgagacgtttccgtgggcgatttcgtgaaggttttccaccgttcttcatcgttcttcgtcgctcttcgatcttcaacaggtaagttcccgaaatcgaacctttccattcattctatgtgcccttagtggtccccacttgtttcacgtgcttttattnntatnnttgttgctttctgtaccccttttgacatgcttt

SEQ ID NO: 137841 - DNA, 435 bp, Glycine max
  unsure (1)..(435): unsure at all n locations
agctagttcttgattnttcctaagttctgtatctagcttagaacaataaacttggccttctcttaattgtctttgggcttggcgaccacgatcaacaaagtactttcggcacctactatatgttgacttgaccaacgctgttattggaatgctgcgacaatctttcaacaccttattgacacattctgataggttggttgtcatgtgaccatatcgtcgtccagatgtatcgtaagccatgctccattttttctttgaaatgcgatcaatccatcttgctatggctggactcagttgacgaaatttttctaagttttgatcaaacacatgcttgcaaggagtgtacgctgcatcaaatttgttatcatcaaaagttgtacgtagacatcaaactcaaattaaattaatgtataaaatcaaccttacccaatttct

SEQ ID NO: 137842 - DNA, 474 bp, Glycine max
  unsure (1)..(474): unsure at all n locations
tatggaaaggcctaaacaggggagcaaaacagaggaagttgctgtttctttctttcttttgctctgctgtgaggtaaagtgcttcaaggcgggcctctatttataaggaacatcttacttttttttcttattactaacttccacataagcgtgcttttttttatttcttccaaaagccaaagaacaagtgacaaatcaagtgcacatgcgctggttctagttggggttcctaaccgctaatattgtgggccacacccctccacatgcaaccccaactatctttcttcccaactntatagaccagcactaataactctttttttttgtagccaatagtttaaccaacattntttttctttttcattagattatctttttcccttgcaaaatgttagcaacacagtctcagacattnttttctaatatatattatttattattaagtaaaatntattgaaaattataaaagtatta

SEQ ID NO: 137843 - DNA, 440 bp, Glycine max
  unsure (1)..(440): unsure at all n locations
agctatgatggtgttgagaaaaattctctatgtttgtcatcatcaaaaagggggagaatgtgaatgtatgtatacatgatcttgatgatgtcaaaagaagaatcaaacaaggctcattntgcttcaagattaatacaagattgtttcaacaaacaaatccttgattcaatatttcttcaagatcaagccttgcctcaaaatgcagagatttcaagtcatccaaggcacatgtaatcgattaccaatggtaatcgattaccaaggcacatgaaagtgtgtaatcgattacacatcatatgtaatcgattaccagagactctgaacgttgggaattcaaattataactgtgtaatcgattacacaaacattgtaatcgattaccagtggaaagttttcagaaaatctgccaacagtcacatcntttcattagatttgtgaat

SEQ ID NO: 137844 - DNA, 448 bp, Glycine max
  unsure (1)..(448): unsure at all n locations
cgcttgcattggaattgcgaaagccccactccatcattatgtttattacctgacatctcaaacaaacaaatcaaacgtaacaagacaattatagttgttgtttgaatacctcacccactcaagtgtatcacacaattatggcttttctctaatgaaacactcttgccttttaccactctaattccccttgagttcttaggcaattcaagagattatggccacaacaaagaacaattcaccaatatgtgtaaggtaaggctagagagacaaggaaaaggttaaccaagaaaaggctaacaatgtttttaggcacaaatgaaggaaataaaattcagaatttaggaattcaagtaacaatccttcatgcaaccaatatattaccttaaagagatgtttntttaaagttcttcaagcatgaaccattcagcccaattntttttnntttttt

SEQ ID NO: 137845 - DNA, 445 bp, Glycine max
agctagttattaattaaccatatatgttattctctaatgtggtattgaaaatgtagaaactcaacccctccaaaaaacagggatcttaagtcaaaatatcaataaaactaaaaaatcatccgaagaaaaagggaaatactaaaaaatatacaagaagaaagagcatgacgctacctgctttaaacaattcaaaacatctgcacaaatagatttatgcatacactgaatctgcaataaagttccacactgtggggcaatcaaaggtgatctgtgaaaatttaaaaatagagaacaaattgtagacttacaggaaacacattaacattctgattattcaaacttgaaaggatacatgaacatatcatatggcaacaatttataacagaaatcaattaccataataacatgttccaaactgctcaatgtaaaatttaaaccatctaac

SEQ ID NO: 137846 - DNA, 472 bp, Glycine max
  unsure (1)..(472): unsure at all n locations
cttgtaattgtaatagatcaaagataaaagtgagaaattgcactttccagagtgaaaatccttttatgaggagagatctatatttgtgcaatccaaaaacacaaaaacctctttattgtttaaaggccagcaatggctagcaaaggttgtaactagtggtgttgttgatctagttgaggctaggtgtgaagtccattgcgagtgttgtcaggttattgaaatctagtaattttttgtccaactatgacgggctatgtttgtgaaatctcatcttaaagagtaagaactagacgtagtccaaggttaggatgaaccaatataaaaatcattatacatcattcttcctttctctctctctccaatgagttattggtttgatttgtttaatattgatgttaagcattaaaacataaaacatttacaaatactgttaaaattgaacctttccactaaagactttgtanacaaataa

SEQ ID NO: 137847 - DNA, 442 bp, Glycine max
agctagcttaaacacagacatacttttttttatggtgtgttatgtaccaacattttaaaatatgatttaacatgcttatacaagaaaagtgagtgcctcccaattgatcacaaaaatagcacacccaacttagtattctagctagatcataacacacttcttgggaaacattatcagaaaggaacatacaaggaactcacagtcacaggtcatggtaggtatcttgtattctttctattgcagaggttgtctatttatctgtaatactcttctggttctaatcagcagtattgcatgaaatatggaactaacttttaaatgtcagtatgtatgtcttgaaatcttattttggtttaattattcatttggtcttatagttacaaaactttcccttttagtccttatacttaaaaacacccccttttagtccctacacatgatt

SEQ ID NO: 137848 - DNA, 345 bp, Glycine max
  unsure (1)..(345): unsure at all n locations
tttaaccttgactnggtagaacctcttgccagcttgatttgttttttgcttgctaaagtgagacaaaagctggtgcaaatcaaaactccgacatctcatgggtggaatggatgaatgcatgaaggaatgtatataacacaaatgccatctaggaatgcgggggtccggggaattcatccccttcttagacacaacgtctaggggtagcaaagtgccccaacgtacatttttaagaaggcgacacggaccctccgttgatttgtttacacaagggatcaagacagaacccatatgcgatgcctatgcaaaagacacaatgcgggaatgtacacagtatgacaatat

SEQ ID NO: 137849 - DNA, 390 bp, Glycine max
  unsure (1)..(390): unsure at all n locations
agctagacatactataaaagcatttattacttataaatnntggaatttcatttgtttgagtttcttccatcctttatttcttcccagtttaagtttgattcggctggtatagatgttacgtttgttttgtttcttttgggcttgttccgctttgcatttagaagaaaattactgtgaatgaaattagtacacattttgggcaattgcttcctgtgcttcatttcttgctatttcgaatattccaatgctgcccaccatttttcgaatattccaatgctgtccaccatggaacctccgtctgaaagtctaggccctcctccatcaccattcaccgcagttgcttctgccaccatatgtgccctccataggtcaccgttcattgcttttgcg

SEQ ID NO: 137850 - DNA, 474 bp, Glycine max
  unsure (1)..(474): unsure at all n locations
tatccaaccaagcagggcaacaccgatactttataagtttatgtttctaatacgccacccgtgtctagtatttctataccatgtatgtgtattgtttccaatggtcaacattaacgaaagtcttgttccatatatattttttttaattattacgcatgccttgtaaataagtattcttttaatcatattaacttaaatcacagtataaatacattaaatttataatataactttttttataaaaaaatagcatgtatttttcaacaaagataattcagttcaaactagaaaaaattactataaataaacatcttcttccaattgtaattacatatttaaaatttaaattcaaaatcacttattaaattgaattaattttacgctagttaaatttctacctcgaagtgtttattntaattatatatttaagacttanattcaaaattacttattaaactgaaataagtcgatata

SEQ ID NO: 137851 - DNA, 436 bp, Glycine max
agcttgccctggcgagctgttgcttcttctagaaggcaccgccttctgttggaacaccccggaaggcccaagtgggcctagtttctattttcacacccttttttactaaatacacccccttttgcttgttttgttgattctttttccgtaacgttacggaaattttcggattatgtaacgacacttattttctttccgtaatgatgcaaaagcttacggattacgcaataatccccttttttgacctctggaatgttgtagaactttacggattttgcgacaatgccccctttcgacttccggcatgtcgcggaacttcacagattacctaacaatgggtgtgaagtacctccaaacggtcaggcaaaggttgcaggccatcaaacaatggtcttcagatgaaattagggtatgacagttagccctctttacttat

SEQ ID NO: 137852 - DNA, 439 bp, Glycine max
  unsure (1)..(439): unsure at all n locations
tgaccagacgatgatgaanagaatttcacaatatacatatacagatataagatctaaaatcaaattcaaaccccttgtcaattaaaacaaaggaaagaagtaaggaaaaacacacaaggtttatactggatcgtctctgccattgagactacatccaattcttgggaacccacaaagttccactaactttaaaagttacaagtattcttcactactgcttttggctcttgcaacacaagctttaccccaagcttgattttaaacccagtattctttgtcctaacaagccactgttggctctagaaaaatcaacaagatttgttgttgaagatttctcgatgactaanagatcatcatcttatagacgaacatcacactcaactctttagtctattctctcaaatatacatagtggtttgagagnnttttaatctataca

SEQ ID NO: 137853 - DNA, 442 bp, Glycine max
  unsure (1)..(442): unsure at all n locations
agcttatgtatataaatatatntttctaatcaatcatgctcttgngttctacgttgtagtctaaattactaaacctcgctgtaagagaaaaaaaaacacaaatgagtgacaatgcattaaccaataccttaagaagtaactcatacgaatcaaaattgaattggataaaaactaaaaggattttctttattattatttaaatctaactttcttgttcatactcgtaaacaattgtccacctacaataattttgtccgtcacaaaagtacttcatcgatttcagtaaaaaaaaaaaaaaaaggagaaacaaaatacaaattacgcaaaaaatgtattgcacattactagctaagatctttgaataatgccaagactacagcttcctcggacccagaatggatcgttcttgttgatatttaaaaaaaaaaaaatcggttcaata

SEQ ID NO: 137854 - DNA, 480 bp, Glycine max
tccgttcccgagagcatttcttatttaagcacttcatcttttgctttcgtgtagcttaagaaaaacgtcatttcttcttctttctttctttcttccaaagccatttctaaagtcccaatcactttctccatcacccatagccaccattagccaccacaaaccatcgttgttctccattgaaaccccacaccgagaggaacccttcaaccaaagcggaatcttccaacttggcttgcggtttcgatagagaatgaaaccctaatctgacctttcattttctttcgacgtaaccatgattctacgcttgtttcttgtctttgcatcttttctgactttggaaccgccattgcatgtcttatgcttcctttgaaatgcatgttattttcgtaacctacattgaactccggtcacattggcgtggtcggaatttcctaatgatgttcctttgtaaaacccgaaatgctctcagctctttcatag

SEQ ID NO: 137855 - DNA, 411 bp, Glycine max
  unsure (1)..(411): unsure at all n locations
agctttaagttgaggaaggggcaagtantttgcctggtccacagtgaacttagaagtctccaaagaactgtgatcctcaggcaatgcagttgagcaaatgacggtccgggttgacaattgtcacagaccataagccagtatcttgacaaatagataacctgttcttaccgcgnggccttgaaaaactatacagtgctctcactgataatgtagggtattcttaaggtcttaacaccgactccgaatgcaattggatttaaaccgatgatcccaacattttctcgctggctgttatgccgaactatcatacacccctaattaatgtaagggacatgtctctccacaaatgagaggtcgcagcatgttgaattaccgaccctgaaccagagacagacatggacaggatccgtt

SEQ ID NO: 137856 - DNA, 377 bp, Glycine max
gctgggcatatggactcaaccgccatctgcttgatcatcggccactctgagatgacgagacctgctcactggatactgagaagtgcccaatcctcaacgcgtcagggtgactggaacatcccacctgaatacgaatatcgccaaaatgaagtatatatgctctggaaaccttcaccttacatgctcgttatgtgggatcccattacgcttgaatctcacatctacgatggatcaaaacttatcatatctctgtgcagcctataaagcctctacaacgggttgtctcgcacccttgcgcacgccataccgtgaactgggctcagatatccaccctacgcctgtgtggcacgccgagattcaggtcgaccactgagaca

SEQ ID NO: 137857 - DNA, 299 bp, Glycine max
agcttgtggtaaggtacagactatggttattgttttgtagcaaggaactaagcaaccacccttcagcaaatgataaagattacaatactcttttatctcagagtcttggaaccaacttttattaactaaaagcccctcgaagacactctttcactaagcttatccacaccttgcctttacttggttctttcagagcatttcttatgcggaggaaacttaaaaagtgatcagaggtgggctcctcttattccagccccctgtaaaaatggcaccctctgtacacttaaattttattattt

SEQ ID NO: 137858 - DNA, 405 bp, Glycine max
ctaagcttttacatgacccacctaaaagagaagaagaaatctttgtatttcggaatgcactaatattgataactatcgatctgcatgaaatcgattctgaccatttgatttaaaatgcaaatccagcaataatcgttgaaacaaatgcacaaaatgatataaaataaaaattaaatcagtgtaaaatacaatagaacaaaattataacataattaaaaaaaaaaaaaaagttaagatctacaacaaagtcaaagcaaatggtaagagatcaggtcaaaatcaaccagaacaaaaaagcaagagcaaacgacagaatcgaagcataccatggggcgtagaactctacgacgatgaaatcgtgcttgctgacagtgtcgtgaaagctagagtgatccaatgtgagta

SEQ ID NO: 137859 - DNA, 439 bp, Glycine max
  unsure (1)..(439): unsure at all n locations
agctataagaaataaactaggtgtctgtttttattgaggcaaggaggagatttgntgaaactgtgcatgcaatagctacatatgtggatgttttagctaatttttaacatttaaaattgtttgttgcataggatctattctttaagagttctgattctatttttttttatcaaactataaactggtttagtcatgcctaaaaataaggtattttatgttttgtatatttgactctaactctatttaaagaacaaatgaataacagttatgtatccttcgtaaatatatttgttcttctctattttttttatctaatcttcaacaaaatcccccactattatacaaggcacacctgtggcttaattctataatctttcaattctatcaataaactacactggccattcttcaattttttctttaattctctcatctcttg

SEQ ID NO: 137860 - DNA, 424 bp, Glycine max
  unsure (1)..(424): unsure at all n locations
acgctcgtgaatgtacctatgaatngtttattgctatgaaataattcttctcctgagagaatatggcgagtgaaattccgaatgacagattctattanggcaccacaatgatcacggacatatttattaattgaaccaggatgaacatattccagataaatataaaaacggtcctcaacctgcaagcacatatgttaaggctttaatgctgatacagaataatgattattaatcttgagtagctaattatgaagtaggagattgcttactatttcactgccaaaatactgtacgatgtttgaatgttntagattgctaagaactctaatttcctggagaataagaataaactaataagaaggataaagaggatatagaaaataacatatcttcaaaactattacggaacgataaatatatatag

SEQ ID NO: 137861 - DNA, 433 bp, Glycine max
  unsure (1)..(433): unsure at all n locations
agctataagcctaaagtttctctggatgttttataatactattatatatattaatattattagttactactttactaactgaaaaaaggttttgctagcccattgattgtttagagaggtcaaaagtgaatttgttgaaatcatactagtatgtgtgatattctttctgtcttgctgaataatatgattgcatggttcatctattaaatttatattttcccctttcttttgcagaactcttcttctagtgtggagtttgctttagtctcctataatactcatggatgttattctggtatagttntgctaattttcttttttcatgttacaagaatcatggctgtttaaaaactgttgatcagaagtttntttctttcaaacttatgaactaatgttgcgcaatactctgcagttcattttcttttattacagt

SEQ ID NO: 137862 - DNA, 436 bp, Glycine max
  unsure (1)..(436): unsure at all n locations
agcttcgatccctttntntntctattttatttctcaacccaagattntgattgataaatcaattattaatctgctttaattgcaatccgatttcgtaaacatacctttccttatataccctcctctagaaaagcacaaaatttaagttcgaaaaaagattcataagggagatgtggcttgtgtgggatagcatatatgagttctctctcttctttatgcattctgccccaccaaaaccaatatggcttactatgtattttttgtcatttgctattgatatggatacatgacacatttcaattgattcttcacccataaatcgtttaagcgacatatcctcaattatttgtcttgtatgtggtgtcaaaagtaatgatgtcgccaaagtatccataaccatttatcatttgtgcatccgcccaaaatatatttgtta

SEQ ID NO: 137863 - DNA, 485 bp, Glycine max
  unsure (1)..(485): unsure at all n locations
ggacctatgatactcagcctgaggtatatgggaagtatgttgtatgactctttcttttaccatatacctgctcgagggcccattgttntgccagccatgttttacgatatgtgatggtgtattcgaactcttgtcttacgaatgcgatgaatgtacgaatgattagttgctcgttttcttcaaccatcacaaggatattctttcctacaagttctgaatccatcttattgtgatcttgtgaaatagttggcatgacgcatgtgtgagactttcttatcattgtaatttcccaaatttttagattttttctttcggacgctctaagtttccattggcatccttcagctgggcaacataagacccatgtatcctgtgcacacctcttggctttaaagtgacatnggtcttaatgtgtcacatttttaccacgtgtttcaggtcctccaattaatggaatccctgaccatcatacaactcgtcatcgt

SEQ ID NO: 137864 - DNA, 403 bp, Glycine max
agctaggactcatgagtggtaagttgttgtctaagtggatgggttcttttgttgttactaatgtttttccttatggtacagttgagataaaaaacgactccacacacaagagcttcaaggtcaatggacaccgacttaagccattcctcacaaacccttctttagtggacgtagtggtggaagagactttcttactccaccctactcttcctccaccatgacttagggagtttttcttttcctatctccttctttacttttattacatttgtccgattctatttgatggtttaattacttttaatcttttaattgtgctacattaaggataatgtgttggttaagtatggggggggagtgttctttggttttggttttgatagtcgtgttaaattagtttaat

SEQ ID NO: 137865 - DNA, 472 bp, Glycine max
  unsure (1)..(472): unsure at all n locations
tatccttntcattcttgatcactgtgaggcctgtcttcttatgaaccacttggactggacttacccactggctgtcagagatggggtagatgattccagcttgtaagagcttggtcactttctttttcaccacatctagaataacgggattgagtcttcgctgtggctgcctcactagcttatctccatcctctaaaagtatcctatgcatgcaggtagatgggctaataccaggaatgtctactaaagtccatccaatggctttcttatgtttcttgagaactagcaacaacttctcttcttgctcagcagcaagggagacagagatgatcactggaaatntttccttgtccttcaagtaagcatatttgaggttngatggtaagggcttcaactctggtgtgggtggtggctgaacagtgggaggaaccatggtangagaagaaaaagttcctcagcctgtacctcacaa

SEQ ID NO: 137866 - DNA, 411 bp, Glycine max
  unsure (1)..(411): unsure at all n locations
agctatttagtttcagatgatgctatgggtntgtagctacctcatgcactcctctaatgactatggcatcatttctggcactaaactgctgggaagtggaggccatcttctcaattaaatttttggcttcagcaggagtcatgtctccaagggctccaccactggcagcatctatcatacttctctccatattactgagtccttcataaaagtattggaaaagaaattgttctgaaatctgatggtgggggcaactggcacatagtttcttaaatctctcccagtactcatacaggctctctccactgagttgtctaatacctgagatatccttcctgatggctgtggtcctggaaacagggaaaatatcttctaagaatactctcttaaggtcatcccagctcgtgatgg

SEQ ID NO: 137867 - DNA, 350 bp, Glycine max
  unsure (1)..(350): unsure at all n locations
ngcttgtggngcttctatggaggctggatcttgagcttattgaggtcctttaatggtgattttccaccatggggatgcagcggaagaaaaaggaaaagaggtgagaggaggcaccatccactagggaataagccatggaagaaggagcttcaccaccaagatgagccttggataagaagcttggaaggatgcttcaatggaggaaaagaaagagggagagaaagagagagggcggagcacgaaattcaaggaataaaagagggagagaagtagaactttgaagtatgtctcacaagactctcattcatcanagttacaacaagtgttacacatgcttctatttatagact

SEQ ID NO: 137868 - DNA, 461 bp, Glycine max
cggatccttaagcaccgcaggctgcagctagatctacagggaggtacttcttgttctaacttgatactactcaaggatgacatggatctacatcatgagtcacaaaagtcaagctatcaaatgcttcatagaatggaacgcatttattgaaaaacaaactgaaacgaaagttcaaagactcctagctgataatggcttggagtgttgctcaccagagtttaacaaattctgcaaagatgaagggattgctagacaacttattgttaagaacactcctcagcaaaatggagtcgttgaatgaatgaacataacacttctggaaagaacaagatacctattgtctaatgctggtctccataaaagttcttggggagaagctatcaactaaacttgttctatgatcaatcgaacaccctctactactataggacttaaaacttctattgaaatcttgaatggca

SEQ ID NO: 137869 - DNA, 273 bp, Glycine max
gcgctggcagactaagtgtgcaccattattggagaagaatcctttatgttgtttcatgtcaacctcttcttccagatcaccattgaggaatcttgatttcacatccatttgatgtcactcaaagtcaaattgagctattaatgccataattacttgaatagagtctgtcttatgcataggagaaaaaacatctattaagtcaattccttctctttgagtgaaccctttggcaacaagtcttgccttatgtctctacaatttgccttgtgagtt

SEQ ID NO: 137870 - DNA, 383 bp, Glycine max
gttggatggtgaaattgatgtgggattcataatcatgaattggccaagtcatcagttggacatccatatattgggtgattgactaaagctgaaaatacacttattgttgatatgatgaagtcaatggtgaaaccaaaaaacattttgctaactctgaaagaacacaatgccaatagttgtacgaccatcaaaagaacatacaatgcaagaagtccataccgttcttccataagaagaagtgatactgaaatgcaacatctcattaagcttcttgaacggaatcagtatattcatttgcatacattaaaggatgaaaacgtggttcgtgatatcttttgtgtgcaccatgatgcggtgaagttagtcaacacatgtaatttgat

SEQ ID NO: 137871 - DNA, 336 bp, Glycine max
  unsure (1)..(336): unsure at all n locations
aacttatgcattgactaatgtattgcctccttggaacttgatagagtagggctcgataactgcactgctagacatactgtgcagggatctaagatatactatggtgagcgtataatactgtttaaattacgctgcgctctacaagagacatctgcgaacgaagcttagtttaaattagtccgaactcacgagacatcanggttggtgtgtttgccctcggcatataacacaggaataatttcccatcgtgaaaaaccctaattgcatatagaatctctgtggaaggacccgacgcttttacttatttgctatcacactcaaacgtacatgtatact

SEQ ID NO: 137872 - DNA, 435 bp, Glycine max
  unsure (1)..(435): unsure at all n locations
agcttggttcgaggtacttacccttttaatatcgaaaaacgatgaagaacgaatgaagaacgtcgaagaacggtcaaaacctttgcgaaattcctcacggaaaacgttacggaaatgtttcggaagcgcctcggcttagattttcttcacgaaaacaatttttccaagcaaattcgaaagagagagaagtgcctaaggggctgaacccttttcttcttcacttcctcccctatttatagcaaaataggggagatggttgccgcccagctcgcccaggcgagctcagctcgcccaggtgagccaggttgcttcctccagaagcaacagccttctggagggatcttctggagggcccaagtgggcctggttgctatttgtacccccatttttactaagtacaccccctggcctttttttggtgattctnttttcgaa

SEQ ID NO: 137873 - DNA, 419 bp, Glycine max
  unsure (1)..(419): unsure at all n locations
tgccacccagctcgcccaggcgagctaggttgtttcctctataaggcaccgccttctggagaaacttcctagaaggcccaagtgggcctggttgctatttgcaccccttgtttactaaatacaccccctgccttttttgctgattctttttccataacgttacggaactttatgaattctataacgatacttgttttccttccgtaatgttacggaaccttacagattatgtaatcatcccttttttggctttcagaatgttacggaacctcacagattgtgtaacaatgcttccttttgatttccggcatgttgcggaacttcacggatcgtgcaacaatgctctcttttgacttctggcacgttatggaactntatgtattgtgcaacaatgggtgccaagtacctcgaagcggaca

SEQ ID NO: 137874 - DNA, 432 bp, Glycine max
agcttgagcttagctatacatacctctctaatagctaagctcacctccttaagatgagaagctagagcttagctatacaccccctgtaatagctaagctcacccccatgacataaaacatgaaaatacaaaaaaaaagtccttactacaaagactactcaaaatgccccgaaatacaaggctaaaaccctatactactagaatggccaaaatacaaggcccagacgaaggaaatacctattctaaaatttacaaagataagcgggctcatacttcacccatgggctcgaaatctaccctaaggctcatgagaaccctagggccttcgctgggatctctagcccaatctacgtggagtcttctacccaatgccctttcggggtaggattgcatcattccctccaccttggaaaggatttgacctcaaatcccg

SEQ ID NO: 137875 - DNA, 418 bp, Glycine max
  unsure (1)..(418): unsure at all n locations
cttctagggaaatttcttgcaaaaacaaatattctattatgttatttacaaggaaatgccattttaaagcaaagcctatcaacaacagcctacgaccctttccgagtgtaaacctagaacaacttatatacttacgggcatacacgcatattcaaggtattttcgctacctaagaaatacacatgcacatagccaaggcatttgctaattaagtcaacaaggcatttcgctacctaaattgaataaggtatcttcgctacctaacacaacacacatacatttcatgagacattngctacctacacgcaacacacatacattcacgaggcacatgcaacatatatacattntatgagggcattttgctatcaaaatttacatacacacattcacgtatttgctacctgaattataccta

SEQ ID NO: 137876 - DNA, 304 bp, Glycine max
agcttctcatctttagagtgtgcgcctatcttgcgacagtacatcttgagatggtttttgggacaggtcgtccctctatacttgtcgaagtccggtactttgaacttcggggggataacaacatcgggtactaagcaaagatccgtcatgtctgcgaacggatagtccccaaatccttctatggatctcaatctttcctcgaggagatcgagcttcctcctttctttagttgccgggggtggtccttccgtggacaaaactattggttgtgtctcgatgttgggttgaagcaacgtgctgggtg

SEQ ID NO: 137877 - DNA, 485 bp, Glycine max
  unsure (1)..(485): unsure at all n locations
tccccttacctatattgagaagaagaagagaaggaagatctttagctccaccaagggatttcattcaatcttcatccacaacatcatactcatggaaacacaacaaaaacaacacccatgacggtctctacatcaaaacccattatatataggtcactccaagaaaagcaaaagaaaagaaaaatggaacaaggaggtcaaacaggaaggatgtgagcttacccaaaccaaagtaaagtgaagaaactctatggaagaggaaaacaagccactaaggatatataaatataagttcaactcaagaggaatgagagcttagagaggaaggaagatgagaatgaaggaatgggagaaagaatgaaacttttcacatttaaaggctttggggcatcttgtgtttttctaattacacctatgttttcgctcgccacacccgtcattctatgtaaaaacttanagcttacttacaaggctataaacttaag

SEQ ID NO: 137878 - DNA, 443 bp, Glycine max
agcttggtagaggatgtaagatatggattgttttatccatccacaatgtatatgggaaagtagaagctaacttacatggaaccagtcaaaattgcaaaaaatatactaatgacttgtcctcctgtataacctttgtctagtaccatcttccctccaaaccacactgccaaaccataggtacaataaataaatagacaaactaaaccaaagccaaaccctcttgcactccaactctacaagctataattaagtattgattgtattgagttatagcttgcttctaaccaataaccacttttggtcctaaaattctaacgtttaggtagagtgcaggttgttgcaattctgcgtaatcaagttatcttcatcaaccattaatcggagcacctcatcttcccctgttccttttattcttatcctagctaggaatgggattagaatat

SEQ ID NO: 137879 - DNA, 478 bp, Glycine max
  unsure (1)..(478): unsure at all n locations
tgtgcctctctcacgttggaatatgaatgtagcatatattttctatgacccttacgtgctttgctgatggcttcttcccgttccaagcttcaattggagtcttgtcttttacagacttagttggacatctgttgagtatgtaaacagcagtgtagactgcttcagcccagaatgtgttaggtaatcccttctccttgagcattgatctagccatttccataactgtgcgattctttctctcgaacactccattttgttgaggagaatatgcgactgtaagttgtcgctcaatgccttcatcctcacaaaatctttcaaactcgcgagaggtgtactctttgccgcgatcacttcttagtacttntatccattntccactttgattttcagcaagggccttgaactttttgaatactccaaagacttctaatttttcttttagaanatatatccatgtcattctagagaagtcatcaat

SEQ ID NO: 137880 - DNA, 441 bp, Glycine max
  unsure (1)..(441): unsure at all n locations
agctngatcaaacaaaatctatacattcttatctactcaattcatacatttgctcattcaagtcattcacaaacactcatttcatatcaaacaaaccactgaaacatgagtcaatcatttcactgttcaaacaagctttttgtacaagcaatcaacactaaaacaacataaaattaaaaagactgaaatttaaagactaataaagcataaactaaataactgacatgaactaaatatctgataaaataatctgttcataatttggaaaattttaaaaactatgcagaatttaaaactcctgatcatcctgctgctgatcttctgcatactcgttcagattcagcactggagcagctggtggatcttgaacaataggctgctctggctccaatgctggtgcaaatggctaggaatcctcanggatgggtgctggagagatat

SEQ ID NO: 137881 - DNA, 412 bp, Glycine max
  unsure (1)..(412): unsure at all n locations
ngtgactcacagtcgtgctaagccatattctgccccttccttattattggaaaccattctggaggacagaggatcagtggaggacttcaaccagttggtgggagttctcagccaattaacagggtgtctcagtctgtggatagaggtagtggtggtagtggtgctcctgctattgttactacaccactcaggtgtgggaagtgtggttggcttgggcatattgctagtgagtgcacagatagagaggtgacttgctttaactgccaaggtaagggccacctcagtaccagttgcccatatccgaggagggagaagaggagtggaagtctgaataatctgagtggacgaccaaggaccacaaggagagtgtttgctcttagtggtgctaatgccgcacagtctgatgaactca

SEQ ID NO: 137882 - DNA, 459 bp, Glycine max
  unsure (1)..(459): unsure at all n locations
gatccttaagcaccgcngctgcagcttcggctagatacccttgattactatattcagctgacatagcttacgaaagtgtagactaatttagcctaagctttgtactcagatccctcttgctggactatacttagaccaaacaacattattgtaacaacatattgaaaaccaaaacttaatccgcagatccctcatttaagactaagattcaattgtgcttcattcaagttctaaggcaacaatacattttccaatgctaaagccacctaaccaggcacacaaatggttgatcagaccaagagcatatgcaatttaagcactgaaagaagcattgaacacaacacacaccatcaattagatattanagtaattacatcaggtgttctttataaatcttcaacagaggagtctagccagccaatacagaaaaaccgctagcataatgagattacaaaccta

SEQ ID NO: 137883 - DNA, 257 bp, Glycine max
catctacgcctgttgcaagagtatgtggactatgatcttccgcagatcaccatacagatctctgtccttctttgtagcaatctggagtcaatgagcaacctgaagcttatgctgcacacagttataatacaccctctcagtagcaaaaccaacaacagtagaagaattatgatctttcaagctacagatacaatccaggctggaggaatcatgcaaatctgagatggacaaggcctccataacaataacagcatgtt

SEQ ID NO: 137884 - DNA, 440 bp, Glycine max
agctaagtgcaaatccttgcggcacatgtttatcttagtggacgctttctcgctaagccaattctgcagaatctaaaaattctgcaactttcgctaagcggctccacatgtcgctaagcgatagtgttttttttacaaaggccagctaagcagaccatgtctcgctaagcggccagagtctttttcagtttcattttttagttttaaaaattaaaataactgtgtcctgattaattggttggtccctttatatgcagatggcctctaagaaacataagagtagtgattctagaccacaatatcagaatgataactggagaattcaatcagaggaagcctagaaccgatatatcgaaaatattttagaccgaatgatccttctggaaaggaaggtggaactttgtcattctgaatctcacaagtttaaaatagaattggag

SEQ ID NO: 137885 - DNA, 429 bp, Glycine max
agctataactgtaattataactattatttttatgtttaactaatgtgttaaaaattggactgacaattgaatccggagaaaatatttgatcaaggtttattgattcaaccgcgattaaatcgcgattgaactagcaaatgaatctgtacttctaattcatttaataatttaagtaataaagtatacatttatgagaaattgggatataaaaattataaattaatataaatgtttatgtattttataagataaatattaataatcgacaatgatttatatttatgagaaattcttaaacgcttatattatctttaaaacttttagattaagttataaatgaacggacaatgtctctttttataaaaaaatacacgtatttcaatttcttttattgcatctggtttgcatcgggctctactcattttggat

SEQ ID NO: 137886 - DNA, 437 bp, Glycine max
  unsure (1)..(437): unsure at all n locations
actgcgangagcgtgcctacgtgacttttgagtttaaaacccaagcacttagcctagccttgcgctaagcccaacctgaagttgtaaaatccagtaagcatctggggcttagcgctgtacgctgcgcttagcgctttctgcaacaccaaattttatctgcaatatgcgcttagcctgatatataagtcttagcgtaccatcaagcttcaacttatagagagtagttcacgcttagcgcaacatgcgcactttcaagaatacaaaacccgtaagagattggcgcttagcacctcctggcccgctcagcccagcttacaaaatcaagttacagaatggatctggggcttagcacaagatagcgcgctaagtgctgctacaataaatattttcccatgaagaagtggcgctcagtgcatcatccatgctaagcccactgg

SEQ ID NO: 137887 - DNA, 438 bp, Glycine max
  unsure (1)..(438): unsure at all n locations
agctnnagctacacacacccctctaatatttttagctcactcctatgccaaaatacatgaaaatgcttagctacacacacnctaatagctaagctaccccatgccataatacatgaaaatacaaaaaagtccctactacaaagactactcataatgccctgaaatgcaaggctaaaaccttatactactagaatgaccaaaatacaaggccaaaaagaagaaaaacctattataatatttacaaagaagagtggacccaaccttgacctatgggctcagaaatctgccctgaggttcatgagaaccctagggccttctttagccactctagcctaatcctcttgaagtcttctatccaatacccttggggggtaagattgcatcagtacccatcaagttacctccatcacgtcttcccaggtcaagggtagacacaac

SEQ ID NO: 137888 - DNA, 468 bp, Glycine max
  unsure (1)..(468): unsure at all n locations
ggaagaggatgctntaatggagganaagaaagagagaatgtgttatcacgaaattgaaggaataaaagagggagagaagtggaactntgaagtatgtctcacaagactctcattcatcaaagttacaacaagtgttacacatgcttctatttatagactaggtagcttccttgagaagctttcttgagaaaacttccttgagaagcttctttgagaaaacttccttgagaagctagagcttagctacacacacccctctcataactaagctcacctccttgagaagcttccttaaaaagattcctaaagaagctaaagcttagctacacatacctctctaatagctaagctcacctccttgagatgagaagctagagcttagctacacacccnctataatagctaagctcacccncatgagaaaaaacatgaaaataacananaaagtccttattacaaagacaactc

SEQ ID NO: 137889 - DNA, 296 bp, Glycine max
tatcttatgtaatcttctctgtacctttttgctaaactcaaataaataaaactatataaatgtgtaattcgcttatccaaaaaaaagaaattgcgacaggattctgatacaatcgaaaaactcctcgccagattatgtaaagtttattaagagaataacatcaactaagttcataatcattcaactggctaagtaatggcttcaaaaagagggaaagtgacagtacaatttactagtccggtatagagtctaatctgatgacggagaaaatattcttatcacataatctatatatg

SEQ ID NO: 137890 - DNA, 381 bp, Glycine max
  unsure (1)..(381): unsure at all n locations
tgcttctcaatacccntaatttgtccggngataatngtttgtttacatgcagatttttgccggtcatgttgagttgcttaaatccaattatcgcgtgatccataagatttcatgatatttcagaaggaaatgagcaaaaactcaaaatggaggtgaaaatatcaatttagggggtgttcttcagtcttaggctcatttaggcccattaggaagcctcaacatgaagcaaatagctcgcctaggcgagcatgttgcttctgaactaagccactagctcacctgngcgagttgggtggcaagctcctccctctatttttgtataaataggcggnggaggctcangggaaggggtgcagcacccttagtgagcaaattccactg

SEQ ID NO: 137891 - DNA, 419 bp, Glycine max
agcttgactctcataacttgcttattttcctttaggtccaatgcttcatgaagcagcccatttgtatcatagctgctaagcatactgctccaagatacactatatttagtagattagaggatagtcacacttattggttagtcgacttgtatatcctactcattgccacgtattggtatctgttgttcgaaatgatgattgatgttagcggcgactgactaattaatcggatccttgctttcaatttggaccgtgctgctcatcatcacaggaacgaatgtttgcgaccaattaatatctttattaatcagttactgccattaacgacagctgatatatgctatacaacttgttgtcatgatgagagaaccttatcattcactttgatactgaatacaatgattcttgctgatagtgta

SEQ ID NO: 137892 - DNA, 143 bp, Glycine max
  unsure (1)..(143): unsure at all n locations
tggctcatcccatgcttaagctcgaaagccaattactcatttttctcttgctggncatctcacttaagcctagtggagcctacgcttaagctctggtccagccacgccttaagcttgaaaccagtagcccattttcccctgca

SEQ ID NO: 137893 - DNA, 409 bp, Glycine max
  unsure (1)..(409): unsure at all n locations
agcttctagccaaatggacttattttgtattattcctntgatagcccttttgagccttgtttccctttccttgttttgaagctcactacaagccttaagtgaaaaaccatgatattaccatatccttaaggaattttggagctttggaattgttttgggaataagtgtgggggggtttttgtttcattggacaacttgttttgttggctatgcttcatgatgtattatgggccatacttgatgtacattgtatactggttaaatgttggacatgctgaatgaaatgttgtttctcaaaaaaaaaattctcataaaaaaaaaaacatttccaattagaataagaaaagcaataaagttgagtgaataagatcttacatggcacaagaatgatgaaactcttggttttact

SEQ ID NO: 137894 - DNA, 473 bp, Glycine max
  unsure (1)..(473): unsure at all n locations
ggcttgtggngcttctatggaggctggatctgtgactttattgaggtcatttaattgggattttccaccatggagatgcaacagaagacaaaggagaagaggtgagaggaggcgccatccactagggaataagccatggaagaaggagcttcaccaccaagatgagccttggataagaagcttggagaggatgcttcaatggaggaaaagaaagagggagagaaagagagaggagggagcacgaaattgatggaagaaaaaggcagagaagttgaactttgagttgtgtctcacaagactctcattcatcaaagttacaacaagtgttacacatgcttatatttatagactangtagcttccttgagaagctttcttgagaaaacttccttgagaagctagagcttagctacacacgcccctctcataactaaactcgccttcttgagaagcttccttaagaagattcctaaa

SEQ ID NO: 137895 - DNA, 438 bp, Glycine max
  unsure (1)..(438): unsure at all n locations
agctagtccttggtttagacatgatngttatttgatttgggacttgtaggattcaatttgggcaaaattggatgagggaaagtgtgatttcgaaaatctgcactttatgcagaactttgctgtcaaataggtgcagcaaaattttggctttgtgcagaaaatgttgtgtatttgctggttgtggaaagagtagtacagattgggctctggaagtgttctagcagatcccaacggtcataatgtagatttatgtgctagagacttccagtaaaattttcgagtcgatccaacggttaaagaattggaacgaagagaatgttactgnggtatttgtatgtgaaaagctgtgatattggtttgtgttgtgggcagagtattctgcctttgcctatcttgcttggttttgttagttcatgatgatcggatgtggaattactc

SEQ ID NO: 137896 - DNA, 370 bp, Glycine max
  unsure (1)..(370): unsure at all n locations
gggttntgggcaatagcaccccacctgacgtcttcagttcttctgacccccgcgacatatctccaggtaccactctgtggtgaacaataaaagcaggaagtttcacccttcaacacttcctcatctcaagcttgtaagattatggggtacccatcacatgtggtactaggtggcggtcgggcgatggtacacaacaagttttccacatcgacaatgcgcgcataaacccaccatcccctggtgtccacctncaactgagctcacgtactcncacgtagctcatatcctcgtttctctcaaacaccgggtcccatcaatcctnccaagcttccacaacatncaagcaaaacaacattcaaacagcacaagc

SEQ ID NO: 137897 - DNA, 382 bp, Glycine max
agcttggcgtcataaacaacacttattttttaattcttatccagacgactagccactgaaaaaatacagagcgtagctctgatcatggttgtcgactttacattgaacgacttaagaaagcacatccgatccagctcatgttagaaggccacacctgaccatacatgaatagactatataagcgaggctttgtttatcatttcaaaaaacatgaatactttttcaaccatccttcacaagccttgaatctctttgaacttcatcttcttctttgtaccaacagcttactgaaatatcctgtacatgaaaacttgagttaaacatctattcattcttttctcgcttaggcaaagagaagtcatcatcgactaaccgcctgaat

SEQ ID NO: 137898 - DNA, 252 bp, Glycine max
ttgtgcgcatagatccatgaaggccgccgcgacaaatgtgttagttttcctcacgaagagatagccaccattttaggagtggctagcaccatcatcattattaagccatcaccagatggtctgttcacacaaagagatatttccgatctagggacgatgattacacatattctcaagaagagatagatggcctaccttcgtcgtatctggtctctcatatggctataaatgacccacatatagtgactggag

SEQ ID NO: 137899 - DNA, 423 bp, Glycine max
  unsure (1)..(423): unsure at all n locations
agcttcttgagtacgtgtgcacactctcaattattatctggaaactatgcattctgagcaagaatatcatcagcatattctgtccacttaatgtgtagaatcaatgcgccagatcatactgtactacattgtatactatcggactcggtcgaggaagcacatatgcaaattaggttccagattattctacccctcttcaatttgtagctttatgttcattagctaaactcattggagaaagcgattcatgcagcaaaaatctggcacctattcttctccttagataaacatgcagatatatataaaacatcgtgcattataattctatctgaacatgtatgttgagatactatggacactcttgactctntagttcgaagtgcgatgggattttctgcagattggaaacatattatatcatga

SEQ ID NO: 137900 - DNA, 421 bp, Glycine max
  unsure (1)..(421): unsure at all n locations
ntagccttaagtggtaccatcttgctcatgtggctcttgatctgtaacaatctccccctttatggctttgatgatgccaaacttgaatacaacatatattgcatttggaaagtcttgagattggattggaaccatgattcttagtcttatcctagaaaattcttaacacttacgaaaggagtaattcatcatcatcatagatgtcaaagtataactaattatataatacaatgctcaacatgctatgcattgcagacaatatacgatgctcaacacgctatgcattcttagtcttatcctgaaaaattcttaacacttaagagaggattaattcatcatcgtcatagatgtcaaaatataactaattatataatacagtgctcaacatgctatgcattgcagtcaatatgcaatgtcttct

SEQ ID NO: 137901 - DNA, 424 bp, Glycine max
  unsure (1)..(424): unsure at all n locations
agcttctcgtnaagcaatgattatgcttattctttgctcttcctgaagagcatcgcgctggncttcaagctatgttatctggcacgccaagagcccttgttgctccagcaggaaaaggacaatcttctcaatctgaattgcaaaaacagggatgtgattgaaagttgaaacaaatgtgcaacatacaagattccctacataataccacacaaacacagtttgataacagttatggttcattctactcagataatcacatgcattcatataactatatccacaatcaaaattgggcattaaaagtaatggaaaggttcaaccttcattcagaagtgcacaacttagcgttcaacaaagaaaacagaagacctgattatcagcattcgtgagaaatccttgagtacatgtctccgatctagtgttc

SEQ ID NO: 137902 - DNA, 325 bp, Glycine max
  unsure (1)..(325): unsure at all n locations
ggagtacgacagtcaccgctttatgagcgttgtacaccancagcccttcgaagccatcaagggatggtcgtttctccgggagcgacgcgtncagctcagggacgacgagtatactgatttccacgaggaaatatggcgccggcggtgggcaccactggttactcccatggccaagtttgatccacaaatagtccttgagttctatgccaatgcttggccaacagaggagggcgtgcgtgacatgagatcctgagttaggggtcagtggatcccgttcgatgccgacgctatcagccagctcctgtgatatccgatggtattggaa

SEQ ID NO: 137903 - DNA, 415 bp, Glycine max
agcttctaagcagcttccatcctacattatttctaggctttatgatgattggtttgacatcatgggcctcagaaagacaaatatcatgaagaaattttttggaggacaaggatgatgacttcaagttcactactttgacatcctttggaaggattttccactagatcaacatgcactcagtattgccaaggcgcgacatgtttcaagaagtaaatgaccatgaccttctgatcatttactgtctatgaaggaggattcctctaagtctaccccatctgatcatcagccatatgatcaaggaaacccaacccatcaagtccacttctagtgtgccctatgggatgctgatgatagtaatatttacgaatttttatgtaccttttgaggatgaacctcatgatgatgaggttatata

SEQ ID NO: 137904 - DNA, 428 bp, Glycine max
ctaagctaagctccgtaactgccaagactctaatattgattatttttttgtggaaccttcacccgacgaagacactgacaaaaacttatcttctccttcttggacaaattatggcaggctgggggcaagtagattctcttcccatcagaccttggatgcaactgtgatcgtatacccatatcagctagaacttgacgggtattcaagccatccttcgtcttgccttgaatgttaaggagcatcccaatcacactgtcacaaacatttttgtccacatgcataacatcaatacaatgtctaacgtcaagatcacaccagtacggaagatcaaagaaaatggacctcttcttccatatgcaactctgacttttatccttcttgggggctcccctaaacagtattagggtgtgaacccttgatatacctgc

SEQ ID NO: 137905 - DNA, 420 bp, Glycine max
agctaggagcatgtgacttatattctttattttgagggggagagttgaaattacatacattgtatgggtacttcatccacatattgcatgggtacttgttccaataaataatagttattaatgtacctagttagtcacatatccatgtatctaagaattcacatgcatgtacataggtactagaacttcatttatattcttataaatttcacattgtatttactccctaagtctatataaatatagatcagctgggtgggataagcactcaagcatgtcacaacctctagtctcttcaataaatataatgatgagaaatgtaaaatctctttattatctggaaacatgtgacgtatatctaatagggcaatgtcttctatgggatactataatcgttggacactagccataacttattgc

SEQ ID NO: 137906 - DNA, 420 bp, Glycine max
  unsure (1)..(420): unsure at all n locations
ntaaatatgtgggagtttgataactgacgtgcttaagtttattatgtaactaaaacatataagaattagcaatattctctcatttttattgcttctttttgcgtgaatcattggagtttcagcatctctgagtttttgtgtagtaggtgccttaaactgctaattcatactgatttgatggctgttatttcatagatatataaccaacgtatacagagagaagttgaagtcagatggttcgcgctcagcgcgccatgctctcttaacaagctgttgtcacttagcgggagggtgttcgcttagcatataatagcagcattaagaacctgcagttatgcgaatgggtgcttatcgcccagacacttacatgcgctcaacaagcagacgtgcttagcgcgtagtcgcggaatctcatacttc

SEQ ID NO: 137907 - DNA, 439 bp, Glycine max
agctatagaagagagtgatgaggtttttttctctaaggcagagcttgtacgagcccgagtagtcgaagagaagttcaagtccatagccatcaaagtctgaaaagagtatgatgaactaagggacgtcaatatggccaccgctgaagccttggaacgagaaaccaagaaggcccgaaaggaagaacacgtgcaagcaaagttttgaggggctttatagggcagcaatagtaagctcaagctccgaagaggtgaaaggaattatcacgggtcaaaggcatgatcttgaaggacgagctaaaggcttaccttaggtcgaaaagaaatttgttccaacagctaatcgagactgaagggaatatgtgggccgtcatcgatgagtgcaaagagaagctaaatctatcggcgactcacgagcaaaggctataggatgagtatgcca

SEQ ID NO: 137908 - DNA, 471 bp, Glycine max
  unsure (1)..(471): unsure at all n locations
ntataagtgcgggttctgtagacaaaggtcaagctctcatgtattgcgaagatgatattccgagcactttggatttggtacgaccatgctctcctgatttccagctgggaaattggcgagtggaggaacgccccggcatttacgcaacaagcataatgtgaacctttacggctataaaagctctatagttgggcctaggctttagagttttcattttgttaaagctacgagtcttttgttgctgaatttataatacaaggatctttcttcatctgttcctggactctacccattctcattcatttgcatgtttacttcttttactaatacggcatattcaatgacaagtcccccgaatgtactaatacctgtgacccgtctatcaacttctagcacgaaatgaatcacacggatgatgaaggacatgatgatgtgggacttccttcagaactagagagaatggtcgcccat

SEQ ID NO: 137909 - DNA, 441 bp, Glycine max
  unsure (1)..(441): unsure at all n locations
tgcagctattgtatngatacatagttctttttgagacaatgattngattcttttaggagtctctactttaatcgattaattggcgatataatcaattacttctcttttaaaagtgtttcagaagtgaccatgaacactttaatcgattacatcaagaatctaattgattatattattcttgaaagtttttcagtttttgggacgaacactttaatcgcttgaaatggtaatataatcgattacttcttcaaaataatcgattacattgtatatttaattgattacagacggttataactgttttctctattaatagtcaccttgtgttctcacttctaataacttctgaacgagctagaattaagagttgatattagtaaaagaaagaagagaagaaaaagtgcttagaaacaatgtgactcacaacttctaatctctgat

SEQ ID NO: 137910 - DNA, 474 bp, Glycine max
  unsure (1)..(474): unsure at all n locations
cttgtgtaatcgattacactgatttggtaatcgatttctttgtttgtttctgaataaatcaaaagatgtaactcttcaaatggttgttgactatttcaaattggttttatgtttttctaaaagttataactcttctaaatgggtgtcttgaccagacatgaagagtctataaaagcaaggctttgttttgcatttcaatcaatcttgaatactcttccaatcaatttcttacaatcctttacaagccttgaatctctatgaacttcttcttcttctttgtaccaaaagctttctgaagttttctggttttccaaaccttgaaaacttatgctattcatcttttaattctcttctccctttgccaaanagaattcgccaaggactaaccgcctgaattcattctgtgtctctcttctcctntttccaaaagaacaaaggactaaccacctgaattctttttgtctcccttctccc

SEQ ID NO: 137911 - DNA, 418 bp, Glycine max
  unsure (1)..(418): unsure at all n locations
agctttctaaactntgtttanattctttgtttttctgcaagtggaaattctgcagaaaacaaaagtgtgctatcttttcatcccttcttcctcttgccaaaagattcaaaggactaaccatctgagaattcttttgattcatccctttcccttacataaaagatttcaaatgactaactgcctgagatatcttttgtttccccttacaaagattcaagggactaaccgcctaagaattgtttgtcttaacacattggagcgtacatcctttgtggtacaagtagagcgtacatctacttgggttgttatactgagaacaagagagggtacatctcttgtggatcagttcaaatggagcgtacatccacttggttgttcaaagagaacaagggagccgtacatccttgtggatctttgc

SEQ ID NO: 137912 - DNA, 433 bp, Glycine max
  unsure (1)..(433): unsure at all n locations
agctatattctacacctgaaaattggatgagncttctgcacaaaagagaaagcttcctgatcatgagggagctatacaaaaatcttcatgcaagtggacttccttcgagtagatctgacttgnnagagcctcctatccctcttccatttccacctanagcaattccaaacaaaaagatggaagaagttgataacgagatcttggagaccttcaagatagtagaggtgaacatacctctgctagatgccatcaagcaaattccaagatatgtcaagtttctaaaggagctgtgcacccacaaaaggaggctcaacggcaatgaaaggattatcatgggcagaaacgtgtcatcattgataggaaacttgttcctacattcctgagaatgtaggacccaggactttctattagcttgattattagaacataaatt

SEQ ID NO: 137913 - DNA, 311 bp, Glycine max
  unsure (1)..(311): unsure at all n locations
ccacaactctcggaatgggagagaaatgttcatctaaagcatacaagtccctaatattatcaaatcctaaaatttgagctcctagggagcaaaacaatgtgtatctcctaaatagggcatcaactaccacatttgtttttccctttttgtatttgataacatatggaaatttctctangtactctacccattttgcataccacttnngttaacttgctttgccctccaatgtacttaagtgattgatgatcactacaaatgacacattccttggaaacaangtaatcgtcccaagtttggagggctcctat

SEQ ID NO: 137914 - DNA, 436 bp, Glycine max
  unsure (1)..(436): unsure at all n locations
agcttccttaagaagaatcctaaagattctatagtttagctacacatacctctctaatagctaagctcacctccttgagatgagaagctagagcttagctacacaccccatataatagctaagctcaccccatgacaaaatacatgaaaatacaaaaaaaaatccctactacaaagactactcaaaatgcctcgaaatacaaggctaaaaccctatactagtagaatggccaaaatacaaggcccaaatgaaggaaaaaccaattctaatatttagaaagataagtgggctcatacttagcccatgggctcgaaatctaccctaaggctcatgagaaccctgnggccaccccttgaatctctggcccaatctactttgagtcttctatctaatgcccttgcggngtaggattgcatcattccctccaccttggaaa

SEQ ID NO: 137915 - DNA, 326 bp, Glycine max
actcagctgaagctggagaaagcttgagaaggttgtgtttttatttttaactgacgcaatcctaccccgcaagggcattggataaaagactcccagtagattgggccagagatccaagggaaggccctatggttctcatgaaccttatggtagattttgaccccatgggctaagtatgagcccgcttatctttgtaaatattagaatagggtttttccttcgtttaagccttgtattttggccattctagtagtataaggttttagccttgtatttcgaggcattttgagtagtctttgtagttgggaactttttttgattttcat

SEQ ID NO: 137916 - DNA, 437 bp, Glycine max
  unsure (1)..(437): unsure at all n locations
agctattcaaaanatgttggtttctttcttgtttttaaagtattccaggctttgattggaggttggtatcctttttatggcgttatcatgtcttgtcaacaagaaatgcatgcacgtatatatagtcattcagttttgtattaacatagcaatgaattcgtcatctgacttgttccaaatgttagaaatcggagcatcgctttaacaactttagttaaagctgtaaattggtgatatcaccaattatcttcttcttcttctttttttttttactgaaatatcaccaattatcctaggactggctgttcaggagaaacattatatcttagaaattcgtccttttttgtcaaaaaaaaaaagtaatggttctctccccaattagaagaagtacttattactagtcaaacttgttgaaacagcgtgatacttctgagaaa

SEQ ID NO: 137917 - DNA, 473 bp, Glycine max
  unsure (1)..(473): unsure at all n locations
tgtactgagttgttagaatttggtttgagttgcataatttatgggcagataatcaaatatggctttgggtcagatgtgtttgtgcaaaatggccttgttgcattgtatgctaaatgtggccatattggtgtggcaaaagtggtgtttgatgggttataccatagaacaattgtttcatggacttccatcatttctggatatgcacagaatgggaaagctgtggaagcattgagaatgttcagtcaaatgagaaataatggtgtgaaaccagattggattgctctggtaagcattctgagggcgtatactgatgtagatgacttagagcaagggagatctattcatggctntgtcatcaaaatgggtcttgaagatgagcctgctntgcttatctctcttacagctntntatgctaaatgtgggctggtgacagttgcanaatctntctttgatcaaatgaagacaacaaacgt

SEQ ID NO: 137918 - DNA, 434 bp, Glycine max
agctagaggaatattagggtatttctttatatgctcctatcactgccaaaccacacaagtgagcccacttagagattaaggatgagtctactgcaattggactaaaattgaacatgtgtagggatccttagaggatcaaatctgggttttttttgggatgttcactatattataattctacctttacaattataattatgagattgctatgtttgacagaccaattgatgccctgatgcaaattgtttgattaagacgaatgttcttggtgaatccgtgtcttagatctatgattatgaatcctttgattttgatatgattacatgaaattgcttgattttaattcatataatataacatattaatattattattgcgtggcctgtatatgatgcatgatggatgatagcatgcttgattactattatggaagt

SEQ ID NO: 137919 - DNA, 411 bp, Glycine max
  unsure (1)..(411): unsure at all n locations
ggacactatgaaactaagcttttatccaggctcatcttgngggngaagctctttcttctatggcttataccttaatggatggcacctcctctcacctcttctcctttgtcttccactgcatctccatggtggaaaatcatcattaaaggaccccattgacactcaaagatccagcctcaatagaagccccacaagcaagctttgatcaagtggtaatcagagcacaagagcttcaagtaggtgctccttaaacttccattaattttttgctttaccttctcttccattgatgattcttcattcttttctccatttatctcctcacatgtcttgtgataaatgtttataacatgattctttagagtgtccaccgattaaacttgctatagaagctagatttgatnttttatg

SEQ ID NO: 137920 - DNA, 469 bp, Glycine max
  unsure (1)..(469): unsure at all n locations
agctagaagatagggccaaactctctcttatttatctgattncangcttaaacaagtggntntgttcgtgctcatgcgcttagtgcacttcagaaccgcttagcgcgcattagtgaatttcgacttagcacggcttttctcgctcatcggatggactgaagcggcgcgcttagcgggatggcctttcgctcagcaaacaagcacaacgcatccttcttccagattctctctcatgtttagccgaggaatgttgcgctcagcagatagctcgctaagccagtagattggcttagcgagagggtgaaaatcagcacttcaaaacttgcctaattatcctgaaattgagagataatgattattaaatacacaaaatgggagtactacgtatttattacctatctttaacaaaaagtaattataacactataaaataaccataaattgtagaggcttgatacaatttacacaa

SEQ ID NO: 137921 - DNA, 222 bp, Glycine max
  unsure (1)..(222): unsure at all n locations
ggatctttgagcttcattatatgtccttcaatggtgatnntcaaccatggatatgtagcggaagataaagaagaagaggtgagaagagacaccatccactatagaataagccatggaaggaggagcttcaccaccaagagagtgtcttggataagaagcttatagagaaagcttcaatggaggaaaaaaatgagagagggggggggggggtctcctttttcc

SEQ ID NO: 137922 - DNA, 340 bp, Glycine max
  unsure (1)..(340): unsure at all n locations
gaaagatgattggagatgccacttcaaggagaagatgagtcaagaagaagctcaccatcttaagaagccttggataagagcttgaaggtatgagaagatgagtggagggagagggagagaaggagcacacacttttgtgcctcacatgaggtatgaactntgaagtgtaattctcaaatgatcaaagttctaaaaaatgcacacacatggcctctatttatagcccaagtgtcacacaaaattggagggaaagttgaaattntattcaaatntcacttgaatntgaaattaaatatgtggagccaaactttggagccaaaatttcactaattatgattag

SEQ ID NO: 137923 - DNA, 256 bp, Glycine max
caattattctaggcttatgtgaggacctttatttatattatgtacgaaatacttatactggtttaatatattttaaatgactctcaaagtaagttttgaatattctttacatgtttaacatcatgtggctatacttgtgttctcttaatgtatagtagtgtacctaagtttgatatttatcttatagtatttgaatacaatgaactgctgatgtcgatatctgtatgtaacccagaattacattttaatgatgtat

SEQ ID NO: 137924 - DNA, 383 bp, Glycine max
  unsure (1)..(383): unsure at all n locations
cacagacttggaattctacccatcttaatgtttattcaattcaaatcatgtattccatggtgtactcttnttccttacttggctcttttttccctataaggaaatgtaagggtctttttcgaaaagggtttaacaaagcaccttctttattaatgaatacaaatttcaattaccacacatgtttatctttaatttctcacaaggttcttctcctgaatacctatattccgataaggacacaccttataacatttcaaggtttccctctatatacctctattcagctaaggatgcaccttaaaacatttccaggtttccttcatgaataaccctatctgctaatgatgcaccttanaacatttcaggctttcttccgatacacc

SEQ ID NO: 137925 - DNA, 227 bp, Glycine max
tctctttcgccttatctactgacttccttttgttgctgggcgttttacgctaaccttgcaaggcacactgtagcaagctgtacctcacagaccactcataatcggtcaagataccgactttggttatctattacctttaccacaagtgtataccaattaccgaattagttccccaaatacattgcttggagggctaggtcgtatcagtcacctgaatggtgttgcat

SEQ ID NO: 137926 - DNA, 458 bp, Glycine max
  unsure (1)..(458): unsure at all n locations
ttctatgtgatttaccaagcacacaatgatcacaaatattcaagttatctagttcatcaccacctaatagattttgtttctcaagttcatgcaatcctttttcactaacatgacctaatctcaaatgtcaaagttttgttttatcaatcaatgtattactagctagcgatgcatgtccaataatagtggaaccttcaagaataaacaagccattacttttattcttgttacccttagctatgattaaagatccatgtgaaatcttaagaacaccatttaaaattctaggtgaatatcctagatcatcaaacatgtttatagaaataagatttcttttgagttctggaatgcaccttacatttttcagtatatactatctgttatcaaacatctttagtctcacaantccaatgtctttgaccttgcatgtggagatgtctcctaacagtacagctcat

SEQ ID NO: 137927 - DNA, 142 bp, Glycine max
  unsure (1)..(142): unsure at all n locations
gtccttccattctttgactgaaagtgttaatcaaacttcttgcatcatgactgagtatcgtttctgaaaataatcttcngtctacaccatccagtggtgaggctgtgacttgtctttctaagacatgatgtgactgtctacc

SEQ ID NO: 137928 - DNA, 446 bp, Glycine max
  unsure (1)..(446): unsure at all n locations
gttgctttggactcttggatactcgtcaagctggtcgaagatttctcgaagtttttattttgatcaatgtattttcgacatgtttcgctctatttcctgtattcaataattatctttattcttttttctctcttctttaatgttgatgcattgtatactccaagctagaagtgttttcaacacattccagcttgcgggggggtattagacataaaattaatttagttagttactagaagttatttgagtaaattagttggttactcaagttatagttactagaagttatttgagtaagttagtgttggttattcaagttagttattttctatctttgtatannatatatcaacttgtaatactctgatgaatgaatgaatgaattgaatgaatcataanactacttttcatctatcgtccatttctgtcattcctaatatatttca

SEQ ID NO: 137929 - DNA, 340 bp, Glycine max
  unsure (1)..(340): unsure at all n locations
tcttctacactctgagtgatcacctgcagtgctcttgaacccttaccacccactcagtcatcatgccgagactcatgaagcccaacaggtttagccttctttaagtattctgaacaaaattcaatggcttcttctgcaatgtacctctcaataatagatgcttctggacgatatagatactttgtatacccttataagatattcatgtatcgctcaactggatacatccaccgtagataaacaggaccacaacattngatttctctgaccagatgcacaatcaagtgaatcatgatgtcaaagaaagcagggggaaaatacatctncaactggcacagta

SEQ ID NO: 137930 - DNA, 427 bp, Glycine max
  unsure (1)..(427): unsure at all n locations
atatttaattntcaagtcaacatatttgtattgtaagaagacaagttcgcggtgccttgtgcctgtaaaatgtagaataattcttttctggggtttcgagacagtaaatcttagatctctgtctggtgccttgatgaaagaagcatatgcttttggttaatgtgcattaggtggctcttatagatatgttaaagggtgttaatcgaaaaaggatggttgtgtgatttgctttggtttgaatacaggtttatggtttcaaggcatgcaaaagcacaaacccagtttaggtgacgaaaagacaaagattaaagattgaagaattctccttgtgttagggagcctcgaccaatctaaaatcactacatgtggacacagtggccccgaaatacacgaaatgctatgcttcagcgaaaaaaataaaattttg

SEQ ID NO: 137931 - DNA, 457 bp, Glycine max
  unsure (1)..(457): unsure at all n locations
actcagctcttgtgctatgttttgtactcgtggcaataaactttatatcttattgaaaccctaaacaaagacgatataacatcgatcttacaccgatcaagcacgtcgttgatttgtgttctggaactttcttcagctccaagacacggccaatggggaattggagttggttcgatccttcatctttctttgttctatgctcgttgtttgtcttatgttcttttaaatacgactgcatgcatctatttttttcaattggttttatactcttactagctaattgttgtccaataattaaaaaaaaatagagtttaacttataattcatgtgagagttattatattatcaactaagaataattattataaaagttattaaatttataattcataaaanattatgattaaatgattgtggaaattaacaaactatgctatctattatatattatcattca

SEQ ID NO: 137932 - DNA, 355 bp, Glycine max
  unsure (1)..(355): unsure at all n locations
cccgagtcattcatccctatgagatgttgntgaagcatcggcgatcagaattgtcattccttggaataccgggttgaaccaagctcatgcttttataaaaaggttcattaagtcaagttggaatatggaaagaacccgtctgcaaaattggggcacaagatgaatcgagtcacatcactgcttcgtctactgccaaacatatttaggattattgatgtccttgttacttccaatttcaccttgacaaagatgtcatggaccatgttgaaaatctaaattgattcaaccccatgtcctgcgtaaaaattcgcgatacttcaactgtacatcattctgcatgcatccatgcttttca

SEQ ID NO: 137933 - DNA, 370 bp, Glycine max
  unsure (1)..(370): unsure at all n locations
tcgtanagcttaccggtaaatctgggacctagccatggtttaagtctccacagaggccattgcctccctcgcccagtattatgatcagcctttgaggtgcttcatctttggggacttccagctatcaccaatggtggaagaatttgaagagatcctangatgtcctctanggggaaggaaaccatacctcttctcagggttctacccctcattggccagaatttctaaaaaagtccaaatctcggcgcaggaattagaccgccaaaggcaagtcgaaaatggggtggtcggaataccgagaaaatatntggaggtaaaagcaagaatcttggcagataaggcgagtggaccccattcatagatattctca

SEQ ID NO: 137934 - DNA, 430 bp, Glycine max
  unsure (1)..(430): unsure at all n locations
agcttctgccatatggtgccttgagagtgtcagatgtgagctctttacccttagctgatatgctggttttgtagctgtaaattgtgaccaaattcacatagcagcgaccttaatgtttccttgcagcaacgtttgcccttttgttgatgtgctatctatnttagttttagtatttttctaaatagttgggtgcctatatacaggtatattatggaaatgttttggaaaatccattctctagctacaaagttgggcaaacagtgacagcaaggattggtgcaaaacctaatgagtcagatggcaatcggaagggctctcagtgggagctatcagtcagacctgaaatggttacaggttaagtacaccactagccggaaattatgtgaatgattaaaatactggttactttgtgaaacatatatgaagaaag

SEQ ID NO: 137935 - DNA, 443 bp, Glycine max
agcttgcttctataattacgaacattttttgtaaaaataaatctccaaactaatcagaacaatatttctcaaaatgcaacaataagaaaggaaaacacaaagatggaattcacagaacccaaaatgagattaagataattttgcatttttttctaaagaacttaagaggaaacactgaattcattcaaatagaggaaaacctcgtcaaaggtgtataattctcacacaagcaagtgtttcatctcaattccaattactgatatgtcataaatcaattgttgcaagtcatttcccatcaaatcaaagatattgtgcataatcatcatggatcaataggtctttgtaagggtgggcctggctctaaaggaaatcttgattttctggatattcacacactttgagaataggagagcagacatagaaatctagctggtaacttaaat

SEQ ID NO: 137936 - DNA, 188 bp, Glycine max
  unsure (1)..(188): unsure at all n locations
atatgtagatgatattttacttgcagccaatgatcggngtttgctacatgaggtgaaacaatttctctctaagaattttgacatgaaggatatgggtgatgcatcttatgtcatcggcattaagattcatatagatagatctcgaggtatttngggtctatcacaggagacctatattaacaaaattc

SEQ ID NO: 137937 - DNA, 480 bp, Glycine max
  unsure (1)..(480): unsure at all n locations
tcgtattggtggatcaagtggtctcagaatagttaataatgtgtgggttgaattaattattaatgtgtcttgactaattaanaattatccttcttaatattactagattcaattaggctttactactaagttatgaggaagtaaagaacaaaaacaataacttagacaaaagtaaagtggaaataaaagtacacagcggaaaagtaaagagtgtatggaagaagaagacaaacacaagaattatactggttcggccacaatccgtgcttacatccagtccccaagcaaccaccggttcttgagatttccaataaccttgtaaaatcctttacaagcaaagatccacaagggatgtaccctcctttgttctctttgaacaaccaagtggatgtactcttcacttgaactaatccataagagatgtaccctctccggttctcagtattacaacccaagtagatatacactctacttgtacac

SEQ ID NO: 137938 - DNA, 183 bp, Glycine max
  unsure (1)..(183): unsure at all n locations
gtttcatctttttttctcttccctttcaccaatattaagtgaaatatgcttacccaaggtttttggaaattntacggaagctttacngaagccccgtgtcataccctaatttcgtccgaggacctttgcttgatgacatgcaacttttgtttggtccttgtgaggtgcttggcacccatcatt

SEQ ID NO: 137939 - DNA, 261 bp, Glycine max
  unsure (1)..(261): unsure at all n locations
agctntgttgcagatggaaaaggcacacaatagatttactttgaaagataaacttgttgcacttatttataaacaagcaccgacattaggatcgggttcttcagtggtgaccacagccagggggagccgttcgacgggagcttggggatgctagcacactcgttctcgccgacgaatgggaggttccacctggatgctgccgaggacttggtggtttctggtgacgtgacgcagtcgacgctgtctgatgtagccccatgt

SEQ ID NO: 137940 - DNA, 336 bp, Glycine max
  unsure (1)..(336): unsure at all n locations
gttcatttactttttatacccccttttgacgtgcttaagccattttacttaagtcatttctcgcttaacttaaaaataaaataaggttccatcgatcggttgaattattccgtaaacttcggtaaaatgaattccgaccgttcggtcgtgccgaaccacgttggaaacaaaagagataacaataaatattataaaaaactctttagtaaataagcggaaatcatcaacatntctcttggattctattcttatcaatgactatactaagtgaactaggctaataactgctagcagctcgcacaaatagtgtgaagttgcattcattctacaagaaat

SEQ ID NO: 137941 - DNA, 414 bp, Glycine max
tgcagcttcatagtgaataggtgcaaccatctttctagagtcctctcatgaggtggaggttgagccatgttctcagtatgaaaattagtagtggaatgctcaaaatcagaatatttagaatcaccctcaacagaatgctcagaatgcacaaaatgctcaaaatgcacagaatgaccaaaatgcacactatgcctaactaatctatgaaaggttctatctattttaggatcaaagggttgtaaatcacctggattgcccctagtcatgcactatatgcagcaaataatgtgtgatgcaatcctccctaggaagggaccaatcactagaaccatgagcaagaggctccaagaagattgggctagagctgctgaagaagccctacggtctcataaccttaggatattctgacccatg

SEQ ID NO: 137942 - DNA, 275 bp, Glycine max
tttttctgaatcaaaaaagcctctcaaactctaaatgctcaatcaggctaaccttctactgatgcaaatcaactaacaagaaaacttttatttacaaatagcgctatcttccctgctcaattacctaggtataaaccaggcttcctgatttgccactatgagcttttcatgcttgcggagatgtatgcttatctcctctcacatccactgtgctgctgaataaggagttactcctcctaatatcaatatgaatttacacttaatataaaacctaa

SEQ ID NO: 137943 - DNA, 455 bp, Glycine max
  unsure (1)..(455): unsure at all n locations
gcttcatcagatgtngcatttcggtatcatcttctcttattgaagaacgatatgcacttcttgcattgtaaatttgcttgatcatggtgcaactgttggcattgtgctccttcaacgttagcaaaatgttttttggtttcaccatcgactttgtcatatccaataattttcttttcatccttagtcaatcgcccagcgtatggatatccaactaaggacttggccaattcatgattgtgaatcccacagatcaacttcaccatccaaccttcctctccatgcactggtttcctatgaagcctgaagggacaaccacatttcctactcccagtgtctcttctaacgaattctttattcctactcttgtacagaccactcctttcacacccaattaacacaaatgaacttcttcctctgctaccagtatctgtgtcagacctcataatcactgcaac

SEQ ID NO: 137944 - DNA, 224 bp, Glycine max
  unsure (1)..(224): unsure at all n locations
ctggaatagtggaatctcattaagcagaaaagcacttcgacagcaccacaaaatggtcactgtagaaataattgtgaccataattcaactttacaaagggtaaatccaattcatattaatatcattntaaactcaatgaanatatttggcatgaaccaactgtcccaaaacctattttatattttatttttagagaanataagaaaacttatgaaagagaagac

SEQ ID NO: 137945 - DNA, 259 bp, Glycine max
  unsure (1)..(259): unsure at all n locations
gtaatggtttcttacctaattggggtatttgaattttatattaaatttgtataagaaactcacccctcgcaattnttgtaccgtgtggttggtacctgtgatgatcgtgaacctttgttcgtgggagcagaatgacggcaatagagtacgagaagtgagattcttttgtggagccgccgagccaacgtgatgaacgtgggattattttgggagagaaagtgtgtttgtaatcaactccttcgtagctggttacgtaatt

SEQ ID NO: 137946 - DNA, 465 bp, Glycine max
  unsure (1)..(465): unsure at all n locations
gcttnctatggatgatgctttcctacaacctattacaagtagcaggagataacactgcataggctcaagattcaatcaatcaataattcattcagctcaaattgggtgcaaggaataaatcattcaaggacatggtcaggtttttggctatgtggctatcataatcaaacatggccttcatcatcctcaatttcatgcattcagtccatactttagaggttcatgcaaaaatcagtactaaatgattgttgtttctctcaaaattttaggatcacactctcactaggatacagtcaatgcattccttcacaatcaatctggcaaattgactaacattnttagtcaaagttctaatcacatgttctctctcttctagtggatgcaagctngatcaaaacaaacatctaatcattccagtccactcaattcatacattngctcattcaagtcattcacaaacactca

SEQ ID NO: 137947 - DNA, 307 bp, Glycine max
  unsure (1)..(307): unsure at all n locations
cgcgaaattggcgcctagctcaaattcacttactcatgcttagcgcgagaatgacgctaagcgtgacgtcgagatcaggaagtcctttntaagcctgatttgcacaaattaaagaaagaagagagaactgttcactactcagaggcctgaagagtgtgaatttcagagaccatagagtagagcaagaggccaagttntcatcttttagggagattagtgaatttttgagtgtttgtgagattcctagaggtggaggagacatcctcactcctttngtagccagcaataactcttgattcctctttct

SEQ ID NO: 137948 - DNA, 385 bp, Glycine max
  unsure (1)..(385): unsure at all n locations
caatagatnataaaaatatttacatcaagtactcattagaaattccaaacaaaggatgttagccctccattacaaaggagcagctttcacaaataggacaagggttttagagaaaataccagattaaaaagcagtggggatgtctccttcacctctaagaacctagaaaataactctaaaacctagaatctacttaaaagttaggacctttgcttccatgctcagcttttcctctgttctctgcacacatttcgcaatcaattctgacctctttcacgtcgtcacactcttttttttttcatgtgcaaatcaggcttaaaaaggactttctgacctcgaaggcgcgcttagcgccattctcgcacttagcacaagtaagtgatat

SEQ ID NO: 137949 - DNA, 433 bp, Glycine max
  unsure (1)..(433): unsure at all n locations
tgtgtaagtagtccccaaagaggatggaatgacaatcgataagaatgacatgaatgagctgattcccataatgaccatgactggtttgagaatgtgtattgattattgccttctcaacaaggcaacaaggaaagaccactttcctctcttcttcatggatcaaatgcttgagcggttagccaatcaagccttctattgctttttggatggatactcaaggtataatcaaattcttgttaatctggaggatcaagaganaacaaccttcacatgtccatttagagtctttccgtatcggagaatgccctttggactntgcaatgcaccgaccacattccanaggtgtatgaatgccatcttttctaacatggtagaaaaatgcatagagatatntatggatgatttctttgtattcngagaatcatttgtgtca

SEQ ID NO: 137950 - DNA, 325 bp, Glycine max
gtgtaattctcaattgatcaaagcttcaaaaatgcacacacatgacctcttattatagcctaagtgtcacacaaaattggagggaaattcgcatttctattcaaatttcacttgaatttgaaatcgaatttgtggagccaaaatttcactagatatgatgagtgaatattagctatgatgccacccactaatccaagatcaagtccaagattctccactaagtgtgcttatgtgtcaggaggcatgtcaagcatgaaggacatgcacaacgtgtgactatatgatgtggcaatggggtgtagcaagcaaatgctcacctccccct

SEQ ID NO: 137951 - DNA, 305 bp, Glycine max
tccacccggatccttaaagcacctgctgcatgcagcttcaatttcaatttcgaccatctcgatatatttccggactcatccggacatccatgtataaagaaattgtcaattcaatgtactcacggctgcggatcttaattttgagcgtctcgatatattacatgactcattcagacatccgagtaaaaagttattgtcgtttgaattaaatacgaacttccgttttcaatttggagcatctctcgataaattatgacactatatcgggcatccgagtaaaaaggtattggcgctcgaattttcta

SEQ ID NO: 137952 - DNA, 328 bp, Glycine max
  unsure (1)..(328): unsure at all n locations
atatatcgagacacttgaaatagaaaaccaaaacttgtagcaagtgcataccacaatcaattttaactcgtcgcgaaatatgttgagatgctcgaaattgaaaaagaaatttcatagcaaattcaaacgacaataactttttacacggatgttcgattgagtcccgtaatatatcgagatgctccaaattgagaacggatgctcaaatcagattcaaacgacaataactttctacacggatgtctgattgagtcccgtaatatatcgagacgctccanatngaaaacgaaagctcctaacagattcaaacgacaataactttgtactc

SEQ ID NO: 137953 - DNA, 361 bp, Glycine max
agcttataaaccaactagcttattagtttattttatatacataatcttagaatagttaattatcatacttatgacaataatttaggtttttttttttacttttttagctaccctaattatataattaattaagatttattatttcctttttaatttttgacatgtttcttttttaatctatgttctactttgtatataatacgatgtacaatagatatgtacatacaaatagaaaataatcatctattattccgtccatgtttcttgcattggatcactatattcttcctactaccctcttcttaagaaattttaacgaaatcgtaaaattatttatcaatgtgggttgtttagaaaatta

SEQ ID NO: 137954 - DNA, 416 bp, Glycine max
  unsure (1)..(416): unsure at all n locations
ggatccataagtcacctgcagcatgcaagctngaagtagttcctccatatccaccttttattatcatctgcgattccccatctagagaagctgctgctccccctgattcccagttggagaagctgttgatctttctgattccttatttagagaagctgctgctctctttgattccctagttggagaagttgctgatctttatgattccttatctggagaagctgttgatctctctgattcccctgtttttccatctgacaaatgaggaggatgcttatactgaagatacccaggatctatctctggacttttaaattcctgattattctgcttgttggataataattataactatattggttctagtacattgttctgagtaatgttgggttttggttatacttatatacttatac

SEQ ID NO: 137955 - DNA, 445 bp, Glycine max
  unsure (1)..(445): unsure at all n locations
acgcatcaacaagaatcaagccaaggctattgtgcaagcaatcaatggggcaaaacacaccanatgattatgatgatggatggctcaaattctcacaaagggtaactcatcactttcaaattgagctttcanaactatcatgacatgtagaggagaatcaaggatttcaagtcacaaaatgtcaagaacttttattttcaaaacaattacccatttcttgaacatatcatataattcaaagaagaacatgcaaagtcgtacgtgcacacaaaattgacccaaaatattaaactaaaaatccgacaaaactaacaacattaacaaattaacacgactaacaaattaacaaaaccaacagaactagccaaaccaaagaacacttccccccatacttaaacaacacattgtcctcaatgtagcacaattaanagattaaaaacaatta

SEQ ID NO: 137956 - DNA, 189 bp, Glycine max
ttgtctttaacacaatccaaaatcaccttgccaaatatctcgggctaactcctttaccctcaataatgatcttgcctaattgcttagaacagacctttacctcgttgatcactattagacctgacttcgtatgcgttcttttatgtcgcacactacctcattacatccatatcattatgcagacactat

SEQ ID NO: 137957 - DNA, 336 bp, Glycine max
ggaaaccatcttgtttagaccactgactgcaacccctactgtggcaatccctgaagatcatgctcttttgcactgtgtatagtgcatccttccgagccatatcaaattgtttgaactgctaacaaggcaccttaggtctttcaagaaggactccgagggtctaagtagttacccgtgacagttgcctataagactttttgaaaatgatagcagttctatctttgtgatccccatttcaacatacatttagatgtcttggagcagagtcgccctgacttgcaaatcagccctcaactgaatacatgtcggtcaggaacacctctagtagcaagctat

SEQ ID NO: 137958 - DNA, 391 bp, Glycine max
  unsure (1)..(391): unsure at all n locations
atcacttaagaacatctctcatccatctactctttcttcttaaggcccttggtactgattatttgtcacattcctcaaaatgtggaaattcttaaactcgttccagattattttctgcctgaagaagcagtagaaacaatacanggtgggtactcctcaacaaccacacatncatgagtgtttcacggtcaaagtgtgtgtacatacttgttatcacctcacacaatcaactnttataaaatgcaatttgcgattataatatatattatctcactttatttttatcttttgcaaatgtaacaactgtaaaatatctcaaagggtgttaaccttatatatntaaaagatattatatcaatttaatgcagcgttatatacgtattaatatgta

SEQ ID NO: 137959 - DNA, 362 bp, Glycine max
cacaatatggaagtactaagtatttattacctatacttaacagaaaatacttataacactataaaataaccataaattggaagagtttgatacaatttacacaagttttatacacaaaagttagttgtattcaccgactaacaactccctcaaatttacagttttgcttgtcctcaagcaaaaagagaacaactcactcgttctcaagtgataataacatgcagtgatcatattacaaggtgtatgccgtagaaattattgattggatgatagagaatgaagtaaaatgcctcatacttgctttcacaggtgcaatatccaagagaagataaaatgaacctaacattagatggagtagcata

SEQ ID NO: 137960 - DNA, 292 bp, Glycine max
  unsure (1)..(292): unsure at all n locations
tcatttggtcttaccattttttttttaaaacaccagatattctgagacattatgtgtatatacagaaatagtgtgtggatgctatttactttgaccatttcaattcttacccagtgcctcccccaaatttggaacaaatttaccttggatattannctccccaaattgggacaacattgctttgaccacgcttcctgtggatgaatgctctctacaacctaagtcaaggtagcaggagataacaangtataggctcaaagttcaatcaatcaataattcattcagctcaaac

SEQ ID NO: 137961 - DNA, 328 bp, Glycine max
tacactccgaatagtccgtcagggctctctccttctaattcagggctaacccaagacaacaccttagcacacagactctatctatgaaatgtgcaaagcccacgacttctcaattggtctcaaaataattatatctcatcacgcctgtgattaaactcgtccagtccccacagtggttcccatcataatactcctcgcacattaactcgctgtcttaaagggtctcaacaataactcaccacccttaaagggccttataatcagtgtgagtggataattcataactcacaacatctcaatgcacatatatgttacgaggcaatacata

SEQ ID NO: 137962 - DNA, 472 bp, Glycine max
  unsure (1)..(472): unsure at all n locations
tcagcttctcactagttgcctgatccctgaatgtcctttctgatggttttggtcctacatgcacggaagaatttcttccagaacacccttctaatggtcatccaattgaaaatagacctgtgagcaaggtagtataacccatcttttgccactccctttagagaatgaggaaaaacctttataaaaatatgatcttcttggacatcanggggcttcatggtggaacaaacaatatggaactccttaagatgcttatgaggatcttcacctgcaagaccatgaaacttgtgcatcaaatgtattagtccaatgttgagaacatatggaacaccctcatcangatattgattacacaagctttcataagtgaaatcaagtgcagccatctctctaagagtcctctcacgaggtggaggctgagccatgttctcagtataaaaattagtagtggaatgctcanaatcataatatt

SEQ ID NO: 137963 - DNA, 446 bp, Glycine max
  unsure (1)..(446): unsure at all n locations
agcttcatgatttcttccttctagntctgctctatttnctctttccttggtatgcatggcttttaataccaaatgagccaagaggtgctagaccaactcgcctaggctagttggttgcttaagactgaagaaattccactcgcccaggcgagttggttgctaatctggacaaatggtactctaatatattgcaaaaatgacccttttgctcttcatctttggcttggtttctggatctaacaaacaaccatcaaaacataaggaatggatggatgaatctttcatattgaaacacaaacattaacaaatgtacaatatataaaacaactagaattaagggagaattataagagaactattacaatcaaaatataagtactaacgtcttaatcccacaataactaaaatatggcacttacctgtcagctcaccaaatataatcttgt

SEQ ID NO: 137964 - DNA, 357 bp, Glycine max
  unsure (1)..(357): unsure at all n locations
gagcttaactacacacacctctctaatagctaagtntacctccttgagatgagaagctagagcttacctacacaccccctataatagctaatttcatccctattgccaaatacatgaaaatataaaaaaagtccctactacaaagacaactcaaaatgtcctgaaatacaaggctaacactctatactactagaatgaccaanatacaaggcccaaaagaaggaanaacctattctaatatttacaaagaagagtggacccaaccttggcccatgggctcagaaatctaccctgaggttcatgagaaccncatggccttctttatgaactctagcccaattctcttgggagtttcta

SEQ ID NO: 137965 - DNA, 440 bp, Glycine max
  unsure (1)..(440): unsure at all n locations
agctagtcccaaaatgacctctcgcaaatgtaataaatatatcaagtgagagtgaagagttccttttagttatatataatcgaatgaggatcctttacatgagagttatgtatcatttcaaagttgtgcctcagattcccaaaggctataagcttataacacacattaggaataagaaccttaactcatgtctcaaattaatgttaatgatctagaaagaagaatgtaatatcaataataatttatactatgggttctattttaattctctatattcttactctactaaccaggaaattgacatcttgacaagcccataatatctcatattgtcaagtattnttttatcaataagtttcatgataatatcaatcaacaactnttcaataatttaaattatgcagccaattttactagggttaaatgcaagcaaaacacat

SEQ ID NO: 137966 - DNA, 417 bp, Glycine max
  unsure (1)..(417): unsure at all n locations
ctcagcttggaaaacttntagttcttttcaatcttgctttggtcattttgtctttcatccattgcaaaaaatatttgaagtcattaaactcttactggatcatatcacatcgttggttgtgggaggcaacatgggaagatgcttgagaggaanggtatgttgtggagtaaatatttggtgaaggaagattagtgataatatcatacactcttatgaatcaaaggatttttaaaagtgatggaccacttaacttcatagtctatcctagactcggtcttacttttaataaagttttataataaatatttttaatatataaattatatnttaaaattataataattaattgataatgtgatacagtgttgttntagttattaatattntgtttgtatccaaagtgagacaaatagttag

SEQ ID NO: 137967 - DNA, 354 bp, Glycine max
  unsure (1)..(354): unsure at all n locations
agctnggtgaatattatgtagataaacatatatgtatacctctggggggataaacttcagcataaatgtcttatacattctactagaaggaaaaacgaatggttggtgtctaaagtccattttgagaaggtgtatgactcggtttgttgagattttcttgcttacgtaatgaacaggatggacatttgtgaaaagtggatccattggatcatgacatctttgtcatctagctcggtgtcaatgttggtaattgataacccgatcatggagtttcaacctaaaagggggcttatagaaggagatccattggcgcctttcttattcacttgtgcataacgattgagtggtctaatg

SEQ ID NO: 137968 - DNA, 283 bp, Glycine max
  unsure (1)..(283): unsure at all n locations
atgatcaaattgagttgtgttggtgttcttcngtggttgtggccattcagagcgttgcagagaaagagagaaaggttggatttatggtctgagagaggaataattgttagagagagagggagaaagctttgcggataaaaaagagtgaatatgcagacggaagtgaagaattagtgccaccttggatagtccacgtgacactaaaattaccaacaatgcacctcattaatggtgttactttaaaatttaacagaaggattattntgcaaaacttatgcaatga

SEQ ID NO: 137969 - DNA, 460 bp, Glycine max
  unsure (1)..(460): unsure at all n locations
agcttaaagaaaaatagagagacntttttatttttaagaanagtgtgatatgaggtcttttattcaacacgtgtgaccttttttgctttaaaaaattaataacaaatattgctagacctaaaatttaagttctaattattttaacattgagctaactctctaactagtttgatgacatcaagtcaataatatatccatttaagaattaactctaactagttataagtttttgttcctaatccatctaaccaatctgggtttggtttactaacactagttagaacacacacatgaatgcatcaatcataatactttctttttaccaattgtaatactaatctaaatgattccaatttaattaatattataatttataaaatgtaaatatattaatattaatactggtaaaataacaatagagagccgtgcaatccacgtgtctaaatctagctcaatgaaa

SEQ ID NO: 137970 - DNA, 418 bp, Glycine max
  unsure (1)..(418): unsure at all n locations
ttgacaacactntcaaccttggatcacagccccacttactaacttatgctgaatcgctttaggtatttcaaattcgcaagatctgatatttctgcagggagtcttgctcgaactgcccaagacaaaacccttcagaacccgaagccgaatcaagttctcaataccctttggcattctgtccaataaatagcattgagacaaatccaaatgtatgagatatctcaatggtgaaatatcactaggtagtgtttctagattgtgacaagccttgagatctagagcttctaggttctcaacttgaaaaatgaagggtggtagctcanatattcttcatatcccaccaacgctaagatgcctcanattcttttgatccctatactccttcacgaattcttcacactcctcttcaatatgatgt

SEQ ID NO: 137971 - DNA, 397 bp, Glycine max
  unsure (1)..(397): unsure at all n locations
tgctnggcatgctctagtgcatgggcgtgtttttantgtcttcctactgatcgacacgtgcacagtggcgtgaggtgcatgggatatcctggattccactcatgaaggaaccgccattgtgaagatgttcggatcgcaacttctggccacatgagttcgcatctctcaacatgaatgacgacgaactgtttcatgacgctctcatgaactagttggatagcgcctacgctagcactgtcttgcgagataggatgactaacgaaaggctggggagaaccatcctcagatcgttgcctatgaggagcgagatgatggtgtctgtgatctaggaggcgcacgtcatttgtacttgacagaagatgatctcgttggttccgttcagcctttgagcttagac

SEQ ID NO: 137972 - DNA, 323 bp, Glycine max
tgaaatctttgcgaaatacctcacggaacacgttgcggaaacgtttccgaaacgcctcggcttatattttcttcacggaaacaattcttccaagcagattcgaaagagagagaagagccaaagggctgaacccttttcttcttcacttcctcccctatttataccaaaataagggaggcggttgccgaccagctcgcccatgcgagccatgttgcttcctccagaagcaacagccttctggaagaatattctggagggcccgagtggacctgggagctctttgccccacatttactaactacacccccctctgctgatttctg

SEQ ID NO: 137973 - DNA, 409 bp, Glycine max
  unsure (1)..(409): unsure at all n locations
ctcagcttattcagacanagaaattaaagatattcgagatggatgatctatacagtctctagagtcttagaaagggtatattaaataagaagggaattccaattgaagtagtaaaaggtttggccaagaattctaagttaaaaagtctttttcaacaaatttactctcttgtaatcgattaccagaggatgtaatcgattaccagtggccaaaactgatttacagcagctattaatatttgaattcaaagtttgcactgtgtaatcgattacacatatatggtaatcgattaccagcagtntctgaaggtttaattcaaatttaaagcttgtatcgataccacatattgtatcgatactnaggagttttcagaaacattctaacagcacatcttttgtgtggtcttgat

SEQ ID NO: 137974 - DNA, 323 bp, Glycine max
  unsure (1)..(323): unsure at all n locations
accttggcttcatgaacactgatttctaaaacattgttggtggcggtggcggacgtggtggaggacaatacttgtaaaagcccttcttcctcaccgaatcctctgtgtgtgaagacaacattataacataagtgtgtgaagacaaattataacttcagcttttgtattggaattgcttgaaaatccttgagacattgttgacctatttagagatngaacatctgtatcaacagcatcagcttcaacttctgcatttctatatgaatcgcttganaaccttctagaactcattaacatgttcagagattgaacatcaatatctt

SEQ ID NO: 137975 - DNA, 252 bp, Glycine max
ccaccaagatgagccttggattacaagcttggagagaaggcttccatggaggaaaacaacgatggagagaaagagagacgggggagcacgaaatttaaggaagacaaagggagagaagttgaactgtgaggaatgtctcacgagactctcattcatcagagttgcaacaagtgttacacatgcctctatttatagactacgtagcttccttgagaagctttcttaagaaaacttgcttgagaagcttctttg

SEQ ID NO: 137976 - DNA, 363 bp, Glycine max
  unsure (1)..(363): unsure at all n locations
aataaagtctagatatatctagagcaatcatctacaataatcaaagcatagtgattccctctaatgcctatgggtctagaaggaccaaaaatatttaaattgtaaagttcaaacactctaaaggtagaaataatacttttagatttgaaagatagaagctngctttcttttttgacatgcattacataagctatccttctcaaatttgagctttgggagtcctctaactaactcctcagagactagcttatttagatgattcatgtggatatgagctattctcctatgccaaagctaagaaggatcaacattacttattaaacaagccatgtntgagtgagatgcactttttacattaagcat

SEQ ID NO: 137977 - DNA, 227 bp, Glycine max
attatgtcttccaacaatactataatatctgtcacatacaattttttttattttttattttatccttatttcatggggacttactggttctttaacaatatttgtgattatttgaccttgacaattactatgctagagttcttatcatccattaacatcttattgagttggtgattcaatttctcatatttatgatattcaacgacgatctcatttttcacagtaaa

SEQ ID NO: 137978 - DNA, 439 bp, Glycine max
  unsure (1)..(439): unsure at all n locations
tgacctaaccatatattatctacatgcaacaaaatatgactgaacactagaagaaatattggttgataaacaaaatgatataggagagaatcatcaagtagcaatgttgttaagtaattattagagagtttgatacactaaatttcaaaaccgaaacaagttcttctaatgcactttgcaatttctcagtgctttgttagttaataaaaaaaaatagaatgcagaagaggcattccttaaaattgacttttgcaagatagtcctggagaaataaaaaactgagtcctgttaagtgccttagatgtgtggaccaatctaaaaaactaataagaactagagaaatcatgtttgactaaccacctcaagctagggctgtagagcaagcttntgagctctatcatcttttaactgctaaggaataacttcacagttgcacata

SEQ ID NO: 137979 - DNA, 303 bp, Glycine max
cttgtgttcggactctcagccacttatgatagccggcgatgatcccattacttgcttcccctaagctctctgtcctttcttaacgccgcatcccatgccttgcgaactccttggagtaccctcgcgttgtggtcactaaaaccccgtgcgatgaaaggcgtgatgctttcgtctaatggcgctcctctcatggggtagccaagctgtcttatggcgagaatgggaattataattaatacaaccctttgttcccatcaagggaacatttggacatccttcgcatgaagatagaatcttgattct

SEQ ID NO: 137980 - DNA, 389 bp, Glycine max
  unsure (1)..(389): unsure at all n locations
tttcttttggacatggaagcagatcaagaagtgctgtactacctgagacccctgattttttaattaataaatgattttagtctatattttcctaaaattcatctagtactatacttaaaaataatattttggtcttcagatttttataataatcggtgaatttggtctttaccttactatctttttaagtttagatatgaaatacattaattataaaaaattataagaaataggaagaccaaaattctttaaaaaaaacatagacacttagatcaatcttgacaaagaataatagaacttaaaacacatnttacactttctttgctctttctacccgcttttattttagttggctatatatattacaagatcattgatacagtgatgga

SEQ ID NO: 137981 - DNA, 222 bp, Glycine max
aaggctcaagtttttaaaaccatttacatcgattagaatataactaacaggaaataacactttttacctaacaattgcttccaagacaatgttatcattggatacaaaaaatattgacttaacgtttaacgcaaacaagctccccataacaaaaaggcaagacctccatcctcgtggagaatacattaagctatgagacctttcagggaatacttcatctat

SEQ ID NO: 137982 - DNA, 449 bp, Glycine max
  unsure (1)..(449): unsure at all n locations
atcttttattntcttctctcataagtatttatggagagatttatccaaacaaaaataccatgaagaacataaaattaggcagcttaacctcaaaagtacaaagaaagttaagtcaattcataaactatcattatgttgtaacacttacaatttggaattcatctaatctgcctcctgatcaagaatggaaaatgaacgtagcacaaacaggaacgaataggtcttgctactatagtggagagaggaaattctgatggtcccacaaatataacaagatataaatattagataaattacttgttccttaatttatgtactgtgataacaattgaggttgggtgcatgagcaatggaagagaaagaactaatagattcttaattaattttggagcaacatctattagataaaaatggacatcagaagtaaatgccccatttatatatcttta

SEQ ID NO: 137983 - DNA, 254 bp, Glycine max
  unsure (1)..(254): unsure at all n locations
atcaacttcatcccttgcatttgtaaaattatcactattaatgttattgtatttcgttgatttatagtgaacctctatatcttttaacgagatatctctctactctctntagctaagtgtcaccacccatacattaanagctatattaaataagggaagaaaacaagaaaaaatacataacaatcgaccaacgaggatcttacgtcaattaactatacttatggtttcatgtcatattatatatcgctatatat

SEQ ID NO: 137984 - DNA, 435 bp, Glycine max
agcttcctcaatgtttgtggattgatgctcttttacagctgcgtatatgttaaattgagttccaaccaaggctctctcaaagacaccttttgagttattcaagggttggaaacaaagtttgtgacatatacatgtttggggatgtccgtctgagatagaattcataatccacaagagaaaaaactagaccctaggactattactggatatttcattggatatgctgaaaagtctaaagggtataagttctattgtccatcccacaacactatgattgtggaatcaaggaatgcaaagattcttgaaaatgacttgattagtgggagtgatcaatttcagaacatttcttctgagatggatcactatgaagctaaaccttctgggacaggtaatatattggtattcatcctcacccctcatgttataatgggtgtt

SEQ ID NO: 137985 - DNA, 346 bp, Glycine max
  unsure (1)..(346): unsure at all n locations
gcttatattcttctcttgttttgttttactttctntctcggttaggggtatggtattctggaaaactgancagggcaataattaaattcatatactttatgcatatgtnttgaaggaaaanggttttgtttttgctgtcttctggtttcagggaatagtattctgaanaagttaatagacattntgccatgttataggattctccattgagcccaagttcatagtttcttngactctagttttgattgtggatatctagttctcctttgtcttctggttcttgcactctgttttatttctcttttccatttaattaaataacctaatgcacgttcatttcattctg

SEQ ID NO: 137986 - DNA, 488 bp, Glycine max
  unsure (1)..(488): unsure at all n locations
gatccttaagtcacctgcggcatgcaagctnggactataagagttaannatgacagtatataatactcggtaactggtgaagttagtggaacttgatgattngtcaagaactaaacatagtttcagtggttgatacgaaccaatataaattcatgcatcttatatctcaatatactttatgctaattgacttagggtttgaatttgattttgttgtgaaaagaaatatnttttacaaaatctattattatcaactgcctatctatttgtgaaaacttgttatatgctntcaaagctttattggacgataactttgtcttgtgaaaaaagatttaaaaaatttctaaaatcacaactcaatcctctttcttgtaatacttgtctttacacaaatgaatttgaccatcattaataagatgctntatgtgcgatgacatcaacattaatattatgttggctgtagaaaataacctaatcgacgcatacacg

SEQ ID NO: 137987 - DNA, 362 bp, Glycine max
  unsure (1)..(362): unsure at all n locations
accgctgcatgcagctggctatgagggtagttatgttttattggattggtccttttgatgttactaatgtttttacttatggtacaattgagatcaaaagcgactccacaaacaagagcttcaaggtcaatggacaccgacttaagccattcctcacaaacccttcttcaatggatgcagtggtggaagagacttccttactccaccctacgtttcctccaccatgacttagggagttcttcttttcctatctccttctttgcctttattacacttcgcncgatactatgtattggtataattgactttaaacttttaattgtgctacattgaagacaatgtggttgttaagtttggcgggg

SEQ ID NO: 137988 - DNA, 410 bp, Glycine max
  unsure (1)..(410): unsure at all n locations
aagctagtctttggaaattttaggaattaaagtttgttattctcttcattcaatgatgtaatattatataaatgatcatgcattccaaattttaaataatccataaattcataagtatgtaatttaataattgacatattttaaatagcttgttatatgtaaactaccttcacaagcaaaatgtaattttcataatggcaattgatgtttattattgtttactgacctctatgcagatcttccccctgataaggaaccactacattggaatactataatgaaaatagttgtcggtgctgcaaaaggattagaataccttcatgataaggcaaaatcatgaacaatttctntaattccaaccaataactaattttcataagaaatggagtactaatcaaagtcgaatgtat

SEQ ID NO: 137989 - DNA, 392 bp, Glycine max
  unsure (1)..(392): unsure at all n locations
gtgaaaattctgcagaaaacaaaagtgtgctatatcctttcattctcttctctctttgccaaaaagaattcaacaaggactaatcgcctgaattccttttgtgtctctcttctcccttttccaaaagaacgaaagactaaccgcctgaattcttttgtgtctcccttctcccttctcaagagaattcaaaaggactcaatctgagaattctnttaattcttccctttcccttaaacaaaagatntcaaaggactaaccgcctgagatatcttttgtttccctttacaaagattcaaaggactaaccgcctgagaattctttgtcttaacacattggaggatacaatccttgtggtacaagtagagggttcatctacttgtgttgttgtacta

SEQ ID NO: 137990 - DNA, 396 bp, Glycine max
  unsure (1)..(396): unsure at all n locations
ataaaggctcatttcaaggggagtaaattgtgaatctctttgttggtattgcaactcaaattttgagaatgacttctaccttttttttttgggtgtatgcaagctcaacatgtgtgggtagcagctggactttggcaccaaattgaaggtgcaatttttcaagctaaaaactctattgatttaactctcactctcttggaggacttagttgattatgagaatgagtctttagctttgactctatggtgcatttagaggaggataaatgataagatctacgaagatgtngatgttcatccaacaaatttagtttctcaagctcaacaatacctccatgaatggcggtttgttcgaatcaattgcccatcaaccaactaataataatatggtccaaca

SEQ ID NO: 137991 - DNA, 454 bp, Glycine max
  unsure (1)..(454): unsure at all n locations
tagctattatactatagtgggtcttgcgtattatccaaatgtgaaactctancctgaggtttcaattaaactgtgaaaatataggctggaaatggatatcatttggcccattcccaatctttgggtcaattgtttgatctttcgtattaattaatactagtattttgttatgtaacgactttgttttacatctgcagaggtgcagtggtggcattctatatctttagaatagtactggaacgtaatctacagaaggcctcaaacttggaaactgaaccaggaaactagttctatgatgaggttagctctttaaattcatagacactatattttaaactaaaaacctctaggcgaatatataagagagatgcttgcttttcaacatgtgcacttttcaacactaatgtcaatgtaaatgtaatttatttctgttgccaggttaaaaatgaagatc

SEQ ID NO: 137992 - DNA, 292 bp, Glycine max
  unsure (1)..(292): unsure at all n locations
tcacatcttttcaaatgtgttttacatggccatgataggtctatctatatgtgactcggaacacgaatctgctaatagttattcagaacatcagggcttatcctctcaacagcagaatcattttatcctctatagaataccttggccaatacactcgcaattcgataaggaatgaattgagtgctcacatagttcaatctatctctcttaagagagatatcttcttctcttctatctatttctaanaacggattaagagaccgagagtctcttgttgtaacaaatctgaaca

SEQ ID NO: 137993 - DNA, 299 bp, Glycine max
atacacttgcactatgcgcgcataaacccgccttcccctggtgacaaccatcaaaagagctttacgtcttccacgtagccgatattcttatttgtctcaacaccgagtcctgctcaatacttccaagcttaccctgcatcatattaatacaacatatatacagtacatgctgtcacatgaaagccaagcattgcttatgcataatactctgcacacaccaccagccagatgacaagttctctcacttagagaccacagtaacaactccttcgtccgagtcattaccgctggatcgactc

SEQ ID NO: 137994 - DNA, 252 bp, Glycine max
gagcctgatgaacatcttggagcctttcataaccaccacatctaccacaaaatggctgagtgagaaatctaccttttttcttccaccctctctgtgggagtgatcgacttctatattggtcttaccaatatgtaacattctttagatagaagtgagatattcaattcctgagtggagtccttcttttgaggtgaaaatatgtattttgtgcagtaaaacacagatcctattttttgtcttaaagtcaagtag

SEQ ID NO: 137995 - DNA, 389 bp, Glycine max
  unsure (1)..(389): unsure at all n locations
tggaaaacaatctttttgcaccccttgtttgcttctctagcatagctcccgttcctcttttcaatntgggccttgactctntcatggaactttttcacatagtctgctttggcttgtccttccttatgctcaaaaactgaaatattaggcattgacaacaaatcaagaggaattagtggattgaaatcataaacaacctcagaaggagaacatctagtggtgctatgcacaaccctattataagcaaattcaatgtgaggtaagcanacttcccaatttttaagattattttcanaacagtccttagaaaggtacccaaagtcctattcacgacctctatntgtacatccgttttagggtgacaagtagtagaaaatattaacttagta

SEQ ID NO: 137996 - DNA, 325 bp, Glycine max
  unsure (1)..(325): unsure at all n locations
gtggcacaataccatctctcctgaggactcttcctcctcatctctcttgatctctttcttcttcaatccgcgttccaatcttcgttttcattcgagttccctttatcttatcaatcaagtggagatacaaatcagaccctgatgtagttaatccacaatctggagtactctgaactaaatcttgattatgtttcaactggtacatttttnttctttgtaggatatcgttttaaaggctctagtgttgtcataaaaatgaaattgagctaatgaatcactctgacatttctgatctgtcatctccgaaagtctagctgatctttca

SEQ ID NO: 137997 - DNA, 169 bp, Glycine max
tctttttgagacgccgatcaatccatgttgctatggctggactcagttcacgagatttttctaatttgataaaaaaatgtcttgcaacgagtgacgctgctataatagtatgaatacaatttagtataatgaagtaaattaacggacatcaattgaatttcccaattct

SEQ ID NO: 137998 - DNA, 169 bp, Glycine max
ttttcttgtgactctaaaaatggcacacatttaatttattatcttcagggatattaagagagacacgattagcaattctttagggaggagacatctctagaagacattccacctaacaagtcaagatgctattaaaaagctaggttaacctaggaatttacctggcagt

SEQ ID NO: 137999 - DNA, 325 bp, Glycine max
cgacgcagctgcacttagagagaacaagagattcagttttttgatgtatgacaaaatgatggcgcacagcctaaagaatgattccaagaatgagtcaacaagctcaagatcaagattatttcaagattcatgacgagaaatcatgaagattcacgaatcaagagaagtttggattcgagattcaagagaagatgaattcatgattcaagagaagaaatcatgaagacttctcaagagaagtattgaagagatttctcataaagcaaacatagcacagttttgttttacaacagagttcttctcaaaattttctaagttactagag

SEQ ID NO: 138000 - DNA, 418 bp, Glycine max
  unsure (1)..(418): unsure at all n locations
taaaatcctaaatctaagcacaggtaagtctctacctaaagtnagaccagaaaaagagaaaaataatcaaggaacttacttggatggtgtatgattgatgcttaaaggcgaaaatgcacaaagagagtacatatgcaaaatgtgcaaatttttggagagagagaatgcaaaagcgagggttctgtaatctggaaaatgtgagtgtaactgttcttacactcaagcaatttttcgataccttcgcttagcggaccattgcgctaagcgagaaagagagacgtttggtttctcaaccaggctcgcttagcgaacacgtgctgctagccgacgattcattttcgaaaagaatcgttnnttttacagaaactcgacttagcgcgagtgtacgtccgcttagcgagacttacagattagaaaa

SEQ ID NO: 138001 - DNA, 259 bp, Glycine max
ttatctactgctataccgatgagaatgtataaccctataatctagtttacttctacaaatcttacctcaaaacctatggggattgtcatttcagttttccaaagagcgtcaccgctacatttaatgggcccacacgcactaccggaatgtcaatgaatcttacacgtttcgttttaaaacaaacctgtgcttttaattaagcagggcatctacctttactgagaattttacccctgcaccagctgttatcacattggtg

SEQ ID NO: 138002 - DNA, 297 bp, Glycine max
ttaactgcgttggaatactaccaaatgccaaacacctttgggaatggccgcagacctttaagaattcacatttattctgtattcgtcaaatgataatgtttgctagtacaatttatgtttctatgaaacctcttataggaaaagatatattctttcagataggatgttatatgaagtttcatgttaaactaaatgattcttctgtgcaaactgttgtacaatagacgctgactggaactaaaatggcctctaatacatcgatacgccatgattttctcgatgaatgtttgaagcgtt

SEQ ID NO: 138003 - DNA, 344 bp, Glycine max
  unsure (1)..(344): unsure at all n locations
actccacatctggaacgtgtaactttttctgtatctgcaatatgacatcagctaatgtctcactctcatatataacaaataaaaaaggatccccaaaattctgattttggtactgtatatcatctggtttaatgtctacattgactgaaacaaatgaaaacttgaaatttangggggaaatgttgaatctcaagtacccatgaatgtgttttagtctattntctgcgcttgttctaaaaaattgaaactttttggggaaaaactcctcatccagcaacacccaggccatcaatcatagttgtgtgtgaatcaattcctcccatttgtgtngaacacaactctac

SEQ ID NO: 138004 - DNA, 404 bp, Glycine max
  unsure (1)..(404): unsure at all n locations
gagagagggggagcacganattgaacgaataaacacgggagaagtggcactctgaagtatgtctcacaagactctcattcatcaaagttacaacaagtgtttcacatgcttctatttatagactaggtagctcccttgagaagctttcttgagataacttccttgagaagcttctttgagagaacttccttgagaagctagagcttagctacacacacccctctcataactaagctcacctccttgagaagcttccttaagaagattcctaaagaagctagagcttagctacacatacctctctaatagctaagctcaccttcttgagatgagaagctagaacttagctacacacccctaataatagctaagctcacccccatgacatagaacatgataataca

SEQ ID NO: 138005 - DNA, 263 bp, Glycine max
  unsure (1)..(263): unsure at all n locations
ctcagagctgcattggtctatttttatcgtctcgatatattatgcgcctgaatcggaccttcgagtgaaaagctatgaccatttgaataactcaagagcttccatggttcaatatcgagcgtctcgatatcttatgtgcctgaatctgacctccgtgtgaaaagttatgaccatgtgaatttctcgagagcttccattgttcaatttcgagcgtctcgatatcttatgcgcctgaatctgacctccgagtgaaaagntatgac

SEQ ID NO: 138006 - DNA, 453 bp, Glycine max
tgaaaaactacttgagatatctttagcttaactacacatacccctctgataactaagctcgcctccttgagaagctctctagagaagattcctaaaaaagctagagcttagctacacacacccttataatagctaagctcacatccttgagatgagaagctagaacttagctacacaccccctataatagctaagctcacccccatgacaaaaaacatgaaaatacaaaaaaaggtcttactacaacgactactcaaaatgcctcaaaataccaggctaaagccctatactactagaatggccaaaatacaaggctcaaactaaggaagaacctatgctgatatttacaaagataagctggctcatacttagcccatgggctcaaaatctaccctaaggctcatgagaaccctagggccttcccttgatctctaccccaactacttgagtctt

SEQ ID NO: 138007 - DNA, 415 bp, Glycine max
  unsure (1)..(415): unsure at all n locations
ctaagcttaaaattgaattaagcgttcataactgctggtaatctattactntatatgtgtaatcgattacacagtgcnaaatttgaattcaaatnttaatagctgttgtaaatcatatttggccactagtaatcgattacatcctctggtaatcgattaccagagagtaaatctcttgaaaaagactctttaacttaaatntttggccaaaccttttgctacttcaattaggaattcccttcctatttaatatacccttcctaagactctagagactgtcttgatcatccatcttgaatatctttaatttctttgtcttgaataaagctttgagaaacatgtgatcctttggcatcatcaaaacattcagcttgatcctttgtctacaccattttcataccccacttatcacaac

SEQ ID NO: 138008 - DNA, 456 bp, Glycine max
  unsure (1)..(456): unsure at all n locations
caactntacactgaggcaatgaagggctctgttcatgatcctcaagtgaacataggggtcgatcaaaagatctcacccatccatgttcttaacaaaaaagagggggacaaaccctacgatctcaatggattgattaaacatcaaacgactccattgccgtcactccaaaatggtcaaatgactaaatccaacagaacaacactcagagggagtcctcagagagatttgcaaaagataggataaagttgcatggactatcacctcattcaaaagacattctatttgggttttccataaaacaatcaaatcaaaatcaaaatcacaaaatatggaaagaatgtcatgaacatcgaacaactttccattacattgcattgtttcatatgaaagccgcatttaccataattcacgacaaaagttgcatgcatctgcattcctaaaatacatgttaactac

SEQ ID NO: 138009 - DNA, 122 bp, Glycine max
caacccggtttatggagcaccgctcactgaccctcccttcaaaggtagaagcgattcagatgcctaccaggactgagagatgaatactgagcacgtatttgtctgctgtgactacactgatg

SEQ ID NO: 138010 - DNA, 458 bp, Glycine max
  unsure (1)..(458): unsure at all n locations
agcttcccaagtatttaagttcttcctcatttctgtcttaagcaaagntcccaaagtcctattaacaacttccgtttgcccatcggtttgtgggtgacaagtggttgaaaataacaatttagtgcccaacttgctccacaaagtcctccataaatggcttaggaacttagagtccctatcactaacaatgctccttggctaaccatggagtctcacaatctccttgaaaaacaaatcagccacatgggaagcatcatcaatttttttacatggaataaaatgagccactttagataacctatcaacaaccacaaaaatggaatctctaccattgcttgtgtttggcagccccaaaacaaaatccatggataaatcaatccaaggatactccagaattggcaatgtgagttacaatccatgaggctttaccttagactgtgccttatacatacaatgca

SEQ ID NO: 138011 - DNA, 304 bp, Glycine max
  unsure (1)..(304): unsure at all n locations
actcggatgtcttatttagttccgtcatatatcgagacgctcgaaattgaatgttgaagctctgagccaattcaagcgacaatatctttttactcggatgtctgattgagtcctttcatatatcgagacgctcaaaatngaatgttgaagctctgagcaaattcaaacgacaataacttttttctcggatgtctgattgagtcctgtcatatatcgagacgctcgaaattgaatgttgaagctctgagccaattcaaacgacaataactctntactcggatgtctgaatgagtcccgtcatata

SEQ ID NO: 138012 - DNA, 266 bp, Glycine max
  unsure (1)..(266): unsure at all n locations
aatttatgcaaactggcatgcatgccctatgcggcactcaagtgtaaactatatggcatgtatgctgggtaggatcatttcttatttaatcacccatgttcaaaatgtctttataattgtcatcatccagtcatttggactcggaaatttacagattaccttcagggccactttttcacactacttgacacaatnttttttcaaaaagtgaagatttttcaagctgtgtttactacactatttttccctttttatgtatcttctgc

SEQ ID NO: 138013 - DNA, 379 bp, Glycine max
gttcaaccctcctggtatctgagactcactctaaattattgagtaatattgtgtccgtgaagaaaatccaagccgaggcgcttccataacgcttttgagacgtttcacggggtgatttctcgaagtatctccgccgttcttcgccgatctttgttcgttcatcgatcgtcaaccggtatgttcccgaactcgatcatttcaattcattctatgtacccttagtggtccccacttgtatggcgtgcttttatattcattacatatactttctgatccccctgttgacctgctttacgcgattatataagacattttctcgcctattccaatataaaatgaggtcgcccgtcttggaattgaacatatttaatttctgtta

SEQ ID NO: 138014 - DNA, 329 bp, Glycine max
  unsure (1)..(329): unsure at all n locations
actcagctgagctncgacactctgctccttctgtgtccatgtgtctctattgaaacccctcgagggctcggctgatgcatgaatagccaaaaaacattcttccgaagtggtggattatccacccctcactacacctttagctattctgggccacaaaatgagtcctacagaccaatggcccaaacgcatggttctggtacaatgtgcatgcctgcatccggatgagacatcgtgggaagagtgagcgtgcctttaagaacaacatcaccttgaggacaaagagttatttgaagaccgcgggtatgttactaatacctactcggagtcac

SEQ ID NO: 138015 - DNA, 372 bp, Glycine max
gatcaagcgtcctcataataattaacaacgcggcgggccgctcactttctatacttcctctcctattaaatcctactttaccctctctctactcacttcatctttacacctattcctataatatccattaacctctcctcccatactttattccttacattattctctctctgatatctccatttttaccatctatccttctctttctcttcctcatatctccctctattcttctctctttttcccttctccaatctcttccttttctccaacacactatattacatactcttttctcatcatcatcacccattatacatcttccttctcctctctatctccttccttcttcacttatttttatcctttccc

SEQ ID NO: 138016 - DNA, 369 bp, Glycine max
  unsure (1)..(369): unsure at all n locations
agaaagagtgaaagaaaaaaaagaaataaagaactgtgcaggtctcaaagagaatttcaggacgaaaatattaaaagacttcctattgacaaattaagccaaataaccctcacttttcacaanaaaattatgataagatgtggtcgcatgcatgtttgtatntagcatttattaatntgagaaaaagtcaatataaatttattcatcgcttatgacacccccactaaacgtatagaacgtgaaatttctgattgngcagacttggagatcaactttggatcacaggtcacataagcaaacaaaccaacgtcgcacatttatattccagtgaaagttaaatagatatgaaaagatatgatcgtgagagaa

SEQ ID NO: 138017 - DNA, 388 bp, Glycine max
  unsure (1)..(388): unsure at all n locations
cctattatagccgaaaccaagctaaatatgacctgaaacaaaaaagccctttttggtatctaatgggaaattccttactcgtcgaagaagatattcttcatcaccatcgtcatcaacaacttttacatcagtactcttttgaccacttatgatttctaaggctacaattccatagctgtatgtatcagctctntctgataattgaccatggagtacatactcatgtgctgtgtatcccctgacaaatgcatataacacatagttcgataattaataaaataacactcagacatattatgttacatttttcccacgtaagaatatgtatctcattcaccacacttgatgctaattataaatgtcaagaattcaagtgattgcctatggg

SEQ ID NO: 138018 - DNA, 380 bp, Glycine max
actataaaaaataaaaaaatttcagttcatttgactgcacttatcattttttatttgagtccaacctttcttttaaatttactaagtttatgttaggtatgttatgtggcaaaaggaaaaaaaattaaaattgtattgcgttattgctgtggcaaattaaaattccactctcaaccagtgtagttgagatgactagtacaattccaatatgaacaataacagaaagacaaatatggatgaaacagagggaatatttataggaagagagagaaattacaatttactcataatccctctcacaatgattatccttccctcttatcccttagcctattggccaagcgcactctgctgtctttcctccacccacatttcttgga

SEQ ID NO: 138019 - DNA, 193 bp, Glycine max
  unsure (1)..(193): unsure at all n locations
tgtcataccctaatttcgtncggggacctntgcttgatgacatgtgaccattctttggtccttgtgaggtgcttggcacccatcattangcaatttatgaaattccaggacatgccgaaaaaaccaaaaaatgttgatgcacaatccgtaagtttccgtgacacatcggaaataaatggaacatcgttcataa

SEQ ID NO: 138020 - DNA, 405 bp, Glycine max
  unsure (1)..(405): unsure at all n locations
acgacaaagatttgctcaacaaaggcatgatattatctttcttttcttatatttacttaacaaatgcaatggagagaatgcagggggaagagcgtggcaatggctttcattcctgctgcaacggagcttgtgccgaccgttgtcagtgatgctgaactctctaaaaaagatgagaagcagaagattgatattcaacagaatagtaatcatatgaccaatcttgctatcaccaagtgcaggggcgagacacaagccaatttggcttcagttattactcaatacgtggagactctaaatcagcacaacttgcgcttcttagtaagttnttggtgtntaatattctttaagcgtgtgctaattagtgttatttttattganatgagttaattcacgcaaaacatattt

SEQ ID NO: 138021 - DNA, 372 bp, Glycine max
  unsure (1)..(372): unsure at all n locations
atgtcataaatcagtggtttaaaatcaaattaaagtttgctgtgtttngctattggcttctagatctgtgtgataatattatttggatggacatgaccactttggaaaggtgatgtcatcagtctgatattgcactccaactgctgcacgcctgcaacaccaggcttaaacttaatataaaaatagaatatcccatcgtactatatatattatgtgcatgcaacctaaatgacgtagatcatgtatatattttattggatcatcattgattatatatgcacgaaatctctcggcaacattattgttcatgaagagaaaagcagtgaccatagtacttagtggttatcgtctgcatggtgtcactacaccaat

SEQ ID NO: 138022 - DNA, 311 bp, Glycine max
cccggatccttaagcaccgcggctgcagcttccttctctggaagtcatattttatttgacttcttctggaggatcttcattgtttcctttatcatttcctttggaatcttgttcatcaatattcatatgttctaaagaatctgccatatcatctagcatattctttcttgaccagaataccttagaatcatcaaaaggaacatgaatggattcttcgatattcataggtcttttattatatatcctatatgctttggcttgggaaggatattccaaaaaaatacccctatctaaatttggctcaaaatttc

SEQ ID NO: 138023 - DNA, 104 bp, Glycine max
ttttgtgttctattgtcttccagatggattggattggataatttgtgtctggtgtgttgatttgtttgtgcaaaacaaaaaaagtaaatgaagtgtctcacaaa

SEQ ID NO: 138024 - DNA, 425 bp, Glycine max
  unsure (1)..(425): unsure at all n locations
agcgtganaggcagtcatacctcacaatatatatatgtatgagcgcggaggtagcgagataccttggatatgcatgtaataagcaaaaataccttacaaaaatatacatgtttaggtagcaaaatacctaaaaaaaaacaaacacaaacaagaaaaaaaatatatctttcggctgaaaagccaacacatatttgaaaagaaataacttccagcttttctttaaaaaaagattcaccgatcaaaacaaagggttgttttttgaaaaagatgtgtatacacctgaagggtgaatgctgtgaaaattttcccgaacacccaaaatggactctaatgaatgcatgaattgataaaagaacatgttttggaaacactgggataacttaatcgggagatataatcatgagccctagtgtcatgtgaccata

SEQ ID NO: 138025 - DNA, 424 bp, Glycine max
  unsure (1)..(424): unsure at all n locations
ntgatgatatggtcttcaccgacgaaaggatcaaagtgggtctgataagaggccaatctgatcatcttgctttgataaatgcaaaaaaaaaaaaaaagctggggcaaataaagagggtgaggatgaaggagaagcccatgctgtgactgccattcctatacagccaagtttcccaccaacccaacaatgtcgttacttagccaataaccaaccttctccttacccaccgcccagttatccacgaaggccatccctaaaacaaccacaaagtctgtctaccgcactcccaatgacgaacaccacctttagcacaaaccaaaaacaccaaccaagaaatngaatttgcagcgagaaagcctgtataattcaccccaattccagtgtcctatgctgactngctcccatatctatttgataattcaat

SEQ ID NO: 138026 - DNA, 330 bp, Glycine max
  unsure (1)..(330): unsure at all n locations
ttatagtatctgataaatgaatttgtcttagtagttgaaagctaagacattccttgcatgacactttacaaaacatgggaaatttattagcaaatatacgataggtactcagaatagtacaccacaaaaccaanactaatgttggatatcttttgcatatgttaccgcatttctggtgccatacatcaatatatcttctttgcatttaagaaaagaaaacaaaattaatggtcctcaacacaccacaatacgcttncataaaaacataacagattaattgcatctcactcgagtgtggtcctcattgtaggaccctacactttgattggg

SEQ ID NO: 138027 - DNA, 323 bp, Glycine max
  unsure (1)..(323): unsure at all n locations
tgtagctggctaagaacatgtcttntgtggaagaattggacatcaaattggtgtcatttttggtggttgtaatcttggagctgcaagagacttccatctcatatgcttttggggcaaatgatgatggtctctgctcataagaccctttatcagtagcactgtccctggggctgcaatctccctaccacccaaatcactcaattaatgcccccagcaatgaaacaacagcactgccccttgtgctacaacttaagaggttgttcgtaagtctgttattagttagtcagttatgggacaatgaatcaaatagtgggtacttactg

SEQ ID NO: 138028 - DNA, 256 bp, Glycine max
ttggagccattgggcaatctgaggggggggcaaaactgtggtactactgaaccggggcctctgcttatccttctgctatctagggctacctatatgaaatcaatccacaacgaatggtgggtgggagcctatcattaaaaattccaaggttgcctgactaaatgaaccagagaagttttccatgaccggcacgattaccttaattaatggtgtcttaaaaccatgccctttgttttatttctttttcacacccctc

SEQ ID NO: 138029 - DNA, 226 bp, Glycine max
  unsure (1)..(226): unsure at all n locations
ttaaccttgacttggtagaacctcttgccgggttgatttgtttccatgcttgctaaagagagacaaaagctggtgcaaatcaaaactccgatatctattggtggaatggatgaatgcatgaaggaatgcctattacacatatgcaatctangaatgccggggtccggggaattcatccccttcttatacacaacgtctaggggtagcaaagtgccccaacgtacgt

SEQ ID NO: 138030 - DNA, 286 bp, Glycine max
acacactttttccagacgtctgtagcgaccaacctgaatatttctttggcaagcctgctttcctagtttatgtttatagagctcggacttattcatcctctatcggagctgcgaagctttcttcgtcaattattctctaccttggagagacaatctaaccctctgttcaaacatcagccttctgaaaccaccgtgagccttacaatgcccttagtcttatctttcttacgggcttcccaccctatgacctttgatatctgaacttgcgcccaaacttacaagaaga

SEQ ID NO: 138031 - DNA, 475 bp, Glycine max
gatccttaagcaccgctgctgcagcttcttgaaacaagtgttcacctctcctttatctaagctcaccctatgggaacacacaccccttcaatagctgagctcaacaccccctcctcccctctaataaaagtacatgaaaatacaaaaaaaaaacaagttcatactacaaagactattcaaaatgccctgagatacaagactaaaaacctatactactagagtaccctttacttgtagggtagggtgtgctatattcttaaggtatcctataaacctaaaatggcccaaatacaagacccaatataagagaaaccatttctattatttacaaaaaaaagtaggcttattcttagcccatgggcccaaattcaccctgagctcatgagaactctagggccttctagcccaatcttcttggagtctttattcataacattttaggataggaggcctcaaagggatcaaagattggcta

SEQ ID NO: 138032 - DNA, 131 bp, Glycine max
  unsure (1)..(131): unsure at all n locations
aatattctaggctcagtgtacggatcactgngtactaatggtcatcaatatgtagaaatgatcatatatgttatctatangatctaacgataatatgaatctatctatgnttctaataaataatagtatat

SEQ ID NO: 138033 - DNA, 411 bp, Glycine max
  unsure (1)..(411): unsure at all n locations
aaaccattgggattctaggccgcaatcgagagtttggaactcatgatcccccttagttnttgttctatccaagggtaacgcatccatttgtcagagcatcatggagtctatgacaacaacgagtcgtgatgaagatggatntgtgatagcggcaaaactatgtcagtcgttggagatgttgttgtattgtgaaagatgtacgaaagaagaatccgtggaagaaatgttatgacaaaaaaatgatcatgataacattttacactgtcataaatttatgtataccatacataaattatcatagtagaccaatcttaacttaacctttaagataataatatataaatataaaagtttctactcatcatatgtaatgacttatgattaataagattagaaattgtttgaacttca

SEQ ID NO: 138034 - DNA, 261 bp, Glycine max
  unsure (1)..(261): unsure at all n locations
agtctggaatggagtgacccctcaaacatagtgccaattagggatcatgataccctatatcaatggaggtgtgctatgcgtatcatgcaagagccacctcanagacctctcacacaccaagtacatgattggtatgcctcgccaccaggttatgtgaaattcaatgtagaatgttgtttttccagtgctaaccataattgtggtttacgtatttgcattcgtgatgaatgaagacgcttcaagggtgctcaaactatcagt

SEQ ID NO: 138035 - DNA, 420 bp, Glycine max
  unsure (1)..(420): unsure at all n locations
gtttccacatacacaatgcgcgcattaacccaccattccctggtggccacctccaactgagctcacgtactcccacatagcccatatcctcgtttctctcaacaccgggtccccatcaatacgtccaagcttccacaacatccaagcaaaaaaacattcgaacagcataagctatcacagccaagcaaaacagagcagaggcagaatactctgccaaaacaccaaccaaatcacagctnttctcacttaaagaccccagtaacaattccttcgatccaattcgttaaccggtggatcgactccaagaatgtactggaagtctatagtacataagcctacattttgaccggtgggatctactagcagacattcagaactcattctgtactactcttntcacaaccaatcacacacaagcat

SEQ ID NO: 138036 - DNA, 273 bp, Glycine max
aatcgggccatctgaggagcgtggcacacttgctgccaaccacttgaaatgaggtcctctgcattttcccttcagctatctaaggctaactataggaatcaaatcgagaacgaacgtggtgtgggagcctatcataagaaaattgcgagctacgctgaataatggaaccacagaagtatatctgatgactggcagaatcacgttaatatatgttgtcctcaaagcattgcccctgcttactatgtctttatccagagcccctacagcatatga

SEQ ID NO: 138037 - DNA, 135 bp, Glycine max
  unsure (1)..(135): unsure at all n locations
cttggaatgagaaaccaagaaggcccganaggaagaacacgaccaanacaagttttgaggggctttatatggcagcaatagtgagctcaaactccgaagaggtgaaaggaatcatcacgggtcaaaggcgtgatc

SEQ ID NO: 138038 - DNA, 464 bp, Glycine max
  unsure (1)..(464): unsure at all n locations
atcttgagtcacctgcagcatgcaagcttgcctcanagaggtccaggaaggattttatggccgaatgaactagttccgctcctgagtatgacagtcaccgctttatgagcgctgtacaccagcagcgcttcgaggccatcaagggatggtcgtttcttcgggagcgacgcatccagctcagagacgacgagtatactgatttccatgaggagatagggcgccggcggtggacatcactggttactcccatggccaagttcgatccaaaaatagtccttgagttttatgccaatgcttggccaacagaggagggcgtgcgtgacatgaggtcctgtgtaaggggtcagtggatcccgttcgacgcagatgctatcggccagctcatgggatattcgttagtgctggaagagggccaggagtgcgagtatggccataggaggaaccggtctgatgggttcgatgag

SEQ ID NO: 138039 - DNA, 233 bp, Glycine max
ctaacatcacccagtttcaactacacgttgatcacagtcacaaaaactaaacactcataggagaagtacttcttttaaaagagtaaagtaaattcttctcaaagggacatcaacctaacaaacttatgtcaattatcaatgattgaaaacttctcaatcttaacacatcaacatcaaccagagcatcgttgaagacctattaactgtgtttggatgtgcctcatatacccaag

SEQ ID NO: 138040 - DNA, 361 bp, Glycine max
gatcattactaaaggccaacgcagtaaaatgatcaccttttaatgtaaaacagaatctcttgataaaaaagaactacgcaggtctgattttctcatcccaaattgaggaatacgtaagagcaaagggaaacacccttgtcgaccacaaaaagaaaaaatataaaaagggtataaaggatatggagacctaaaaagggaacataataaatcaaagtcatgtttgcacattcgattaaaggctgccgaccctttgggcggacgtatggggtgctaataccttccccgtgcgtaaatacaactgccgaacctttcacttaaagttcggaaatcgcgtcttttccggttttccgacttttcctta

SEQ ID NO: 138041 - DNA, 337 bp, Glycine max
  unsure (1)..(337): unsure at all n locations
gataccatctttgcagatgaagatgcttcacaaacattaagaaaactagccaatgggcctataagaaatggtataacttggcaaggatacgacataaacaagtattcattttacacaaaagcacatgacgacaaaagtacaatgcagaacaacggggtcaccctaagggctgaatctcaacacttcgcaagtgtgcatgacgccaatccctgtgtagcttccatcccttacattgngttcattgatgaaattngggagcttanatatgtgaaatctatcgtttgtgttttaaatgtaaatgggttgacaacaacactagtgtgcgcaccgatgatat

SEQ ID NO: 138042 - DNA, 151 bp, Glycine max
  unsure (1)..(151): unsure at all n locations
gtacttacatcacacacatttctttttgctaaatcacatacatgcatactctaagcactttggctatcgaaaaatgcatacgtgcacatnctggtatttctaatacctatacatacacanactntatgatanacctttgctatctacacaa

SEQ ID NO: 138043 - DNA, 354 bp, Glycine max
cctagagggatggacctttttatgttttgtttatgatcaataacaatgcctataggttggacctcccataagagtatggagtcagcaccacttttaacatttctgatttaactccttttgcacgtggagctgatattgaggaggaggaactaacacatttgaggtcaaatcctcttcgaggggaaggggatgatgcaatcctccctatgaagggaccaatctctagaaccatgagcaagaggctccaacaagattgggctatagctgtcgaaaacgccctcaggttctcatgaaccctatggtagaattacgagcccatgggccaaggtagggcccaatcatctatgacatatt

SEQ ID NO: 138044 - DNA, 298 bp, Glycine max
  unsure (1)..(298): unsure at all n locations
gctgatctgcagaagaacatataccacagactcttgctacaggtgctgatttctgattcatggtaagctgagttactanggtgaccaaggcatcaagttttccctcaagctttttaattttagcagatgaagatgaatctgtggccacctcatggaatcctctaaggacaatagcatcatttcttgcacttaattgttgggagttggaagccatcttctcaatcaaattcctagcctcagcaggagtcatatcaccaagggctccaccactggcagcatcaatcatactcctctccat

SEQ ID NO: 138045 - DNA, 414 bp, Glycine max
  unsure (1)..(414): unsure at all n locations
ctcagctctcctctttccttattgggggggttggttttttctatgttcgaccctcccggngtctgaggatcactctacattactgagaaacaatgtgttcgtgaagaaaatacaagccgaggcgcttctgtacgttgttagacggtctggggggatttcgcgaagatttctctctgttcttcaccggtcttcgttcgttcttcgagatccttcggtcttcaacaagtgagatccccgaatcgaacttttcaattcattctatgtacctttggtggacccacttgtttcgcgtacttatattttcatttgattactatctgtacctcttgtgactgcttagtcattattaagtcatgtctcgctagtcacaatatataagttacactgtcattgaattgaacatctgtgaattct

SEQ ID NO: 138046 - DNA, 373 bp, Glycine max
cttcatgcactcctctaatgacaatagcatcatttctggcattgaattgctgggagttggaagccatcttctcaattaaatttctggcttcagcaggggtcatgtctccaagggctccaccactggcagcatctatcatacttctctccatgttactaagtccttcataaaaatattgggggagaagctgctcagaaatctggtggtgagagcaactggcacatagtttcttgaatctctcccagtattcatataattaagctctctccactgagttgcctaattcctgaaatatcttttctgatggtcgtggtcctggaagcagggaaatatttttctaagaatactctcttgaggtcatccagctcgtgat

SEQ ID NO: 138047 - DNA, 384 bp, Glycine max
tcaaaacacatcattttcattatatcatggcactgattatcgaatagcagaagaaaagtttgctaatcaacttttcagaatggttttgaaatttgaattttgaaagctgtaatcaattaccattggtgtgtaatcgattaccactaacggaactcctaaaattcaattggaaaagccatgacccttcataatattattgcgtactcgattaccaatgaacaagtaaaaaaaaacaaggctatttgaaacgacacatctcttcaaaccatttcgaaaaggcatgatggacctatatatatgtgtgtctgacttctaaattaagagagagatattctaagagaacttgactatcaaatgctctctcaataagtcttggcaaacact

SEQ ID NO: 138048 - DNA, 366 bp, Glycine max
  unsure (1)..(366): unsure at all n locations
tctcagcttaagagatcatcccctcgacaacattattggtgatatctcttaatgggtnacaactagacattctcttaaagaattatgcaataatatggcttttgtatctatgattgaaccttanaatataaaagaagctatagtagatgataactggatcattgccatgcaagaagaactgaaccaatttgaaagaaacaatgtgtggaaattagtagaataacctgaaaattatcctgttatagggacaaaatgggtttttagaaataaattagatgaacatggtataattattagaaataaagccaggttagtagcaaaagggtataatcaagaagaaggaatagactatgaagaaacatatgc

SEQ ID NO: 138049 - DNA, 167 bp, Glycine max
tacaaagactactcgaaatgcccctgaatacaaggctaacaccctatgctactagaatggctaaaattcaacgcccaattgatggaaacacctcttctaatatttactaagaagagtggatccaacctggacccatggactcatgaatctaccctaacgttcatgag

SEQ ID NO: 138050 - DNA, 451 bp, Glycine max
ctcttccgcacttaataactgagctgcacttgaccctcgtcacgttatgatttcctccacaagttcgaagtaaaaggacctcaaccctatacccaacgaggaggtcaaaagtgggcagttaactagaatggtcataattgacaatgcagaaagtattatgtgcacactatccatgtccacacattattgcagcttctcgagcatgaactactactcaattatatatgttggttacacaaaggaacacatcttaaaagctacttacgcacaacggttggctatatggaaagaatcggctattccttcctttgatgacgcatggacacttatcctctacctcacgtcaattactgccaaattgcctccctaatcatacatgataaggaacaacatggaatggatcgaatcatctgaccaccaactaaatagtattatatgtggatcctaaagg

SEQ ID NO: 138051 - DNA, 427 bp, Glycine max
  unsure (1)..(427): unsure at all n locations
tttttaacttctttacagaatttattgtgaaattaaaaaattattaaatttattttaaacttttaaatattaatattttattattttaatatttaatatatctatcacattaaatatgcttttaatagttaaaatttaatactaatattttagtataagcattgaatatactttaactcaaaaaagtattaaatatattntaaaattttcacatattaatattgtacttttaatatttaattatattttaatattttacatatatttaatgttaaatattaatattaaaatattaaaatataaagtttatcattctatgtcagaataggaacaaataatttggaatcctcctctttctttttaggataagtattgaatatattntatacttctaacatattagataaactgtcttttcatttaatat

SEQ ID NO: 138052 - DNA, 415 bp, Glycine max
  unsure (1)..(415): unsure at all n locations
agctngttgccccatgaggaatgccttgcgtttagatagcattattatacccctcgataatatgtatatatgtaaatgtgtagcatanaatgccttgcaaaatgtagaataaaatgcctctgcaaatatgaatatatatagcatgaaaatgccttgcataatatgaatatatatagtatgaagtgccttacaaagtgttggatggatagcgtaaaagtgtttttcaaaatatgtgtatttgtagtaggtagcacaagaagccttccaaaaaatatgtgtgtatatatatacgatgtagcgtgaataggtttgtctaaaaatatgtacatggacgtgtgttgcatagtgcctttcccaaattctatgtgtcagaatcatatgtgtcataaatacatggccctattgatgatttata

SEQ ID NO: 138053 - DNA, 289 bp, Glycine max
tctaggaaacactcttagcactgactgtaaacaccggcgaaggcatgatcataaatatcctgggaaggttaaatctccctaagagccgagggagatctatccccgtgtgtagcttataactaccctttcccacattagtgaagcttatccacccttaacatagggaggacccattatcagagacctcatgatgaacctcttccgatcaataatgttggatgggaaccacctttcgctctaccatgtgttgaccaaaagaacccctagagtctctttctctcatgcctaa

SEQ ID NO: 138054 - DNA, 374 bp, Glycine max
  unsure (1)..(374): unsure at all n locations
agctntttccatgacgggtttttgataatctatgtcgacaatttggatttaatttcaaaaatgctacggagaaccattgatggtgtttgttgaaccaatgttgatagagcgtcgtataaagtattttttgtagttgtctcttttccacggagacaactttggccattaaagctataagcctttgggtaaccaacttcgtcgattgcttgatatggagggttgtggaaaatggggaatatttagtcaaatctgggtataagtgcttgatgatgaacaaaagcaaatgaagcattgtcgagttcagccaatggcaaggtctggagcttgatctggaactcaaaagcacttgcccaatgcaaaaatttatcttggag

SEQ ID NO: 138055 - DNA, 376 bp, Glycine max
  unsure (1)..(376): unsure at all n locations
actctggctgnangataaattgctacatctctaggatttgatccctgcgctctaaagcgttgattaattgaaattgtaaaatgggtttnnnncttntaacaaagaaaggacatacaaggaatcttgcagctcattattatatgaatggggtggaagagataatgcagcttttctgggatctctttttattattattttgaaagaaaaagtaatttgtctttttgagaacttttgggtggattccacagtgcatggttagaaatcaagtggaggcaaaagtacttttgccaaaagatgaggacctttgcttttactctcatttggatntcattgggacttgagtgtgacaagtttaaccgcatatcgaacatgcact

SEQ ID NO: 138056 - DNA, 440 bp, Glycine max
tgacttgggttagatatgattgatacatgatttgggactcgtaagatttgatttgcgcaagattggatgataagaagtgtgaatttcgaaatctgcacttatgcacaattttgctgtcaaataggtgcagcagaattttggctttgtgcaaaaaaatgcttgtgtgtggtgggctgtggaaagagtagtacagaatgagttctggatggttgctagtagatcccaacggtcacaatgtaggcttaagtactagagacttccagtaaaattttggagtcgatccaacggttaacgaattggaacgaaggatatgttactggggcctataagtgagaaaagctgtgattttggtttgtgtcttgggcagagttttctgcctttgccctgttttcttggctgtgatagtgtgggctgtgtgaatgtagaagtactcggatgtt

SEQ ID NO: 138057 - DNA, 410 bp, Glycine max
cacattcttggtggctaagctctctttttcatggcttaatccctagtggatgacacctccattcaccacttctgctatgacttccactgcatctccatggtggaaaatcaccattaaaggatctcattgaagctcaaagatccaacctccattgaagcttcacaagcaagcttacatcaagtggttatcatagcataagagctttaagtaggtgcttcataaaccttcattaattatcagctgtaccttcccctacatagcaggatctacattcttctccatgtatctcctcacactgtcttgtgcaaatgttgtaacatgatttttagatctcaaccgattaatttgcttagaagctagattcgatacctatggatcaatacctagtcatgttcttgaccatgactgag

SEQ ID NO: 138058 - DNA, 338 bp, Glycine max
  unsure (1)..(338): unsure at all n locations
tctatgtatgtttgttgatggatgtttgtgattccttgtttgtatcgatgttaatgccttataggttgatgacatgtattaagatatatttcataaggaatattatnttgattgtacctttcaattctagtgcaacctattatttgtgttgcgtgcttaagtcaaatagtttgattacacttgcaagtccgagtataattcattctttatgttatgagcacatgtcanatagtttgagtattgatgtttctgtcaccattaagtgattccggacagtctcatatatgcgtacattgtgggcatattcttggttctagaattcattcggaatatctatt

SEQ ID NO: 138059 - DNA, 382 bp, Glycine max
caaatcaaccaacaggagaacagttaggacctatccaacaacatattcaaccctggatggaggaatcaccctaatctcagatggtctatccctcagaaacatcatcagaaacctgctccttccttccaaagagctgctgagccaagcagaccctacattcctccaacaatccaacaacagcatttgccccagaaacagacaacaagttgaggcttctccgcaaccttccctctaagaacttgtgagacaaatgaccatgcagaatatgcaattaaacaagagaccatagcctcattcagagcttgacaatcagagggacacttgctcacgataaatcacaacagtccacaattctgaaagctgcctttcaatctgccaaaat

SEQ ID NO: 138060 - DNA, 424 bp, Glycine max
  unsure (1)..(424): unsure at all n locations
accttgaannactgtgctattcatcttttcattctcttctccctttgccaaaaagaattcgccaaggactaaccacctgaattatttttgtgtctctcttctcccttttccaaaagaacgaaggactaaccgcctgaattcttttgtgtctcccttctcccttgtcaaagaattcanaacgacacagtctgagaattcttttgattcttccctttccctaatacaaaagtgttcanaggactaaccgcctgagaattcttttgtatccccattcacaaagtatcanaggtttaaccgcctgagatctttgtcttaacacattggagggtacatcctttgtggacaagtagagggacatctactgggatttgctaagaacaagaaagggacatctcttgtgatcagtctagtgggggacatcact

SEQ ID NO: 138061 - DNA, 121 bp, Glycine max
  unsure (1)..(121): unsure at all n locations
cagagctagaatggatctccttattgactcanatccatgtgcaacaccaccatcagaaccctagttcaccaccacaacaacgattagtaacctagcttcatcagatcttttttatttctca

SEQ ID NO: 138062 - DNA, 341 bp, Glycine max
acatccaacattattgttaagacacctagcatttttgctgggcatccagcaacacagtaaaagggttaaaatgtccttcactttttcacgaatcggcaatttgtgatccgtatgagcatatatattgtcaatctcgatgaatttgattttttttttttatataccaaatgacaattcgtaatgggcctaatcaaactagtgtctcttgcatttttaatagaacactcaaaacaactgaactattacactcattatgctataaataaaaaatatatctatgtataacactaaaatttctaatatatatttaatgtacatgtgacattatataacaaatttat

SEQ ID NO: 138063 - DNA, 272 bp, Glycine max
  unsure (1)..(272): unsure at all n locations
caacgccttcaaaatgatcacaaattcaagtaaaaagaatcgcttgattcactcttaagaaagaactacgtatgtctgatatcctctccaaaggagggtacgtacgagcaaaagccccgcttttgtcgacctcaaaaaataaaaagaaataaaagttaaggcaatacaattatcacaattctaatagatacggtggtgtcctttgagacatacgtgagaggtgctaataccttcctcanacgtaaatacaactnccgaacctaaaatttcat

SEQ ID NO: 138064 - DNA, 281 bp, Glycine max
  unsure (1)..(281): unsure at all n locations
cataatgaacattcaaatattatcacactaagaatgaagctagatataagaatcaacaatgtttgaccattatcatgaatgttgagggtgaggatccagacttctggtccacatacatgtaacaaatgaaaattaaaaaaaagggaagatttctttattagttaaagaatacatcataatgaagagaaatngtctnttcccttcagtacctctgtatgcttaaagaatgagcatgcaaaacttccttaatttgtataatataactaccaattagagttgct

SEQ ID NO: 138065 - DNA, 283 bp, Glycine max
atggtgtgcaaaatgctactgactctaccaaagcttttcttcaaaagagtttggcaattgtggaggagaacaaactgtggaaccaacaggtggtgcaaaaggttgtgtccttataggtggaggtcgccaaatagagggctactgctcagactttatgacgagtggagtgccttaaggtggctaatgccattgttgcttttgttgaggcccgaaaagtgaaccactaactgtagttgcgcactctgttagatggtgatgacttcttaagacgttgtatggattt

SEQ ID NO: 138066 - DNA, 223 bp, Glycine max
  unsure (1)..(223): unsure at all n locations
aacagcaagtttacttgattctgcacatctgaaggcatcactcatgagttctctgcagccgtcacaccacaagaaaatggcatagttgaaaggaaaaataggactttgcaagaagctgctagggtcatgcttcatgccaaagaaccttcctataatctctgtgctgaagccatgaacacagcatgctatatncacaacagagtcacacttagaagagggactc

SEQ ID NO: 138067 - DNA, 388 bp, Glycine max
  unsure (1)..(388): unsure at all n locations
catgangactnngaaaaaataaataaaataaaaacattctcagaaccaagttgaataccaaaaaaataattaagtaaaatatttcatatntaccgtaacagtttcgacagaataatagccacgatcaacataatctcccataaacaagtaatttgtatctggacactaccaacaaaaaaaggtaacaagaatcagtatttaacagagaggttccatatttcaactagaagcanaaaaatatttaaatatgcaaggatgagatgctaaaaaataatggtttcaatcaagaataaaataagcacatagcacattagttctcanatttgaaataagacaatgagagactatgtaactgattggcaataaacactgcagtttgtttctcaat

SEQ ID NO: 138068 - DNA, 438 bp, Glycine max
  unsure (1)..(438): unsure at all n locations
accatgactacctgaataattccttgatagctcnnttgagccttgtttccctttccttgttttgaagctcactacaagccttanatgaaaaacatgatatcaccatattcttaaaggattttggaagctttggaaatggtttgggaattaatgggggggggttttggttcattgtgatacctggtttggtggctatgcttcatgaggtattttggccatccttgatgtacatggatatgggtaaaatgtgacatgctgaatgaatgttgttttcaacgctatagagtaaaaataattcgaaaaaagaaaaaatttaaaaagacaagaaagcataagtgagtgaaagatttaatggccacaatgtgaactctgatctactttatgctaaggaacgtactcctttatttatatatccctagggccccaacccaactccct

SEQ ID NO: 138069 - DNA, 52 bp, Glycine max
atccagcgtgaaggcacttgttttttctgagtatataggtggctcaccatct

SEQ ID NO: 138070 - DNA, 409 bp, Glycine max
  unsure (1)..(409): unsure at all n locations
gtgatgcaatcctttccaacacttagaaaattcacaaaactctcatatgaaagggggcggggagaggctaacagaatcattgcaagatctatatcttctaaatttgacgtcnatggcatatagcttccaccaggcaaaggttaacttcacccaatgaggcatacctttctttcataaccaacatttgttcaatagcaactttgttgagatngatttcgtcatgaagagttctccaactgagcccatacacataagtgatttctcttcagaaactcataaagacttcatcagacacgacaaagaatagcaatgcacttttctcttgtgctcagagcgactatcacaaaaaccatcttgtgcctaaggttgaagtattctcctgtgattctcatctgatgtgtgacatatc

SEQ ID NO: 138071 - DNA, 157 bp, Glycine max
  unsure (1)..(157): unsure at all n locations
gatgctacatagaagggttatgtctgtgtggtggtcagcagaggagcataaaccacagaatctggcaaccgngccaaattttgaatcaatggccagtggggtaccaaggtaacccagggctttaagttaaccttcaacctcttaagttcaactgaag

SEQ ID NO: 138072 - DNA, 129 bp, Glycine max
  unsure (1)..(129): unsure at all n locations
tacccatcacatgtggtactaggggtgnggtctgtcgatggtgcacaacaagttttccacatccacaaatcgcgcataaacccaccatcccctgtggccaacctccaactgagctaacgtactccaacg

SEQ ID NO: 138073 - DNA, 328 bp, Glycine max
  unsure (1)..(328): unsure at all n locations
cctctaataactatggcatcatttctggcgctaaactgctgggagtggaaacccatctcttcaataaaattctggcctccaccagaagtattgtccaaggcctcaaccgctgccagatttatcatacctctctctataatactggagtcctcataaaaaatatggagaagaaactgcttcgaaatctgatggtgagagcaactggcacatangtttttaaatcgctctcagtacccatacaggctctctccactgagttttctaatacctaagtgatcnggtacccgatcaaataaacatgaaaatgcagtaactacgaagtgatcct

SEQ ID NO: 138074 - DNA, 118 bp, Glycine max
  unsure (1)..(118): unsure at all n locations
gagaggatncagcagcanagagtgtagcagctggtgtcatgatgtttgactgcaccaaccatngcggctgaggtggttcaagatcaaccgcaaggcggccctcaaaaagaaccctgaa

SEQ ID NO: 138075 - DNA, 127 bp, Glycine max
ctcctttggcaaatctgatttcaggttaaattaggtggcctggttcggcttgtgcgcttaatgcaccttggaacattcttgaaatttcttaccggaatttaacggaatgatggattttggatgaata

SEQ ID NO: 138076 - DNA, 322 bp, Glycine max
  unsure (1)..(322): unsure at all n locations
ggggggaccacttgggcccgccgaacccttcaacttttgggcggggtctttggaagaatccgtcccccttttggcaaaggtctggaagttgattcctatccaaacccatatcaaaatggacctatactgcctaacaaaggcacccattaggtccttccaagaatgtactcnggaaagttccaagttagtgtaccacgtaacagctaccccagtaagactntcttgggaggaatgtatcagcaattcctcatcttttgcgtattcccccatcttctgacaatacatctttagatgggtcttgggacaagtagtccccttgtat

SEQ ID NO: 138077 - DNA, 277 bp, Glycine max
  unsure (1)..(277): unsure at all n locations
atggacctggttttgccctaacaatttttgaaaaggatttccttaagtaatcaagggaatctttaaccatggtgaacccttcaaacactacccccctaaaggcctctaaaataccacacctaatgaaccttaaaactcagccaattgaaccatcccaacttctcaaagtgtcctccgtcttcaaaggaactngcatcattaactgaagtanngtgttcagtttataatgccaagtttagatccatgcaacccanatcaactaaatggtatcctatat

SEQ ID NO: 138078 - DNA, 390 bp, Glycine max
aggtaaaaaagcatttttaagaagaatctaatggataaaatccaattaagaaaaagatgggcattggtcctcaaacctggattcacttaaaccaaataaaaacctcttttgaggtataatagatagtggatataggaattaaaattgggtttgctctataactgctgatacattttctttaatgccattcaaagttattgacctgaggaggctcttgtcctgatggatgaaatgaatgtgaaagctattctcattgatattatgacattgggtgtctaattcctgctccatttttgtgtggaaactgaattaatggagaaaaactaatgctcaacaagaatagtgctcttgcttggatacgtattactgataagcaggatctggacaggg

SEQ ID NO: 138079 - DNA, 397 bp, Glycine max
  unsure (1)..(397): unsure at all n locations
agctgagaatagccttctatagcttgaagatcttggcnttgnttttgatatctggaattgagtntggatcaggttgatcctaccactcattggaaatgaatataatgtgctcttatttgatataatgcttcaccggggtcccagaattggagtgcttgccttcccccttcttaattctttcttaacggggaggattttcataaccgaatgccttatgatgaaaatcgtattaagaggggtngcactgtcatctcttggtgtagcccttgctgctccacttttgaaaccacccatcacctcgtttttgatcgtgcttttgcgaaaaatctttgggcttggcttggcttggctttccagcaagcttcaatggtgcattaatatatcttctatgcatact

SEQ ID NO: 138080 - DNA, 477 bp, Glycine max
  unsure (1)..(477): unsure at all n locations
atgtgaatcnaggtgattcnaagtgtttgatgaattcttgatggtaacaaaaggtgatgacaaaaagctcaaagatcaatcaaagaacaactcaagtgaatcaagaccaactcaggagttcaggataagattcaggaagatttcaagactcaagaagaaagtctagagacagaattcaagattcaaggttcaagatctcaggattcaagatcaagattcaagaataaagagaagactcattcaagataagtattaaaaagttttttcaaaactttgaagagcaccatgaatttcgacaaaaccttttaccaaagagttnttactctctggtaatcgattaccatattgttgtaatcgattaccagtagcaaaatgagtttgaaaaagtttcaaactgaattacaacgttccattatttcaaaagctgaatcgatacaatgtttggtatcgataccgtgccttgaacgtgaatcaatc

SEQ ID NO: 138081 - DNA, 484 bp, Glycine max
  unsure (1)..(484): unsure at all n locations
ctgcaatccttccttacacccacagctcagcttatatgaagcagccaaacaaaatatgagtgatcaatgagttagaattgatatggtacccccttagtgagaacnctgatcaagtataataacaagagagacctttagagcagcattntctattacttttctggcaaagatantttagtgataaaaatataaaaatagaaagagaggtatacatactaattaatggagataaatatattaaaatntactcatttaatctcatgtatttctttaaaagattccaatccaagaaaatagatatatttatttatatcaattatcattttaatgatcaactcccatatgtcgtatcataatattggtcaattcctttctttaactaatanaaaaatatatttgcaaataataaaccttgaaatgaatatccatctctaaggaaatcatatgatcccttagaaatcgctgacttatcacgctccctgta

SEQ ID NO: 138082 - DNA, 392 bp, Glycine max
  unsure (1)..(392): unsure at all n locations
ttatgcgaaacggagaccaacatgcttttttatatcgccaagtaccaagaagagttaggtctagccatggcccatgagcatagaatcgcggatgagtatgctcaagtatatgcggaaaaagaggctagaggaagggtgatcgactctttacaccaagaggcaaccatgtggatggaccggtttgctcttaccttgaacgggagtcaagaacttcccgcttgtagccaagccaaggcatggcagacactactcacccncgaaagatcatgggctctcggctatgcagcatatgataacttaaggccacataatagaaatcgtaggaacttgatggctctagaccttgctagatcgacttccttttttgaataaatagtggccctgttcactca

SEQ ID NO: 138083 - DNA, 402 bp, Glycine max
  unsure (1)..(402): unsure at all n locations
gtgttgatctgngataattaattgttntattatcagttctttgcactttaaagattttaactttccaacctcaataggtgaaatgaatacatgaaatgatacaatacatntattgtcaactatgcaatgctntacactgaataaaatattgaaatttataaaagatatgcaaggtagagcgctgattttttgaactttaaaggtatgtgttaatgctataaatatattacactattttatattgtattataacaataaattatatacaaatcaaatgaatgtacaataaaaataatacggaattcagtgcatctctatttgtagatcatttgaatataaatactactgaatatacatgataaacaagagcttaccaaaacactgaaaactgatactgacata

SEQ ID NO: 138084 - DNA, 322 bp, Glycine max
  unsure (1)..(322): unsure at all n locations
taatagagtaaaaatatcaagctaatgtcgaattccggctaaataggagtgngaaggatcctagaatcaacttagatgcggattaggagtgggaatatcaatanacctagagaatacatacacatagcattaataggagattgcaaagactaaactttttcagaggtagttatggcaagcataatcaagaacatttaccctggatacattcagaaaaatagatntgatatattcttcgaaggtatagcanaaaagccatataacagcaaaaatggagagcataacaaacttgtggaaaacttgngaaatcataataagaatc

SEQ ID NO: 138085 - DNA, 122 bp, Glycine max
tgtgaactctgatggatatatgggatatggcctctggtaatcgattaccaagggggggtaatcgattacaaaggctaaaaatgaagacaggaggctaagatggtctctggtaatcgattacc

SEQ ID NO: 138086 - DNA, 426 bp, Glycine max
  unsure (1)..(426): unsure at all n locations
ctcacgctcgcaganagatcttcgttntggtttaatcaattaccaatttttttgttattngatactcagnnctgnnaagaccatattttgtttcttagggtctctgggttaaatctttaggagagtatagaaatcgaatacatcgttcttgaaagtgtccccatgattgatcaagattactttaattgattaaatcaagaatttaatcgattacattatttttaaaagcctttcaagtgttgggaagagcactttaatttattgaaatgagaatctaatcgattacttctttgagataatcgattacattgacaatnntattcgatatcgatgattataactattttctctataaatagtcaccttgtgttctcactttcaacaatgaattataacaagcctttgtgactcacacattctagtttt

SEQ ID NO: 138087 - DNA, 413 bp, Glycine max
  unsure (1)..(413): unsure at all n locations
cgactccagnncaagattggtcacaattgggcttacaagaattgaaaacacaggttagaatatctcaaattcataaaatgggttttatggttttcgagattatgactagaaatgaaaaatagattagaaagaaaaggttccatttttcctctttctaagttgaaatttagtgctgctacctttacccttttcccaattacccttgaattacccatttcaaccggatttcacactcgttctgtttattttctctagttacataaccattgctgacaatcgtgtagtgaagtattaatattggtgccttagaatttggatanggttagtcaatcgagttcgattagttcaaactgagtagtgctatctgatacacatgtaattagataacttttgaatttcagtgagttacacaa

SEQ ID NO: 138088 - DNA, 427 bp, Glycine max
  unsure (1)..(427): unsure at all n locations
tgttgcaagctgctattatttgtcggtgagatatgatatttgtgtgatgtctntaaaaagattaagaatttatcagagaaactggaatggttgttatactgactaaatttatttatattttgtaaatttataaacaatgttttgtagtttgaataccaattttattatcaattttacaatttttcttgcttcaacattgtaattccttttatatctgtcatgccaaatttttttttctaaatcactantcagacgacccgtgcgtatgcacgggttgtagactagttacttataatattcattatttcttaagggtttgtgcgctacacaggtactataactagtagagtttttttttccaatccaaatatttcaattcctaatttgatacaactactcattctaccaaatctcatttatgcttgac

SEQ ID NO: 138089 - DNA, 373 bp, Glycine max
  unsure (1)..(373): unsure at all n locations
ccacatcctgnnngagagaagaatgatcagatgaacttcaaaacctttcaaattatcttgatctcaatacatgtttgctaaaagaatgtcctagtcaaaacacccaatatgtctgtacaagaagcctatcactagattttatttattttagatatgaaaagaaattattaaaagagaaagggaaaaaggtacaagagccaataataagatatccaaattgacaccatttttttatcagcaagataaattttatatatagataaatgagtacccaaattgaacccatgaaatgcaaaatccagattgttcaagataaccatatcagtggattctaaaatgatacagaaatttataagcagtaccttgngttcta

SEQ ID NO: 138090 - DNA, 458 bp, Glycine max
  unsure (1)..(458): unsure at all n locations
atggcctctattagttaganangngtgtgatttgtgtgtgtgtcnnatatgaatnnttgacaaataagctgtacaattttgtctatgctgagagatggctcatagcgaggttggcattctcttcgtttgtgcatangcagggtagatatccatcatgtgaatgtgattgttagatttagctcttggacttgattgctagttagactaatttaatatgtactggcggtggttactgatttatatgaattaatgtcactacctagcatagatcttgtatgcaatctcatggatagtcacactggtgctaattacgacagacaggaatgctcttgtaggcaatctcatggattgtcacactggtgctattaagacagacaataatgctcgttagctaggtatccactttatacaaggcactaagattatatgttgtgtgtattggcagtgtgtaatttatt

SEQ ID NO: 138091 - DNA, 237 bp, Glycine max
gatacttgggtttgaatttctggtaataattgcggatggctggattccaccttaagctctttcccgatctgataaaaaaagccgtctaccaatggaataaaaaccctggattggtggagcattgggtagaataaaaatggacctaaaattttgaccggagaatttgacctcgaattttattaattaaaaccattcctaattaaaaaattttttaattaaaattattcattaaaattt

SEQ ID NO: 138092 - DNA, 375 bp, Glycine max
  unsure (1)..(375): unsure at all n locations
ttaaaaaaacctaaacctggagggccaaccatacctaaaaaccatatttttttaattaaaattatattattaatatgagaatatatattaataataataaaggaaatcccaaaataattttggtggttggacaattaaaataatttaaatatttgaaataagtcaattcctataaccataggtggatagtacgaataaagaattattttttgtggacttagaggctntagtagtttgcacatgtaacgtttggtagtcaagtttgaccatggtttgtggtgtaaaattaccttaatatttntaatgcaaaattttgactntgttaaagaatantttttacacttncttagggaatgcttgggacacccagtattt

SEQ ID NO: 138093 - DNA, 165 bp, Glycine max
acagataggggatacacgatgacccttaccatggaatccagccaaattcctatatgtgggaaagttataaatggtccaaattaccatccaccacacctggaaggcctcatttggagccattcaaccacaacacccccttggccaacaaattggccaggcctccat

SEQ ID NO: 138094 - DNA, 448 bp, Glycine max
  unsure (1)..(448): unsure at all n locations
aagtaactatatatcacatattataaccttatatatttataataatactagctacataatattaaacattcattaaataaaatcaatataattataatatactgtttgaattgggttttataacacaatccanaaactgaacaaaattgtaaatatatatatatatatatatatatatatatatatatattagatnttttttgttntgttaagtgggttcaatatttttggatgacatagtggttatgaataattggtcaatttaaacaactctatacatacttactccatgctaaactaactnttttatacaaaaatgaagcagcaagataaactcttgatacttatcataaaatnttgaacaatgtaagatcaactaattgaaatttcatnaatccatgaccatcgaaaatatatgtagagattaattanaataataccattaata

SEQ ID NO: 138095 - DNA, 399 bp, Glycine max
  unsure (1)..(399): unsure at all n locations
attgatgccaaaaaggttattgaatgaagaacatgaactaattagacaacaaaagctacattacctaaactgggagcaacaggacaaacaattagtgtctttggcttctagcatcaatggcattgagtcttcacacaaaagaatggttggaagatacttgaaacttaaccttttagaccaaagccaaaatcaaacaactaaaactgaaactaagtgtctaatacacaggagcaatgaatgactatattnttgaaacataaacatagtaacacaaatgggtaagagaagctaactggttttcaaacaaaattaactatgatgacttatggaatccaaaacaataatgccaaagtgagacttcatgaactgagaaagaagctcaacagcgttagggaatct

SEQ ID NO: 138096 - DNA, 458 bp, Glycine max
  unsure (1)..(458): unsure at all n locations
ctcaccttgtcctagatccttctgttgactagactagaccaataacattattgtaacaacatatntaaaactaaaacttaatccgcagatccctcatttaagactaagtttcaatcctgcttcattcaagttctaaggcaacaatacatttcccaatgctaaattctcctaaccatgcacacaaatggttgatcaaaccaagagcatacagaatttaagcactgaaagaagcattgaacacaagaaacacaattaattagatattaaagtaattacatcagttgttctttagaaatccccaacaagggtgtntagccagccattacagataaaccctaacaataatgagattaagagtagagaataattgctccttacacaagaaggnggatccctcctcctcttatcagcattgcacaatcactctacaactcactaatctttctctaattacaaaa

SEQ ID NO: 138097 - DNA, 410 bp, Glycine max
  unsure (1)..(410): unsure at all n locations
gcaacccagccccttttaattntgtttttcttgcattctagttctgttaaatggcttgtgaattgtgtgtttcagcatggttagtattgaaaaagggttcataagttttgtgaagagatggatagaaaaaaaaaacttaagaaaatttttgtggtccacgcgctaagcgcaacccttgtgctaagcgccatttccttcacgcgctaagcgagctgttgttcgcgctaagcgccttgacccctgatcattggttggatggtactgctaagcgagtgctaagcgctaagcccanaaacctctctggattttaattctntcgaattangctaagcatggaccactactgcatttaatgagcattaattcgctaagcgcaagtngcaggaccaatcaaagttgttgtacccact

SEQ ID NO: 138098 - DNA, 193 bp, Glycine max
  unsure (1)..(193): unsure at all n locations
gatgagaagcaatttccctgtaataaaatttgaatcacagaatataggtaggggaaatttggtattcctcttgcgtatggataaaaatgaagagtgttctggttgcccaatgccaaattttgaacatcggggagccaatattgatgccagcacaaccatgtcttatggagagngttctaaatctattatcgaa

SEQ ID NO: 138099 - DNA, 363 bp, Glycine max
  unsure (1)..(363): unsure at all n locations
gacttcaatnntatgtgtcacgcatactacattttttatcttaanaactttntaaatagtggacagcatgttctattntattaaatagtttttactataaaacaaaagccttaacctagtgttcttttcgttaattatcatagcccttaacctagtaagtttaccttcttntacacagtttgatctaacttaatctgatatagctggttaggcttgatgaacaatatggcctatcgctatttctacaggagctagataatatatggaataacaattaaatgacatggaatggaaggatctatctatgaaatctataagaacttgtcatgcggttcatgtgagggcataagactcccattttct

SEQ ID NO: 138100 - DNA, 474 bp, Glycine max
  unsure (1)..(474): unsure at all n locations
ctcaagcttctntgagaaaacttccttgagaagctagagctagtcactcactttcctctaataactaagttcacctccttgagaagcttccttgagaagattcctaaagaagctagagcttagctacacacacaccctataatagctaagctcacccccatgccaaaatacatgaaaatataaaaaaaagtccctattacaaagactactcanaatgccctgaaatacaaggctaaaaccctatactactagaatggccaaaatacaaggcccaaaagaagganaaaccaactcttaacattacaaagaagaatggatccaaccttgacccatgggctaaaaaatctaccctaaggttcatgagaacnctanggccttctttagtagctctagtcgaagcctcttggagtcttctatccaatacccttggggggtaggattgcatcaacctcggggaatcacacgacatggaaa

SEQ ID NO: 138101 - DNA, 212 bp, Glycine max
  unsure (1)..(212): unsure at all n locations
acatataacattacagacatcatacgagaacgctaaactgaatggggtgttaaatcatccaacatgacaattgaacaagtttcagcaatgtcttacnatattcatatgagcagaaacttacatagctcgcatatatcttcagaacccatacccactaatcagaggaaagagtccaccaacctgaattcgaagcccctcgagcgaccacttac

SEQ ID NO: 138102 - DNA, 405 bp, Glycine max
  unsure (1)..(405): unsure at all n locations
cttccgcgaaggctcctttcattatccgccgaaggggcctatagcccaaaccataccttccacgaatttccttggcaattaccaagctaggtatgcccgccgtggctttggcctaaaccaatcccgggtcattaccggtcccccacattacctcggccatcantactgctgcatncgacaggcaaggctgcccagagaagagtccacggaagaaatgttgaccacctcanaagactgganagcgngttctaacgattcttctgcgggcttcacataaggcatagaggatgggcagctcaccaagatgtcttcctcgcctgacatgataaaccaagtgccctccactacgaatntcaacttttggtggagtgtagagggcacaactcccactgagtggatccacgg

SEQ ID NO: 138103 - DNA, 137 bp, Glycine max
gataaggagacattcctatgggtgctttgtaggcagtcctatgtgctcaaagagcatcatcaagcctggtactccaatctttcctgcttggctacacaatcttctctaaaattctcttgatctccctgttagagatt

SEQ ID NO: 138104 - DNA, 445 bp, Glycine max
  unsure (1)..(445): unsure at all n locations
ctatccatcatnctcttcaccaacctcttcgatgccatccatcatcttaaaaagcttatcnagtgttctagacatggcagatgcatcaatatattttaaaaagacaaatcccttttgactgttcacctagttcaatatcgtcctcctattttctgacaaaaagaagggggacaaatattgaacttcctggtgaacagtccgaagggaaccatctntctgaaacatattggatattgatgcattgataacatctagataaaccaacaatcttttaaagatgatggatgactgttgaagaggttgatgaagagaatgctgtccaaattgggatggacaatgcagcanactaaaagaagctggcgaaatattggtagcgaagaggaagaaactttattgaaccttatgagaagcnactgcattgcttgatgttganaacattgataaa

SEQ ID NO: 138105 - DNA, 437 bp, Glycine max
  unsure (1)..(437): unsure at all n locations
gagccataaccctagccaaggggcatcaacctccatttctccgagaatacgactcgaacgcaacgtgtgcttgtcacggagaagccccggngcgttccattgagcatggtagggctctgaagcgtaaggtgcaaggtctaatcgatacgggctggctgaaatttgaggagaatcgcttggtgaatcctaacattgacaagcaacaccatacatggngcaattttgaaagttgttgttaggtgtccctaatgactcatcanggtttccaagtttatgccattattgtaaaccacagctaccatgctaaatgacatggataaagttgatattcttgtccctcatcctctcacaaacgcatgtttgctcattcaaactttcaccggaatgtgggtgtaagccattggtctgttagctcaagcatcctgcgctcctgagtg

SEQ ID NO: 138106 - DNA, 455 bp, Glycine max
  unsure (1)..(455): unsure at all n locations
cctttctgcattgtcttcttcccanattcctttntatatctgcaatcaaataaatgaaatataaattggctaaacagattcaaatttcaccacactanacagttcgcaacatgaaatggtttaattgtttaggcttcaaatangcctgaaaatggtttaactttaatggcaggatgtgggtagtggaaaattttggcaatggagtttttagggaatttaaggacaatgtcaagattatcagcaaggaaatattcatatagtgattcaaaggtagatggaacctanagctgagaccaattttttggtgatagaaaatataagaaatggaatggcccanactcactctccaaagctngctcaacaggggagaattgcccaagtcttataaggagtattctgggtgtattcctagccaatgcaagacctcttaacagaagcangcctgtagttcagta

SEQ ID NO: 138107 - DNA, 138 bp, Glycine max
  unsure (1)..(138): unsure at all n locations
gactccagaccaggaacgaaagggttncctggcccgggggacaccttccaagtttttgggaagctcactaacaatcctgatatctccttccagggatccgatgaaatgaaacccatcaaatacatctgaaaatacact

SEQ ID NO: 138108 - DNA, 157 bp, Glycine max
  unsure (1)..(157): unsure at all n locations
acacttaaaactcagctgtgcaatanatactcctacattcatctcagtangtantttctttctttctttacccactcctcacgtttggttttttagggaaaaacaccataactaaacgcgccacaaggcatccctatcgcaccagatccaattctaa

SEQ ID NO: 138109 - DNA, 454 bp, Glycine max
  unsure (1)..(454): unsure at all n locations
cgcttccttggggttgtctaagtgctattgccactataatttgttgtgtctttgtgttcaattcagtcattcaacaacaaaagccttttccaaatatattactactaataacacttctgcaatgttactaaactactaaccataacactnttttattaaacaatcctatcagcatttgagaggttgagacaacaacattgagtcaaatactacgggagccacaaaatactaaggctgcttaaacaaatggattatttaaaggggtagcanaattaatactagaactggacctgngtacgaatcgagtggngaaaatggataaggacatgagtttaaaaaacaacaaataaagcacaacanagttggcagtaataatggatggatcttttcgaggcannnataaaatggtggtanatcttgaatcaaaatctcctactaactattactattacta

SEQ ID NO: 138110 - DNA, 469 bp, Glycine max
  unsure (1)..(469): unsure at all n locations
aatggtaagtctctcctcagcagctcacttcngatctcttctctgcacatctagattctcaagaccctctcatgggtatgttctctggcatcattcacatattcattaaaaaaaaaggaccccgtagttaaaaaaaaaaaggaagaagacataactaggaacaaccataggatgaagtgattcagatctatctatgtttaatgttaccaaatcaacagtttccttcaacacggcctccaaaacttgggacttgtccnccatcttcttcttctctgtgtctctctagagctaccaactntgctctcacactacannaaaccgtcagaaattagagagttagcgtgcgtggatgaagtgcaccaaccgaaagaagtggcactaagtacaagtaaatagaagaaaaaagtgtgcaagtaaaaggggcgatggatggatggtatggtaggagtagaacacctactgtgggatc

SEQ ID NO: 138111 - DNA, 444 bp, Glycine max
  unsure (1)..(444): unsure at all n locations
cactaagagggagggattgagcntgaataggctctctaatcaactaataaactaatacacaaagcaaagaccaatttctgccccaatattcaagtgcagagatattgacttctaagctcaatttgaccctcgaaatggcagaattggtccaagatntattttgacaaaattaaagataattttcttatctttccagcgactactgacatgctccatttggagttctacagtgtcatataggccctgcacaaggcagataggtcaagtaagcacataaatccaaanataagccacaattatcgattaagcttaatcatgtgccttagatcanaactaagttaaagtgagaaaataaggttcanagaggtgtctattgagttaaaaagaatagaaaaatactaaactacaaatgctcaatcactcggctaactctataggagacat

SEQ ID NO: 138112 - DNA, 446 bp, Glycine max
  unsure (1)..(446): unsure at all n locations
gatggcgcctnctctcacctcttctcctttgtcttccgctgcatctccatggtggaaaatcaccattaaaggacctcattgaagctcaaagatccagcctccatagaagccccacaagcaagcttccatcagaaacaccatgcttattgagtctatctttggcttagcaaagttattgtattgagtcttactattgtaaatgcactctntgagtgttagaatctgtaattgtcaaaattgatagtttgtgaaagccaaaaggcttaatgacaaaataatacttgngtattcttaaattcagggggagtctaagggttgtgccagtagtggccaagagaataattgtaaagctaggagtggcatgttagaatacttngtgtaattagatatttgattagtgaaatctttaatgtttngtanaggagaacaggacatagccaatgttc

SEQ ID NO: 138113 - DNA, 307 bp, Glycine max
  unsure (1)..(307): unsure at all n locations
aaccctatacaccttgggacccctaacttggtccctttaattggaagggaaccttacaaaccttaaatgaccaaaataaaaggcccgaaacaagacaaaactattctatatattgcaaagaaaagtggacccaaccttggcccatgggctcanaaatctaccaagaggttcatgagaaccataatgccttcttcaacagctctagcctaatcctcgtggagtctcttgctcatggctctggtgactggacccctcctaaggaggatngcatcattngacttaatttagtcataacatgttctaaatc

SEQ ID NO: 138114 - DNA, 109 bp, Glycine max
tcacatgaacgaggacaccggccaaggtgccaactaaatgggagtggcgacccgcacccagcactacaggaggggcacccagcaccactggaggcgcacccaccaaaca

SEQ ID NO: 138115 - DNA, 350 bp, Glycine max
atttatgagtttaataatcataaaaacgacatgggaaaaataatttatcttactaatcaatcaaaaatttttatttttattaataaaaattattgttattataaatcttaatataattattgtaaaagttaataaacttattatatataaaaaacattgaatgaatgatgattttttcactagtgcatcaagtattttatttatttatttattagacaagcaaaactctaatattattaaaggaatataagggtaacccttatgtatcatgtgatcctaataacaatgataccttacaaagttaatacgttgaaaggactaaaacactaattagaaagtgagatacactt

SEQ ID NO: 138116 - DNA, 444 bp, Glycine max
  unsure (1)..(444): unsure at all n locations
tcatcatagaanaagagaagtgagtgagcttcccttatctacacaaacccaagattgactcttagaagaaggaaggacaatgagtgagctctgggttcgagagaggaactntcctctaatcccacaataaccaccgtacataagcatcaaccaaaccccatagccaaccaaaaatagaatcaaaacctcttanaatcaagctntgtccttgaactttccatgggagctctataaaaacaaaaatgaagaatacgggaggaagaggaaaagcttaccacactaaggacaactatgaagttccaaccagaaggaagaagaatctcctttgaacaaatgcaccatagactcaatcgttaatgattagggttcttgtngaagagcggaaatgaaagaatttttgagagaagtttctaaanatatangggtgtgagaggttatgactat

SEQ ID NO: 138117 - DNA, 447 bp, Glycine max
  unsure (1)..(447): unsure at all n locations
tctagccanatggacttaccttgaataatgcctttgnatcccttttgagccttgtttccctttccttgttttgaagctcactacaacccttaagtgaaaaaccatgatatcaccttatccttaaggaattttgaacctttgaaatggttttggaattaattgtgggggggttttggttcatggaataacttgtttggtggctatacttatgaagattttgggccctacctgatgtacattgatattggtaaatgttgacatgctgaatgcatgttgttctcaaaggattaagcaataacaaaaaaaaattctaaatgataagaaaagcattaagttgatgattaaatcttaatgcaaagaatgagaaccttgttctctcttatggaaatttatcttacctctatctttctatacgcctattctatgctcttatccttggattaccct

SEQ ID NO: 138118 - DNA, 389 bp, Glycine max
  unsure (1)..(389): unsure at all n locations
gaagtttcgaacttccattttatttttatgattgtctcttatcgnatgaagtagaacagattgatcatttttattttctgttatattatctactgtttttagtatttatatgctttttttggtatttatatttgctgccttttctgttttttatttatatttactgttatctactgtttttttagtttctatatatatatgtgtctgccattggccaccacgtcatccgcaatatgtttatggcagatnttgggttcttctcctctatgctctatcatccgctattaacaacactggccaaaaggcaaatagaaacgcctcgacttgtttaaaataggtccaagtcaaaataacacccaagaagtaggctttgccaacacaacaacatt

SEQ ID NO: 138119 - DNA, 374 bp, Glycine max
  unsure (1)..(374): unsure at all n locations
tatgctcaaatataccccgaaaaagaagcttgaagaagggtgaaccactctttacacccaaaagccacccttgtgaatggaccggttggctctaacctggaccggaagtcaaaaccttccccgtttgttacccaaggccaaggcgatggcagacacctactccngccccgaagagattcatgggcttctcggctatggtcagcatatgatagaactaatggcccacataattagaaatcgttaggaaacttgtatggtctctcagaccttgactagatatgactnntcttttgaaataaaatgagtnggtcccatgtntctactccaaanagctngtgcaaatcaaatcaactctacatttcatctctagcatg

SEQ ID NO: 138120 - DNA, 409 bp, Glycine max
  unsure (1)..(409): unsure at all n locations
atagctccactagactagttatgactaagagacatgtctgtgagttcactgaagccacccatgtggaagcaatgccttccaaggttattntgatgatgccaaagaatcaagagttaagcaaattccaaagattcaagaaatgaattttcaagaatcaagtttcaagaatcaagattcaagaataatcaagatcaagattcaagattcaagaattaagaatcaattaagataagtattaaaaaagtttttcaaacattgagtncacatgaagttttacanaatctttaccaaggagtttactctctggaatcgatactagaagagtaatcgttaccagtagccgcattgttttcaaattgtttacaagctgtatcgataccataacatgtatcgataccagatttaaatg

SEQ ID NO: 138121 - DNA, 145 bp, Glycine max
  unsure (1)..(145): unsure at all n locations
ttttatatataaagaaatttaccacccatattaaaatagggaagggcatatagctattttaaaaattaaatcaagatatgataagtacatataattaggaaaataattgagaggatgatgagtacacctcntaaaatctttatct

SEQ ID NO: 138122 - DNA, 481 bp, Glycine max
  unsure (1)..(481): unsure at all n locations
tagccgaattcagatcgaattctagttggcttagctcatttttggtcatcntagcggaccanatcagccttagatgcaatggttgagcgctaagcgcttgagactcgcggcttagcgcatgaacaaagatgtgcttagcacgaggcgtgcgcttagcgaaaggactattttttttcagaaaaaaatgttttctaagttatatttcagtcctttttccaagaaattgaaacccttatgttaaacattcaaagataggctgatatacttctatgtacagattataacagagattaaaactgggttgcctcccaggaagcgcttctttaacatcattagcttgacactgttacctcactgngtgatcttatgtttttggtcttactttcagaagctcttgacctcctttcattacctataagcagacattgtgttctggagcacgcttggtttcaacagacatatcacaatcaattgtctgatc

SEQ ID NO: 138123 - DNA, 341 bp, Glycine max
  unsure (1)..(341): unsure at all n locations
tctgcacaannangnatgttctggtatttcttgatgtgtggtaaaaaaaaaaaaaaatccttggccacttctggagcctgaggaatgcacatagaaatggacttgagaacatggctcttttcagaatcatttttatttggatatgagctagctctgtttttctggatgtagcacacgattagtgtcagataacatttagtggtgaataagttttctggatgtacaaataacatggaataaaatcgtaaatttttacttattgcattttcattggagtgatctccaagtaatagtcgatgctattgtgtttaccataggatatgttctgctttgactgaaag

SEQ ID NO: 138124 - DNA, 420 bp, Glycine max
  unsure (1)..(420): unsure at all n locations
tctntgaganaacttccttgagaagctagagctagtcactcnctcccctctcataactaagctcacctccttgagaaagcttcttaagaagattcctaaagaagctagagnctagctacacgtacctctctaatagcctaactcaccccttgagatgagaagctagacttagctacacaccccctataatagctaagctcacccccatgacaaaaaacatgaaatacaaaaaaagtcttactcaagactactaaatgcccgaatacaagctaacctatctactaatggcaatcaagccanacaagaaaactatttatattacagatagcggtatcttgccctggctcaattcctaggtataaacctaggctccttgatttaccaacactgagctcaccatgcctgggaagatgtatacga

SEQ ID NO: 138125 - DNA, 500 bp, Glycine max
  unsure (1)..(500): unsure at all n locations
ctaagctgctcggagacgtgtaacccaccatcttctcatagtaggactcctgnattgtgtctactatcatgggtatcaactccctctccattattgtgggcattacttgagcttccatatcctttcacctttgggcatacgctttgaaagattcgtgctcccttttgcacaagttctatagctgcatcctatatggagccatatcagaattgtactgatactgcttaatgaagacaaccattaggtctttccaagaagggactcgagaaggtttcagattagtgtaccacgtgacagctaccctagtgagactttcctggaagacatgcatcaatgactcttcatcttttgtgtatgccctcattttcttgcagtacaccttcatgtggttcttgaggcaagtagtccccttgtacttattgaagtcgagcaccttgaactttggagggatggcgatgttaggcactaagcacaattctgccatgctagaanaagcataa

SEQ ID NO: 138126 - DNA, 327 bp, Glycine max
  unsure (1)..(327): unsure at all n locations
caatgcttctgatatatcattnttgacccatatcaagcaatttcaattatgaatgcaactatatgataaagcattgctaacaacaaagtgttcttccttcatttctttccttttagtcttgtttccatctttctgtgggcaacatacctcaagctatctacaggttgatccttcttcaaacaacaaaatgcctttaaaaggtcacatattcatctcctatgcntaaactttcgtttctcagtacttggttctcttgttacanncgtctccttctttttttttctttctattttcattccttggttgactcacaatagtttcacatta

SEQ ID NO: 138127 - DNA, 414 bp, Glycine max
  unsure (1)..(414): unsure at all n locations
gaaaactggggcaaatggagagaatcagaaagaggcangaacccatgctataattgtcgttcctacatggccaaatcccccaacaattcaacaatatcattactcccaatgttagcccttctcattacccaccacccaatcatccacaaaggccatccctaaatcagccacaaagcctgcctgtcgcacatncgtttccaaacaccacccttaacacaaaccanaacaccaaccagagaaggaattttccagcgaaaagacctgtagaattcaccccaattccggtgtcctatgctaacttgctcccatatctacttgataattcaatggtagccataaccccagccaaggttcctcaacctccattttttcgaggatacgactcgaacgcaacatgtgcttatcatggatgag

SEQ ID NO: 138128 - DNA, 451 bp, Glycine max
  unsure (1)..(451): unsure at all n locations
aactgtctacttcattaaagaagcagtcattgtagctctggctattctaaacccggccaagggagccttgttcggtaccgccctttangctctctggaggagcangaatgataagctctgggagaataaacagttttcagcttctcacactagctctcgggctttctaattcctagtggattggaatgttgctaatgctcttaggaggcaatatccatctcaccatcatnttgtgtcccataccagatggtgcatgtgttccagagatgggctatgtaagatgtaacttaaatgctgtgtttcttggcttggcaaatattactagttggggcttctgctcagagacaagaatggagcttttgtgttggctgtcagaatgggatcaaccttgtttgccaacttcagaagggaaagctntangtctccttatagctcttaagtggttgatgga

SEQ ID NO: 138129 - DNA, 480 bp, Glycine max
  unsure (1)..(480): unsure at all n locations
cttctacataaccggcatagtattggataaaatattattttttcatatcaagtaatgataaattnctacagagtaatataaaaataaattataattccacaaaaaaaataatttccatgggggttggaataaaatcatttggattaacctcttaattaatttaatataattattaaagtatgaacatttaaaaatttaatatggaaaaatagttaaaatataatcttttatatattaagtacaaatgggattttgattaatctntcataacttcatatataaaaaattgatccaatattatatgaatttntttacataaacatataataaataaaatttattaaattaatttataacaaaataggttaaaacatttcttanatatcatcatgaataagaatttttttnatttcttcatgcaatgataataagagtaagtttagatgaaatatattattattttttgcaagagaaaatcat

SEQ ID NO: 138130 - DNA, 160 bp, Glycine max
gcacaggggctactctataacagcaaaaaagtgatgagcatatacatgttaaattcaataagcccaggatagaaaatctaaccaatctatcagcttggcggataccagcttttgacatcatacataatcattcctcgacagatatatgctcatatatata

SEQ ID NO: 138131 - DNA, 85 bp, Glycine max
  unsure (1)..(85): unsure at all n locations
aggagcgatggngacccggagtagagagaaagagtgatatggtctacgtgggagnacgcgagctcagntggaggtgggcaacagg

SEQ ID NO: 138132 - DNA, 421 bp, Glycine max
  unsure (1)..(421): unsure at all n locations
gccactcaaggggacatctcacctatagcttatgtataactatatgtacatctggccattacacagaaataacaccatctaagcaaacttaactgagtagagactaggttctctcctctttcatacccatatgtccctctcactcagaataaaataatacttctaaagtcatgaaccttttttatctaagcanatattatattaattctccaatgatatagagattctccatcccatctcacaatcatttcctcctccgtcaccaaacctacaccctgctttatggtactacaagtgataactagatactcctattggaaataagccttcacccaagcttggaaataaagatacctaccccaccncccactttacaactgaagcgatcttcttccttaagtactttgaatcgataaatatg

SEQ ID NO: 138133 - DNA, 463 bp, Glycine max
  unsure (1)..(463): unsure at all n locations
tccgctctccttctttcctataatggggaggagggatatttttatgttcaaccctcctagtatctgagactcacttaaaattagtgagaaaaattgtttccgtgaagaaaatccaagccgaggcgcttccgtgacgtttccgtgggttatttcgcgaagattttcaaccgttcttcatcgntctttgttcattcttcgtcgttcttcggtcttcaaccggtaagttcccgaaatcgaacttttcaattcattctatgtacccttagtggtcctcattngtttcgcgtgcttttatttccatttcatttacctttccgtacccctttgacgtgctttagtcatttatntaagtcattntcttgcctaatcaaaaataaaantaaatttcaccgatcgttcatattgtaacatcctttaatttctgtaaaatgaattccgaccgttcggcatgccgaaccacgtt

SEQ ID NO: 138134 - DNA, 463 bp, Glycine max
  unsure (1)..(463): unsure at all n locations
agttggccnttggtggtgaaaaatatcaagttgcttattcattctttatatgacacataattaagtagtatttgtttttctcataagttagaaagaaaacttaaggatgtgtcacataaaaattagtaaagactataaataaatggtggtttaaaactacctaataacttctcgtgtgttttgcttccaattctaaattattcaaattccacaacaaaatgtatttggaataaataatgttggattagttctcattttatatgatgttaaaagatttttttgttggatcaagtggcctcaaaataattaagaagggggggttgaataattattcctaaacctttactaattaaaatnttactcttctaaggctttnactaagttgttaagagaataaggagtagaagagaaacttaatagaaagtaaaagccgatattaatatgcacagcggaaagtaaaaga

SEQ ID NO: 138135 - DNA, 435 bp, Glycine max
  unsure (1)..(435): unsure at all n locations
atctctaagtcacctgcggcatgcaagcttctccgcccattgtctataaatagtttggttaattgaagagaanaagggttcagccccttaggcacttctctctctttcgaatatgcttacaaaaattgattccgtaaagaaaatccgagccgaggcgcttccgtaatgtttccgtgagttatttcgcgaaggttttcaaccgctcttcgacgttcttcattcgatcttcatcgttcttcaatggtcaacgggtgaatacctcaaaccaagcttttcaattcattctatgtacccgtggtggtccacatttggtttcatgtatttttattctcgtttcattcactttttatacccccttttgacgtgcttaagccattttatttaagtcatttctcgctctaacctaaaataaactcaaattccaccgatncgttg

SEQ ID NO: 138136 - DNA, 436 bp, Glycine max
  unsure (1)..(436): unsure at all n locations
tctctagagatagagtgaaccaatatataanagtttgttcatcttctcttgatcttatctttctttctcaatgtattcctgatcactatggttattgcatgatgtgatttaataccaattcaccccgctctctttattcgtgagttccatcatctttgttcaattggtatcgaagcaaaatcttgaaagttgctcaagatcacagttcttataaaatgggatctaaacaaatcactttcatagagggttcatctctcaaccgatctccattgtttaagggagaacatttcttcattttgggaaaaaagaatgggaatctttatttagtcaattgattccgatgcatggaatgctatcgttaaaggaccttttataccaactatagaagtcaatggtgaattggtgcctagagaatgggatgagaataaagatgatg

SEQ ID NO: 138137 - DNA, 479 bp, Glycine max
  unsure (1)..(479): unsure at all n locations
agcttctcaaggaagctacatgagttgtctctgtatatacgctgtccaaccttcgttaaccgttggatcttctcgaaatttggtttgcaacttcataagacacttgtccacgatttgactgttgggatctttgcaaggatgtgtggagtgtgcacgaagcttccgttcccgaaagcatttctcacttgagcgtttcagtctttgctttcgtgtagtttaagaaaaacatcatttttttcctttctttcttccaaagccatttctaacgtcccaagcactttgtccatcacccacaaccaccattagccaccacaaactgtcgttgttctccgctgaaaccccacatcgagaggaacccttcaaccgaagcggaatattccaacttggccttgcggttcggtagagaacgaaaccctaatctgaccctttcattttctttcgaggtaaccatgattccatgtntgttccttgtagtttca

SEQ ID NO: 138138 - DNA, 464 bp, Glycine max
  unsure (1)..(464): unsure at all n locations
tcgcgcacactccacacattcttgcatagatcccaactgtcttatcgtggacaagtgtcttatgaagctgcaaaccaaattttgagaagatccaacggttaacgaatgttgggcagcgttcttaccgagacagttcatgtagcttccttgagaagcttcattaagaggctttatcaagaagcttcctcgtggcttctttgagaagctttctcaagaggcttctttgagaagctaacgctttaactactaacacccttttattaactaaattcacctccttgaaaataattactaataaaataacacaacaaatataatcaatcatcaaacataattactaataatatatagatatatatatatatatatcagggtgttacacgcttatggcgtgatgcgcgctcaacgcgcgtctggcatttnttgcttgtacacctnncagttttatatctgcagtcaaaatt

SEQ ID NO: 138139 - DNA, 478 bp, Glycine max
  unsure (1)..(478): unsure at all n locations
agcttatgcgcatatttccctacgaacgttcatttgcactatacatcctattaactaagaaaaatgcacccatatacaatcaaggtagcttcattacctagattatttacatgtacttccaaggtgtatttgttatttacatcacacacgcctccttggctaaatttacatacatgcatactcaaagcatttcggggtaccaaaaattgcacatgcgctcatcttggtatttctaatacctatacatatacaaacttcatgatgaatcttgactacctacgcaataaggtgctacatttcatgctctttnttttttntttttttttgaggggaatattaaccatgtcccctcccttctcatggattagcatcttgcctaacttgaacttacttaggttagaaataggcgttgattacttatntttttactctttaaaacaaacaataagtaaaagaaagctcgcaaatacaaaggata

SEQ ID NO: 138140 - DNA, 459 bp, Glycine max
tgtgtattgctgcattctactaatatatggaatggccctttgctttttctgagaataacaatggcttgaccacaacatcgctgggggcggcaacggacaatggtctttcaaataaacctgttgtacatgaacaaacattatatcatgcgttgaccgtgccaaacgaaccagcgaagtcattgcataattgttacactaactatattcaatgtacctgaacaaaatgatttccaaacacgtgaccgacacatatgatgcggtggccagaagagtcaggtggtggttgacttctaagagggaaaaatgtcatgctttgttgttgggacaacgatacaatgattacgttataccgtgaatcaatcacatatcccatgtctgttatatccatccacttgtccacactaacctgaatgaatcaaacatacacatgtaagtaatttaaacattgttattataaaa

SEQ ID NO: 138141 - DNA, 477 bp, Glycine max
  unsure (1)..(477): unsure at all n locations
gtcacctgccgctgcaagctggaacaattcattcttattttattatttaaacttctatgtattctaaacatgttttctttgtccattgatattctgaactttgaaatcttgacttttggttatggtttatttctaaaattggatttcatatttgtaaaacaaaaaaggctaaaattttatttgtttttttttatcagcaaagataaattatatttatatatattgtgagtaccagaggtacaaagcagtacatgtaattagattgacttgccagcaacatggttccaagctaaaattttatttgtattggacgtttagtaatgtattgtattattttggtagcattctttcagcggagtttattcgagctttcttatntttgaaatatttaaacttctatgtatttctaaacatgtttctttgtccattgatattccgaactttgaaatcttgactntnggttatggtttatttcta

SEQ ID NO: 138142 - DNA, 471 bp, Glycine max
cttgcaatccacatggatgtttcaaatctgtttgatttgttattattatgggtttgaaaaagatccatcactggcatgttgcatcagtagcactactaataacaacgcttgacaacaacacccagatttcaaaacaaagaagaaaaaaaggacttttttctgcttggaaaaaatgagaagaataagacccataaactaaaacttcgaggggaggaatttagcaaattaacaactaggacatatacatgaacaagtagcagttctttagaagaataagaagagaaatgaggtttttagaaactgaaaattcagtctgaaaattaaattctgaaagcttttcgtcaggaagataataaagtaggagatgcaaaagaaccaagatgtgtggtgaattactgtggatccatgaagatcatgatacataaggaaaaatgaacattaaacataggagcgtcaaaactgaacacaatg

SEQ ID NO: 138143 - DNA, 467 bp, Glycine max
  unsure (1)..(467): unsure at all n locations
tgagctgcagctttctcatcctgactgctacatatttctgccttctttcccctcatcaccgacttccagtcagccttgatctatcatttgctgcaacaattcccctactgccagacatgtttccatgctatatagctcactgggatgcaacaaacaagaatcctctttatgcccaccgtggggaatcacacctccctgttgtagggcttcaaagataaacctcctaggggttgccatgtcccttaaaggtttagacttgtgcggcctatctgacccaatggcattaaccgctcccccaccatgattggcaagcgggttggttttcacattgggtcgatcctcttgaaatgtcagcaacctagcatctatcaaatgttggaccttgtatttaagggccaagcatttntcgatggaaatgccccgngcattcccgtggtacgtgcaagtcgcgttaggatcataccact

SEQ ID NO: 138144 - DNA, 424 bp, Glycine max
ctaaacaaaaggtagtacgataaagcgacttttttcttccctaaatttacaggtttgcttgtcctcaagcaaagaaagaacaattcacttgtccttaagtgataaagacagtggccaatcaaaacaaaatggtgtttgattcatcaaggacatcaaccatatgaactgaatatcatggaatgcttaaatcaatcacttctcacaagcatgcagtttttcaaagataggagcacaagtattagagtcacagctgaaataagctagtaagcatgacagaaatcaaggaaggatcatcaaccaaaacctcacagtcattatttcactcatactcaagtgtttatgcttattccatcataaacaaccaacacaagttccagcctttgcatttcatctgctatcatacaacaatgaacacatataaatg

SEQ ID NO: 138145 - DNA, 435 bp, Glycine max
agcttcgacattcaatatcgagcgttttatatattactggactgaatcagacatccgagtaaaaagttattatcgtttgaatttgctcagagcttcggcattcaagtccgagcgtctcgatatattacgggactctatcagacatccgagtaaaaagttattgttgtttgaatttgctcagagcttcggtattcaatttcgagcgtctcgatatattacaggactccatcggacacccgagtaaaaatgttattgtcatttgaatttgctcagagcttcaacattcaatttcgagcgttccgatattttacaagactcaatcggatagccgagcaaaaagttattgtcgtttggaattttctcagagcttcggtattcaatttcgagcgtctcgatatattacgggactcaatctgagttccgagtaaaaattta

SEQ ID NO: 138146 - DNA, 425 bp, Glycine max
  unsure (1)..(425): unsure at all n locations
ctgagcaaattcaaacgacaataactntntactctgttgtctgactgagtcgcgtaatatattgagacactcgaaattgattatcgaagctctgagcaaattcaaacgacagtaactttttactcggatgtctgattgactcccgtaatatatcgagacgctcgaaatggaataccgaagctctgagataattcaaatgacattaactttttactctgatgtctgatttagtcccgtaatatatcgaaacgctcgatattgaatggtgaagctctgagcaacttcaaactacaataactntttactcggatgtctgattcagtcccgtaatatatcgaaacgctcgatattgaatggtgaagctntgagtaccttcaaacaacaataactttntactcggatgtctgattgacacctgtaatata

SEQ ID NO: 138147 - DNA, 504 bp, Glycine max
  unsure (1)..(504): unsure at all n locations
ttaagtcacctgcggcatgcaagcttgatcaaaagttcaaaaatatatgttctatataggagngtccaacagcttaaaaacaaattntctcaagagatatttttaacaacttgtgtgtccaatagtgagatagaagcaactaaagtaaacaagttataacataagctagagaagaaacacatccagttctcatttaaatccttgaagggtttcattaatcacaaattgattacaaacaagtttttacctatcacttttgggtacaacaagtattctctaagttacttctggttcacccttaatctttccttgagattaagaacgcccaactagtctttgataactaagccacttttagctttccaaacaatagttggaatgaatacaatattcaaatctctcaaagagagaatatacaattgagttcatataaaaatagatagctttggtatgcanagaataaactttctaagttctggtggttaagcattcaatacttctgat

SEQ ID NO: 138148 - DNA, 459 bp, Glycine max
  unsure (1)..(459): unsure at all n locations
ctgatggtgcgtatcccacaatcttttcatagtatagtatctataatgtgtctaccatcacgattatcgtctccctttccatcattgggggtaccacctgtgccgccagatccctccaccttttgggtgtgttcttcgaaagatccgtccccttttttgcacatgttctatagttgcatcatatccggaaccatatcaaaattgtactgatactgcctaacaaaggcaaccattatgtccttccaagaatggactcgggaagattccaagttagtgtaccaggtaacagctaccccagtaagactttcttggaaggaatgtatcagcaattcctcatcttttgcgtattcccccatcttctgacaatacatctttagatggttcttgggacaagtagtcgccttgtacttgtcaaagtccatcaccttgaactngtgaggggtgatgatattgggtact

SEQ ID NO: 138149 - DNA, 384 bp, Glycine max
cctagtggatggcgcctcctctcacctcttctccttagtcttccgctgcatcttcatggtggaaaatcaccattaaaggacctcattgaagctcaaagatccagcctccatagaagtcccacaagcaagcttccatcaagtggtaatctgagcacaagagcttcaagtaggtgctccttacacctccattaattttttgctttaccttctcttccattgatggttcttcatctttctccatgtatctcctcacatgtcttatgctaaatgttgataacatgattctttagagtttccaccgattaaacatgctatagaagctagatttgattttctatggatcacatctcttaatctcgttcttgaacaatgaattatgaagag

SEQ ID NO: 138150 - DNA, 461 bp, Glycine max
tctccacgttttttaaaaatgattttcggagctttcgttatgcttccgtaaaatttttgaaaaccttgggtaagtatatttcacttaacattggtgaaagggaagagaaaaaaagatgaaaatcaaatccgaaacacttccgtaaaatacgaaatggggggtgaacttagtaatttgggtgtgcttagaaatcttcttcattaagtctctgggcggcaaacacctatctttttccctataaatagggaggtggctgtttcaaaaaatactcatcaccccttagctatgcatttcggctattttgggcaaaaaacacgcgtgaagaaaaaatcaagtcgaagtgcttccgtaacgcttccgtaagcgattctgtggaaattcttcatcattcttcatcgttcttcaccgttctttgtcattcttcggtcttcaacaggtaagttcccgatatcgaatctttc

SEQ ID NO: 138151 - DNA, 483 bp, Glycine max
  unsure (1)..(483): unsure at all n locations
agcttcgtgtggttntatgccatgttgttgtggtcaagcacttattcaacttctatatcatctgttttagtttgttttccaatgatctatctacaaatttataatttaactatacatgttcggctatctacacaaagtgacatttctctgttgttttcttattgattgcaggaagatgtaataaagcctcttcttgaagttacaaaaacagctatgcttcatgactgtacactcctttgtggatggaggtgcaattgactttactttttactgcttgtgaattatgtgtactgaagatatgattntaactctcaggagcatgagagtgcttccattatctattacactcttgtgaatttcttatcaaactctgattagaaaatatcatatgacacgatcaaatctcttgttaatgatgaaagtctgtggttgaacttgatgaagattgtaatgcaaccgtatttttatgtgattatagaatat

SEQ ID NO: 138152 - DNA, 453 bp, Glycine max
  unsure (1)..(453): unsure at all n locations
gtgtgccaacaacttgatgacataaaggggattatttttcacattctgggttcctatagcagtgccaatattgacaaatttgttgccttcatttggtgtatttggagacaaaggaacgagaagctttgggaaggagtccaaaagcccagccatgttgttacacaacttgccttacattacctcgactggaagcaaattcattgtaaagaaccaccactgcacacgcagcaagctagcatcagcagaaataactatctctggattccacccacagaccattacttgaaatgcaataatgaagatgcaacaatgatgaatgacacaacaaattttggcatttcagcatgtataagggactcctgagggaggtttattattgctgcaagaactcaagtctaccaaggagatctgacacctcaagaagtagaagcattggctctcanatggatttcg

SEQ ID NO: 138153 - DNA, 133 bp, Glycine max
gcctgtcactatgcagactgtgtatttataacatttgtcgctggaacctacaacgttgataactgatcgcagcgtatacccttgtccttggttatattgcctgggaaaacgggcaaatttgtctttggcagtt

SEQ ID NO: 138154 - DNA, 453 bp, Glycine max
  unsure (1)..(453): unsure at all n locations
tgtggnactaggtggcggncgggcgatggtgcacaacaagttctccacatccacaatgcgcgcataaacccaccatcccctgttgcccacctccaactgagctcacgtactcccacgtagcccatatcctcgttcctctcaacaccgggtccccatcaatcctcccaagctttcccaacatccaagtgattcaacaatcaaacaacacaaactatcacagccaagaaaacagggcaaaggcagaaaactctgcccaaaacaccaaccaaaatcacagcttttctcacttaaagaccccagtaacaattccttcgttccaatatcgtaaccgttggatcgactccaacattttaatggaagtctctagtcataagcctacatgttgaccgttgtgatctactatcaaacatacagaactcattctgcactactcttttcacagccaattacaca

SEQ ID NO: 138155 - DNA, 463 bp, Glycine max
tagctagatagattgtccaagatggaagatactttattctattttatgcaggtatccatctcataccaaaagaacattgatgcttctattaaaaatctagaggtttatgtgggacaattggcaaaacaaatgtctgagcatgaaagtggatccttctcagcaaccacaaaagtcaacccaagagaacaatgttaggcagctacaactaggaggggggcagtagttggtttgaagaacgaaagttagtttagtgagaaaaagacaaatgaagagttgtaaaaatgagtgatgaaaaagaagtagtcgaaagagagaaaaaaaatgaagtattagctaaagagatggagaaggaaatgagtgaagtggaggagcagaaattgaagaaaacaacatctaacaaatgcatagttgtactatatcatccaccaattcaacatcttccttatccacatgctccataaat

SEQ ID NO: 138156 - DNA, 451 bp, Glycine max
  unsure (1)..(451): unsure at all n locations
ctaagtactgagcatgcagctcgataactaagagagcggctttcttgcttcatctcttcganatattngttgctgaaagtatccctgatcccattgataacgagtaagaccgaataattcaataggggttgttgctgaaccataccacatagttccagcaacgacaaaagctgcaaaaaagacagcagcaatactgctggaaaggacaagttcaatatttcccatccgtaatcctttatatagacgttggggtggacgcacactangatggaaaagacctgctaatatgcccaacgttcctgctgcaatatgatgagaagctaccccccccggaacaaaaggatcaaaaccttccacgccccacgcgggatttacggatagtatccttccagttagatcataaggatcggacacccatattccatgaccatacaatcctgtatcatgaaat

SEQ ID NO: 138157 - DNA, 409 bp, Glycine max
  unsure (1)..(409): unsure at all n locations
tcttacatagcatacggctttctggatgtagatgatgttttctattctgatggatcttatatatctatatatctatagatagatatatagatatagatatatagatatagatcatacaatgaagtaccgcacgagtgggtatataggaatccaaatctgccgaatcactcatgttatgatcttctacatcctaggtcttcccgttccttcatctggcttatgttcttcatgtagcattcagactgaatgactctatgaaattacgtcgctacttccacatggtacgggtaacgtatgagacatctctatttttcccggngggaatccttagaattaccacagcttagctttcaattcgcctctgaccatcaaatgaaatgtgaataacccgtcctcccctctttgaaac

SEQ ID NO: 138158 - DNA, 401 bp, Glycine max
  unsure (1)..(401): unsure at all n locations
gatgaatgactcgggcatactttaaacttatgcatggaaaatgtaattatgaaattgagatgcccgaagaaacaccatttcctaggtaaccatgcattagggaccatgatcaattattttgtttttaagtgaaatgggtgtatgatcccaacatggttggctcatggtgcctaacacatgagactaagaatgtagtggggagtatcacgcttccccttcttttggttttgtcttgttgaggagaacgcaccgatgatccaacatgaaaacaaaatggggtgcaattttgcagatcactaatgttgtggaacgcatatgcatgataatgccatgactcatgcanaatgtgaggttgaaaatgataacggacaaatgcaggatatgtccattatgatgttatg

SEQ ID NO: 138159 - DNA, 465 bp, Glycine max
  unsure (1)..(465): unsure at all n locations
cttctaagctgctgtgggctttatgagctggtcttgagcttcntttgttccttaatgcgggcnttctgtagaagcaaatgactctgatgtttcgatgatgatcacgatgatccgatgcaaatgatgcaaatgcgcttttcaagtttataatcaagacaatgattcaggaatgcaagacacaaacgttaagatgatcactagtacatgtggaaggaaattcctaattgatatagcaatagggttggccaagtaatgcatgttaaaaagtgttcttctagagatgtactctttggtaatcgattaccataggatgttatcgatctcccgtggcaataaatgtgtactatagctattaataatatgaattcaaatgttagactgtgtgatcgattacaccatatctgtgaccgattaccaccatctaataaacgtgtaatccagattttaaatctgtaatcgattaca

SEQ ID NO: 138160 - DNA, 418 bp, Glycine max
actcaagcggtagtatctaatagcattattggggagcggaggagaaatctcatgatattttctatccaaaaatgaataactaatcctcggaagtatagaaatgtatttaaaagaccaacctttgctagagattgttgttactccaaagtgatatcatgaattacaagacttggtgcaagaactaaaggtgagagacacaataagcgctttgaataatctaaaacgaacaagggataactgcattaaaataacaaaatgtatactaaaagaaataagatacaagtgggacaatataatcgtgaaaacaagaagtgagtgttggaagtgcataatatataatatataatgatatgaatatgagtgaaaaatatgtgcataaatagaatcatatgctatacacatatacaaatatttcacc

SEQ ID NO: 138161 - DNA, 509 bp, Glycine max
  unsure (1)..(509): unsure at all n locations
gtcacctgccgcatgcaagcttctactgcgagggaataaaattatttacttgtttgatgtagcactttcttgtttactgatagcaaatttcaaacaaatattgaatctaaactcataagaagcatactaaaacactggtatttatttcttcccatgcttaccccttgcatagaagagaattgtgttcttgcaaactgggaattaagttggtcatggcgattaacctgactagcatcctgctgtctattaccaaactctcggttatctctgaggttttcccaagatctctcatctgtactagcaggaggttgtccagaacgaccacgccaatcacggttatctggcttcagaataccgatttgtaattgatgaggaagctgcagaagataaagtaaacattattatataacatcttgagtgtgaaaatgattaccagagagattaanaacagataatatttaattgcagcaatcacaagagtanatgtatcaatacaatagtatgatatt

SEQ ID NO: 138162 - DNA, 453 bp, Glycine max
ttaaatctaagcttccttgcctttaagtactttaaggactcgtgatctctatgtatgacaaactatttgggtaacaggtaatgttgccaagtttgtaaagctctaaccaaagcatagaattccttatcataagttgaatagttaagggcagcggctcctaacttttcactaaaataagcaatcggatgtccctcttgcaacaaaacagccccaatacccacatttgacgcatcacactcagtttcaaatgattttgcaaaattaggcatagcaagaatgggtgcattagttaacctatgcttgagagcagcaaaggcctcttcttgtttcttaccccttttgaaacccacattcttcttaacaacttcagttagaggtgcagccaatgtactaaaatccttaacaaatctcctatagaaacttgctaaaccatgatatcccctcatctcactc

SEQ ID NO: 138163 - DNA, 196 bp, Glycine max
acatccgagtggagagcattgatgttcgatactgctcacatcttctgtcctgaacgtcactcgtattcatacgctactggatacactcggacacccgagtataacgttattctcacttgatttagccaaagcgacggaaatgaatttagagagtacttaaatactacgggacacacacatacatcccatttaggac

SEQ ID NO: 138164 - DNA, 258 bp, Glycine max
atatcttgacgctcacaacccacaacagagattctgagctaaatctgtcgacaattgcatcattctgcagcgatcgaacggcctccggcgcatattgagacgcttgatattcaagatacaagctctgagcgaaaggcaacgacaattaccttttactccgatgtccgattgtgtcccgcagtatatcgagacgctcggaactgaaaccaaaagctctgagcgaaatctatcacaatagcttttactcgggagacgatt

SEQ ID NO: 138165 - DNA, 471 bp, Glycine max
  unsure (1)..(471): unsure at all n locations
agctnttaactaggatgtcaggttgagttttttaatatatcgagacgctcataattgaaaacgaanactcatagcaaatgcaaaccgcaataagttttgactcggatgtccgaatgaatcccgtaatatatcgagacgctcgtaattgaaaacggaagctctaagcaaattctaacgacaataactttttactcggatgtcagattgagtccagtaatatatcgagaagcttgaaattgaaaacagaagctctgagcaaattcaaatgacaataactntttactcggatgtatgattgagtcccgtagtatatcgagacactcgaaattcagaatagaagctctaagcaaattcaaatgacaataactnttaactcggatgtccgatggagtccggtaatacatcgagaacgctcgtaatganaacggaagctctgagcatattctaacgagaataactttttactcggat

SEQ ID NO: 138166 - DNA, 464 bp, Glycine max
  unsure (1)..(464): unsure at all n locations
tccatgttcaattacaagcgtctagatatattactagattcttgcggacatccgagtaaaaagttattatcgtttgattttgctcanaacttttttttccaatttcgagtgtcacgatatactacgagacacaatcagacatccgagaaaaaagtttttgtcgtttgaatttgctcagaacttctgttttcaatttcgagcgtctcgatatattacagcgttcaatcggacatccgagttaaatgttattgtcatttgaatttgctacgagcttccattttcgatttcgagcgtctcgatatactacggcacacaattggacatctgagtaaaaagttattgtcatttgaattttctcagaacatctgttgtcaattgtgagtgtctcaatatcttacgggactcaattcgacatccgagttaaaagttattggcattttaatttgctcagcgctattggtctg

SEQ ID NO: 138167 - DNA, 427 bp, Glycine max
  unsure (1)..(427): unsure at all n locations
agcttgaccgaatgtaagaaacatcnncttctatcttatncanncnngactccatttcattgaagcgcatatccacttgcagttccaaagtatcaaacctctcaccaacaaaggtttgaagaccatcaaacctttccaaaatctttgaaagaagagatgaatcttctccctcatgtccttcttcaccaatatttctagcacccttctttacccatgatccatcatgctccttaatataaccaaaggatgctatgactgaagcgcctataaggaatgatctcttgattggaacataaggttcagaatcaagagggatgttgaaatgttgaaggaagagggtaacaaggtgaggataaaggcatggggcattcaatcgcaatgccttatgcatgcgatatctaacaagatgtgcccaatcaatttgtaa

SEQ ID NO: 138168 - DNA, 371 bp, Glycine max
caagtgtggctagaaccaagcttaagcgagagccatgcgtagtcgttgttgaaccaaacttaagcgaaatggcctacaaaagaagtttagctactagatttaggtttaagcgtggggtgaaccaagcttaagcgttggtcgagccaagtttaagcatatgtcgagccaggcttatacatggaaccctgcagaatgtgtacgaatgactttcaaatgaatgttcaattggaatttctttaatgtatgagaattatgagttgcacaaataagttgtaaggttatgttaagagaatctacttttaataagtatctatgagtttgagttcaatggatttaagtataattttccttcacttaattgatattattga

SEQ ID NO: 138169 - DNA, 473 bp, Glycine max
cttaagtcacctgcggcatgcaagcttgtaggttacaatgacaactattgttctagagatgaagatgatcggaaaagtactagtggatttgtgtttttcatggggaatacaaccttcacttggatgtcaaaaaagcagccaatagtcactctttcgacttgtgaggcagaatatgtagtagctacttcatgcatttgtcatgcaatctagctcaggaatttgttaaaagagttgggcaggtcacaagaagagccaaccaagatctttgtgcataataagtcaaccattgctttagtaaagaatttagtgttccatgatcaaagcaaacatattgatactcgttaccactacaaaagggagtgcatagcaagaaaggatgtgcatgcagaatatgtgaagtcttaagaaccaaatagctgacatttaaccaagccgctcaagcaagaagactctatcaagttaagaagcttact

SEQ ID NO: 138170 - DNA, 402 bp, Glycine max
  unsure (1)..(402): unsure at all n locations
tgctacattgatgcatcttggctatagcatctttgatttatgcacttaaatnttggaggcttaagtttgctatcaaaggagaagatggtgagaggactaccctatattaaccaccctgatcaaccctgtgaaggatgtttacttgagaagcaatttagagtgagttttccaaaggagtaaaacccaaaagctaagaagccactcaagctaatatatggtcacgtctgtgggccaatcaagccaagctcaccaggtaaaaataattatttcctccttttgattgatggtttttcaagaaaaacataagtctatttcttaaagaaaaaatcagaagacttttccgcctttaagaagtttaaagctgtagtggagaaagaaaaaggtcaaaaggtcaaagccatg

SEQ ID NO: 138171 - DNA, 505 bp, Glycine max
  unsure (1)..(505): unsure at all n locations
ttaagcaccgcggctgcagcttgtacattcaacttatatgctccagctctatgtggagngttggaaacagnttcttttcctagtttctagggatgctctgataccaacttatatgccgctgcacaagctgttcagtggacatcctatcatctgttttgcccccacagcaggttcaatatgcctgtatcatttccctcaactacttgcttccatgactcagttcaagcatccttcaaatgcttttagttctgtcctttcaaataaaactgctgtaaatagtcctgttgtaaccacaagcttcagttcaggtctcaagaatgttttcttgggatattttgtaatgtccttcattaaaacaacaccccatactaaaaagaatataaaatcacaaaattatattagtctgaaaatacctcacgtataataaataaagtcaaataagtaagtntgtacttaaataaaaatattattctcaaatatgggcgtctaannaataatcgacgct

SEQ ID NO: 138172 - DNA, 343 bp, Glycine max
atgaatcagaaatctgcacctgtcgccagactctatggctcacgctcctctaccgacaaccacaaagaccattgcccttatgtgcaacaatctgaagcaattgaacagcctgaagcttatgctgcaaacatctacaatagacctcctcaacctcagcagcaaaatcagccacaacagaataactatgacctatccagcaacatgtacaatcccggatggaggaatcatcccaaccttggatggtcgaatccttaacaacagtagcaacaacaacaaccttattttcaaaatgttgttggcccaaccagaccatacgttcctgcaccaatccaacaacaacaac

SEQ ID NO: 138173 - DNA, 488 bp, Glycine max
  unsure (1)..(488): unsure at all n locations
agtcacctgcggcatgcaagcttgaataatctcttgttattaattatatacgagncngngcgctaaaatcacatattctttntttttccctgtaaagtctaattgtgactaacaaaggtgaaacctagtggtgtagttcgtctaacaaagactaggattaaagtccgatgggaaactgacaatattgtgaaatccagtggttgctggtttcattgtgaactgattgtgtcaatgaaatcttatttttaagggtgaagactaaatgtagaccaaggttgagattaacaagtataaaacctatatgcactctctcttctttttcttcctctntactttgttctagcacaaatctaaaactacttttgtataaaacactaaatntgttaaccttttatcttaacaactaaactaaacttggttntatcaaannagtttagtanagaaactatctttaaacaaaagctttaaaactacaaaagaaattattt

SEQ ID NO: 138174 - DNA, 383 bp, Glycine max
  unsure (1)..(383): unsure at all n locations
aggtacttacccgttgaagactgtatattttcttgataacgaatgatgaatcgtgaagaacggtcgagaatcttcacgtaattactcacggaaacgttacggaagcgcctcagcttggattttcttcacggaaataattntcctcagcaaattcgaaagagagagaagtgcctaaggggctgaacccttttcttcttcacttcttcccctatttataacaaaataagggagaagcttgccgcccagctcgcccaggcgagcaaggttgcttcctccagaagcaacagccttctggaggaatcttctggagggcccatgtgggcctggntgctatttacaccacacttttactaaatgcacccccttctcatttttttgaattc

SEQ ID NO: 138175 - DNA, 386 bp, Glycine max
tagaaaaggataattacaattgatctgcaggttccacacacacaaacacacacacacacacacatatatatatatatatatgagagagaatcaaaattaactaactaacttaatattaaaattgtctaataaaaaacttgttgtctaatacaatctttagttcctggtatagcatgtaaatattgaatatgaatacctctccaacagaaattcaagcattggttgcatccagtgaaaattggcagcgttatagcactcgttaattatgtccaaaatatctcttgagatcaacagtctaacacgaacatctcaagctctaatagacttagagctttgaccattggagaaccagctagcatatcttattaatattttggacttgcacg

SEQ ID NO: 138176 - DNA, 428 bp, Glycine max
  unsure (1)..(428): unsure at all n locations
ngtgagttgtggttagttctttgaattagtagttctttttgctgtctgngacaccctctacccctcacatatatactaataaggaataaaaaaatttaaatattaattaaaagtattgttaaaacattttttttaaacaagtctttcaaaggggaaaaaggctcacattcattttcttctacatcatattcaaacttgtccaaataaataataaagtattctcgactcaataaggtcgtctaagcttcatacaattaatatagaacctatatcctaatgtcacatcctaccagagcgttgtgttcccgtgtactctagcatgatgttcttcatagtcatccacctattcatctgctcccccgaacacaagttcaagatcatcacaggatccatacacaacaacacacatggagcgagttatcacattc

SEQ ID NO: 138177 - DNA, 319 bp, Glycine max
ctcggggccagcctggcttttatgttagccgagccgagcgggtaaaaaaagcctatgacaggtaatgagctcaagccttacgtattcaactcaagccaagctcaagcctagtaaagcttggcctggcttggctcattttcacccctagttgcgacataattcatacaaagcataagaataacaagctaaaagcctaagaataacctactttctcacggaacaaccgctccaattcgtgctggaatctcttttcatatgcatagtagtagtagtagtaataggtttttatacattgacatgggcttggacttgccgtaca

SEQ ID NO: 138178 - DNA, 420 bp, Glycine max
  unsure (1)..(420): unsure at all n locations
gattattgttgtctcaaagctgtaatataaaattgttgagagaatattaataaggatgggtgtatctagaagttctttttagtacgaggcggcaaatatctttcaccagaataatattgttcgacttaaaatatatttattacaggtgacaatttctttaaatatttaatctcaaactgtatatttaaagtttaaatttaaaactattagttaaattgaaagcttaattgaggagaaagttttagaagaaataaagtataatgctataaggagaaagaatggattttgaaatgtaggtaaaacactttntattattacacaaacatatagtgtgttcagttttctaaaaatgaaccatccaaagcttaattaacattaatatactgaacatataatacttatttgatatatataacaatt

SEQ ID NO: 138179 - DNA, 418 bp, Glycine max
  unsure (1)..(418): unsure at all n locations
agcttcaacgttcattttcgagcgtctttatttttacgggactcaatcaaacatccgagaaanaagttattgtcgtttgaattagctcagaagttcaacattcaatttcgagcgtctcgatatgttacgggactcaatcagacatccgagtaaaaagtcattgtcgtttgtattggctcagagcttcaacattcaatttcgagcgtctcgatatattacgagcctcaatcaaacatccgagtaaaaatntatggtcgtttgtattggctccgagcttcaacgttcattttcgagcgtctcgatatgttacgggactcaatcagacatccgagaaaaaagttattgtcgtttgcattagctcagaagttcaacattcaatttcgagcgtctcgatatgttacgggactcaatcagacat

SEQ ID NO: 138180 - DNA, 441 bp, Glycine max
  unsure (1)..(441): unsure at all n locations
ttgagccaattcaaacgacaataactntttactcggatatctgattgagtcccgtaaaataacgagacgctcgaaattgaatgttgaacctcagagcgaattcaaaccacaataactttttactcggatgtgtgattgagtcccgtaatatatcgagacgctcgaagttgaatgtttaagctntcagccaattcacccgacaataactttttactcggatgtctgattgagtcccgtaatataacgagacgctcgaaattgaatgttgaagctctgaactagttcaaacgacaataactttttactcggatgtctgattgagtcccgtaatatatcgatacgctcgaaattgaatgttgaatctcagagccaattcaaacgacaataactttttactcggatgtctgattgagtcccgtaatataacgagacgctcgaaat

SEQ ID NO: 138181 - DNA, 475 bp, Glycine max
agcactgagctgcagcttgatcttgtcagaccactcttttaagcttttattgaaagcaaatgctcatgaatggttctataattgggttgtatttaatttttaaaaaaggatcaaaccccatgcctgacttcctctatgagctctgctatggagcgattctgtttcatgccatttaaggataactctgttttttcaaattatcttatggcttatattgaaattttgatatttgggtgatgagttcaattccctcattgcttcgtgtttgggataaaggaccaatttctggttccatgttgctgtcaggttcatgggttaatgactgtttcagacatgtaaagtagtgcttgagatccgagctttgaagctgttgtcaatctcttctttctcatatctgtcaaatatattgtcatagctctgacaattaaaagttctgttcgtcttccatttaaggaatcccatctctctctacttt

SEQ ID NO: 138182 - DNA, 110 bp, Glycine max
aagccaggcaccggcgggcaaattttttttataaaaaaacagggggaaggtcaaccatgaacccacccatgactacacgatcgaacggacaaatgcaagagtaaaaggga

SEQ ID NO: 138183 - DNA, 404 bp, Glycine max
  unsure (1)..(404): unsure at all n locations
agcttctattctgaatttcgagcgtcttttattctttattatacaancggacatccgagtaaaaagttattgttgtntgatactgctcagagcttctgttctgaatttcaagcgtctcgatacactacgggatacaatcggacatccgagttaaacgttattgtcgtttgattttgcacagagcgtctgctctgaatttcgagagtctcgatatactacgggacacaatctgacatccgagttaaaagttgttgtcgtttcattttgcttagagcttctgttatgaatgtccagcgtctcgatatactactggactcaatcagacattctagtaaatagttattgtctcttgaatttgctcagagcttccgtttacaagacgagcgtctcgatatataacggga

SEQ ID NO: 138184 - DNA, 257 bp, Glycine max
  unsure (1)..(257): unsure at all n locations
ggaacgacaaggacaaccgcatcgccaacaaagggaggaagaccaacaaacctatccaaaagctgaagaagaagaaaggaatcaacggcacgaaggccggcatgagcaacaaggcgagcacccaatgaacacaagagccagcatgcgcttntcgagaaccaaaggacgcaacgacaacaacaccgaagagaaaggatctccagagcggaacacaaggaccagaaacaagagggacgtcaaagcgtcgaaggaagagg

SEQ ID NO: 138185 - DNA, 446 bp, Glycine max
tgtattccaccagcttcagctatggcaccctatgatggtatacttcatactttaagcattaaatttcaacaaatgaaaaactaaattagatacaaaatccaaattccaaccttgtgctcttctccaacagagagattccataatccttcagcagcctcttcagccactagcttgttcattgacctggccaacccatcaagaatctcaatcccaccctcttctgcaacagctgtggccacattggcattgacggacaaatttgcaatggcctacgcaaatttagaaagttgggaggacaaatacacattgattgtgtcagatttttcttagctcggatttctagtgaaatatgcatgtgaaaggcatcaaatattaagagtacctgaacataatgcatatatgaattgttctgacgaaagtacaagtgaaagtgactagaaatgatc

SEQ ID NO: 138186 - DNA, 397 bp, Glycine max
  unsure (1)..(397): unsure at all n locations
caagcttggtaggctaagttctcatctttttcatcttttgaatntacttctacaatattattggattctctaattttctgtctttaattaattaatttaaattcttatttaatttctcctcttgtttgatttaattttctgtcaatttaaattattgttttttttctcataatcttttcaaattaattttctttaacttcttttactaatcaaatattcatctacataagtacaaacaaagtcctagtggacacgatactcgaactttcgttttaactttattatttaagacgaattggtgtacttgccaatcgatcaacacttagtgataaaaattcaattcccactatgaattacatgcaccttatttnttggcttagaactctaacaaatgatg

SEQ ID NO: 138187 - DNA, 390 bp, Glycine max
  unsure (1)..(390): unsure at all n locations
atactaagctattcgcgggtggggccaaaaatcttttttctttttatgcatactgcacttataattgacgtacacaaaattatgtggctaagatgcctggtgattgatcatgcactcaggttagttgcatcttatctacactgtttagagctataattccgatggacagctnatatgcccttgttttttcaaagttgtttgacgtgtgatcaccaccttataaacaatggcaacataaagcctccacttgtaccaaatgagacgtgcctaagtgttcctacattttagtgcatattcggtttcatacttttgctgcatgcttgaacatgtttcttatgtttgctggatacaacggaagtatttctgactgatgaatatacgcacacagat

SEQ ID NO: 138188 - DNA, 481 bp, Glycine max
  unsure (1)..(481): unsure at all n locations
agcttaggcataatatgaggtccttgttttgatggtggcaattcatatgggtttttgggatctttcaatatatatttgatctgttactgtctagtgtttgagtttacttgtgaaattaatcagttaatgattcttgagttggttgatgagtatgaattggtcaactcaaaagttgcatacaacatcggcaatttattttcatgacaatcattccgattntgcctattatacaagtaactaaaagctttatcccaatgaggtcagttacattggatagctacgtagattgcattaatgcaattgagtttgaataaagaccaaaatttcaagaatactatttactatgagatctcttgataatttcttccgaagttcttaacaatcatgcaatttattcttttaactagtgctttaagtgattttctttgccggtgtcaaatcactctgatcaattttctgtaatcaaatattgtctcattcc

SEQ ID NO: 138189 - DNA, 440 bp, Glycine max
ggtagtaatcccaattgccgtctgaagtatatgtcttctattgtattcagtatcagtaatcagtataggctaaagagaagagcttcatagtcatgtgggagtggctaacagtgcagaaacttcaaagtggttaacaacttcctggctcagcaagcgcatagcagctccctgagagaatttcctagcaaacaaaaagcaaggaacggatgtggaattcgtatgacaccattctatccggtactcagtctcgtaataaacatggttgatgccctgttaaaaaaaaagtaaaaaagtcacgagacagaactagttgcattaaaacatgtaattatcactttaacaaaacttcaaaaaaaaagaaaaagaaaaaaacttaagcaaaaacataagcagacaaaatctatcttcaaccacaaaagataaaagaggagtcgagaata

SEQ ID NO: 138190 - DNA, 321 bp, Glycine max
tatcgtaattgattacacaattcttgtttagacaatgacggtgcctagaattctttgctgtaattgattaccaagtgatataatcgattacttttctttcaaaagtgtttcagaagtgatcaagaacactttaatcgattacattgagaatataatcgattacattgttcttgaaagtttttcagttttagattaaaactctttactctattcgaatgataacacctctgtcctccttcttattagtcttgtcgggcttgtaccttatacttccactccacccattcattgtcgcttgttctcgcgcttgcttcgtacttc

SEQ ID NO: 138191 - DNA, 64 bp, Glycine max
  unsure (1)..(64): unsure at all n locations
agagaagnacccaccacacggactgttaaaaaaagaaaaaagaggggcgaagcacacccccccc

SEQ ID NO: 138192 - DNA, 478 bp, Glycine max
  unsure (1)..(478): unsure at all n locations
agctngaagatgttagctagactcantctatttgactaatgtgcgtgactcatattctcaagggtgagactatcacgtgtcaaagactcatgcttgaacgaaaggatggtggaggacccgtctgagatgatcaatgagtctcacatctgacaaaaataaatgaaattaagtatcatatagactaacagaagactcacaatcttagaaccttattaacttcactagatgctcatgactcattacgacaacatgtattggttatgttctttggtttggacctttaggaagcacccttccacgtacacaacttgcttgcagaaattatgtgctttctggtctttaggcaacatacttcttcacgtttctcattgcagaactacaatgagcccacaataaacgtggtccatcaagaaaaaagaaatgcatcatctgacatgcatganggcagacactcacacaaacacttacaatataaact

SEQ ID NO: 138193 - DNA, 81 bp, Glycine max
gacttatcatgctacttgtagaggtgatttatgtgaattttaactcttgtaagctgatgttataattctcctatgcatggg

SEQ ID NO: 138194 - DNA, 92 bp, Glycine max
gatcttagagcgactgaggcatgaagcttatgatgatgaatcaagttgcttaattagttctgataacgacaaagatgatgacataaagccca

SEQ ID NO: 138195 - DNA, 164 bp, Glycine max
gcttgactattaaggaaaaagggcgcttaccttcaagagtgcatacacgtgaggaaaactctctcttgggccttcttgaaagaggatcactcaaaggtatttcgagcaaaacagaggaacgagagacatttgctctccatttatatatattctaaaccttcatt

SEQ ID NO: 138196 - DNA, 258 bp, Glycine max
  unsure (1)..(258): unsure at all n locations
gtgtgaaaactattccggatgttatgggacctcttcttgttcntcaattcttaaatattttcctatacgagaggagggatcagaataacgaaagttattttctaaaatatcagtaacttccttatttattaatttatttattttgtttaattgttcaattttaaataatatttccatgaatattaaatgtatccaaacatgttgttaaatttacttacgaataatattcctttttttttaacaagagtaattaggaat

SEQ ID NO: 138197 - DNA, 167 bp, Glycine max
agcttaactaggagagcacttctaattttattatatacataaagcagcagcaagctcacacaaccattggaaaactacgcacactaaaatcaaacaatggcccaaaaatagaaaaaatccacatggcaatggcaaaggaaatataggttaataagaaaggagggaaa

SEQ ID NO: 138198 - DNA, 161 bp, Glycine max
acatgggcgccgaccaaaaagaaaccgcacagatgaaaaccgcacactcacagcaggaccagatgtcccacagatgacaacaccggacaagaagtccaacccagaggaaatcatgaccacaaagaggagaggcgataacagaccaaaatgcaacacacaca

SEQ ID NO: 138199 - DNA, 315 bp, Glycine max
  unsure (1)..(315): unsure at all n locations
agcttattgacaatctacattatgganatactcataaangnggctctacaacatataataaacaatggaacatgactacaataacacagcataanagccaaggtaaaaccagatttggcagtactaggccaattatggtgcattaacactacaattaagaaaaaaggaaaaaagaaatgataaaaataatattaattaataaactggaaaagcataacagtccatgggtacaacaaacaattaacaacgaaaatattgcagtttcttgacatgcaagaattacaaatacaaatacttcataacaatcacatccta

SEQ ID NO: 138200 - DNA, 425 bp, Glycine max
  unsure (1)..(425): unsure at all n locations
ngaagaggttcaatctgaactattaggtgtattctagcctcgaactgatttctttcttcaagggtgatcctggttaaggttaccaagcatagagttgataagggttcaactcttacggttctccagttttacggttcacgctngaacgccgtccccttctccccttactgtgccttgtgtcctcacctcagtattctctatcgcttacctctgccctccccctcccttatccccaggccctgcctccgacactcccgcttctttgttctaccgtccaaccccactcctcgttctcgccgccttccacggtcgtatcccccccccgatcccctcctctctctatcctcttccctcacttcgcctctcatgccctcacttcttaatcctctgtctatcccactcccccctctccctccctcatttcc

SEQ ID NO: 138201 - DNA, 177 bp, Glycine max
aacatgttccgtaagagattcacaccagtgctagtaagtggagtttctgtcaacaaacagtgaccagaggcaagcaatcgcacagttacattatatatgtacattaccttctagtggagggatattcaccctttcctctagcattaaaaactccaactggacgttctacatatccta

SEQ ID NO: 138202 - DNA, 390 bp, Glycine max
  unsure (1)..(390): unsure at all n locations
tgaccaaatgggacatctaattgaatcatgtatcagcttatagctatgnttcgggtcctgctctaattagggttctattctatcacaaaaatacctctttgtattttcaaaacattttaaaagaaattgggcccaaagcccaactgacactagtttactttttctgaagagtgttgctaggtgtttnntncattgttggtggcgctcncacgttggctataacctgtaaaatacctcatctttgtgacctgaagtgtgtcaacaaaccaccatgaatgtccagtggatccatgaacagacgaggattgctcatagtatgcattaatgttctcaggatagaggagaaaacactggattcacggttgggatcatgattcttgaaatacctca

SEQ ID NO: 138203 - DNA, 430 bp, Glycine max
  unsure (1)..(430): unsure at all n locations
agctntgccgatttagttntcatcgacgaatgtatcgaattgggtctgaaaagaggaaaatttaatcatcctgcttggacaaatgagaaaactggggcaaatgaagaggatgagaaaaaaggagaaacccatgctgcaactgtcgttcctacatggaaaatcccccaccagctcaacaacatcattactcagccaatatcaacccttctcattacccaccacccagtcatccacaaaggccatccctaaatcaaccacaaagcctgtctaccgcacttgcaatgacgaacaccacctttagcacaaaccaaaacaccaaccaagaatgaattttgcaacgaaaaagcctgtagaattcaccccaattccggtgtcctatgttgacttgctcccatatctactcgataattcaatggtagccataacccta

SEQ ID NO: 138204 - DNA, 436 bp, Glycine max
tcgcgtctcctccacctacatccgagaacttgcagccttctccatggccgttaagaagtggcgccattatttgttaggtcaccctttcgtgatcctcactgatcaccagagtttaagggaccttatgactcatgcagtgcagacgccagagcaacatcgatacctcatccggctattgggatttgaatatagaattcagtatcggccagggcgtgagaacggcgttgcagacgcattatcgcgagtcgctgcaaacgacactcaggcttctttgtatctactgtccataccccagttctgttttcttgttgatcttaagaaggagttagtcacacacccagaggccttaacgttgctagaagaaaattgaaaggaagccacgatagcctctgagtataagctcataaattgatggatcatccacaagcagcgcctt

SEQ ID NO: 138205 - DNA, 488 bp, Glycine max
  unsure (1)..(488): unsure at all n locations
agcttagtaagcctgaatctagttgcaatattatattntctaatgagggctccacctaatatggctggaaggataatcaccctggagagttggttttggaatggtgtgttaggaaataaggagaaaggggagttagttaagatagactattaatgagttagttagttagttaattggttagaggggtttattagatataaataggggaagaaggataggagagaggggatttggtatcatttgtagattgatcattagttctttgtgaaaggagaaatcctttgtgaaggggaaacccttggaggagattaggaaagaagaaagaagaaagagaagagaaacagagagatcaaggaaactgtgcactgcaattctgttcttattattccagcctatctaaaatacaacagcccttctttttttataggcagctactcaacagctatgaaatcttatctaatagtagctagctgactaactaacatatg

SEQ ID NO: 138206 - DNA, 457 bp, Glycine max
  unsure (1)..(457): unsure at all n locations
taagctccatgtaagcgtatataaaattctaaagttcaataatttgtttttctctaaagnttgattattttgttttaaccaattctctaaatataacattgcccgatatgtgaccatacatattaaataattaacagaactatgaatttataaagtgattattgtccaacaaaaaatataaaggaagtctgtttaatttctttaatgtattttatgtatataagttattccaatagaaatagtctagctctgtcacgtgtaagtttcaacatagaatttgatctgtaaattaattcaaatatttgtttaatgaattccaaacataataattgattactaaatcaaatcaaattcatattttactgattcttaacagtgtatgntaattgcctcgaagaacataggttaagctctaggagaaataatttctcttaaaaaattattggttntctgttcg

SEQ ID NO: 138207 - DNA, 408 bp, Glycine max
  unsure (1)..(408): unsure at all n locations
agctngctaacccatggaagctcctaatatctttacactttnntggggggccattcttggatggccttgattttctcagggtccacatggaccccatttctaccaactacaaaccctaagaaaactatattatctacacaaaaggtacacttctctatattttcatagagggtgtttttcctaaagactgaaagaacttgcctgagatgacctaagtgataatctaggctcctattgtacactaaaatatcttcaaaataaacaactacaaatctacctatgaaatcctttaagacatgatgcataagcctcataaaggtgcttggtgcattagtgagcctaanaggcatccctatccattcatacaaaccaaacttggtcttgaaagcnggtttccactcatcaccc

SEQ ID NO: 138208 - DNA, 393 bp, Glycine max
  unsure (1)..(393): unsure at all n locations
ctaccatccttatactaatgacctttctgatctggccattcagtcaatggaggaccttttaagggcgtgtgtcttatagcaaaaggggagttgggagagttttatggctntgatagagttcacttatagcaatagttttcactctatgattggcatggctccctatgaagctttgtatggtacaaggtgtatgacacccctatgttggctagagcctggagaagacctcaccttatgacctgaagtggtacaacaaaccaccgagaaggtccagttgatccaagaaaagatgaggattgctcagagtangcataaaagttatcatgataagaggagaaaagacttggaattcaaggttggtgatcatgtattcttgagagtcactccatggac

SEQ ID NO: 138209 - DNA, 474 bp, Glycine max
  unsure (1)..(474): unsure at all n locations
agctnganagagcccgggtagtcaaagatatgttatttccatagccatcaaagtctgaagagagtatgatgaactaagggacgtcaatatggccaccgctgaagccttggaacgagaaaccaagaaggcccgaaagtaagaacacgaccaaaacaaagttntgaggggctttatagggcagcaatagtgagctcaagctccgaagaggtgaaaggaatcatcacgggtcaaaggcatgatcttgaaggacgagctaaaggcttgccttaggtcggaaagaaatttgtcccaacagttaagcgagactgaagggaatatgtgggccatcatcgatgagtgcaaagagaagctaaatctagcagcgactcacgagcaaaggctagaggatgagtacaccaagatatcagcagaaatggaagcaagggaaagggtaattgattcattgcaccaagaggcaacaatatggatggaccg

SEQ ID NO: 138210 - DNA, 349 bp, Glycine max
atgtttcatcattgtctttattgttcaattttttttattaaatattgctaaattttccatcaaatggttctacccaatgagaaaagcataaaagtcgaagttgcagcaagtgttctcactttggattttttttttttgtatttttcttcacttttaaaaattctctttccttgtaaatttttgttgaaatattaagaaatgtttgctaatgatggaaagaaaaaagaagtggaaatatttttgtatataacattaaaatttaatttttaatgacaaagtttctagttgataagaaaaaaaaaactacaaattggatttagcacaatattcattactaagcatgtatcat

SEQ ID NO: 138211 - DNA, 434 bp, Glycine max
  unsure (1)..(434): unsure at all n locations
ctgacgctgcagctttaaggaagttttctaaaatttccttatgtttctacctagnctataaatagaagcatgtgtaacacttgttgtcactttgacgaatgagagtcttgtgagacacaactcaaagttcaacttctctccctttttcttccttcaatttcgtgctcccccctctctctttctctccctctttcttttcctccattgaagcatcctctccaagcttcgtatccaaggctcatcttggtggtgaagctccttcttccatggcttattccctagtggatggcgcctcctctcacctgttctcctttgtcttccgctgcatctccatggtggaaaatcaccattaaaggacctcattgaagctcanagatccatcctccatagaagccccacaagccagctttcatcaagtggtaatcagagcacaa

SEQ ID NO: 138212 - DNA, 309 bp, Glycine max
cttctcaaggaagcgaccgagtctatttattgaagcatgtgtatcacttgttgtaactatgatgaatgaaagccttatgagatacacttcaaagttccactttgttccttcttttattccttcaatttggtgctacccccttctgtctctcttttactacattaaagcatcctcttcaagcttcctatccaaggcaattcctggtggtgaaactccctctctaccggcttattccctaggggatggtgcactccctatgctctgatactttgacttgcgatgcatctgcatggtgaaaaaccaccattg

SEQ ID NO: 138213 - DNA, 461 bp, Glycine max
  unsure (1)..(461): unsure at all n locations
agcttgctctaaatntacattgttgtttttattgatgggaggaggttacatgccatttttgctttaagagtaacgtcccactggtaaaactaactttccaaatgtttgccttcgcaggaatggccccgaggaagcttgcctcaaagaggtccaggaaggacaaggcggccgaaggaactagttccgccccggagtacgacagtcaccgctttaggagcgttgtacaccagcagcgcttcgaagccatcaagggatggtcgtttctccgggagcgacgcgtccagctcagggacgacgagtatactgattttcaggaggaaatagggcgccggcggtgggcaccactggttactcctatggacaagtttgatccagaaatagtcctttgaatttatgccaatgcttggccaacagaggagggcgtgcgtgacatgagatcctgngttaggggtcagtggatc

SEQ ID NO: 138214 - DNA, 265 bp, Glycine max
aagctgctggcagtacataagtggatagagcatgatgtacggaaagctatttttttgtggtgttgggggggcgacacatcacccctaccgctgacaacattttaaaggaacatataacccatcattacatactccattcactactagtacccaaacgcgccaactcatctaatctacatcaactacctacacgctaaatagctggtcgtttctcaatatcttgtatgtcaaggtactatctacactttaacacctgcatctactc

SEQ ID NO: 138215 - DNA, 435 bp, Glycine max
  unsure (1)..(435): unsure at all n locations
aaaaagagcattntgaacttatcagtagtaaaagaagaaaggagggagtttttatcaccatacgtcaagaggaacatgatttattactacatcaatttcaattggctcaccacaacacaatttgtcaaaataggttttggcaatgttacaaagttcaatattttatgttacaacataccgttatcacgagttagagaaacaatgttattcatcttctttctcgcgaaggaaactttgacttgacgtccctaagagttcatgtaagaggaaaacctctcaagcttagagatcagattatcggttaaagcattctcccatccttctttgattattgatggaaaaaagggttctaagagccatgtcgttttaaaacgaattntcctatagaatgtgttcttacaatttgcatcaagcaaaagatggatgggtgagtga

SEQ ID NO: 138216 - DNA, 374 bp, Glycine max
  unsure (1)..(374): unsure at all n locations
tctagncaaggtctgagagaccatacaagtttcctaacgatttctaattatgtgggccattaaatctatcatatgctgacaatagccgagaagcccatgaatctcttcgggggtggagtatgtgtctgccatcgccttggccttggctaacaagcggggaaagtcttgactcccgttcaatgtaagagcataccggtccatccacatggttgcctcttggtgtaaagagtcgatcacccttcctctagcctctttttccgcgtatacttgagcatactcgtccgcgattctatgctcgtgggccgtggctagacccaactcttcttggtacttaacgatgatagctagcatgttggtctccgtctcgcataaac

SEQ ID NO: 138217 - DNA, 452 bp, Glycine max
  unsure (1)..(452): unsure at all n locations
agcttntttggagtagaaacatgggactttctcattntatttcaaaaaggaagtcgtatctagtcaaggtcttagagaccatacaagtttcctaacgatttctaattatgtgggccattaagtctatcatatgctgacaatagccgagaagcccatgaatctcttcgggggcggagtaggtgtctgccatcgccttggccttggctaacaatcggggaagttcttgactcccgttcaaggtaagagcaaaccgatccatccacatggttgcctcttggtgtaaagagtcgatcacccttcctctagcctctntttccgcgtatacttgggcatattcgtccgcaatcctatgctcgtgggccgcggctagacctaactcttcttggtacttggcgatgatagctagcatggtggtctccgtctcgcataaacgctgagacaagctttctttg

SEQ ID NO: 138218 - DNA, 333 bp, Glycine max
  unsure (1)..(333): unsure at all n locations
atgattgatacatgatttttgtcttgttggaattgattngggcaagattggatgagaggaagtgtgattntcgaaatctgcacttatgcagaatttttgctgtgaaattgtgcagcagaattttgcacaagtgcagaaaaatgcttgtgtgtggttggctgtggaaagtctagtgcagaatgagttctggatgtttgctagtagatcccaacggtcaaaatgtatgcttatgcactatagacttccagtaaaattttggagtcgatccaacggttaacgaattggatcgaaggaattgttactggggtctttaagtgagaaaagctgtgattt

SEQ ID NO: 138219 - DNA, 392 bp, Glycine max
agcttcaatggcttagtgaggatggactttttcttttcacgaagcaagtggagttggatatttccattggaaagtacaatgatgaggtgctttgtgatgttagcctatggaggccagccacttactcttagggagaccatggtcaattgatgagagggctaatcatgatggtttcaccaacaagatctctttcacttatcaaggcaaaaagatagtgctcaaaccattgagtccacatgaagtgtgtgaggatcaaagaataatgagagagaaagttcttcatgaacagagagaatatgaagatgagagcccaaaacttgagagttcagaaggtgaggacaacacgagggaaacacatgagaggagaacgatgagtgacacacttgaagtga

SEQ ID NO: 138220 - DNA, 406 bp, Glycine max
  unsure (1)..(406): unsure at all n locations
tcttagtttcagatgatgcagatgggtttgtagctacctcatgcactcctctaatgactatggcatcatttctggcactaaactgctgggagttggaggccatcttctcaattaaatttctggcttcaacaagagtcatgtctccaagggctccaccactggcagcatctatcatacttctctccatattactgagtccttcataaaaatattggagaagaagctgttctgaaatctgatggtgggggcaactggcacatagtttcttaaatctctcccagtactcatacaggctctctccactgagttgtctaatacctgagacatccttcctgatggctgtggtcctggaagcanggaaaaaattttctatgattactctcttaaggtcatcccagctcgtgat

SEQ ID NO: 138221 - DNA, 186 bp, Glycine max
agccactcaccacatgggtttgacacaagccttaagtttgaaccttggtcattgaaatctcaagagagaaacttaacaactaagctattatatgatattagtttataagtgaagaataatatatatatatatatatatatatatatatatatatatatatatataatatgttaatcatttatactg

SEQ ID NO: 138222 - DNA, 476 bp, Glycine max
  unsure (1)..(476): unsure at all n locations
agcttgtctcagcgtttatgcgagactgttaccaacatgctagctatcatcactaagtaccaagaagagttgggtctagccatggcccacgagcatagaatcgcggacgagtatgcacaagtgtacgcggaaaaagaggctagaggaagggtgatcgactctttacaccaagaggcaaccatgtggatggaccggtttacccttaccttgaacgggagtcaagaacttccccgcttattagccaaggccaaggcgatggcagacacctactccacccccgaagagattcatgggcttctcggctattgttagcatatgatagacttaatgacccacataattagaaatcgttaggaaacttgtatggtctctcagaccttgactagatatgaacttccttttgaaatanaatgagttggtcccatgtttctactccaaanagctggtgcaaatcanatcactcctacatttcatct

SEQ ID NO: 138223 - DNA, 452 bp, Glycine max
tcatcctcagatccctcttgttggactatgcttattttatacagcattataatcacaacataattaataaaactaaaaaaactgcaatctatccctagcaatgcaattatctagccctgctctatcaagttctaaggaaatagtacacttcctagtgctaaagttcctaacaatacacaccaatgggtgattagaccaaacgcatgcaacaatgaagtatcgatagaagcactgaacacataaaacacacttaattagatatgaaaagtgtttacatcaattgttcattagaaatccccaactaggattttagcaagccataacaaggagagcttttctacaattagacagagaatacaaagaaatggttgcttaaacgggaagggggatccctcctcctcttcttggcacctcacaataacttaaacactctctaatctcgctcaaagatg

SEQ ID NO: 138224 - DNA, 481 bp, Glycine max
  unsure (1)..(481): unsure at all n locations
agctngatcaaaacaattatctatccattccaatccattcaaatcatacaattgatcattcaaatcattctcaaacactcatttcataccaaacaatccactgcatatctttttcaatcaattcactgttcaaacattcttttggtacaagcaaacaactcaaagtgctgaaattttaaataactgaaacataaaaactgaaattaaagtaactaaacataaatcataaaataattgaaaataaactaaaatgttcaagatgcacaaatttaaatgtcctactgatggaagcttgcttgtggtaggattgcatcacctactcatcctgtggctgatcttcattaagatccagtgctggagctgctgatgaatcctggataggctgctttggctctatgacgggtgtagatggctgaatctcctcaggagcaggtgcaaaggatgactcaagtatctgatctgtggagggtaccctctcttg

SEQ ID NO: 138225 - DNA, 454 bp, Glycine max
  unsure (1)..(454): unsure at all n locations
tctgagacgtttccgggagcaaatccgtgaaggtttttcgtctttcttcactgttcttcatccgttctttgttcgttcttcgtttttcaatgggtaggctttcgaatccaagactttcaattcatttcttgttttttaactttcgtattcattttgttcattttcgattttcatttctttcgtttttaacgtgctttaaccgttcatttaagtcgttttctcacctaataaataataaaatgaatttcagctgattatttgtgttgtaatctcgtttaatcaccgttaaaacaaaatctaatcgatcgttcacgctataacctcggtcaaaccaaaaaaagcaaaataataataaaataatcaaaatatcttgaanaataataatgaaataatcaaaatatctttgaataaaataatccaaaaatcaatcggacgttttttctttggaagttct

SEQ ID NO: 138226 - DNA, 388 bp, Glycine max
  unsure (1)..(388): unsure at all n locations
ctaagcttaggagaaaccattaatactaaggtaggaactaaactttttctttgtgaagcnncgccgagcgtccgcatagaacaacctttattcatacctttcatagttagtgataaagctaaacaaaaaattatggaacttagataaactaattccttaattgaaggcgtatgtgacaatcatatcgaattactaaacaagattagtagttagcataatgtcattgcagatactccacaagcttctgaaaatactttcaaaatggtaacaagaagtaccttcaaattaattaatgttattaatgaagatagtgaccaaaacttatataacacaactgagatatgatcagtgtctgaaaagaatataaatacattataactgcaaacac

SEQ ID NO: 138227 - DNA, 461 bp, Glycine max
  unsure (1)..(461): unsure at all n locations
taagctgctgaactagctttaaatncttcgaggggaanngttgcgttgtttttctacannaaaaaatatgattgaaaacatgattaataatccgaaatatgaaatttttactgtaaaagaattattctgctcaaaatggttttgccacaagttataataaaaatcaaagcttaccacccatccatacgtatcaatacgcacaattaaatgctggaaatcaataattcaaaactgattcaatgaattccccttgcgccccctcgatcaataaccaagaaatagtaacttgaaaggtgtgcgtcaaccaatatttcatatatgataacatcattagcatgcaatgtttctttgaactatgctaatgttaatatgattagctagcacgatcttttttttcgtgcctccttatgcctatgatgaattgaaatgccgcatctatatgcaacctatatatatatata

SEQ ID NO: 138228 - DNA, 442 bp, Glycine max
  unsure (1)..(442): unsure at all n locations
taagcttatgacgaatcagatgattcaggaganggatgtttatttctgatgacattcaagaatgagttcaagactgagtcaatatcacttcaaagatcaagatgaaatgtgatctcaagaatcaagattcaagaataatcaagatcaagattcaaggctcaaagattcaagaatctagagaagacttaatcaagataagtattaaaaagtttctcataacattgagtagcacaatatgttttcacaatatcattaccaaagagttttactgtctggtaatcgattaccagtgcgtttaaaacgttaagattgtcacaattcaaaatgaagagtcacatcggttgatgtgtaatcgattacacctttatggttatcgattaccaatgacttgtttcaaaatattcatttcccatagtcacatttcttcaagtgactcggttct

SEQ ID NO: 138229 - DNA, 313 bp, Glycine max
  unsure (1)..(313): unsure at all n locations
acaaattggcacgcccagngggaccggncaattgtgtgtttnggttttaaattatttttaaagttttgtttgttgcagttggtttattggccttcttaattgtttgattttgtatgcatttaagaagtgggaaatctgttccacacttaacagaattcaaaactcgtacaaggatggctagaccacccccaagcaatcgaaacaatgaccttccaaatatggaggggcaaccaacgcaaacatctgtcagtaatgccaatataaattctggtataggagcaattcctgaccaaacttgtggcacaattagttc

SEQ ID NO: 138230 - DNA, 443 bp, Glycine max
gtacatacaagggttatatagaagatatcttttgtgctcattttttccaccctcaacaaattatgcatcaaattttgttccctcatgaaaatttaagctaactttggatgactaccaaaattgtttagacattaatgaattcttaattattatatataagaacaatgtggcatccaaaaactaatatattgtgtaaaaataattcaacgaggcatcgataagatgctctgaccaaaatatattaacatgaggttatggaggaagcagcagagcatattacgttaagaataacttacaagttataattgatgtatgggtttaccgaaccccttatcacactacaaaaatgttcctcatgtgatgttattccacagtaacataagggttgacatgaaatcatttgaaagctacatagaaattatatggtttaagattactttcaa

SEQ ID NO: 138231 - DNA, 471 bp, Glycine max
  unsure (1)..(471): unsure at all n locations
agctntangtgtggtaggatggtgaccttattctatgagtgtntttgtcatgtcaaatttaacatgaaaaacttgtgcaatgtgtctatattctgaattcattcattggatgtttatttacattattagaggtctacttttcaattagtgttcatacataaaatgttattatagaaggaacatgtagctgcatttggttccccatgttttggctattaattacacaaacaatgttgatggtggtgtcacatcagagcacatagcacgtgcgtacacatacacataaaaaaaagcagcagtacatacctttgtaccatggaatgaaaatcatgcccattggagacaacctgcaattaaataatttacatgagcagcatatattcaattcatatgagagcaaagcactgtatgtttcttgaacantaatataatagattaaatatgccaataataaagattgttaactctata

SEQ ID NO: 138232 - DNA, 453 bp, Glycine max
tcagtggctcaatgagcaaggggaaatgataatatatcttcaagtaaagatagtcttttctataggagattactgtgaggaagttttatgtgatataatccctatggaagcagggcacattttgttatgtagaccatggcaatttgacaagaaagcaatccacaatggtctcaccaatgaaataaccctcacccatggaagcaaaaagttcaaacttgttcccttgacaccttcacaagtgattggggatcaagtacaaataaaactcaaatggaatgaggaaaagaatagaaaaagaaaagaagaacaacctttaatggttaaggaggagtgtaaggaggtaagtgatgtgaacctgagtaggagcggatcgtttgatacatgctacggagaattggatgacaccacttccaatgaaggaagataagtcaaggtagatgccactttcggtga

SEQ ID NO: 138233 - DNA, 405 bp, Glycine max
  unsure (1)..(405): unsure at all n locations
tgagcccatcncctattgcanagtttactggtgcaactagcagatgacacttgacaattctcagtttggataaacggtttcattaagcatctattaaataatcgtttatcatataaatactcatatataagttgttttttataattttaaaaaatgaaattaaattgtttccatacaagttataagtttaaaattatcttggaatgcttgttaaaataagctgtaagcctgtaacgtatcaaaagttatctccacaagttttcttacactttntttctttccaaaactaagtntctcactgttacacaaatgcttctgcgataagagattagtcacagttttttctttataagaaaatggaatccaatggaaattagtgtgttaaacactgacacattaacaatc

SEQ ID NO: 138234 - DNA, 424 bp, Glycine max
  unsure (1)..(424): unsure at all n locations
tgatcaatctctaatgcatgtgagaatatcacgcgtcncttatccagancaganngaggagccaangaaggattatgaaatgatatatcaagcgaccattaattaatgttgacgcgtgtgcactgccccaaattgtatggctccataaaggaatatatataggctgggtctccctgattctcacatgccctgaacgtgagttcacatcaaaaccaaagtctatatttggttcgttgttgtctctttaaatgaataaaatgccaagtcatattacgcaccctacttgggaccagtgaacatagagtttctcatctattatccacccaagatggtcccgcataattgaattcgacgaagacatatgatgggtcctaacgccataacatttcatcgtcactatattatagaatagttacgtgagatc

SEQ ID NO: 138235 - DNA, 395 bp, Glycine max
  unsure (1)..(395): unsure at all n locations
agcttcanatctcccttcatttccacacctaattgcaaganaaagnngnttttggagtctaggagcttacctctacctcatcccaccttcaatttcaggtaagggtggacttctcctcacttgaaatctgtgggtgttgggttcttgggagctataatgggtagttctactaagttattgtttaagggtagttgtttgtgaaggaaattgttgtagttatgctaaacttgacatgtttaatgtaagcaaaactgcccatgttgatttagggttcaataatgatgttttgagatatatgtgtgcttaaaatgtagatagaaaactggtagagaggatggggagagttagcttagagttaaatgtgagaatggcagtgttgtaggtggaaaagtgtg

SEQ ID NO: 138236 - DNA, 361 bp, Glycine max
  unsure (1)..(361): unsure at all n locations
tacactntgtacccctagttctcaccaccttcgaaccttngtgtaagactaaaactacaataataaacatgtgatgttgatagggtgggcttccatgttattgctaatttctagtgttactgctaatgtgactatactgattaaaccttcattgctttatttcattacttcatggtatttataatggctaatacactggatacaggcactattggcctcagcgagggggacaggaaattaacagaatgaaaatatcaataacagaattggtggaattatcctattaattataactaacttccgacaggatagtagcaagggtaatggctggttgtttctggtggtgtatcaaacgtggtat

SEQ ID NO: 138237 - DNA, 481 bp, Glycine max
  unsure (1)..(481): unsure at all n locations
agctngaatcggacctccgngtgttatgtttatgactctttgaatntcttgagaggtttcgttgtttaatttcgagcgtctcgatatctgatgtgcctgaatcggacatccgagtgaaaatttatgaccatttaaatttctcgaaagctttcgttgttcaatttcgaccatctcaatatattatgcgcttgaatcggacatccgagtgaaaagtgatgaccatttgaatttctccagatcttccgtggttcaatttcgggactctccatatttgatgtgcttgaatcggacctcattgtgaaaaagtttaaccatntgaatttctcgagagggttccgttgttaaatttcgagcgtctcgatatctgatgtgcctgaatcgggcatccgagtcanaagttatgacaattntaatttctcgagagtttcactgttcaatttcagcatctcatatatgatcccctgataggcatccgatgaaa

SEQ ID NO: 138238 - DNA, 400 bp, Glycine max
tctacttatgtggcagggcgggcttccttcaccttcttgtctttaacgcgaattttgaccattgttcttccttcccgcaatgcttcttttcatgtctgcctgagtgggcttatagcctaaaccatacttcccacgatttccttgagtatttatcaggctagttatgccgccgttgttttttcctaaacccatcccgggttcaaaaccgttccccaacataactcgggccatcattaccactgcatcggacagacaaggttgcccaaagagggagtccacggaggaaatgctgaccacctcaaaagactggaaagcagtttctaacgattcttctgcggcttccacataaggcatggaggatgggcagcttaccaagatatcttcctcgcctgacacgatg

SEQ ID NO: 138239 - DNA, 446 bp, Glycine max
agctgagtgagccaccatagagtgtgtcttattttgtaatacatccttgtgaccctactatcactttgtatagtggaagaatctccatattggagaattataatcggatgttctcattactacctttaattattaagtgcctatcttaacttcacgaagcggaaaagtccgagttttcccaacaaaaataatagataaatacctttctcccaaatcctgactctaaaactagagttaaaccaaacaatgcctcaaacttaatgatcttaacaatgtaacacacgggtactcgtaggccctctagctagtctcttagtctccattagagacctattatttctgatacaccaaaatagttttggcaatagagtgatcttaactaaatagcgaactagcgaaactgaggtcataatatttttttttttgaaatatactatattatattt

SEQ ID NO: 138240 - DNA, 415 bp, Glycine max
  unsure (1)..(415): unsure at all n locations
cgacctgtcatgctaagcgccactttgcttctgtaagtttttatttgaataagggtaagcacgtctatgcgctatacccttggtgtgtgttgagctaagcgccctgctgcactaagctcaactctctcactgttgttttaaaattttggagtcaagctaagcgcaccctgtgcgctaaacttgagtgttattcggctgaggttgagctaagcgcgccatgctgcgctaagcctattctgcagaaagaaatgtnttttgtgtcttcgagcttattgccagcctgctgcgcttatcgcctgagtaaaatttcataatgcgcgctaagctcatcatgttgcgcttatcgcccagtcaaaatttcagttttatttttctgtttgtaaaataaccccgcgtaatctcttgtgttatttta

SEQ ID NO: 138241 - DNA, 455 bp, Glycine max
  unsure (1)..(455): unsure at all n locations
agcttatgctgcaaattatttattatatatcctnctcaacctcagcaacaaaatcaaccacagcagaacaattatgacctctccagcaacagatacaaccctggatggaggaatcaccctaacctcagatggtccagccctcagcaacaacaacagcagcctgctccttccttccaaaatgctgctggcccaagcagaccatacattcctccaccaatccaacagcagcaacaaccccagaaacaaccaacagttgaggcccctccacaaccttccctcgaagaacttgtgaggcaaatgactatgcagaacatgcagtttcaacaagagaccagagcctccattcagagcttaactaatcagatgggacaattggctacccaatngaatcaacaacagtcccagaattctgacaagttgccttctcaagctgtccaannatcccaaaatgtcag

SEQ ID NO: 138242 - DNA, 400 bp, Glycine max
  unsure (1)..(400): unsure at all n locations
tctatccaaatggacttacacttgaataattccttttgtggtctcctttgagccttgnttccctttccttgttttgaagctcactacaagccttaagtgaaaaaccatgatattaccatatccttaaggaattttggagctttggaattgttttgggaataagtgtggggggtttttgtttcattggacaacttgttttgttggctatgcttcatgatgaattttgggccatacttgatgtacattgtatatcggttaaatgttgtacatgctgaatgaaatgttgtttctcaaaggctatagagtaaaaataaaaaatcgatgaaataaatatcgtacataagaataagaaacgcaatattgttgagtgataagatcttcaatggcacaagaatgatga

SEQ ID NO: 138243 - DNA, 472 bp, Glycine max
  unsure (1)..(472): unsure at all n locations
agcttggtgtttgaggtaactgtggtgtttgttatcangntgaccatccttgtcggatcctatttctgcatcttcctaattgcttccaccaactttagtttatacgacttcaagcttaagaagatttggttcagctatcactttgctcaagacatcactgacagaatcaaagtaatgatcacctttcataagttttcttcttgaaaactttttaacaccagggaaaagaaaggccacacaatttttggagctcagagagccttgattctttagtttctccgagtgccaacctcttgccagtaaatggggccaaacagctgcctagaaaatatcattactnttggctttgcacaaattgttatccnccagtcaaatgtttgattatatcactaggtccaagagaagaaaaagctntgctagtttgtattgaanacacttgggttntcttcacatgttccacagttgggtgagt

SEQ ID NO: 138244 - DNA, 458 bp, Glycine max
  unsure (1)..(458): unsure at all n locations
gacactataaaactacgcttcacaaattaaatgtctatccctcaattcctccacgatttttctctggccaagatgacattgttagtccagcatatccagcatgggagcaacaagactccttgttcttaacatggctgctttcaacacttttctgaatcaatgctaccttgagtggttcgctgcattcattccttgcaagtttagggggagattcataagttcttccacttgttgatgaatgctaaatcgagacatctttgatctgagttaaaatcaatcacaaaggaagattgatcaatttctgaatatcctactaaataaatgatccaagctttaacacttctttttttccactaaccaagcctgacttcaagtgcccagtgagacttatactaattacaccccttatttgtggatatntattttagtggccctgagtctagtagctctcatatttc

SEQ ID NO: 138245 - DNA, 429 bp, Glycine max
  unsure (1)..(429): unsure at all n locations
agcttgccgatntagttntcatcgacttatgtatcgaaatgggtctgaaaagaggaaaatntaatcatcctgcttggacaaatgagaaaactggggcaaatgaagaggatgagaaaaaaggagaaacccatgctgcaactgtcgttcctacatggaaaatcccccaccagctcaacaacatcattactcagccaatatcaacccttctcattacccaccacccagtcatccacaaaggccatccctaaatcaaccacaaagcctgtctaccgcacttgcaatgacgaacaccacctttagcacaaaccaaaacaccaaccaagaatgaattttgcaacgaataagcctgtagaattcaccccaattccggtgtcctatgttgacttgctcccatatctactcgataattcaatggtagccataacccta

SEQ ID NO: 138246 - DNA, 460 bp, Glycine max
tcgcgtctcctccacctacatccgagaacttgcagccttcaccattttcgttaagaagtggcgccattatttgttaggtcaccctttcgtgatcctcactgatcaccagagtttaatggaccttatgactcatgcagtgcagacgccagagcaacatcgatacctcatccggctattgggatttgaatatagaattcagtatcggccagggcgtgagaacggcgttgcagacgcattatcgcgagtcgctgcaaacgacactcaggcttctttgtatctactgtccataccccagttctgttttcttgttgatcttaagaaggagttagtcacacacccagaggccttaacgttgctagagaaaatttgaaaggaagccacgatagcctctgagtataagctcaaaaatggattgatcatccacaagcagcgcctttggcttcatcgtgatcaccatcat

SEQ ID NO: 138247 - DNA, 462 bp, Glycine max
  unsure (1)..(462): unsure at all n locations
gctnntgggctgganaactatatagctgtcttcttgttctagtttaggcccttctcttctctctctcctgtntttggttttagttttaggcttctcttcttcttttagacattntttcattttgcaattccagtttcgacttttcgttttagcaataaaatttcattcttcaatctataatttcgttctctattgattaatggaaggctaagtctccagcggtgttttctcttgaggatcaagcacagttctctttgaggttctactaatactgttaaattctgttcagtttttcctcttcactaattactctgaatntgttgctattaattcatcatgcttagtgcttgattaattggctctgcgcttaatttacgttcatgcttagtgatcgtttatggattaattggtgtatgtgtggcttaatcacataatgaatggtctatggtaaatttcgcttag

SEQ ID NO: 138248 - DNA, 487 bp, Glycine max
  unsure (1)..(487): unsure at all n locations
cgtgacctatgatactcagcttatgatgatgaatcaagatgattcaagtagttntgattatgtcttagatgatgacaaaaagcccaaagaatgatttcaagattgagtcaacaagttcaagatcaagtttaatttcaagtttcatgagaagaaatcaagaagattcaagaatcaagagaagtttgatttcaagattcaagagaagatgaatgcaagattcaagagaagaaatcaagaagacttcacaagggaagtattgaaaatatttttcaaaaaacaaacatagcacaattttgtttttcaaaagagtttttctcaaaattctctaagttaccagagtttttaccctctggtaatcgattaccagtggcaaagtttgatttcaaaagcttttaagtaaatttccaacgttccaattgatttcaaaatggtgtaatcgattacaagatattggtaatcgattaccagtgtatctgaacattgaaat

SEQ ID NO: 138249 - DNA, 505 bp, Glycine max
  unsure (1)..(505): unsure at all n locations
agtcacctgccgcatgcaagctnggacttcctgtgttcagggaacttcttcttcctatgtgtacccaaactcaatcacctggttcaagcacgactttctgcttttgttggcttgccttgcatagctcgcatttttcttttcaatttgagccttcactngctcatgcaacttcttcacatactcagctttagcctgtgcatccttatgcttaagcatagcaatgttaggcataggcaacaaatcaagaggagtcaaaggattaaatccatacactatctcaaatggtgaacaattagttgtgctatggacagcccgattataagcaaactcaacatgaggcaaataggcttcccaagatttaagatttttctttaaaacagtcctaagcagtgtgactaaattcctattgactacctcagtttgaccatcaatgtgtgggtgacaagtagtagaaaacaacaatttattaccaatcttaccncacaaggtcctccanaagtgacta

SEQ ID NO: 138250 - DNA, 467 bp, Glycine max
  unsure (1)..(467): unsure at all n locations
acaaaatctaagctgtccacaaaaaaagggcctaatggggggaattgtttctcttttcagnnnnccttatcgagtaaatggatcatttttaaggtccaacgccttaaaatgatcacctttcaagtaaaaagaatcacttaattcacccttaagaaagaactacgtaggtctgatttcctcttagatggagggtacgtaggagcaaaagccccgcttttgtcgacctcaaaaaataaaaagaaataaaaggtgaaataacacaatttcacaattctaaaaaataggctgttttcctttgtgacaaacgtgagaggtgctaataccttgctcaaacgtaaatacaactcccgaacttagaattttcatttttaccggtttccttcggttnttccgacgttttccacatataaacgttggtggcgactccgcgcatctttccttctttggaaagcgcacccgtgagcctc

SEQ ID NO: 138251 - DNA, 464 bp, Glycine max
  unsure (1)..(464): unsure at all n locations
ctgcagcttatgatgtagctanagaaagtcttttcaatagtgatgtaacctttgatgaaagcagaagcctaaattaggaaagcactgctacagaaactgactcaaggcagcatgatctcaggattgaggttgatgagcctgattcagaatcagctaatgaaattaaagattcagatcatgaggcattggtttatgttaaccaaaaccaagaagaggcagcagacaatagggctaagagaactagaatcccttcatcatgactttaggatattgaagtttacccaaatgataatgttggtgatgatggtgaatttctaccttgtaaagaggtgcatgttgcactgtttgctgatgttgagcccctttcctttgcacaagctgttaaggagatgaaatggatggaagaaatgaaggaggagctggagttaatcgaaagaaatgggacttgggagttagtcaaactt

SEQ ID NO: 138252 - DNA, 454 bp, Glycine max
  unsure (1)..(454): unsure at all n locations
ctcatccagttctgagaaccactccttgtttctagtcatatgtttgttgcaaccggagtcaaggaaccacacttcttccattntgtcttgctccaattcaacataagacattaataacgattcttcatctttttccttctctaattcaacataattgtcatttttctcccaatcaggacattcatattgatagtgtcctaacttgtgacatttgaaacattcaataacaactttattgaatgattgtcttccccttcctcgacctcctctgaatgaaccattacctctacctctacctcttcctctacttgctttgtcttcgtgggagatcttcagaacctgctcttcttctccacgacttctcatactctgctcatgaacaagaagactactttgcaactcatcaatagtcatcatgtctaangtggtggattctcattgagcataccacata

SEQ ID NO: 138253 - DNA, 399 bp, Glycine max
  unsure (1)..(399): unsure at all n locations
attgcacggcttaatttattaatgaaatctggatgaactctgtcggttctgaaggccttccaacaaagcaattcgagagcttcaccattggccaaaacttccacctcgtataccttgtcaaccccatgggctttaagcaaatgtctgtctctagtggcaatgatgactctgctgccagggccaaaccaatcaggacttccaacaagagctcgcaagtcatctagctcacagacatcgtcaagaaccanaagaagcctcttcctggggagcatcttctttattagtgaaattccttgctcgacacttgtcagacgaatatntgtctcacggaatatctcagcaagcagggttggctggagatgcactaagccatgcttcatagcattntccctgacgtta

SEQ ID NO: 138254 - DNA, 410 bp, Glycine max
  unsure (1)..(410): unsure at all n locations
tggcagtggtgatagcgactatctttctgttctttatgcagcacaatgaaaaagccatggcgtttccggacaagcgatggcgggcaagagcctgtggcctgcacaatttcctgtcttgtaaattggaaccagggctagcgcgggntggtagaaattgagatatggaatgtgagttacaaaaatatgctaattttattttaatactcttacaattggtcgatccaaacaaaaaattttgaaaatacaaaaattgcaatttttaattaatacattttaattttcttgaattttaaactccctttcattttaaaatactccccagttagggatgacaaaaaatttgtcacgggataaaattcgtcatgcatacgtgatggataagttaaagaaatacccatgggtagcgggtt

SEQ ID NO: 138255 - DNA, 482 bp, Glycine max
  unsure (1)..(482): unsure at all n locations
ggcatgcaagcttgacgatcacaatataatanntttcctcntattcacataataattcttcgtaaaaaaataaaaagatttgtagctctttccttaaagagagttttgcattttaagaaactcatagttgaatcatggaatgatagatcataaaggaagatattgttttttatagcaacttgaaatttgagaagttttctaaatattatttgctgattaattaaaacgatataacttctgatgttaatgcgtgtgtgtaattaaaaacttatgaacatgccataagctaattttacacactcacccaaattaacatttacacaagtagtaatgtcatgagacaagtntaaataaattgtaaacaagttatttcatagacatacgaattctaacaaaacttccataaagaaaacgaattctaacaaataaaatatacgaaatataataatactatagattataatanattataaatattacta

SEQ ID NO: 138256 - DNA, 397 bp, Glycine max
aaaaataataaggaagggatgtttaaacttgaaagcataaatgtatgagcaaaaagaatggaacataataactaagccacatattattgagtgaaacccctaacactgcagtactaaacagaggattatagtgtggagcaattaaccaaattcttataattagtgcaagtgagtgaaattatattttgtccctaggctgaaagaaagcaaatcttatgcctcaatagctatcatactttctcatgctgctaatgctgtgtcaattcatatctttctctccatggctattatttaatgcaggcatcgtcattgccttgacataaaaaaaaatgtcttcttcaaggtgattaacaccatgaactttcttataatatactgtactacatgtactgcataa

SEQ ID NO: 138257 - DNA, 467 bp, Glycine max
  unsure (1)..(467): unsure at all n locations
agcttccaacttctaacgttccatatttttgtctattttcagataaacacacacattagtcgcaatcactaccataaaactacaatattttcaagttataaccagtttccagagatgaatggaagtataacagcttatacaaggaattttattataaatcacacaaagctcaaaatgctaagcagtcagttgtgtcataaactagacatggagatctattacgtaataaaatatcttagccaacaattcagggtaagacatccattatggaacttgagaatagaacaattacaaggacacagtttcagcaacatggttttaatttccaagtggagttcgaaggcacacatacaagctaagacttggagtctatcttgagataagttaggagcctctagatactttgaaagaatagttcataggtcactggttcaatacttatgaatntcatgtcttacaagttcata

SEQ ID NO: 138258 - DNA, 465 bp, Glycine max
cttgatgatatggtcttttccagtgaaaggatcgatgtttgtatgaaaaaaggcaaatttagtcatccttcttggacgaatgagaaaactggggcaaatgaagaggaggaggatgaaggagaagccggtgctgtgactgccattccaatacagccaagtttcccaccaacccaacaatgtcattactcagccaataacaaaccttctccttacccaccgtccatttatccacaaaggccatccctaaaatcaaccacatagcctacctaccgcacttccaatgacaaacaccacctttatgcgttaccataacaccaaccaagaaatgaattttgcagcgagaaagccttataattcaccccaattccagtgtcctatgctgacttgctcccatatctacttgataattcaatggtagccataaccctaaccaatgctcatcaacctgcatttctccgagaatac

SEQ ID NO: 138259 - DNA, 514 bp, Glycine max
  unsure (1)..(514): unsure at all n locations
atcctctgagtcgcctgctgcatgcaagcttatctacacacacccatctttattcttacctcacctccttgagaagcttccttgagaagctagagcttagctacacacacccctctaataactaagctcacctccttaggaagagaagctagagcttagctacacacccctataatagctaagctcacccccatgacaaaatacatgaaaatacaaaaaaatcctactacaaagactactcaaaatgccctgaaatacaaggctaaaaccctatactgttagaatggccaaaatacaaggcccaaaagaagaaaaaaaaacctattctaatatttacaaagaagagtggacccaaccttgacccatgggctcaaaaatctaccctaaggttcattagaaccctaaggccttctttatcagctctagcccaatcctcttggagcctcttgctcatggctctggtaactggtccttttctagggaggatagcatcacattatgacangctcagtct

SEQ ID NO: 138260 - DNA, 310 bp, Glycine max
tactcagcttgcttgtggagacccaatggtggctggatcttttgcttcttgatgtccttcaatggtgatttttcaccatggatatgcagcggatcgcatacgacataaggatatgggaggcaccatccactatggaataagccaaggaagaaggagcttcaccaccaagaattgccttggataagaagctcgaagaggatgctttaatggacgaaaagaaagagagaatgggggagcacgaaattgaaggaataaaagatggaaataagtggaactgtgaagcgtatctcataacactttcattcatcat

SEQ ID NO: 138261 - DNA, 387 bp, Glycine max
  unsure (1)..(387): unsure at all n locations
cttgatttgcagtgtgatggtatctgaagccacaaaggttgcacctatttgttcataaatcataaacgttgtttgttgctcgttttcggcttcgtttgcaggtatgatgttctgtgcacgattttcgatttttgttgggttgtttgttgctatgtaccattttgctcgaggtttgttgggttntgatgttgcatgtgcaccattaactacctttctgtgggtttntgattcatagcaacaagaaagtgtacacctttgttcattttctatgatgattaggaagaaagtctcgacctcttgtcatttgttatgattattacgaatggttcgacctgtttttgtttggttgtgatattgtatgcgcatcattaactacctttatgaggt

SEQ ID NO: 138262 - DNA, 423 bp, Glycine max
tccatcttatagactctcgctaagctacccaccttttctgttttcttcctatcacttctctcacatccaaaattgacccacatggttaatttgggatacatacatattacaaacaaggagaatgtgtttgaggggtttttatagctttacaacactaattaaggtgaatcttctttaaagctctgagctatatgcactcttgccacaaccattctaagctacatagcacatatgtagtacggaaagaagatgaatatggtttctacacagtgtaggttatctcctaccttctctctcaagttttgcacctatgctctatcaattcataggacccacagaccatagtagccattatgacaactaggtcttcttttttttctaactttaatagcttcctccaagtctaaaatatcccaagaaaat

SEQ ID NO: 138263 - DNA, 394 bp, Glycine max
  unsure (1)..(394): unsure at all n locations
caacatatttctttggcctaataagaactccaatatttttgcagcttctgatgttatgattggtttggccacaccttccacatgtaaagtcaggcaattttctctttaccctatgtcctttgacattgtcttcatctgcatctctccttctatttttcttaggccttcctctttggaactttttatgtggtggaacaggttgtgcatactgtgtttgggcccaatattgtggtccttggactggctgaataaaatggtgatatgtcttattataagcctctatggacagccagtcatgacacaagtcctcaggcttgcctcctttgtgacttattactgtaatggtatgtcggcatgacatccctacatcaaagntgtaaaatcagcacgcatg

SEQ ID NO: 138264 - DNA, 435 bp, Glycine max
gcactaatcttttgaataaattctgcttgttctcttttggataaacttttgaagaattacttattgtagaagaaaattaaatgaattgaacttcacttctcttgtaagttaaaatcaactgaagcacttctacttctatacaagttctctcatctgacttctctaaaaagctgagatatattatgttttctcttacatgctacaagggcttattaagaactttatctaaattgttccatagtatttaattaagttgtttactcaaacacacctgtagtatcagtatgtcgaatagataataaaattgattttcctaaatcatgttacaaaagaagaaaactctccaaaaatccatgataattgatgctagtaaaattacaaccaggataatgtagaaatatctaacctctgtgtcaatccatgtatcaacacatg

SEQ ID NO: 138265 - DNA, 434 bp, Glycine max
  unsure (1)..(434): unsure at all n locations
aaaattctctttttccgtaaaatgcatgcctaaatatgcattccatacttcaaattagcctgtgtttttatatgaacgcataattggttcccttctaaactatagatacggngacccctccagcattaataagattgaagcatttgacattgccataaactaatctgatgaattatcttgttaggcttggggtgctatgcctctgcagctacatcacccttccattatatgctcttgttactcaggtactatatgcttttcgtttcctgattttcttgtatttgatcggagccaattttgaatgactaaattccaataattaattgctatcagaaaactgagagatgcaaatagttccaggttgatgaggccaaagctcataaagctcanagaatagcaaaggacatccatganaataaccgatttgataatat

SEQ ID NO: 138266 - DNA, 387 bp, Glycine max
tatcctgtaaccgccaaagccttctgggaatctggtttttttctattataatcgattagatgggccttgttctatggtaatcgattacagggagtagtaatcgattaccagatcctaaaatatggtatttcaagtgaaataatcacgaaaatcaattatttgtcacccgcaaaactacacatttagtataaataatcaaaatagacaatcgtgaacaatcatcataaacaatcaaaatagacaatcatcataaataatcatgaacaataattagcaaacacaagcacttcactcaacaaaaaattaatcaatcatgaaagataactatcaaacacaatcatttttcttaatcaaaggaaacaatcatcataaacaagcataatttac

SEQ ID NO: 138267 - DNA, 310 bp, Glycine max
  unsure (1)..(310): unsure at all n locations
agcttgaatacttgatacatgggtaatanctaanttttntggagaggaagggnncttaanaatttcaagatatataccaactatatctgctcacctggattaaaaaaaaattctttacattcttagtactcattttaaatagtggtatggagcactcaatctaaattggaagatgctataacaggaaacagtgcggctattttatatattataatacactaaataatttatagaacgcatataaatactaaccaaatgcaatgtggcatgctatagaagtgtgaatttgcactttttgtattcgattctc

SEQ ID NO: 138268 - DNA, 464 bp, Glycine max
tcctgatataaggtaaaaataattttcaaataatcactttgctttttatgataactaattgcatgatccgatcctaatatgtagcaataaaatcttacttttattgtatgaacaactttcacatttataaaataatactatttgttcatattaaattctctaatttaattatcaaataaattatcttcttttgcaaagattgaaacactcgtttacgtgtgactctataggttcaatattaaaccgatactaaattaaccataattaatttactaatcaaggtaggtgtctagcaacacttattttcagataacatgaagtaccatcttttaccttcaagaatcaataaaagaataatgtaatattttctttcatcatttatcattcaagggtaactctaaagtataatattatcgtcaaactctaataagttaacacattatatgtaatcaatgaatgactta

SEQ ID NO: 138269 - DNA, 82 bp, Glycine max
gagagagaagagagccaggtttttgaaaaacagaccgcgaaccccccccccaaaagcggggaaaccaggccaaccaaaaggc

SEQ ID NO: 138270 - DNA, 114 bp, Glycine max
gagctgcaccaccgacagcatcaatcatactcctctccatgatgctaagtccctcatagaaacatcgacgacggagtttctcagaaatctggaggtgcagacaccatgcacaca

SEQ ID NO: 138271 - DNA, 311 bp, Glycine max
  unsure (1)..(311): unsure at all n locations
taactgaataacgtcaggctcgaaaatagggcagttccttctgctcgctcctttataatgccgntaggcgaatgaaatataattaccactgttttattgaatatttttaaaataacttagcattaatcaaataattagtaacaaaacaaaatttagatgttttaaaattataatattggaaaagaacaatatccggagggaatttcatcaaggtgtattttcctatattttacctaaggaacttgatattattattttttctaaacccgtgcatcactaaaactatgaaacttatattttcctacataatt

SEQ ID NO: 138272 - DNA, 420 bp, Glycine max
  unsure (1)..(420): unsure at all n locations
taatctggtaatcaattaccagagagtaaaaactcttctgcccaaggntctgagaacaantcatgtgctacttaggtttntannnactctttctctcttttctcctctcctttactcctctttcctcctcttttctgcttcctgtcctcacatgctcctcttcacacttctnccactcctcacctcacttctctcgctcttcctctccccctcctcacccccttactctttcctcccttatttctactgctctcttgtcttttctcttccactctccctactttcccttccccctcntctacctcccctcaccctcgctccctcccctcatctcacctctttctctttttttattctccatcccttccttcttcgctgctctcgcgctgttgctcgtcctctctctccaccctcctcctc

SEQ ID NO: 138273 - DNA, 126 bp, Glycine max
  unsure (1)..(126): unsure at all n locations
tggacgaaagtgcatagcgtccatctgccctgcgctgatggagaagcagnacttcttggacctgaaatgctacaacagattcacgaacaagtgaaattgattcgagagatgagtgaagcatctcat

SEQ ID NO: 138274 - DNA, 382 bp, Glycine max
  unsure (1)..(382): unsure at all n locations
gctgctgtcaaatagaattaatagaacccggagatgtctggataaaagtctggcattggcttttagatgagattttgtttcagcaaagaagaatgtcaaatattcaaggtaaacactaaatcaagtattaacaaatacgagtcatgttttactatttgtgtttgattacttcttataatgtgttctatgtatagaatttaactttgattgagattgagaaattattggaaaaaaaatagaaaaagcctaaaggactttccattgataccttacccacaacattatgtcacaacacatttaggaaataggctgatttatgcagagctggattatgatgttactgaattgaaatctcaatntgataattactttaaatctctta

SEQ ID NO: 138275 - DNA, 186 bp, Glycine max
ctaagcttacacaactctattagatgagaaaactattttgtttgatatgaaaggaaacctttggattaaacattgaaccaaactctcccctccatgaattgttctaggacaatcttcccacatactcctgcaaacttaaccccttgacgtggtaataatgtttactcaaacccaaagggctgccca

SEQ ID NO: 138276 - DNA, 281 bp, Glycine max
gaaaagcaaacgacaaagagcggaactcgggctggcgtttgagacccgcaacacaacgagacgctccgaagtgacaactgaccctctcaccaaactcaaaggaaaagaaacgcgcacgcggatatccaatcgcgcgccgaagaagtcgagacgcccggaactgaaaaagacagccggagaaaaaccaaacgacaacaacccacaactcaggggtccgaatgcgacccgacacacaacgggacgcgccgaaacgacaaccgaagcggggagcgacccgaaag

SEQ ID NO: 138277 - DNA, 388 bp, Glycine max
tttataaacgccggaccatataacaatggtgataggaggcgccatccctttaggaataagccatggaagaaggagcttcaccaccaatatgagccctggataagaagctcggagaggatgctctcatggatgaaaagaaagagggagagaaagagagatggggggagcaccaaattgaaggaataatagatgtgtagaagtggaactttgaagtatgtctcacaagactctcattcatcacagttacaacaagtgttacacatgcttctatctatagactaggtagcttccttgagaagctttcttgagaaaactatcttgagaagcttctttgagaaaacattcttgagaagctagagcttagttacacacacctctctcataacta

SEQ ID NO: 138278 - DNA, 337 bp, Glycine max
  unsure (1)..(337): unsure at all n locations
actagtgccactcccgagttcgatagccatcgtttcaggagcactgagcaccaatagcgtttcgaagccatcaagggatggtccttccaccgagagagacgtgttcagctcagggacgacgagtacacagatttccaggaggagatagctcaccggcgttggacgtcgctggtcactcccatggccaagttcgatccatatatagtcctcgagttttacgccaatgcttggcctacaaaggggggcgtacgggacctccggtcatgggtgaggggccagtggattcctttctatgcagacgccctcagtcagttcctgngatatatgcttgtattgg

SEQ ID NO: 138279 - DNA, 467 bp, Glycine max
  unsure (1)..(467): unsure at all n locations
actaagcttggctaatagtgtaactttcggagctantaagctaagctattcctacaagagggatctgaggatgaagcttagtttaagttagtctaaacctaggagggttgtctaaattaagcctagtccaacaagagggatctgaggatgaagcttggattgattcagtctaactagggattgaggtttagtaatttaggctacaacatagaacacaaaagcatgattgattagagaaatatctttatatacatcagctggtttgttagaaagacccaacatctttacctactgttgtcaattttacttgcatttntactgtttttagcctagacttagtttaatcctactctaaatcatcaattatcaatgtttctttaaacaatgccttatttctgaatttaaccatgtctaagactagttccttgagttcgatactcggattcatccgttttaattttaaatac

SEQ ID NO: 138280 - DNA, 414 bp, Glycine max
taaaaataaaaatgtatgtttattatggactgcgacaaatcatatgacattgcgggacttttggatagcaagagagtgattaatgtcccgatagtgcatgactcgaaccaaaaagggcaaatctgccaaaatgatgacacgacaataggggaccagttacaataaccaaagattatttgaaacatgcatgaaaaatgaatgacagagtagataagaaccaagacagatacacaagtgttaaagcacaccagagatatcagtggtagaagaaaccaatggaaaagatggtcagaataaagaacacaaccaaggactatcaataggaagacacacgttgccaaacaaagtgttaaatttgaatgcgccaataaatgcaagcggaaaattgctgaacaactggaaatgcaggataac

SEQ ID NO: 138281 - DNA, 400 bp, Glycine max
  unsure (1)..(400): unsure at all n locations
agctgcagctgcctctcaaagggatgtgacttctttttgtttttaccantcttgttggcaagaaagaggtttccttggaaaattgggacctctgaactaaaggggatcttacatcagcatcttgaaatgtaaaagtgtagggattctaaagaaccaatatgcaagtaacaattgaataaattgcgttgcatgggacaaaaatgaagactccaattaacgaaaatgtaggagattttgaatgttaacctgatacccaacagtttgagatatatgggaaaatataaagacccattccaaaaggatgctagccttctcttaagtattaatctctaatctgtgattggaaacttttctacttccccactggaacctcttttttagatctggaatataacatatc

SEQ ID NO: 138282 - DNA, 440 bp, Glycine max
  unsure (1)..(440): unsure at all n locations
gctaagacatctttntggtgatgatgaggaattgtctctattgatgatgtcttggaggcatgagatccttacaaacattgtctcgtgtaaagctaattatggatgatgatggagtagagctaatcagagaactgggaatgctgacgcaattaaggaacttatggttgaattatgttaagaaagaacagggaagtgctctatttgcctcaataaatgagatgaaaaacttggagaaactacatattcaaacaattggaggctttacctatgagggaagttcaataagttaccagagtgtaattcacaactcaaaaatcttgtgaagttgtctttggtaaactccaagttaactgatgatcaattganatcattacaaaaccctgacaaatatgttgttccttgacatcagccatggggcttatgaagctgaatgtttgtat

SEQ ID NO: 138283 - DNA, 421 bp, Glycine max
  unsure (1)..(421): unsure at all n locations
atcccacaaacaaatccctcttattactagctattttgaattcattagctcttgaatgtacaaccttcaaaatgttgctcggtcccctctttgttttctgcgaaaaagaaaatctatatcaaagaaaacatggagagaattttcatgggtattattactcgaaccagaacgaataacatctaaacaagtcattttattcttagaatgtgaaaactctgcatatttatggagaacatgggatatggaggcacgtaagcatgtgaataccacaagtcattttctccaattcaggggcttgattaattgctctacgaaaaaagcatacatttggtatattggttggtttgcagctgtttggagccatttgcagaacaaaaatttcggttacgttgggtnaccatgttcactgattaacctatat

SEQ ID NO: 138284 - DNA, 462 bp, Glycine max
atatgcacttacttcagcagaggagatccaccactgattatatctttcaacattgggggctgattagggaaatttataaacctggaccatataacaatgcgatagatgccttatcctgagttgtagatgaagaaaatgagttgattgttatatcttatgcctcagctaacaaaagttaaggaggatagcagactttatactttactggcacacataataattggcctgcaaaagacttccaattctgggtttaagttacatggtgactaactcttctacaaagggcaattagttgtctcctaaacaatccattctcatcctttgttgctgcaagaattccattcctaggattttacataagaggttgcggcagaatatgtacgttgttcatggttgtgagacttgctactaaaggtataaataccatagtttagtccctccaggctcactacaaccactccc

SEQ ID NO: 138285 - DNA, 274 bp, Glycine max
catttgaatgatcttgctagccattttgaacccatcatatgcagagattaattatttagctttactgttgacatttttttttgcgatgtcgtcattttgtattgataaatgaaaactttatgatctgacaatatcttaaaatagttgaagcttgataattccattgaatatggtgaattggtgagttaatcgatcactcaaaagatttctaagtgatccttggacctgctccattaataatttcatatatttgttttatcgaatttgaactcct

SEQ ID NO: 138286 - DNA, 465 bp, Glycine max
  unsure (1)..(465): unsure at all n locations
actcaagcttaggttcgatgtcccaatgacatctatccnccacattttataaaggccttggggcggacatgagacattcataggatgtggcggaaccttgacattgtccgcgtacgcttgacatttatggcatttccttacatggcgcaacaatcgctatccatagtgagccagtaataacctgctctaaggatcttcctggccatagcatgcccattggcatgtgttccaaatgaacccccatggatttcctcaatcatgtagttcgcctctttggcatctacgcatcgtacgagggtcatgtcgtggtttcgtatgtacaagatggtaccactcacaaagaaaccagtagccaatctccttaacgttcttttgtcattgtcggaaatacctggtggatattctttgttctcgacatactgattgatgttcaaataccatggtgttccatctcgctcttctcta

SEQ ID NO: 138287 - DNA, 356 bp, Glycine max
tcaacaaagaattttctacacctacttcacgttgatttgaccaacgctggtatgggaatggtgcgacaatccttccaaaccctattgatacattctgaaaggatgggtgtcatgtggccataccgacgaccctctctatcataagcacatcgccatttttctgttgaaatgcgatcaatccatgtagctaaggctggactcagttcacaaaatttatctagattctgatcaaaaatgagcctgcaaggagtatacgctgcatcaaactaagtaataataaaaaatgtaagtatatatccaagagtaataatcctgaccatgagaaataaatcctacccattctatacaattctttt

SEQ ID NO: 138288 - DNA, 395 bp, Glycine max
agcttctttgagaaaacttcattaagaagctagagcttatctacacacacccatctaaaaactaagctcacctccttgagaagcttccttgagaagctagaacttagttacacacacccctctaataactaagctcacctccttgagaagagaagctagagcttagctacacacccctataatagctaagctcacctccatgaaaaaaatacatgagaatacaaaaaaaaaagtacctactacaaagactactcaaaatgccctgtaatacaaggctaaaaccctatactactagaatgaccaaaatacaaggcccaaaagaaggaaaaaaacctattctaatatttacaaagaagagtggatccaaccttgacccatgggctcaaaaatctacc

SEQ ID NO: 138289 - DNA, 426 bp, Glycine max
  unsure (1)..(426): unsure at all n locations
tgcctcanagaggtccaggaaggacaaggcggccgaagttctagtttcgctccggagtatgacagtcaacgctttaggagcgtggtacaccagcagcgcttcgaggccatcaagggatggtcgtttctccaggagcgacgcgtccagctcagggacgatgagtatactgatttccaggaggaaatagggcgccgacggtggacatcactggttactcccatggccaagttcgatccagaaatagtccttgagttttatgccaatgcttggccaacagaggagggcgtgcgtgacatgagatcctgggtaaggggtcagtggatcccgtttgatgccgacgctatcggccagctcctgggatatccgttggtgttggaagagggccaggaatgtgagtatggccagaggaggaaccggtctgatggg

SEQ ID NO: 138290 - DNA, 408 bp, Glycine max
  unsure (1)..(408): unsure at all n locations
gcttncgtaacaaattatgatcttgtatttatatatcaaataccataagggaagaagacaagggaatgtaacttacatagcttattaaagctactgatgcattcagaaaaaaagaaagaaaaaatgctactatgagccatatagacgctcctcgcaacttaaatcacgcaagggtagattaaacaatgccaaagcacaaaaggaagaaaattaatcataacataccaaaaactaattatggtgttaaatgaatatgttttcatttcatatatgttttgactataagtnggcccaattcactatatgtntccanatccagaaattcacaagaattatcaaaccaatatatatatatatatatgtatatatatacatatttctcgtgcaaccaaaccacaaaactataat

SEQ ID NO: 138291 - DNA, 458 bp, Glycine max
ggctatacacactaagatttcagatctcctatgtatttttatttcctctcccggaccgcttcctttcatcctatgttccttattttctctcaattcggcccaccagcatatcttattccaatactagatataagctccacataaagcaagagaaattggttttaagcaagccacttggaattatcagtctcggaatcaaagaactgtgacaagggtattttctgaactgaaatgcacttgttccacacttccagtttcattatttatattggagatgatttgcctgaactataaaatcaggtacttgaattcttttcagaccaattcttattttcacattcacttcttattgctgaatgtgacctagaccttaatgctacaaccacttgttatgatcactattatgtgttcaactaggagagcgttcccgtccacattctcataaaatactaccaact

SEQ ID NO: 138292 - DNA, 443 bp, Glycine max
gatccttgagtcacctgcggcatgcaagcttgatcaaccaatgatattgtttgatgccttatctttctcttgatcttgtttgcttgaccttgaattaatcttgaagcaatgcttaacctttgaattaatcttgaagcaatgcttaaccttttaatgtttgttgaagtaaccttgtaagcaaccttgtttgattctactttggcatcataaaaatcttgtgttcatatattcacaaattcacctcctcttggtttgttgagtaccatcatctttttcaacactaattattgactaaggcccaataagacttaggtgtaacattaatgatttagcaagacctaataaggcccaagtataacactaataattgattaagacccaatgagacctatgtgttacactgatgatttaccaagacccgataaacttatgtgtatattgat

SEQ ID NO: 138293 - DNA, 416 bp, Glycine max
  unsure (1)..(416): unsure at all n locations
cgcttgcttccacacataggggaggagcttgtcacccagctttgtcatgcgagccaggttacttcctccagaagaaaccgccttctataggaacatcctggaaggcccaagtgggcatggttgctatttgcaccccttttttactaagtacacccccttggctttttttttttggtgattctttntccgtaacgttacgaaattttacgaatttcgtaacgatacttgttntctttctataaggttacgggaccttacgggttacgtaattactcctattttggctttccaaatgttacggaacctcacggattgcgtaacaatgcttccttttgatttccagcatgttatggaaactcacggattgtgtaacaatgcttccttttgatctccggcatgtcacggaacttcacgta

SEQ ID NO: 138294 - DNA, 398 bp, Glycine max
  unsure (1)..(398): unsure at all n locations
gaattctatcaatagacctccaatctttaatggagagggttaccactactggaaaacccgaatgcaaatttttattgaggcaatacacctaaatatctgggaagccatataaataggaccttatatacccaccacagtagaaagaattacaatagatggtagttcatcaagtgaaagcataactatagaaaaacctagagatagatggtctgaagaggatagaaaacgagttcaatacaacttataagccagaaacataataacatctgccctgngaatggatgaatatttcaagggttcaaattgtaagagtgctaacgaaatgtgggacactcttctattaacacatgaaggaactacagatgttaaaagatctatgataaatgcacttactcatg

SEQ ID NO: 138295 - DNA, 292 bp, Glycine max
gaatgccagcttaaagactgggcgagattttattaatttttcttcgcagctgtgtcctcacataagggtgtcaaactgacaagctgagggccactgggcatgtgtgttgaacctctccttagtcccgatcatcgggagccaaggacatgggcaacttggaacttctaagcatacaacattactttaggactgacctgacactaatgagcgttgcggagaacactggcaaacaaggtgaaagcttacagttatagaacagttggagctttaaatcccatgaatctaagtgagc

SEQ ID NO: 138296 - DNA, 454 bp, Glycine max
  unsure (1)..(454): unsure at all n locations
agcttctatttntatgctggtgggatacattaaatttgctattaaattgggacatctgttagttatggatattttgatattttttgaaaatgtgtatgtattgattaaattactcatgaaagtcaatgttgtntaattggactctacataagcttaaaattgttttgaaatttcaatacccatattttttatcaacaatattcaaattagagtgtatttactattatatattcacataatacctttgaaaaacataaaattatggaaatgtcgtgaattgatatgcatgagattggtttactttatcatattaacatacgagagattaaaaaaatcattagtcttccaccaataaacagtaaaaattgtaatcactgaaattccaacacatttcattttcttaatcagaattgtttaacaatgcataccatcgtcaccaatatatctttctttt

SEQ ID NO: 138297 - DNA, 473 bp, Glycine max
  unsure (1)..(473): unsure at all n locations
agcttctaccatatgattgctntgtcatcaaagcccaaggcagccaacttaatcttcttcacttcactatactcatgacatgcaaagatttggtaaactttcatctcccaatcaagatatgcctccgggtaatgcttcatttgaaaattagggaatattctcttaggaaggccatgtcaatttgataggaagatcatttacaatgacctaactaatgagattaccctcaactatcttggaactaaatttgtgttgcatcctcaaacaccttctcaggtagctaaggatcaagtacaaataaaactaaaatatgattaggaaaagaatagaaaaagaaaataagaacaacctttaatggttaatgaggagtgtaaggaggtaagtgtctcctccaagaggttagctaagaaggaaagtcattttacaataaagacaaacattaaagaaacttcccttcttagacaacctccaca

SEQ ID NO: 138298 - DNA, 430 bp, Glycine max
  unsure (1)..(430): unsure at all n locations
agcttaagtgcccttggtatgactttgtctatgctgtntggtttgctaaatactttctctgtgactttgtaaagaagtgtcntccataacaatgttcaaaatttgagttcttcttgtctgtgctgtttgggggtttttgtttccaagagaccgcgaaaactgaggagagggtgcgcggggtaagaagtaaagtaagagttcttcctcagctagctagggtataccaaaagtgaaactgatatacaaaggcagtctttcgtaaaaatcgccggtgtcttacttcctcataattacaagattgtcaccgaaagacattcttagacggtcgtctataatcgccttataatgtacgacattaaagacaaaagttttcttctttattacaaaattgccaccgctccgtactctaagacggttgttaatttaaaaa

SEQ ID NO: 138299 - DNA, 483 bp, Glycine max
  unsure (1)..(483): unsure at all n locations
ttacggacacttaaaactcagcttggnagttccatggaggaaacaaaatgaggatttatacaaaagaggaaggtctcttacctttaaaatcagtccaaattcgaaaaaaaagcttatcaacaaggtccttggtgctaaggtttcaaggtttcacactctctaataatgggttgtcttggagaagaagaagagtctgaaatgagagtattttgtgttatgattcagttttgggacaataaaactaagtacatgactcttcctcttccttctattcacaccctatcacttcctaagctcactcactatgttctcttcactcaagacccactcatctcagcctaaacactctaaaacttattattcacaccctaaacacaatttttaacatttgtaagcataatcatacgttcaagcaccataacatcatctcatagttaattaattaattatgaatcttanattaaatttaattactcttcaaat

SEQ ID NO: 138300 - DNA, 462 bp, Glycine max
  unsure (1)..(462): unsure at all n locations
ctgcagcttanaataaaaactaaccgggtgaagatctttgatcaatgaagaacgaacaaagaacgtctcaggaattgatcacagtagcgttatggaagcgcctcaactgggaatattctttttccttctttcttcttctcctcgctaattttaagtgaaaactgaatatccaaagtgttgaaccctttcccctcagccccaaacgccattttatatcaaaaatgagggaggtagttgccatccaaaaagaatattccagatgggcctagatgggcccaaggctaggtacacccccctaaattgatcagttcaccccccatgttttttggctaatttccttccgaaacatcgcaaaactctacggattgcggcgatgagtgttaagcatctcaatttgatcaccacaggttcgtatgttgacaaacaattgtcctcccacgaaattatggtatgacactatgt

SEQ ID NO: 138301 - DNA, 261 bp, Glycine max
tgaccacttaaacgttgtttatcgatttctgcgataatactgttgctggatggttgaatattgacacaaaagtagttcctttgacataactatgtattgccttgcatatttatttgtccctggacatgatttgacaatttgaatctaataagaccaggatataaaagcttgccaagtactaccttagaattgatgttatattaaggcctgattcttattactgagcactttactaatgatttttcctgctaattgcccatt

SEQ ID NO: 138302 - DNA, 467 bp, Glycine max
  unsure (1)..(467): unsure at all n locations
ctaagtcacctgaggcagcaagcttaatgggaaagagagggtgncttactattattttactggtttnggntctgtcacggagggggcgtacaaatatgacagcataaggatcggatttcccaactatatctttatttgttaagttctttgcttgcactacttttacttctagttttccaaccggtttcaactctagattactgcaagaggaataaccaatcacacactctaataaaaaaaatgatacttaaatgctacaaaaaatatgacatgaattaaaaacgtgatgaaaaaaagacaaagaaaaggatttggaacggaaaaacaagacttaaactccaatcgagcaaccaagtcattagtttaccatgcctaaatngaatgaaataaaccagcaagcaaccaaggcagcactctaacatgcatttcatttacacgaaaccgtgtctaaaagtcaaaagaaaatg

SEQ ID NO: 138303 - DNA, 465 bp, Glycine max
tcgtattggtgacaacggtttcatttcaaatccaaatgctgtatttcaatttccaggtcaggtcaagtcgctttctctgctgtactcacaatttacggttacatcaagttatatgcttattatcaccaaaacaagtagcttagctgtaattagctaaagtgctaatcaagagcgtttagggtcagtttctttgataataaaaatttaaaaagttaagtgatttacatggagcatgtgaactaaatactgtataattgttttatattaattagtccctggtttccttttaattatcggattttagaaaaaatattatttatatttatttgtcgcttataaagtttaacatcatggtaattactacttcattaattatatttttacttattttcttatctgtaattatcaattatatcattacgtattttcttatacttaatatatgagtgctgctacttataatga

SEQ ID NO: 138304 - DNA, 385 bp, Glycine max
acaacctgcttgcctacctcacgccgtcactcatgcctgactccaagaggacaagattaatgaccgccgaaaacactctcggacctcgtttacttccccacaacaaccagcttcagcaccatccactcaaacccaaacacctcgccctaagactcctttcatacagcgtactcaggaagagatgacctataggcgcgaaaagggcctctgctacaactatgatgagaaatggaacttatcacaccgtattaagggtcgagtcttgtttttcattgcagcctctaatgatctctccccctccgacatagctctgctggaaaactcaccacccctccctattgaaacccctccacctttggaccccacacctcttcaccctcacatc

SEQ ID NO: 138305 - DNA, 454 bp, Glycine max
  unsure (1)..(454): unsure at all n locations
gcttcaagaaaaagatggcctctacatatttcttattttcagaagggaattctatcaatagacctccaatctttaatggagagggtaccactactggaaaacccgaatgcaaattnttattgaggcaatagacctaaatatctgggaagccatagaaataggaccttatatacccaccacagtagaaagaattacaatagatggtagttcatcaagtgaaagcataactatagaaaaacctagagatagatggtctgaagaggatagaaaacgagtacaatacaacttanaagccaaaaacataataacatctgccctgggaatggatgaatatttcaaggtttcaaattgtaagagtgctaatgaaatgtgggacactcttcgattaacacatgaaggaactacagatgttaaaagatctaggataaatgcactaactcatgagtatgaatta

SEQ ID NO: 138306 - DNA, 368 bp, Glycine max
  unsure (1)..(368): unsure at all n locations
ctctccctcctgatttatgtctaacccctaaaacaattcatgtatgcagacactgctcatgaattatacaatacccatgacctcacactcgtgtttgaaacagcgttaacacattgcgctacaatntaacactggttcccaaataagaaacttacactttccctttaacactgcgcatcaacatatttcataagataaacactggtcaggttattgtgcaattcacagctcacaacacaagttatatcacattaagcgttaaccacacacttattcaccactaagactcatgttgacaatatgacattccataatgtcctagtccaccatcacatgatgacatgtatttcataatttaacacatgtca

SEQ ID NO: 138307 - DNA, 450 bp, Glycine max
  unsure (1)..(450): unsure at all n locations
agcttataagaacaaaattgcctcaatcatttccaaatatgcatgtgaattaggacgcatcaacaagaatcaagccaaggctattgtgcaagcaatcaatggggcaaaacacaccaaatgattatgatgatggatggctcaaattctcacaaaggtaaaatcatcactttcaaattgagctttcaaaactatcatgacatgtagagaagaatcaaggatttcaagtcacaaaatgtcaagaacttttattttcaaaacaattacccatttcttgaacatatcctataattcaaagaagaacatgcaaagtcgtacgtgcacacaaaattgacccaaaatattaaactaaaaatccgacgaaactaataacattaacaaattaacacaactaacaaatcaacaaaactagcaaaaccaaagaacactccctccccccncccccatacttaa

SEQ ID NO: 138308 - DNA, 355 bp, Glycine max
  unsure (1)..(355): unsure at all n locations
aaaccagcttttgtgtcttaagatgaacagcctgttctttttnttttgctagcngatgcatcttcacgagtactatcatcccctgagccttcaagaatcaccttgcccttaaggtggcagttatctcgatgttgctcccaatcttcccaagtggtatcttcaggaaacaaaccttcccattgtaccaccacctgtcacttatgggtgtgagaattaaaggtataacgggtgcccacaatggccgtctgagagatcacatgcttcgttgtaacaatcaacgaatgtaattgcaaggtgggagaagtattaactaatacatgtgagtggaatggcttgagcactgagcactgaaata

SEQ ID NO: 138309 - DNA, 446 bp, Glycine max
  unsure (1)..(446): unsure at all n locations
agcttgcaggacaactgtntacctttgttctcaacttatcataactcatgaattatgtgagtctataaattaatgaataacctaacaaataaataaaaatgagtaaatgggttactatggcacatcagacccactttattaagattagttttatcaacatttttttgtacgggagtgatgtaaaagataataaaaaaataaaaatctatggatagtataaaattgaataaatatagatagacgctataatatatgttaaaaattttgtgcacatgatgacaatatacaacatatataaaagtgcaacaaatgtcatgcaatgctaaacaatcggtagaattcaagtagaagatgaatgcacgtattcttttatctgataatattntaaaaaaaaaaataactaaaaatattttctggttaaaaaaataaatanaagaaatattaat

SEQ ID NO: 138310 - DNA, 436 bp, Glycine max
  unsure (1)..(436): unsure at all n locations
actatccaccactcaagcttntaacttatgaccctggaagggaaggtacatgatttttgaattatattgggaacacaaatttgtctgaatattaatgtaagacctactattttatgcaccggatcactggcgaagatgctcttaatcatgagtgggtccgtgaagttcctcttcccaaaaggtaagaattcatgcctacatttcctgctcaacatgctcaggacaggtaatttgacctaattggaaatgctggagcaatttttataagaatttttttttggttatgttctctagtctggataaaagagggaagttgtgtaaaaaatttgctgagtctatactatataacatttatcaacttttatttttgaccagtgttcataatttcatcatataaataagcgtgtgccgagaatatacaagagtcccgatcctt

SEQ ID NO: 138311 - DNA, 355 bp, Glycine max
  unsure (1)..(355): unsure at all n locations
cccgagagcttgcggtgttcattttcgagcgtctctatatgtgatgcgccttaatctaacatccgtgcgaaaagttatgaccctttgaatttctcaagagctctcgttgttcaattttgagcgtctcgatatgtgattagcctgaatcgtacatccgtgtgaaaagttatgaccatttgaatttctcaagagctttcgttgttcaatttcgagcctctcgaaatattatgcgcccgaatcggacatccgcgtgataagttatgaccattngaatctcgcgagagctttcgatgtttaattccgagcgtatcgatatattataagcctgaaccacacatccgtgtgaaacgttatg

SEQ ID NO: 138312 - DNA, 272 bp, Glycine max
tagtatctaccaagacgtttctcattaacttccctacaccttagatctttaccgtgggatttttgtactgtaaccttgaccggtgacttgagtaagatcgtacggacacgatggtgatacacattttgtgcgatgcatggtagttgtcagcagtgatgagcatgttccccttactgttcgctgtgcgtatccaaaagttgaataattattaaaaaaacaccttagttcctcgtccggttgttactatgggccacactaatgtgagccgggga

SEQ ID NO: 138313 - DNA, 403 bp, Glycine max
  unsure (1)..(403): unsure at all n locations
tattggccggtggatgaaactccacacagtgcagnttatgttcacttgtagaggatctgaatcccagtttaccagttggttgttgccgctaaccaacaaatcttattttatgttctctttaatatttctttttaattgaagatgcttcttttacccacagaaattgtatatttttcatgcaagtataacagttaaatgaatagtagttagtttaattgtatttcgaatttttttttataattaaattataagtgattctttagtttctatggaaaaaattaagttggttaagttttctattttaaaaattaactaaatttattcattgtgtcaaatttttacttaaaaattttcaaacttttatttttatctacatatttaggaagttatgataaacttgagt

SEQ ID NO: 138314 - DNA, 451 bp, Glycine max
  unsure (1)..(451): unsure at all n locations
agcttgggggaatttgtgatagtgattttgccggagatgttgatgatagaaaaagtactaccggatttgtattttttatgggtgattgtgnttttacatgaagttttaagaagcaaggcattgtgacactttctacttgtgaagccgagtatgtagctgcaacttcttgcacatgtcatgccatttggctaagaagattgttggaggaacttcagttgttgcaaaaggaaagcacaaagatctatgttgataatagatctgcacaagagctngccaagaatccggtgttccatgaacgaagtaagcatatagatacaaggtatcatttcattagagagtgcattaccaagaaagaagtagaattgactcatgtgaaaactcaagatcaagttgcagatattntcaccaagcctctcaaatntgaagattttcgaagatcgcgagcaagact

SEQ ID NO: 138315 - DNA, 436 bp, Glycine max
  unsure (1)..(436): unsure at all n locations
tctccgcttccacgaggctgacgtattccctcaaattcgacgtctattatctcgcctcagtctacgacttccgcatcgacaagtttcaggttcgctcaccggttgtttttatttctcttcgttttcgaaaaattcgaaacttgtgtgttgaggtcttgatttgtttttgttgagtttcagcggcaagcaatactggcttttttaagaggcttctcggtggtggtttccgctccgacgagcagcangaagacgctgattggggaggctgcggcagaatgtgagtacttattgacgactgcttttcatgcagcgttggtaatgtttcttctanaagtggacttgtaaatgttgatgtgatngttttggacgaagttgattaccttattgacatatctcgtggtacagtctacgaggagattgttagccatattttttg

SEQ ID NO: 138316 - DNA, 307 bp, Glycine max
tatatcaacacgctcgaaattgaatggtgaaactctgtaccaattctaacgacaatatatttttaatcggatgtctgattgagtcccataatataacgagacgctcgaaaatgaatgttgaaactctgagccaattcaaacgacaataactttttactccgatgtctgattgagtcccgtcatatatggagacggtcgaaattgaatgttgaagctctgagccaattcaaacgacaataactctttactcggatgccttattgagtcctctaatattacgagacgcgtcgaattgaatgttgaagct

SEQ ID NO: 138317 - DNA, 434 bp, Glycine max
  unsure (1)..(434): unsure at all n locations
cttaacattcaacttcgagcgtctcgttatatgatacgactcaatcatacatctcttttaaatgatattggcgnttgaattcgctcaaagcttcaacattcaacttcgagcgtctcgttatattacgggactatatcagacatccgagtaaaaatttattgtcgtgtgaatttgctcagagcttcaacattcaatttcgagcgtgtcaatatattacgggactcaatcagacattcctgtaaaaagttattgtcatttgaattggctcaaagcttcaacattcaacttcgagcgtctcgatatattatacgactcaattagacatccgagtaaaaagttattgtcgcttgaatttgctcagagccttaacattcaatttcgagcgtctctatatatgacgggactcaatcgaccttcgaggtaaaagatattgt

SEQ ID NO: 138318 - DNA, 394 bp, Glycine max
  unsure (1)..(394): unsure at all n locations
actgagctgcagcttttatcaggctatcttggggtgaatctcttcttctggcttatccctagggatgggcctcctctcacctttctctttgtcttccactgcatctnctgggggaaaatcaccattaaggacctcttgaagctaaagatcagcctccataaaaccccacaacaagcttcatactatctctatttttgagtatgatgagaaccctctctagagtaatctttgctttttataggtaacccttagtactagtcctgctggctgttcatatgactgaacgtctttgttatgtttcataaactacatctttatttgttcataagactaacgtcttccctttatgttcctggatcacatctcatttatgtttatagatcacatcttgcct

SEQ ID NO: 138319 - DNA, 405 bp, Glycine max
  unsure (1)..(405): unsure at all n locations
gccaaacctagactactttaattgggagcagcaagacaaacaattagtgtctttggcttctaccatcaatggcactaagtcttcacacaaaacaatggttggaagatacttgaaacctaaccttttagaccaaagccaaaataaaacaactaaaattgaaaaactaactagttttgaaacaaaattaactataagagcttctcaccatgtctctaatagataggagcaatgaatgcctatattntttaaacataatcatagtaacacgaatgggtaagaaaaactaactagttttgaaacaaaattaactataatgactcagactcgtcttcagctaatttaaatctccaaattcatatgtaccgcgaacagtgtacataaacttttgtttggaaaaataatcat

SEQ ID NO: 138320 - DNA, 455 bp, Glycine max
acctgcggctgcagcttaggcatgttctctattcagatcatatcaatgtttcgaaggttgttcttttatcaagtccatgcaaaaatatttgagttcatttggtatttgggaaagtcattcattgttttcattctcaatgttttccaaaaaaaaaaaaaaatccttttgttgggttctgatccaaaaaagtttcaaaaaatactagttgttgattctttccaaagcatgttgcgttcaagaaaaattttctatttaagtcccaaaaagaaagttattatctataactacactattagaatatcaaagcacgcataaattaatcaaaataaagtcacataagttgttttttcaaaaattcaaaacaataataaggaataaagtgctgaaatttatacaaagcgataataaacataagacaagtctcaaactttaaaacatggtgagagcttatctct

SEQ ID NO: 138321 - DNA, 468 bp, Glycine max
  unsure (1)..(468): unsure at all n locations
ggcctacttagataggtaagttgacttccctaaggagtttaagcatgtacttagttggcaaggaaagaaagtttatattggtagaattaagaccactcaagcctaaaggagatcttcacatcaagcatatgaagaaagtaaaaagtgtaattaattccaaatgccaatatgtcaagtaagcaactgaaccaattgtggttgacatggaacgaaaatgaagagtcaaaatttcaagaaaatgttgaggagattcttgaagttcttcaacctaatgcccatcaacttgagagtttaagggtgggaggatataaagttgtccatttcccgcaatggatgtctagtccttccctcaaatatttatcttgtttagagcttgaggatngcaaaagttgtttaaaacttccattgttggggaaactaccttctctaaataggctaattatatccaatataatgcatgtaaagtac

SEQ ID NO: 138322 - DNA, 454 bp, Glycine max
agcttgtggtattcaaaatttgtaaacatttgatgttatttgatgaaaagttcacgaaacattttgccattttgcagcagtcattttgttgcattttttgtgtgaaggaatatttgtattttttaactcttatttttctatacacttttcaaaaggggagattctgaatggccaaagctgcaagagaaaccacctattggatgatgtcaacctattcaagaagttaaaaataaaccaggacaagtcaggcaagttcggcatttctcacccttaattctacccttcacatttggctttgttttctttagttctctcattaacttttattgcaatgtgtggtctcttgaccaaagatgaacttttcaagccttctccctccccttcctaagaaaattcttttcttatctgtctgcatctgcctcaacattaacacatctaatgaactcttcacaga

SEQ ID NO: 138323 - DNA, 453 bp, Glycine max
  unsure (1)..(453): unsure at all n locations
acattgatgtttgtatttatgggaggaggttatattctctctttgctataaggatagtgtcccactggtaaaattaactttccaaatgtttgccttcgcaggaatggccccgaggaagcttgcctcaaagaggtccatgaaagacaaggcggccgaaggaactatttccgctccggagtacgacagtcaccgctttatgagcgctgtacaccagcagcgcttcgaagccatcaagggatggtcgtttcttcgggagcgacgcgtccagctcatggacgacgagtatactgattttcatgaggaaatatggcgccggcggtgggcaccactggttactcctatggccaagtntgatctagaaatagtccttgagttttatgccaatgcttggccaacagaggagggcgtgcgtgacatgaggtcctgngttatgggtcagtggatcccgttcga

SEQ ID NO: 138324 - DNA, 481 bp, Glycine max
  unsure (1)..(481): unsure at all n locations
ccttgaaactaagctntgttagatgcgggtagtccctttaagaccctgttcattctttaaagtctccttattaagtatgctaaatgcttctaaattttttacaaaggtgacaataaacattgaaattataacatcatgcttctaccctaaccctagtaccattagccattaggaacaaattaatagctctatcccacattactatcgggttgcgtgagtgaagaaacatgaaacaaaaacaaactattctagaagatggagtaatctacacaagatgttatgattggagggtgatgcaagatccatgagtcatcaagattcacaagacgtcatcatcattataaatttcaaagtattaaaattataattatttagtgaaattaatagaataatatatgctggttgtaaattttaattggtatgccaacatgcacaaagttgaaaaagcccatttactctattttatgactagtgggcttat

SEQ ID NO: 138325 - DNA, 452 bp, Glycine max
agctgtgcgaatcaaatcacttctacatttcatctctagcatgccatttttctttacccactcctcacgtttggttttttagggaaaaacaccataactaaacgcgccacaaggcatccctatcgcaccagatccaaatctagaacgatgggtgatcaagaggagacacaggaacagatgaaagccgacatgtcggctctgaaagaacaaatggcctccatgatggaggccatgttaagtatgaagcagctcataaagaagaacgcggccaccgctgccgctgtcagttcggctgccgaagcatacccgactctcttggcaactgcgcaccatcctccctcgaacatattatgacggggaaaggacacactgtggcacgatggcagccctcacctgagatacaaccgagcggcttacccttatggattgccgcccaactactcaccacccgt

SEQ ID NO: 138326 - DNA, 380 bp, Glycine max
  unsure (1)..(380): unsure at all n locations
ttgcatgtctagagcttctagcgagagaaaggtccaagtttcatagagttttgagagattntgctgtgtgaagatctgcagagaccagagcttgaagcatgaaccagtttcagagcttaagatgagtttgtgagtgattgtgagatcctagaggtgaaggagacatcctcaccacttgtatatttgcaatcttccatcttgttcttctctttgttgtaaagaaggcttcctggtatggaaagctaaatcctctgttggattttccctgtaggtacctgatgtaaatatatttatatctatttaatgatgctntgtgtgttctctgtgctatctgcttttctctccagtatgcctttaccttgatcatgtagatgcatgct

SEQ ID NO: 138327 - DNA, 456 bp, Glycine max
  unsure (1)..(456): unsure at all n locations
agcttattacaagtcagtgagacaaccttttaatagctgaatctaataatgaaagaagaagtaagaaaggaagtgctcaagttggtagaggcagggctcatttacctaatctcggatagttcatgggttagtcttgttcaagttgttccaaaaaagggaggtatgacagtgataaagaatgatagagatgagttaattcctacaagaatagttactgggtggaggatgcgtattgattacaggaagctaaatgaagccactaggaaagaccattacctgctccccttcatggaccaaatgcttgagagacttgcagggcaatctttctactgtttcttagatggatactcangctacaatcaaattgcagtggatcctcatgaccaagaaaaaacatctttcacatgtccttttggagtatntgcttatcgccgcatgtcattcggtttatgtaat

SEQ ID NO: 138328 - DNA, 434 bp, Glycine max
  unsure (1)..(434): unsure at all n locations
tgtctcagcgtgtatgcgagacagaggccaacatgttatctatcatcttcaagtaccaagaagagttaggtctagccacggcccacgagcatagaatcgcggatgagtatgctcaagtgtatgcggaaaaagaggctagaggaagggtgatcgactctntacaccaagaggcaaccatgtggatggatcggcttgctcttaccttgaacgggagtcaagaacttccccgattgttagccaaggccaatgcgatggcagacacctactccgccctcgaagagattcatgggcttctcggctattgtcagcatatgatagactcaatggcccacataattagaaatcgttaggaaacttgtatggtctctcagaccttgactggatacgacttcctttttgagataaaatgttggtcccatgtttctactccaaaa

SEQ ID NO: 138329 - DNA, 451 bp, Glycine max
  unsure (1)..(451): unsure at all n locations
agcttattcttcaagttcaaactacctatctacatccatgagttaaaacatcagaatgtgcacatgtcatacagttaaggaaacaaaaaagaaagaaaaagattgtcaataacaattcgaaatatgcacaaaaaagaagtttctattagtaccttagaaaccagaaatgcacacaaattaggagaaggtaaacaaaagatgtaactcttcaaaacacattcgaatcttgtttctgaataattcaagagttcaagataagagtcaataagaaagtttagagtcaagaatcaagattcaaggttcaagatctcaagaatcaagatcaagattcaagactcaagattcatgaatcaagagaaggcttaatcaagataagtatgaaaaggttttctcaaanattgagtagcacatgatttttcttaaaacatggttaccaaagagttttactctc

SEQ ID NO: 138330 - DNA, 454 bp, Glycine max
  unsure (1)..(454): unsure at all n locations
tagaatttatcaagttntattttgagagtgggaggggtgttgatatctacaaaatatgtcatatttgtgttgtatctttgaatatttagaataccttacacaatctttattaaaatatatggaaaaataaaaaagatatctaattgaggaggcaatcttaggagttatttcctattccttatatttattgatttatttccttatttaatttaattaggcttagtagtcttattcgtgtgcttgggttgaatagtaatgcaacacaagtatgtgacctaattattagtacaaataagaacattcatttagtaattagtattgtaatattagataatccaaataatttcaacatataactcacctgagacttctacattnggcatttaatatttcaattgtacaactcacaatgtttgagctaaggtgtatatntaataatctttctaaaccaatg

SEQ ID NO: 138331 - DNA, 445 bp, Glycine max
  unsure (1)..(445): unsure at all n locations
agcttgaacgcaagttcagggattataatttttcttaattgagttaaaatttcccccctttatgcagtccctgcccccaaaacggtccccgggcccttatttcttaggctttgtgtgtctgcggtacctgtaaatatatatttgaatgttgtattcaagcctaaaagggttacaagggtttcattctatgtaaatttttcccccatgcaacaagactaagagatgattaatcttatgctaaatttaaatctattgcgaccaatgttttatgctcctaagactaagatccggattcgggtcttgttagtttgtttaaaagatntgataagtgtttgtttctgtgagttcattccatatagtccgcgttcgcgcatngtggcaaanaacttcatattagagatggcaagtgatgtatccnctcgcccttcccctaaatatgcttgac

SEQ ID NO: 138332 - DNA, 447 bp, Glycine max
tctaactaccgttagaatgagtctcacaacaaggaaatctttattgatatagtaatgcgggtgaaatcagttttgaagtgattttcatttttttaaaactggaaacagatacagtcctttacattttactaaaaaagacaaaaaaaatgcaataatgagaattgaaataaataaaaaaaaaaaaaacggcatatgtatttcatacacactttcaatttatattagaattgaaattgtaactatacaatcattatattatggaggcaaaatactacacgtaatggattaaaaaggtagttgggacaactgcccccactctcttaaaggtggatccgtccctatttccatgttcaagtggctcgggagagtttaaggaagaactcacaagtagaactattttatgttcatacacaacattaaaaaaaaatcgtctctaatttacacctt

SEQ ID NO: 138333 - DNA, 292 bp, Glycine max
tggctctgaattaaggagtccgtgaatgtgatgattggaaaggtgtggcgggggtcaactatgtggggtctacaataaagcggaaaattgtgggtgagaattaatttttggatgagtgggatataatgttgttgacttgaacgaagctcagtggaaataaattcgtaatggaagaattcactagcaccatcttcttctaaccctacgatgaaattgaagtgggctatgagatggagggtggattctatgtcccctttcactcaatgagttgcccacctaaaatgaacctatt

SEQ ID NO: 138334 - DNA, 456 bp, Glycine max
  unsure (1)..(456): unsure at all n locations
taagtgtatgagcttattgaaagagaaacgaattanatttataagtcttattataatccgggaaaaaaagtcttattataaaatatgttggtaattagttatcatgaatatcatatcatattagaccttaaaaatatgttatatcatataaataagacaaaatcaattattataaaacctaacatacatattttcacctttattttagtgttaaattatcataaagtatgattttcaataagcttgtaggtcaagcaaaactagacttttatgtatgataggcttaggccatgtaattttaatcaaggccagactcaagcctagaaaagtctagcctatttccacccgtagttatattgttgtacatgttgcttctaacactctagacgggatcatcataattatgcttaagtatatattgaaagctgaaattaaaactttctccgacatatattt

SEQ ID NO: 138335 - DNA, 395 bp, Glycine max
  unsure (1)..(395): unsure at all n locations
agcttgaagtgagaaagtgtggaagagtttttcttcctacttttactcgntgaccacagagtggtacttggagatatgtcgcgggggtcaagagaccttggggacgtcaggtgggatgctattgcccaaaaccaagcttgaccaatctcgacccaacccgggcatattcagtcagtgagaacatgtgacgtacctaaacaggcgagctcctggcagtcaaccattaaaagaacaaagaccacaaagcatggaggcttgtgtggtggctggtcagctatggatcttgagtgatatctggaatatggcctctggtaatcgaataccaagggtgtgtaattaattacaaggcttagaaatgaagacaggaagttaagatggcctctggtaatccatta

SEQ ID NO: 138336 - DNA, 400 bp, Glycine max
  unsure (1)..(400): unsure at all n locations
tgcctcgaagaggtccaggaaggacaatgcttccgaattatctagttccgctccggagtatgatagtcaccgctttaagagtgctgtacaccagcagcgcttcgaggccatcaagggatggtcgtttctccgggagcgacgcgtccagctcagggacgacgagtatactgatttccacgaggaaatatggcgccggcggtgggcatcactggttactcccatggccaagtttgatccagaaatagtccttgagttttatgccaatgcttggccaacagaggagggcgtgcgtgacatgagatcctgtgtaatgggtcagtggatcccgtttgatgccgacgctatcggccaactcctangatatccattggtgttggaagagggccangaatgtgagtat

SEQ ID NO: 138337 - DNA, 351 bp, Glycine max
  unsure (1)..(351): unsure at all n locations
gacttgtaagaattgatttgggccagattggatgagaggaagtgtgattttctaaatctgcacttatgcagaaatttggtgtcaaaataagtgcagcaggattttggctttgtgcaaaaaaatgcttgtgtgtggttggctgtggaaagtctagtgcagaatgangtctggatgtttgctantaaatcccaacggtcacaatgtaggcttatgtattatagacttccagtaaaattttggagtcgatccaacggttaacgaattggatcgaaggaatngttactggggtctttaagtgagaaaagctgtgatttggttggtgttttggcagagttttctgcctttgctctg

SEQ ID NO: 138338 - DNA, 469 bp, Glycine max
  unsure (1)..(469): unsure at all n locations
attcccctgccttgaaactaagctatgactagtttcttgggattcctaactatatgattatattatgggatttgngatagaggggaaaatggatccatggatgcctttctagtgcaactatatcaattttgatcaatggcagcactactagagaatttttgcctgagaggggactgangcaaggagatccccttgcacctttcctatttaaaatatcagctgagggactcactggtttgatgaggacaactgtctctaaaaaccttttcagcagctataaagtggggaggcaaaaggaggggattaacatcttgcagtatgcagatgataccactatttttggaactgcaactacagctaatgttagagtcatgaaatctatcctcagaattttcgagttggtttcaggactcaagattaactatgctaaaagccaatttgggtgcttgggtaaatctnttgactgatg

SEQ ID NO: 138339 - DNA, 430 bp, Glycine max
gcttatgctcctatttccttacaaacgttctctttctcaagacatttaaccgaagaaatgcacccatatacaatcaaggcagcttcgttacctagattatttacacgtacctccaaggggtgattgttacttacatcacacacatctccttggctaaactcacatacatgcatactcaagcattttggggcaccaaaaattgcacatgtgcacatcttggcatttctaatacctatatatacacaaacttcatgatgaatcttgactatctacacaataaggagctacatttcatgctctttattcaagtttttgctatctaaagccgcgtgcaatataaacatatttccctttgctgactaaaaagcattctgattaaaaggcatgtgtttgtaatatgttttcttacataacatgcaacatatctata

SEQ ID NO: 138340 - DNA, 464 bp, Glycine max
  unsure (1)..(464): unsure at all n locations
tgcttctatgtccttttcattgcttaaatgggggaataatccttgttaaattgtcttgggaaaaatccattgctttagctctcaattcattattttgtctctggttattgcttgtctctttgtttccttgtttgtgagttgccatataaggaattggaaaggacgattggtgccatcccttgaagaatntgagtcaagaagcaaggggccaaccaccttaagagctattggactaagaagcactccaaattgagtgaatcaccaaagagagaacaaccactaaaattgaggacgttttgtaattntttaatttgcaatttacttaccttcattgctttcaagttttgtaacaaagaggcctttcattggaagtgtgttgggagcctccaatatgttaccaaacttccatttgtgtgtaataattttaggcaatttttccttangatagtgagtgttttgttggg

SEQ ID NO: 138341 - DNA, 385 bp, Glycine max
  unsure (1)..(385): unsure at all n locations
gcttcttaatctcagatgatgcagctgtgtttgtatctttctcatgcactcctctaatgactatagcatcatttctggcgctaaactgctgggagttaaaagccatcttctcaattaaattcctggcttcaacaggagtcttgtctccaagggctccaccactggcagcatctatcatacttctctccatattactgagtccttcataaaaatattggagaagaagctgctccgaaatctgatggtgagggcaactggcacatagttttttaaatcgctcccagtactcatacaggctctctccactgagttgtctaatacctgagatatctttcctgttggttgtggtcctggaagcanggaaatttttttctaagaatactct

SEQ ID NO: 138342 - DNA, 468 bp, Glycine max
  unsure (1)..(468): unsure at all n locations
cggacacttaaatctcagcttaagagactnttcnaggtggatgcagcttcatgggttacaactaccctccttttcctgatcaagggctcaggagtggaagaatctgatgactcatcctccgactgatggggtacctgagtagcaaggtcttcgtgttccctatgaagaggaggctgagtccctggccaggctacccattcaataaattgctctaccattgggatggagtctggaggcgctaccaactgtaggctttgtagtaatataatctgcccctgatgtatgctttgaagcatggtctcgaaatgttgaaaatctgcaggaggtagggtagaaagagctactgccatatgtgctggaggaggagctgctgatgtanaagctggataaggagctgctgatgtagaagggaacctcattggccttgcccttggtcttttgaacccnctaataataactgttgaatca

SEQ ID NO: 138343 - DNA, 225 bp, Glycine max
agctttttggccatgaggctatcgcaatcaaacatgggcctcatcacccctcatttcatgcatttaggccatacttcaaagattcatgcccaaataagtactataatgagtagacgcttctctcaaaatataatgatcactctctcactgggatacgggtaatgcattccttcacaatcaatttgacaaactgactaacattttcaatcatactactgatcacat

SEQ ID NO: 138344 - DNA, 318 bp, Glycine max
tacacaagcacacacaacgataggaccactttattatttacaatagcccgggaacattacactagtctacctcaacaactcaattagctgataatgcttattcaactagtataactatgaacatccttatagacgaccgcaaaccatctgctggacggtacaactataacacatgtgttaagactacaataactgtctgcttattacatagacagtagcatggacggcggattgtcatgaactaatgcgggatgcattggcattaaaataatgcactctattaatcaaagacgccagaactctatttcgtttggaaac

SEQ ID NO: 138345 - DNA, 438 bp, Glycine max
tgcaagcttgttgtttccacaaggattaagaattatctacgtttatgctaacaagaatctcgtcgatcaagcttctcagcctttccatggtcacatgcttttggaagccattctagaaataattcatatgcagttaagttatcaacaagtagaagcacatgctcatgcaaggtaaatgggcaaggataggtgtaattgctagctctactgatattgatggtgggtgtttcacaaatcttgatttgtttagttatgaccagagccttcttccttcaactggcagatcaaataatgaagtttggccatcctttattgctactggcaatggaattcctcatctcctgtcacacattctacagattctatgttgctgcaggtacaatatattccttggctagctgaataatgttacgttttccctctcctcaccctttacct

SEQ ID NO: 138346 - DNA, 420 bp, Glycine max
tctagtctggatctatggcaatgtctacatattgtcttttttatggcatgttgaaactctatcgcatattcataatccatactccataaaatgtcatgcctcataacctataaagtagtaaaaaacttgacaattccaaaacacaagtacgtaacacattacatggcatatgacttctaaaccaaatgcaaatactaatactttaatcctagaatctaaaagtggctgtgttggttcgaacaatcaacagcaaaagccgaaaagtgaaaaaacccaaacctgtatagcaaacaaaggttcgaacagaggaagaagaatgattggagaataaacgaagaactcgtatggagaataaaggaagaactgtctatgagaacaaaggaagaagaatagcaattatgggtcaccgggtcaccaaac

SEQ ID NO: 138347 - DNA, 406 bp, Glycine max
  unsure (1)..(406): unsure at all n locations
caagctgnntgttttagctagacaaccttttattcccattattttcttttttccttcattctttttcattccttgcttgctctcttttccttttcctctttttttccttttttagttatttatcatttgttcatttcctctctcttctttctttttttttctctttttctctctgaaaaagtcgtgcggacaagggcacacactacctactcacgtctaaccacaaggtgaacgagaaacgcacaaaaatggtaggtcgtaatatggtgacgaaataaatgagagccataacgccgaaaatttctaacagaaacgagcaataatgatagtaatgttagtaaccatatgaacaaaatagaaaatagtaatgtcaacaacaacatgggcaataacaganaacgttaat

SEQ ID NO: 138348 - DNA, 456 bp, Glycine max
  unsure (1)..(456): unsure at all n locations
ggaacatgaatactcagcttggtaccttcttcttcactacatcaagaagtatcggtgtttattcttctctgcggctgtcttactggtttagccccatcctctaaattcatccgatgcatacatgtggatgggctaataccaggattgtccgccacggtccaccctatagccttcttatgcttcttgagaactgataacagcttctcctcttgctcatcagcaagggatgcatatataattactggaaaactttttctatcatccaagtaagcatattttaaatttgatggcagaggcttcaattctggtgtgggcggctggataatggtagaaggagatggtttctcaccctatacctcataaagaaagtcagagatatgtgtactttctgaaacatggtgagttctatctgactctatanaatcaatctcaagatgtaaaacatcaccagacatg

SEQ ID NO: 138349 - DNA, 445 bp, Glycine max
agcttatattctaagagagcacaaatcctatacttatcccaatggtctttttaatataattggcttgctcactagcttttcactttcatttgcttttgaccttgttatatcaacacacttttcttctttattcttcctttcttttttcttttcttttaacagacaacttgtgtgttgtgtgtgctgatgctttctctctttcttggcatcccaattagttccactcccccaaatttggggtaaattttccttgaactatatgctctcctagaatctaaacaaggtatctggagagaatcatacaggttcagggttcaatttattagcaaactcattcagctcaaaaagggtgcaaatgatagaattataattcaaggtagagcttttggtcaaaggcttgtgtatgacaatctggccttcatatttctcgtaatcattcattcta

SEQ ID NO: 138350 - DNA, 419 bp, Glycine max
ggacactatgaatctcagcttcaaccaggggagatggaccatttcaagtgcttgttttattaatgacaatgcttacaaagttgagctgcccggtgagtataatgttagttccaccttcaatgtctctgatttatctctttttgatgcagatggagaatccgatttgaggacaaatccttctcaagagggagagaatgatgaggacatgttctacagcaacggcaaggatccacttgaaggacttggaggacctatgacaagggctagagcaaggaaagccaaggaagctcttcaacaagtgttgttcatactatctgaatacaagcccaagtttctaggagaaaagtccaaggttgtgagttgtatcatggcccatatggaagaggactttatgacaccactttgtctcaattttagag

SEQ ID NO: 138351 - DNA, 218 bp, Glycine max
  unsure (1)..(218): unsure at all n locations
agcttctgaatggcgtggtcgatgagcttttttcttcgatcttgntccatgcctgtataatggttggacttcaataataataaaagggtctttctctgttctcacccatcggccaccgacaagagccaagaggtgtattattggatgaaaaccacngagacctggccgtttgggtttgtttttggggcctcctctcatctctaacatcattccacttt

SEQ ID NO: 138352 - DNA, 439 bp, Glycine max
  unsure (1)..(439): unsure at all n locations
tctctntctaagtttctctctctctcaatattgggtattatattgntcatcgtgtgngtncaactgaacctgaacaccctttatatagagaaagtttatacaacaagacaaaaccccttcagtcaagaacagtaaaattactgttcctttactctgtcacagggctgtcctttacaaatacatttattacagataagctcaatgtctaatctagcaatagtaaagattcatgcctttgattttagcttttctttatgcaggatacattggtctttaactcttgcttgcctttgtaatcgtaacatcttcttcatcttggatatttccagaacagaaaatgtcagatgaatcttccattgagagatcagtagaagggaaaggagggagttgttgtccatggcatccgctggcttcataaatctccttgtctttttctctt

SEQ ID NO: 138353 - DNA, 288 bp, Glycine max
cctctaaaagcgccttgagagatcccaagaagctgagctagcacaccccctcttaagtaggaagctcacccccctgagatgagaaactagaactttactacacaccccctataatagctcagctcacccccatgacaaacaacatgagaattcccaacaaagtccttactacaaagactactcaaaataccccgaaatataagggcaaaaccctatactactagaatggcctacatacaaggcccaaacgaaggaaaatgctattctatatttacaaagatagcgggc

SEQ ID NO: 138354 - DNA, 420 bp, Glycine max
tctccgctgcttgtgggctatatggggctggactttttcttattgaggtcctggaatggcgatattccaccatggagatgcagccgaagacaaaggagaagaggtgagaggacgcgccctccactagggaataagccatggaagaaggagcttcaccaccaagatgagccttggataagaagcttagagaggatgcttcactggacgaaaacaaagagggagagaaagagaggggggagcaccaaattgaaggaagaaaaagggagagaagctgaactctgagttgtgtctcacaagactctcattcatcacagttacaacaagtgttacacatgcttctatttatagactaggtagctatcttgagaagctgtcttgagaaaacttccttgagaagctctcttgagataacttccttga

SEQ ID NO: 138355 - DNA, 444 bp, Glycine max
agcttcatgatgaaacatgattgattcatatagtcttgatgatgacaaaaatgatgacaaaaagctctaaagtcaagaacacttcatgataacaaagatgatgatctccaagaatcaaagaatgagttccagattgaatcaagtacacttcaaggatcaagaggaaaagtgaattcaagaatcaagaatcaagtttcaagattcaagtttcaagaatcaagatcaagattcaagaatcaagagaagactcgatgaagataagtattaaaaaagtttttaaaaactgagtagcacatgaattttgctcaaaccttttactaaatagttcttactctctggtgattgaataccagattattgtaatcgattaccagtagccaaatggttttcataaaacttcaaactgaatatacaacgtccaattaatttcaaatgtctaatcga

SEQ ID NO: 138356 - DNA, 412 bp, Glycine max
  unsure (1)..(412): unsure at all n locations
ctgatgaagaagctattagccaattggtgtgcatgtcttggtanngacttgcccggaccgcaacagggagaaaggtgcggatcatgctcaccatcatgaccactctcacataaatctggatgacgttgctgcttatcaaaattctccctagcgaccataactcggacctcaccctactaaagtgtcagctggtctacaccatactgacacatgtgagtgtacatgtggctcagctgatctctgatgctatttaccagcttgcagggattgtgcgtaccatacacccggtggaccctgagaagtccaacacggccttgagattatatgctctgattatatgcctttggtcagtctattgagtgtcggtcacccccagcaagcctattcgcccttctattaataaggctttcat

SEQ ID NO: 138357 - DNA, 301 bp, Glycine max
  unsure (1)..(301): unsure at all n locations
agcttatgatgatgaatctagtttatttctgtnggtgtgatgatgacaaagatgatgacggacagcccaagagaatgagttcaagattgagtcaacaagcttttagaatcaagagaagttcgatttcgagattcaagagaagatgaattcaagattcaagagaagaagtctagaagacttcatgagggaagtattgaaaagatttttcataagacagacatagcacagttgtgcttttcaaaagagnttttctcanaactttctaagttactagagattgtactctctagtaatcgattac

SEQ ID NO: 138358 - DNA, 420 bp, Glycine max
tatagttcgaattgtggactgtgtgtgtcctagcccgtgttttagtctaagcaccttgaaatggtgttgatcgatggaagggtatgttgtgatttagcctctgtttcgcttcctaatgtcacaaagtgtatgctctgttttgttgctggtctagagggatacagtccatgcccttctttacaaagatgatatggaaagttgggaagttgaacttaatgaagggaaagcgtattatatgtacaactttagggttgttccgaatcatggcctgtacaaagtttgagcacatccattcaagctctatttcactggtggtacaactttgaggcaagtcgatcttgcttgaattcctcttcatcatacgagtttatgagttttgaatacatcactcatggcagctatgatcctatcatgttgatt

SEQ ID NO: 138359 - DNA, 482 bp, Glycine max
atcttaagtgacttgagctgcaagctgatgattacattctccccctttctaagcaaattcttcttgacatcatcaaagtcttcatgatttacattctccccatttttgatgatgacaaccacctgtaggttaggagcaacaacaaagaaaatatctatttgcatatagtttacaccccctaggttttacaatgattgcttatatgagacaattgaagatttcatatttttcatatataaaaagttgtttcataaaaaatagataatttttccttactattttatcctatgtctttctctccccctttgtcaacataaaaaagaaatcatgaatagagaggagaaaaatgttaccacttgttgcaatgtataaaaatcaagtgataccaaaagacattaaaacaaacattcaatattaattaagcaaaaaccaagtcaataacacatcaatcaaaaacacaatcaatcaaacatacaatcaat

SEQ ID NO: 138360 - DNA, 461 bp, Glycine max
  unsure (1)..(461): unsure at all n locations
ctgcaacttactccctccttgaagttgctgtatgatgtgtcanaagaagacgttcatggactcgtccaaatcagcgatctctgcagagccctccatggagaaactgccaagaaaagaaagggaaggaaatcgaacctgattctgaaacggtggagtgttgcgtgggagggtgaantaataagtggagaaagtcacgtgtaagtgggtaaacaggagtattttggacttctcatcgacttattattttattagatagatgatataagttttctttcttaagaaaatatatatgaagtaggccaatatatatatgtatctacaatatataaatttcaaaaccattaaagaaaagcatgcacataattacataattaatttatttgatataattttaagatgtttcagaacttatcatattaataaaatcaacattatattaatagtaaaaaatatatttcatg

SEQ ID NO: 138361 - DNA, 438 bp, Glycine max
aactaagctgggagtggttaatagtctatttagacaatgtctagctcattgtttttatgatggaggtcaaattaacactttcttggtggggttgaaaccccaaactaaacttatgctttatgcttcaactagaagaaaaattatgtacaagacaccacatgaagccaaggagatcatctgaaataacacctcaaatgactacgaggttcctcatgatagaattcttactcccacacataatggaggagttcttgagttaaattctcatgatgcaattttagctcaaaacaagctactcacttaacaacttgatgcactaaccaagcagatttcaaaaaattcttaactccaaagtgtgcaagctacataatctggctctcaacaagtgttaaattgcactctatgtagaggtggtggtccaaatgatcaatgcttcat

SEQ ID NO: 138362 - DNA, 450 bp, Glycine max
agctgtaactcctattcaacatttatgttatttatttaaaaggcagggaagagggaaatgaattctcatgaaaaaaaaaaaaaaacttgagatagttgtgttaaaacctctgtttattttactaaatctcacctttattgtagaaatatattacattgataaaattcattgaaggactaggatctcatatagtgataatgtcattgcagagaatccattcctatggaagagacagatgggagagatcgattgctctatctgaagacaacttgatgttcaaataatgagtacatgacccatcatcattcgtggagagggaataaagattaatctcatagtcaatctaaagtaccaaagcttacaagatcggaatacctcatagtctcaccaaaaactaaagctaaagaccttggtaaggtgataccataaaaaaaaaaaaaaaaaaaccga

SEQ ID NO: 138363 - DNA, 467 bp, Glycine max
tataagaacaaaattgccttaatcatttccaaatatgcatgtgtattatgatgcatcaacaagaatcaagccaaggctattgtgcaagcaatcaatggggcaaaacacaccaaatgattataatgatggatggctcaaattctcacaaaggtaaaatcatcactttcaaattgagctttcaaaactatcatgacatgtagagaagaatcaaggatttcaagtcacaaaatgtcaagaacttttattttcaaaacaattacccatttcttgaacatatcctataattcaaagaaaaacatgcaaagtcgtacgtgcacacaaaattgacccaaaatattaaactaaaaatccgacgaaactaacaacattaacaaattaacacaactaacaaattaacaaaaccaacaaaactagcaaaaccaaagaacactcccccccatacttaaacaacacattgtcctcaatgt

SEQ ID NO: 138364 - DNA, 368 bp, Glycine max
  unsure (1)..(368): unsure at all n locations
agctngngtcatngtgtgattatgacctatattgtttttgacactacatccatcctgtggtaataatgcaatcttgagatagaaaacaaaatatccataacatgtgaatngaaacacccaaagagtcatcacgtacttgtgtttccattcaatgtttaccgtgcatgcatgttatgtacaataaattatttgtaattatacgtataacactcacaaaacttaattatggcatatttgggtcattataaaaggaaaaatcttcatcaatattcatcatgatgagggagacccaccaccatcaaagttgatgttgtgaagggagatatgcgatcattttctgacggtgtgaaacagctctgaacctttga

SEQ ID NO: 138365 - DNA, 462 bp, Glycine max
  unsure (1)..(462): unsure at all n locations
agcttctatataagctgaaccattttatcaatatacacaagttgagttttattcagaaaattagagtttatctcttttatcttagtgagagtgattctcctaaattcttgagtgattcaagaacaccctggctgtatcaaaggactttcacaacctttgtgtgttgccctcgctggaaagagtgagtctttccttcctttcatcttcacccttgttctttcaaaccataattctagaaaatccacctctgcccagaattatctagtggccataactcccattttacgcactcaaattaagtgattcttgaggctaaattgaatttcaaaacgagacctttcacctcgttttggaatcacctcatttggatccctgtagcttcagttattaccatcccattcattcattntatgccaagaaccaccttattatgacccacgaaattaaccaccttattttcca

SEQ ID NO: 138366 - DNA, 471 bp, Glycine max
  unsure (1)..(471): unsure at all n locations
cttgccggatgatgccgatcgaacatttcccaatcgacattatcttattgttattcanggactgaatagaataaacaatggccggtgtcggtcactatatggccccgactgatatccttcagtcgacattgcaaaatttcttttacaaacgctggccgataatgtttttttacggtcgaggaagttttttgttttggtgttgccaaaaaaatttacaatgtaggtcggctaggtttttccgtgcgagctcaaccgaggttgtgtttcggccgacacaggcatgttctcatttagtaagccaagaaaacgttagcccaccccggcacaaaaaaaaacatcattcacggaaattgatcaaaaaaaatgatagcttacgttggcgtggagagatgaccgattgaggtctaaaaaggaagcatcatcggatgacgccaattgaacatttcctaatcgacatcatgcaaatctcat

SEQ ID NO: 138367 - DNA, 445 bp, Glycine max
  unsure (1)..(445): unsure at all n locations
agcttggttngaggtacttactcgttgtagactgaagaaaacgaagaacgaacgatgaatccttgaagaacggtcgagaatcttcgcgtaattactcacggaaacgttacggaaacgttacggaagcgcctcggcttggattttcttcacggaactaattttcctcagctatttcgagagagagagaagtgcctaaggggctgaacccttttgttcttcacttcttcccctatttatagcaaaaataggggagaagcttgccgcccagctggaccaggcgagcaaggttgcttcctctagaagcaacagccttctggaggaatcttctggagggcccaggtgggcttggttgctatttacacccccctntttactaaatgcacccncccttttctatttntttttgtaattctttttccgtaacgttacgaaactttatgaattt

SEQ ID NO: 138368 - DNA, 451 bp, Glycine max
  unsure (1)..(451): unsure at all n locations
gggagaggatgcttaatggaggaaaagaaagatggagttaaagagggagggggagcacgaaattgaaggaagaaaaagggagagaagttgaactttgagttgtgtctcacaagattctcattcatcaaagttacaacaagtgttacacatgcttctttcaaccttcctatgtatgttgaactcactaggattgtttaccacagttttcagagttcaatattcacttaggatcaacatttcagccagcaattcaatcaccaaaactcaaattcacaatagacacaatcataaagaaacctaaaagttcaagaaaaggttcacaatcaaagactctctaagaantttgcatgaacatgttaaggactaattaacatgaaagatttgactcanatcaaataataggctaaaagaatttcatacactcatgaacaaatgagttagacaaagaaac

SEQ ID NO: 138369 - DNA, 475 bp, Glycine max
  unsure (1)..(475): unsure at all n locations
gacactatccacaactcaagctttcctttctttggccaatgctggactcgcngggcagtgtttttcttggctataggaggctcagaaacatcaatatctatcactccatcagtaggtctgcccatatatttgttgatcacagcaggggagaatctaacacactttcctctgacaaacactctntgataatcatcaccttttctgtttgatatgtcagagggaatgttgacaatgaattccctgactaagccttcataacagtctcccaacttggtgactgtcttcagtagtccagcagccttgatgaggtccatggtctccttgcaatccaaggcatctcttcccagtactctctcaaccagcagtctgcgttgatacacatatttccactcttcaacattgccaatggagtgggatgagatgttgttcaatggtgcatcangaacatttncaggcacctttctttcagatttct

SEQ ID NO: 138370 - DNA, 476 bp, Glycine max
  unsure (1)..(476): unsure at all n locations
ggaccttaagtcacctgcggcatgcaagcttccaagttcaatatcttcaatttcttcttttagaatnncatcctttactttaacacaaatgtcacctaaccctcaaaggacactctcttctaatgtttgtctatcaaactcataaaaccttcctcaaaaaacaaacaattgaggatcttaaaagtcttatgtccccaatccaccatagtgtttttaagcacaacaaggcaatgacatgaaaaacttatactaagaacatattgtgtactcactgtccattcatgcantccaccatttgacacaagaacctgtatagtccattcttggaatgctcagtagacctataccaattatattttctacccaccataggagtatcttcaatatctatatccctaataagcatattaaactcctcaaagtccttttctcttgtcaataattattggagttcctcatttcctccatcctctttg

SEQ ID NO: 138371 - DNA, 446 bp, Glycine max
actcaccttgtcttgattttcctagttctttaacaaactttgttattatacttggccttcatttaactggctttgggcttggcggccacgctcaacaaagtacttttgacacctactgtacggtgatttcaccaatgctgtcatgggaatgttgcgacaatcctttaaaaccttattgatacattctgagaggttcgttgtcatgtggccatatcgacgtccttctctatcgttagccatcgtccattattcctttgagatgcgatcaatccatgttgctatggctggactcagttcacgaaatatttctaaatattgatcataaatgtgcttgcaaggagtgtatgctgcataaaattagttatgaataacaattttaagtataaatgaaagtaatataattgtgaccgtcatatatgaaatcgtacccaacttcttctacattt

SEQ ID NO: 138372 - DNA, 447 bp, Glycine max
  unsure (1)..(447): unsure at all n locations
agcttgtgactcttggcaatntatttaatattagtcacttaaaaaggtgtgactnttgaaaaaatcttcagaaataagtcacttgaagaattgtgacttttggaaatgtatttttcgaaattagtcactggtaatcgattaccattaaggtgtaattgattacacatcaacatatgtgactcttcattttgaaaattaaaacatttagaagctctggtaattgattacaagtattgtgtaatcgattacacaagtttaaaatactttaaaactgtttaaacataagttgtaactcttgaaatttgaaatcttaatgttttaaaacactggtaatcgattactaccttctggtaactgattaccagagagtaaaactctttggaatgattttgnaaatcttcttgcctactcaatattctgaanaacttnttagtacttatcttgatt

SEQ ID NO: 138373 - DNA, 407 bp, Glycine max
  unsure (1)..(407): unsure at all n locations
cttgagccaaaatcctgactcaccataaaccttgacccattgtgagaatgccaatccttaccctcggaagccaaaaaaaaaaagagagagagagagaagagaaggaaaatttccaatcaaaggaaaaaggagaaggaaaatttcaaatcaaaggaaaaaggaaaggaaattcccaatcaaagagtgggagaaagcaaaaagaaaagaaagaaaattcccaatcaaagaatgggagaaagaaaaaaagagagaagttaaaaaagaagaaagctcctggtcagagaaaccagaagaaatgtgccgagaggtccttggaccaaacaatatctaaacaatacagaattgtcaccaaatgaataaaaaagaaggaaaggaaaccacgacctanaatggtcttccccctttaa

SEQ ID NO: 138374 - DNA, 315 bp, Glycine max
atcttaagcaccgcggctgcagcttaagaatggcatttttttttttgttagttactatttgttgatcagtggatgattaaaaaggttgattattttattgtttgctataaaaattatcttttatgttctaatcatagctttactctaattaaaagtaaattaacatacttaccaattatgaataaaacacacgaaattaatgttggaaaaaaaaccagatttcgttggtacatggcctctcatccacaccacattttaattttcacttaaacttcaccaaatcctaggtgcctctttttttaaacaagttccttc

SEQ ID NO: 138375 - DNA, 409 bp, Glycine max
  unsure (1)..(409): unsure at all n locations
actaagctgaaccagaatttagataaagatctagggtctgcttatgtcactcggganngatattcatagggacagggctaagggtgaattattcttgtcccaaagcaactacctcaagaaagtggtggaaaggtttatgatgcatcatagcaaacctgttagcacaccacttggtcatcatacaaagctatctattattcaagcaccacaaacagctgaagaaaggtctaaaatggatcaaacaccctatgtcagtggtgttggaagcataatgtatggaatggtttgcagcaaacctgacttggctcatgatgtaagtattataagcagattcatgggagatcctggcagtgcacattgtgaagtcgtgaagtggacactaacgtatctaaatggatctttgaaagct

SEQ ID NO: 138376 - DNA, 342 bp, Glycine max
  unsure (1)..(342): unsure at all n locations
agcttcttcacatagnnccgtctttgctggtcacttcttaatngcttaaaaacaagaaacactttggcctatggcataagatcaagagaagttagttgggttaaaaccattaacaacttcaaaaggagaacaattagtggtgctatgaacagctctattgtaagaaaaatcaacatggggttaacaagcttcccaagtttttaagttcttcctcaaaactgtcctaagcaaagttcccaaagtcctattaacaacttccggttgcccatcgngttgtgggtgacaagtggttgaaaataacaaattaatgcccaacttgctccacacagtccttcaaaaatg

SEQ ID NO: 138377 - DNA, 450 bp, Glycine max
  unsure (1)..(450): unsure at all n locations
ttttacatagtccgcctttgcttgaccttctttatgcttaaaaacagaaacattaggcataggcgaaagatcaagaggagttagtaggttaaaaccataaacaacttcaaaaggagaacaattagtggtgctatgaacagctctattgtaagcaaattcaacatggggtaaacaagcttcccaagtttttaagttcttcctcaaaactgtcctaagcaaagttcccaaagtcctattaacaacttccgtttgcccatcggtttgtgggtgacaagtggttgaaaataacaatataatgcccaacttgctccacaaagtcctccataaataggctaggaacttagagtccctatcactaacaatgnctccttgcaaaccatggagtctcacaatctcctctgaaaacaaatcagccacatgggaagcatcatcaacttttttacatggaat

SEQ ID NO: 138378 - DNA, 446 bp, Glycine max
  unsure (1)..(446): unsure at all n locations
acgttgtttgtcaataaccttaaacaacgttccatcagggatgcaaagaagtgaaaacccattactaaagtgactaatatttacagttttaaattaaaatagatttactcgttattatttgtagtaatatatggtttacttatatcttatttggataaatttctctataaatacttatatgagcaaaaaaaaaaagcaaaacgaattaaatttctcctataaattaaaatcacttatgcacttcagttttcgaagagaaaaaaaaaaataggtgcaaaaacttctataaaagttaagcattaaaaatactccatattattntcttctcttatactactttggttggtgtatacacttccactttaccgggtgttctgttaaaaaagtgcagaannacacaattttccattngcatcaagaatntaaacaatgaggcattaagatga

SEQ ID NO: 138379 - DNA, 450 bp, Glycine max
taacaggccaacttacaacagcaagccctaagagacttatcataatgatgcacaggccaaagttgagtatgtgaaaagattgtatgaccaagtgaaggtgcaaattgcaaaggagaatgaaagctatgccaagtaagcccataagaaaaagaaggaagtggtacttgaacccggtgatgatcctggacatttgagggcaaatgttttccaagaaggagggaatgatgagaatcctgaaactggccaaatatatgctaaaggtccaagtggagaaagacgaatgcctaaatggagaaggataaagcccccgagtggagaaggatgaatgcccatatggagaaggatgaatgcccaaatggagaacgatgaatgcccagaggtagagacattatcaagactattaattgttgctgaaggcctaaactaatatgaaggcccaagttaaatatg

SEQ ID NO: 138380 - DNA, 461 bp, Glycine max
agcttcaggttgctcattgactccaaattgctgcttagaatgacaaagatatgtatggtgatcttcagaagaacatacaccatagactcttgcaataggtgtagatgtagatttttgattcatggcaagtgatgcaagctccattggagcttgtaggcctaggatcttcttcatcaatggattcctttgcttcttggaagatgaatggcagcggaatggagaaaggaagagagagaggagacgccacttcaaggagaagatgagtctagaagaagctcaccaccataggaggccatggataagagcttggaggaagaaggagatgaatgaagggagagggagagaatagcacaaaattttatgctctagatgagctttgaaatctgaagtttaatattcaaatgaatcaaagttaaaaaaatgcacacacatgacctctatttatagcctaagtgtcacac

SEQ ID NO: 138381 - DNA, 467 bp, Glycine max
  unsure (1)..(467): unsure at all n locations
ttaaaactaagctttcgaaacannacttgctactggtaatcgattatcagagagtttttactccttggtaaaggatnttgtgaaaacttcatgtgctactcaatgttttgaaaaactttttagtacttatcttgattgagtcttttctagattcttgaatcttgagtcttgaatcttgatcttgattattcttgattcttgattcttgaaacttgattcttgaatcttgaaatcaaatttctcttgattcttgaattgttcttgactcaatcttgaaatcattctcttgggccttttgtcatcatctttgttatcatcaaaacaccttgaatcaatcttgattcatcatcatgaagcttgcttctacaaaacctattgacaaatatagttgtccataacgataaattagagaatgtgaaaaatggttagaaattaacattntattaaaagataaatatgcatgctac

SEQ ID NO: 138382 - DNA, 439 bp, Glycine max
agcttgtggtccaaagcaacctcgccggattcttcttctggcatatgcaagaacccatcatacaccgccagatcctacccactaccaaagtttatactttgaggccctcagtttcgggacgaaggaggagcaccgccgcgaccaccttcgtcggaatctccggagcaagattttccggcgagcttttgttgtgtgtgtgtgtcgtcaacgaacactctgtgtgtctttgtgagtgttttctgcgactaaaattgtacgaacgatggtcactgccttttatagaactttcttggtagttaattgacttaaatgtccttttataatatattactactattttggtcctgctacgagcatgaactggatattaacctcgttcgcagaattgtggtggagattgaacatgagattttcaaataaatagatctgtctcataact

SEQ ID NO: 138383 - DNA, 447 bp, Glycine max
  unsure (1)..(447): unsure at all n locations
ngcaagagggtactnngtgaatatgaacaagattaatttatgtgttgactgcagattctntgcatgggatttattggcattggtntgtggttaggaaaagggaactaatttgtcgagctaatttttggttttgcagattttgcttttccttgcatatttggccatttcaactagggtgttttttttttattattattattattagngggaaaataaccagggtgtttctttaaagttgtattgattactgactctgatttattttacaatcaattgtctttcatantttgtctctggtcttggctgagaatacacaagttgtaagagagttgtatctgttgcaatattgaaagatcgcgcgataaccgaagaccatgttttcgagaggtcaataagtgcataaccgacgtgaaaatcataagctatggactataggtgaaataacgt

SEQ ID NO: 138384 - DNA, 422 bp, Glycine max
  unsure (1)..(422): unsure at all n locations
gagcgttttctattgttatattaactgatttatgttatgattccattcaacccatgggggggaactagtgattggtttcgtctataaagattttggatttgctcaaaatgatcaaattatatctggtcttgtttccacttttccagtcattttagatacaattttaaaatattggatttttcgttatttaaatcgcgtatctccatcacttgtagtgatttatcattcaatgaatgattgactgacaaaatgattcacttatcaaattttaatttaaagttttttagctaaaaagaaaataactttgctttctcccttctttntaacccccttaaatgaaaagaggggttccccgacttggatagggaactatgcgagtgacctacctaatcttattgtagaaattttcaggatcaatgatt

SEQ ID NO: 138385 - DNA, 435 bp, Glycine max
  unsure (1)..(435): unsure at all n locations
ttatcgtgtcacttanattatatataaatgctcgaactcttttttttatttgaacaagctcttgattaccaagaatagaatatccgcttagaataaagaaacaaattatatctgtcgagaagtgcaaaatcgtattcatacgatcttcgttgtgcgttttgattaattggattgtttctttatagattccagtacgcacgttttgtagatgtgtttccggacattccttttacatgtcatctaagaaaaacaggtcttcaaattctatgagattttttagaatactctcttctttaatatcattcaagaaaatttcggattgcctagtattccaccaatcaataaaccaagattcgagactcttcttaaatgtgaaagagatacaccagggctaagagactatagatgttagatatagaaggggaatgaatgttt

SEQ ID NO: 138386 - DNA, 486 bp, Glycine max
  unsure (1)..(486): unsure at all n locations
taagtcacctgcggcatgcaagcttggaaatatcctcgcacagagagtgtgtttctttctacaagtgtaccagatcgctcaagtactataaaacgataagtgaatatcgagtatcgaactctcggggaacttgttttacttggtaaagctgtggttcagcaaataagtgtcttgtgataaaattttggtgtgtggtatggaaaagtatgtaaactaacttttcaaaagcaagtaaaggtgagtagtggtgtgtgaagagagatagacaacttgttggtcttcctactgggtggactgatgttactaaggatgttctctacctaacaatgttcctgtgttctatgttgtctcctaaactactaaaccccgatgtctcgcgcatgtttagcctaatcctaatcgagcatcgtcctcagatgtctcttggtggactaatnataaccagaaccgcattaagacataacttaccaaanactaagttatcgt

SEQ ID NO: 138387 - DNA, 458 bp, Glycine max
  unsure (1)..(458): unsure at all n locations
tcttattcattcttacttgagctatctcatttttttattnttgttgtctaaaattatgcatacacctccttcaaagtgaagtgtgtagcctctctccatcattagaccaatgcttagaagattttcttttatgctgggaactagtaagacatcatggatgagtagcgtacctctatttgtctccaccatgacagtgcctttgtcttttgattcaaccacacttccatttcccagtcgaaccttgactttgacagactcatcaatacttttgaaaatagtctcatccttggccatgtgattgctacatccactatccaagtaccagcttcctcccttttcttttattgagtcttgagtggcgtagaacgtacattgttcttgatcatgctcctccgtgatattagcttgatgcctattcttgttgcgacaatatttctctactagcccgaacttcttgc

SEQ ID NO: 138388 - DNA, 456 bp, Glycine max
  unsure (1)..(456): unsure at all n locations
agcttgagatgaggaagtgtagaatggttatacttcctgcttttattcgntgaccacagagtggtaccaggagatatgtcgcgggggtcaagagaccttggggacgtcaagtggggtgctattgcccaaaaccaagcttgaccaatcccgacccaacccgggcatagtcagtcagtgagaacctgtgatgtacctaaacaggcgagctcctggcagtcaacagataaaaggaacaaagaccacaaagcaaggaggctggtgtggtggctggccagctttgaatcttgtgtgatatatgggttatggcctctggtaatcgattaccaagggtgggtaatcgattacaaggcttaaaaatgaagacaggagactaagatggtctctggtaatcgataccaagggatgtaatcgattaccaggcttgaaaacgaggtcatgaagctaggagagcttctg

SEQ ID NO: 138389 - DNA, 455 bp, Glycine max
  unsure (1)..(455): unsure at all n locations
tctggaggaagcctcttaatgaagcttctgaaaaaactcttgaagctgcctcggtagaaacgcttcccagccttcgttaaccattggatcttctcgaaatttggtttgcaacttcacaagacactttaccatgatttaaccgttgggatctttgagaaaatatctggagtgtgctagaagcttccgttcccgagagcatctcttatttaagcatttcagcctttgctttcttgtagcttaggaaaaatgccatttcttcttctttctttcttccaaatccatttctaaagttccaagtactttctccatcacccacatccaccattagccaccacaaaccatcattgttctccattgaaaacccacaccgagaggaacccttcaaccgaagcagaatttccaacttggcttgcggtttctgtagagaacgaanaccctaatctgatctttcgttt

SEQ ID NO: 138390 - DNA, 424 bp, Glycine max
  unsure (1)..(424): unsure at all n locations
gcttcaagaatcaagatcaagattcatgtatttttattcaagaatcaagagaagacttaatcaagataagtatgaaaaggatttttcaaaaactaagtagcacatggatttttcacaaaaacatgtttaccaaagagtttttactctctgtaattgattaccagattgctgtaatcgattaccagtagcaaaattgatttgaaaaagttttcaaactgaatttacaacattccaattaatttcaaaaagttgtaattgattacaatgttttggtaatcgattaccagtgcctttgaatgttaaattcaaattcaaatgtaaagagtcacatcctttcacataaaagccttgtgtaatgattacactgatttggtaatcgattaccagtgattgtttctgaataaatcanaagatgtaactcttc

SEQ ID NO: 138391 - DNA, 452 bp, Glycine max
  unsure (1)..(452): unsure at all n locations
ctactgcaacannattgaattaaagaaatntaaagcacatacatattaattacatattatacataataaaatatcaaaattattagaattaaagggccagtggatcaatgaaattacatataaattactcattaaacataataatattagtttaatacaaattaaagagttaatgggttaggttagtggttcaacaagtctatatattaaaattcgttattcaatctaaaattcaatgactttaattgatttgggtctgattcaaacataaaaaaatattcaataaaaactatttgaattaatttgggtctattcaagttcatattggatatgtccagaaaaacatgaaatgaggtcaaactctcgaactgcacggtagtcaccgtaaggcatccagcaaacatcagcagtcttcagtcgatctagacgcttctgatacatcgatgctggta

SEQ ID NO: 138392 - DNA, 385 bp, Glycine max
  unsure (1)..(385): unsure at all n locations
agcttgagatgangaagngnngatttgtttttacnttcccgctttattcgntgaccacagagtggtacctggagatatgtcgtgggggtcaagaaaccttggggacgtcaggtggggtgctattgcccaaaaccaagcttgaccaatcccgacccaacccgggcatagtcgtcagtgagaacctgtgatgtacctaaacaggcgagctcctggctgtcaatagataaaaggaacaaagaccacaaagcaaggaggcttgtgtggtggctggccagctgtgaactctgattgatatgtgggttattgcctctggtaatcgattaccaacggtgggtaatcgattaatatgctatataatgngacaggatgctacgatggtctctgg

SEQ ID NO: 138393 - DNA, 443 bp, Glycine max
  unsure (1)..(443): unsure at all n locations
tgtagcanatgcaaaccacaataacttttagctcggatattctattgagttccgtaatatatcaagatgctcgaaattgactacagaagctcttagcaaattaaaacgacaataactgtctactcggatgtccgattgggtcacgtaatatatcgagtcgctcgaaactgaatacagaagctaagagcaaattcaaacgacaatgacttttaactcggatgttcgattgagtcccgtaatatatcaagacgctcgaaattttatacagaagctcggagcaaattctaacgacaataaatttgaactcggatgttcgattgagtcccgtaatatatcgagacgctcgaaattgaatatagaagctcttagcaaatgcatacgacaataaacttttactcggatgtgcgattgagtcccgtgatatatcaagacgcttaaaattg

SEQ ID NO: 138394 - DNA, 428 bp, Glycine max
agcttattatgaattcatcttacttggtttttcttgcccagaggtgtgcttcaataatttagatgtagacttgagagattgaaaaatgagggtattgttatgattttccataatgttttggtagttttgaagaggttgtgctgctggctctgatctgctttgttgatgtaactagcttatgatgattcctaacttttatgaacataaacaataatgacaacaacaaagccttttcccagatgagaccagctacatcatcaaacaattactctgcttatgttgtgctctgttgtgatttctaacatagtttgctccccagcctatataaaagagattagtatgagattctagtgtggagtttataaaccttgtgcttttcaactgtaatgactaagttttgtggtgtggttttcctaaatctctatttt

SEQ ID NO: 138395 - DNA, 450 bp, Glycine max
  unsure (1)..(450): unsure at all n locations
tctgtagcttaattgaataacttcaatctacgaacctattttaagtggattcaattcaactatcctctattcatgtctatttaccattcactatctaagtgtgtcccctagctaattactacataggttttttttatatcataaaagtgcccgaaataaagtaccagtatggcaaacaaagctaggcacattttgatatttcttgctttggaatctctatgaacactaggataaattatacaacaggaggaatccaggctaaaaggaatagaattcctgaaataattattatgacctttcaaaaagtggtttcttttacaaacgattgaagatggactatttgcgagctggctcttgcatgatgcatttggaattacttcaacagcacgatgagcaggaatgattcatccanacttgtacaagaccttaacanatcacagacatgtgtgc

SEQ ID NO: 138396 - DNA, 380 bp, Glycine max
  unsure (1)..(380): unsure at all n locations
gacacatcaaactaagcttctagcctttattggtgtattagaacctttttttttctctaattgttgggaagngcncagaaatgtggggcaattttctgttgatttcttgctcgattgcgttgaattgggggtttgtattaaatggccctaagcctataatgcatgttgaagcaatgggacatgccacattgttctcgtactcttgctattgatgcctaaacacacacccgccaagtgttccgtgaaatgctctaatggcattatctcgtgattttcctatggaaacaaaccatagggcaaatatgcttgcacatattatttatatatttggacacgcgctataattggaggaggctagagtaattgcccacatatatcta

SEQ ID NO: 138397 - DNA, 444 bp, Glycine max
  unsure (1)..(444): unsure at all n locations
agcttaaacttccctcttagtaatgccttattcatcatatcagcaccactaaatgatttcacctttaaagggtcacaaacatcttaatgcaccaatttaagcaactcaaattttttggagggaggatgcttcttgaaggaaactctggtttgcttaccaaccatgcaatgagaacatttctccaaatttgcattcttcaatcttggaagcatatccttcttggctaaacaattcagccccttctcactgatatgactaagccttaggtgccacaaagatgcctccatatccatagcattcacactgtctctagcaaccaaagctttcgtccaatacaactttgaaattntctcccccttggccacaaccaagttacccttggtgagtttccactttctagaaccaaagtggttatcataaccagcatcatcaagtacttgcaca

SEQ ID NO: 138398 - DNA, 452 bp, Glycine max
  unsure (1)..(452): unsure at all n locations
cttgagacgcatgntgaaccttggcatcatcaaaacattcagctngatcccttgtctacaccaagttgggtattcaacttccttaatgaagtttactgccagtagtttttcgacctcttactttatcgtcttcctcttatcatctccaaattccttttctaggctaccagctttgcatccagattcagtgaaaagtttatgttcaataaaattgggatgtattccagacatgtcttgtgctttgtaagcaaaggcatccttgttgtgcctcagacatttgatcaactcttcttccatgtttaatggtgaatgacagtctgatcctcattttttgcttgtggccatcgatcaagatattcttcaagtcatctgccagttaggggcatcattctacatgttcactctgagggtctaggtatatgaaattgatcgatcaatntatgttagttggt

SEQ ID NO: 138399 - DNA, 451 bp, Glycine max
  unsure (1)..(451): unsure at all n locations
ttcctaggcctagaattgtattcttcactcattttananccctcacgccgcccctatacatataaaacagtcccacaacccaaagctcacaaaaccatgctcatatctcgttgaggcatttcaccgaacacttggtgggcgcatgtttatgcacgaatatcaagagaatggggacaatgtggcatgcgccattacttcaaaatacaccctaagccaaggccattccttacaacccctcaatccaacaaaaacaagcaacaatctgaggataaatccctcacgtttcttagcaaacacatgcaatttanggcaccaaaatacatcaatggaaagctagaaagcccaagaatgaggtacttacctgttggagacgaataatagagcaaaacggaatcataaacgcataatatggtgacctaagggcttgcaaatccgtgagtcctgtgagcct

SEQ ID NO: 138400 - DNA, 397 bp, Glycine max
  unsure (1)..(397): unsure at all n locations
aatgacttctcccaacatatgtataagaaatggaataaaggtcttgcgatgatggataaaatgactgttgtattctttctgatctcttttcattgggaactcttaaatatgcccatcaagaatcgctcccttctacaaggtttcatattctttttcttccattggacattttttaacagactaaaatgatcttctgaatcacgtactgataaatatcttgataaagttactaaagtaaactaaagccaaactttccttcatttcattacttttcgaagtaactgtataccacaaccgaaaaattcactgtggccttccttgacaagaagcctacaagagtaataaacaatattgggatcttcccaaaaacaaatgtataanattagaataaatcaat

SEQ ID NO: 138401 - DNA, 474 bp, Glycine max
  unsure (1)..(474): unsure at all n locations
actaagctaaagacaagagctaagtaaaaacactgggggtatacttgttttctcaatttgaggtacgtccagntctcctttacaacctataaaaggttgcatttaatcaagctgattacaagaagtattctgacctgcattcctgactacaacaagtattctttaggccacttttgacacacaatctccccctgagattaaaaacacccaaatattctttgatcattaagctactcctagctttgcaaacaattgttggaatgaatacaatatttaaatctctcaaagagaggatatacactaagtttgaatacaatagataactttgctaaagccaagattgatacttatagagttntatttttgaacatgcaacactttcgatagagatatagcacttgtgtaattatgatcagcctcgtgtattgtgttgcttttatacgccttagaaatgtatctattctaagatatgtg

SEQ ID NO: 138402 - DNA, 419 bp, Glycine max
  unsure (1)..(419): unsure at all n locations
gatgttttgtcttttacattcctaactcccttgagtggcatttgtaatggttgttatattggatgttgcatctttagtacatatcatatcttttatgcctcatgcatcatcatgagtaagtgaaaagaaaagtttctaagttagaaaagtttcttcaggaggaaaaactctctattttaatcgattacaattctatcgtaattgattacacaagttgtctgaagcttgcagagttatgtctcgtatctatttaatcgattacaaccttatcgtaatcgattacacaattgttttcaggcaatgactaatntattcaggtgtctctgctttaatcgattaccatgtgatataatcaattatttctctttctttaagtaattcagatgtggacaaaaacactttaatcgattaccttcagt

SEQ ID NO: 138403 - DNA, 461 bp, Glycine max
atactcaagcttagactaagttagcctagcatcctcagactgatggcctaacttatctgaccattcattcattggaggaccttttgagggcgtgtgttttaaagcaaaaaggaagttgggagagttgtcttccattgatagagttcacttataataaaagttttcattctacgattggcatggctccctatgaagctttgtatggtagaaggtgtaggacacccctatgttggttagagcctggaaaagacctcaccttatgaccggaagtggtacaacaaaccaccgagaaagtcaagttaatccaggaaaggatgaggactgctcatagtaagcagaaacgttatcatgataagtgaaggaaagatctggaattctaggttggtgatcatgtattcttgagagtcactccgtggactgcggttggtcgagcattgaaatcccgaaaactcacaccttgc

SEQ ID NO: 138404 - DNA, 439 bp, Glycine max
agcttgagcaattcgtcctcaaagttggtctatattatctcaccttcaacactcttatggacattgttctctccccgaaatgcatatcgtagacgtcttcatgtagttcttagagcacatagttagcctagtattggccaagaaatttgagtagaggggaggagaaccctctactatatagtttgtcggccactaagatgtacctaacaacttgtgttcttagcttttttggttttctctctgtttgttgggagtgtttcatgcttcaagtatttgactatttctctcttccaccttaaagagtttccttctttgatctagaaacatttgttacctgagatactaggtacaagaaccgagtgaataatgaagggtttcagttgcccaggtttaggtgaagttgtcaagtgagccaactcatcagcttggtcattgatct

SEQ ID NO: 138405 - DNA, 481 bp, Glycine max
  unsure (1)..(481): unsure at all n locations
gacctataaatctcagcttacggtcctcctttcagcacttcttggtaatcaacattatggtataattggaaaagaaatctaccagcaacaaggttagtgatggtcatcacttgaaatggtttccatactacagacatatgttccttcattatttggtttcagatgtttttgtctgttagaaaactacccaccagacatattgagaagtctgctttggccttaatgggagtgtcaaaattgatttccagtccaatatcctcgtcaacaatctgtaggttttctatattgggtgtctccataaggttatagctgatgggtaaagggaagggtacatgcaacaatgttgctcgggttcacaggagtaggttaaagctctcaagggagagaaagcatctcactagggagagaaaaaatcgagtatgactatcagcaaaagtaagttataatagtacgtttgaaagaagtcnggtatttacaaatc

SEQ ID NO: 138406 - DNA, 405 bp, Glycine max
tagagtcacctgcggcatgcgagctttacctgagtttcactgtattaatgtctgttctttggacgaaaaggcgagaaaatgaagctctttatgttataaatatacgaaacacaattgctctcgcacatataagagtcttggtcatcataaaccgccatatccctatatagtatggggtttaagtctaagactattcattacaggcaaaggacttgcatcaacagctatggaatactatatctggatgtgtttgctcttatgaatcagtagacgtctaagtagtagagaaactatttatttcccgctaaaaaacaggatcttcacgtttgatataattcttttcaaatagacatatggttcctgcgaatgtgtttaatcagattagtaaaaaaaaaattcatggag

SEQ ID NO: 138407 - DNA, 460 bp, Glycine max
  unsure (1)..(460): unsure at all n locations
ngagccgatcccacatgactggaccattctcgcaaaatatcatgtttttgtctggtctcccnaagaccgtacctagtgagagtgatcagacttaccaatgtgtgtggactgtcatgtcatgtactactatgcgctcgaccaggatattcactgacatggtaccacatttcatataagatagagtcttagaacatttgttgcataatgttcgtgtattgatcgatattcattggatgagtgatattgtgtctgattcttgagtacgtgaatgatcttaaaatatatgagacatgttatgtagagatgtgatgtcacgccatcagtggtggaatgacttgaactgtgtttaaacaagtctgatttcctatatatgatacgtatatctatgttgccacgtttatctctgttaaccaagaatgtgataactcaatctctgtgacgtgttagcgtttcatcatgt

SEQ ID NO: 138408 - DNA, 206 bp, Glycine max
tgcagctggtgaattactgaaaccatttttgttctgtccgggttatgagcctacacatgtcgacaaaagaagggtcgccttataaaggaaagaaaaaagcttggcccatttacaagggcagggaccacaagtggagtgggtccccatttgtcacattgacaaaagctctgtcaccccgggatggatgcatgatgatcaggtggctg

SEQ ID NO: 138409 - DNA, 475 bp, Glycine max
ggctatcaatgttaatcccaaactcctttgcatagggattatatctataatcagtttcgggaattgtctgctagtatattggaaaagctatagattaattaaactaaaccaaacctgcaatacacattatatttttgtttgtaaagagaataaatattgaaatggacatgttaaaacaattgcaatttatcatacaaccatggctattcagtttccaattgattctgacaaaaataagaatataaagaagaaaataaaaggtttgatgagaattctaaaattacccaaatacgggaaccagtgactaggagtaggatcaaataactagtggataccctctaacaaatgatagcagacatgcttaacaaggctcaagtggagaaagatgaatgccagagacagaggcactactaagaatattaattgttgttgaatgcccacactaatctgaaagcctatgtcatatatgttgtat

SEQ ID NO: 138410 - DNA, 445 bp, Glycine max
  unsure (1)..(445): unsure at all n locations
aagagccttctagatctgttcttcaattgattntgntcatcaaatctttttttttctttttttgctttttatcatagtccaactccttcacaaatatcacccacttcagcaccgacatctcattgaattcccactgctgacctctccaacctcttgtgtcccttaatggcatcgtttttcactcctccctcgaagtctcttgctctttctccttttccatcattgttgtgatcttccatgaagctagtgcgatggattggggaggggaggagagtgtgatataaatgacgattttcatatctaatttggagttgtgtttgttgtggatttctgatctaaggttgattttttcctttatcaagatttggattgggtgttgttagggaaaagagttccttgcatttttttaaaaaaaaaattcttacaatttatggtggttttaatc

SEQ ID NO: 138411 - DNA, 463 bp, Glycine max
  unsure (1)..(463): unsure at all n locations
tctntgagaaaacttccttgagaagtagagctttcttttacacccatctaanaactaagctcacctccttgagaagcttccttgagaagctagagcttagctacacacacccatctaaaaactaagctcacctccttgacaaaatacatgaaattacaaaaaaaagtccctactacaaagactactcaaaatgccctgaaatacaaggctaaaaccctatactactagaatggccaaaatacaaggcccaaaagaaggaaaaacctattctaatatttacagagaagagtggatccaaccttgacccatgggctcaaaaatctaccctaaggctcatgagaaccctagggccttcccttggatctctggcccaatctacttgtagtcttctatccaatgcccttgcagggtaggatggcatcattccctccaccttggaaaggattngacctcanatcccgag

SEQ ID NO: 138412 - DNA, 257 bp, Glycine max
gatattttgaagctaatacaatcatgtcttactttaccaaatctccttttgtttgacttctatcaaaagtccttctgtggtgggaggctagtattcggtgcttatgccatcaccttgcatgtataaacttccctatatcgacatacctgcatatacacctgtgtcgatgcatatcttaaaaccaataaagccattgagcaagatattcggttccagcaattattgcccgattgttactccgtttcggttaatacctc

SEQ ID NO: 138413 - DNA, 412 bp, Glycine max
tcaagaaaataaagggtcctaagagagatatctaaacttttgtcagcatcaaactgcttgggagagcaatggtaacaccattcattttagcaagtgtctttgcaatcaccctaaacttcctcgggtcatcttaactacatggctccacttaccaccttttatagaatcctgctggaagatgacataatcaatcagaagatagtttctcttttctaaaattgatatacaagagtgattaacagttaaaattttacttcaaccaacgtaatgaaatccaaatcattcatcatctcaatatatactagttgggtgatctctgaccagaccaaaattcaagttccataaatatgggtcaaagatgatcagataaaggactcacatggttcaaccaagggagcatacttttcttttt

SEQ ID NO: 138414 - DNA, 450 bp, Glycine max
agctgtgtgaagagatagacagataatgtcttataaagttcttgcaattgtctattcgctaagcgcagaccttgcgctaagcgcttagtcttcacgcgataagttgagcttgctcacgctaagcacacagacccctgattggttggctgaatagttcagctaagcgcacatcactgcgctaggccccacatcttcacggtaattgaactttaactaatgggcttagcgtggatgatgcgctaagcaccacttcttctctggaaaaattttattgtagcagcgctaagcgcgctatcctacactaagccccagatccattctgtaacttgagtttttaagctgggcttagcgggccaggaagcgctaagcaccaatctcttacgggttttgaatgcttggaagtgcgcttagtgcacctgttgcgctagcctgactactctctgaagttga

SEQ ID NO: 138415 - DNA, 463 bp, Glycine max
  unsure (1)..(463): unsure at all n locations
ngaaggtgcgtaccccaccatttttccatggtttaatattggtaatgtgtccactatcattgntatcatttctttctccgtcattgagggaaccacttgacccgctagatccctctccctttgggcgtattctttgaaagatccgtgccccctcttgcatatgctctgtagttgcatcctatccagagtcatatcagaattgtactgatactgcctaacgaaggcaaccattaggtccttccaagaatggactcgggaaggttccaagttagtgtactaggtaacagctaccccagtaagactttcttggaagaaatgtatcagcagttcctcatcttttgtgtatgcccccatcttccgacaatacatctttggatggttcttggagcaaatagtccccttgtactcgtcaaagtctggcaccttgaacttgtgaggggtgatgatatagggtactaagaac

SEQ ID NO: 138416 - DNA, 362 bp, Glycine max
  unsure (1)..(362): unsure at all n locations
cgacccggatcctnaagcgacgagctgcactttaccaatggatatttttttttttctttgtgcccttggccttttcccttcttgtttgagctcatacaagccttaggaaaacctgatttccttacccttagaatttgagcttgaatagttggaatagtgggggggatgttcatggaaaatatttggcctggcttagtttttttggcatctggtgttacattttgctagacttctaatctcatacgaccgtcaaaaaaaaaaacattttttaaaagaaacgaaaaaatcataaatcgtgtgcaatttgaattttctttccgtagacaaagatacaaatgagcgagtgataatagttgattaac

SEQ ID NO: 138417 - DNA, 447 bp, Glycine max
tctttgggaccttgaacaagcaatcaactcctctttcttataccatgctatgtgctcgcgactggtccctttcttcccttcgcaacttgagttcattattgctaccccatagagctccgcgaaatttgttccggccatactcttccttgcgagccctcttggtctcttgttcaagggcttttgcggtaattgcattctcttcccgtaacccggcgcactccttccgaacgtgtgtagcagccaacttgaacttctccttggcgagttttgcctttcctaactcgcttttgagagcttggacttcttcgtcctcttccggtgcttcaaaattctcttcgctgacgacttttaacttggcgagccaatctaaacctcgtatgcgaactttcagccattcgtggtacccaccaatgatgccattacgaatgcctctaagctcttgatctt

SEQ ID NO: 138418 - DNA, 161 bp, Glycine max
atatatatatatataatatgtatatatatatgtatatgtgtatgtatcgcttaggtggcaagataccttgggatttcatgtatgtagcaacaatacctcacaagatatatatatgtatatatatatatatatatagatatatatctatatctgtgtgaatg

SEQ ID NO: 138419 - DNA, 429 bp, Glycine max
  unsure (1)..(429): unsure at all n locations
agacgcgacacatgaatactcagcgtcagagattatncacgtgacaacatatttgtgtgaatttaatagagggtggcaactaaacattctctcggagacttatgcacaatcaagactcttgtatctatgaatgaacctaaagatgttaatgaagccatactaaatgacaattggataataactatgcttgaagaactaaaccaatttgcaagaaataatggatgggaagtagttgagaaacccgagaactacccaatcattattgggacaaaatggcgtggtataaatgaattagatgataatggatagttataatgaataaggctagattagtcgctaaacgacctaataaagacgagggaatgtattatgaggagacatatgctccagttgctagatagaagccatcggaatgctattggcttatgc

SEQ ID NO: 138420 - DNA, 449 bp, Glycine max
  unsure (1)..(449): unsure at all n locations
agcttgtaggattatggggtacccatcacatgtggtactaggtggcggttgggcgatggtgcacaaaaagttttccacatccacaaatcgcgcataaacccaccatcccctgttgcccacctccaattgagctcacgtactcccacgtagcccaaatcctcgtttctctcaacaccgggtccccatcaatcctcccaagcttccccaacatccaagtaatacaaaattcacacagcaaaaactatcacagccaagaaaacggggcaaaggcagaaaactctgcccaaaacaccaaccaaaatcacagcttttctcacttaaagaccccagtaacaattccttcnnnncagctcgttaaccgttggatcgactcgaaaatttactggtagtctctagtacataagcctacattntgaccggtgggatctactagtanacatccagaactc

SEQ ID NO: 138421 - DNA, 438 bp, Glycine max
  unsure (1)..(438): unsure at all n locations
ntgtagcgtagggactaaagttagtgagctttggacattctgttctacngntactgacggaggagctgaagtggatgatgaagggatgtcttctattctatccctttttctggatgccatctgtaactaaaaagaactcaaaattccttagaccaaaattgttcaagtttaaaaatagaaataaaggctgaaattaacgatgggcgctcagcgggataccactcgctcaacgcgctctcaaaaacataacatattggcttagctggagccaaggtcgcttagcccaatagtttccgtgacgaaatgcgcttagctcaggtagactcggcttagtgtgaagcttacaacacaaaatntttctaagttaccttggcttagcgattcaacctcgcttagccacaaatatctcaacaggaggatgagttttcatcctcacaa

SEQ ID NO: 138422 - DNA, 386 bp, Glycine max
agactccagagcacgagtcaactcagaccaagtaaacactagagataatgtctgtgttagcccatatttttgatgagctaaaaatatgctctaaatacgaattctgtcagattctgttcgaatcgaaaagaaagaagagtctattgaaaggaattcacaggttcaaggaagtatttacgaagtatagggctaagacaagaaagagggcttcgaaccattgggcgaatcgagcgggcgtatggtcgagtcgaagtcaaggcagcaagatttctggacttagcataatttctgacaaaacttcacaaaatcagttcgacttcgagcaatgtggataaccgttctaaggagcagttatgtgcatgcaaggtgtacgtagcaggacactt

SEQ ID NO: 138423 - DNA, 459 bp, Glycine max
  unsure (1)..(459): unsure at all n locations
tgaagcgagcaagagacccganagtaacagagtcttcttcattatatgcataatcctcccattcaattcagaatcatacgtttcatgcaccctgtccagaagcttcctccctacacccttacccttcacaggtcgtccatcatcataaaaaagagcaacctgcttaaacataaacattgaataaatgattccaagttaaacagagacctgaaataaataatgctggtgaaaatgaaagcacatacactatactgataaaaatgcccatcagtgtttgcaacgttcactctgtagtgattggtgagaagttgcagcttcgtccctcttgaagcaaggccacgcctggctattggaaaccttgaagcctttttcttctccggctcagctttaacaggtacaacatctgatggtacaacgggaggtggnggaggcaacgaatcctcattntcagtatcattt

SEQ ID NO: 138424 - DNA, 372 bp, Glycine max
aatttcagctatactttctcctccattgatggaacttcgtttctctccatgtatctcctcacctgtcttgagctgaatgttgtaacataattctttagaagttccaccaattaagcttgctatagaagctagatttgattttctatggttcaaattccttgttcttgttcttgaaccatgaattgtgttgagtttaggatcctttgagttttatattgtcaatttatttggctgaaacctaaaccataaaattcttacaaaaacattaaagtagaagaaaacctcgaaaatctagaatgacatattcacctattgtagttttgacataaaagtcatgtctagtcatgaaacttgtcacgtaagatttcttat

SEQ ID NO: 138425 - DNA, 441 bp, Glycine max
  unsure (1)..(441): unsure at all n locations
cccatcatatgtggtactatgtggcggncgggcgatggtgcacaacaagctttccacatccacaatgcgcgcataaacccaccatcccctgttgcccacctccaactgagctcacgtactcccacgtagcccatctcctcgtttctctcaacaccgggtccccatcaatcctctcaagcttccacaacatccaagcaaaacaacgttcaaacagcacaagctatcacagccaagcaaaacagagcaaaggcagaaaactctgctcaacacatcaaccaaaatcacagctnttctcacgtaaagaccacagtaacaattccttcgatccaattcgttaaccgttggatcgactccaaaattttactggaagtctatagtgtataagcctgcattttgaccgttgggatatactagcaaacatncagaactcattctgcacta

SEQ ID NO: 138426 - DNA, 432 bp, Glycine max
  unsure (1)..(432): unsure at all n locations
gctgtcccaaaataggtttgaaattagcatttcagtttttccagtttttgtatcanttcaaggtccaacgccttaaaatgatcacctttcaagtaaaaagaatcgcttgattcacgattaaaaaagaactacgtaggtctgatttcctctccaaaggagggtacgtaggagcaaaagccccgcttttgtcgacctcaaaacataaaaagaaataaaagttaagataacccaattccactattctaaaaaaataggttgttgtcctttgagacaaacgtgagaggtgctaataccttcctcaagcgtaaatacaactcctgaacttataatttcattttgaccggttccttcggttttctgacgttattacaaataaacgttggtggcgactccgcgcatctttcctcctttggaaagcgcacacgtgagcct

SEQ ID NO: 138427 - DNA, 278 bp, Glycine max
ttctttaccaactattgagactgtggaagatctacttctggcgtgtattatagaacaacaaagtaggtggatggattgcttgccattgattgattatacttacaacattaactccaatccaatattggtatggctgcttttgaagctctatatggacgaaagtgcgaaactactattagttggtatgatgatggataaacacaacttttttgacctgatatgctacaacagattaaccaacaagtgaagttgatctgagagataattaaagcatctca

SEQ ID NO: 138428 - DNA, 354 bp, Glycine max
aaaaccaactctccccaaatataaaaacgggagagcgagtaatttgtgttaccacttagcactccctctctctcgaaaagccgagaaaatagtttcatgaacaaaatcaatccgacgcgcaaccgtaacgcttccgcgagtaatcacacgaagattctcaaccgcctgacaagagaccacgttcggcctacagaaactcccatcatcgacgggtaacgtccaccaaccaagctacacaagacactcctgaacccgagcgaggccacataatgctccatgtagtttgatactcgaacacatatcactcatataccaccatctgacatgcactagccatttatttaagtcatatct

SEQ ID NO: 138429 - DNA, 436 bp, Glycine max
  unsure (1)..(436): unsure at all n locations
agctntacatgagtntcactctattattgttcgttcattggacgaaaaggcgagaaaatgaagctctttnttttataaatataaaaaaattaatttatctaacacatataaaattagtataaatcaaaaacagctatatatatatatatatatttatttaaatttaagactattcattaaattaaaataacttgcatcaacatttattaaatattatatttggttattttttttcttatgaattagtagacgtttaagtagtagagaaactttttatttcccgttaaaaaacttgattttcatggttgatataattttttttaaataaacattttgttcctgcgaatgtctntaatcaatttttaaanaaaaaatcatggagagtacaaatctactttttaagttaatttttttacacaacaaataacaaatatat

SEQ ID NO: 138430 - DNA, 438 bp, Glycine max
  unsure (1)..(438): unsure at all n locations
tgtgccgatcccacatgaatggtccattctctcaaaatatcttgaccttgactggtctctctatgattntacctagtgagagtgatcggacttaccagtgtgtgtggtctgtcttgtcatgtactcctangcgctcgacgaggtttttcactgacatggtaccacattacatataagattgagtcttagtacatttgttgcataatgtttgtgtattgattgatattgattggttgagtgatattgtgtttgattcttgagtacgtgaatgatatgaaaatatgtgagacatgtaatgttgagatgtgatgtcacgcgataagtggtggaatgacgtgaattgtgtttaagtaagtngtatttcatttatatgatatgtatatctatgttgtcttgttctctctattagttacgaatgtgataactcactctctgtgt

SEQ ID NO: 138431 - DNA, 395 bp, Glycine max
  unsure (1)..(395): unsure at all n locations
ctggagtcttctccagnggcgtcccttctagaccttttcgtggagaatttcttcggagccatctcctgtgaaaaaataacattcgggaagttagttcaagaaaccaattaaaataaaaaggccaaatcaagcaaaaatggtgtacacttctttcccacaaaacgtgaatatcaacgtgaatttaaaagaaaaaaaacttacacattgatgcgcgagttttcctaggacatacatacatttacacatatctttcctttggtgaacgacattttacgagatgcacctactttcgtttgcaaagaaatttcatatgctacatgcaaaactatccaacatacatattttgcaggcactttgcctacccatctaaccatacacatatttgcaaagcattt

SEQ ID NO: 138432 - DNA, 415 bp, Glycine max
  unsure (1)..(415): unsure at all n locations
cgacctatgaaactcagctgcactgatgtaattagtgttaaccatttattttttttgctaatgacccnataaacaatatatgtgattatgtcctgcatccatttccttccctctatctattttggactcttagactcaaattacttgctgactttcttctatattcactcttgcatttctgggagcttgtgattatgcttacacatgttaatttattctatattcactcttgcttagtcatgcttgtgatagaactaccaacgtcaccgacggcctttcgcgggttcttgggattaatagggttttaccagaaatttatcaaaggatacgccgccattgcttcacctctcacatacctcttacgcagggactatttctgctggtcacctgaaccacacacaactttttccaatct

SEQ ID NO: 138433 - DNA, 456 bp, Glycine max
  unsure (1)..(456): unsure at all n locations
agcttggagaggatgcttcaatgtgttgtatttaattaaggagtgaaagagagaggggggagcacgaaattgaaggaagaaaaaggcagagaagttgaactttgagttgtgtctcacaagactctcattcatcaaagttacaacaagtgttacacatacttctatttatagactaggtagcttccttgagaagctttcttgagaaaacttccttgagaagcttctttgagaaaacttccttgagaagctagagcttagctacacacacccctctcataactaagctcacctccttgagaagcttccttaagaagattcctaaagaagctagagtttagcttcacatacctctctaatagctaagcttagctccttgagatgagaagctagagcttagctacacaccccctataatagctaagctcacccncatgacaaanattcatgaaaatacaa

SEQ ID NO: 138434 - DNA, 438 bp, Glycine max
  unsure (1)..(438): unsure at all n locations
agctggtgatcttgggttactaaaggatctatcttcaacaatataatgttatgtttgaattataatttataagtaaaatggagaaaaacagaagaaggataaatttaacataattagagtaaaaaaaaaaatacattatttaaatagataaaaataagaagaaaagaggtatattttttgcagtacttgtttgtatgcgtggaaaaagagaataaaaataaattgtatatataaaaactattttttcactaattaaaaaattaagttaaacctaaaagttaaatttttttatttcattattttttctttgtaaaaaaaaattatttattattttaatgttatataaatatttaatatttaagtaaacggaaataaaaaatgaaaaaggagatttattctctctatttcaagtcaatntgagagttntttttatatata

SEQ ID NO: 138435 - DNA, 463 bp, Glycine max
  unsure (1)..(463): unsure at all n locations
ntataatagactntctcttcattgctactagcatcagttactttnacaaacttctcttccaacatagcaaaatcaagatccaaaacatcgaggtgaaattggacttgatcattccaatcagagaagttaagcccatcaaaattggcacagatgatacatgagaattcagtgaattgggagcatgtattgcataataaaattcacataagtgttttgagacataaaacacatatcatacatatgattcattcagataacgatcaatgtatattaatactctcctttgggtgatacaccaacacacaacatacaaacatgatgatgctaataaaattcttaacattatttgacaattaaatatgcaccaattaatagtatttatttcctttgggtatataaataaaactaatgatacacacaaattgcctacaattatattcattaattataagaacaactaatc

SEQ ID NO: 138436 - DNA, 443 bp, Glycine max
  unsure (1)..(443): unsure at all n locations
agcttgaatgtggatagatcttgatacttttcttgctcaatcccgatagtctatatcttcatgagattgactattaagaggatagcttcacaacaatatgaaatgactntcagcataccccagggatttttctaacactataatgaaccttcatgccaggcctgtttataattcttatggaagataaaaattattggaagtgtctttggccgggccaggtaaccatacacatataacctcacacttcaaaataaacttggtgggatgtcacatctgccatacctttttatgatactaaactatgagttccatagcagaaactcttatttgcttaatcatgtcgactctggttagatatttataagaacatgaaaccttatgcctaaacgctcttagaaaattgagcaagtgataaatgactaaaccgctccttgaaataattg

SEQ ID NO: 138437 - DNA, 326 bp, Glycine max
agctgttcagaagccacttaatatgttattgtttatgcctgttcgtgggtgctccacttccgagggtggagctatgttccatgattgcctaagaagaaaccctcaagcaaatcctccattcttaccctttttcggagccccatgaatgaattgcgttgtcattcatgtgtcctccatttctgagttcggagctgcgttccatgattgcctaagagaggagcctcaaggcaatcctccattctcattcttttccggagccacataaagaattggggtgcattcatgtgtcctcctctttgagttggaggtggttgcctgatttccta

SEQ ID NO: 138438 - DNA, 378 bp, Glycine max
agcttagagcttggagaaaagcttgacgatgttttgtcttttacatgcccaactcccttgagtggcatttgtattggttgttatattgaatttttcatcttagtccatatcatatcttttctgcatcatgcatcatcatgagtaagtgagaagaaaaatttctaagtttgaaaagtttcttcagaaggcaaaactctttgttttaatcgattatagccttatcataatcgattacacaagttttctgaagcttgcaaagttatgtctcgtattggtttaatcgattacaaccttctcgtaatcgattacatagttggttttgagactgtcgcaacctacccttttgcgggcgagcgaggcgaggctcacgggtgcgtc

SEQ ID NO: 138439 - DNA, 437 bp, Glycine max
  unsure (1)..(437): unsure at all n locations
tcagcctgatcgctaagagacagcttatccgtggctaatcatgacctattgtcgccaagctcaattccttaaggccataattgaggtccatgacactaagcaccagtcatggcagctaagcgagattaattgcggcaatatgagcgctaagcgagtccctctccactaagtgcatgctcctctgtacttaagatgcatcattttagctaagttggctagagccttgcttagcgagagttgcagcttttctaatctacaaacctctctaagaagacgtaccctcgtgctaagctgagtttctgttaaaaaaaaactgattntgaatttgaaacgtcagctaagctcacgggtccgctaagcgagccttgttgagaaaccaaacgtctctcttgctcgcttatcacagcggtccgctaagcgaaagtatcgaaaaacta

SEQ ID NO: 138440 - DNA, 435 bp, Glycine max
  unsure (1)..(435): unsure at all n locations
agctntcaatgttcttaagcaattgcttactaatgcccccatacttgcgttgccaaactttcaaaaatcttttgaaattgagtgtgatgcttcaaatgttgggattggggctgtgttgatgcaagaaggccatccaattgcttattttagtgaaaagttaagtggtcctacccttaactattcaacttatgataaggagttgtatgccttagtacgtgctttgaaaacatggcaacactacctttatcccaaggaatttgtcattcatagtgaccatgagtccctcaaatatatcaaggggcaaggcaagcttaacaaaaggcatgcgaagtgggtggaattcctagagcaattcccttatgttatcaaacataaaaagggaaaaggtaatattgtagccgatgctctttctcggcgtcatgcattactttctat

SEQ ID NO: 138441 - DNA, 460 bp, Glycine max
  unsure (1)..(460): unsure at all n locations
gctgagaacattgtggacacttgcgatgcctactcccggcatctttctggatacatgagtagcagaacaagtggtagcatttngttattaccacctgacaaataaaaaatgtataagcttttcaccccaaaaagaaaagtcatcttttcgttctattcaaattaaaaattngtgaacagactagcangtgactaaaacatgtgcacaccccttagatacttctccataagcacttatagaagaaaataaaaaagaaataagcttctctcaaagctaattttaacttctatattagctaattgaaaagcttgtttcatttagtttctccaaaagctgattttgactcgtgcataagcaaatattggtttatgggagaatatttctcattttaccttcttattatcttctcctatgagtgtggtagataagtttatcaaacattacctatatctgacagtga

SEQ ID NO: 138442 - DNA, 379 bp, Glycine max
  unsure (1)..(379): unsure at all n locations
agcttagcatctagctgtngtgtggtgngtttgaacagggatcaaacaaactctttcttctttccaaggtgtgtaataaaccaaagtttgaatgcattctctctctctctctctctntnnnnnnnnnnntntctcgngcctaattaattatatagttgtggtctaatatttcccattgctttctggcagattctggcagttactgncagactcattataaaagatgcacaggagaagaaggcctctttcaatccaacgccactcttcaggacattcatcaactggcttctggatcttggtacacttgagcctgttactgatggagcaaaccttcaggtgtttatcactttcatttactccttcaatatattctatttgt

SEQ ID NO: 138443 - DNA, 473 bp, Glycine max
  unsure (1)..(473): unsure at all n locations
atactaagctnaatntctggattatttntgcagacaaaccgcacaactgctcgtttttttccagccgttcttgatgttgaaaacccagagttcaagcggaagttggaccggatggtggagataaatgagaagcttgttgctgttggtgagagcgatgacatagcggtggtgaagaacttaaagaggatcccactggttgctgccttggtgtctgaactcttggctacatatctaatgcctccaattgagtcagggtctgtagatttggcagagtttgaaccacaacttgtgtactaaagttgtgtataaattgattaaattccttgtgtccttttgatctccatcaaaatgttcatcttgagtgttactagtattggtgctaaagtaaaatatggttgtacaagacagtgaggaaacatttaccatgatgagggtccttttagtattaatcatcttttgctcccatcttcctt

SEQ ID NO: 138444 - DNA, 425 bp, Glycine max
  unsure (1)..(425): unsure at all n locations
agcttatagaatatataataagttatcttgacaattggagaatcgattcatgtttcctttgatgagtctaatgttatttctccaagaaaggatattttagatgatattgcagaatctntagaacaaatgcatattgatggacaagattctaaaggaaaaggagaaggaagcaatgaagattctccagtagaagtcaaagcaaataatgatcttccaagagagtggaaagcttcaagagatcatccccttgacaacattattggtgatatctcaaaaggggtgataactagacactctctcaaagatttatgcaataacatggttttgtatctacgattgaacctaaaaatttaaatgaagccataatagatgaaaattggataatagctatgcaagaagaactaaaccaatttgaaataaataat

SEQ ID NO: 138445 - DNA, 467 bp, Glycine max
  unsure (1)..(467): unsure at all n locations
tctaagcctnttcctctgatggctctcctaggatntccaagagttagggagattgataatggattggagcctcaatntcactgtctctgtgcgaggggttccaattgaaccattgaaccatggagttgcattcatgctcatgtacaactatgcaagaaaggaaataatttagtggtaaagtctattaactacaaaaataaaaatttaacacagaaagagttgagctgaggtgaatagcaataaaataatttgaatagtcactatcaatggtattaaaaagtaaagaaaccaacatgttttatcatgactgacaaataactttgctacttaatcatgtattcagagatttcatctttaggttaattcttcaaataaactatagtacttcatattcctaacttttaaccgaaaatactntgggttgaaaatagttcatagaaaacatatcagnntgacctttttcagtt

SEQ ID NO: 138446 - DNA, 427 bp, Glycine max
agcttgagctggatggtcactttttttaacatatattttctcttagatccaaatccagcacctacagtgttaaaaaaaaaggtcacatgtttaactgaaaaataacacattttgcagggctattaaatggactaacaagaatcagatctaacaaaaaaaaaaagtgtaaaattaggcataacgggctagtagtgaagtgaaccaaaccaaaaaacaacatgaatatcaggtctgcaggccaggagccaaaaaatcaattaaaaactgggataatactcattaatcagcacgcacaagcataagaaatccagataagttaataaaaaagaatggtaaagaaaagaaaacaagcaaaacaatgatactgagcaagtaggaatggtttcaagatgatgtacaacaagaaggcttgtttgtgttgggttcg

SEQ ID NO: 138447 - DNA, 471 bp, Glycine max
  unsure (1)..(471): unsure at all n locations
ctaagcttcttggtacgagtatgtccgtcgcgagagcctcgacaagcttcttttattgagtgcttctntgcaaagcccctttgtttacttgatttgattgttattttcctgtgttggcaaagccattcaatttaacatatagttgagaatntgatcatctaatgtatgtgcatgaaaaatatatantgtgagagatattggccttttcatgattagtgttttaatccctcccagaagctaccatggccacccataaaaaatgccattctaaattgttgagtttcttacatattaagtatggacaatggacctaagtgaatgatttgacctacgatagtttgatttattcttgatagtttatatttgaacacttacttattgtaacacttcatccaatattatttttactacttctatcatatcatctatctaatattttttattcttttggttcattctttctgtcctatc

SEQ ID NO: 138448 - DNA, 413 bp, Glycine max
cgcatgcatgcaagctttcatggtatggcctttcttattctctcattctaagttcggaagcctctcttgcatgaaatcctagcaatttacagaggtttggatgttgcaaagatgcaagagtattaacttcatttatgaattccttcaagccctgaaagaagacagattcatttagaccacgtcagaatgcactcaggtgattgagcatttttcaatgtcccaaagagataaacaaaaacacataatgctaacagtaaatgataaataagtttcaatcagtaggtacataattcataatattcaaacagttgaaattgcaaggggtttaacaacattctcatatgcgtggagacataacagaggaacaaggatagcaaggactataattagaccctgcttaatagcaaattcaa

SEQ ID NO: 138449 - DNA, 403 bp, Glycine max
  unsure (1)..(403): unsure at all n locations
cacatagaaactcaagcttgtccgattgtgaaagtttgattntcagaagctaaatttacttcttttattacaaaagttgtaccaagacttgaacagttntactagaggcataggctcatctggtgactagtgacgggaccttgtgtgccctacgcttattatatgaatagtntcagtgtgctataacatatggtgcgggggttgttttaatcaagtctaatctattctcataaaactgtatgtcaacctccgattaaacataatcaaagcggatgtccttaatgatccacatttgaatataatactacataatgtattaattaatttttgggtcaaataaccatgtctataatacatcatgctaaagatattaattttatctgtagattatatcatcatataa

SEQ ID NO: 138450 - DNA, 403 bp, Glycine max
  unsure (1)..(403): unsure at all n locations
catgcgagctttaaagagcacatatccattatctttatctgcgcgaacaaattcggaggacgctcttgtggataccttgatgataacagccaactttccacttgcaatagcatcgctttcttcatcctctttactatcatctgcaaaacattcacaacaaaagataagcatctcactagaggtggtactgtgtgaaagaactgaattatggttaacttagtgcacctttaatgcctggaacttggagcatggtgcgaatcacacaacggctcttgacatatttctgtaacctagggccttgaaatggctcattctctatgaatctctgggctaggactaggaaaagttgaaattcaccagcgacatggatatacctatgactatgagacccgngtgaatcata

SEQ ID NO: 138451 - DNA, 458 bp, Glycine max
  unsure (1)..(458): unsure at all n locations
gctggtcgaaagaaggtgagcaaatgctatgatattttattcttattaactgaagttccncataatacttggtggattaattctggatgtacaactcatgtttctaatatgatgcagagattccttacaacccgaaccataaacccaaatgagaagtttgtcttcatggggaatatagtgaaagttccagtagaagctgttgggacttatcgtttaatctttgacattgaatttcatttagacttacttgatacttgttgtacctagtatttctaggaatttagtttctttgtctaaacttgatgttgttggattcctctttaagtttgggaatggttgtttcagtttgtataagcgtacttgtatgattggatcctgttcactttatgatggtatatcttatttgaatcttgagtattatatagctgaacccttatgaccttgcatcataatgttgg

SEQ ID NO: 138452 - DNA, 418 bp, Glycine max
  unsure (1)..(418): unsure at all n locations
agcttaaacattcaatnttttgtgnctcgatatatnacaggactcaatcagacatccgagtaaaaatttattgtcgttcgaattggctcagaggttcaacattcaatttcgagcgtctcgatatattacgggactcaatcagacatccgagtaaaaagttattggcgtctgaattggctcatagctttaacattcaatttcgagcgtctcgatatattacgggactcaatcagacatccgagtaaaaagatattgtcttttgaattggctcagaggttcaacattcaattccgagcgtctcgatatattacgggactcaatcagacatccgagtaaaaagttattgccgtttgaattggctcataggttcaacatgcaatttcgagcgtctcgatatattaccggactcaatcagaca

SEQ ID NO: 138453 - DNA, 486 bp, Glycine max
  unsure (1)..(486): unsure at all n locations
acacaagaaactaagcttgagcaaatcaaacgacaataactnnttactcggatgtctgattgagtcccgtaatatatcgagacgctcgaaattgaatgttgaacctatgagccaattccaacgacaataactttttactcggatgtctgattgagtcccgtaatatatcgagacgctcgaaattgaatgttcaacctatgagccaattcaaacgacaataactttttactcggatgtctgattgagtcccgtaatatatcgagacgctcgaaattgaatgttgaacctctgagccaattcaaacgacaataactttttactcggatgtctgattgaggcccgtaatatatcgagacgctcgaaattgaatgttgaacctctgagccaattcaaacgacaataactatttactcggatgtctgattgagtcccgatatatatcgagacgctcgaaattgaatgttgaacctctgagccaattcaaac

SEQ ID NO: 138454 - DNA, 385 bp, Glycine max
  unsure (1)..(385): unsure at all n locations
agcttctacttatgtggcttggttggctttcttcaccttcttgtctccaacgcgaactttgaccattgttcttccttcccgtaatgctttctttcatgtctgcctgagtgggcttatagcctaaaccatactttccacgatttccttgagtatttatcaggctagttattcccgccgttgttttttcctaacccatcccgggttcaaaaccgttccccaacattaattcggcccatatttaccgctgcttcggacagacaaggttgcccaaagagggattccacggaggaaatgctgaccacctcaaaagactgaaaagcatttnttaacagattcttctgcggcttccacataaggcttggaggatgggcagcttaccaagata

SEQ ID NO: 138455 - DNA, 495 bp, Glycine max
  unsure (1)..(495): unsure at all n locations
acggacacttgaatactcagcttctcaggaggtgagcttagttatgagaggggtgtatgtttctaatctctagcttctcaaggaagttttctctaagaagctactcaaggaagtnttctcaagaaagcttctcaaggaagctacctagtctataaatagaagcatgtgtaacacttgttgtaactttgatgaatgaaagtcttatgagatacacttcaaagttccacttctttccctcttttattccttcaatttcgtgctccccccttctctctttcttttcctccattaaagcaacctcttcaagcttctgatccaaggcaattcttggtggtgaagctccttcttccttggcttattccctagtggatggtgcctcccctgtcctcttctcctttgccttccgctgcatctccatggtgaaaaatcaccattgaaggacctcattgaagctcaaagatccagcctccatagaagcttcacaagcaagcttcc

SEQ ID NO: 138456 - DNA, 429 bp, Glycine max
tagcttgatgatttagtttttgtctatgaaagaatcaaagtgggtctgaaaagaggcaaatttgatcatcttgctttgacaaataaaaagcctatggcaaatagagaggatgagaaggaggaaggaacccatgctgtgactgtcgttcctacatggccaaatttcccaccagctcaacaatgtctttacccagccaatatcaacccttcttattacccaccacccaatcaaccacaaaggtcaccctaaatcagccacaaagcccgcctgccgcacatccaataccaaatgccacccttaacatgaaccaaaacaccaaccagggaaggaattttccagaaaataagcctgcagaattcaccccaattccaatgccatatgttgacttgctcccctatctgcttgataatgcaatggcagtcataagcc

SEQ ID NO: 138457 - DNA, 465 bp, Glycine max
  unsure (1)..(465): unsure at all n locations
tctntaaaacttattttagatgcatcattactatcttgtatcaattttatgataaaagattgatttgtatcaattggttttaaagttttgatttcatttctaagattttctaattcttcatttaatttcaaaacttcctttttctaaatttgaaatagttttcttagaaaatgaaactagtttggcaagtttgactgattctttatataagtcattgaatgcatcttgaagttcatcaaaggaaatagataagttattgtcagaagatgtttcctcttcttcacattcatagcttttggccatgagacttagattcagtacttcattttctgagtctccgaatgaatccatatcgttatcttcccaagtgatgtaagccttattngctatattttctttgaagggtttcctatcagattattccattcttttcttgaaactagggcaatcaactctcagatgtct

SEQ ID NO: 138458 - DNA, 428 bp, Glycine max
agcttgttttaaaattattaattttatcaaatccttaaattcataggaggtacatgtgataattttaaactagaaaaagaccaaagttggtaaattgtaactgagtatgtgaaccctatatttagaaaatggaaagtagagcaatggaatagccaaatacaatgtatagaatgagtgagtgaccatgcgaaacgttgtctttagaagaatgaaaatagaacatctgaaaaatcggatatggtgcgtttagcagtgcccctttagccccttttttaatcattcaagcttttcaaacttttcaatttctttgataagaatggtaaaaacaatgtaaaaagaaaattgaattgtgcaattcatatcaatgatatgaatagttgggtagtcaaatcacatccgaattgtgttattcgaatggtgaatagtaa

SEQ ID NO: 138459 - DNA, 458 bp, Glycine max
ctaagcctggaagttttaaaaagcttaaaaccattactttttaattatatgaataaagtcaaggtatatctagagtaatcctctacaataacctaagcatagtaattccctccaatgctcatggttctagaaagaccaaaaaaatctaaatgtaaaagttcaaaactctggaggtggaaactacattttttgatttgaaagcatctagtagttgatcatagttatcatcatcttccaaatcagaaacggttacctcactttcagcttcattgtttaccatcaagcacaaattttgtcatcatcttcactattgtcgttggaagttgttgattcatcgtcatccaaagagatatatgtcttttcattcttttggaatgaacccttattcttcttatctccttgttgcttcttttggtagatgggacaatctaccttaatatgacctgtctctatgcact

SEQ ID NO: 138460 - DNA, 329 bp, Glycine max
agcttaactatctattcactctttgagtgaatcattgtaatcattcaaatttttgcttgtgaaagctaagagtggcttaaagttaaacatttgcgaaaatattgtcttgcttttactaagacaactacctttgttctcaccaaatttgtttctctcataagtggatgacctccttattttcatctttctaagcttgcaattaacgttttatttatcaaaagttggtatctttgattaacacactattcaacatgccctccccttttagtgtgattgttgttattacattatggacgactgatggcaaaatgtctaaccaaggtaaaatc

SEQ ID NO: 138461 - DNA, 445 bp, Glycine max
  unsure (1)..(445): unsure at all n locations
tagaatngaaataggatggcattaagtacaagatatgatctttaaaaagatattacatactngaattatttcaatcactcaacaattgtaaaatttagctcatttggatcatgaaggatgcatataaaacatcaagcgtgtaacataggggaaaaagagagagggaagagagagagagagatttcaacattctttttttgaaattcacaaatgaaccaaaattccttacaaaggatgtcataagctatttatatagagctgagattacattattttattggctcataggagtttctctatagcaaaagcataattcactacaacgaaattttantatacactaaggagctttacccttgatcttcatacttctgaactttgtccatagcggtgaatgggtaactcactattgtgagttcttttatcttaaggtcttcattttgtg

SEQ ID NO: 138462 - DNA, 435 bp, Glycine max
  unsure (1)..(435): unsure at all n locations
agcttgaccaatatagattaatgtatctactattaattggggggcatggtggaccacctattggcggggttcaccttaaaatccatcataaataataactagaatagaaaacagtaacgaattttgaaaattaagtagtgccatacaatgatgctgaataaaccttcagttaattntttacccatctaataaacaaataaaataagaaaacataaaacctatttctaaaataaatttcaataaagattaaaaaattagcacgcctttaataatataactcagttcagatttcaattactcttccgagtctaccacacccctaaagacagtcagtacaaaggaaaaaaatatttagccctaaagaccaggctggtaattcatataagcttctaanaatatacatgaattgaacaacaaaagtcaagtcttaatcct

SEQ ID NO: 138463 - DNA, 460 bp, Glycine max
  unsure (1)..(460): unsure at all n locations
atgacaatatttaagtntaattaaaaagtcaaatatccttattatgatgattatcaaatgaaaaaaatgtaatatagttttatttgtcctaatattactactcttgttaattntacttgtcacataccatatcaaaacttataccataactaagaaagctcaagacaaaaggaaagtcatgcatttattaaaccgccggatggcaaccatactgctgagtctaaagtataagtatcaatacaacgggtcattagaccatgggtttgaggatataatcaagcaaaacaaatcactcccaccaattaccactactatttagaataatttatatcctcctataacatcctcccaataattntcttatacttcataaagaaaatattagatgaaaatgtaaaaaccattaacacttggaaaacagagaaaaaatntaatatnttcttcatttcattaataatta

SEQ ID NO: 138464 - DNA, 402 bp, Glycine max
  unsure (1)..(402): unsure at all n locations
agctntaacactgaagattgagactcttattagagctcaagcttaagtccccattactacacatccattcctagacctgtgatagatgtgggattgtgcatgggctgggagaatgcactgttaatgatgagatacctacagccatgaatgagattaactttgtttggggaagcaactattcttataatcagtaccccaataatttcaatcaacgatagggcttcaagaagaatcacagaatgtttaggtcttaacctatgcaaaattagaggcctacaaaagaggagacaacccactcttcaagaaatcatgcttcaatatatgacccaaaatgatcaaagaatgaagtaggttgagtcctaattgaccaacatacaatctctcttgtcacaaagacaacta

SEQ ID NO: 138465 - DNA, 484 bp, Glycine max
  unsure (1)..(484): unsure at all n locations
ctaagcttaagaggaagatggcctcagcaaattccttatttccagaatggaattctatcaatagacctccaatctttaatggagagggttaccactactggaaaacccgaatgcaaatttttatcgaggcaatagatctaaatatctgggaagccattgaaatagggccttatatacccaccacaatagaaagagtttcaatagatggtagttcatcaagtgaaagcataaccatagaaaaacctagagatagatggtctgaagaggatagaaaacgagtacaatacaatctaaaagccaaaaacataataacatctgccctaggaatggatgaatatttcagagtttcaaattgcaagagtgctaaggaaatgtgggacactcttcgattaacacatgaaggaactacagatgttaaaagatctaggataaatgcactaactcatgagtatgaattatttagaatgaatacaaatganaatat

SEQ ID NO: 138466 - DNA, 387 bp, Glycine max
  unsure (1)..(387): unsure at all n locations
ggcttattgaatgtacgtaanattgtaattttttcacctcgaaaataacagaaatcacctctgatataagcatcggaaaaactctaaattatcacattcacgactatatgatgtggctgttacaaatacttctatctaagataaacacaattctacttttgtaaaaagtaaatcctatttttttcttaaaaaacatttattgcaaattatatttattttaagcttaaacaaaccaaccctaaatatgacacaccaaaattctcttaatgatgagggtgagataattttgtatgagatcttagattcaattgttttttcattatacacacaaaatatatgtgtaatatttttttaaaatgtgtgattaaatgaataaatgtgatatat

SEQ ID NO: 138467 - DNA, 89 bp, Glycine max
caaagggtcttttgaggaggtttgtgggaagcaatgttgggagaatttaagtgtaaatgagagggtgattgaggatgtgagtgttgggt

SEQ ID NO: 138468 - DNA, 181 bp, Glycine max
aacatatataaataacatgtctaccttttcaaaccctaaatatgtttccccagggattatagacatcaagtgcacagggacaatatcgctgcctgctgttctaagggattagcactcttcaagcccattggtcctagtaagacctgcaacacaatatatgatttggcagttagtagaacat

SEQ ID NO: 138469 - DNA, 432 bp, Glycine max
agcttgtgttttatcatgtgttttatcaagtgtgtatgctacacaaagaaagaacaagaatgtaagcttgcaattagaaatgttagtcagtagacagattgattgagaaagaagagcttgaaccataacccggtgagagtgtgaacttaattattgagagaacgactagcatagagcaatgatttttgtatcaatctctaaattttagaatgaaatgcataaatgtggatatgatgaaggccattgttgtatatataagccacttgaccaaaaagcttaccaatttatcaatgatgatatcagttgcacccatctttgagctgaattgtaattgtcaaattgaaccttaagctttgaaattgttatctccatttaccttgcttaggttttaggagagcacattggtttaagacaactttgccccaaatttgg

SEQ ID NO: 138470 - DNA, 447 bp, Glycine max
gatggggacccgatgctgagaggaactttgataatggctacgcacgagtgcgtgagctcagttgaaaggtgggcaaccggggatggtcggtttatatttgacttgtggaagtgggagagttgatttgcgccatcgcctgatcgccacctagtaccacatatgacgggtaccccataatccactaagcttgatgtgagaaagcgtggaagagtcaatcttcctacttttgtttgttgaccacagagtggtacctggagatatgtcgcgggggtcaggagaccttggggacgtcaggtggggtgctgttgcccaaaaccatgcttgaccaatcccggcccaacccgggcatagtcattcagtgagaacctgtgatgtacctacaaaggcgtgctcctggcagtcaaccaataaaagaacaaagtccacaaagccaggatgcttgtgtgg

SEQ ID NO: 138471 - DNA, 418 bp, Glycine max
agcttcccacatcaagaaacaattattatttaattacccaatatctataacatggacacacatacaacattcatagctgaagattactcataccacattgtactcaatttcatgtagggggtcataacaatcaaccaccaacatttgcaatcgttaacctcacaaacaagtagcaattgataggataagacacacttaacaaatgtaatctcatcaccatgacattttcattacaagctcatcaccaaacttccaatacaaccaattccaatttcaaaaaataatgtagcattcaattatgacaatccaccactcaatgaccttaaaatcaatgtgcaaagttagaaggaatcatgtagtattcttaatcaaacatacatagatatatataatctttcatcaacacgttacacccacg

SEQ ID NO: 138472 - DNA, 405 bp, Glycine max
  unsure (1)..(405): unsure at all n locations
tggatgttaggaatgactgtataagagtcgctctccccccaaaagacaggtgtctntgcttccatttcgctaattntctcacacttgctaatgatagggtcctatgtctgagatcttcgtggatttgctccaataggaacaccaaggtacgaaaaaggaaaggacatcagactacagttgaggtaatttgctgcatctgtcttccattgctcgggcataccaaatactccaaaactgcttttagcaaaattaattntgaggccagatgcaagttcgaaggtcctcaaaattgccttgattgctttcacgttntgcatagatgcctcaccgaagaagattgtatcatctggatattgaagggagactgatttcaccctgtgtatgccaactatgaaacccctaaat

SEQ ID NO: 138473 - DNA, 365 bp, Glycine max
aagaaatagaagtggtgaggatgtctcctccacctctagaacctcacaatcactcacaaactcatctcaagctctcaagatgacttcctttttaagctctgttctatgcaggtcttcgcatagcaaaatctctcaaaactctctggattcgaacccttctctctctagaatctctcacatgcaaaagctccttgagaaaatggccaaaatccctggaacttggacctctctctctagaaatatctaaaaacgcataagctgaaggaaaagcccacactcctctcccaaatttgatttcaggattaaataagtggctttgttcgtgcttgcgcgcttaacgcaactctggaccgctcagcacgcat

SEQ ID NO: 138474 - DNA, 464 bp, Glycine max
gggttcgaggacttacccgttgaagatcgaagaacgttgatgatacttatgaagaacgtcgaagaacggttgaaacctttgcgagattcctcacggaaaacgttacggaaacgtttcggaagcgcctcggcttagattttcttcacggaaacaattttttccaagcaaattcgaaagagagagaagtgcctaaggggctgggatccttttcttcttcattttctcccctatttatagcaaaataggggagatgcttgccgcccagctcgcccaggcgagctcagctcgcccaggcgagcagggttgcttcctccagaagcaaccgccttctggaggaaccttctggagggcccaaatgggcctgtgtgctatttgcacccccatttttactaagttcaccccctcttctgttttttgggaattcttattcgtaaattacggtacttacgaatttcgaacgatac

SEQ ID NO: 138475 - DNA, 402 bp, Glycine max
  unsure (1)..(402): unsure at all n locations
nnncttgccctaaatntacattgttgtttatgggaggaggttgtatgccatttttgttttaagagtagtgtcccactggtaaaactaactttccaaatgtttgccttcgcaagaaatggccccaaggaagcttgcctcaaagaggtccaggaaggacaaggcagccgaaggaactagttccactccggagtatgacagtcaccgctttaggagcgctgtacaccagcagcgcttcaaggccatcaagggatggtcgtttctccgggagcgacgcgtccagctcagggacgacgaatatactgatttccaggaggaaatagggcgccggcggtgggcatcactggttactcccatggccaagtttgatccagaaatagtccttgagttttatgccaatgcttg

SEQ ID NO: 138476 - DNA, 323 bp, Glycine max
  unsure (1)..(323): unsure at all n locations
ggctcatgggccactttgggatagacaagacccttgtcttcctcaaagaaaagttttattggccccatatgaagaaagatgtccataagcattgcactaggtgtgtggcttgtttacaagccaagtctanggtgatgcctcatgggctatacacacccttacccatcccatctgcaccttgggtagacattaatatggactttgtccttgggcttcctagaacccaaagagtgtatactctatctttgtggtggtggatatgtttacaagatggacactttatccatgcccaaggtgatgagcttccacattcaaactctttt

SEQ ID NO: 138477 - DNA, 423 bp, Glycine max
  unsure (1)..(423): unsure at all n locations
agcttcaacattcaatntttagtttctcgatatatttcgggactcaatcagacatccgagtaaaaagtcattgtcgtttgagttggctcagaggttcaacattcaatttcgagcgtcccgatatattacgacactgaatcggacatccgagtaaaaagttattgtcgtttgaattggctgagagcttaaacattcaatttcgagcgtctccatatattacgggactcaatcagacatccgagtaaaacgttattgtcgtttgaattggctcagaggttcaacattcaattttgagcgtctcgatatattacgggactcaatcagacatccgagtaaaaagttattgtcggttgaattggctcagaggcttaacattcaatttcgagcgtctcgatatattacgggactcaatcagacatccta

SEQ ID NO: 138478 - DNA, 458 bp, Glycine max
cttgagccaattctaacgataataacgttttactcggatgtttgattgagtctcgtaatatatcgacacgctcgatattgaatgttgaagctctatgcctattcaaacaacaataacgttttactcggatgtccgattcagtgacgtaatatatcgggacgctcgaaattgaatgttgaacctctgagccaactcaaacgacaataactttttactcggatgtctgattgagtcccgtattatatcgagacgctcgaaattgaatgttgaagctctgagccaattcatacgacaataactttttactcggatgtctgattgagtctcgtaatatatcgagacgctcgaaattgaatgttgaagctctgagccaattctaacgacaataaacttttactcggatgtccgattgagtctcgaaatatatcgagacgctcgaaattaatgttgacctctag

SEQ ID NO: 138479 - DNA, 409 bp, Glycine max
  unsure (1)..(409): unsure at all n locations
agcttttcgattcattctatgtttccgtagnggtccacattgtgtttcgtgcatttttattctcgttttgtttactttttataccccctgttgacgtgcttaagccattttacttaagtcatttctcgcttaacttaaaaataaaataaatttccaccgaacgtttgaattgtattatccattaacttcggttaaaataaattccgaccgttcggtcatgccgtaaccacgttggaaatcaaaaaagaggtaaacaataatataataatcaaaaagacatcttttagtaaaataaagcggaaaatcaatcggacgttttctctttgggatttctcattcttaatcgaattgattaataactaaagtgaaactaaaggctaaaatcaattcgcctagtcaagctcgtcca

SEQ ID NO: 138480 - DNA, 469 bp, Glycine max
  unsure (1)..(469): unsure at all n locations
tggtatcaattacacaagtcttgtaatcgattaccagaggggattttcagaatataattcctaagagtcacatctattcaaatggtttatgaatggccatcaaaggtgacttggaaacacaaatttaaagagagttttcattgcccaaacagttttatcctctcaaaagattaagagtttttctgaactaaaatgttttatcctctcaaaaagattccttggtcaaccacttacatattcaataaggaattttgattgatcttcattatataatctatctcttttaagagagatttcttcttctcttcttcttatttctaaaaagggattaagagaccgtgggtctcttgttgtaggggattcttgaacaaaaggaagggttgtccctgtgtgcattgttaatccgaaaagagagagtgaaagtttaattgnggaatagtctctgtatcttaattcaaccccccccccc

SEQ ID NO: 138481 - DNA, 415 bp, Glycine max
  unsure (1)..(415): unsure at all n locations
agctttgagccaattctttcgatttttactttntactcggatgtttgatatagtctcgtgatataacgagacgctcgaaattgatatgttgaagctctgagctcattcaaacgacaataactttttactcggatgtctgattgagtcctgtcatatatcgagacgctcgaaattgaatgttgaagctctgagccaattcaaacgacaataactttttactcggatgtctgattgagtcccgtcatatatcgagacgcttgaaattgaatgttgaatctctgagccaattcaaacgacaataactttttactcggatgtctgaatgaggcccgtcatatatcgagacgctcgaaattgaatgttgaagctctgagctaaatcaaacgacaataactttttactcggatgtctgatt

SEQ ID NO: 138482 - DNA, 400 bp, Glycine max
  unsure (1)..(400): unsure at all n locations
actcagcttcacattcaattntgagcgtctcgaatattacggtactctatcatacatccgagtaaaaatttattgtcgtttggattggctcagagattcaacattcaatttcgagcgtctccatatattacgggactcattcagacatccgagtaaaaagttattgtagtttgaattagcttaaagcttcaacaatcaatttcgagcgtctcgttatatcacgagactcaatcagacatccgagtaaaaagttattgctgtttgaattggctcacagcttccacattcaattttgagcgtctcaatatattacgggactcaatcagacatccggagtacaaagtattgtcgcttgaattggctcagagcttcaacattcaatatcgagcgtctcgatatg

SEQ ID NO: 138483 - DNA, 402 bp, Glycine max
agcttggttcaaggtacttacccgttgaagatcgaagaacgatgaagaacgaatgaagaatgtcgaagaacggttgaaacctttgcgaatttcttcacggaaaacgttacggaaacgtttcggaagcgcctcggcttagattttcttcacggaaacaatttttccaagcaaattcgaaagagagagaaatgcctaaagggctgaacccttttcttcttcacttcctcccctatttatagcaaaataggggaggtggttgccgcccagctcgcccaggcgagccaggttgcttcctccagaagcaacagccttctggaggaatattctggagggcctaagtgggcctgggtgctatttgcacccccatttatactaagtacacccgctctctgcttttttttg

SEQ ID NO: 138484 - DNA, 260 bp, Glycine max
  unsure (1)..(260): unsure at all n locations
tcaagctatcaaaaatcatcctggagtacattttttgtagaacaaaaatcctttatgaattcacactcccaatgtcgtcanttgtatggaaatcatatttatcagaaaattgtcttccaattaaattttaaagaatgttttgctattatcaaatagaattggaaaatgaaataatccttatcaacacaagattgaagaagattcaatgcgctttaatcaaaatctttttttgatttaattcccggcaataacctaagatt

SEQ ID NO: 138485 - DNA, 410 bp, Glycine max
  unsure (1)..(410): unsure at all n locations
gaccttaagcacctgcagctgcagctttaaaacattatacttttatcttgttcttatnataagttcttaaggattatacttcctcattaattgaggcaggggaagatgaataatgcaagacaccaaggtgtatgtgtaggaatctttttgacaattatattgaagagattgaaactcaaatcaatttactattagagctcttttgtttgtaaagaacctaatagagaataatgaccaccattagttaaagttacagatgatatggaactttaacaaagtacaaggagatggttatgtttcaactgtaactgttgaaaaatgtaacatcatgggcatagggatttgtgtgggtgtgctcaactagttaggcaacaatcatcacatctattgtgaacatttgttgcgacatg

SEQ ID NO: 138486 - DNA, 399 bp, Glycine max
  unsure (1)..(399): unsure at all n locations
gaccacgcttctgcttctcttggctcagtcagtttcttatataacatagaactagcttagctgtgatcaagtttcctagattaccacgaacacaaacaattttgctccttgaaaagcgntgcatcaatgtgacattttatatatcacgcgctaggattcttgccataaaatattagtcctgatatttgaagtctgttggatccaataggttgtttgagcaccactaggaattaaattgatttacacaaatagattatataaaaaaaattatacacatcaaattctagactaatataatttaaatttcaaagtatggtttaaaactcatacatcatatgcattatatcctaagaaggtgagtaattaattgttaatttaagagataatatgattattact

SEQ ID NO: 138487 - DNA, 422 bp, Glycine max
agcttgtaatctattacacacatactgtaatctattaccagaggagtttttcaaaaaacattctcaacagtcacatctttttgtgtggttcttgaatggctatcataggcctatatatatgtgacttgagacacgaatttgataagagtttttcagaacaaaaaggtcttatcctcttataaagcaaaatcgttttatcctcttacaaattccttggccaaattacttgtgattcaataaggaattatttgagtgctcaaattgttcaatctatctctttcaagagagatttcttcttttcttcttcttcattctgaaaatggattaagagaccgagggtctcttgttgtgaaagaattataaacacaaaggaaggggtgtccttgtgtgtttagaactcgtaaaggaattacaagatagta

SEQ ID NO: 138488 - DNA, 398 bp, Glycine max
  unsure (1)..(398): unsure at all n locations
ctcaagctactaggaccactacacgacagatcgcggtgtacctgacttttctatttgttattttcgtgtcagaaaanagggtacgttggattgtgatttaaacatgtatntatgttatgttaacctcatgtttttttgttgtggaggatctatgagctccttcctaataggcattgatgcgtgactgatgatgcatttcaagagacattctcacgtgctttcctgtggctaaacgatcatgcgcatatgcagggaattacatgatgcccgttccgtgcgcgttgtgatgcttagaccgtcacagatgtgtgttggatacctgacactgagcatcgaagggctaggggcttcgagctgatttcattattccaatgtcaacttgagatgggcgtccttat

SEQ ID NO: 138489 - DNA, 406 bp, Glycine max
  unsure (1)..(406): unsure at all n locations
agctttctgaagttttctggtttttctttctctgaaaaatngtgctatttcaactttttcattctcttctccctttgccacaaagaattcgccaaggactaaccacctgaattctttttgtgtctctcttctcccttttccaaaagaacaaaggactaaccgcctgaattcttttgagtctcccttctcccttgtcaaagaattcaaaatgacacactctgagaattcttttgattcttcccattaccatatccaaaagtgttcaaaggactaaccacctgagaattcttttgtttccccattcctaaagtatcaaaggtttaacagcctgagatctttgtcttaccacattggagggtacatcctttgtggacaagaagatggtacatctacttgggttcgactg

SEQ ID NO: 138490 - DNA, 282 bp, Glycine max
ttgaagaaacttttctaacttagaaacttttctcaaaacagaccatgatgatgcatgatgcattacagatatcaaatgtactaagatgcaccaaccaagataacgaccaatacaaatgcctctcaagagagttgggcatgtcaaaaccacaacttcttcagaacttcttcaagctttgccttgagcttcaagcgatagccttaaggtgaggcaccatgttgctcatggttcgtggggggcaagtagtccggatcgcacagatttgtttaaacagatagaact

SEQ ID NO: 138491 - DNA, 395 bp, Glycine max
  unsure (1)..(395): unsure at all n locations
agcttactctagcatatgangcttgtgttttttatgcttatgataatcctgtatttgacgaatgtcgggagcaaatggataggaggtggtcttgtgtctttggatacttcgatgatcagcgtatctagacgtgaaagcacgctatctgtctttggatacttcatggatgtgtgtgtgtgtgcgcgtgtcttctgcttaaattagtttcttgcttgctgttacaacaatgaattgttacaccttacaacatttttaatgagacaagtgatgatatattgaaggcttatgtgcttcttttaattcactaagtttatcctagtaattgttaaaagaaataccttctttagtataaacatctagagagaggcggcatcaatattgtggcatcagatgat

SEQ ID NO: 138492 - DNA, 349 bp, Glycine max
taagcttctcatggaagatggggaatcatttgatgcaacatctctttttgtttgaggtgcaaggaaggaaaatatgtctgtagttgttgaaaatgtctcttatgggttaaagcaatctctaagacagtggttcaagagatttgatgagttcattgttgtttatgtgtacaacaaaagttcctgtaagtggaagatggttcccacatctatatgctactctatgcaagcaacatgcctattgcatcttaagatatagttgatattcataatctgaagtcattactcaataatgaatttgagatgaaagatttaggagcttcaggaaatattttgggcatggagattatga

SEQ ID NO: 138493 - DNA, 400 bp, Glycine max
ccgggatatataagtcgcctgcggcagcaagctataagtacatgtttgtttctctcgatcaaatgttctaatgaactacgtagttaagtttgttcgtgggaatattactttaacatatacttgatacgtattgagaagatgggaatcactgtcttgtataaaattatttatttgaaaaatggggcaacttctgccactttattggttcagcactgcccaatcaacatgccatatttgaaacacagtggaactgaattgataacttatatcatgctgtgacccaagctgtgccgggttcctggaaaatggtgtcattatctgactattgactataagacatttgcactttgaattgtgaagcttaattgtctttgatgaacccccccaaataattactgtt

SEQ ID NO: 138494 - DNA, 372 bp, Glycine max
  unsure (1)..(372): unsure at all n locations
cttccatcccgagtctcaagacttgatctatattatagacatcatctngngcatcgagtgcaggactaataaatttatcatccctaatgtcctcatttctagttactgaaattttagtaaggtgtccctgttcaagaaattgagtgcaaatgcatagcataaaatcaaagggcttgaagtaatgctaaatgaataacacattgcatttaaatctgtccatgaacaaaaatatatttacaaaactcataaccagctcttacaaattaactgttagccaccatgtcatcactgaaacacctagagagacttcttttgcaattcactcatgtgcgtgtagtgcaaccaggttcttacatatttatgagacactga

SEQ ID NO: 138495 - DNA, 386 bp, Glycine max
  unsure (1)..(386): unsure at all n locations
agcttaaccactaagagctttattctttttttgccngaccacataagattgaattgcataccattacatctgcatgcttaatcatccatgactgaagctaaaaactatgcttaactaccatggaaaaagcttataacgggaaaatactcaataaccatactttccttaatatgtcttagtgaagaattttgaacaaacacttagtatgcataattttgactcactaaaccagtaataatagcagtggccatgtcaccatcattgtaaaaagaaataaagagcgaggcttagcatattcattgatatcaagctcaaaccaagcgctacattatcatcaatgtttccaacctctagcatttgcttcacagacattttttcatacactt

SEQ ID NO: 138496 - DNA, 254 bp, Glycine max
gaagaagtgtacatggagaatccactaggatattgtttttcttatggaaaaaataaagtatgcagactatagaagaccctaattggtctcaaacaatctcctcatgcttggctttgcaagatcactcaagctaatatatctttggggtgcaagcagatgcaatgtgaccatgctccttgtatataacaatctcaagatggttaacttacttggatcttggtctatgtcgatgatattatttttacacgctatca

SEQ ID NO: 138497 - DNA, 356 bp, Glycine max
agcttatctattatgggatatttatgttttgggaactcatgctatgtgtatgaaaagtggaaaacatgttgtattaacatgtggtggtgatgcacgaaatattccaagaccaaggtctgttcgaatatggcttatgcatcgaaaatagtaatggtgcttgtcatttagcaaaaacaaattgtagaatgggatcccctcatgcaaaataagctgaagcacatgcattggctgaagttctctattcatagaggaggtgaattatcaacattatgataaaccaagacaggtttgtcatgtgtgatagtgtgtatagcaacaatgccaaaacctctcgaattgtacttgcagataattgt

SEQ ID NO: 138498 - DNA, 390 bp, Glycine max
  unsure (1)..(390): unsure at all n locations
actcagctgcaaatactcagtnggtcaagaaggtattttatttatttttatttaaccaaaatatgcaggcggttatgtttctttttattgcaaattatggggatgcagtctttgtttcgtagtgccatttgcccacttgtatgttctctagaaaagtctggatgtctgccttcttttcaaaattttcgtggagaaaatgcacaatttgtttcctatctggtttaatctgattcccaaagtggaaatcctattggttatgattctatttccagaagcatcatccttcttaaaatctggaatttctattttaaaaccatttgcgctcaatgttttgtaaagtttttgtagcatagactatcattgagttgttgacattctgtgggtatatct

SEQ ID NO: 138499 - DNA, 403 bp, Glycine max
  unsure (1)..(403): unsure at all n locations
agcttcaaacttgcaacatatgtgttgatcangtaaaaaagagtcgtcttcaaactcttagaggtgactttgagcgtttgtttatggaggagtccgagtcaatttctgattatttttctcgagtattggccgtagtcaatcaacttaaaagaaatggtgaagatgttgatgaggtgaaggtcatggaaaaaatacttcgaactttaaatccaagttttgacttcattgttaccaacattgaagaaaacaaggatttaaagaccatgactattgagcaactcatgagttccttacaagcatacgaaggaaaacaaaagagaaaaattaaacaaaaggaggctacggagcaactactacaactcaacgtaaaggaagcaaactatgcaaattacaagagccaaag

SEQ ID NO: 138500 - DNA, 422 bp, Glycine max
agcttatcagcatccttgtacatcttctgtgaaatttccttccaaaggtggccttcatctccaacttcacttctagccaacaactaaccagcctagattcaaaccagaaacagataaaataaagtttcctaagtacaacagttttgaaagctaaaaatgagggtggctcgcctttatacccaaaagctcatactaagataactataatgcaggcacataagattctaaccttgtctgcatgatgtcggagagctgccttgtggtatgccttcttgatatctgttgttgtatcagctgatttgattcctctgatattgacattgtaagaggttgggtctttaataaccttacggttctgaatgaggtaaggcacatagcagagtgtgtgaaattgagagagatgttgaataagaagaaaacat

SEQ ID NO: 138501 - DNA, 404 bp, Glycine max
  unsure (1)..(404): unsure at all n locations
acacatnaaactcagcttaagagcctatatntcttgaggagtgttcagagtttcctatactataatccaacacatcgcactgatttccagtgtaggcttggttccactctgcttgtatatcaacatcaccttcaccactatcttgctgcccataaagtaaatgaaggaagcatatataaactcttctaaattcatggacatatccatggtgcaagcatcttgctaattatctcttttctattgcctatatcatacatcaatgacatttgtatttatctcgaggcacacttccaaacatgcttttgaatttattcaacatgattcagtaaatatatgaagctcgtgcacaatcatcgactttgatgatattacatattaaccaatctcttaaatatctgattcat

SEQ ID NO: 138502 - DNA, 423 bp, Glycine max
  unsure (1)..(423): unsure at all n locations
agctntataagtgctggtctggtagacgaaggtcaagtgttcgcgatatgtgaagatgatgttccaagtacttcggatttggtccgaccatgccctcctgatttccagctgggaaattggcgagtggaggaacgccccggcatttacgcaacaagcataatgtaaacctttacggttttaaaagctctatagttgggcctaggctttagagtttcctttttgttaaggctttgtgtcttttgtttttgaatttataatacaaggatctttcttcatctgttcctggtctctacccattctcattcatttgcatgtttacttctttttctgaaacggcagattcgatgacgagtcccccgaaggtactaatacttgggacccgtctatcaacttcgagcaagaaatgaaccaaacgggaggatg

SEQ ID NO: 138503 - DNA, 335 bp, Glycine max
gtgaaagggaagtgtgcttgttgttttggctcaaaatatgatctataattggtgcctattttataccaatcctagttctgaaagttcaattgaaaattattgtgaaagcaagtgccaaaaatagaggtttcttgggtcttttttttacttattctactctactctagagccatctaggttactctttgagtcctagcttgcttttctgtgctttgcattgctttaattgttgaattatctctttaaatatgacttgtaaaactctattggtttagctttctttcaattgttagctttggttttgctagatcttgcttcttgcttgtagttacatc

SEQ ID NO: 138504 - DNA, 355 bp, Glycine max
agcttgccgccactgagtttttttactatgctcttgtgtggtggaacaagcctcaaaagggaagagcaacatatgaatagccaatggttgatacatggaccgagatgaaaaagatcatgatgaagcggtatgtgccagctagttactaaatggacttgaaattcaagctgcgaaaactaacccaaggcaacaagggggttgaggagtatttcatggaaatggatgtgctcatgattcaagcaaatatggaataagatgaggaggtaactatggctctattgcttaatggtttgactaatgatgtccgcgatattgatgagctgcacgagttggtggtaatggatgatttgcttca

SEQ ID NO: 138505 - DNA, 428 bp, Glycine max
ctcaacctagaggagacggaccattccaagtgtttgttaatatatcgacaatgcctacaagattgacttgcctagtgagtataatgtaagtgccactttcaatgtgtctgatctatctctttttgatgcagatggaggagccttggatttgaggacaaatccttttcaagaatgagggagtgatgatgacataaccaatggctatgaccatgaagcacttgaaggttccatgaccagaggcagactttaacaagcccaacacgtcatatagacatggctagtcatttgtatagctgccattgatgatgattgaaggcccaatgtggagatagatgaacgcccataggcatatgcactaccatgactactaattgttgttgaacgcccaaactcacttgaaggcccacgttaattaagtattataataa

SEQ ID NO: 138506 - DNA, 432 bp, Glycine max
  unsure (1)..(432): unsure at all n locations
agcttgtgggattttgtgatagtgattttgccagagatgttgatgatagaaaaagtactaccggatttgtattttttatgggtgattgtgtttttacatggagttctaagaagcaaggcattgtgacactttctacttgtgaagccgagtatgtagctacaacttcttgcacatgtcatgccatttggctaagaagattgttggaggaacttcagttgttgcaaaaggaaagcacaaagatctatgttgataatagatctgcacaagagcatgccaagaatccggtgttccatgaacaaagtaagcatatagatacaaggtatcatttcattagagagtgcattaccaagaaagaagtagaattgactcatgtgaaaactcaagatcaagttacggatattttcaccaagcctctcaaatntgaagattttc

SEQ ID NO: 138507 - DNA, 469 bp, Glycine max
  unsure (1)..(469): unsure at all n locations
ntntctaatgaaatntcattagtcatataaaacattaattgttgcttgatatataaggccaatgcagtcttcaaaataaaatagtacagtagatgatgcattgtaatattaaaattagataatgataatataaagcagtaatcaactaaagcacgttgaattctctttataatttaaaccgtaatttaatatatagatataactaaaaaaatgaggaaaggaatagtatgggaaaaagttgaaggaaagagaaaaaaaaatacttcagttgttttgactaaaaaaaattctttacttagttaattaaaaaagatgtaagaataaataaaattctctattattctacttgctcaattctctgttacgaagaaaatgttgtctaaattatttagaggaaaaaaagtggtatatntgaaaattagagaatttaaaattagataataatntataaaaaaaactaaaattaaac

SEQ ID NO: 138508 - DNA, 434 bp, Glycine max
  unsure (1)..(434): unsure at all n locations
agcttgccacccagctcgcccaatcgttctangttgcttcctccagaaggcaccgccttctggtggaacttcctggaaggcccaagtgggcctagttgctatttgcaaccccttgtttactaaatacaccccctgtctttttttgctgattcttttttcgtaacgttacggaactttacaaatttcgtaatgatacttgttttctttctgtaatgttacggaaccttacggattacgtaatcatcctttttttgacttctggaatgttacgaaacttaacggattgtgcaacaatacttccttttgacttccggcatgtcacggaacttcacagattgcctaacgatgggtgccaagtacctcaaagcggtcaagcaaaggttgcatgccatcaaacaatggtccccagacgaaattagggtatgacaatatgt

SEQ ID NO: 138509 - DNA, 477 bp, Glycine max
agatactcagctgctttaaccgatggtgccgtgctaaaagaattctttttcttcaatgctcatgtgttcttatggtgtctcctgagatactaaaccccgattcctcatgatggtttagcctaatcctgatcaagcatcgtctgcagattcctcttgtaagactaaactcaaccaggactgcattaagacacacatacataataagttattgcaccccgattcctcgtgatagtacgacaacttagccctgtactatcaaagactttagagtcaaaccaatttccactgttgaatgaccctaacaaagcatgcatctacgtgatcaaagtaaaggatattggaatgaaaagcatatagcatagagaacacacaaaacatcattaaatagatagaaatatatttacatcaggtacctacagggaagatccaacagaggatttagttttccataccaggaaaccttcttaacaaaaaaga

SEQ ID NO: 138510 - DNA, 409 bp, Glycine max
  unsure (1)..(409): unsure at all n locations
agcttctggaagtgaccttgatgtggttctatattntgncacatgggatgaaaatctcattccaccaagtaagaggagctggatacctatggagtatgcccctcaagaaagcaaacttctgacacgtcaagtgatgacccgagtatgtgctttttgaatttcattctatgaagttccatagttagctagctgtgtgctttgtgctatacatgggaacattaaaatatgattgttgtttttcacatgaattattcatagcctcatgcatttgattagtaattcaaatgacatattcactacagggacttgtgtatagtaataacatttcatatttgggaaatatttcatctgatctctaacataaaattttgagtgtgctggaactaattctacagtcacattcaatcat

SEQ ID NO: 138511 - DNA, 369 bp, Glycine max
  unsure (1)..(369): unsure at all n locations
tcttcttcttcgtaatggtgactcatctatttatccgttcattggcttgatgcatnttcgttctccttcgagggagtatgttgtgcattgttttgtttgaatcattgcgttttggttgttggctgtcgatgatggtgactatatctgcatttttatggtgactctgcgcgaaaaatgacatttatttaacggctgggcatacgaattatgacccataaagatcagtaacctgtacgactctttttattaaatgttatatttatatgtctaatttatttgttattttgctttgcaacttaatctttttggatattagcaatagtattaacaactttataagtattgatatcgtgatacttatttatagtg

SEQ ID NO: 138512 - DNA, 234 bp, Glycine max
aacccttagaactgattaactggacaataggactaagtggtatctcaccctttcagaaagttaaagaatcgagactctttttggtctttgagccttaaaattgctaataacatgtgcacttctttgaagttgttcgtaggagtaaaagattgaacagtaatttcagaaattccgtgctagtgaaagtaagagtccacatatggaggaaaatatagtaaaatcacatatgacagg

SEQ ID NO: 138513 - DNA, 436 bp, Glycine max
  unsure (1)..(436): unsure at all n locations
actaagcctgaatccatatcggttaaatatggtattaatctctatttaacgagtgtatnnttgatttagtcgaaattatttcttttggtcaataattatgtgacacttgttaattctcaaggcttcatgccttcacttcctctttacatttcatcttctctggtgatgagcatcacttatcaaataacaaagaaactagatcacaagaattntcttgtctagaaacatgttgaacatgttcttaaggcacatcgcttgcatcaatttgttataagtcctcaaattcctctaatattttttgtcagcaatcagattgtgatactggtattgagaatcctgcattcttactttaggagcaattggaccaaatcttactctattggctccaatcttcttaatctagtacagaagcactattctctccaaagtcatacat

SEQ ID NO: 138514 - DNA, 423 bp, Glycine max
  unsure (1)..(423): unsure at all n locations
agcttacagatttaattgcttgctcttctgatcaaaaagtgggacggcacggaatccagatcttagctcagagacgggtaaacatgtttgcccaccaaagtcatccttttcatgcttatcatactctcgaacttctattcgaagcaaagctagttcaggaacagtcaagggaaattcaaactcttcgtcccagacgggaaaccaattatcttgaattaccttggtcttcttattggctttatcagctggtactccaacaatgcaaacctgttatataaattaatcaaatgctaagtataatatattttttgtttctctctcttttttcctcttgataagtgcaattacacaattagctcttcagattctagccagccatcatcaacaaaataaaatatctttaaaggatntctaacaataatt

SEQ ID NO: 138515 - DNA, 432 bp, Glycine max
  unsure (1)..(432): unsure at all n locations
tagcctaggcattttgatcacattgtcatatagagttacttgattgtacatgatgcaacacttagtgcatgnttgatttcatgttaggaaattgattctgagtttaaaattgattntgaatatatttttatatgtctaattntacattagaaaaaaaattaacatcaattataggttaaaacaattttaaataatttttacgttagatctaaaattttgtattaaattttatctttaacttcattntataataaaacattcaatagatcacaatcactttaatattaattgtaactaaaattaattttacaaaatcaattntattaatgtacatcgaaacacaattaaatgtgagagcacgtacatcgcctcccttaagttttcgttttgctttgggttgttacgttccatcataaacctgttacgatatca

SEQ ID NO: 138516 - DNA, 427 bp, Glycine max
  unsure (1)..(427): unsure at all n locations
atcttaagtcacctgctgcatgcaagcttttatctttaatttaatgatattaaaactctatctgctatctacaggtagagaacctcatcctaatggcatataaacgaatgaattgacacgttccaacatgaggggatgattccactacttgtgattataagtcaggattacatttggcttcaaaataataataatgttgaaatcatacaagtgcagacattctatataaatattccactcaaagctgctatgtgctaactttatgtggaatatgtatggctaattggatattggtacttagatgcaacaaaataatggttcagatagtccctcgcgtgggaggaatcctttttactctgtagtgtagagtctagaaccacaacatcattatcattnttggctttgttgttataaaattggtgcatga

SEQ ID NO: 138517 - DNA, 472 bp, Glycine max
  unsure (1)..(472): unsure at all n locations
actcagctaaccatcttatacttgagtttgaatgtgcggcaatttgttatttngntctgaaggtcacaattctcttctcctaaagttttgtacgttcaatcatgtgggaacatggagttcttacttcttcatattctccctaaactagagggtttgtttgttatgcgatgcaagaagctaaatctgttgttgatctattggggccaaatccaaagattgaggatgaaatattttcatcttgagcaatgtccaaggcaagatactttgcctcaatggattgaaggaatcgctgacactttgcagacattgttaattntaaattgtgataatcttaagatgcttcttgagtggctgataacaatgactcatcttaagatgctccaaatcttccaagtgacatgcatcgcctcatgagcaccctagaagaatattgttgggtagtaatgcttccacaaataaatatactcacact

SEQ ID NO: 138518 - DNA, 429 bp, Glycine max
agcttcaaagaatgaaaaagaattttcttaaccacaaataagagctttgcacaaaaatgatggagaaataagaagaaaagagaggttcaagagcttcttaccaaagatttgagagaagaagtctcaagttcactcacatagagacaaattacaagcgtccagtgcaattcttgcacaaatggaaatctaactcaaacaattcctatttctctatcaagtttcactaaactaatcacacacacacacacacatatgataagctcataaataagaattaaaaacacataatcactgcaattaactacatacatgcacagatgacacaacacataatttcctttgtcagttggagttgtaatttttgtcaggacgttacagattgtgcaaggagaacaaagttttcccacttcattaggaatttaagaacta

SEQ ID NO: 138519 - DNA, 413 bp, Glycine max
cttcattatcttcattgagggcttatgtctcaagaagtgttcgttggagcatttaatgcaaacattaaacacacatcctttccatgttgaaataccactctctctggttttcttgagccacacgtcaatagagaacaacgtgccttttccttaaatagttctgatcaacactagtgtaacatattgcatcttatgagatgaagaaatatgtcgttttctttaagacatgaatgttctcttacttccttggacttcaatagatcctatcatggttattgaaatcacgagtcaactcataaaatggtacaagtttataactcccctttgactccacgagttaaatcacacactacataagatattgagtgaacttaagtagacttaaacaaaatcaagctatatcatgagtctat

SEQ ID NO: 138520 - DNA, 421 bp, Glycine max
  unsure (1)..(421): unsure at all n locations
agctttaaaaaggagtggttangttgttttctttcctcttgaccagcttgtgaaaatggaggaagaatgagctactttggtgagttttggagtttaaatggacttgtagaagaagcttagagcatgatccattggtaaatcttatcctaatcttctagattagtgtgctaacttctattgggatatgagtactcatagtgaaccttgtacattgcgactcaatgcacagtgcaattcttgcacatatggaaatctagctcaaataatgtttgtatctctgtcaagctttactaaaccaatcacatacacacacacacacacacacacacacacacacacacacacacatgatatgaaaatcaataattaagagcatattattgctgcggctaaatacgcacaagcacaaaagacacaacac

SEQ ID NO: 138521 - DNA, 430 bp, Glycine max
  unsure (1)..(430): unsure at all n locations
ntgagccaaaatcctgactcaccataaaccttgacccagtgtgagtatgccaatccttaccctcggaagcaaaanaaaaaaggagaagagaaggaaaatttccaatcaaagaggaagcataaaaaggagagaaggaaaatttccaatcaaagagaaagaaaagaagaggaaagaaaactcccaatcaaagaatgggagaagaaaaaaaaaaaaaaaaagaagttaaaaagaagaaagctcctggtcaaagaaactagaagaaatgtgcagaaaggtcttttgaccggacgatatctgaacaatacagaattgtcaccaaatgaacaaaaaaagaaggaaaggaaatcacgacctanaatggtcttctccctttaattaccaaccaaaatcccgtgcgctagcgaaccctttttctcgccccgcactaaac

SEQ ID NO: 138522 - DNA, 415 bp, Glycine max
  unsure (1)..(415): unsure at all n locations
agcttgctaacccatggattcttttattatctcccacactttttggggtgggccattcttagatggccttgattttctcagggtccacttggaccccatttctaccaactacaaacattaagaaaactatattatctacacaaaaagtacacttctctatattggcatagagagtgtttttcctaaggactgaaagaacttgccttagatgtcctaagtgatataggctcttactatacactaaaatatcatcaaaataaacaactacaaatctacctataaaatcccttaatacatgatgcataagcctcataaaggtgcttggtgcattagtgagcccaaaaggcatcactagccattcatacaaatcanacttggtcttgaaagaggttntccgctcatcaccctcttttgt

SEQ ID NO: 138523 - DNA, 478 bp, Glycine max
  unsure (1)..(478): unsure at all n locations
ntgaagcccaatctncctttttaccaatcttctagagaaatcatctgtcatcaccacccactatagccacctatgttacatctgttgggttgcatgaaactgcatacaattaccctgtacaagaatccaagtgagcatggaaataaaataatacatttccttgtaatagaaaaaattattagtcagttatctaaatggaatatttggcagcttgaaacactaggtttgattcaatctaattagcttaataagaatcaggatagcataagagggaacataataaacataagagtagaaaacatcataatccctaataatatatataaaatcacctcatntatgaattgtgatctgtctcataagacgatccacactatattcatttcgtgttttcaaaagtgtagtaatagcgagggtagcaatgcttctgttctggtcagagattaaactttccatatcaatgttgcagttagtgact

SEQ ID NO: 138524 - DNA, 410 bp, Glycine max
agcttcagtgagtttgttttattgtgtgaccagaagcttctattcacatattaataacgggggacagatagtgtaaagcataaataagatacactacgctcttattgttatgtttgcgagctggaggttacttgggcctataataccaattataacagatttggacgtaggttataattttattaaacaatccaaagtctcgagagggaaactgtgcctatacaacactatgtgagactgtgtttatttgaagctaaatcatgggtggattcatcgatctttaggggactacatctaccttaccacttttcaagatgtgattccgctatcaaatagagaggactctgttgttttacatacacaatcgatattcttcttattatcacggtgaacatagaattatcttgata

SEQ ID NO: 138525 - DNA, 396 bp, Glycine max
  unsure (1)..(396): unsure at all n locations
ctgactatgaatgttcatacactgaatgagatatcctaacatttaataggaaaaataaaacttattctataaagttaatacaataagtaagatatctacgggatccctctaaaatgtgaaaaatttcaatttcattctcatcaaattgttggtattaagttgattcctacagagatagaacaacttnttatgttcatgctgatctgttgtataccatatttctgagtatagaacgattatatttatangtcatctcatgtctctgggatgctcttatttaaacttttaagaaataactataaagtgtgcacctattatataagagtatatttttgttagagacagaattgatctacttcttatgacacagtaaatctatttttaagcatacacaat

SEQ ID NO: 138526 - DNA, 414 bp, Glycine max
  unsure (1)..(414): unsure at all n locations
agcttgagatgaggaagtgttgtatggtgaaacttcctgcttttattgttgaccacagagtggtacctggagatatgtcgcgggggtcaggagaccttggggacgtcaggtggggtgctattgcccaaaaccaagcttgaccaatcccgacccaacccgggcatagtcggtcagtgagaacctgtgatgtacctaagcaggcgagctcctggcagtcaacagataaaaggaacaaagaccacaaagcaaggaggcttgtggtggctggccagctgtgaaacttgattgatatgtgaggtatggcctctggtaatcgattaccaagggtgggtaatcgattacaaggcttaaaaatgaagacagggggctaacatggtctctggtnatcgattaccaggggatgtaatcgattac

SEQ ID NO: 138527 - DNA, 468 bp, Glycine max
  unsure (1)..(468): unsure at all n locations
tccatcaagtggtaattagagcacaagagcttcaagtaggttctccttaaacctccattattatttttttctttaccttctcttccattgttgtttcttcattttttctccatgtatatcctcacatgtcttgtgctaaatgtggttaacatgattctttagagtttccactgattaaacttgctatagaaggtagatttgattttctatggttcaaatttcttgttcttgttcttgacccatgaattgtgttgagtttaggttcctttgagttttgtcttgttatttttttgtggctgaaacctaaaccataaaattcttacaaaaatattaaagtagaagaaaacctcaaaaatctagagtgacttgttcacctattgtagttntgtcatagaagtcatgtctagtcatgaaacttgtcacatgagatttcttatgttgtgcctgaatttattntcttggttcttt

SEQ ID NO: 138528 - DNA, 432 bp, Glycine max
agcttcaatgttaatgtcacatctttattatgtcttaaaccgtatcaaattatggagatcgtggtatggtattgtaagtgacatccttggccagagtggatttgattgggatggcactaagcacatgatcacagttgagaatgaaaatgcttggaatgaatattgcactgtaagtattctttaatatgttgctatttgttattcaaagtagattggatttgactttttctttgttttccagtcgcataaatcggctaaaccgtttcgatacaaggtgcttcaaaattgggatgatatagtggatttgtgtgctaaagatagagccaccggtcatggagctgaaactgctatggatgctgatgaagcgatgagtagagaaacaaatgaagtgaatggatggtaaagttgatgatgaagatattcaagaagtat

SEQ ID NO: 138529 - DNA, 429 bp, Glycine max
agcttgtcttgaaacattgaccttaattatttttctcatgaaaatggattctcccgaatttttcttttggaaaagataactcatgaagaaactggttaactttataatttgatcagattattgaaattgatcttacttgttatttatgtatactattgttctagtcattgaagccaatacaaaaactgtataaagtttatatgatattcaaatgaatgctagagatactaattgttggtgccatcccgtcttctttttccaagaatgacttgaattatactgagtattcatgaaacaacattgtatacttagtattcatgaaacaaacattataagaatctgtactaatcccaatcccaattcataaaagaaatcagtggcattgcaagaacattgcaagaatgatgggagaaaagtgtttctgaaaac

SEQ ID NO: 138530 - DNA, 387 bp, Glycine max
  unsure (1)..(387): unsure at all n locations
ctaagcttgcctaacaattcaaggctgatgaaatctacctcttctttttttttttatattccttaaagggtgngtcatccattagacacaagttggctttctcctctccttcttgattggaagaggtgtcatccagatccttctaggtgctcatgagacctttcttgcccatagacttgtatttgttgtgcttatactctgaattttccagatttatgtactcagactntaagtgttcaagctttttgcacttatagaaaatgatggaactnttatctttgtctctcttttctttgaacaccttcttggaggaattcttccatctagatccatccttgttcttctacatcttttggatttttctagagatgaaggctagctcatcat

SEQ ID NO: 138531 - DNA, 430 bp, Glycine max
agctttctttaagaaaaagacaattctcttccttttgtcggtttaaaactaaaatcattaatattttatattttaaaatagctaatttaataaaataataattttaaccgtcactatcttcaaactcagaaatcaatcttaattacattttcattgggaaaaaaatatgaattgaaagataggaaaagaaaacaagaaaatgaaattgaaatggtaaatggaaagaaagtgactgaaaacttgcttgaaacccaactaatcttttgacgagtgatgaatatataggattatataaatataataattggtttttaatgaagatataggactatatacatacatagcagataacgagtgaccaaaatacatgaattttaatgacaaagttccaaacttgttacattataagatgggtacatacgtctacata

SEQ ID NO: 138532 - DNA, 465 bp, Glycine max
  unsure (1)..(465): unsure at all n locations
atactaagctatagagtttaaccactcttttaacacactctccactgttggtcctattntattgagaattataaaatcagaataatgactcatcatatgagtagttggacctgtcaaatttgtgatttttaagaaatttgagccaacaaaaaagagtgttcaagagaatgtgttagagacagtgttgctaccatttctctgtttaggaatggtgtttgtagttattagtgaaaatagaaatagaaaatattttccttatgtcaaacaggcttctgcattactatntttagtttttacaacattatgatagatcattatatattttttctttctctaaaacaaatgatttgtttattgtgttggggtggtgtatataaaaactgatcaacacattntacttttatttttttgcctgttcattccaatgtacaaatgattggcttatgatgcaacaaaatctaaatc

SEQ ID NO: 138533 - DNA, 425 bp, Glycine max
  unsure (1)..(425): unsure at all n locations
agctttcatcacatcanaggagattttttatatttaatggcaaaaaatgctgctatacattccagtttaaaaatatcatgtccatctttgtgaaacaaatattatcagtacatgattgtttgagttttttttaagtaatcatacttttttatatcaaatcgagttgttcacaaatttaaatcaaaataagttcaacttaaaaataaaatttcataccaaacttaaatcaagttacaaattcaacaaattcgaattgagttgaatcaaataatgttcaactcaacttggttcattttgagcaccactcatgagcctcttgaaatcatgtctctgtccaaaacaccaataatatttctacaatttatcttcatagccactcatcanatggcttgaacatattcctggaatgatggagaaatcatctt

SEQ ID NO: 138534 - DNA, 439 bp, Glycine max
  unsure (1)..(439): unsure at all n locations
tgtggcatatcctaagctgatgattaatacaacgtatcagattagtattgctagaaggaaaaagagtgaatatgacaacctctctntatcaaaagtattattcagacctcagatctggtcgctccaccaacaatgaatataaatattctttgccccattttcttgaaatcactggatgcgtgtnttagcaccgaatcgctatataccagcagaaaaggatgaaaattaaatgtgagttttggaatgcaattccaacagatactcagtagtcccctacaaattattatctataatagcaaactgatgcaagtatacaacacaagtacacagctcagaagttgggaagaataataaggcagtggcaaagacagaacagggttcataaatgaagtgaaaaaaaaactgatttcactagaagcgctcatcatattaatgactt

SEQ ID NO: 138535 - DNA, 427 bp, Glycine max
agcttgttcttgattttttctatttttttaacaagattagaataatatatttgtccttcatttaattgtctttgggcttggcgaccacgatcaacaaagtactttcggcacctactatatgttaacttgaccaacgctgttatcggtatgctgcgacaatccttcaacaccttattcatacattctgagaggttggttgtcatgtgaccatatcttcgtccagatgtatcttaagccatgctccatttttcctttgaaatgcgatcaatccatgttgctatggctggactcaattgacgatatttttctaagttttgatcaaacacatgcttgcaaggagtgtacgctgcatcaaatttgttaccatcaaaagtagtaagtagatatgaaacttaaattaacttcatgtataaaataaaccttaccc

SEQ ID NO: 138536 - DNA, 473 bp, Glycine max
  unsure (1)..(473): unsure at all n locations
ntagttcacatattaacttctaaaaggataactagacaatgtttgttacaatctaagggaaataatagctcttttcctttttcaaaaaaggcatcataaagttgacagaagtgataacttctaaaaaatgagcaaaactaaacatgcacacagccttaagcttgaactttgccctaagctgctccctctaccttcagaaatgtggatttaaaacatttcacaagccattaccaacaaattttcaagacataatacttgcatgccatgtttgcaactttgaataatgtttttggcatctgtttctgttactacttttctttcaacattaacacgtggttgacattagctagtagttcacgacaaaatattgcacaggaaagagataacggatgaagttatgaaagattgatgagccataatgacatcatctaaaagaagaacaagtcanaccatcatacatcaaagaaataaaa

SEQ ID NO: 138537 - DNA, 432 bp, Glycine max
agcttagttggtgttaaaaaatttcttttggaaaataacaattattaaaaataagcaaatgtgatccaatgaatcaatgatctagattggaaaatcaaacaaaaaaaatatgtcaataatatagtgtatcaaaatcataattttttatttaatgtaaaatttgatagatatgatctacataaaacaattttattccaaaaataaattttgagatattcaattgaaagttatttaataatgtaataacatattacaccggtgacatttgatcctaacctatatgatatatagtaaaagagtaaatcttaatcatctaaataactatagtcatagtcaacataccaacgttatttccacaacatctcattatttacgctccctatataaattaaaataagcacatttaatatttctaaaatgatatagatgttg

SEQ ID NO: 138538 - DNA, 479 bp, Glycine max
  unsure (1)..(479): unsure at all n locations
ttaaaactcagctatngtttataaactagttgaatatattggaaaaaataatctaacttataaggtagataaaagcttatagggaatttatttaatttaattattcttttaaaaaaaaagatttttataacaggaggaaacaaagcaacagacaaaagaaaactaactaagctgcatatccattactaaagcagacaagacaccaacaactgctggaaaagtttgatttaagacaatattagtttattaaaaattgattttaatcaatatttagtaaactcaccagacatttactattcttttatatcataaagttattatcctttttttttttttaagatgataacttattaaaaataaatttaaatattataaatattaaacatatctttttatatcatttaacatctatttagttaagttatcaattaattttatactaaaccagttaatttataaacttacaccttacaaatttt

SEQ ID NO: 138539 - DNA, 423 bp, Glycine max
  unsure (1)..(423): unsure at all n locations
agcttgttagtanngagatatttttangtatcctttcngatagacgcgaatatttgtattaagtggataaacatctattatttcatgctgtcacaaactttttgtattgttgtttcctgagttgacacatcacatcttgtgctttcttggattttttttaataacgattttgcttatccaaaacacaatctcatatagagcggagtgcatataaattttagatgatattttgggtaaacatatttaacatgggatcgcctgataaaaaaaaaaggaggactcttcgcctttagaaattataattatgcatatattaataccggccttataaaatttaatgatttagcaactacgactttgtgattattgtaaccaaatgtgaatcttgctgatcataagctccatacataattgtttttcata

SEQ ID NO: 138540 - DNA, 475 bp, Glycine max
  unsure (1)..(475): unsure at all n locations
actcagcttcagtgtattgatatggncactctaaaattaccttctatacttatatacatatgntnngattntacaataagcaacctcgtggtgcaggcttggacagaaagagaaggagtcaggaatcttctgaatatggtgggcaaagaagtaaggatggaaggttttttgctgaatacacatttcgatcgctttggagagtttgcaaaagagatggagggccacataaaagaagggaggcttaagcccaagactaaaataaacattggaattgagagctttttggatagtctgaactccttattttctagcactaatattggaaaagtagttgttcaagttaataaggattaagtatatgtatatatgcttgatcaagttgcagtgtttgctcaatatgtttcatccactctccatatatctggcatttagtttatatattcaactcatgaagagataatttatgtaataatta

SEQ ID NO: 138541 - DNA, 421 bp, Glycine max
  unsure (1)..(421): unsure at all n locations
agctntagcatgtgctntactgtttgaaaatgccgtctagtaactgggggtacagacaaccatttaatactttgggatttaaagcccctgggattgacaggtattgtatgagcatgccatatttttatgatatattgctaattgatttttttatctgtttaatgtctatgtgtccattagactcaactagtttacatgttggctacacattgcattagactcaactagattctttgacattttatgccttcacatttacatatcaagatgggcatatggatttttatagaaagaataggggcttcctaggctttcccccaaaacgtcctaggtgtgaccctgtagcagggcatgtgctttatagagacaaggtgaccaatgtctntttgcccattcttataatgaaatataaagtcaatta

SEQ ID NO: 138542 - DNA, 478 bp, Glycine max
  unsure (1)..(478): unsure at all n locations
cttccattttgctatggcactcatatccacagaggcatcatctttcttcttccttgcaagagctntcaatatcaaaactcgttcatctgggcttggaagtggaacataaagaagtttaccaaaccttccgggccgtaggacagcacgatccatcacctcaggcctgtaaaatgagaaactgacttgaatacagtgtgatgtgaagttaaataactaattagagaaaacatatggtgaacaaaatgtancctattgtagcaccaatcacaaaaacaccttttcgttgttcagcgccatctaactcaacaagcaactgcaatttcatataactgtatcatttatcgatgttgttatcagttaaaatgggctatgtttttcatattccgaaagactaataaatattttacctggttcaatagtcgttcaacaacccaaccaccttcttttaccacgttggttgtcaaagcatcaatctgaa

SEQ ID NO: 138543 - DNA, 425 bp, Glycine max
  unsure (1)..(425): unsure at all n locations
agctttctccacatcagcattgatgattggagcagcatgcctcagaagtaaaagagccattaactgcaaattttgggacagacccaaacacgaaaactaaggaaatgtaccatgaaaatgatttaatacatgtgattttactaatactgggacttctttccaaagaagaattaacagcaaacataagagcactgcatcagatactacatcccagaaaagcaatcacaagaaaataaatattgcaaccatacacccaacaaaaatacatgggtaggtaccacatatacataaatatatctgaaggacaacaatcagaaaaggtggagtggttccgtggataataggaaagaaaaaatagaagaattntgaattttcatgcctaataaaacatctaaaaaccatactattgaacttcaataacaaat

SEQ ID NO: 138544 - DNA, 475 bp, Glycine max
  unsure (1)..(475): unsure at all n locations
tatgttgatctcatatggtttgagcgttcttgcaaattatagtgactcctgactggtctccctacgattntacctagtgagagtgacttgacttaccagtgtgtggtatgtcttgtcctangcgtccgacaggatttttcactgacatggtaccacattgcatataggattgagtcttagtatatttgttgcataacacttgtgtattgatcaatattgattggttgagtgatatcgtgttttgatccttaagtacgtgaatgatgtgaaaatatgtgagacgcgtagtgttgagatatgatgttatgtgataaatggtggaatgacgtgagttatgttgaagtaagttgtttcattgagttgagagaaatagaatggataaaaataaaagagatgaaggaaaataaagtaaaaattaaaaatatttagttaaagagaaataaagacattggaannatagataagagaataatga

SEQ ID NO: 138545 - DNA, 408 bp, Glycine max
agcttaccttgtgcatgattgatttattccttgcacccattttgagctgaaagtgtgattgtttgattgaaccttgagcctgtacagtttatctccttctaccttgtcttaggttgtaggagagcatcattcataaaaggaaattttggttcaaagcaaatttgcccaaatttgggggaattatggggtgaaagcttgtgatggtaagaaaagagcaacacacacagtcatctaataagctgcaagtattaaaaaaaactgtaagtataaaataaaagtgtgtgtgctgctaattaagaaaaagacaagctaagttcgaaaaagcaagtaatagagctgtaataaaaagaaaaaggttgatctaaggatgaatgctttcccagaacctaagcttttgcatcctagaaa

SEQ ID NO: 138546 - DNA, 388 bp, Glycine max
  unsure (1)..(388): unsure at all n locations
ctttgatgctccgccagccactccgtaaggtactgatcgatttccctcatgacagattangcatcttttatttgtttccaatgaacaatggtaataattactgtgaatttaaaggatactgggctgctttacagcagcactttccgcttgtcctangctaggcataggacgacgacctactggtcgcaaccctagcctctctttgcgtccgtccataagtacctgaaagtaggaaacaacgaggtgtggaaaatctcgaccgcgtcgtcgtcttaccttgattggtttctgtcgttttaactttgtctcgacccctaatggtagctcgagatgattctgcccctattttaccacaacaatatgcatgcgtatgcatatgcatgaacat

SEQ ID NO: 138547 - DNA, 395 bp, Glycine max
agcttcttctgcagtctcttggttcaactaaatgggtacgcgtgtgccttttattattttttcaataaccaataataataattttcaagtgatgtgtgcgaatgtgcgtgcgtgctaaaaagtccgctccacggcggcgccgtcgctctcccctatctcctcgcggcgttttcccacgcgccaacgcgtgttttccacgcgtacatgtcgcttttcacttccacattccacatgggtttcgtccattaattcattaattaggggtgtgtctctgacgctcctttaaagcggcgtgaggttcggtaaaccgagataaaatcccccacgctaatgtccagaataatccctaactctcgtccattctgattcgagaaaaataaagatctagtaaaaaa

SEQ ID NO: 138548 - DNA, 464 bp, Glycine max
  unsure (1)..(464): unsure at all n locations
cttggttcagatatntaggcctngataatcagtttatctctattgtaaattaatatgttaataacatttaagttcaatgttataaaaaattgagattttacgtaagattgggattcgggaggtaaaaggtagtgactaaaaatgcaaaattacactttagtttttcataagcataacatccattacaactcataagtatataattattcacataagtttttcataacatatcacaagtcacaactaaaacaaaagaaaatagtccaagtgtgcaattatagaatctagaattcttgatatttagactagcaccaaatcgctaattttttccagataaaaaacaaaggcagaaatagagatggtgaggggcacttgatgtgagagatgagcttatctctgctgagcctcaggccaaagtgcaatggtgaaactggagagaacaatgttacagagcaatgggtata

SEQ ID NO: 138549 - DNA, 419 bp, Glycine max
agcttattagggttttattttgttttgtctttttgacaaatgccatgtttagatctagaaggattaaaatattctgttgggtatccatttctgattttgctattttcattagagcattttacaatatctcacaatcttcaaccttcaatttgatgtgttttccattctatagtcttgcatctatgtcatgctcgtatgtcttatctggtcacattgaaattattctatgcattgacacctgtgtatcaagctttgggaaaacactgattgtaactagaagtaaagacaacagtttaagttttctcccctttgatcttaagattgttgtaaaggctttaaattttcttgtatgggaaaaagtgctcaagggattttgttcaattttacgtagttaacaacgggtgctctattgagttcat

SEQ ID NO: 138550 - DNA, 462 bp, Glycine max
  unsure (1)..(462): unsure at all n locations
ntaaccaattcaggataaacaggcaattgtnatgacatgaattgtataagacctaggttctgaaaggctngaatgcaatcaaaagtttcagcataaaagaattccatatcaatgaacttagggtcgataatggaacgagatgagaaaagatttgagtaccgtttctgctgttcttcggaagaaaatagtgtggacgaagatatggagggtggaattggtgctgtggatgcgctgttggctccggaacgatgagctcttgaagccgaagtggaggtggatgaacccttacgtttctttgacgattcttccatttgaaggagtttttgcagatttcaatcggtgaaatcaaaagaaaaatgaaaaagaagaagattgcaagttacgggagtcgatttgatgaagaaatgagtaagataggaaggtttggaggtttgggaatggaggaacgtcgaaagggtcaag

SEQ ID NO: 138551 - DNA, 430 bp, Glycine max
  unsure (1)..(430): unsure at all n locations
agcttggatggtgttgggcatattgatgagtattgagaggggttgattgaggttttggccaaacaggagccgaggtcacggcatgagcgtccccttctttcctctttgccccagtcggcccggaccttctgttgcttgtgctggtaggggtgacgtantcgaaatttcccctttttaggcctacctcgatcctcttgcccgcaaatactagatccgtaaagttagagggcatgtagcctactaacttctcaaagtagaacactgggagtgtgtccactatcatggtgatcatctccctttccatcatgggaggtgctacttgagccgccaaatctctcaatctctgggtgtactctntgaaagatttgtgctcctctttgcacacgttttggagctgcattctatccggagccatatcaacattgtactg

SEQ ID NO: 138552 - DNA, 474 bp, Glycine max
  unsure (1)..(474): unsure at all n locations
ngctaacccatggaagctcctaatatctcccacactnttgtttgtgggccattctggatggccttgaatttctgagggtcccactggaccccatttctaccaactacaaaacctaagaaaactatattatctacacaaaaggtacacttctctatatttgcatagagggtgtttttcctaaggactgaaagaacttgtctgagatgtcctaagtgatcatctangctcctactatacactaaaatatcatcaaaataaacaactacaaatctacctatgaaatcccttaagacatgatgcataagcctcataaaggtgcttggtgcattagtgagcccaaaaggcatcactagccattcatacaaaccaaacttggtcttgaaagcagttttccactcatcaccctttttcatcctgatttggtgataaccacttttaagatcaatttntgaaaagatattggcaccatgcaac

SEQ ID NO: 138553 - DNA, 428 bp, Glycine max
  unsure (1)..(428): unsure at all n locations
agctntttttgagccatttcctgtttatacatatccataaaaagntagtttgcatgaaacgcacaaccattatttcatttatcttaagcaagcaagaagtcaaccaattttgggtggtgtatgttttttcgctaattgcaagtgttacgatgcaaataacaaaacaaatcacataccagtgcgtattattatttttttaaaaaaacattctacagctacttagatgcaatgtgcccatcatagtgtagtcagcttaataattagactaattccacctagtcaattctacatgtttatgtaattcatgtattttgcatttaaagcaaagtctagatttccaagcctaacttatactctnggcattttaatctatcaatctnaagtgctcatgcattctaaatgatgtctggacatgcataaagctcatt

SEQ ID NO: 138554 - DNA, 400 bp, Glycine max
  unsure (1)..(400): unsure at all n locations
agaactatagatcttgccagagaacaaggctcccacccactanggtagatatatgtagtcttaccctcacaagtgggaaattggttccatgatttgaacctgtgacctccagatcacatggcagcaacctgattgttgtgccaagactcactctcatagaactgagttaagatntattccttcacttcagccatgtagtgtgcaagagtttctattctgacaacaatatatcttgccattatatttacaaagaagcttcatgaaattntgttctttctaaaatgcttgaaacacacacacacacacacaacacagataatgttcaaccggtttagaaaagtcaactgactttctttcaaacaaagttgctgctagctagcaataattgtttgctttatga

SEQ ID NO: 138555 - DNA, 424 bp, Glycine max
  unsure (1)..(424): unsure at all n locations
agcttcttactttatagcatagttgtatttnttcattatgagcatgggctagactaatcaaaacacttactatgttctattcttcacatatctttcattgtatcatttctagatcttgcatagctttcctgcatatttgatgagatccttactaggaccgacttgcttgatacacggcacaaagtttggatgatgccactttcatagagggaatataagccatggtagatgccacaaggattaccttgataagtccgacattggttcagcgaggaacccaaagagaagttctcacaaaattttatcaaatgccacaagttgcctttattgaagacgagatcgatacatatagtgtatctgaggagcaactacaaaggcgccaattntatttaatttcaaattaaaaaaaaatagaaaagaaatg

SEQ ID NO: 138556 - DNA, 397 bp, Glycine max
tactcaagcttcacatgaatgggtggctctctattaagaaggttgaacatatcttggcttggttttctctcacttggaaggcttcagcataacttcatgatgccccttgatgaactcttaatgctccacagaagactgttgaagtggagcccactcaagtgacaaacttttgtaaaacacaaagaaaaagtgacaattgtcaactcatgataagttgtagagtcattctaaggaacctttctgatgagcattatgaacgtacatcagaatggcgactctgatgttagctaagaatggatcaatatgaaagttgatccttatgatgaagttcaacttatatggctttctgaataaacatagcttcatcactcttaacacaacttcacaacgcatagca

SEQ ID NO: 138557 - DNA, 425 bp, Glycine max
  unsure (1)..(425): unsure at all n locations
agctcttgggcttagcacataattattttcttagcgggtactggcagcttgattggtcctacaacttgtgcttagtcgccaaaggctgcgcttagcgaattaatgctcattaaatgcagtagtggcccgcgcttagtgtgtcgctcgcacttagcgcaatctaatagtttcaattctagagaaggaattgcgcttatcgagcgtttgcgctaagcccaattcaaaagaattaaaatccagtgcggtttttgggcttagcgctaagcactcacttagcgggacaatccaaccaatgatcaggggtcaaggcgcttagcgtgaccaacaactcccttatcacgtgaaggaaatggcgcttagcgcaagggttgcgcttagcgcatggatcacagaanaatttctgtccatctcttcataaaacttat

SEQ ID NO: 138558 - DNA, 451 bp, Glycine max
  unsure (1)..(451): unsure at all n locations
atgagttagacatacccattctgttttatggttntgngatgatgtttatgatgtttgtatgctgaaattgcccatggaaaactgttagagatgaaatgtagagttaacctatggttggaaagtgagaatgtggtgttatgagtggaaaaagagtgaggctctgagagttggaaggttaagtctgaattctgtggtaaatggaggttaaagtgagttaatactagcttgaaatgtcatttacgacttgggagaaagcttggactgtgctagagagaaaaacaaatgatcaaagtgaacaaatagccatttctagggcaaaattgggtgttgaggagtcaaattttgattccgtggaattttatgtgtaaattcagtttgagcaagtttagtttgaggttatggacttgtgtgatgtgagagtttgctttnacctacctcattctcaatttca

SEQ ID NO: 138559 - DNA, 426 bp, Glycine max
  unsure (1)..(426): unsure at all n locations
agcttatagttcaaatcataagtcattnttttgtaatgttgacattccgtctagagatctgagttcttctttttcatcttatcacgttcatcattagaaaaggggcattcttttttaactaagagttgttgtttaagcatttccttgcacccttcttttgaatctttaagagctgtgattaaggatttcaccctttcttccaagtcttgaaaatccttaagaaactttttgcatccactagataccttttcgtccagtagtgccttgacgtcctcacaaacagaggcatcttatacattactaagagaagtggtttccaagacaaactcaactaaatgaacttgatgaggtttcttgagatcctcatgctctctttcaagatgttgaaacgtttgttaatnttctataagctttagacatgtgagt

SEQ ID NO: 138560 - DNA, 484 bp, Glycine max
  unsure (1)..(484): unsure at all n locations
gacacaaaaactcaagctgggtgcnaagatacatctaacaaaggaatttttattttgcatcctccaagactccattaagattccttgtgtgaggtgggacatattctgcctacctaagagtaaaggtgggttagggatcaaagatttgattaaattcaacgaggctttgcttgctaaatgggggtgggagttggcaaataatcagaatcagttgtgggccacaattctattgtgtagatatggtggttggagggatttgatttctcataggaactgcagtttagactctccttggtggaaagacctcaaggttatcttcaagcagcagcaaagcaacacaatttgtaaaaatagctgtatttatgccatangtaacgacggtccatggaatacataccaagtacttattggcttgacaacaaaaaaaacactcattggaaatatatatgtttagcaattagcatagactcgctgaacaagaatg

SEQ ID NO: 138561 - DNA, 414 bp, Glycine max
  unsure (1)..(414): unsure at all n locations
agctngcgcaagaagtgattcatgctttttagtcgtacatatgaatgatgggggactagtgcttctgatttatactgcacacaattttggacattggggatctcaaagtctttgatataatagtgtgcactctttcattgtcggtgtgtttttttaatcatcgatcatgcgtgcctataaatcaaacatgttaagatattttgctgtcacggtccatcttcgacaaattagtcaaatttaaatttctatagaaatattcgcttatttttaaaacattttcttagagaaatagatagtgatgaacatatatttttttttttataaaataaaatggactaaacgaatgcttcatggcacagaggagcacgtgcttggtgggtttaatttatataattaatataactccaatgcacg

SEQ ID NO: 138562 - DNA, 470 bp, Glycine max
  unsure (1)..(470): unsure at all n locations
gctgttggtccaggttgcatgaccaatacacactcaatttgttttttccaaccttaccaacaagggtgagtataatcgaaaaataatggaattcttcaagtatgtcattaagggtttaattcttcttaatgtgtatgaaaaaacaaactttgttgagaaaaacaaaatttactaaaataatctttatgtctcagaataaattagtctttgaggatcacttaagggatattcttggtgaaaataataaaattaaatccaaccttcaacttcatttgaaccttaattatgtaaaattttcaattattatactattttatatcatgctatgctcatccatgtgcacacaagtacctaaacactatacactaggcttagaattagcctattcttttccaaatttaccgttttagaatgtacgcgcnctccctatatgggaccagctcaacaaaattggttgcgttgtctatatc

SEQ ID NO: 138563 - DNA, 425 bp, Glycine max
  unsure (1)..(425): unsure at all n locations
agcttattagagacctctttttgttccccaatgatgatgtcaacgtttttcccattgctaattctttgtgtccaactcacaagatcgttgagaagcgccttaggttcctaagcccacccaatacaattcactaagagaataaaaagtatatggctaataagagaggcagaaaactgaggaatcaaaccttgcatgtcccctaatgcatttcatatctggtgtcaaggtttatgttagcattatataatatgtactttgttaaaatgtgatctatggagacctagttctcatacatctaaagagagaaaagtgtagggaggttccatatatcttgactntactttgttttaccatatttttcttgatgatctaccatcaatttcatccttgcctggaggtaaatttcaaatctgagaaacctattt

SEQ ID NO: 138564 - DNA, 476 bp, Glycine max
  unsure (1)..(476): unsure at all n locations
ggtctcagcgtctatgcgagacaganaccaacatgttagctatcatcgccaagtaccaagaagagttgggtctagccacggcccacgagcatagaatcgcggatgagtatgcccaagtatatgcggaaaaagaggctagaggaagggtgatcgactctttacaccaagaggcaaccatgtggatggatcggtttgctcttaccttgaacgggagtcaagaacttccccgattgttagccaaggccaaggcgatggcagacacctactccgcccccgaagagattcatgggcttctcggctattgtcagcatatgatagacttaatggcccacataattagaaatcgttaggaaacttgtatggtctctcagaccttgactagatatgatttctttttttgaaataaaatgagttggtcccatgtttctactccaaaaagcttgtgcaaatcaaatcactcctacatctcatctcta

SEQ ID NO: 138565 - DNA, 400 bp, Glycine max
  unsure (1)..(400): unsure at all n locations
agcttagacgaaccttgttgagttgatattactttattatttatttggacaagtttgaatatgatgtagaagaaaatgaatgtgggcctttttcccctttaaaagacttgtttcgaaaaaaaatgttttaaaaatacttttaattaatatttgaatttttattcctttattagtatatatgtgaggggtagagggtgtcacacaaaacatatattttttcctttttgcgatagacaaatgcaaatctacttactaatgtcatatgtacctatactactatgtagttatgaatgaattaaggttggcacataatgaatcgtcttccctagcaacggggcccagtttgataatgattggcgaattgattcanaacaaataaaactatgatattctacgatac

SEQ ID NO: 138566 - DNA, 479 bp, Glycine max
  unsure (1)..(479): unsure at all n locations
ctcagcttaaccaggggagatggaccatttcaagtgctngaaagaatctatgacaatgcttacaaagttgagctgcccggtgagtataatgttggttccaccttcaatgtctatgacttatctctttttgatgcagatggagaatccgatttgaggacaaatccttcacaagagggagagaatgatgaggacatgaccaagagcaagggcaaggatccacttgaaggacttggaggacctatgacaagggctagagcaaggaaagccaaggaagcccttcaacaagtgttgtccatactatttgaatacaagcccaagtttcaaggagaaaagtccaaggttgtgagttctatcatggcccanatggaggaggactaaatggcaccactttgtctcaattntagagttnttagttngtctaaataatggcccaatccttgtaaagtggctgaccaanaatatgttntgggttaatcaac

SEQ ID NO: 138567 - DNA, 408 bp, Glycine max
  unsure (1)..(408): unsure at all n locations
agcttcctaccacacagcattcttttttttatatagagactaagaaaaccactgctacgtagtacgtaccattaagctacagatctttctgattaaacaacatggcatatgaacttccttcacattgattctacctccattgtccacccacaacgttgaatcgttgattgccatgcctcacaaatccaattaaccatgcgattgcacttgcaccccacctgccaccattatggataaccttcgtggaatcaccacaaaacgaagagcaccttcaattcataccccaacttgtacacatgctcttccttcgtgcctttactagagacctgcagnacctccattctgtgttaatttgttgcatgcggccattgctacatgtataacacatgcatgctgatgcctccaccc

SEQ ID NO: 138568 - DNA, 483 bp, Glycine max
actaagctaggacggcccttttaattacaatagcccatggcctaatttttatttttttaagaatataataaaataaaattattataataacagttaaatataaaatcaattcttttaaataagttaaagttaaaacttaaaataatttattttaaataattcgcgtcagttactcaaaactgccgctaagtgtgaaaattcactttaacatgcaactgcacaaacgacattctttaaaaacagacaaaagagcaacattaaaaaaaattaaataactaaattgaacatataaaaggagagaaaaaaaactaaaggaaatctaataagtcaattcgtcaagtaatgtgcctatgaatcaaaacgaaagagagtgagaccatattgaataaatcaaataataaactgactgtaaaagtaatttaaccttaagtttaacataatattctctattttttaacccccaaaaaaattaaaaaaatacta

SEQ ID NO: 138569 - DNA, 421 bp, Glycine max
agctttaggagaatccatatattctaaggtagttcctaaacaaaaatcaattgaggaaactttgccaagaatccccattgaaaaacctttattcaaacctttcaaagttagtgagaaggctaaaagaaaaattagggaacttagaaaaaataaatccttaattgaaggcgtaggtgacaaccatagtgaattactaaacaagattggtagtttacttaaagtcattccagataccccccaagcctcggaaaatacttccaaaatggtaacaagaagtacctccaaattaatcaatgttattaatgaagatagtgaccaaaactcagataacacaactgagataggatcagtgtcagaaaagaatataaatccaattaattccaaacactggaaaacaccctccaaattatattatcaacgt

SEQ ID NO: 138570 - DNA, 480 bp, Glycine max
acacatagaaactcagcttcttatccaaggctatcttggtggagaagcttctttctctatggcttattccttaatggatggcgcctgctctcacctcctttcctttgtcttccgctgcatctccatggtggaaaatcaccattaaaggaccccattgaagcttaaagatccagcctccatagaagccccacaagcaagctgccatcaagcgggttgcaccactgcaaacattcatcataccacctattgtaaggactaggttcctaataatacctattttgggcaccaacagagcacaaggatttaagctcttgcgaaccaaaccctcattcaacaacttctgtacttgaggaatgaactcaagcccaagaggtgtggcaatgctaacaagagcctttttactaaagagaaaatgtggagggtgtctaagagggaaaggttctatactgtttgtatttattggaatacgagaatccttct

SEQ ID NO: 138571 - DNA, 300 bp, Glycine max
acatcctaaaaattatactctgatgaaaaaagaacaaaacacattacccgtgtggacctatttgaggcttgtactgatgggcctgtctctacataggcagccccaccatctggaagtctacactaggggaaaggaaggaaacacaaaaattgctgggtggagaaagagattgggtcctggaaaggggatgctggagtgaagaaacttggatactatagtttgtatggcaagaatctggccttgaggacttacttgacagagggaactgacccttggttgcttctttataataacattcac

SEQ ID NO: 138572 - DNA, 464 bp, Glycine max
  unsure (1)..(464): unsure at all n locations
ntcatctagccaagattagacaaaggtgttacaagataacttaacggcttctaattatatgggccatcaaatctatcatgtgttgatagtaattgattagcccatgaatctcctcgggggccgtacacacttcggccatggcttttgctttggctaatagacgcgggaggtcttgacttccattcaaggtcaaggcgaacctatccatccacatagtcgcttcttgatgcaatgcatcaatcaccctccctcttgcttctttttcggcgtacacttgtgcaaaatcctccactagcttttgttcgtgggtcacagactggttcaactcttccttgtattgccctatgatagctagcatgctntgctccgtggcttccaagtgttgagccaaactcctcttggaccttgcgtacgcagctaactcttctgttaagatcatgccatgcacccgtgaccggtctctt

SEQ ID NO: 138573 - DNA, 432 bp, Glycine max
  unsure (1)..(432): unsure at all n locations
agcttgagcaaccacttccttgttattatcttctaccatagtcttgatgtaaatattcatcacagtatctgatgaatcaaacagccccaaaaggttatacagataaaatgaaatggcttatcattaccataaaaaaataaaatcaaacagtagatgttctcaccgagaagttcttttgctttagcagccccttccttaaaaacaaaggcagtgtcaattgtggtgttaaaatcaaacaaaagatgggaatgggaccaagaaacaaaatgattaaataaaaataagtccttctatgataaagtaagaatgcaaagttaaaacaaggaggtattggtcaaacttacattttgactttggaagatngcattggccgcagttaaagtatctgcggttaaaatcaaaaacacatcagcaatcaatggcaatacacac

SEQ ID NO: 138574 - DNA, 449 bp, Glycine max
  unsure (1)..(449): unsure at all n locations
ctcaagcctgttcccttttttagtggttattgtaatggttatgctttctatgtatttataaatataagaagatgaagattaaatttaattttggataaataatcatttttgtctctaaatgtgtaaagtgctgacaaattcgtccctgagtgtgtcacttaaactctttcattaatggtagcgaatgaaagttaacatattatgaaatntgtgtcactctattttttacgttcagggactaaaatttgaattttcatctttgggaaataaatttatcagtggtttacatatttaaaaacaaaaataattatgtatcataaaattaatgctgctttcttacacctattgcccgttagccactctcttaagtctcgtgctacttattgtacgtttaggaactagcatgtaccttctactactttttctttactataattcatctgcatgac

SEQ ID NO: 138575 - DNA, 265 bp, Glycine max
agcttctcccacattctcctattttatgtggagaagtgaagaggaggagtgttcagctctcctggtaattcgagaatcacttgaaattagtgaaaaaaattggttccatgaagaaaatccatgccgtggcgcttccgtaacgtgtccttgggtgactaggtcgggatctctcaatgtagacaacggggtttggtagtcgtgtttaggcagtggggtgtgcccgttatacctcgtggtgggaccgttcatctcttatttgggccct

SEQ ID NO: 138576 - DNA, 328 bp, Glycine max
aaagggtgaagaggtgtacaaacacaatctgttattaatttcttatctcaccacagagaccatgtggagaaaagagctctcgacgtagcaagaattacaacttgggcatagatacctaagttttgtaatgataaagagattagagagttcgttagtgatagagagatgcttacaacaagatgagggagcccccttcttgcgttaggaataaatattctattctctcaagtcataattgtgctacggtctttgggtatggcagagttaacactcttgttgggaatttcttaggaacatcttgggtaattacttcgatattgatttgatt

SEQ ID NO: 138577 - DNA, 428 bp, Glycine max
agcttcacacaaactactctctcttttctatttatcagaacaccaattactaattcctttttaactagacaattgacgtggtgcatgttcacatgtgcatccctacgaagcaatagtcaaaaatcatgaatcttattttccaagcaactaagctcatgaaatgatgcatgttcaatattaagcatgtagatattacctatttttctacctatgtgaacaacctcactagtttttgcttcacaaatgagacaacaattcttgttgaatgcaattttgaagcctttgtcacatagttgacttatgctcaaaagattgtgcttaagttcatcaacatatcaaacatgttgcttatctgagtattgtgctaatctccaatatttccttctcccacaattcttttcttattgttgtctccaatagtgacatat

SEQ ID NO: 138578 - DNA, 470 bp, Glycine max
  unsure (1)..(470): unsure at all n locations
gggattactctgtgatggaaacctttactttctcatatgctcttttctctttcaccaggcnngaaaacaaccttgtttcttcctttgttatcatgtttagaaaaactttcacttgttcatgtaacttccttacatgttcaacctttatttttccatctttatgatataagacaaaagtgttgagcaatggcaatgagtcaagaggagttaacgtattgaatccatacactatttcaaatggagaatgttgcgtagtgctatggacaactctattatatgctaacacaacatgaggtaaacattctttccaagtctttatatacttgttaatcaccactctaagaagagaagagatagctctattcactacctctggttgtccatcaatttagggatgacatgtaattgagagaagaagcttggacttagcttaccaataggctcttcaaagtgacttatgaattcgtgtc

SEQ ID NO: 138579 - DNA, 364 bp, Glycine max
aaataacgggggccactaccataataacctcacaccggcctttggttggttggggtccccaagttacctgggttctggttatgaaccttttaccttattttcttggcttcatggtctaaagaaaatcctgaaggcccaaagcctcacttgaaaaattggtagaatttataggtggtgctcaaatggcaaaggctgaggatgctcttctgcctcctgaagaaaaggtagcaatgtagccatattggtatcttgggatgaataaaatagaaatttaatgcatttaattttcgataaatttttccttcgaattatctagcatcatccatctggtgctcctcctcccccccgttcattatctgtcaca

SEQ ID NO: 138580 - DNA, 472 bp, Glycine max
  unsure (1)..(472): unsure at all n locations
tcaccgatcctatngaagcaattgttaaccatacatacccattattctcttatgaagtataaagatgacgaaattctcatattcagatctatactcgctacaacaaatgaggttgtagaccaaatcaatgactatgtattaaacattatcccacgtgaaaaaaaggggatttcagctatgactcaattgacatgaaaaatgctgcaacaactanagctnttgaagcaattacactagagtttctacattcattaaagacatcatgaataccgaatcataaaattaggctgaaagttggcacacctgttatgttgattcataatttagatcaagttgaaggcctatgcaacgagacaagactaattatctctagaatggccaaccatgttattgaggcacgaataattnttggaanaaaatgtacgaagcttggttacatttcgtgaatgtcattatcacccatctcaatctc

SEQ ID NO: 138581 - DNA, 336 bp, Glycine max
ttttttataaacttaagagtttttcatactgaataacttatgcctagttgtttgtaaaactctctcaatatagcttctaaaagatggaacataattcatatatcatctagactcaggttagtgtctgggacaaactatttatgtcctcattattcgatctctaacagcattagaagggctaacccctgataaaacttcataatctcttttaaatcttctataattcccataatacgttatccccaagactaattgacaaacagcggactctgcacctggaataacaagctgcataagcaaatattgtgggggagttgatttgcttgagaagtttga

SEQ ID NO: 138582 - DNA, 488 bp, Glycine max
tactaagcttgctcaaccgattctttattctaccaaaccactactgactctatctctataagaagaactgtttgttttgattgcacaatgattaacgctcaatcatcttataaacaaatagatactttaaatacttagtcttttctctcaagataatcaaagtgtttcaagagatattctaaactttacaataatttacacaaagatatttttacagaaagaatttgaataatgagtgcttcaattcatactacatgtcttcaaagtttatggtatttataggcctccttcaatcaagtatatgttgtctctaaatgaacgtatttttgctcttaagctcgcatatgaagaatgtgactgttgggaaattaaatgcatgcacttcctcatgctgagaaatcactcttcattggtggcgtgttgaatactacattaggaaaccacttccttttgcgtcaaagaaggtatgtgcaatagaactcttctta

SEQ ID NO: 138583 - DNA, 418 bp, Glycine max
agcttatgatcaacctattctttttgattccataacatattcaaagagaagagagaaattgtgagagatctgtattgtggaaattcaacccaactgaaaactgattacaatacagtacaaatagtagttacacaactgtaactgtcaactaacctgagttagtgacagctgtaatatggctgtcctaactaacagactaactactaactgtttaactactatggttagacttacagcttcagctaaaaagaaatattacaagtatactcctataaaagcatgtgaattaatctgaatcttgattaagaataaccgaatagtgtttagcacatgctgatactctcttgatgttttgtctgtccctgccattttaaatttgcttctaaactgtatgtttctgtgcagtaaattccacttt

SEQ ID NO: 138584 - DNA, 442 bp, Glycine max
tactcaagctattttctttcagatggtttgaaggatgggtttatattttattctttaatgggaaggatattgacggttggggaacaaccatggctatataatggaggataatgcttgcatctcaaccccaatctgggaaggagggcgcgacctttaagtgtctcatattattgacccatcaacaattatctggacaatgatatcattagccattagtgtttgccataagatgcccatgcaatttctagaatccccatcctaccaatgatacaaaaggattctcgaatttgggcactgaatcataacaatttgtactctgtaccaagtgctcatattttcataatgaagaagtttgtaactatgatatattatactgtagagattgaaattcctctgagtgatttttttggcgttgtcaaaattctttcgaatagatacattc

SEQ ID NO: 138585 - DNA, 423 bp, Glycine max
  unsure (1)..(423): unsure at all n locations
agcttggttcgaggtacttactcttttgtagatcgaagaacgatgaagaacgaatgaagaacgtcgaagaacggttgaaacctttgcgagattcctcacggaaaacgttacggaaacgtttcggaagcgcctcggcttagattttcttcacggaaacaatttttccaagcaaattcgaaagagagagaagtgcctcaggggctgaaccccttccttcttgccttcctcccctatttatagcaaaataggggaggtggttgccgcccagctcgcccaggcgagcagggttgcttcctccagaagcaaccgccttctggaggaatattccggagggcccaagtgggcctgggtgctatttgcaccctcatttttactaagtacaccccctctgctgtttttnggtgattctttttcgtaaagtac

SEQ ID NO: 138586 - DNA, 320 bp, Glycine max
  unsure (1)..(320): unsure at all n locations
gacattcatacaaagatactgttgcaataaatnacataaccaaaaaaagctgatacaggattgacacgcatcatcaaaaatggttcacagacaaaaagaacatcctgtcttccgataaatcacaacaccataaaaacaaactatatgattcacatgctagatcaaaatgcaagacagttggggatagaaaatgatcataaactgattcttatgcaactgatacaaaaatcaaacatgccaaacatgtgaaaccaatcaataaatgacccacgagaaaggaaatagcttcgcataagaatagacaaactcatgatgaaatc

SEQ ID NO: 138587 - DNA, 426 bp, Glycine max
  unsure (1)..(426): unsure at all n locations
agcttaaagtatgcccgttcattctttcttatgagatgtcgntgaagtattggcgatcagaatttccattccttggattacggggttgaaccaagctcaagcttttacaaaaaaggttcatcaagtcaagttgaaatatggaagtaaccatcctgcaaaattggggcaaaagatgaatcgagtcacatcactgcttcgtctactgccaaacatatttaggattattgatgtccttgttacttccagtttcaccttgacaaaaatgtcatggaccatgttgaaaatctaaattgattcaaccccatatcctgcataaaaattcgcaatacttcgactgtacatcattcgcatgcatccatgcttttcattggttgcattgctcattgcattctttccttgaaaaataaaatanaataaaatgaactt

SEQ ID NO: 138588 - DNA, 475 bp, Glycine max
  unsure (1)..(475): unsure at all n locations
tgtgcattcaatatcttgatgagggtgttccatatgttcttatgactggactaatacatttgctgccaaagtttcatggtgtcgcaacaggcccttttgcgggcgagtgagacgaggctcacggttgcgctnttcaaaggaagaaagatgcgtggagtcgccaccaacatttatttgtggaaaacgttggaaaaaccgaaggaaaccggtcaaaaagaatattccaagttcgggagttgtatttacgtttgaggaaggtattagcacctctcacgtttgtctcanaggacaacaacctattttttagaattgtgtgaaattgtgttaccttaacttttatttcttttttatttttgaggtcgacaaaagcgaggctcttgctcctacgtaccctccatcgaagaggaaatcaaacctacgtagttcttttttaagggtgagttaagcgattctntttacttggaagatgatcatt

SEQ ID NO: 138589 - DNA, 419 bp, Glycine max
agcttgaaggtgtgtattctctatttttcataatagaacactggtaatgtgtctactatcattgttatcatttatttctctgtcatcgagggaaccacttgggcaaccagatccctccacctttgggcgtattctttgaaagatctgtgccccctcttgcacatgctctatagttacatcctattcagagccatatcagaattgtaccgatactgcctaacgaagacaaccattaggtccttccaagaatggggaaggttccaagttagtataccaagtgacagctaccccagtaagactttcttggaagaaatgtattagcagttcctcatcttttgtgtatgcccccatcttctgacaatacatctttagatggttcttggggcaagtagtccccttgtacttgtcaaagtccagca

SEQ ID NO: 138590 - DNA, 463 bp, Glycine max
  unsure (1)..(463): unsure at all n locations
tcctcgggccattcctgcgaaggcaaacatttggatagttatttnttaccaagaaatgctacccttaaaacaaaaatggcatacaactccctccaataaatacaaacatcaatgtaaatttagagcaagcttatgcgcatacttcttcacgaacgttcacttacacaagacattcttataactaagaaaaatgcacccatatacaatcaaggcaccttcgttacctagattatttacatgtacttccaaggagtatttgttacctacatcacacacatttcctttgctaaattcacatacatgcatactctaagcactttggctatcaaaaattcacatacatgcatactctaaagccgcatgcaaattcaagtatattttctttggctcactaaaattgtattcaaattaaaaggtatttntgtaatgcattntctttacataacatgcaacatatttatag

SEQ ID NO: 138591 - DNA, 416 bp, Glycine max
agcttcacgttggccttttattttaattaacatcatatctgcctcgaaatcagtatatacgatacctcttaccatgtaccaaaatcagcaccccttttaaatattcgcacagaggaagaaaactatgaatttaagaccaagaaattaataatattttcttcttgtgcacaactcaagaaattaacaaaatgaaaataatgtaaattgttaattaccaattttgcacaatgctacaattgttattgctaattcccctttctattttagaaaacaatttaaagagggtaaataatcccttacaaaagcctaaagaatagataaatatcattccacagttttttttttggccaaatccacattcttttaaataaattgtgtccttaacctaggttctagatccaccactagttcaattt

SEQ ID NO: 138592 - DNA, 456 bp, Glycine max
  unsure (1)..(456): unsure at all n locations
ataggcaaattcaactactggtgaatcatactttattttagtcaaacgnnnctatggatcggaccaaatattgtggaagattgtcagtgtagcttacgaactccagttgcttgaaggctcccgcattcacccagtgttccactgttccattctcaaaccatgtcatcaaccatcccgatcagtagacactacagttgacttgccaccaacaacagttgatcatcaaccagttatttcacctcttgcaattctgaacactcgatgggattactctaagtattaccccaaattgatggttctggtccagtggaagggcctatctccttatgatactttgtgggaggaatatggtagtctcaaagttgaccaacaccttgaggacaacgtgttattcgatgagaggagggatgttatgaagggaataatacaactaccgtcatgcactacagacacaag

SEQ ID NO: 138593 - DNA, 437 bp, Glycine max
  unsure (1)..(437): unsure at all n locations
accagctacctggctgatgattatgcctgcctcctctttctgaagggatagttgatcgaacccgacctgtacagttatcttctttaccttgtcttggttggaggagagcatccttcataaaacgaaattttggttcaaagcaaatttgcccaaatatgggggaattattgggtgaaagcttgtgattgtnagaaaagagcaacacacacagtcatctaataagctgcaagtattaaaaaacactgtaagtattaaattaaagtgtgtgtgctgcctattaagaaaaagacaagctaagttcgcaaaagcgagttatgagctgtaataaaagaaaaacgatgacttaggatgaatgcttccataacctagcttttcatcctataaaaccatgaattggttgcacccccctgattcaagcctacataagtctttggatc

SEQ ID NO: 138594 - DNA, 425 bp, Glycine max
  unsure (1)..(425): unsure at all n locations
agcttgctaacccatgaaagcttctattatctcccacactttttagggtgggccattcttggatggccttgattttcccatggtccacttggaccccatttctaccaactacaaaccctaagaaaactatattatctacacaaaaggtacacttctctatatttgcatagagggtgtttttcctaaggactaaaagaacttgcctgagatgtcctaagtgattatctaggctcctactgtacactaaaatatcatcaaaataaacaactacaaatctacctatgaaatcccttaagacatgatgcataagcctcataaaggttcttggtgcattagtgagcccaaaaggcatcactagccattcatacaaaccaaacttggtcttgaaagcggttttccactcatcacccnttttcatcctgatt

SEQ ID NO: 138595 - DNA, 458 bp, Glycine max
  unsure (1)..(458): unsure at all n locations
agagacatnttcttcgaccttggggattattgactccatctcattgaagcgcatgtccacttgtaacggtaaagtatcaaacctttcaccaacaaaggtttgaagaccatcgaacctgtccaaaatctttgaaagaagagatgaatcttctccatcacgtccttcttcaccaacatgtcgagcaccctttttcacccaagagccatcatgctctttttgataaccaaaggatgcaatgactgaagcgcctattagaaaggatctcttgattggaacatagggttcagaatcaagagggatgttaaagtgttgaaggaagagggtgactagatgtggatatggcaatggagaattcaatcgcaatgccttatgcatgcgatatctaacaagatgtgcccaatcaatttgtaggcctttatganaagcccacataacaataagatcttcttcagaaacct

SEQ ID NO: 138596 - DNA, 422 bp, Glycine max
  unsure (1)..(422): unsure at all n locations
agctntgtgctccaactcaacatgtattgtatagatttattatagaccaattggaagggaccaatcctttgtatgctattttgtatgcccacaaagcttcatctagtttttgggaccaatccttccttgactgagcaattgttttctctaggatctcctagaattccctattagagacttcagcttgcccattggtctgggggtggtaaagtgaagctaccatgtgtttgacagtatagtgttggaggactttcttgagttgggaattacataaagaagatcctccgtcacttatcaatacccttggtgatgcaatcctaccccgcaagggcattggatagaaaactccaagtagattgggccagatatgcaagagaaggccctanggttcttatgagccttanggtagatntcgggcccat

SEQ ID NO: 138597 - DNA, 482 bp, Glycine max
  unsure (1)..(482): unsure at all n locations
ctaagcttggaagctcttaaagcactcctacctttgtatctagacatgttagtcactagctaaaattagcttatgcacaagttaaaaatcaggttttggagaagctaataatatgaagagagtttctacagattagcttatgcataagttaaaaatcaggatttggagaagctaatgggccagtttgtataaactttaaaaaaaaaagtaatttaaaaaaaatgcttttttaataagcagataaaatttgcttcttaaaaaagcaaaaaactaattattttaagtaaacacagtttagacaaacatcagaaaaccacaaactgcatattttattttaaaaagcacggattntaaaaaataagtttaaacaaactagcccaatatcagaagttttacctgtttttttaaacttatntgttggaataagttcttattntaataaaataagcaactttcttgtntttagtgtttggctaaacttt

SEQ ID NO: 138598 - DNA, 431 bp, Glycine max
  unsure (1)..(431): unsure at all n locations
agcttacccctatggcttgccttcagtctttactccccgtgccaccccggaagatttaagccaagcccctaccttcgaggggcaactcccaccttatgacgactatcccgggcaagacgatgaggaaggagatacccatctcggccccctgctccacctcaaagatccatccccccatgaactaccccaaccgaacatagtcctccatatccctgcttcacccacacccgtaaaagaatatgttcccttcgtggaagataagggaaagattgaggcgcttgaagagaggttgagagcagtcgagggcctcggcaattacccattctcagatctagcggacttatgtcttgtgcccaacatcgtcatccctcccaagttcaaagtaccagactttgataagtacaaagggacgacatgtccgaanaggcatc

SEQ ID NO: 138599 - DNA, 472 bp, Glycine max
  unsure (1)..(472): unsure at all n locations
cttgacttgagtcatcaagagattataaatatgtgaccatggcatgtgtntcattaatcatctatatttcaatctttacaacatcatctctcaacatctttcaatatccttctacataattttctgattcatttctcttcatctttctaaaagtttttgatcaacactttctcttccaagaaaagttctttgttcaaaaacttgttctattaatctttttcattgtcttctccctttgccaaaagaacagaaggactaactgcctgaattcttttgtgtctttcttctcctttacaaaagattcaaaggactaaccgcctgagaattcttttgattcttcccttccnctcaagcaaaagatttcaaaggactaaccacctgagaattctttgtcccaacacattggaggggtaatcctttggggtacaagtagagggtacatctactgggggattggtatactgagaacaag

SEQ ID NO: 138600 - DNA, 430 bp, Glycine max
  unsure (1)..(430): unsure at all n locations
agctntgcatgtatatcttcacatttattacttaatgctaaacttaattacatcatcttcttttttggtacagctttattctattatttactctaattattaaaaagagttttaagaaaataggttcacgacacaagacaagagacaaaaatcctgccggcactaagcatatacatacatttttttaagagatataaatacatattttatcatatatatgcatacggcatacccttgtacatttcatcaatattaattcaaaaaatttgtcaaaaaaaatggctgataaaaatcaagctagtagctgagtatatgactaacattacttttaattagcgtgattataacttagcgcaacgcgaaaagcacgagttttgatttatatactaaaatcaagttattagagagagaatcttactttattatatat

SEQ ID NO: 138601 - DNA, 465 bp, Glycine max
  unsure (1)..(465): unsure at all n locations
ggtagtatctaataacattattgtttgtattnntaaaaattcatgatatttttttcataaattaataactaatcctttgaagtattgaaatgatttaaaagacacaccgtctcttatagattttttttttttactcgtaatagatatcaagaatgacaaggcttaatcaaatttgtttgataaataaaaatgagagacacaagaacaactctaaataatttgaaactaacaaattataactggtttaaaataataaaatgtatactaaaaataataagatataattntggcaataaaataatgaaaacaataattgagtattgtattttttataatatgtaattatataaatatgaggattggaattctataactatggacaaagatacgcactatttatctattgatttttacaaacaatagattaatagtgcgtaccttcggtcatagtgaagcttctctttt

SEQ ID NO: 138602 - DNA, 365 bp, Glycine max
agcttcacaatattgcttattatttattagagatgaacatagatcaaattgcgctcgtataactttgatgagtattacatcattgttataacctgatatagaatgggatttttattaatcaacccgttgaattatatctatgcattattaaaatcatctatgtcaaattttggcgaaattgaataacaataataaggggatcaaatgatttatattttaatatattttaaaatatttatattacgtcgattttaatatataagaacaagataacaagtgattttggattaatatcaaattttacatatgtgacctatgtgaaaaaaaaaaacttttaatccaacgatgagttttaagaaaacata

SEQ ID NO: 138603 - DNA, 490 bp, Glycine max
  unsure (1)..(490): unsure at all n locations
gacacttagaatactaagccttgtaaaaccacttctttgatataactctactcaagtatcttttcataagttactggaagaatgcttctgagaacacactaaagtaacatttttctagggttttgctctttttcttcaaaacattctataagttactgtttcttgctgctgagagcacactacagaacatttctaaaatatatggcatttaaaagttgtaacataattgaacttaatttagaaaggactcttaagaaatatgaaaatgtaatctgtgatatcatttcttatatcagcaaatgatattttgaaaacgtcatgcataatatagaatacataattctctacaacatgtaaagacgacattgtgtctttggtggacgaacaaagcacaatgttaaacacactgacacaaggtcacaactcagatagggaaactcgctngaacagctgcgagctgatagatcatctcacagagagaacatcagag

SEQ ID NO: 138604 - DNA, 425 bp, Glycine max
  unsure (1)..(425): unsure at all n locations
agcttctccgaagggcatggttatttttagtttcctgaaaatatctaagaatctcgccaaatgacggtccttctccttcttggaaggtaccagatgatatggtacttcaacaccttcattcacagctttttctcttttcttctctctagctngttcacttctactcctctcttcattcttatttttttcatttttttttctttttctacttctttttctttttcttggtcatttaattcttttctcttgaccattatttgtttttctttttcctgattgccttcacctctcacatcatctttcttttcatcagcacctttcttttcagaacctttcttcttggatacaacactatcctcatcctctgcctccacaaacctcttactccttgtcatcacagctgtgcattcatccttaggattctt

SEQ ID NO: 138605 - DNA, 469 bp, Glycine max
  unsure (1)..(469): unsure at all n locations
nnggatttaattatacttatgaacaannatttattttgtttatgtgtatgactngtaccaagttactgtttctatttaattatgtatattcacttaagtaatggcatgttgttggatgaatttatgttgtgacaaaattactttggttttcataagcaaaattaagggagttctttttataaaaattgaaattagcgtatattagagtgtgattatcgtagcgacgaggtgggtcgttacaactagcatttgctcaacctccctagcatccgcaaattggagcaaaaccatatcatggtttctcttgcagaggatatttgcactcaggaagaaaccgactgctaaccttcacaacattctcttgtcgttgtcggaagcctctcgtgggtactccttgtctttgatgtatcgcttgatatcaaagtaccaaggtttaccaacttgctcctctntatcaagcacaatgtat

SEQ ID NO: 138606 - DNA, 425 bp, Glycine max
agcttgaagatgatgctttaattttgttaagaaagagagaagggggagcacaaaattgaaggaataaaagagggagagaagtggaactttgaagtgtgtctcataagacttttattcatcaaagttacaacaagtgttacacatgcttctatttatagactaggtaacttccttgagaagctttctaaagaaaacttccttgagaagcttctttgagaaaacttccttgagaagctatatcttagctacacacacccctctaataactaagctcacctccttgagaagctttcttgagaagattcctaaagaagctagagcttagctacacacacctctctaatagctaagttcacctccttgagatgagaaactagagcttagctacacaccccttataatagctaagctcaccccattccaaa

SEQ ID NO: 138607 - DNA, 435 bp, Glycine max
  unsure (1)..(435): unsure at all n locations
tccaagaatcaagatcaagatccaagactcaagattcatgattcaatagaagacttaatcaagataagtatgaaaaagttntttcagaaactgagtagcacatggatttttctcaaaacctttttaccaaagagtttttactctctggtaatcaattaccagattattgttatcgattaccagtagcaaaatggttttcaaaaagctttcaactgaatttataacgttccaattgatttcaaaatggtgtaatcgattacaatggtttggtaatcgattaccaatgtgtttgaacgttgaaattcaaattcaaatgtaaagagtcacatcctttcacaaaaaagctttgtgtaatcgattacactgatttggtaatcgattaccagtgattgtttctgaacaaatcgaaagatgaactcttcnatggttttgact

SEQ ID NO: 138608 - DNA, 424 bp, Glycine max
  unsure (1)..(424): unsure at all n locations
gcttgacttaaaacccaatatttttttgcttaccaaacttctactagctctaaacaaatcaacaagatttgttggaagattgcacactaacttaatatgtgatcctcttatagacaaatatatcactaaacaattttagtcttttctctcaaggtatacaaagtgttttgagagcttagcatctctacaaaaaaatttatagatagctttacaagaaaaaatgaaagaataaggtcacatagattatctgtgtctattttcttcaaattctatagtttgaagtcttgagcctattggagcatttaatgcttgctttaaatgcgcatctcatcttcatgcaaagtccatgctaataggctagtgtgtcttgtactccaacagaaaagtcacttctttcatcanataagatctacaacaacagagt

SEQ ID NO: 138609 - DNA, 475 bp, Glycine max
  unsure (1)..(475): unsure at all n locations
ntngccttctcctccaagcgcttccttggtatccctacctttctattcctatcatgcttcactcggtctagctcttgttctgagatcttaaccacttttgctattcttgccatagaaggatagaattcggtaaaagaggtacggcttccttccccctaatgggcattctaagatctcctcaaactcttctatggttggtgccaactaaaagtccccaaaagtgaagcatctgagtgattggtcatagtattgagtaagggatgcgatggcttcaatgaacacttctaccattgccagatcccagatcttcccatatgccttgttgaaggcttgatccatccgtcgccctagatctcgcaagctggatagttctagaattttgactatgacatgataggaaccttttttaaaaaatatggcacttggtccgaccacatgtttgcgagaatgaaaattctggtgaccaatacttcaa

SEQ ID NO: 138610 - DNA, 422 bp, Glycine max
ctgcagctttgaccaaatctttctctcctaaaccttgacccacggtgagaatgtcaatccttaccctcggaagcaaagaaaaaaggagagaaggaaaatttccaatcaaaggaaaaaaggagaggaaaggaaattcccaatcaaagagtgggagaaagcaaaaagaaaataaagaaaattcccaatcaaagaatgggagaaagaaaaagagaaggataagaaggaaggaaagctcctgatcaaggatcgaaagataacaaaagaaatgtgcagaggggatctctggaccagacaatatctaaacaaatacagaattgtcaccaaatgaacaaaagatagaataggagaccataacctaaaagtggtcttcctcctctgattaccaaccaaaattctgtgcgttggtgacttgttcgcctcgc

SEQ ID NO: 138611 - DNA, 467 bp, Glycine max
  unsure (1)..(467): unsure at all n locations
aagcttcttaaagaagctacctaggctataaatatagtctgtgtaacactngntaaaactgtgatgagatgagagtcttgtgagacacacttcaaatttcaacttctctccctctttttctccttcaatttcgttcccccctctctctctctctctctcattcttttcctccattgaagtttcctctctaagcttcttatccaaggcactctctcggtggtgaagctcctccttctatggcttaatccctagtggatggcgcctcctctcaccttttctcctttattttctgctgcatctccatggttgaaaatcaccattgaaggacctcattgaagcttaaagatccagcctccatagaagcttctcaagcaagcttccatcaggttgggttcactcttatttgtaaatattagaatagggtttccttcttttatggcctgtattttggccattctagtagtata

SEQ ID NO: 138612 - DNA, 406 bp, Glycine max
  unsure (1)..(406): unsure at all n locations
agcttattattggacatttgaattataatgaatcntgncaaaattttgttaaagagctaccagttaaattaggaaaaaattataatatattatttttttgtaaaattagccatgagagttgaaagatctaaacgagaactttatatatccatctttatgagtgaaatttcttcaaatcttgaataaatgaacaaaagaagtaggcaatataataagctataaagaaaggaacaaacctctattcttggaattggatgaccgngagttgtgatttgtctttacttgtcactattccaaatcgtaagcaataaactgaatgtgagaaaaaaagagcagattttggaagaaagcagaaatatgttggcaagctaaacatgatttaaggatatggatggcgtactactag

SEQ ID NO: 138613 - DNA, 443 bp, Glycine max
  unsure (1)..(443): unsure at all n locations
tccttcttcatagtttactatntacttttcttttatttttctgtatatattccccaacttggagttnttggatattcactttgacgaagcacagaagtggttattgagcaacactgtgaagcatccaatgcaccgtttaaaagagctttggttaagccaagttaatgatggtgaacgtctctgtcagattctgtacagaatgccaaatctagaatagttacacttgtggaaagctgaacatttgcttaaagagtcgtcggagtcacgtttgggaatcgtattacagctgaaggaattgggtttgtattggtcagagataaaggatataggatttgaacgagaaccagttctacagagactagagcttttgagcttacattggtgccacaaattgaggaattgggtccttcctcgtatcatnggcttacttgacanattgaaag

SEQ ID NO: 138614 - DNA, 415 bp, Glycine max
  unsure (1)..(415): unsure at all n locations
agcttagaaatacaactcttatttataagtcacagngtacagcggatataacgggaaatcataaagtacatttcacaagatcacatgattctaaaacactactactttttttgtcatttctttgctttttgtttagggtcttaactgttctcgcggtttgttcatggaggtagggcttatttagttttttatttccttggcatatatttacttttggttgactagtttctgtaacgctgggctaattgttttgttcatggcttgttttgctactttggttttcttaattcaagacgtgtttatattatgtagtacttctttattttattcttatactttgtangaatagggaaaaaatcaaatagaaagtaggaacttggttntcaaaacttaaaacaaaaaataagttaaaaaa

SEQ ID NO: 138615 - DNA, 470 bp, Glycine max
  unsure (1)..(470): unsure at all n locations
ntntagtcaagtggctttcanaacaataatggccttcatcatatccacatttatgaatntcattctaaaattcagagattgatacaaaaatcattgctttatgctagtcattcacactctcaacaattaagttcactctctcaccaggttatggttcaagcttttctttctcaatcaatcagcccactgactaacatttctaattgtgatcctactttattgttctttctcatctacatacatgctcattcaaaactcatgatttcaacacatgcttcacccattcatgcaatcaattcacaacaccaatttcacaaaaaaaatagttatgtttgcactgcatactcagataatcaagtcaaactgttcagtatgcttcaagacatgcatactactatccacaatcaanagtaaaccaatatcacaacaaaaagtgtactaaagacataagtataataattataataatt

SEQ ID NO: 138616 - DNA, 467 bp, Glycine max
  unsure (1)..(467): unsure at all n locations
gaactatcatcacatgatgcnttgttggcacaaaattatttgctttctaggcaacttgagattngaacagaaacactnggcaagttgccaactaaactgtctattggtcaacctacacattcttctattntgcaggttacaagttgtaccatctgtggtgtggctcatgaaacaggccaatgtattcccattgaagaaaacactcaagaagttcactatatgggaaatcaacagagacaaggatatactcaaggaggattctcatgcttccaacagggttcttataaccaacaaggacagtggagatcacaccctgncaatcaattcaacaaggaccagggtggaccttctaacaggccaatccaacaagggcctaacatcttttagaggactactaagctggaggagactntgactcagtttatgcagataacaatgtcaaagcataaaagcactgagtcaacact

SEQ ID NO: 138617 - DNA, 273 bp, Glycine max
cagtggttcgtcattgatgtgccacttgagctgccacgttctccacctttgggcgtatgctttgaaagatccgcgccccctttttgcacatgttttgtagtgcgtactatctgaagccttataccgacactgtctaacgaatgcaaccattacgtcctcctacgaatggactcgggaacgttcaagtttgtgaccaggcgaaactacccataagacttcttgaaggatgatcacaattctcattttacttatgcccactttgcatacatttta

SEQ ID NO: 138618 - DNA, 379 bp, Glycine max
gttgcttggatcttcttcatcaatggagtcctttgcttcttgaatatcaatggcagcggaatggagaaggaagatagatgtatggagacgccacttcaaggagaagatgagtcaagaagaagctcaccaccataggaagccatggataaaagcttgaatgaaggagaagatgagcgaagggagagggaaagaagaagcatgaaaatttgtgcctcaaatgacgtctgaactttgaagtgttattctcaaatgatcaaaagtgaaaaaaatcacacccatggcctctatttattacctaagtgtcacacaaaatttgagggaaaatcaaatttacttgaatttgaattgaatttgtagaagctatgtttatgaagtttga

SEQ ID NO: 138619 - DNA, 489 bp, Glycine max
  unsure (1)..(489): unsure at all n locations
gaaactaagctcaagctgcatgttcattccgttgatgaagctaatntgtggaaatgtcaaagtggacctgagctaaaacagaaaattcaacaacaattcagaaacatcatgtattacttcaaactagtggaagtggacctagctctgcctagctaaatattatccattaataacttgcagggctttgttgtggcttagtctcttttaagcatgcatcattcttccaacaaatatgtagaaaagacaattngatactaatgattcgtagtgatgcttacaaaaccatcttttgtggaaggaatcacagtatatatatgttggattctatctaaaatcccgtcattgattattttagtcctgcagtatggctttcttttcatcttatgtggcttggagatctaatctcattngagtnttccacatcttatctgaacataacttaagacaactaaatgacccctcgctttactcgcccttcatttattattc

SEQ ID NO: 138620 - DNA, 376 bp, Glycine max
tctcattggagcgcatgttcacttgttattccaaagtatcaaacctttcaccaaccaagggtttgagaccatcaaacctttccaaaatcttttgaaagaagagaagaatccttctccaccatgttctttttcatcaacaggtcaagcacctttttcacctaaaaaccatcatgctctttttgatagcccaaggatgcattgacagccgcgcctattataaaggatctctcgaatggaacataaggttcagaatccaagaggatgttaaagtgttgaatgtaacatccttggaaattctacccgcgaatttttggaacgatgtatcttgaatgattatattataagtattattcagcgtatatgcctatatgttctt

SEQ ID NO: 138621 - DNA, 389 bp, Glycine max
  unsure (1)..(389): unsure at all n locations
gggagaggatgcttcaatggaggaaaagaaagagggagagttagagagatgtgggtgcacgaaattgaaggaagaaataaggagagaagttgaactttgagttgtgtctcacaagactctcattcatcaaagntacaacaagtgttacacatgcttctgtttatagactaggtcgacttctttagaagctttctcgagaaaactttcttgagaaggatctttgagaaaactttcttgagaagctagagtttagctacacacacccctcttataactaagctcacctgcgtgatgaagctcctttagaagattccaacagaagcttgaacttagctacacacacctctctaatagctaagctcaccttcatgatatgagaagcttgagct

SEQ ID NO: 138622 - DNA, 415 bp, Glycine max
  unsure (1)..(415): unsure at all n locations
agttgtctggaagggtttcaattntcttcgcaagaatcttgttttgagttaatagtgcatcatgagaggttagttcataaaggctcttctttgcgggagtatatgctctatcatggaggatggcatgatcactagttgtcatattctcaataagctccatggcatcatcaggagtcttcaacttgaatttaccattggcagaagcatcaagaagttgcttggaatgaggtcataagccaccaatgaagatattgagttgaattggctcactaaacacctgagtgggagtcttgtggagaaaccacacaaatgatctatatacctcactaaattcatcacgatatgatggaatgatgaatatctgcctcccctggtggtctggattctaaaagctttctgagagaattctacacct

SEQ ID NO: 138623 - DNA, 337 bp, Glycine max
cttattcatcaccaaaaaattaaacagacaagctatcacattcacttttcatacaagccaaaacttgtgacacaccaccaaatacagttttctcacttaaagaccccataacaattcttgtccggtcataaccgtggataactcaaactttactggaagctttgtcataacctcattggacgtgggactctgcaaacattaactattctacattcttttcacaacagcaaacatcatttttgcacttggcaatctgtgccaattacgcaaaattgcaaggcgattcaaataattcttcatcaactgcaataattctcagtcaatatgttatatttaa

SEQ ID NO: 138624 - DNA, 225 bp, Glycine max
aatatcatggatccttcatgactaggatgtgaaagattattaattgggctataaacatcatcacttgacacgtgtgggaatatgtgcacaatgcatatgtatgaacaacgcaacgactatatatatatctgaatgtacgacaatataattcaaatgatatagtataaaaagtgttgatgatccctttctctactgacttgctgaccagatttgccttacataccc

SEQ ID NO: 138625 - DNA, 371 bp, Glycine max
gctaggttcgatgaatgaagcgaacttgttgttatgttataatgcatgctcacctcgagacaaattgcttaaacacaacaaggccttccacaagctctcgacatcttcatccacttgaaaggctgtgccccattcatatcatgaaatatgtgatgcttagctaatgtttgatatgcttgtatgatatatcaataaaagtattgccataaatagacacgtacctgaactcatggccaacctatcatgctgtaatgtcaatgctgaaaactcaacgagattatcgtttcttgtaatattgaaaggaagacatctactcgcctgttagagtagtttgaaagattgccattgacatctttatatatttacacgac

SEQ ID NO: 138626 - DNA, 422 bp, Glycine max
agcttttagtaataaataaataaattaatatatgtatagcaaataataggctgagtaccctaggtataaatagttatgttaagtcagctgcctccttttggcctcattttcgtttatccccttctcctctcaaaaccctttcttttttccgcagcccaccaaaccagtctcagaaaaacaacgatctcgaacccgttcaccgttggatcgtcgtgaaatttgagtatcatgttcgcaacacaattccgagcattctcaccgttgggaatatcgatatcatgtctgaactaagagaaaaacccttcgcattgtagcctttttctttcccgcagaaacccagagttgccttggtaaaactacaatcctagtttcggtaacccgtggattatcgtgaaattcggatattgtgttcgaaattcaat

SEQ ID NO: 138627 - DNA, 374 bp, Glycine max
  unsure (1)..(374): unsure at all n locations
taaagacaagagctaaagtaaanaacactnggtttatacttgtgcactcaattngaggtacgtccagttctcctttacaacctataaaaggttgcatttaatcaagctgattacaagaagtattctgacctgcattcctgactacaacaagtattctntatgccacttttgacacacaatctccccctgagattaaaaacacccaaatattctttgatcattaagctactcctagctctccaaacaattgtttgaatgaatacaatatttaaatctctcaaagagaggatatacactaatgcttgaatacaatagataactttgctaaagccaagatcgatacttatagaggtttatttgtgaacatcccacac

SEQ ID NO: 138628 - DNA, 318 bp, Glycine max
  unsure (1)..(318): unsure at all n locations
tatggacaagctccaaaggcttagacaagggggtatgagtgttgaataatatagacaacaaatggaactactctntttaagagctggacttagggaggaggaaagaacaagcatagctaggttccgtagtgggcttaatatggaagtgagagacaaggttgaactccttccatataaggacctagatgagctagtccaactttgtataaaagtggagcaacaacttaaaagaaacccttcttcaaaatcttatggctctcactcttatccaaggaaagaccaagcccatggaattttgggggctgcaccttcataacc

SEQ ID NO: 138629 - DNA, 371 bp, Glycine max
atctggagcaagcatcgcttcataaaatgactgatcagataaacttttaccagtcatttgtaaaatttggatcagacacacgctggttaataagatttgattataccaattatctcatgttgcttgtaagtaaaaaaattaaataagctcgtgaaaaacatttccagtaaaatgttggacatttgccactatatgtgctcaaatcctaccttgtggctgacaatgtcttttgaaaaatattctttaatctccaaaaattgaagatctaataatatgaattgcacgatcctcccttgtttaaataatcaattttaaaagcttcgcactggaaggggatgaaacactcatgaactttacgagaaacattttga

SEQ ID NO: 138630 - DNA, 247 bp, Glycine max
  unsure (1)..(247): unsure at all n locations
ctagtanacctgaatgcagaaaaagtttgttatttntaacatcgnataaactcagggcttgattgattcaataaggcaaaaactaacgtgatatatcataggcagggtagcaaagagaggagcatggttagccaatatcatggtggatagtttctttgccttttcaaactgtatgttgcacttttgaataaaataaaattatatgccatggtaggaagagttgaggatgcgcgttagctcattgtca

SEQ ID NO: 138631 - DNA, 401 bp, Glycine max
cacaatgtgctctaaaaattttgtgggattgagttacttaaaagtaatgacaaaattgattagtctattaattaatggatgcctctttttatcggttaatgaatatgtacttgttgcatgcaatactctaagtaagctggccttcgaaaaaattaattaaaaagaagcacaatcattactctaagtaataattatgttcacttcaagatggagttggatggaattatggaacacaatgtttgaaaagatcaagagaaaataaagtgatggatataatattgtcatgaaaagatttaaagagacaataatgcaaatcatatgaaagtgtaataaaagtatacggttctaatgatttaagggcttcttcacccactaacaataacaaaacactcctttttttc

SEQ ID NO: 138632 - DNA, 252 bp, Glycine max
gtaaagtgttagacactgaggtgagatattagtatatatgtcttaccatctcttatgggtcagatcatctatgtttgttccacgttggtgctaacaatgtcttgctatataaacagtccacctagttggataaagcgtgattgctgtagtatgtgttgaaacttaaaagtgtgagacatgattaatctcttgtgtgtcagattatctatgattatttctatctacgtactaaccatggtgcccatatatttg

SEQ ID NO: 138633 - DNA, 287 bp, Glycine max
  unsure (1)..(287): unsure at all n locations
agctntgatgcaacatttggagaggttaatgtttcaacgagatgatgcgctccatgagaggttggatcaaatggagaatagagatcataatgaagaagacaggaggagaagagggaatgatggtgttcctagacaaaaccgaattgatggtattaaactcaacattcctccatttaaaggaaagaatgatccggaggcctacttggagtgggaaatgaaaatagaccatgttttctcatgccacaactatgaggaggaccaaatggtgaagcttgccgccacggagt

SEQ ID NO: 138634 - DNA, 357 bp, Glycine max
  unsure (1)..(357): unsure at all n locations
atgtacccatggtggtccacatggtgtttcgtgtatttttattctcattccatttactgtntatacccccttttggcgtgcttaagccattgtacttaagtcatttctcgcttaacttaaaaataaaataaatttccaccgaacgtttgaattgtattatccggtaacttcagttaaaatgaattccgaccgttcggtcgtgccgtaaccacgttggaaatcaaaaaagaggtaaaaaataatataataataaaaaaaacatctttttttagtgaaataaagtggaaaatcaatcggacgtctttctctttgggatttctcattcttaatcgaattgactaataactaaagtgaaat

SEQ ID NO: 138635 - DNA, 377 bp, Glycine max
ggaatttagtaattcatgatgccattatgattaatgcttccgacctcaatatcatattcttaaaaattttttggaaaaataattctccatcccttctagctacgggtaacatccatatatgaaatcactacttgcacaaattaatatataaataaataacactaaccgatactatatatatatatataatatgacctatgtctttggctatcttagtgtggtggagcaagtgtgatatcaagatctagttgtcatcttcttgctctgattatagtgtaattccattttaccacggtcataattgcaataaattgaatttaatttgggatatattaatactgcctttcttggcattaatttcattatatctgcacaca

SEQ ID NO: 138636 - DNA, 379 bp, Glycine max
  unsure (1)..(379): unsure at all n locations
ggccattgcgtcaagaatgacaatcaaacttattattagtatttgttttgttgntgttattacaagtacatcatacactaacttttacataacagaaattttttttttttgctcagaanaattaggagtattatataaatataaaatagtaccagtggtactaagattacaaaggattataaaggaaccagcgtatccaataatgggacgagctggcacaatctaatatattacatagttctaccaacatctatcccccctaattacagaatgcatccctcaggccagaagaccattggttaaaatggtaattaaaatcctttcttcaagctttgaaccacgagcatagtaagagttacgcatcctccagcaccttatt

SEQ ID NO: 138637 - DNA, 324 bp, Glycine max
  unsure (1)..(324): unsure at all n locations
actaagctgaaaacgagataatcccaagccagaaaggttgttagcttcttatccaacaaattaagaaagaaaaaactttcaacaataccaagcaagtttgccagattccagacataacatataatcatcaaaatggttgtctanttaatttaaaggcaaaccattaaaagaattcttgaaaggtaattaaaaaaattaagtaaaaccaaagaacccaaatttccttttttttttttttactaaaagaaagaaacaaaatttatgtacccacaagcgacatcatccccaccgaccaagcaagcaacatttaaattaaggaaaaga

SEQ ID NO: 138638 - DNA, 308 bp, Glycine max
  unsure (1)..(308): unsure at all n locations
caatctgaaatacgaaaacaagaagatgaatcaaccagcttataataaaggggtacatttaataaaatttcaagacntaatnngtattattggactcccaggcgtctctctaatattttaatataataaaatcntnnnagtctaatacagtaaataaaataaaaaactaataatataaaaatagtggaaaataatataggttaaaagaaaaatttaaaattcaaaaaataatttaagaataaattgtctaataataaaatgtcaacaatgtaataattctcattaatataantatagatgattgatga

SEQ ID NO: 138639 - DNA, 172 bp, Glycine max
  unsure (1)..(172): unsure at all n locations
aatcagcgacaatggctcctagtagcacgtttttctagtgttaaaagactatcatagncgntattggttcattgtagcttttttcttcttccatacatttaatntaacccacaagaaaatacttgcattacaaacagatcattgatcatacaggggggnntctnaacatgtg

SEQ ID NO: 138640 - DNA, 304 bp, Glycine max
tctcattcctctttccaacatatgcctcagcactgagaacatctcaagactcttggaatgctagatgagatcttctcaaagccactcaagtggagcattctttccaatgatgagagaatgatattacagcctcgaacgccctcagtgatcgatgatacaacataaccaactacgatttaaagcatctactaactctagtgaacctctcttcatcttcatcacaaagtacgaaacaatgatgagcactctcagggtggtggtggaggcgtaaataacatggtttctcatgaagagtcggattcta

SEQ ID NO: 138641 - DNA, 222 bp, Glycine max
agagtaagatagcataatgataaatacacacacgagtcttagagctctatagttgaaatatccaatgcctgagcacctctaataggggagatcctccttcttagccattcgccctcttctttcctctagtgaactaaccctttctttcattcacattatcacaagaagcgtataatctctcatggtatgagagactaaaccccctttgtggaggctggatga

SEQ ID NO: 138642 - DNA, 409 bp, Glycine max
tcaaccaacatctcatcactttccatcctaccctctccatgtggcctttcccactctaaagaaatctgttggagaacaagtcttacattcatgaattagaacacaagttaaagaatacatagagaagtaggagtaggggggaccagagtcttgtggggttttcaattttttttgcctataagaaccaaaccatgtgattatatttggattgattcacgtcaggatatcaagtctattaatagaaataataatagaaacatgaaaaaatagacaaatatgaaataaaattgaagaaagttgaatagtttaaaaaattagaattatagaattatgccgcataaatattaattctttttgtaaataatacaaggatatcttgggttcctttccatgtgtccaaattcaatac

SEQ ID NO: 138643 - DNA, 398 bp, Glycine max
  unsure (1)..(398): unsure at all n locations
tcaagctcatgaattggttcacctcaaagccatattcatctgtaagctcatagcanaacctaagatcacaattcatagaanacttaaaacttagcagctaactagggtctaataatgctacttttggataagctcttatattggtcgatcaaagtcttgaaacaaaaggaaagatcaagcatatataagtctaagtgaggaaaagtatatgtatgtatcgtttcgaaaactaatataatctaataagattttttgtcttatccaggacctagttcaattataatgattttccttagaattcatggacagtttatgatgattatgcgtatttccatccaattcatttaccattattttctatgaaagacttgtatgccatngttcctaatctacttttt

SEQ ID NO: 138644 - DNA, 401 bp, Glycine max
  unsure (1)..(401): unsure at all n locations
ggctcaaaatntattctataattggtgcctattttataccaatcttagttttgaaatttaattgaaaattagtgtgaatacaagtgccaaaactagaggtttcttgagtctttttttttagtttgtctactctactctagagacattctaggtttctctttgagtcctagcttgcttttatgtgcttgtcattgctttaattggtgaataatccttaaaaatttgtcttgataaaattctattggtttagctttcatttcatttttttttgtctttgactattgcttggctctttgtttacttgtctttgagttgccatatatggaattgcaaaggaggattggtgtcatccctcttagagattgagtcaagaagcaaggtgtcaaccaccttaagagcta

SEQ ID NO: 138645 - DNA, 423 bp, Glycine max
  unsure (1)..(423): unsure at all n locations
ntaagtgtgattcctttctttntcttatcattctcctcattctgattcagtctcattagttccatttcatgttcctgaagctttccaaataaagttgcaagagacatgttagtaagatctcttgattctgtaatagtcattacctttggttgccattccctgcttaaacatcttagaactttattaataagatcctcattgggaaatatctttcctaatgatgcaagatgatctactatgtgtgtgaatctctttttcatatcctgtatagtttaattctaaaaaattcatatctatgggttaggatatttattcttgaccttcttacatctcttgttccttcatgggttactcgccagggaatccacatatcctttttactcttgcaatttgatactctaaaatattcatccatttctaatg

SEQ ID NO: 138646 - DNA, 345 bp, Glycine max
actaaaaagacgcatcataaatattaatctacaatgccgacataatactaaaatacatcctgacaagtattgttcaaaaaaaaaaacataaaggaaaagttgattaaaaaaagagggggtaggaaacaacttatagatgggtatgtcattcatatcttgggacaaatggaaataaaatgatagatgagagataaaatgagaggatagaactgaatgagccttaaaacaaacagcactacataatggaccatttgattcacattcaatagtcaacacactttgatatggatcaaacaaagtcacaactttctatcgtaaaacatatccgtcagaaaagctgcctat

SEQ ID NO: 138647 - DNA, 298 bp, Glycine max
actcacttagtgagatgatccgctaagcgagagagatgtttggctttccgcctcctctcttggcgggccaaaatgggcccatttaagaatctttggcttatcgagccatccgctaatcggtagcgagagacagttcggttctcaaaatgctcgcttagcggtcttaatattgatttttcacataaaactacgcttagcgaaaaacagcacgctcagcgatgtgtgcagataagaaaacctgcaactctcggtgagctgcactctttggcagcttagtgaaaatactacaccctgcata

SEQ ID NO: 138648 - DNA, 324 bp, Glycine max
  unsure (1)..(324): unsure at all n locations
acgcnnccatcacaagcaagtgattgttgacatctccatgtgtgtgttcaatgcgatcatgttttcatttcttggattcatttggaatatttgttgctgattatgaataagtgaccactctcttttttattttaaatctttgtctcctagtccatccactattaatcttttgatgtgctgattattttccaatcatgccttgttatactgcttgataacctatcatgtttctacttctggtatgaatagagagagactcttgccttgccaatcacgtctatgtgtntcgagaggaaatactcgagtaagcattatccttgttac

SEQ ID NO: 138649 - DNA, 309 bp, Glycine max
acacgcacgctgggctgctttctgcgcagaggacatattatgttctcaagtatttaataagagctacaagcattgggagattatatttctggcaatgaaattaaattgatgacatacgaagcctcttactcacacttgtgtggccacaactctgaacttaatatttattacacaactaaatttagatttccatgagagatacgacttgcataaccatttgtttttctaggacacttaaatctgaataacatggacaatagatcccttattttctgacgtgtccgtagatactctttacggtgcccacac

SEQ ID NO: 138650 - DNA, 292 bp, Glycine max
ggggaggaagggccaaaagatacaacccaagccgcaaaccacaaccggtggcactcactgaccacgacccccgacccataccagtgcatcacacggcccacaaccaccagcggcaaaaataaagcagacacaccaacgcacaagcacacagcagcaaaagagcaaggcgaaacctgcgaacactaaccaaacacagttctacttaagacaaaaacaatcctcgaccatcgtaccggggacacccaaattacgaagcaaaagcaaagccacttggacgggggatacaacaaac

SEQ ID NO: 138651 - DNA, 366 bp, Glycine max
  unsure (1)..(366): unsure at all n locations
tgtggactataccttcgactgaacacggccgtgtttctgtctatgcccggattcaaggtaggttgcagcaccggctccgcttccctaactgtactggaggcggttgcggtggctntatcctctatggttttttggacgtttaacatgacctccgagatggaagccatttgatcttttaaggccgatagatcagccttcatctgttcctgcacgcgctcttcattatccacttttctggatcgagtgttataggggtgccttggtgttttcttagttatgatgaaattcctaaagacataaacaacggtgagtatgccaccaaaacatgagtatgcaaatggatgatcggagcacttggatccaccc

SEQ ID NO: 138652 - DNA, 420 bp, Glycine max
tgcaagctatgacaacactttcaaccttggatcacagtcccacttactatacgtatgctgaatcgctgtatgtatttcaaattcgcaagatctgatatttctgcagggagtcttgctcgaactgcccaagacaaaacccttcagaacccgaagccgaatcacgttctcaataccctctggcattctgtccaataaatagccttgagacaaatccaaatgtatgagatatctcaatggtgaaatatcactacgtagtgtttctagattgtgacaagccttgagaactagagcttctaggttctcaacttgaaaaatgaaaggtggtagctcaaatattttcatattccaacaaggctaagatgcctcaaatacttatgatcactatactccttcacgaattcttcacactcctcttctata

SEQ ID NO: 138653 - DNA, 436 bp, Glycine max
  unsure (1)..(436): unsure at all n locations
tcactggcatgtgaaatgatgtaaacattatggcctactatataattgtttctaactaccatgctatgggatgtcaaacattatgtgaaatngatttaatgtcatgtttcttctctttcttttataaattatacactcgtgttggatttggagttggagtatgaccacctattatagtgctacttcaataactatcaaaagttatacaacaacaaatgatatctcataaattgcaaatttcagtcacgaagttcacctaaacattatatttaattgaaatgggttattgacagtagcaacaaattacttccttctacaaattcttcagcaaaacaacaatttcaatatctatagatgctattacacattntaccttagatacacttcccgctacacctacagttcaatttaagatgatgaacctaacaacacaatg

SEQ ID NO: 138654 - DNA, 208 bp, Glycine max
cttcacatcatctgctactgcggacaacctatatgccttttagaaacacctctcctctaatcatgcattaattaaaatgaaacgtcaacctttcacaaaatgataaagtgtctactgccgtgtattaaaacaagagaactgtcaaaatgcttctgatagaaaactatgcccatactaaaacttgcagtgtgtgtcattaaggaaattt

SEQ ID NO: 138655 - DNA, 351 bp, Glycine max
agaaacctctgagctgctagatattgaatggtgtaggccactctagaactgcctgcaccttagtagtatccatagcactctctcacctaaaactatatggcccaaggagctttgatcccaataccccaaaggagcttttagacaacttggcaaacaaataatattctctcaatactttgaattcacacctctaaagggataagtgttcatgccatggggaactagtatcaaatatttatgaaaaaacacttacacatatgccttaaagcatggttgaaaattgggctcatcaacacggaaagaaagcgggctatggtaaaccaatggattgtgggaaaattttactttata

SEQ ID NO: 138656 - DNA, 196 bp, Glycine max
  unsure (1)..(196): unsure at all n locations
tatcacaagcgatattatcatatctataaccgctgtctagctgttgactttcttgaatngacatcctcaaactctttactccactgctttaagctgggatttaagtatctctgcttatttttagcacaaatacccccccaccagcctgctgatcattgtgtcatgattccttcagccatgttcgatattctttatt

SEQ ID NO: 138657 - DNA, 283 bp, Glycine max
  unsure (1)..(283): unsure at all n locations
aagcttaatgggagtattgtagcagcactgcacatgtgattcttttgtccatcaacactgaccccgctattctgcacactacttntatcatcctgtgactttgtgtagaaagaacattgattgatatcatattccttccaagtgggaacatgcatatttggacccacagctagcaatcttaatgtgtatgaagcactgtcatcggtgaagattgtttgtccaaaccaaggtatgaaagatatattgtgctctcgtacaacctcatcatgttcatttgtgagtg

SEQ ID NO: 138658 - DNA, 339 bp, Glycine max
  unsure (1)..(339): unsure at all n locations
agcttccatcaagtggtatcagagcacaagattattttctttgttctccttaaacctccattaatnttgtgctgtaccctcttctccattggtgatacatgattgatttctccatggatcttctaacatgttttgtgcgtaaaggttttacatagatctatagaggttccaccgcataaactggcttcatatgctagaaatgatttctcttggttaaaattctttgtcctgttcttgaaccacgaaatgtgttgggtatgggtctcttaggtatgtctggtaatttttgtggtgaacctaaccttaaattttccaaatattaagtaaataaacctcaaa

SEQ ID NO: 138659 - DNA, 327 bp, Glycine max
cttcatggggtttagattggtgatgttgatattgaacatcttaatcattattaaggtaattactggtgcatgaaaccatgcatgattcatgcttcttaaattatggccaggaaaaaccttctcaaactatttgtctatttttctgggtctagaagaaaataagaagttacctgacaattgattattaaactacttcaacttaggataaaggttaaatgatacaaccaattcttggaggaaaaattatgatagattcctcagaaggagaagcagccacctacagtatcatatttatggtctacgttgtaaaatgatgcattagaatat

SEQ ID NO: 138660 - DNA, 247 bp, Glycine max
  unsure (1)..(247): unsure at all n locations
acacatanaatactaagctttggaaatattggctacaatgagacgtgcctgctacttttcttgagatcacgcttcaacttgaagatgcgaggagcattgctctgctgaaagcgttcttgcaaatctcttccaatatcatgtgcagaactcgagtaaatgacgctggatgcaagatccttggaatagaattgatgattcaagatgcaacaatgttattcgtgtgttggccggaatgaaaaagagaatc

SEQ ID NO: 138661 - DNA, 176 bp, Glycine max
aagcggctcatgttgatacaagatgtattgagacattgattgtttgttcacgagtccctactctaatcgggtgccctgtgatataatcagatactcctctcttaatagtgtttctgaaggtgagtgagaacactttaatcgatggcatcaagaatctaatcgagtacattattctt

SEQ ID NO: 138662 - DNA, 440 bp, Glycine max
  unsure (1)..(440): unsure at all n locations
cctgcggcatgcaagctngaaatgaggaagtgtagaagggtgatactttctgcttttattcgttgaccacagagtggtacctggagatatgtcgcggnggtcatgagaccttggggacgtcaggtggggtgctatagcccaaaaccaagcttgaccgatcccgacccaacccgggcatagccagtcagtgagaacctgtgatgtacctaagcaggcgagctcctggcagtcaacagataaaaggaacaaagaccacaaagcaaggaggcttgtgtggtggctggccaactgtgaaacttgattgatatatgggatgtggcctctggtaatcaattaccaagggtgggtaattgattacaaggctttaataatgaagacaggaagctcaaattggctctgttattgattaccaatgggtataatctattacctctctttga

SEQ ID NO: 138663 - DNA, 459 bp, Glycine max
  unsure (1)..(459): unsure at all n locations
actcagcttcccaacatccaagaaatntcaacatccaaacatcatgatctatcaataccaagctaaacagggtagaggcagaaaactcagcccaaaacacaaaccaataccacaacttttcttactcaaataccccagtaacattcccttctttccaatttgttcaccgttggatcgactcgaaaattttactggaggttcctagtacataagtctacattttgaccgttgggatctgctagaaaatttccagaacccaatatgtacaaccctttccacagccagtcatgcctaagcattttctgcacaaacccaaaattntgctgcacactntaacaacaaaattctgcatagaagtgcagattttcgaaattactcttgccctcatncnnaaattgcccaaatggatcctacaagtccctaatcaagtacaaatcatatctaaaccaaagacaagct

SEQ ID NO: 138664 - DNA, 384 bp, Glycine max
gatggggagaggtcgcggcctcaaattctttccactgacaaaaactaataattaacattgacaaataaaaaatatataaaaaaaaaaacataactgtttccattgtctgttataatttcaacaaccttttcttccctaattccgtccacaatggagtcaaccaattcaaaaattctctcatcagatttcccaatctaacgcatcaattgatttaatgaacattgtctctgctggacaattcagaaagaagttgattaatcatctttgtttaattctatctgtcaatgcattataacataatatagcgtccaaatctttctcactactcctctttgctcttcacaacttttatagttttctttaactccttgcatcattataaaa

SEQ ID NO: 138665 - DNA, 434 bp, Glycine max
  unsure (1)..(434): unsure at all n locations
ctcagctagcttctctagtctctcccagccaaactanagtttatttctttaagctcacctccattccaaattcaagatttcaactttaaataggcaatcgtgtcggtggcgcgcgcttagcgcgagatggctcgcttagcgcccataagtggctnttggcttagcgccagtcttctcgctcagcctggaggatgaaagcggtgtgcttagcgagttgacactcgctcaatgcttctggacaactcatccttcttccatagtcttctatgcgctcaaccagcggatgtcgcgcttagcggatggctcgctcagcgcatgaaacagcttagtaagtcaatgaattctacacttcaccaatcttggcccatttacctganattgaaatggaatgatcattaaatatacaaaattgggatattgagtacccgatatct

SEQ ID NO: 138666 - DNA, 325 bp, Glycine max
  unsure (1)..(325): unsure at all n locations
ccctgcaccaacaacttctctactgggttgatctctccttactaaaaggaattgtttgggtcttttatcaaaggttccttcttatttttgggttttctctctgggatattattattacagtggatatataacatatagaaccatcatcggggaaagatacaaaacaaaagacaaatattctgtattacaataagccattacaagaagaatattatctagagtgtaattcatgttaaatataaaaaaaaaaactcattnttagggttcacatgttgctccaaccatatgggatcaacatagacttaaaggagcactccaatcgagt

SEQ ID NO: 138667 - DNA, 404 bp, Glycine max
  unsure (1)..(404): unsure at all n locations
tgcatctatcggtgctcanaatataggcattgcttggtgttattcttctctcaattttatntacaggatctcattaggtacaaatatgagcttcctcagtataagttctcttaagtttgtttccttgggctcggttggtcctccaagtgcttgttagattttcttttatattgcaatgatatctgaggtgtgtgttttctaagtagatgttaatggggtgtcaacataattgggatgccatcttcatcttcctcttgcactcctcttcttttttattataaaaaaaaatcatcgtaaattcacaatcaacatcaagaacaaaccctcgtctaagcatataaaaaatgaaacttttatatccaactaatcaaacaatgaggacatgctctgatacaaccttgtag

SEQ ID NO: 138668 - DNA, 443 bp, Glycine max
  unsure (1)..(443): unsure at all n locations
agcaccgcggctgcagcttgtggggtttatgggactaatcgatttttctgttatgacagcaacgaaagattggttctttatgattctgagaacacaagggatcttcatgtttatggaaagcatgattctataagggctgctaagtacacaaaaagtcttgtttcgcttataagggaaatgagtntagtcacaagtgtttttcgtgtagtttggttccagaccctctgctacatgatactgaatatcttgtttcattttaattttgatcaattttatatttttgaactttaaaaaaaataatgatttttgtccctttttaggtgacaatgcgttatgatgagggatgaaacatactttttttctttaattcaaaaattatattgaccaatatataatatcatgattatacctattttagcttaagccaccaccaaaacatgttt

SEQ ID NO: 138669 - DNA, 420 bp, Glycine max
  unsure (1)..(420): unsure at all n locations
acactctgatactaagcttgtatcattaaaccgatacgagacataactctgtaagcttaaacaacttgtgtaattgattaccggaagaatgtaatcaattaaaacagagagctttgccttctaaagaaagtttctaactttagaaattttcttctcactcactcatgataatgcatgatgcataaatgatatgttaaagactaaggtgccacattcaatataacaaccaataccaatgccattccagagagttgggcattgtaaagacaaaacttcttcaagatcttctccaatcttcaagcttaactcttcatgttgctcantgtggctcccatatctctaacaatctccccctttnntggctttgatgatgctaaactcgaatatgtcattgagtacattttgagggtctgagtgttg

SEQ ID NO: 138670 - DNA, 385 bp, Glycine max
ctttccttcgtttgaagctcactacacacgctgagtgaaaaaccatgatatcaccatatcctttacgaatgttggagctttggaattgatttgggaatacgtgtggggggtttttgtttcataggacaacttgtttgttggctatgcttcatgatgtattttgggccatacttgatgtacattgtatattggttaaatgttggacatgctgaatgaaatattgtttctcaaaggctatatagtaaaaaaaaaaaatcgaaaaataaaattccaaaaaagaaaaagaaaagcattaatgttgagtgaataagatcttacatggcacaagaatgatgaacctcttggctctactcttcatgttaaaaattatcttacttcttttatt

SEQ ID NO: 138671 - DNA, 327 bp, Glycine max
  unsure (1)..(327): unsure at all n locations
gcttcacatcagaccacttccaggtactggaactacttcacatggacttgatggngcctatgcaagttgaaagccttggaggaaagaggtatgcctatgttgttgtggatgaattctccagatttacctgggtcaactttatcagagaaaaatcagacacctttgaagtattcaaggagttgagtctaagacttcaaagagaaaaagactgtgtcatcaagagaatcatgagtgaccatggcagagagtttgaaaacagcaagtttactgaattntgcacatcttgaggcatcactcatgagttctctgcagccattacaccacaac

SEQ ID NO: 138672 - DNA, 322 bp, Glycine max
actgtttctgaataaaatcaaaagatgtaactctctaaaaggttcttgactctttcacaatggttttaagtttttctaaaagttataactcttctaaatggttgtcttgaccagacatgaagagtctataaaagcaaggctttgttttgcatttcaataatcttgaacacttatttcatacaatcctttacaagccttgaatctctttgaacttcttcttcttctttgtaccaaaagctttctgaagttttctggttttccaaaccttgagaacctgtgctattcatcttttcattctcttctccctttgccaaaaagaatt

SEQ ID NO: 138673 - DNA, 399 bp, Glycine max
  unsure (1)..(399): unsure at all n locations
cttgatgatgtcgacaagaaatcacatgtttgttatcatcttttatggggagaatgtgaatgtatgtatacatgattttgatgatgccaaagaagaatcaaacaaggctgcttcaaatgataagcatttgcttcaagaataattcaagattgcttcanaaaacaaagccttgtttcaagattcactaaagaccaagccttgccttataacaaagtgctntcatgacatgcaaggatctggtaatcgattaccagaagacagggttgagaaataactgtcgaaaaaccttttgaatttgagatttcaacatgtaatcacataccatatgtctgtatgcgattacgagcaacgaaactttggaaattcaacatcaaaagtcataactcttcaattataact

SEQ ID NO: 138674 - DNA, 134 bp, Glycine max
cactcttttcgttctgtccatctcgaatcatgtgagttgtctttattgccctactgacttcttttcctttccctttgggctctgtggattactcgactaccccggtcactgcagatcgagtgagccgatatatt

SEQ ID NO: 138675 - DNA, 378 bp, Glycine max
ttcccgccagcatctgaagttaggcataaatatgtacttaaagataatgcccaatcttcatatattcctcattgttaaaacggtattcatatgttatccatatgtacgggtctctctcctaaattaaaggaatttaagtgtaccctcctgaatcaataattctttttgtaaaaaacacataattttctaaagataaggtattaagccggataaactattataacataaaactttcttctaatagaagacacatacgcgccatgatgaagcatagtagttcatcaaacgaaccaaacgctcatacttaatggtcctggataaacaccccattcactatttaaaaaagaaaatactctataaaatgaaatcggaaaaaaa

SEQ ID NO: 138676 - DNA, 305 bp, Glycine max
  unsure (1)..(305): unsure at all n locations
catcatgaggaaataagaaccttaataactacattgtccaaatttgtcaatggaataaataatcttaacaaactattacgatgttgtagaagttccttaaacaaatctagaaacggatatgatgggaaggtatatgttcatgatgaggacaccattgtctgttatttatgtggaaaaactagacacatgacgttcagatgcaaggatcgntctatgaaaggttcaagtaatcccttcatggctaacacaaaagaaccctaaaagatatgggtacctaagaaaaatattattcccattggcaatgt

SEQ ID NO: 138677 - DNA, 347 bp, Glycine max
tgatgtcaacattgatacaccctctgatgatgatcatttatgatggctcagacgaagataatcaattagctttcatctcaaggaagataaggaacttgtggaagacaataaatggatcaaactggaatggatcccaataaaacacattgagaaagacagagaaaagctccatcgtatcctatgagtgcaagaaaccaggacatttcaagtcaaaatgtccaacatttgatatatcagcctataagaagaagtacttcgaaccaaaggacaagaaagtactaatgagcacgtgtgagacatcatcaaatgaagaaagtcaacctctgtctgatggcagacactgcatc

SEQ ID NO: 138678 - DNA, 324 bp, Glycine max
  unsure (1)..(324): unsure at all n locations
tccatcataaacgacgcgctctctnttcccgaacttgttatgttgccccagcatacaccccattgactcgtccaaaatcgtcatatacaggatgagaggtcttccgggcaccagcggcataagcacgggagggttcatgaggcactgtttgatcctgccaaacgcctcttgacagtcgtcattccagcggatggattggttcttgcataagagcttgaacaacggctcacagatagcggtgagctgtgatatgaatctggcaatgtagttctaacgccccaggaaacctcggacctgcttctcggtgtgtgtttctggcatttc

SEQ ID NO: 138679 - DNA, 345 bp, Glycine max
  unsure (1)..(345): unsure at all n locations
tctggtgggacatctngacttgctttccaatctgacattttctcacagattctgccttcttctattntcagaatgggaatgcctctaacagcacctttgtcaatgattntcttcatgcctcttaagtgcagatgtccaaatctttgatgccatattttgacttcatcttctttggaggatagacatgtggaggagtaactggtttcttgaggtgtccataagtaacagttgtcctttgatctgctgcccttcattagaacttcactctcttcatttgtcaccaaacattcttgacttgtgaagtgtacattgaatccttcatcacacaactgactgatgctgatc

SEQ ID NO: 138680 - DNA, 417 bp, Glycine max
gcaagcttgcttctagacatagggtattagaatgctcatgaactgttgtggttcataatacttaattccagtcctaatagtttagaaaattaaaatgactaacatcatttcaagacagaagactggtggacttgatttacagtgcatagaaatttctttggcagtcaagtaaatgcatgtgctacgcattttaagctatagtatattctatgaaacaaactgttgacaaccacaacaacctaacctccaaaggcaatttgtgaaggaaggcccgccatggtggtgccataaggtgcaatggttgtgttatatggcggaattttggcctttcgccattcgccattcggcatggattacattaaatacaagttcattttgctataacaaatttcttttgttttaaaactttaccatttg

SEQ ID NO: 138681 - DNA, 395 bp, Glycine max
  unsure (1)..(395): unsure at all n locations
agcttagnggagaagtaatattatggtagtgttatatatatagagacaaaggaaaagtctggtagggaaaaatagaagcacgagagtgaatgaatatacgtgcctgaaggtgcgagatgagttgatggtntgaaatggatagtaagtaactaataactaagtagtggaaagaggatgcgggatatgtgataatgtgaccatatccatatctctgctgtgtttggtggagcaaaggttaccataggaagacaagatgaccaaagctcgtgactcacacatggtgttcacgggtcagcctatccatacatgatgcacgtgcgtgttttatccaagggtgaaaaaatcttcacttttaatgccagggaacaccctattagttttttaataaacatgca

SEQ ID NO: 138682 - DNA, 458 bp, Glycine max
  unsure (1)..(458): unsure at all n locations
catggagcangggtaaatttcattatatcatattgcttatgcacatganacatcatattgcgaggtaaatgttaatgcagataaacaatcaaaactcctatctaatatctaccactctatgtctcttctatttgcagggtaaagcaatctttgctagtggaagcccatntgatcctgttgaatatgaagganaacttnttgttcctggacaggtttaatttaatactttctaagcattttcttattcaacagactcacattcccaaagtgtaggctgacctttnttttttcctactatgcaattcaggctaacaatgcttacatatttcctggttttggcttggggttgatcatctctggtgcaattcgtgtgcgtgatgagatgctctttgcagcctgtgagtacacgcanaactagagagattagattatcgagcatgatatatatacttcatgaa

SEQ ID NO: 138683 - DNA, 405 bp, Glycine max
  unsure (1)..(405): unsure at all n locations
gctttgcttctacacatcgcatctgagaatatttgattttcataagaacacgctaagctgaccatgtcgcccaaagcacgttcatcacttctgatgaacacgaacgaggaagacgcttagtgggcctacacgctaagcattcaccagtgtttagacacttctgaatttttaaaaaattgtctcagcgctaagcctgaccttgcaggctaagcgccaatatgcttctatttttcagtcctttgaataaggctaagcgcaacttctgggctaagcccttgttgtgtgtcaaggaggttgagctatactgcccctactgcactaagcttaactctttcactatttctgaagttttgtgggtaagctaaatgcgccctgtgtgctaancctcatggtcattctggtagg

SEQ ID NO: 138684 - DNA, 182 bp, Glycine max
gaatgggctaatcaagtctcatcgctaagcccacattacatagtgtagatgccattgggcttgatgttttgatgatgatcatgatgatgtgttgaaattgatgcaaatgggcttttcaagaataaaattcaagacaatactttcagattacaagtcacaacatcaagatgatcactagaata

SEQ ID NO: 138685 - DNA, 290 bp, Glycine max
  unsure (1)..(290): unsure at all n locations
agcttcanaattcaatttcgagcgtctcgatatattgacttgactcaaccagacattccgagtanaagttattgtctgttgaattggctcagagccttcacattcaattttgaggcgctcgatatatgacgggactcaattagacctccgagtaaaaaggttttgtcggttggaatagcttagagcctcaacatttaatttcgagcgtctcgatatatcacgagactatatgagacatccgaagaaaaagttattggccgttgaattcgctcaaaggttcaaaattcaat

SEQ ID NO: 138686 - DNA, 288 bp, Glycine max
  unsure (1)..(288): unsure at all n locations
actaagctagagccatcaacgacatactnttactggatgttttttgattcttgaatatcagacgcgcgcattgtggtggaagcttatagccactacatacaataactctttctgcgagtggattgagactctcatatattgagacgctcgcaactagtgtttagctctagcgccttacacgacatatcattttcaccgagtgcgttgagcccgcaatatctgacctccaattgaagtgtagctctggcgccttcacgcacaacctttcctggtggtgagggtcccgct

SEQ ID NO: 138687 - DNA, 392 bp, Glycine max
atcctctgagtcacctgaggctgcagcttaacctagaggagacggaccattctgtgttttatgaagatcaacgacaatgcctacaagattgacttgcctagtgagtataatgtaagtgccactttcaatgtgtctgatctatctctttttgatgcagatggaggagccttggatttgaggacaaatccttttcaagaaggagggagtgatgaggacataaccaagggcaaggaccatgaagcacttgaaggtcccatgaccagaggcagacttaaacaagcccaacacgtcatagagacaaggctagtcatttgtatagctgccattgatgatgattgaaggcccaagtggagaaagatgaaagcccagaggcagaggcactaccaagacta

SEQ ID NO: 138688 - DNA, 311 bp, Glycine max
  unsure (1)..(311): unsure at all n locations
gtcaagatcaaatggaggaaaaataatgctttttttctaccacanaggaaaagaagttgtttcaacccgagatgggtttgggtgccatgaaaaagaaagtttctgaacaaagaaatcaaacttaaccaagggagatgcctttaagtgcttgaaaataatgacatgcttacaagtgagctgccgggagataatgttattccaccttaatgtcttgattatctcttttgatgccatggagaatcgatttgagacaaatctctcataaggaaaatgatatgacttaccagagcaaggcatgatcacttgaggac

SEQ ID NO: 138689 - DNA, 413 bp, Glycine max
  unsure (1)..(413): unsure at all n locations
gcttccttgagaagattcctaaataagctatagcttatctacacataccccatataatagataagctcacccccatgccaaaatacatgaaaatatataaaaaaaagtccctaatacaaagactactcaaaatgccctgaaatacaaggctaacaccctatactactagaatagccaaaatacaaggcctacaagaaggaaaaatctattctaatatttacaaagaagggaggacccaaccttggtccatgggctcagaaatctaccctgngattcatgagaaccccaaggccttctttagcagctctagcccaatcctcttggagtcttctatccaatacccttgcggggtaggattgcatcaacttagtaatcccattttgtgtggttaacaatcattntctctcaatttc

SEQ ID NO: 138690 - DNA, 295 bp, Glycine max
aaaaaattcgtgtaacaactcttattcttcataacaaagagagcttcttcacacagagtcaacaaaataaggatatagaagatctcgttgtctaatattcttttgttaatgattagatgttattgactaatgctctttatttaattttaactagaagttttggaatatccaactcaaatatagttattaaaaaatttaaattacacattaattattaactttaaatagcgtagtgagaacttctgattatccaaaatttacgtgcattccatcctctatattttctgtaacaaaa

SEQ ID NO: 138691 - DNA, 377 bp, Glycine max
ttaagcgacctgcaggctgcagctgcttggggctttatgtatgctttttttgatctttcaaggggacctccaatggagatattccaccatggagatgcaccggaagactcatgaaaagacgtgagaggaggctgccttcattatagaataagccatggaagaatgagcttcaccaccaacatgagccctggataagaagcttggagatgatgcttcattggatgaacataatgagagaaggcgggagcacgatattgaaggaattcaatatggagagatgcgtacctttgaagtgtgtctcatactactttcattcatcaaagttccaacatgtcgtcacaccatgcctttatttatagactaaagtgctttccttg

SEQ ID NO: 138692 - DNA, 355 bp, Glycine max
  unsure (1)..(355): unsure at all n locations
ggttntcttctntntttttcttaaatataattttcatcttcttattttactcgatctataattntatttttactattttaaaattaaaaaaattgattctcttcaattttttaaaaaaaatataattttagtctaatcctaatttttttctatgtttttttttttaattttgattcaatcaaatctttttttagaggtccaatcctaccataaacctaacatgttaatataaaggtattataaaaaataatttaattaattaaaatataagaaataaaataaataaaaatagacaaaattaagtattatattaaatttacagattntatagaatagaagaattaaatatctttat

SEQ ID NO: 138693 - DNA, 387 bp, Glycine max
  unsure (1)..(387): unsure at all n locations
gatctctaagcaccgcggctgcagcttagaagatgttntggcttttacatgcccaactcctttgagtggcatttgtatcgcggggtaactttattgttgtatcttagtacattagatatctattttgcattgtgcaccatcataatgcatgtgtgtgtgaagaaatatttctaagttagaaaaatttcttcataggaaaaaactttgttttaatcgattatagaggtgttgtaatcgattacaacaagctatttgaagcttaaagagttaagtctcgtatcgcgttaattgattacaatagtactttaatcgattacactattgtttgagacaatgactgattntttcaagagtctctgctttaattgattaccagatgtattaacc

SEQ ID NO: 138694 - DNA, 337 bp, Glycine max
  unsure (1)..(337): unsure at all n locations
cagctcgcccaggcgagcacgggtgtcttctcttatatcaacagccttctggaggaatcttctggagggcccaagtgggcctggctgctattngcaccccctgtttactaaatgcacaccctattctattttttgtaattctttttccgtaacgttacgaaactttacgaatgtcgtaacgatacttattattcattcgcaaggttacgaatacttacggattatgtatctactctattatggctttctaagaaagtacggaaacttacggattgtgcaaaacacctctttcgatttcgcctattaggaatttacggttaccaacctgctgctttga

SEQ ID NO: 138695 - DNA, 406 bp, Glycine max
  unsure (1)..(406): unsure at all n locations
tcgactttacattgctttcaacgacaattagttggaaattgttagcattntatttgnggtatatgacttatcttttgaatatatattaatctaaattttgttgagctacactaagtctgattaaatttatttaatttaattaaaggtgacgaacaacgagacaacaatgacagaaggagagcatgatatagataataatggtgtacccttacataaaacaaaattgaggagatacatgataagattcctagtgaagttatacctaaagttggaatagaatttgacatataaagtgaaatgactgttataattcttatctaatagagtggattttatcatatatgacataaaagtacaaatggttacatagttgatagaacactttgttgttcatgtgagagttatt

SEQ ID NO: 138696 - DNA, 390 bp, Glycine max
  unsure (1)..(390): unsure at all n locations
attgcttcttatccaggctcatcttggtggtgaagctccttcttctatggcttattccctagtggatggcgcctcctctcacctcttctcctttgtcttccgctgcatctccatgatggaaaatcaccattaaaggacctcatttaagctcaaagatctagcctccatagaagctccacaagcaagctctcatcaagtggtaatcagagcacaagagcttcaagtaggtgctccttaaacctccattaattttctgctataccttctcttccattgatgatacttcatttttctccatgtatctcctcacatgtattgtgctaaatgtctgtaacatgattctntagaggttccaccgatcaaacttgctatagaagctagatttgattt

SEQ ID NO: 138697 - DNA, 359 bp, Glycine max
tagctggcttctacacaagggtcagccaactcccattgatcatttgttatttttgtggaggagagcattacaatgagaattgtcatctctactccatgaatgactctaggtggaaacaagagttaagtccttacaatcaatatgaagaagaaagaactcctcatctcaaaagtgtgtttgaggaattcatgtcataccatgctatctcaaatgccaatcaaaattcaatgaaaaatcatgaaattcatcttggaagagctactcaatagaaaatttcaagggggccagactacaacctactatcacatgtgcgaaagaggtccatcagataattgtgatcaattcacgaacaactaatc

SEQ ID NO: 138698 - DNA, 435 bp, Glycine max
  unsure (1)..(435): unsure at all n locations
actcagctgagcttctgtgatcctatanatgcttgaagggatatttcagtattgctctttaatacaagatactgactcattttacatgtgaaactcgtagatcatatttcagtcctacattcatacatcatttgatacgagattcatctttctaattcttatcgacatagatacagtatactgcatgtgtagaattgattcaattattttatttccaccttaatggtactgcttacaactacaaatgcactgagttatgaatcttgatatatgccaatagtatgtgttattgaacttaccaagaatggttatatgtgtcataacatgccattattatnatttggaagttcgacaatgtgatnntcttcccacacaacatggcatcttactctttctagaccatcanaggcgtctatatttgtctntaattgacat

SEQ ID NO: 138699 - DNA, 352 bp, Glycine max
  unsure (1)..(352): unsure at all n locations
agcttagtgctngatcactacgcgtggctctttacttatagttggacgatgcatgaacgacaatcaatccatggggctccgaataaaagtggagaatggggaattgcactaggcaatcactactcgtggctccagactcattggtggaggttgcatgaaccacaatcaatttatggggctcccaattaaagtggagaatggaaaattgcacttagcaatctcttcgcgtggctccagactcatttgtggaggatgcatgaacgactatttattcatggcgctcctacttaaagtggagaatggaaattgcactatgctatctcttctcgtgcttccaactcattggtggaag

SEQ ID NO: 138700 - DNA, 385 bp, Glycine max
  unsure (1)..(385): unsure at all n locations
actaagctntaacctcatcatctctcacagtctntagaattgggagcctttccaattcttgtgtccggactctcagccacttatgatagccaccgatgatcccattactgcttccnctaagctctctgtcctttcttcacaccgcatcacatgccttgcgaattccttggagtacctttgcattggggtcactgaaaccccgtgtaatgaaaggcgtgatgctttcgtctaatggcgctcctctcatggggtagcccagctgtcttatggcgaagacaggattataatttatacaaccccttgctcccttaaaggaacatttggatatcctcgcatgaagatagaatctgatccttccatgagcaccttagggctgtcatatact

SEQ ID NO: 138701 - DNA, 392 bp, Glycine max
  unsure (1)..(392): unsure at all n locations
cctgaggcatgcaagctttcgttcccgagagcattccttaattaagcacttcattctttgctntcgnggagcttaggaanaacgtcatttcttcttctttatttcttccaaagccatttctaaagtttcaagcactttctccatcacccacagccaccattagccaaaacataccatcgttgttctccgttgaaaccccacaccgagaggaacccttctaccgaagcggaatcttccaacttggctggcggtttcggtagaaaacgaaaccctaatctgacctttcattntctttcgagggaaccatggctctacgcttgtntcttggtaagatcatcttgtctttgcatcttttctggacttggaaccggcattgcatggtctatgcttcc

SEQ ID NO: 138702 - DNA, 488 bp, Glycine max
  unsure (1)..(488): unsure at all n locations
gctgcagatngcatttaatgtcttncacaacacccttgcaagttgcaactgcaattgcagcaatgccgcattgcccacaattctgttaatcgagagacaccaacaacaaccacaaccataactacaatntaaaactatgcacatttgatacgcatcaaacaactcaccatcaaacttgtcattctgtgcagcaaccattggcgagccctcaagctgtcaccaaaagccaaaccaagaaatcaaaacaattaaacactaaaaaccaaattcagaaacacaagtgcatgagtttgacaccttgcaagacaagagcttgatgcaacatccatcaggttgctcttccactttcaccaacaacacaggacaaacctcanagttgaagaacttgaacctatatacgtaacacctaaacgtgttttcgtttacccgctcaatcctctctgcatccaacactgaatactgacttcgctgtaaccgcatgtactcaa

SEQ ID NO: 138703 - DNA, 429 bp, Glycine max
  unsure (1)..(429): unsure at all n locations
agcttcatgatgaatcaagattgattcaaagtatgtttgatgataacaaaggtgatgacaaaaagctcaaaggtcaatcaaagaatgagttcaagatgttcaagatagaatcaagaacacttcaagattcaagaggaaagttgatttcaagaatcaagaatcaagattcaaggatcaagcttccaagaatcaagatcaagattcaagaatcaagagaagacttaatcaagataagtatgaaaaggttttttcaaaaactgagtagcacatggatttttctcaaaacatgtgtaccaaagagttgttactctctggtaaccgattaccagagtattgttattgattaccagtagcaaaatgaatttgaaanaggtttccaatgaatttacaatgttccaattgatttcaaaaaagatgtaatcgattaca

SEQ ID NO: 138704 - DNA, 384 bp, Glycine max
  unsure (1)..(384): unsure at all n locations
tgattcttatgccggaaagttctggactgtcacccttgcttccattatataccagatagtaaagaccctcccctaactctttcttgtgttgaagtgaattgagaaagtattatacatatgcgttacaactcagattttaacttcttggtgctacaataaaacttaagtcgagttctttatattcttaccattaaacttaaattatgtcacttattatatatatgtacttttctagatatcttctctctctctttaatttatctctctaagtgtcttcatgaggctgttcatccatctatttgcatatggagtattttaaaaacttactactcataatagaggttntatattcagtattaaaaaaaaaaacattcacatgccata

SEQ ID NO: 138705 - DNA, 382 bp, Glycine max
  unsure (1)..(382): unsure at all n locations
agcttctatcananntttcatcatcttaatctttaatttctttatctaagntcatttaagagatgcaataatttaagggggaaaatgaaatgttcctttccaatgtgaaactttcacgaacttaaaaaaagaaaaaaagagagagaagagttttaacaagtgctgaccattagcacgaacagctcatattggcaaatcctccaatagtgatttctcattcaaatttttttcatataataataattaaagtacgtagtgttatggtgacaaagaaactaaatatataaagggttatatattctatatatggtgaaatggatgtggtccttatatagtacaattatacaatgatttggattgatcactgatggacctgcatgcg

SEQ ID NO: 138706 - DNA, 472 bp, Glycine max
  unsure (1)..(472): unsure at all n locations
gcattgctactatctgccaactcagtcaaacatagatttattttttctcgatcagctggtgcaggaaatacctgcataaagtaattcagtcagttaattatgcaattttaaaatgatatatattattatataggcaaagcaaagtgccataaataaaaatatgagctatagtttatgattccacggaggacaaaccgacaaagagctatataaatggaaaaataattcttcttcttcttcaaaaaaagaaatctggaactntattccagctacattcttacatttaaaagtgaagggggagcagttgatgaagcaaaagacaaacatgccacatatttaattagcacacttgcgcctctgataaacatctagtgaaaatggaaaaaccttccaatacatcagactttatatttactatcttaccatacaaggaacacagtcttacttatggttcattaacttagattcatat

SEQ ID NO: 138707 - DNA, 255 bp, Glycine max
  unsure (1)..(255): unsure at all n locations
gtgaaatgcaaatagaaaatttggaactaacattggatttttccctgtgctctctccctgttactccttcggcaacacttaaccaaccatagttttgcattgtttctcttcttatgctcttgcaatntcaaatggaggtggcggttaatataaagttgaacaaagtattgaaaaggaaattggttgagaagtataaaacattagaaaacaaatcagtacttgtacatcaacatgaaaaaaattagagtgagaaag

SEQ ID NO: 138708 - DNA, 311 bp, Glycine max
  unsure (1)..(311): unsure at all n locations
tgtagagatgcatcaaggctcaccaagggcggaccttggtttgacgagcctttggagatgcgagactcaccaaggatggaccttgggtttgactgacctttgaagatgcgagactcaccaagggcgggccttgggtttgacaagcctttggagaagtgagactcatgaagggcagaccttgtgtttgatgagccattggagaaacgagactcgccaagggtggaccttgngtttgacgagcctttggagaagcgaaacttaccaagctctgagtcgacttgtgggtgaaagaagttgtctagtgtcgaggg

SEQ ID NO: 138709 - DNA, 440 bp, Glycine max
  unsure (1)..(440): unsure at all n locations
agcttctagccaaatggacttaccttgaatttatttctttgatagcccctatgagcctatgttcccctttctttgntttgaagctcattacaagccttaagtgaaaaaccatgatatcagcttacccttaaggaattttggagctttggaatatgtttgggaataagttgggaataagtgtggggggtatgtttcattggaagatataatttttggccatgcttaatgttttattttggccatgcttgatgtatttgtatatttcctagttcttgctttaatcttcaaattccgattgttaaaaaaaatttctattgctgcagattctgcaaattctgactgttcaaaaaataagagaagaagaatagaggtgatgcttaataaatgatgtctttgtttgaagacttgattagggagccctggttgattttgttgatatt

SEQ ID NO: 138710 - DNA, 346 bp, Glycine max
  unsure (1)..(346): unsure at all n locations
tctagccaaatggacttaccttgaattaattcctttgatattccctntgagcctatgttcccctntctttgttttgaagctcattacaagccttaagtgaaaaaccatgataccaccttacccttaaggtattttggagctttggaattgttttgggaataaatgtggcggggggtatgtttcactggaagatatgattttaggccatgcttaatgttgtattttggtcatacttaatgaatatatatactcgctagtgctgcattaatcatagatcttactgcttaacataaaaatgagaaaacatactactttattttaataaaaaaggattcaatcatgactt

SEQ ID NO: 138711 - DNA, 444 bp, Glycine max
  unsure (1)..(444): unsure at all n locations
ttaagtcacctgcagcatgcangcttctctaaccctccatgtatgttgagcttaacattctctaaagtttaattccaaattctcatccaatgattggtgttttatattaatttataaaattctatttgtttttaaaaagacgcatggaatgcgtactcaatagttaatttttcttaattaataaattataatcagcaacacatcttttttcaaaatattaatcttgtttctttttacacatttatcttaaaaaattagcccctctttatattttatctctttctcctcttccaaactctcctttcctatactgtttctgtccaattagcacatcaaattcataatatggcatactcataaataaaaaacaaagaacttatatgcttaccaatataaactattgtagtagttgagaaagatccgagcatatacaacatgacacac

SEQ ID NO: 138712 - DNA, 495 bp, Glycine max
  unsure (1)..(495): unsure at all n locations
ttgaagttcataggtgcataataganaatgaatgagattgtttcccanaacttatgagatgatttgataatcttaaacacgaggtataatgttgttataatggtacagtgatgcacatttgtgatgcgtggtttggtctatgattntattgttgctgagaatattatattgatgacaagataattatattaattaatgaatgtcttgagttgtgttggttgatttcttgatgatgatatgagatgtggttgagatgatgttntatgattaaagttgactctgtgttgagatcatgaggctcacattcatatgaagttttgatgagttgtttgcaagaattcaaggtgttgtaatgtcttgctattcttattgaactatagatggcctgatgagtgtgatgagcatatgaatggtgaatatatgatattataacctcttatgatgttgagatcgtgaatgaattgtgatgacgatgatgttctgattgatgatcat

SEQ ID NO: 138713 - DNA, 361 bp, Glycine max
  unsure (1)..(361): unsure at all n locations
tgagatgaggaagtgttgaaaggtgaaacttcctgctnnatttgttaccacagagnggtacctggagatatgtcgcgggggtcaggagaccttggggacgtcaagtggggtgctattgcccaaaaccaagcttgaccaatcccgacccaacccgggcatagtcggtcagtgagaacctgtgatgtacctaagcaggcgagctcctggcagtcaacagataaaaggaaaacaagaccacaaagcaaggaggcttgtggtggctggccagctgtgaatnttgtgtaatatgtggattgtggcctctggtaatcgattaccaagggggggtaatcgattacaaggcttaaaaatgaagacaggg

SEQ ID NO: 138714 - DNA, 361 bp, Glycine max
aagcttagagcactgtgctaaaacatgtcattgattaaaatctatgcattcttttgaatttatttttaacttgcacttgatgaagaatatcttggggatcactaatgagttgtcttaagcacttcaaagaagtgatcaagatattgtaaattctataacattggttagagtgtacaagaagagattacaaagcataagaggtgatggtaggcacactctattaaatgaagtttcattattttgtgagaagcaagatactaacattccaaatatggatgatgcattcatttcagaaggaagatcaaagcgtacagttaaaaagttttaaatctccctcactctcaaagtaagttatttatca

SEQ ID NO: 138715 - DNA, 304 bp, Glycine max
  unsure (1)..(304): unsure at all n locations
tcataaaaagctggtgaaacaagtatgtttgaaaaacaagctagccttgtagccagggttactcacaacaggaaagtatagattatgctgaaacttttgctcttgttgctcgtctaatgacaatacgcattttactatcctttgctgctcatcatggtaagatagtgtatcaaatggatgtaaaaatgcattcctcaatggaaaaatcaaggaagaggtctatatggaataacccnctgcgttngagaattctatctaccctcatcatggttttcaaacttacaaaggacttgtatggttaaaa

SEQ ID NO: 138716 - DNA, 316 bp, Glycine max
cggagcctctaaacatttttattacaatcacaggtcgctataagaatttccagagatgtcaatattgccatcaaaaaagtgtctgaaggaggggattctcaacatccaatgagaaaacccattcaaagaaatttatttgcactccagagaatgagcaagagtaacatgtcagaggtcataccaagaggagctattctcaatcttgtgaaagtatcatgctctggcgtctctctcagaatgtcagcagcaattgggtcaggctgcacaccatgcaggtcaccggaaacactatgagagcggatcatacttggagtaa

SEQ ID NO: 138717 - DNA, 404 bp, Glycine max
  unsure (1)..(404): unsure at all n locations
gcaagcttgaagcaggagccagtttgagagcttgttatgattnttgtgagtgattgcgagatcctagaggtgaaggagacatcctcaccacttgtatntttgcaatctttcatcttgttcttctctttgttggaaagaaggctccctggtatataaagctaaatcctttgttgaatcttcctttgtggtacctgatgtaaatatatttctatctattaaatgatgttntgcgtgttctctgtgctatatgctattcactccagtatgcctttaccttgatcacgtagatgaaagctctgttagggncattcaacaatggaaactggtctgactctaaagtccttgagagtatatggcttaactgagtatgtgggtcctaatgccgccctggctaagttaatcct

SEQ ID NO: 138718 - DNA, 425 bp, Glycine max
  unsure (1)..(425): unsure at all n locations
tgtaactnntggtccccgtgaaagttttctattgagtagctgtcgcattctacccttcggcgggagggcgacgcgggactcataagtgcgtcttccaagaaaggaaaatgcgcggagtcgccaccaactcttatttgaggaaaacatcggaaaaaccggaaaggtgtggtctatgaactataagtgtgaaagggttgagagttgcttttactcacggngaaggtattagcaccccactcgttcgtcacagaggacgacagcctttaatcgagtgtgtaaatatgatttcaaattgttttattnttcctttccatacgcgtttatgtccatttttgtatttatatctctttgtggtcgacaacgggggatctcttgctcctacgtattactcaattgcgatcaagaaatcagaactacctagttct

SEQ ID NO: 138719 - DNA, 408 bp, Glycine max
  unsure (1)..(408): unsure at all n locations
gcttagccctagaggggatggaccttttcatgttttggagatgatcaataacaatgcctataggttggacctcccagaagagtatggagtcagcaccacttttaacatttctgaattaactccttctgcaggtggagctgatattgaggaggaggaactaacagatttgaggtcaaatcctcttcaaggggaaggggatgatgcaatcctccctatgaagggaccaatcactaaaaccatgagccagaggctccaagaagattgggctagagttgctgaaaaaagccctaaggttctaatgaaccttagggtagatntttgagcccatgggccaagggttggtccaattatctttgacatattagactaggatgtcattatattggtcctggatttagggctcatatt

SEQ ID NO: 138720 - DNA, 481 bp, Glycine max
  unsure (1)..(481): unsure at all n locations
gctttaaggttttcatcgtaggaggatatgtacccaatttgacccttaatatatgtaatcacataattagcaatttcagaaacacccgggactctagctatcgcatccatcgccagccccttgtactatctgtgaattataacggaagacaacgaacataagcnataaatagttaattatattaaaatgctatcttattgctctcaaattcataaattcattcaatacactaagttttcttgtataatagtctattagagatatagacagagtttaaaaagtggtcatttaaatatataattaagctatatagacgatcatncgttgacctttatgttaattcagatgttatattattcacataagacaatgacatctattaaaattggtaggtattgaagttaaagcgaaggagttaacattacatttattaacattgttcattacactggatcaccatcatatattcattatgaaaata

SEQ ID NO: 138721 - DNA, 405 bp, Glycine max
  unsure (1)..(405): unsure at all n locations
gcacactntgtcacataatccgncctcatatgtgaccctctcagactttgggaatacggtctttaaagtatttattaagtatttaacacatttttctaatatagtatgtataataatgaattgaaacatattaagaataaaacacggatcaaaaatatgaaatcagaaataaaaattcatataaaattataaattcccataaatcttatttaatacaaaaagatatgtttctaaaaaatatctttaaccaaacactattataaataacattttgtgcgacagccaaatgatgtcngttctccataaccaccttatatattaaacggtggtattctgaagtactgagtnttcaattgaaacaatttgtgaaactgttttaaacctccatcgacgacgatttatcaa

SEQ ID NO: 138722 - DNA, 418 bp, Glycine max
  unsure (1)..(418): unsure at all n locations
actcttggaatttctttatttctttcactctaaaagnngtgacttgtgaataagtcttcagaaacaagtcacttgaagaaatgtgacttttggaaattcattttttcgaaattagtcactggtaatcgattatcattaaggtgtaatcaattacacatcaacagatgtgactcttcattttaaactttgaaaattgaaacgtttagaagctcatgtaatcaattacaggtatcgtgtaatcgattacacaagttaaaaatgatttgaaaaatgttttatcactagttgtgactattgaagtttaaattctaacgttttgaaacataggaaattgattacatgctcatggtaatcgattacagctttggaaatcagtatttgaaacaatgttggctactggtaatccaatactatcttc

SEQ ID NO: 138723 - DNA, 365 bp, Glycine max
  unsure (1)..(365): unsure at all n locations
tctcccttgccacggtcgtatctggcttccttttcctacatctttcaccgcgnaccttttagaggagttccatgcttccnctcttggcggccacactggggtgccanaaactcttcaccgtatgcgccagaatntcgactgaccccgtatacaaaccaaatatgaggcaaagaaacctgcagggctccttcagcctcttcccataccttcacaattctgggaagatatgtctctcgacttcatcaccagcttgccctcatctcaaggtttcaccatcataatggtggtcgtggacccgtttttcaaggaggctcacttcngtgctctccctacacaccatacagcatacaaagtggctcttttat

SEQ ID NO: 138724 - DNA, 354 bp, Glycine max
  unsure (1)..(354): unsure at all n locations
cactcatatgctactttgcatagttgctctggatgagctcagcgcttgactcaccttaattgcgtgcccatatatagcaatgacatctgttttgttttttataactaaacgatattgttagaaaattaaagaggggataaaaaattcgataaatatttaccacataatcactaataaaattaccattatatattaacaaaaaaaccttcaatttaccaactttatgagtcttcttcataagttgtngagactactatattaatctaatggcagatcgcatctttttatgttaactcctacaaagagtaatgttattcatattaattatcccatgcgttttgtatgataatctcc

SEQ ID NO: 138725 - DNA, 306 bp, Glycine max
  unsure (1)..(306): unsure at all n locations
cagcagcaggggtatcataaatctgagtaacaacacccatgttgaagatggaaaaataacacacaggattattgatggtgttgtgagaagatgttagtgttggctcgttgctggtgtgtctctaagatgtggaaagagtangctttattaagtacttggcctgcactagtcaagtctactctgctgtggttaggtaaagatatacttctgtgaagttgctcgggtctttcctaatagactattatattgtggcgtcaaaatgtttttgacgtggaaatgaaaaataacagtgtttgtaaaaactct

SEQ ID NO: 138726 - DNA, 390 bp, Glycine max
tctttattctacgcctcggcatcctctaaaaatgggtgttcattagagcatttaatgcttgtcaactttcaatcacttcaagcttataaagcattctggtcatcttcctcaatgagcactccaaaactagtttcagaggtaaaatcaccttttgcttaatgaattacattgcacattatttgtacacaccttttaatgtagaaagaggttttattctttgacttccttcacttcaatagatcctatgaagaatatgctagtatactctacacaaaggataacacaaattgagcattaactcagtcttaaatgcttaaatccagcctttgcctgctaccatttgattcatcatcctaaataagaagacccaagttcatttgggtcatacct

SEQ ID NO: 138727 - DNA, 471 bp, Glycine max
  unsure (1)..(471): unsure at all n locations
tgctagtgaagcttctatggaggctggacctttgagctttattgatgtccttcaatggtgatttccaccatggagatgcaacgaaagataaagaagaagaggtgagaggaggcaccatcccctacggaataagccatggaagaaggagcttcaccaccaagagagtgccttggataagaagcttatagaggaagcttcaatgaaggaaaagaaagagagagagggggggcacgatattaaaggaggacaagagggagagaagttgagaaacttccttgagaagctaaaggttagctacacactcccctcttataacttagctcacctccatgagaagcttccttgagaatctctctagagaagctaaagcttagctacacacaccncttctataacttatctcacctcctttggatgagaagtagaagctactaccacacccctataatagctaactcacctcatgcaaaa

SEQ ID NO: 138728 - DNA, 288 bp, Glycine max
  unsure (1)..(288): unsure at all n locations
caatcgaaagaagctgcacagtggttcaggatgtcacagacttctggcttcactcctattttgtatacatggatgaactaagagaaaattatccccctcatgaaaagctgtatgatattccgttagatattctcctccaattattttgttgataccaaacaaagagacttgttgatgaaaataatatgacaaatcatattgtttcttgcaagatagtcattataaccatgtctcttggtggtgatcatggntggcctgcattcgatatggcttttatatatctattgc

SEQ ID NO: 138729 - DNA, 299 bp, Glycine max
  unsure (1)..(299): unsure at all n locations
tctccatctacctcttcttaagttgtttgagagcatcacagntcaagggcaaatttgtccaaaatttgggggaaattattaggtgacaacaagtatggtaagacaaatagcaacacacacaataatatctaaaaacaacaagtaaaagctactaaaaaaagagaaatttcaagaataaagctgagtgtgtattgtattgaagctaagtgancaaagtgctgtaaatattgaaaggcaagttatagaactggaataaaagagaacagaagtgatctaaggatgaatgctctcctagaatc

SEQ ID NO: 138730 - DNA, 313 bp, Glycine max
  unsure (1)..(313): unsure at all n locations
tcagcttgatggcttagtgacaacttatccttgtctattctattacttattatcgccaagcgcaattccttacggccaaaattgaggtccatgaagctaagcgccagtcatggcagcttagcgagattcattgtggcagtgtgagcactaggcgagtacttatcagctaagctcatgctgccttgtacttaagatgcatcattctagctaagccanccanaatctngcttancgagagnngcaacttttcggatgctcaaaccgtgcgtgagcgggctgatcctccactgagccaagcctgtgttaataaaaa

SEQ ID NO: 138731 - DNA, 274 bp, Glycine max
tgagatggatctctattaaccactttgtggctcattgaagatacttgtcctaaacctgtgaggacattacatctcctagtcctctataacctctaagtccatataatatctcctattacatgctattcaaaacataatacactagaggcaaaaagtcgaatcatacaagacacccattgcaatttgaccccaagaatgatgtcggtctctctctattggggggaattggaagtgggagattctagtgaggggaaccccttcactgaaaactcac

SEQ ID NO: 138732 - DNA, 440 bp, Glycine max
  unsure (1)..(440): unsure at all n locations
tactcagcttgaatgctcagaaatcggtaagtgcccaaatagctctgcatcatgaaaacttnnatgtaaatgaatactgatatgcttgtcgataggggctaactattcctggataattacatctttattggctgctacatataatgcaactcatggtnttggagcactgttatgaacttatgatatactttatcagtcactaaatctgattttgtttctcatatttgtgtcgtgtgcgtaaatataggttaactcatctattgtctatattgctatttatcaccctcatcttgtatttgacctgaatgttcttgaatctattgatagcacttgattagaacttatactttgagttaattcccatgttcaatgtttcttatttactctaatcggggcctcatcatgacctgtaaatcccttgacaggctttttttattcta

SEQ ID NO: 138733 - DNA, 376 bp, Glycine max
  unsure (1)..(376): unsure at all n locations
tcaggctgttcaatngcttcagattgttgtacataagggctatatgtctatgtggngggtggcagaagagcataaaccacagagtctggcgacacgtgcatanttttaattcatggccagttgggttaccaagttaaccaaggcatctagtttaccttcaagcttcttagtctcacctgatgaagatgaatttatggctactttatgcacttctctaatgacaataacatcatttctggcactaaattgctgggagttggaagccatctgctcaatttaacttatggcttcaacatgggtcatgtcttcaaagggctcaccacatgcancatgaatcatactactttcatgtaactgatgcctcataaaacattgg

SEQ ID NO: 138734 - DNA, 418 bp, Glycine max
  unsure (1)..(418): unsure at all n locations
tctanactntgtacaagaatgaagctctgatacccactgttagacaagtggcctcatatatcttaagaagggngggttgaattaagatattccaaactggttcccctaattaaaaaaaatctatatcactttgtactcaagttatgaaatcccttaatgacaatcttcctaaatattaattcaaatgaagcaacttgaatatgaatataaagcaatgataaataaaggagattaatggaagagaatatgcanactcagttttatactggttcggccacacccttgtgcctacgtccagttcccaagcaacccgcttgagagtgcactatcttgtatatccttttacaagttctaaacacacaaggacaatccttcccttgtgtttagagatcctttacaacaagagactcacagtctc

SEQ ID NO: 138735 - DNA, 427 bp, Glycine max
tatcataatcgattacatagtttgtgtttgagacaacaactatattattcttgagtttctactttaatcaatatcgattgctcctctttctataagtggttaagaagtatacaagaagactttaatcgattactttgaggatctaattgattacattgttcttgagttgtttccaatatttgggaagaatactttaatcaactgaaaagataatctaattgattagttcattgaaataatcaattacattgtagacttaatcgattacaggcagttataattattttcttataaataggaccttttgttctcttctaatacaatgaaatgacttctgagtgacttgagtacgtgtgatattattaagaaataaaaagaaaatgttagaatatgatccactttaattttgatttagagtttggatatg

SEQ ID NO: 138736 - DNA, 452 bp, Glycine max
  unsure (1)..(452): unsure at all n locations
agcttntaagatgngctcgnttggataaacttcatctatatatnnggagnagttcatgttcacgtaaccacaagctgcaataatgtgtgaacatggatagtgaagcgcanaataccttccgcattgacaatgacgaccattcaagtttactgcccacttttgtggagtggatatcatacacgcgaacgatatgcgtacaagcttgctcttgatttttcctcagttctttaacaagctttgaacaatatacttggccttcatttaactgtctttgggcttggcggccacgctcaacaaagtactttcgacacctactgtacgttgatttcaccaatgctgttatgggaatgttgcgacaatcctttaaaaccttattgatacattctgagaggttcgttgtcatgtggccatatcgacgtccttctctatcgaagccatcgccatttttcttt

SEQ ID NO: 138737 - DNA, 282 bp, Glycine max
tgtgcgaatcagatcactcctacattttatctctagcatgtattctttctttacccactcctcacgtttggttgtttatggaaaaacaccataactaaacgcgccacaaggcatccctattgcaccagatccaaatctataacgatgggtgatcaagaggagacacaagaatagatgaaagccgacatgtcggctatgaaagaacagatggcctccatgatggaggccatgttatgaatgaggcaactcatggagaaaaacgcggccaccgctgccgctgtc

SEQ ID NO: 138738 - DNA, 414 bp, Glycine max
  unsure (1)..(414): unsure at all n locations
agctnttttgaaaacatttttgctaatggttatctattacaataatctggtaatcgattaccaaagagtaaaaactctttggtaaacatgttttgagaaaaatccatgggctactcagtttttgaaaagactttttcatacttatcttgattaagccttctcttgattcttgaatcttgatcttgattcttggaagcttgaaccttgaatcttgattcttgattcaatcttgaacatctttaacatcttgaacatcttcaactcattctttgattatcatgaattgacctttgagctttttgtcatcacctctgttatcatcaaaacatctttgaatcaatcttgattcatcatgaagcttgcttctacagtatgggtattggggatggctctgggatttggtctgtggaagtc

SEQ ID NO: 138739 - DNA, 405 bp, Glycine max
  unsure (1)..(405): unsure at all n locations
tcctcgggccattcctgcgaaggcaaacatttggaaagttatttntaccagtgggacattactcttaaagcaaaaatggcatataacctcctcccataaatacaaacaccaatgtaaatttagagcaagcttatgcgcatatttccttacatacgttctcttgcacaagacatttaaccgaaaaagtgcacccatatacaatcaaggcagcttcgttacccagattatttacacgtactgccaaggtgtatttgttacttacatcacacacatctncttggctgaatttacatacatgcatactcaaagcattttggggtaccaaaaaatgcacatgtgcacatcttggtatttctaatacctatatatacaaacttcatgatgaatcttgactatctacacaat

SEQ ID NO: 138740 - DNA, 319 bp, Glycine max
aaccttgatggtgttaacggtgccctttacaactaatccacacgaaaattctgaatttgaggtggaagtatggtgaatttatatatgcccctttaaatgtataataaaaaatatgtccaagagagccttgagagtattttctttctttcaagtaattaattattaaatgaaccagatacaagtatttgctcttagaaatccagtacaatctataacagaacaatgctcctctaaatgtgagtgccttaattatttagccctctaagactctattattagcattttgagcaattagtggaaagggtttgagtttagatag

SEQ ID NO: 138741 - DNA, 226 bp, Glycine max
atattaaaaattcagaaatacgtgggattcttttgaaaaggaatgacaattattggcttagcttattgggaaggacatatgtcttggctgggatggggagaagaaaaccatcgcagctagtgatgaatggtgggaagcccaaattcaggtatgtattattcaacgacaatagagtttttatgcaggccaatcctttggtttttattttttatgtgtgattcttgac

SEQ ID NO: 138742 - DNA, 355 bp, Glycine max
  unsure (1)..(355): unsure at all n locations
agctttntggagtaaaaacatgggaccaactcattttatttcagaaagtcgtatctagtcaagatctgagagaccatacaagtttcctagcggtttctaattatatgggccattaaatctatcatatgctgacaatagccgagaagcccatgaatttcttcgggggcggagtaggtgtctgccattgccttggccttggctaacaatcggggaagttcttgactcctgttcaaggtaagagcaaaccggtccatccacatggttgcctctcggtgtaaagagtcgatcacccttcctctagcctttttttccgcgtatacttgggcatactcgtccgcgaccctatgctcgtggg

SEQ ID NO: 138743 - DNA, 398 bp, Glycine max
  unsure (1)..(398): unsure at all n locations
tatgcaccccctttttcaatattaatcaacctgtaatcattctctatcacaagcaatcaactacactcaatgcanagaaaacaaaattaaaaataaatgactgggtttcctcccagcaagcacttgtttaacgtcattagcttgacgcatcgctctgttatcctagatcaatcttggntctctctttcagaaccttctcatccaactccttcacctgtaagcacacatcctggtccagcagttctcttccttcattaaatagatcaaagctgatttgttggttttcaagactcatttctaactttttctttcctatgttcaccacacagcttgcaatagacataaatggacgttccaaatgacggaatattgcatcttctcaatgtcattacaataaa

SEQ ID NO: 138744 - DNA, 171 bp, Glycine max
  unsure (1)..(171): unsure at all n locations
catgtttcacctgtgaagaaattattattctactcatgtgnggatgaataaacagctcagatcgatgattatggaacaagaggatgaaggagacccttgcttatgaaatgcaggctggtttcctcaacttgaccttgaagacaaggcccatcttgaaagggggaggggggg

SEQ ID NO: 138745 - DNA, 298 bp, Glycine max
  unsure (1)..(298): unsure at all n locations
cttgataggccttatattcataccttgtgatttattgctntatggcaatctgaaattctgaacatcattgaatccaggaaacagcagattacctgctttatcccaatcctggatcaggaatgatacatgaacaacatctccaattnttccattttcttggtactcttcttgcaaaggtatgtttatgtcccatttcctccctgtctctntaataaggcgtgtcaagatgtcccatattggcttgaaatatggccaaaataatccttataagatctaggcaatcctcctctattggact

SEQ ID NO: 138746 - DNA, 323 bp, Glycine max
  unsure (1)..(323): unsure at all n locations
ttgcttctacaagaagcaagtaggtgagttgctggctcatgatanatcagacacaacacanactcattttttattctagcgatactagttaagaagaaagatgaaacttggaggaagtagtggtgaagtatatactactacaataaagcttttttacgacggttaaattgagtttttaatgacaattaagaaccgtcgtaatagtcaacatcgttaaaagtgagatttaattaacggcggtcccaaaaaacactgttgttggaagaaacaaacttttaagacgatattgatgtaatanacgtcgtaaaaaactgacattctaa

SEQ ID NO: 138747 - DNA, 362 bp, Glycine max
ctgcatgcaagatgtcaggccttgatgcacttaatacttttgcagcctataaggctcctatacagcttttcatccactttttcagctccatcttctttgtaaaacttctccttttgattcattggagttgcagttggtttgcacccttccatgttgaacttcttgagaatttcttttgcatatttttcctggcaaagaaatatttcattctgtttttgatccacctgcataccgagaaagaatgtcatccttccaaggtctgtcatttcaaaagcatctttcatttcttccttgaacttgtcaatatgctccccgctgcttcccgaaccagtagatcatcacatatagagatctacaagctt

SEQ ID NO: 138748 - DNA, 325 bp, Glycine max
actaacctcgtctagcgttatgcgaacggagaccacatgctattatcatcgccaataccaagaagagtaggtctagccacggcccacgagcatagaatcgcggatgagtatgcccaagtatacgcggaaaaagaggctagaggaagggtgatcgactctttacaccaagaggcaaccatgtggatggatcggtttgccttaccttgaacgggagtcaagaactttcccgattgttagccaaggccaatgcgatggcagacacctactccgcccccgaagagattcatgggcttctcggctattgtcagcatatgatagacttaat

SEQ ID NO: 138749 - DNA, 261 bp, Glycine max
agctttgaaatctcttttcaatggaggggacaagaatatttttagactgatcaacacatgcaaagtggccaaagattcatgggagatccttaaaaccactcatgaaggaacctccaaagtgaagaagtccagattgcaactattggccacaaaattcgaaaatctgaatatgaaggaggaagaatgtattcatgacttccacatgaacattcttgaaattgccaatgcttgcactgcctttggagagaggatgacacattg

SEQ ID NO: 138750 - DNA, 321 bp, Glycine max
aagcttcaagaattatggcctcatcattttttttgttttccgagggaaactctataaatagacctcccatctttaatggagtgggttaccactactggaaaacccgcatgcaaatctctatagaggcaatagatttaaatatttgggaagccatagaacaaggaccttatgttccctctataatggccggaagtgcaacaatataaaaacctatagcagattggactggggaagaaagaagattagtacaatataatttcaaaggccaaaaatatttattacatctgccctaggaatagaagaatactttagggtttcaaa

SEQ ID NO: 138751 - DNA, 277 bp, Glycine max
  unsure (1)..(277): unsure at all n locations
agcttaagaggcatttgttgcttgagcnggcagaaaactatttgagtgggaaaatcgctgtgggatttggcaaccttactagtattgttaactttgatgcttcttataatcagcttgaaggcgaactttctgagctaaggtccttgacaaaacttgcatcccttcatctttttgggaacaagttctttggagaaattcccaaaaaaaattggaaatctcaagaatttcacagaaccctctcttttaggcaacaatttcactggcccttcttcctcaa

SEQ ID NO: 138752 - DNA, 317 bp, Glycine max
tgcattttatcaatcagggcttgttgttattctggatgatcaagtgcttcacaaagatttttaagaagagaaacagaagataaagaggaaacaaaagaatggtacgaagaagagagacaatgataacttaagaagttataaataggataaggattatgtgtagatcgagtatctttcctaaaagcaatgggcaagtcaagattctcttcgggtaggtccatggtcgagttgtctgctggagtaggacatgattcagctggtctttcattacctttaagttctgcgtcaggaattagaggacgatgtcgatatacgat

SEQ ID NO: 138753 - DNA, 280 bp, Glycine max
agcttctctaaatttatattgcataacagtatctagacatagttatactcaaatatattatgtagctagccttaatgttttgtgtaatatattttctgtttcacctctggcagcttaaacgatgggagcggaaggagtgtaaaccaaacagtcttcctatcttgcacaaaatgcaggagatgcggtgcaagtcatatctggactaaaaagggggtaaagttggggagattactaaaatcttcaagcatgacaatagtgttatagtgaaagatttaaattt

SEQ ID NO: 138754 - DNA, 281 bp, Glycine max
agctttgcgcacattttcggttctgattggtcatcaagaggaaatatatttgcaaaaagtggattttattgataaaaacaacatccattcattaaaaagcttaaccatgaagcaaggaggcagagggagaaacaaaagcttcgaaagccattgttgaagaaaatccaatttttggagctctagccaatccgtttcactgtatttctcttccattttcttccatttcattccaccttttatatttgtaagtttctcatgaaaatgagagactaaaaccacct

SEQ ID NO: 138755 - DNA, 283 bp, Glycine max
atcacataaagccgcaggcagctcacacaaccattgaaaaactaggcccactaaaatcaaacaatgtccaaaaaatagaaaaaatcaacatgcaaatgtcaaaaaaatatagtttaatagaaaagaaagaaaatgttagaaatcctgggttgcctcccagtaagcgtttctttaacttcactaacttgacgcataacaccctcacgagtcatggagttggatgatggtggtcaatctctcaatattgtgaccattgtaaaccttcatcctttgatcattcatg

SEQ ID NO: 138756 - DNA, 284 bp, Glycine max
agcttaagctaaattttgctaaacttccgtaagctacttgagctgagtctagtcttacatcagggatctgcagacgaaactcagtttaagttagtataaacctaagagggttgtctaaatcgggtgtagtcttacatgagggatttgcagacgaagcttggatagtcagcctgacgagggatcaaaggtttagtaatttaggatacaacatagaacacaagagcacgattgattagagaaatatatttctatgcatcaggttgtttgttagaaagacccaacat

SEQ ID NO: 138757 - DNA, 318 bp, Glycine max
  unsure (1)..(318): unsure at all n locations
tgtagaatggctagacatgatacattttagggtttggtttggttcaaggataaaagggatgccccacattatttccatgacacaaatgcaaaaatgatgatttggaaactttatgcaaaactggtcatgcatgcacctatgcggacactcaagtgtcaaatttttatggtcatgtgatgctagggctcangattcgtttcctctattttaatcaacccaatgtttccaaaatatgttcttttatcaatttgtgcattcatccgagtccatttcgggcgtccggggaaatttcacagcattcacccttcaagtgtagac

SEQ ID NO: 138758 - DNA, 224 bp, Glycine max
agcttattaatttttttgaaagtgtttggtaagattaactgataagctagctaataatatcaaatgacataaaattacgtgtttaatatttctaattaaacaaaaaagaaatccaagtttcataataattaagaaaacaaatatatcatctagtgtttgactatttgtaagaatgttaaaacatgtataaaagggttgggggggggggggcttcctattctttc

SEQ ID NO: 138759 - DNA, 314 bp, Glycine max
tcatgatgatgaatcatggttgttttacgtagttatgatgatgacaaaaagaagcccaaaagaatgatgtcaaaattgagtcaacaagttcaagatcaagattaaagaaaagatctcaagaaggataaagattcaagagaagatgaattcaagattcaagagaagatgaattcaagattcaagagaagaaaccaaaaagcaacaagtcaagacttcacaagggaagtattgaaaaagatttttgaaaaaccaaacatagcacagttttgttttaaaagaaaagtttttccaaatttttctaagttaccagagta

SEQ ID NO: 138760 - DNA, 276 bp, Glycine max
agtcttttatgatttgtaaacaaatgtttttgttgcaagttttttttgtttctaaatctatgaaatgttgatacataagtgtccagtaacataatataagttggaaaatatgtcaagtacttccttccattcatggttattttcatattggcattagatgttcctctaatcaactgaatttcttgtgcttgattggaagtggcttgcaaatttaagaggcactttagttgcatctagaagttagaggcgtcttcatgaaaagctagaggtatattt

SEQ ID NO: 138761 - DNA, 279 bp, Glycine max
ccatataagggttatcacaatacttttataaatctaaataagttcttttaaatggaggctatttaaatgcatgaacattgatacataaaggaactgtatattttaaatattgactaatgcttttcaagattaaagcctctgtcacactggagaaaacgatggcaactaaaacttttaaataactcgacgaagatggaacatttttcatcagttttccacttaatgtaaagaatcactcagtctattggccaagtactctataattaaaagcaacgcaaa

SEQ ID NO: 138762 - DNA, 277 bp, Glycine max
ggaaagaggaagagagagaagaaaatttttaataaataaaggaaaagggggagaaaaaaaaaagaagaagaaggggagaagaaaagagaagaaaaaggagaaaagagaggagagaaaaaaaagaggaggaaggaaaaaaagggagagaaaaaaaagatgaaaagaaaggagggaaaaaaaggaaagaaagaaggaagaaaagaagaaaggaaaaggagaataaaggaaaagagaaaaaaaagagaaaaagagaaaagaaagggagggaggagaagaa

SEQ ID NO: 138763 - DNA, 279 bp, Glycine max
agcttcgatgctttgtattacaaagtctctattcgtatgtcaaagacaaagagagaaaggaaattcgtaactaactttatgtgccaattgatagcagattctaaatgttcttctctatctttcaggttgcttttcaggcattaaggtttgcaaagcctgttcaggaactcggtaacgatattgctgagcaaatgaaaagcaagggaccctaccttgctcttcatctacggatggaaaaggatgtctgggtgagaactggttgtctacccggtttgagtc

SEQ ID NO: 138764 - DNA, 312 bp, Glycine max
ttggtgtaagaatattatatattctgttctggacttctttcaggatttggcttcgtgttataaattaagttaacgtgctaatttaatattcgaaatttaacaaccaggctttaaaagtttatatcaagaacctcgatctcatgcacattcgattacaggtttttattggtgggactcaatcccgcattttgtttcagctgagttcaatatagtaataggattaattggccttctaaactatgggttcaaaaataattatttttttttcatgaatttggtctatgttcccccattgcttttgtgtatatgccc

SEQ ID NO: 138765 - DNA, 284 bp, Glycine max
agcttcctacatgtttccccacttggttgaggttataagttgtagcaagtagaaactcgatttataaaaactttttatatattatttaatgaaatgttgcttaagtctttggataatacgttttttaatgttttactttttatgtatttaattgagtaaataattgctttagtctatgaaattgaaagtgttgtcatattaattcttgaaactaaaaaatattaaataatttcttaaatttaattactcaatgcgattttagtctcttaacatttgttaatatt

SEQ ID NO: 138766 - DNA, 312 bp, Glycine max
tgccacccagctcgcctatgttatcaaggttgcttcctccagaagcaacagccttctggaggaatcttctggagggcccaagtgggcctggatgctatttgcacccccatttttactaaatacaccccctgcctttttttttgctgattctttttttcgtaaagttatggaaacttacgaatttcgtaacgatacttgttttctttccgtaatgttacagaaccttgcggattacgtaatcattcccttttttgacttacgaaatgttacggaacctcactatttgtgcaacgatgcttccttttgattttc

SEQ ID NO: 138767 - DNA, 254 bp, Glycine max
ggggctcacattaattctaaattaacttcctcattactatggcccttttaaggtgttggagaaagtcggagcagcggcctacagacttttctgaatctgcaaggatacattcggttttccatgtgtcactattgaaaaaagctgttggtgattacaatgttgaggagacacttcccttcccttggagttggttagtgacaatgcagcaagtatggaaccagaggcagatttataattagctccgcctctgtaac

SEQ ID NO: 138768 - DNA, 309 bp, Glycine max
tcatgatgatgaactcaagctttttgatgatgccaaaagcccaagtgattgattcaagattgattcaagacttcaagatcaagcatcaagaatccaatccaagattcaagattcaagggaagaaatcaagaagcaacaagtcaagatttcatataggataagtattaaaagatttttttcaaaaaccaaatagcacatttttgtttttcaaaagaattttctcaaattttctaaatttaccagagtgattacactctggtaatcgattactagttggcagtaatcgattaccagtgaccaaattggttt

SEQ ID NO: 138769 - DNA, 279 bp, Glycine max
ctgtagctgcaagtttgatcttttgtgaagaaccatatagacaagagaaaccatgaaccaaaatagaaaagcttgtcccacccatgagtaaatactttataggagcgcctaattagactgtacatctttctaggtatatccaaatagtagataagaacataaattgaaacattctaaagctacaaagatagttattagatacttagtgttgcataaaaacattcctcctagagtaaaactaaggttgagctaaaagtgattttgaaaaagaatacttgt

SEQ ID NO: 138770 - DNA, 261 bp, Glycine max
ccccttgggaaaacacgtgattggggctgcagctgaagttttttctatgatgcactagggcggttcccctggatgagccacttgagataatcttgtaagataagaaactattcttaaaacatcctaaattaattgcgatttattgaacagaccttttttttgtcgaatgaagataccttgggagagttacgaatttaaaatatctaattgagattttacataaatttgtcaatgactttcttcaacgacaaaaaaacattt

SEQ ID NO: 138771 - DNA, 282 bp, Glycine max
  unsure (1)..(282): unsure at all n locations
agctnactgatttttgctacttttgattcctcaagcaagactatatgatccgctaaaagcatgcacttagagataatatatccttgggcgtgctcaatcaagactatggggataatccaagagctcaaattaatgactttcctattgggataggattacatcaagcaaattttgtctcctatgtggtcaagttcacagagctcagtataatccatggtttatctcccaaattgcgaaaccctgcaaaatcctcgattttgcaccagcaaaaattacaaaatt

SEQ ID NO: 138772 - DNA, 338 bp, Glycine max
tgatatttacaatactcaagctttagaattgattttccttccagttcatgattttagtagaaatttagatgtttagttatttgttaaggaaaaagtgattttgctgcaaaacttaagtttaactattagtgataaaacataacttttgggtttagtggaaaaatttagacaatgttttacatcaaacttgctttcaagataaaaacatccaatcatgaataactttccttcaaaatcaattatacaaaattaatttcattcaaaatcaattttgtaaatgctcgtccaaacaaacttacttctaaccattacttctaaccaaaatcaattttgcaaaa

SEQ ID NO: 138773 - DNA, 306 bp, Glycine max
gaacaatatacttggccttttttttttttctttgggcttggcggtcacactttaacatagaacctttcggcccctactgttccttgaattcaccaatgctgttatgggaatgttgccacaattctttaaaaccttattgatacattctgagaggttggatgtcatgtggccatatagacgttcttctctatcataaggcatcgtccatttttttcttttaaatgctattaatccatgttgctatggatggactcagttaacgaaaattttctaaatcttgatcaaaaatgtgtttgtaataaaagt

SEQ ID NO: 138774 - DNA, 278 bp, Glycine max
agcttcttatccatttctcatcttgggggtgaagctccttcttccgtggcttattccttagtggatggcgcttcctctcacctcttctcctttgtcttccgctgcatctccatggtggaaaatcatcattaaaggacctcattgaagctcaaagatccagcctccatagaagccccacaagcaagcttccatcattttcgctcgacccataggggtgccgcaagcgcttaagtaaaattgaacatgatagacttttgtttaaagttattgcgattgaa

SEQ ID NO: 138775 - DNA, 316 bp, Glycine max
ttttattctaacttggaaatttatgatttattcctttatttctgaagtttatgggattaaaaaggtcataaactagtcccttttctttgaactcactcaattatccagtgatggtgtaccatttgagggtacacttgatgatgagtggaagtttgatttttctgtttctgatgtccgctggatggtttgtaccaaccaagcggatatgaccggaaggcttcttgccggttcattggcattcaaatgtcgcatcatgcactacttgattgtgcgcatcctactccctagatcatccaaccttgcacaagtttctgag

SEQ ID NO: 138776 - DNA, 278 bp, Glycine max
agcttcatgcttcttctatagtttttcacaacaacacatcaccattgggttctatagttagaaatgctttcaagaactcaattctctaatggtaagagtgtctattgatgaaaaaaacccccccacaaagaatcgtgtataccttaaataggatgagggttctccttatatagaattatagatatacctctgtctcataagtaacttacaataaatttttggcacttggattatatctactctcttgccgttgattttcttcatttggtaattccttt

SEQ ID NO: 138777 - DNA, 320 bp, Glycine max
tcttgtcactctactgatgtactcttgaaaaatccaacctcaatctggttcagacaaacaaattcaaagatcaaatcttcaatatgatagtgcatcgaaatgagtaataaataattttgtatattttcatttcaattatcatcttgattgtcaattgccatttgataaggtggcatgtgccaagggaaaatatacttaggacaaagtatgattgctactagtaaaagtatgtgaagacaaacaaaatatgacaagctacaatattcaaataaaacatcatcaattgacctcttttctttgggagggtttagtatacaaaa

SEQ ID NO: 138778 - DNA, 284 bp, Glycine max
agctttggatgcatattcaactgaggaaactttcaagaaagtagctgaagagattatgccatggatcgcttaaatttggatgataaaaaacttatattatcatcatgttggaaaactttttcttttttgcctaacttagacaattttggaggcaaataaataaatgctttcatatgtgtgggttttttttaatcagttttcatgttatggtttgtgtgtgtgtgcacgcacatcaaagataatgaggttcaaatctaagattttgtgtagggatgtttattggt

SEQ ID NO: 138779 - DNA, 323 bp, Glycine max
tactcaagcttctgactataagtacgattcatgtttgcagacgcatatatgttaccacactgtaagatgttactttgttcagatgcttgtttaggctcttgaaaagtctccatttttcatttattttaatggaattttcagttgaacgctaggaataaatctgcagccgcagaatgctatacaagaacagaggtttgtctggaaggtagtacttgatgcattgctattttccagtacaagctctcacaggcttgacatgtatgctctttgtttatttctgcatgtattaaacaactcttgttgactttggtatcagtatttgg

SEQ ID NO: 138780 - DNA, 180 bp, Glycine max
ggagacgaggagagtttataaaaaggacccccaccccacaaattataattataaatcttttctctatcctataatatggggagagaagaaagaacctcaaattaatgacctttcccattgataataaattacattcaacaaattttgacttctaagttaggtaaattgcagagttaaaat

SEQ ID NO: 138781 - DNA, 283 bp, Glycine max
ccatgaacagagactcatacaccccaccaggcttttgctgaaaaaactccgaggaaagagagggaaaacaaaacaaaacaaaacaaaaaggaaaaaaaataaacaagaacagattaagtttagaagataccaaatcttgagttaataaagaatccacacgattgatgtattttcttatttttgcaaagtgtagggaggattctgtgtttcttgagtaaataaacaaaagggtaggtgagagagagatgaaaaaaagagtggcatgcaacaaaaaggtgtgaga

SEQ ID NO: 138782 - DNA, 220 bp, Glycine max
  unsure (1)..(220): unsure at all n locations
aaaaattttttaggatggtaanaaaaggggatgattagaaatgaaagaatgagtagagggggaataaagtaaaatntaagaatgaggagatggggagatagaagagggggaaaaagataaataaaaaggggatgaaaagaataatgagaagagggaaaaaaaaaagaagtataaaagaggtgaataaagaaaagaaaaagagggggggggttgatagagg

SEQ ID NO: 138783 - DNA, 322 bp, Glycine max
actcaagcttgatgattgcgataacatttttttgttacaattacgtaactagtgttatactaattaatcgtaatcattatgataataataacatagataattaattgacacaattttactctaactaacttatatttatgtatacgaaaagtgtcaagggaggagcgagggctcagccctgcttgtccgtccctggccttaaggtatggtttttatattaataattaactaatgactcattatatctaaaccctagacatttagctgcatcaaattactttaaataattctgctaaaaaatctaaaagtaattttagtagaa

SEQ ID NO: 138784 - DNA, 278 bp, Glycine max
agcttatccttatgttcgactcttccggagaaaaatcctgcttgcttcttaaatctgctgagagttatccctttatttgcctcttctaatctactctttttgttcactctctttgtgtcttcgccaccattccaagatgacttccatgtcgacagctacgttagtactattggagttgatctcgtaattatcacttttattctctttcgtaattgctatttatggcccaacactcatttctatcttattttcatgaaattaaaaccgtggacatggaa

SEQ ID NO: 138785 - DNA, 328 bp, Glycine max
gaactatcaaactcagctttggtaaaccaaagaatttttatgttcactaccccccaatgaaaaccctcaagtggactaaaccctgggtgctttccacaaaaaggcccccaaaacaacatcatattgaaactatatatgcatgattatctatatcttaatatgcataaaggcattagtgtatcctaaccccaaaaccttaaggactgaaaatcatgagaaatacattaccttaagcaacttgctcagaaaattaaagcaatagactattcaaatacaatgaaaaaaaaaatataccttaactttgagtaccttgcagcaagtccattgg

SEQ ID NO: 138786 - DNA, 256 bp, Glycine max
aaacaactatctttatcaacatgaactgctcatcaccatcttcttaaaaactaaatcccaaaacttgaagcccttcacacctttagaataacctacgataacacacttttttttattttgggttcaagtttaaatctttcatcattggatatatggacaaaagcaggacacccaaatattctcaaattattaaaatcaacagggttacctatccaaactttctttgcaattcccatccaatgatgctcgtggtgat

SEQ ID NO: 138787 - DNA, 311 bp, Glycine max
ttttggttggaaatcaattggttaggacctcctcaggtcgtgggttcctttcattccttatttacttgcgacaatttcgtattgttcagatattgtctggtccaaagacccttctgtataattctttcattgtctttgatcggggattttcttttttctttgttttctcccaatctttgatcgggaattttcttcttttcttttttgttatcttctgacctttgattgggaattttcttcttgggtcaaggtttatggtggtttgaggttttggctcaaaaggcttgtataacagctgaacatgatatatg

SEQ ID NO: 138788 - DNA, 216 bp, Glycine max
aggggagaaggggagggttttagattgaacacacaacccccatttattattataaattttctatttacatcaattgaggtgttagaaagaactaatacttataaatacctcttaaaatactaacttgcatttttttagtttttatccctaaaattagttataattgtgttgtaaaaattgaaatatgaatggtgtttttaagaatgggcttttttt

SEQ ID NO: 138789 - DNA, 310 bp, Glycine max
tctcagctttatttaagaagcgctttttttgaagcacgcgataatcccatccattggcataccatgatgctacgaggaatttctggtaatgcatatggacgaccaatggttaaagattatatgatacatctttttagttcctagacatcatatttatctctacccgaagcccggtgaacatatgctaaagcttatccccataatattgcaaagctcgcttatcgccgtcaaattgattccgagtcgaggtgagggacttactctcatgggacatcaccgacaagcatccagtcaccatccttgtcctact

SEQ ID NO: 138790 - DNA, 255 bp, Glycine max
ttgcctacaaacacacacccataaaaagttagcttgcatgcaaatgcaccaccattatttcatttctcctaaagcaagccagaagccaaccaattttgggcggtgtgtgtttcttttgctaattgcaagtgttatcgtgcaactaattgaaacaaatcacacaccagcgcatattatttttttttaaaacattctacaactacttaaatgcaatgtgcccatcatagtgtatcaagctcaaccaataattaggct

SEQ ID NO: 138791 - DNA, 336 bp, Glycine max
ctttagtgacctatacaaactcagcttcttctatttataacattctttttcaagtatttgttgtctcttaacggatggattcttcactctggttttttgtttgaagtcttgtggccattggagcatttaatgcttgcattaaatgcacgtctcttcttcatgcagagtccatgtttatagttcggattgttaggcacttcaacagaaagtcacttctcccatcaaagtaggtatgcacaagtagagcgctccttttgatgaagatcaacccttctagattgtagacttcatttattcttcatacgagtttgacagatcctagagaatgttttctgc

SEQ ID NO: 138792 - DNA, 284 bp, Glycine max
agcttgagttaatctagcctaatgtgggatcggagtttagtactttaggctatagcatagaacacaaaagcatgattgattagagaaatatccttatatgcatcagcttgtttgttagaaagacccaacactttcacctactgctatcaatcttacttgcatttttattgtttttagcctagacttagtttaattctgttctaaaccttcaattatcaatgtttctttcaacaatgccttctttctgaatttaactatgtttaatactagttccctgagttcga

SEQ ID NO: 138793 - DNA, 307 bp, Glycine max
caaaagcccgcaagaaaaatgcactgttctaccaaagccaccagggccacaacagcaggtggaaacacgaaccaaaaatacaacaagaacccaaacagacgccagaaagaaaacataagagcaaaccacgccgaacaaaacacaaacaaaaagctcaaacgacaccaaacaaaacacaagcacaaggaaacacaataacaaaacacaaggcccaaaaaggagaacaccgcaaaaaccaaaaaaggacaaaagacactccaagaagccagaaaaaaacacaagggaagaaacgccagacaacacacga

SEQ ID NO: 138794 - DNA, 283 bp, Glycine max
agcctataaacttttttattaatgcagaaatcacataatacataccatatatggctgatgcaacaaccactccatcacactgctccatttcaaaaaggtcagctccatcaatgtcaaaacctgtgttgcggccaggtttaattcctctaacaaatctgattggtatattcattattgaagatggagaatgaattcatgtcagtaagaaattacaagaatgcttaattactagcgcagacaactataaccacaaagaacattccttggtgggtatagatgttac

SEQ ID NO: 138795 - DNA, 334 bp, Glycine max
tatacaatactcacgcttacaagacaatttccaaaactttatgttttgtgctgaaatggtaaagtaaggtggctatctcatatttatggtgactctctaaaataacaattatgagaagaccctctaccaccagttcaaacacatacaaagagctttcacatattgttttccctttcgacatttaagtatcctattacttctgatccaagtaagaccattgttagaataatttaacaacattatccttgcttttgagcccctttagagttgaatacactatattgctaaagtttaaacatattccttaacaataattagaagtgattacaacatt

SEQ ID NO: 138796 - DNA, 279 bp, Glycine max
agcttcaccttttttcattattccttttctcactttgccacttcactaatttcaattattttttatttgactttccacactttttcttgcttactttcttagatcttttttctttttttaatcttttctttctttttgcattctagaaatttccaaagattcaaagtcacaaagggtaccccaaagttagcccaaggttgccacaatatattatgtatggtaccaacaaatatcaaaattaaaaatgtggggtacaaaggaaaataatacaatgtatgg

SEQ ID NO: 138797 - DNA, 312 bp, Glycine max
tgagaagaggaagtgtagaatgttgatacttcctgcttttattcggtgaccacagagtggtaccaggaaatatgtcgcgggggtcaagagaccttggggacgtcaagtggggtgctattgcccacaaccaaacttgaccaatcccgacccaacccgggcataatcagtcagtgagaacctgtgatgtacctaatcaggtgagctcctggcagtcaacagataaaaggaacacagaccacaaaacaaggaggcttgtgtggtggctggccaactgtgaattttgattgatatatgggatatggcctatggtaa

SEQ ID NO: 138798 - DNA, 294 bp, Glycine max
  unsure (1)..(294): unsure at all n locations
caggcatgcaagcgcngaagcgctttttacaatgtatcttttaactgccggagaacgaatctcatgacaaggaatatcaggacgtcagagtgtaccaccataattttcatttaatgaaaccaagcttcatccattctctggtcaatacctcattcgagtcaatcctcaaattatacaaatatagtccttctatgcataaatgcctgacaaaatgttgggtgatcgaattatacaaccatctattctatctacctaaatagagtattaagcaaataccacaagtttttttgggtt

SEQ ID NO: 138799 - DNA, 253 bp, Glycine max
gaattttacccaatcaaggaagacgaggccaaacacccaagggaaggaaccaagacagaagcacgaatccctgaacaaaaatccacaaacacgaaagcgagccaggaatcaagaaccaagaaaagaaaccaagaggcaacaaatcaagacgccctcgaggagaagtaagaaaagaataaggcaaaaaccgaacaaaacagccaagagtcacaagagaattaaaccaaaccccctaaagggaccagaaggagga

SEQ ID NO: 138800 - DNA, 330 bp, Glycine max
gacaccttcaatactcagctttagcaacgcgttctttttgttttttcaagacttctaatgctcttaatctctcctcgtctaaatcaactaactcatctgacatcattttccaataatggtcgatcggaatgtccatttgtttttgtactctagctgattgcaaatgtaattcgaccggaagtatagcatcgtgcccataagtcagtctaaatggggtagtattagttgattccctatgagaatttctacatgcccatagaacttgatctaacgttttattccaatcccttggcttttgggcaatgtgtttcttaatcaatttaattacaa

SEQ ID NO: 138801 - DNA, 309 bp, Glycine max
tgtacttgtatcattgttttctttttataggtggcaaggatataccttttaaatacttagggtgtatttatatgattaacatgacttctgatcaacgcataagtaacaatttttctcctatcacatttgttgtctagaaaaatgaaaaattgccttgaaaaacacaaaatggggttcctaattgattcccaaaagtttaattttgatagcatattgtgaatcaattgaaccaaaagtttaaatggttaggttaccagttaagcgtacactggtcacataacaagagattgatcgcataaataaatatgt

SEQ ID NO: 138802 - DNA, 297 bp, Glycine max
acctgcaggacatgcaagcttttcgatttattttatgttctttggggggccacattgtgtttcgtgtatttttattctcgtttcacttactttttatacccccttttgatgtgcttaagccattttatttaagtcatttctcgcttaacctaaaaataaaataaatttccaccgatcgtttgaattgtattatccgttaacttcggttaagatgaattccgaccgttcggtcgtgccgtaacctctttggaaataaaaaaaaagaggttaaattataatataatatttaaaaaacgt

SEQ ID NO: 138803 - DNA, 295 bp, Glycine max
gttgggatttttttttttaatccctttgcagggttggtataagccttttagagaattgatgagttagataaaagttcatgacagacttttctaagagactcagggtcatcaaaatttaccttatcatcgtggtctgattcaaatgcttcagaaattgtgtctaccattagacatgtttacttcttcaccgtgttcatcaaacaaggtgtcggccagatctttccacgtgctcataagcccctttttttatatactaggcttaaagaatttacttctttcttgactatattcaaat

SEQ ID NO: 138804 - DNA, 255 bp, Glycine max
tgccactgcctatggggagggcgttttcaacatcagatcaaaggtttacatgtcaccaaaactgtggtatctcagagtcaatgtaatagaagctcaagatgtgataccgggtgacagaaaccgcctaccggaggtttttgtgaaagctcaagtgagctgccaagtgctgacaaccaagatatgccccagcttaacaaccaccccattctggaacgaagatttgatctttgtagcctgtgagccatttgaggagca

SEQ ID NO: 138805 - DNA, 315 bp, Glycine max
taagctttagtagtcttagatcatagtttattactctaagtataagaggaaagaaatttggtaaagtctcagcaagaatagtttagccaactagaggggttgtggtaaaaaagtatcctaagataataatgagagttaaacttataacagtggtgagaatgagagaggagtctacgagaagtactaccaattgagaggtgaagatccgaccatttgaataactgatttggtagagacctgggagggtaaagccatgagataaataacatggttgcttgggtagaagagtcgaatatctgcagattccttagagca

SEQ ID NO: 138806 - DNA, 280 bp, Glycine max
ggcatgcaaagcttcaactatatattaatgagcaaagcaaatggtggatttttgaaggagatgagatgagggaggcttcaacacgacaatgatgatgactttttgtcgtgcccaattaattatcccattgtacggcacaagaaaaattcactctccacttcttccttttttttctttttttttttgacttttcacatattcagaactcaactagcatcatcattatttcgcgaattgtaaacttacttctcatttaggtgaaatttaaattatttaaatg

SEQ ID NO: 138807 - DNA, 296 bp, Glycine max
tgtgaacaattaatttgtttttatttgtcttatgaaattgaggttaattctaacagaattcttaaagttagagacactcctatgtgttcttgcttgctagtgctatcatgggtttaaattgtggttgccgtcacgattgccgtgagccagaaaacctacattgcgggcaattgcaggaaaatgatgctgatgtggccgcaattgctgtctgtgatgtgattgcggagtgtcaaaatgccttgacattgcggttgcaggccgcaatttaaaaccatgaatgtgtttttagttacttg

SEQ ID NO: 138808 - DNA, 283 bp, Glycine max
agcttgagatttttattgcacatttggaagaaggtatcaaaagcaagaggaacgtgactgcgttcatgtacctccaaatgtacaaacaaatccaaacactgtaagaaggagaagaacatagggttttctatttttctattttaatatattgaaattgcaggggtatgggtcaatatgtaatgacaggtaaaaaaaaaagctgcacccttttgagtttagtgcattgtagaattgttgcttgttcaggtaaaaaataaattcacttaagaacttaaaatgaatt

SEQ ID NO: 138809 - DNA, 282 bp, Glycine max
agcttataagaacttttttgccttaatcatttccaaatatgcatgtgaattaggacgcatcaacaagaatcaagccaaggctattgtcataccctaatttcgtccgggaacctttgctcgatgacatgcgaccattctttggtccttgtgaggtgcttggcacccatcattaggcaatttatgaaattccaggacatgccgaaaaaccaaaaaaatattgatgcacaatccgtaagtttccgtgacacaccggaaatcaaaaggaagcatcgttgcataatt

SEQ ID NO: 138810 - DNA, 316 bp, Glycine max
gcttttttggaccttgaacaggctctttctcctctttcaaaaccatgctatgtgctcgcgactggtccctttcttcccttcgcaacttgagttcactattgctaccccatagagctccgcgaaatttgttccggccatactcttccttgcgagccctcttggtctcttgttcaagggctcttgcggtaattgcattctcttcccgtaacccggcacactccttccgaacgtgtgtagcggccaacttgaacttctccttggcaagttttgcctttcctaactcgcttttgagagcttggacttcttcgtcctcttc

SEQ ID NO: 138811 - DNA, 320 bp, Glycine max
agcttgtactatatgccaggaacctattattttataaatcacaacgcaaaccccattggagtgaagaatagtccaacaaaacgaaaaatgcggcataaaatgacaccatacatagctagctagaccggaccttaaatatagcaatgatacgattctatgcaggcacgcaagcacaaaaaaacgcagccctatagtatacactcactgatcacaccattgttaaaagttaagacaatgccatttacatgtttagttatataccagggccacataacataatatatacctctttggggggattctactatatattacatcaa

SEQ ID NO: 138812 - DNA, 282 bp, Glycine max
gagcttctaaaattattatactgtgattttaatttataaaataattttgatttgccactaggtacttggttagaatacaaacgaagccactcactcacgcgcactgcaatgcgcaatcatagccaacaatccccgggttcaaaacctatcatgtcccttgccttccaaaaagcaaaagaacgaatgagactcgtcacaacatttttgttcatttctctagtagtgcgctaaatagttcaaacgccaatttagaaattacaagggacagagaaagaaacacga

SEQ ID NO: 138813 - DNA, 314 bp, Glycine max
tttaagagtaaagaattgaaggttgtgttatgtgggaaaaacttaattgccccaaagaattcctacgccttcatatatttttagatgttttacccttttttattataaaattattgatttttagaatttcataattaataatttcttaaatatgctattttttaatgtcaactattagtggtgtactagtacttcatctgattttgaatataagcaaaaaaaaaaaaagtggattggtttcaaataaaagtaattatcaactaattatgaaggcagtttggctcaattgattaaacatgttacaaagttattat

SEQ ID NO: 138814 - DNA, 321 bp, Glycine max
actcaagcttaccatgacatatgctggtggttgttgttcatcaaacagggcttgctctcttggtagtacaaatctaaatttgagtaaaaaaaaagaagaaaaaaaatgcagattcatgatgcagtgagtcggtggtgacagaaattccaggctgatccgtatcgtaatgaaatgactacacaggagaaattgggtgaatgaatttggtactgcattggtagatatactagatatgacctggcttttaatgtggtccattttcttttcctggtaaaatttgttaggtcaaagcaaacgtgaactttgccttttcacttaaaa

SEQ ID NO: 138815 - DNA, 279 bp, Glycine max
agctagctcagttataactcctttgtctctctctacgattcacttgctttatctttggttggcgttattttgggaggaggaaaaggaaacacggtgaggcaccactgaaggtgaccgcaataaacgctatcactttaacggtcaacatacaattgcgacgtccgggaccaacattgcattttttttacaaaataaaggacccaattcgcgaattaaattatctggggaccaaatgtgaaattggagttaaaatgggggaccaaaagtgtaattttgcct

SEQ ID NO: 138816 - DNA, 321 bp, Glycine max
  unsure (1)..(321): unsure at all n locations
ctcaagcttattgcatgcaaagaaattcatttttttctaantacagtgagcacaccctgcataagatgtataggtgccaaactgtgcacactgcacactacccacaacaaaataattttcaatccatgtgatgaaaagctatcatcatacagtgaataatgaacttccagcaaataaccatatatagctaccaggggaaactggggtactgcagattgcaatcaatggctccccacattttccatctgcacgagtaggcacccaatacagagccaaataatctccaacatctttaagtaatggtttatattgttctgccat

SEQ ID NO: 138817 - DNA, 278 bp, Glycine max
agctttaccactttttgacgacttgagctaatttagaacatctgaagcaaagggcaatgacataccaataggctgcttcttctgctacacaacctgaaagtgaaagatgttgcctcaatttcaagagtgacattccaagtgtaaccacggaatggccattatcatttgtcaaggtgtatattatatttcattcacaatattttctttcgtagcaaaatggatttaattaaaaaagttaacattataattttaataacctcatgaatttgattataatt

SEQ ID NO: 138818 - DNA, 313 bp, Glycine max
tccatacttcacgaacattatttgaaccatctgtgatttcagcaaccaggctactagtcatgacacctgtacaaataaagggcatttatgataccatgagaacagtacattgtctggtaaaagaaaagaaaaataaactggcatcaaatttcataaggatgaaattatattctttatagttcacattgcataaacgtgaccaagcattttatgactcccatctggcatggaacacatggttctgtaattaaggttccagctaacaggtaggacaattattgttgtgtgtgtgtgtgtcaatagcttatagtgg

SEQ ID NO: 138819 - DNA, 280 bp, Glycine max
  unsure (1)..(280): unsure at all n locations
agctttgtccattttaatcacttaaaaaccgntttaaggtccaacgccttaaacggtcctcttcgctttttatttggttaaacgtggactttcgaaagcataaaatcaacatgtaaccttgctgttactttcaaaaaatacgagatcattaatggtccaataccttaatgtttctctcctttcaaaagaatcaaaagatcgtttaaatggtccaacgccttaaacgacttttgttcggtaaaaacatatcttgcaaaaaagggataaaaacaacttaatc

SEQ ID NO: 138820 - DNA, 314 bp, Glycine max
tatatcaagtaagttatgctattctttacataaactattagttaatcaacaatttatatatttgttatcatcaaaactatgggtattttggatcatccagtcaaagcctgacatgagaattgtccagagatgcaacaacactagactcattttaaaaaaaaaattatagttttgtaataatttttttctatattgtttttataaataaattaaagtttctatttattttatatctcattttttattcaaattaaaatgtgacatgttattaaaaggtatcattcttttaattaattttcctagcattttacaat

SEQ ID NO: 138821 - DNA, 315 bp, Glycine max
tctactgatgtggcagggcagttctctccttcggcttgttgtcccacccgcgagccttggcctctgttcttcctttcggagatacttttccttatgtcagtttgcgtacgtttatagcctaacccaaacttcccgtgggttcctctggtgcttaccaagttggttctgctgccgttggtcttgcccaaacccattatgggcttgtagccgtaccccaacatcacccgcgcgaccatcattgtcgtattggataagcaaggctgcccagagagggaatctatagaggcaatgcttactacctcaaaagattggaaa

SEQ ID NO: 138822 - DNA, 270 bp, Glycine max
agggggtaatctcattatcagaccctccgggcagatgcttggcaatataggaccacctgcgtagggaaatgaagaataatttgtaacagacagggacagaaatctgaatagtactggattagatctgttgaggaataatatatatcaatcatcatttattctaaacatctcagtagcacattggggcttttatcttctctcaatgacggtataaaaccaatgatacttatatagcgatcctcgaattctttagacgtggaaaagcatatt

SEQ ID NO: 138823 - DNA, 270 bp, Glycine max
atttttacacttttttagtaatgactcactaacctaaaattaaaataacttaatgccattaacctagggaattaaaaaaaaaacttaatggctgagtgtaactgaaatagtggcaaccaaaagtcacccccaacagccaacaagtcagccaccatttggtctcccagagggctaatgcctaggttgccaattgggcccttattacaacttgaactaaacctactaaagcctttttagttgattaacccaaaacatatttttggtcagcca

SEQ ID NO: 138824 - DNA, 320 bp, Glycine max
aatactcaagcctgagcctaacctttttattttttttgacagttcaagacagactttatatatgccaggtcgtaggcctctgtaagccggcctggtctattcccacccctaattctactccactacacaagctctggtgttctaacaccgctgcacatatgaataaccaaaagaattcccaatgtttctcatccaggtccatgtatgaaacaaaaaatcctggaacgaggctcccctgaatacaatattgtctctcctggttgtagtccaacaagaaatgttgcctgaaatgctgcagcagaaccgaattgaggtccaac

SEQ ID NO: 138825 - DNA, 275 bp, Glycine max
agcttgttcagatttttttgcggtgttgcgccccttattgatgctctagctgcttatcctgtattgagcaaggcaagtgtgacttgaattaccttcctttaatttatttgtctttaaaatatatgcatgaaaatgagaaaattaaggtacattcactagtgatttgaattgaaatacctctttaacacatttgcaattatacatttttaccttctcactttacacactttctcattaaaaagaacttcccagaaccattttgcatagttaaacag

SEQ ID NO: 138826 - DNA, 269 bp, Glycine max
tatgcctatgcgctggaatattaggtttttaaacaaatattataacccttaaccacaggaagctgtatgccttgtacatggataaagaataccccaaaaagaatatgagataaaactactacattccaatcaggattttttgtatccaagagaacaaggaaaatatcaaacctgcttaataaaggactagagatagaggaagtatatatcaattattaatccctcacttcattattcaatttttaataacccgttagaacaagaatccc

SEQ ID NO: 138827 - DNA, 323 bp, Glycine max
ctcagcttaatatttctcttttgccatttatttttttagtcatacaaccattatgccaatttgagaatcccaaaccgaaaaagtaatcaaatattagaattgacggagtgaaaatagaaaggaaaaaaaagagtttgaaaaaaaaaagagcaacaaaagaagcttatcacaaccaccaccacccacaaccaccaccgaacaccaccacccatatggaaaaagttagtcatagattaaggaaataaaaaattaaaaggaaataaaaaaagccacggggcctaaagtaaacaacaaagtattcaaaatctattgaaaatatagag

SEQ ID NO: 138828 - DNA, 277 bp, Glycine max
agctgcttaatatcttctagttagctggatctccgaacttcaatgaggtccttcaatggtgattttcatccatggagatgtagcggaaaataaaggagaagaagtgagaggaggcgtcctttactaaagaataagccatggaaggagaagcttcaccaccaagaaagtgtcttggataataagcttaaagaggaagcttcaatggaagaaatgaatgagagagaggggggtgaattcgaagtgcgtcttacaaggtttacggtcattaaagttatga

SEQ ID NO: 138829 - DNA, 319 bp, Glycine max
aattccccctcagcttggccatgtcccactctttttcttttgaacatccctttttccctctttcaaattgaatctggattctatctatgattaaaccctgaaatggttaaaaatttaataagattttaaaaccataataattggtcaccagattccaaatgatagaaacttcaaaattgatatgagtaaatgcatgtttggtttgaccttttcagaattgattataattacataattaattttgaatatattttaatatgttttatttatcaagaagaattcagaattgattctaaattaaaataactttgaatagttt

SEQ ID NO: 138830 - DNA, 282 bp, Glycine max
  unsure (1)..(282): unsure at all n locations
agctttgatnaatttattataaaacaaaaaaacccgtccatattgttgaaactctcagtccaaattcatgacagatttttcattttactaaaggtcattaaatttattttatttgtaacttttgctaggaaaatccaatttgggtgaaatttaaggctaactctatgttttaacatgcaaagaactcattttttcatcaaaagctcaagcaaaatatctcagcacacagattcgggacatgaaaacaagctcaaaaatttcaaagccacaatatgttcaagg

SEQ ID NO: 138831 - DNA, 315 bp, Glycine max
tatgcgcatatttccttacaaacgtttttttgcacaagacattctattaaccgaaaaaatgcacccatatacaatcaaggcagcttcgttacctagattatttacacgtacttccaaggtgtatttgttacttacatcacacacatctccttggctaaattcacatacatgcatactcaaagcattttggggtaccaaaaattgcacatgtgcacatcttggtatttctaatacctatacatacacaaacttcatgatgaatcttgactatctacacaataaggtgctacatttcatgctcttttcaagtttttg

SEQ ID NO: 138832 - DNA, 284 bp, Glycine max
agcttggaaatttttttaagattgagtgttaaattaggtttccacactattaaactacttggacaaaagtaaaatactcaaagctgtaaaatgtggacaaatattcaagataaaagcgttggggagtttcctactgaattttctcttgccgtataaaaggatttttctctatttaatgttatcctagtgttcttacactgagaaaatgctcagaccatgattcctcacattaatgagcctaactctcttagcttttggtcttgattcctcaacaaactcgttat

SEQ ID NO: 138833 - DNA, 318 bp, Glycine max
actcagcttctatgatcaggggttttattgcagttgaaagtcatagggtttgttgatattaaacatccaatcagttgcaagatttatcttccatttaataatttagcaaaagtatctataaatcttgcagagtaatttcattaattacatttctgaaacaaaatattgatcaagaggagtttatgcataccaatgacctagagcagtctctgtgctggggtgttgtcagctcagccaatattccactgaaccttcacaacctagatttaaaagagagcaatatattaggttcaaaataatcgcgacaaaggtacgaac

SEQ ID NO: 138834 - DNA, 281 bp, Glycine max
agcttgtatagtttctccaatttatggttattttttattaaaatgtgtaaataaatcttgttttatggttaacgttgtctctagaacatttccattagatttaaagatgaaatctgtgcattttcaggtgaaaacaaaggctaagttttgaattgcaaaaagtagtagttgggctaagctcaatagtttggctaagcacatatccatcactaagcgcagcttcaacacacttagcgcaaaggagaatctggcaaagcatcagcatcaaagccgcgcgctaa

SEQ ID NO: 138835 - DNA, 311 bp, Glycine max
tgaagaggatgctttaatggatttataagaaagagagaaggggggagcacgaaattgaaggaataaaagagggagagaagtggaactttgaagtgtgtctcataagactttcattcatcaaagttacaacaagtgttacacatgcttctatttatagactaggtagcttccttcaaaagctttcttgagaaaacttccttgagaagcttctttgagaaaacttccttgagaagctagagcttagctacacacacccctctcataactaagctcaccttcttgagaagcttccttaagaagattcctaaaga

SEQ ID NO: 138836 - DNA, 279 bp, Glycine max
agcttacaaatttattttatgtccaagtccataaacgaaataaaataaaatatggacaagataagataagattggatgaaataaaatctgaatgaaatgaaatctagatgaaataaaatctggataagataagatttgataaaataaaattgtctgctctcttcaagtccaagcccaattgtttataattcacctgaaattaaattaaaaacacaaaattagtcaagtaggcccaaatgataaaactgcataaagagataggagaaaattaagactaat

SEQ ID NO: 138837 - DNA, 313 bp, Glycine max
  unsure (1)..(313): unsure at all n locations
ntggagtttccaagtgcctattcgtcttcttcttttgtccagtcttcttctggcttcaattcattagtgggctttccttctgtgtccaacatcttgggatgttcccagcctttgatgacaactttccaggttctgctatccagtgatttgaggaaggccaccatccttgctttccagtattcatagttggttccatccagaattggtggtctgttcactggtcctccttctttctccatgttcatcagaatttatctccctagatctcactcagtgatttagagtgcccgctctgataccaattgaaattctg

SEQ ID NO: 138838 - DNA, 280 bp, Glycine max
agcttcggaagtattgtgatgaggtacaagccctaaaggcagagcttgaaagagcccggtagtcgaagagaagttcaagtccatagccatcaaagtctaaaaagagtatgatgaacttagggacgtcaatatggccaccgctgatgccttggaacgagaaaccaagaaggcccaaaaggaagaacacgtgccaccaaagttttgaggggctttatagggcagcaatagtaagctcaagctccgaagaggtgaaaggaatcatcacgggtcaaaggcatga

SEQ ID NO: 138839 - DNA, 311 bp, Glycine max
tcaacttcaacatcttcttttatctattcaaagattccagctaatggcttttcagctattatccattcatgatcaataaacctcattccaagtttcttgagatgtctttcggtgatctcactagatgctttggtaaagtccatactctcattagagacatcaacattgaagtagtcaatgaatgttgaagcaagcacaacataaagaaattcataatccaccaggtgatgactctttagtataatgtccttaatcaacaatacccagttcatcttgatacccgatttcataccataaacaatatgtaaatc

SEQ ID NO: 138840 - DNA, 285 bp, Glycine max
  unsure (1)..(285): unsure at all n locations
ggctttaacctttttttcnctttttttctncagattggggagccaatccaatccttgtgttcggactctcagccacttatgatagccgccgatgatcccattactgcttcccctaagctctttgtcctttcttcacgccgcatcccatgccttgcgaactccttggagtacctttgcattggggtcactgaaaccccgtgtaatgaaaggcgtgatgcttttgtctaatggcactcctctcatggggtagccaagctgtcttatggcgaggacgggattataatt

SEQ ID NO: 138841 - DNA, 318 bp, Glycine max
tcatgatgatgaatcaagttgtttcaagtagttttgataatgacaaagatgatgacaaaaagcccacagaatgattccaagattgagtcaacaagttcaagatcaagtttaatttcaaagtttcatgaagaaaagatgaattcaagtttcaagagaagaaatcaagaagacttcacaagggaagtattgaaaagatttttcaaaaacaaacatagcacaattttgttttcaaaagagtttttctcaaaattttctaagttaccagagtttttactctccggtaatcgattaccaatttcctgtaatccattacctgtg

SEQ ID NO: 138842 - DNA, 252 bp, Glycine max
atgggactgtggaattgttggggaaccggtacgaacacccgaatgggttttaggccaataacaacggttggcataatctagcctgataaatgcccacggaaatcgtgggaagtatgggttaggctttaagccccactcacgtccgatgtaaaagaaaagcattgcgggaaggaagagccattatcaaagctcgcggttgatacaagaaggtgaaggaagcccgccctgccacataagtagaagctttataag

SEQ ID NO: 138843 - DNA, 309 bp, Glycine max
tgcttgaggtgcttctggtattttgtcctccagtagttcttaatctcattatcagtccttccgggtagatgcttggcaattttggaccacctgcgttgggaattgatgaataatttgtaacagacagtgacagatatctgaatagtactgtattagttttgttgagtaataatatatatcaatcatcatttattctaaacatctcattagcacatttttttttttatcttttctctatgacgttataaatccaattatacttatatttttttcttttttttctttagatgttgaatagcatattagttg

SEQ ID NO: 138844 - DNA, 256 bp, Glycine max
tagttcttcttctatgcctgttgaggtctggtggaacaaagagtgtggcgtcttcgttgaataaacaatttccagcaaagaatttatatcacaatacgcgtttttttttgtcctgttgccatgaaaccatattatgtcccgtaagaacaatgacgtacgatcaaaattaaaaaataaatgcattattagtatgttttgatagggggtgagaaatccaaaatcatggcggctggaaaaatttatatcaaacttattg

SEQ ID NO: 138845 - DNA, 311 bp, Glycine max
taggcctaccattgctatttttattgaaactagagtgaaaaataagaatgctaagaaaataagagataagcttaaactacctcacaactacctggacaattacaagtggcatgataatgggaggttgtggattgaatgggataatagtaaaattgatgtgaggcatgttaagtgttctagccaatatgtgcacgtgggtgtgtataacttgcagggggagttcaaattctggcttactgcagtgtatgccttaaataagttggatagaaggaaagttctgtggaaagatttggaggctatccataaacatc

SEQ ID NO: 138846 - DNA, 280 bp, Glycine max
agcttaataaatatttttaatcaatgtcttcaattgctctatatttttcccattttaaatataattatttttgttatgcttctttattaaaaggggtgtattccatgaatgacattagagtaaacttatagaataagagatatattattttcgttgagattttaaatataaaaaattatacgataaaattaaataaaatgtattttagttgaagttaaatccaaacttatatgacaaataatattaacttattttacgtgagattctcaaattttttaaa

SEQ ID NO: 138847 - DNA, 318 bp, Glycine max
gcttgcaagcctctcattaaaaaaatttgtttttgggggtctgttcgagcacttgcacgcggatatgaagtaataatggcgcttgctttctcttcacaccagttgctttcttggcatggttcccatttgtttcagagtttcaaactagaatgcttttcaaccaagcttttagcagaggtttgcagatttctcgtattcttggtggacaaagtaatgaacgctcctctaaccacaaagagtgacactgaaatttcattttcatcgattatcttttatcaaacgtttcgaccatgtgtcgttacattattttaagaggtt

SEQ ID NO: 138848 - DNA, 303 bp, Glycine max
agctttgaacaattttcttggtcttaatttaactgtctatgggcttggcggccacgctcaacaaaagtactatcgacacctactgtatgttgatttgaccaaggctgttatgggaatcgttgcgactaatcctttcaaaacacttatttgatacaattctgaaagggctggttagccatagtgtccataatcgaacatcacttcttctattcataaagccatacgtccattttttcctttgaaatgcggatcaattccatgattgctatggcttgaacttaatatcacgaaatttattctaaa

SEQ ID NO: 138849 - DNA, 296 bp, Glycine max
gatgcagttttttattttttacctcatgcgctcctttaatgactatagcatcatttctggcgcctaactgctgggagttggaacccatcttcttcattaaatttttggcttcaacgggagacatgtcttcaaaggctccaccactggcagcgtctatcatacttctttccatattactgagtccttcataaaaatattggagaagaagctgctccgaaaactgatggtgagggcaactggctcatagtattttgaatcactgccaatattcacacaagcactcttccactgagttg

SEQ ID NO: 138850 - DNA, 281 bp, Glycine max
agcttactcatattttctattaattcgcgagtttcttatggattaagaatctgtttattagcaagagtaatttggaaaaaaaaatgaaaaagtattgggtgtacaagaataaatcactgggtgcacaaagaaattccgcttccatgtcaagccctcttctttcttgctagcccagtccaaatactccaaaaaaaattctttaatatcttaaaaaataaaaatatatttattttgttttatctagtttttctttgtcaattatatgtttgtggtatgaaatc

SEQ ID NO: 138851 - DNA, 317 bp, Glycine max
ttgggtaagactatacccttggtttctttaattttaactctaaaatctgagcatgataaaacccttggaaatatcaaatttcaggattttttggactttactaatttgatcatggtgaatggtttgtgacagtgaatgcgaatgagtgctttgtgacaagaatgcaagaaatgtcactggattatcatttcacagtagagcaagaagttgggtcagccactcatgctttctttggtttcaatggtaactcttttagcacaatcttccaacaaatatgttgaactgtatcacccgcgagataataagataatgtagca

SEQ ID NO: 138852 - DNA, 287 bp, Glycine max
  unsure (1)..(287): unsure at all n locations
agcttctaacgatgttgttgaatctgnctacctcagaccttttccattctcctaggcaggtcacgcaaagacttggctctaattacatccaaacaaaagcctcaacacttaggaagtggtggaggaaaaatgcattgcaaggttcttttctccatctagatttatctgtgcaaaatctgccattgctactttttcctaagggtctgatgaacctttttgtgaaacatgggagagattcaaagctttgttgcagaggtgcccaaaccatagttttgatgatgctgcaa

SEQ ID NO: 138853 - DNA, 313 bp, Glycine max
  unsure (1)..(313): unsure at all n locations
gcttncatcactggcgaccctaacatttttgtcttcccgatagacagcccgatttcaactgatgcgcgatgcatccaattatgcattgggggctgtccttgctcaaaagaatgacaagctgcctcgggtgaactaacacccttatagaactttgtatgttgcccaaacaaattacactaccacaaagaaggagctattaatgatagtttatgctcttgagaaatttcgttcatatttgcaaggtactcatgcaaatgtttataccgaccatgcgagtctgaagtatttgttggagaacgctaaatccaagcct

SEQ ID NO: 138854 - DNA, 273 bp, Glycine max
caatttttttgcgaaagtccccccacagcattaagatatgttcccgccatctcaaacaaacaaatcaaacgtacacaagacaattaaaggcgctgtttgaatacctcacccacatcagtgaatcacacaataatggctctcctctaatgaaacactctcgccttctaccactctaataccccttgagatcttaggcaattcaagagaatatggccccaacaaagaacaacccaccaacatgtgtaaagggaaagctagagagacaaggaaaag

SEQ ID NO: 138855 - DNA, 311 bp, Glycine max
cttctattaagctgaaccattttttctataaacacaagttgagtggtattcagaaaattagagtttatctcttttatcttagtgagagtgattctcctaaattcttgagtgattcaagaacaccctggctgtatcaaaggactttcacaacctttgtgtgttgccctcgctggaaagagtgattctttccttcctatcatttccacccttgttctttcaaaccacaatttcagaaaatccacctctgcccaaaaattatctcgtgaccataactcccattttacacacacaaattaagtgattcttgagcc

SEQ ID NO: 138856 - DNA, 315 bp, Glycine max
cttcctcgtgggttctttgtttttgttttctcaagaggcttctttgacaagctacatccttatctatccacccctctattaactaaattaacttccttaataataattacggatgaaaataacgcatcaaataatctaacatcaaacataattactaataatatatagatatatatatcagggtgttacacatcatatattgagacgctcgaaattgaacaatggaagctctcgaaaaatataaaattgtcataaattttcacacggatgtccgatcaggcacatcatatatcgagacgctcgaaattaaaaaaa

SEQ ID NO: 138857 - DNA, 278 bp, Glycine max
agcttcccagttatgtgaaagctaaatcttctgttggatattccttgtaggtaattgacgtaagtatctttttatctattaaataatgttatgagcgttcactgtgctattaaaacttcactctaccatgctttttccttgatcacgcaaatgcatgtgtttttaggatcattcaacagtggaaactggtctgattcttaaaactcgataggacagggctagtttgtcgtattttcaccaggaattggggtacggcaacctacctggtgtatgcttgc

SEQ ID NO: 138858 - DNA, 324 bp, Glycine max
ctcatgctttctagtgattggattttttttttgatccatcacaaaaaacaaaaatgtgctatatcttttcattctcttctccctttgccaaaaagaaatcgacaaggactaaaccgcctggaaattcttttttgtggtctgtcttctcccttttccaaaagaacaaaggactaatcgcctgaattcttttgtgtctcccttctcccttttcaaagaattcaaaatgacacagtctgagaattcttttgattcttccctttcccttaaacaaaagatttctaaggactaaccgcctgagatatcttttgtttccccttcacaaac

SEQ ID NO: 138859 - DNA, 281 bp, Glycine max
agcttgaagaatttttttcaaacgggtgggcatataaaaggaagcacgataactgcctattaaaggaagaaagcgctcctcgtgatggcgcgtttaacctgcaaacgcaagtcgtaggctccaatggcatttccctgcttcctgcaactgcagcagtctgttgcagcactgtgcaccctgtcacctgcatagctaaaacgccagtttgactggcgtttttggcctccatgcacaacgcgccagtggatgttgcacgtcccactccacgtaagtagaaggcg

SEQ ID NO: 138860 - DNA, 326 bp, Glycine max
tactcagcctttcaaacgaaggccactatatttgtatattcccccgaaaggaggtgcttgtttcaacaacttgcaacacagaattcatgtagcacgtgcttacaatatagtttaaccacctcgaccccaaacgaaaacacaatttttcccctcaaatctttggaggaaacagtgcactttagatttccgcaaaatccaatccaacaatcccagagaccaatctcctcctcttgatcaatctctggccaatgcttttattcccagtggcaccacctgccgcccccaatgagggcttacacatgacaacttggtcaaaatcagggtca

SEQ ID NO: 138861 - DNA, 242 bp, Glycine max
taggaataccaattcgcagccatccataaacactctatgcgtaagaattagaccccctgtatgagcactctgaatcagatctatggtcaaacaatcctttggtacacgcaatcatctctccagaaactataaattaaatgacgcaaatttaaatgaacgaaacatatggggactaaataactaaaaactaaattgttcatgatttgccgaatttatcacaaagcagaattcaaacatcctac

SEQ ID NO: 138862 - DNA, 319 bp, Glycine max
agcttgtttaagatgtaaagccactgtttgtgataacacctctactttctttaacttggatgattacaagtgtttgcaaactaaatttgataatttcaaaaaggatcactatgctgaatgtataaaaatgcaaactgagttatcctactttaaagatttatttggaaaattaaacaaaggaaagagtgatcttaatcacatgcttaatgtgcaaaagcatactacagataaaaccgccttggggtataacaagcaaacctccttttcagagaaaactcagtttgtatcctcaaaaggggtaaacccaaacaaggtcact

SEQ ID NO: 138863 - DNA, 317 bp, Glycine max
caatctaagcttggatgaggaagtgtgtatttgaaacttcctgcttttattgttgaccacagagtggtacctggagatatgtcgcgggggtcatgagaccttggggacgtcaggtggggtgctattgcccaaaaccaagcttgaccaatctcgacccaacccgggcatagtcggtcagtgagaacctgtgatgtacctaagcaggcgagctcctggcagtcaacagataaaaggaacaaagaccacaatgcaaggaggcttgtggtggctggccagctgtgaaacttgattgatatgtgagatatggtctcaggtaa

SEQ ID NO: 138864 - DNA, 309 bp, Glycine max
tctacttatgtggcatggcggtcttccttcactttcttgtctcaactgcgagctttggccactgcttttccttcccgcgatgcttctcttcatatctgcctcagtgggcttatagcctaaaccatacttcccacgatttcctttggcatttatcaggctagttatgtcgccgttgtctttgcccaaacccattccgggttcgtaaccgcttcccaacataactcgggccatcattactgctgcatcggacaggcaaggctgcccataaaaggaatccacggaggaaatgcttaccacctcgaaaaactg

SEQ ID NO: 138865 - DNA, 280 bp, Glycine max
agcttaggaacccaaacttttattttcaatacaagaaaacatattcatgactaggaacccaaaatttggttttaaaattagaaaagcatgaaaatagggacttgcttgtaagaattcgggctgccccatgattggtactttgcacctaagtaacatgggaaatgcttttcaatggtatgtagatatatgtgtaaatataaggggcataaaattcctcgccaagtatgaataattgttttcctaaatgaatgtatgatggcgtggaatgtttttttgaatg

SEQ ID NO: 138866 - DNA, 316 bp, Glycine max
tcatggatgcctactccggattctattttttcagaatgcatcctctagccgaggagaaaatgaaattcattactgaagatgccaacttttgctacagggtcatgccatttggcctaaaaaatgtaggcacaacataccaacgactaatggaccgagtcttcaaacaaaaaatcagacgaaacgtcgaggtatatgtggacgacatggtcatcaagtctcaaagcataccctaatacgtggcagacctagaagaagtcttcaaggaattatgaaaatacgacatgcacctcaaccataaaaaatgtactttcggggg

SEQ ID NO: 138867 - DNA, 279 bp, Glycine max
agctttagatgatgtttaattgaataaatattgcattaatcttaaaaagtttttaaggtttaatgaatactctgatattgatgatcttgatttattttcaaaattgaaagtactaagagaagttttaagaaaagaaattagcacatcaatagaagtattgagttatattaaaactttagatttttttccaaatgtttacattgcatatataattttattgacaatccctgtaacaattgctactgctgagagaagtttttcaaaattaaaattgtttaa

SEQ ID NO: 138868 - DNA, 316 bp, Glycine max
  unsure (1)..(316): unsure at all n locations
ctgggggctctggggananntttttttttttgcnncngnnagnttcagggccttaatgaatctcgttctggttcgttctcaaaagtcaaaatcctatttgcgtgtttggattactttattttgaaaaagataatcactgttttttttttcttcctgagcatcgcgttatgacattattatcagcttttgagctttagttcttctgaatttcttcttctttgtacgattagcgaattgaaaattcttctgaaacaaaatcaacaaattaaccgcagctcttattatcagtctccgtcaacgtttttgccaaatttgg

SEQ ID NO: 138869 - DNA, 279 bp, Glycine max
cttaagaattttttaaaaagaattaacatatcgggaggacaataagaacctgctgagataaagacttgaccagatgtgtcggccaaacaaggaacgtgtgaagtgcctgcccacactaaggaaacctcatcagtgggtacaggaactggagcatctgcatctgtaacctactccacactaagctttactaggccaggcaacaaaggagtgttatgaaaaacagtggatccctcataaactcttcccatggcaaccaggcgggcaggatctgcttctatg

SEQ ID NO: 138870 - DNA, 332 bp, Glycine max
  unsure (1)..(332): unsure at all n locations
actattgaatactcaccctntatgtgttgtcatgttgagtgttttttaatctgagtgtctaatccttatccaaaggcagctttccccttctctctctctttctctgtactatatatatatacgtgttaataaaaagctaagtgctgagtgtgacaattttctccactcattcaaattcaagttctggagtatttcaaatcctcaagcaatgtagtcctctatttttaaacacattcaaattacacatcaagatctttaaatcaaactattataaaactcttaaactcacactaacatagaatcacatggacttaactaaaaatttacagaat

SEQ ID NO: 138871 - DNA, 249 bp, Glycine max
ctgggagcttcaaagagggcccttaacggcgaactcccaccatggagatgcaggggaagacaaaagaaaataagtgacaggaagcgccatccattaaggaaaaagccatggaagaaagagcttcaccaccaagatgagcctcggataaaaagcttggaaaggatgcttcaatggaggaaaagaaagagggagataaagagagagggggggagcacgaaactgaaagaaaaaaagaggcatagaagggga

SEQ ID NO: 138872 - DNA, 317 bp, Glycine max
tatattggaaatcaaagtcctttgattattaaaggattgagaactgatggaggtggtgaatacacctcaaaagaattcctagaattttgtgatgaagcagaaattgtacatgagttctcaccaccctacactccacaacacaatggggcaacagaatggaagaatagaacaattatgaacatgattaggagcatgctcaaatgcaaggatctgccacaaaacttggggagtgaagctggttccactgctgtgtatgtgctgaatagaagtccttcaaagagactgaatggtgtgactacagaagaagcttggtcagg

SEQ ID NO: 138873 - DNA, 287 bp, Glycine max
agcttgtaggcctatgtttttcttaataaagggattcccttacttcttggaagatgaatggcaccggaatggagaaggaagagagagaggagacgccacttcaaggagaagatgagtctagaagaagctcaccaccatacgaggccatggataagagcttggaggaaaaagaagatgaatgaagggagaagaagagaagagcacgaaattttgtgctctaaaagagctctgaaatctgaagtttaattttcaaatgatcaaagttgaaaaaatgcacacacatgacc

SEQ ID NO: 138874 - DNA, 409 bp, Glycine max
tcaatcatatattggtgttgaatcattttataaacatcaggcagagaaaaaatgatcatgctcgcaacgctaattatacaatactcaccttggacaaggaggattaggaacctttttttaaaaatttttgcctctacaaacctacatccccaccatattttgaatctcaaaacgactcttaacaattttattattgcaaggagttctggctgatggaagagagattgctattaagagattatatttcaacaaccgacatagagcagcagatttcttcaacgaagtcaacataattagcagtgtggaacacaaaaatctagtcagactcttaggatgcaattgttcaagacctgaaagccttcttatatatgaatatctacctaacagaagtctagatcgcttcatattt

SEQ ID NO: 138875 - DNA, 121 bp, Glycine max
cccaagcctggtccatggccacgactcctactgagcccgctaccaaaaaaggccaacaagctccagcaacccatacattaaaacaggccgcaacatgagaccaccaaatcattactataag

SEQ ID NO: 138876 - DNA, 314 bp, Glycine max
  unsure (1)..(314): unsure at all n locations
ctcangcttgtgggaatacgtcagggatgtttgagagagtacgtcttaatttctgaggctgcaatggattttgaagcggtggccagagcacgggttgggtgaggatgtgcttaaaggaatgtttgttgatgggttgagggaggagtttcgtgaatgggttctcatgcaaaagcctggttcgttgaatgatgccttgaaattggctttagagtttgagaaagtgtggagggttaggggaaaggagggagtgggtcccacttgagaagttaaggatgtgttggggaaggatcttattgtggggtcgtgttctgagg

SEQ ID NO: 138877 - DNA, 268 bp, Glycine max
cgggccaccgttattagggctcccacaaacaaacttcctatgaaaatatcaaatccaattgcagggcacagaaggctacttatcttagcatttctttaattacaaaatttatgtaataaatttttgattatttttttataaatattatacatttctcttcattgaaaaataaaattttatctttcatggtttcttcaaaatcacgctcctaaacatactttaaaatgatgtaaatttataaaatgccttaatcaaacaccaactgtta

SEQ ID NO: 138878 - DNA, 282 bp, Glycine max
agcttctgaccttttttaaagatggtttgaatcatggggctttcaagatgggtgcaggatctcaaggcaattcgcaggctgagaagtccaatatggggccttatgataaaaaaagacctagtaatgtctctggaaaaccaaatggaaagaggaagaggaagcaggtggcagaatccagtgaaggttctgatactatgagcagcaatgattctgaagaagatatagttgctggcaaggatggtaattctagtgtagaaaaccattcatctccaagagaagggc

SEQ ID NO: 138879 - DNA, 313 bp, Glycine max
tgccaactccttctgagatgttacccgctcatgtattatttatgccttcaacaaatgcttaattcgcaaaggtcaatacaaacacggaagctaattcattctcattagtcaatcctaaatttaaagcttatctcaataatttttaaaactaaacactttaagtgttatattattcagataatatggaaatgcgtaatgattaaaatgcatattcaggccaataggcatgccatgcgtgtcatcctagagattaatcatgtcaaagcttttatgtggatcaagccaaatcttaaagcatagtctatcataaaca

SEQ ID NO: 138880 - DNA, 281 bp, Glycine max
agcttgtgcgatttatatcactcccgcattttatctctagcatgcattctttctttctttacccactcctcacgtttggttttttaaggaaaaacaccataactaaacgcgccacaaggcatccctatcgcaccagatccaaatctataacgatgggtgatcaagaggagacacaggaacagatgaaagccgacatgtctgctctgaaagaacagatggcttccatgatgaaggccatgttaggaatgaggcagctcatggagaaaaacgtggccaccgct

SEQ ID NO: 138881 - DNA, 316 bp, Glycine max
ttgcggatttggtctttgttcatttgataggatcgatgtgggtctgaaaaaaggcaaatttagtcatcctgcttggacgaatgagaaaactggggcaaatgaatagggtgaggatgaaggataagcctgtgctgtgactgccattccaatacagccaagtttcccaccaacccaacaatgtcattactcatccaataacaaaccttctccttacccaccgcccagttatccacaaaggccatccctaaaatcaaccacaaagcctacctaccgcacttccaatgacaaacaccacctttagcgtaaaccaaaacac

SEQ ID NO: 138882 - DNA, 308 bp, Glycine max
tttacactattaaagtgtttttataattattcaccctctatatacctaatgtatttactatagacgcaatcatatatgcgataaaactttataattcggaaaacgattgaaattaatcttaattagtttgatctttcggtaattttctatattttaaatctcaatttcaatctactatatttgtgatgaatgacgttcctttaacccgtataataaatgtgggtttttgttgtttggtataaaatataatgtatattcacggatatgaattctctggagttcaaatattaaactgcaccgggtgcagt

SEQ ID NO: 138883 - DNA, 313 bp, Glycine max
ctgtctctacagaatattaatctttcaacgagcttcttcaatgtagataatacattgcagtgatcaagaataattatgaaccaatcaatcaagaagtataaattgaaaattgatcccacattctaaaaatggtcatctcaatggcttcaaaaaaatttcccaaaagaaatagaaagtacaaaatcatacataaaagcttagaagcaaagtatgagggaaatatcttacttttgatatccagtgtccacacctttgctggggatgaaccaagctcttcatctccctgagtgttataccaattggcactttcttt

SEQ ID NO: 138884 - DNA, 282 bp, Glycine max
agcttgcctaattattctgaaattgttagaaaatgagtattaaacacacaaaatgagaatactaagtatttattacctatacttaacagaaaatacttttaacactacaaaataaccataaattgggagagtttgatacaatttatacaagttttatacacaaaagttagtcattttcaccgactaacaaccacacccatatgagcaatgtgctcatgaaaaactttaggtatcaaaccttccgtaagggggtcagctagtatattattaggccttaaatgg

SEQ ID NO: 138885 - DNA, 332 bp, Glycine max
gaaacaaacaatactcaagcttctacttatgtggcaaggcgggcttttcttacttacttgacaccaacgccagctttgaccactgctctttcttcccgcgaagcttatgttcataaccgcctgaatgggcttatatccaaaaccatacttcccacgatatcctatggcgtttatcaagctagttatgacgacgatgtccttgcctaaacccataccgggttcagaaccgttccctaacaaaactcgggccatcattaccgctgcatctgacaaacaaagctgcccagagaaggagtccacggaggaaatgctgaccacctcaaaagactgga

SEQ ID NO: 138886 - DNA, 249 bp, Glycine max
agcttccttttagttttttcacgtttaaaaccaaactcgatggtggcgcgagcctttgacggtacttggcgggaagtgatgggggaaatcgacattcccattcagataggcccccacacttgcaacgtggtgtttcaagtaatggatataaatcccgcctatagctgcctcttgggaagaccatggattcatgccctgggagtggcccattcaacgcctcaccaaaaaatgaagattccaatcttgagg

SEQ ID NO: 138887 - DNA, 310 bp, Glycine max
tgcatgatttacatctccccctttcttaaacaaattcttcttgatatcatcaaaatcttcatgatcccgactcgttggtggaggatgcatgaatgacaatcaattcatggggctccgaataaaaatggagaaaggaggataggctaaaagcgctaggcaaatcaattcccgggtctcccgacttgttggtggaggatgaattaaagacaatcaacatatggggctcctaataaaaatggaaaaaggaggataggagaatagcgctaggcaaatcaactaccgagggtgcaaacttcatgtcggaggaagt

SEQ ID NO: 138888 - DNA, 284 bp, Glycine max
agcttttggcgctttcttttcaaactcagtggcacctaacttcgcatgagcacggcctatcatcctgaatttgatggacaagcgaaagtacttaatcagatactcgaacaatatatccgtgcttttgtacactccgatccttctcggtgggataaatttttagcattggcagaatagtcctacaacatggtagtgcattctgttacagggcaatcaccttatcaaatagtctatggcaaacctcccccgttcattcctcattatctccttgggtcctcttacgt

SEQ ID NO: 138889 - DNA, 318 bp, Glycine max
tgcagatatcagtattattgttttttttttatgcaacgtggtccgattagtgaggctagctaaccaatttgaagccctcatgatcatgggtgttttgtttttgtcataagtacacctcctgtgtaaaattggtcagctatgcctacatgtgcagctgtgctactaatatattttgagaaatgttaattacaagataaaattgtccatggactaataatatgaaatatttctacactgttattaaattgcaaattatctcatatagtaatttattgacttttggaataattatgttaaaagttaaattaacaatatttt

SEQ ID NO: 138890 - DNA, 282 bp, Glycine max
ctgcaagcttctcggttttttttgcgaagcaaacttgggaaagttagttttaccaagaaatgctactcttaaaaaaaaatggcttacacctcctccaataaacacaaacatcaatgtaaatttagagcaaactcatgcacatactttcttacgaacattcactcgcacaaaatattcttctacctaagaaaaatgcacccacgcacaatcaaggcaccttcgttacctagattatttatatgtacttccaaggcgtatttgctacctacatcacatgcactt

SEQ ID NO: 138891 - DNA, 326 bp, Glycine max
ctcaagcttggaggggttgatggggactcttttttttttaagaacgaatagaagggtacgtacgtgcacgtgagctaaatttaaaggtgggcaactggggatggtgtgcttatgcctggcttgtggaaatgggatagttgatttgtgccatcgcccgatcgccacctactaccacatatgacgggtgccctataatccaataagcttgatgtgagaaagcgtggaagagtcagtcttcctacttttatttgttgaccacagagtggtacctggaaatatgtcgcgggggtcaagaaaccttggggatgtcaagtggggtgctattg

SEQ ID NO: 138892 - DNA, 280 bp, Glycine max
atctttttttcattttcaaagcaggaagtatgggtcaaggcaatggaagaagagatacagatgatcgagaaaaacaacacatgggagttagtaaatcgtccccatggaaaagatatcattggggttaagtgggtctataagacaaagctcaaccctgatggcaccatacagaaacacaaggcgaggctagtagctaacggttactcacagcaacccagaattgactacaatgaaacatttgcaccagtagctcgtcttgatagcataagagctctaatag

SEQ ID NO: 138893 - DNA, 308 bp, Glycine max
tgttgaaattgccatgttttgtttagttaaacatacccattctgttttagggtttttatgatgatgcttgtgatgttcatgtgctgaaattgcttatggaaaactgttatagatgaagggttgaattaacctagggttataaagtgagaatgtggtgttgtgagtggaaaaagagtgaattttgagggctggaaggccaaatctggaattggtagtatttagaggttagagtgagttaatcctaccttgaaatgtcatttatgacttatgagaaagcttggactgtgctagagagaaaaacaaatgac

SEQ ID NO: 138894 - DNA, 280 bp, Glycine max
agccatatgtgtttttcagtaatggcaccttcgacacttgtggcgccagactgggcatacatcttttgagcgccaaacaagattccgaggtccctgccaatctcaaaaactggatattcaggcacaaacattgcaaaaataccttcaaattctctacctcacttggatatgctaatttttttttacggcaagagaataagtactaactagataataatacatcagcagtataatttatcttaatcgaatagaaggcatgaattgttctaaattctctaat

SEQ ID NO: 138895 - DNA, 334 bp, Glycine max
gtgacactctcaatactcagcttttgctggtctaaactttttttattattaacgaaattattatcatactaatcattaaaccgaaaacatttttatcaaagttttgctattatcttataaactatgatattattataataaaaatggatatatttatcgaaattataactgtgattagcattaagtactaagcagctttctaataagctaaaaatcataaaattaattgtttaataaaaaagaacatataattgataatagattttatgtcttatctttaaaaatttattttatacacagaattattagtaaaaattattttgttatttccaaa

SEQ ID NO: 138896 - DNA, 283 bp, Glycine max
agcctcctaattttataagaagtctatgggattgtagctacctcatgcactcctctaatgactatgggcatatttctggggccaaactgttgggaatttggaaaccactcttcttcaataaaatttctggcttcaacaagaagtcatgttctccaagggctccaccactggcagcaactatcatacttctctccatattactgagtccttcataaaaatattggagaaaaagctgctctgaaatctgatggtgggggcaactggcacatagtttcttaaatct

SEQ ID NO: 138897 - DNA, 309 bp, Glycine max
tgtctcagcgtctatgctttattataccaacatgttagctatcatcgccaagtaccaagaagagttgggtctagccacggcccacgagcatagaatcgcggatgagtatgcccaagtatatgcggaaaaagaggctagaggaagggtgatcgactctttacaccaagaggcaaccatgtggatggatcggtttgctcttaccttgaacgggagtcaagaacttccccgattgttagccaaggccaaggcgatggcagacacctactccgcccccgaagagattcatgggcttctcggctattgtcagca

SEQ ID NO: 138898 - DNA, 282 bp, Glycine max
agcttggaattatattttaagaagtgtgaaagtattgcctgaatcaaaaaacctgaacttattgatcctcaaatgttccttctacactacacatgccttgactttctccatttggtgttgaatatttacttttaggttgttgggtttaatatgaattgagttaagcttaaagaggaactgcgcattcgacatcttgaaattactacatacttttgcgcggggtttatgtataaaaactttgagatcttaaatgaaatttatatttttataatttataaatat

SEQ ID NO: 138899 - DNA, 315 bp, Glycine max
  unsure (1)..(315): unsure at all n locations
tcggcaacaagatgctttttttttcgtcnncctattatttgacgtgaaaggatatattaacgcggtaacaagattcgatccaaactccagcgtgttaattgctcagtgtggctgctccatattccttcaactcatccatcgccctctccctcatgctttattcgccacaatcaaaatagacttgtggaagaaggacaagaattttagcttctttagtaattaaagaggaaaatataaattctttttttttcttttccaaattaaatcttcataatattagagaaaaaataatcctttttcattttcttttcctta

SEQ ID NO: 138900 - DNA, 285 bp, Glycine max
agcttctatattttcttaaccattttatcaataaacacaagttgagttttattcagaaaattagagtttatctcttttatcttagtgagagtgattctcctaaattcttgagtgattcaagaacaccctggctgtatcaaaggactttcacaacctttgtgtgttgccctcgctggaaagagtgattctttccttcctatcatctccacccttgttctttcaaaccacaattccagaaaatccacctctgcccaaaattatctcgtgaccataactcccatttca

SEQ ID NO: 138901 - DNA, 324 bp, Glycine max
atactcaagcttcttttggaccttgaacaatctttctactcctctttcagaaccatgctatgtgctcgcgactggtccctttcttcccttcgcaacttgagttcattattgctaccccatagagctccgcgaaatttgttccggccatactcttccttgcgagccctcttggtctcttgttcaagggctcttgcggtaattgcattctcttcccgtaacccggcgcactccttccgaacgtgtgtagcagccaacttgaacttctccttggcgagttttgcctttcctaactcgcttttgagagcttggacttcttcgtcctct

SEQ ID NO: 138902 - DNA, 169 bp, Glycine max
aattgagatttagatatgaaaaatttcatcatcacgcaaataaacccgcaggactaaaggcccgaaaaacccacgcgggagtaccaatcacgcttgacccggacaaagcgaagaaaaatctgaacggaatgccaactggggggccccaaaccataaaacagggaaaagc

SEQ ID NO: 138903 - DNA, 303 bp, Glycine max
tttgagaaattcaaatggttttaacttttcactcggagctctgattcatgcacattacatatagagacgctcaaaattgaacaacggaagctctcgagaaattcaaatggtcataacttttcactcggaggtccgattcataagtataatatatctagacgctcgaaattgagcaacgaaagctctcgaaaaattcaaatggtcataacttgtcactcggaggtctgattcaggtgcataatatatcgagacgcttgaaattgtgcaacggaagctctctagaaattcaaatggtcattaact

SEQ ID NO: 138904 - DNA, 318 bp, Glycine max
aatactccagctgcaaaaaaaggcatactttttttgcaaaatctgaattcagggctgaaatagggggcatcgaacgagcctgcgcgcttaacacaactaatgaaccgctgagcacgcattatgcgaatttgggctttaacgcacccctttcggaacacaggatggactcaaacagggcgcttagcgggaagaacccttattcaccgaacatgcacaactcatacttcatccaagctcttccttgcgcttaaccgaggagtgtcgcactcagcggatgagtcattaagccagcagaatggctaacgagaagagaaaagc

SEQ ID NO: 138905 - DNA, 305 bp, Glycine max
tgcaagcttggtatatttttttacaaatacattaatctctcgggttcatactgaactcacaacttggaggcttgtgttccatacaagtcataagctcgatgtatgctcaacaaaccataagcttggtacctagtcggatttacattctatattcaagcacgtgtaccatactcgagcacgtctaggcatgatgtacatgatgaaagcacacgacagaccaataagaaacaattaatagaaggcaacttccttctcacttgatacatatactcgagaaccccaaaagaaaggtgcatttttactca

SEQ ID NO: 138906 - DNA, 348 bp, Glycine max
cggcgcgtgtgggctaagaccaaacttatccttttacaaccattgagcttagtctgagtcaacttcaacgtgccgtccctatctttctgcaaaagaaatcaatcaaaaacatggataagcctacgatgcatgtcatgtgtattatgaaaatagatttattcataacaacatgatgtgatactgaataactttatactggttcccaatacattaaagccactccaactttaagccttggtaatgctgctcttaggggggttcgtaatatataacttacctctaaaaacttgagaccgtttcataatatttcgtgatcgataaaacatgtatcactgctcatctctctcc

SEQ ID NO: 138907 - DNA, 301 bp, Glycine max
agcttgtagaatggttttacatgatacatgtcaaggtttggtttggttcaaggataaaagggatgccccacattattttcatgacacaaatgcaaaaatgatgatttggaaattttatgcaaaactggtcatgcatgcacctatgtggacgctcaagtgtcaaatttttatggtcatgtgatgctagggctcaggattcatttcctctattttaaatcaacccaatgtttccaaaatatgttcttttatcaatttgggcatccatccgagtccattttgggcgtctgggaaaatcttcaca

SEQ ID NO: 138908 - DNA, 306 bp, Glycine max
ccacccacatcggtgttgaagcccttaccagcaaccctcaaatatgcctacttgggggacaaggaaaaattctaatgatcatctctgtcctccctgctgctgagcaagacgagaagttgctgcaagtgctcaagaagcacaagaaagccattggatggacttttgcacacatttttggtattagcccatctttctgcatgcatatgatacttttagaggatggagctaagccagtgaggcagccacaacggcgacttaaccccgtcattctatatgtggtgaaaaaagaactgaccaaactcttac

SEQ ID NO: 138909 - DNA, 292 bp, Glycine max
agcttcatacatagtattgcttgatgacattagaattcatgagaaattttcctcctcgaatctcagccagcctgcatcaatcagactttgcaccttatgtttcagggtcatacaatgcttaatggaatgcccaggaactcccccatgataagcacatgtcacgttgggtttgtatcctctgggaaacgaaggttgagaaatctttgttgggcttatgactgccattgcattattgagcagataagggagtaagtcagcatatgacattagaattggggtgaattctacaggc

SEQ ID NO: 138910 - DNA, 278 bp, Glycine max
agcttggtaaattttttttcaattacttgcaatcgatcatcctgatggggataacctcgttccaacaacattaaattcttaaccaatgtttaaacatgttcttatcgattaccaaaccatgccatcaattaaactatctttcacacttattttgattaaaaaacttaatgatcatccaatttctaatcactcattacaccaatccaagcatgatattgttaagtttggctgcttccaagtcacattggtctatcccaaaaaattcaattcctatcgtt

SEQ ID NO: 138911 - DNA, 296 bp, Glycine max
agcttgaaggcaaactggatgctttggttaacttggtaacccagctggccttgaatcagaaatctatacctgttgcaagggtttgtggtctgtgctcctctgctgaccaccatacagacctttgcccttccatgcagcaacctggagcaattgagcagcctgaagcttatgctgcaaatatttacaatagaccccctcaacctcagtagcaaaatcaaccacagcagaacaattatgacctctccagcaacagatacaaccctggatagaggaatcaccctaacctcaaatgggcc

SEQ ID NO: 138912 - DNA, 385 bp, Glycine max
  unsure (1)..(385): unsure at all n locations
taagcttcacgtacaactatgtcaaattgtngactaagactattataaattaatgaataaaaaatttaatgattttgtgtattaaacaaccttatgccacaattaagtcatttaagcgacacattacttttaagtctccatatatatcacggtgcttgaacaaaatcaacatgttgatcaatattcactttgtaatgataattatctataatttatgctcaagtaaaatctgtaggctcgtgtcacagactttttgtctctcaatttgctctgaccttgtggtatgcagaaggaaaaagaatcaaactccgtgttaaatatccaagtttaaagatctaggttcttgtgtnctattaaatgtgtacaaatcttccttttattatat

SEQ ID NO: 138913 - DNA, 300 bp, Glycine max
agcttgctgttttcttcaacattcccggaatcttcagtgtgaatttactccaaaactctccctcaaatggtccaggatacataggcacctcagtgttgcaaacttctctccatgattttattgaggttattttccagaacaacgaaaacaccatgcaatcttggcatcttgatggttatgatttttgggtcattgggtatgtcaacttccttgaattataagttttgtttctattatcaaaacaatttagaattagcttaggaaagttataatgattgatcattgccacaattgcagtca

SEQ ID NO: 138914 - DNA, 447 bp, Glycine max
  unsure (1)..(447): unsure at all n locations
ctaggatcaattcgaccggtgttgagttccatgaaaaaccgctcattaacagaactaaacctataaaaacaagaaaggaataccatgaaataacaaaacagttgttcagtcgagacacaaaacaataaaataatggttccacttcgtattataagccatggcaaactgaacaacagttaaaggaactgaagcagaatcactcagcatcaacagacttaacccactagaactgatccatgctcacgctatcaaatttaaaattaacacatacacataaacactcaaagttaaacatgtnagaataccaatctctaatatgtanggagacatctccacatctgatatgagaactgaagtntacaattcatttggtgctaactagtacacgagaatttatgttctaagatatcttagatacactttatgttgcttactgcactaagcaac

SEQ ID NO: 138915 - DNA, 283 bp, Glycine max
aacatagaccgcctgtgggtgaccgacggtatgcggaaaaacagaaacaggaggcataagcaaaagatcaagaggagtcaggggggtaaaaccataaacaacttcaaaaggagaacaattagcagggccaagaacaaccccaacgaaagcaaactcaacaatggggtaaaaaagcaggccaagggaaaaaagactccctcaaaaataaccgaagcaaagctcccaaagacctattaacaacaaccgggtgcccaacactatgggggagacaaggggttgaaaa

SEQ ID NO: 138916 - DNA, 233 bp, Glycine max
  unsure (1)..(233): unsure at all n locations
catgatttgaagatccaatcaaaatcatacccgctgcttaaaggatctcatttgcttaagatatacatcatgttcaccaacacagtcttgcttctagatactataatatgaagccttgcctcacacatagtgcntccaagacatgaaagactctataatcgattaccacgccatgtaaccgatttcctcaatacatggtggacaaatagatgttgaatcatgtctcaatttaa

SEQ ID NO: 138917 - DNA, 283 bp, Glycine max
agctttacagcatattttagtaatcgacccataacctgaaaataaaatctcctcgagccttaaaccgcctgaattaatcaaactctgcacgttatgtttcaaggtcatacgatgcttaatggaatgccccccaactcccccctgataagcccacgtcacgttgggcttgaagcctttgcgaaactaacgttgagaaacctttgtacgggcttatgactgccattgcattaccgagcaaataggggagcccgccaacatattacattggaatcggggtgaattc

SEQ ID NO: 138918 - DNA, 159 bp, Glycine max
actaagctatgaccttcgaatgatcgagagttgtcgtcgtcaatttctagcgtgtagatgagagatgaccccgaatcggacttctccgcgaaaacgtatgaccatgcgatttgctcgagagcttacagggttcaatatcgagcgtctcgatatattatg

SEQ ID NO: 138919 - DNA, 275 bp, Glycine max
  unsure (1)..(275): unsure at all n locations
cttnccctttaaattcaattcacatgccacagttatcaggggaatatttgagggattttcctctccttatctgtattcatagatattccttgataagatgaagctattcataatatatttcctggtataggatgaggctctactagcatcctagaaacagcaactggatcgagaagttgatactcaaaattaaaggaaatttacatcacttgcacatagtgagtgccttgtgcttgcttgttaatttaattcgttggcataattgaaaagcatgt

SEQ ID NO: 138920 - DNA, 471 bp, Glycine max
  unsure (1)..(471): unsure at all n locations
caccacttggaatgcagccacgatgtgctgacnatgctgctggagcaactcggacaagatttcgatgactgcacggctgtgcgtgaactacatcgcgctagaagagacacgaagttgtaaccgcgcgtggaggcgcgtggaagctctgatgacagcgcgttttgcaaggttttggtcgcgctttttcaacgatcctaaccctggtctcaccggagaagatgactgcggctgacgactgctgctgacggcgtgacccgctctgatgccaacttgtaaagccttgatattttgtgagttgaaaagtaaccttacttagcttagctttttgaccttaacacacatacatatatacacaatacattgcttagagataagacagctctgtaggacattattatgctgtcttctgaacatgttaatcataagcttgaagcagcatgtcacacttatttacaggtattcttgagttat

SEQ ID NO: 138921 - DNA, 280 bp, Glycine max
agcttaatatcatcctcctggcgtcggcactgctttctgctatggcattctccgttaacgcagcaacagaactgacaccggaacaagcggcagcggttaaaccttttgaccgtgtagtggttaccggtcgttttaatgctattggcgaagcggtgaaagccggttctcgtcgcgcagataaagaaggtgccgcctctttttatgttggcgacacttctgattttggtaacagcggtaactggcgtgtggtcgctgacctctattaagccgatgctgaaaa

SEQ ID NO: 138922 - DNA, 292 bp, Glycine max
atctttccagatatggagagctaaatcctctattggttcttccttgtaggtacttgatgtaaatacctgtatatctatttaatgatgttttatgtgttctctgtgctatcagtacgtcatttcagtgtgctttttccttgatcacatagatgcatgcttttttaggatcatttaacggtggaaactggcccgattcttagaacttgataggatagggctagtttatcgtattatcacgagggatcggggtacagtaacctagttgtttgtatgttcatcttattgcggtttt

SEQ ID NO: 138923 - DNA, 387 bp, Glycine max
tgagaagctagagtttagctacacacacccatctaaaaactaagctcaccttcttgagaagcttccttgacaagctagagcttagctacacacccctataatagctaagctcacccccatgacaaaaaaacatgaaaatacaaaaaaaatgctactacaaagactactcaaaatgccctgaaatacaaggctaaaaccctatactactagaatggccaaaatacaaggcccataagaagaaaacaacctattctactatttacaaagaagagtggacccaaccttgggccatgggctcaaaaatctaccctaaagtatatgagaaccctaaggccttctttttaactctagtcaatcctcttggagcctttgctatggtctggtact

SEQ ID NO: 138924 - DNA, 282 bp, Glycine max
agctttcctagttttctgctactgatattcattgctaaacaagttatttttattttctcatttatcttgtgatcctagtagtctgtatttatgttcttctgaatgacatttaaagatttcactgctgatatgtttgtctgctttcacatttttcttgaggcattatgatctaacaaggtttgatcaccatatttaattaggattccactttattatcacatgaagtttgcatttcttgtttggctacagctgcccactcttgatgtaagcttaaccaaattg

SEQ ID NO: 138925 - DNA, 385 bp, Glycine max
tactaagcttgggagaagtctctcgtatcatgttaattgatttacaacttatcttaattgattacacatttctttttgagacactgactagtttttctggagtctctgctttaatagattatcaggtgatataactcatttcttctctttcaatagtatttcagaagtgatcaagaacactttaatcgattacttcgagaatctaattacattgttcttgaagtgttgaaatacagtgtgactaacaactactaatcttcgattatgaatatcattttgtgtaaagtgagttgtgaatttttcttgtgttcaaaaagacattcattcattcaagccatgtgtctgtgtacgagtgaccatggtgggtttatctctgactctactt

SEQ ID NO: 138926 - DNA, 304 bp, Glycine max
agcttccaattgtacctgcttccaatttccaagtccttgtgggaaatggaaactcattagttgctgaaggtttggtgaagtaactaaaagtcatgattcaaggtcattctctcaaattacctgtgtacctcctaccaattgttggtgttgatttggtacttggagccacatagcttgctacattgggtcctcatgtttctgattatagccagtttaccttgaagttctacaaggacaatcagtttgtcacattacgtggtgatcaccctaaattactgagccctgctcaatttaaccaactgag

SEQ ID NO: 138927 - DNA, 375 bp, Glycine max
ctacgttcattccttttctctctctcgctatctggaggtttcttgagcctcgaataccaagtgttgcaacctacccttcagcgggagggcgacgcgtgactcgcgggtgcatcttccaagaaaggaatatgcgcggagtcgccaccaacgtttatttgaggaaaacgtccgacaaaccgagcaagacgtggtctatgaactctaagtgaaaggttcgggagttgtatttacacaccgcgaaggtattaacaccctacatgtccgtcgcaagagacgacaacccttaatcaaatgcgcagagatgacttcaatatatcgtattttccttatattacgatcgtacgtcttattatgccattctattatacttttatc

SEQ ID NO: 138928 - DNA, 301 bp, Glycine max
agcttgcctttattattttttaaaagctgaaacaataggaacaaccttttagtacgaacccatcgacagataatgaaactcaaggcaggaaatgtaattaatatattgaaataaatgcgaaacaccgttagctgaacaacatgccattaccaccaaataccacccacgataaacatttttgtttccaaggatcagaccaagtgaaacaatgggggaactcaatcctcccaactgaaactgtcattatgccaaaagtccatggcaacagctcaaataaaagtattatagcacctaggactgc

SEQ ID NO: 138929 - DNA, 348 bp, Glycine max
  unsure (1)..(348): unsure at all n locations
ctcggtgagagtggtagtgttggtttacccattatgtgacaatttgtcaactatatggattcctaaactacattcacagtgatttccaaaatgatatcacatgcatacgagtctaggggcataatgtgcatcgcatttcatgtgtgacttatgtatggagtgtttgatttggatgagacatgcttgtattgattgtccatcattaatattataagaaatataagtaanaaaataattaatattaacttagaaaaataataattattttagaataacaaataaattaaataccctagagtcatttctttcggtggatcctaagactacttattcttctttttttggggg

SEQ ID NO: 138930 - DNA, 292 bp, Glycine max
agcttgtagaattcaccccaatttcgtgtcctatgctgacttgatcccatatctacttgataattcaatggtagccataaccctagccaaggttcatcaacctccatttctccgagaatacgactcgaacgcaacgtgtgcttgtcacggagaagccccggggcgttccattgagcattgtaaggctctgaagcgtaaggtgcaaggtctagttgatgcgggctggctgaaatttgaggagaattgcgtgtaaatcctgacattgacaagagatgccacacatggggcaatt

SEQ ID NO: 138931 - DNA, 419 bp, Glycine max
cattaccagcgcctgatatgtacgagactctttcagacatcttgtcaatattatggacgtctgaatatgctcaaagccttctgttttcattaccagcgtctccatgtattacaagactcaatcggacatcctagtaaataagtatagtcgtctgggttcttctcagagcgtttattatcaatttcgagagactcgatatactacgggacacaatcggacatccgagtcaatagttattgacgtatgaaatggctcagagcttctgttttcaattacgagaatttcgatatataccgtacacaatcggacatccgagtcataagttatcgtccggagaattctctcacagctactgtttataattacgagcttctcgatagattacaggacctatatcgatctccgagtaataagttatt

SEQ ID NO: 138932 - DNA, 291 bp, Glycine max
agcttagcgttgttttacctggcagcgcaagtagcccctcccatggtccagagggagatcattactatgatggtggataccttgcctatgttttactatgaaaaattagtgggctacatgcctgccagcttcgcagacttggtcttctccggaaaaaggattgaggtgggtttgaagaggggaaagtttgattacatctcctcgataggtggcagaagtaggaagaccaaaatatctggggcaaagaagaaagagggagattcccattaccgtcacctcaacacctgcatg

SEQ ID NO: 138933 - DNA, 440 bp, Glycine max
  unsure (1)..(440): unsure at all n locations
atcacatgtgggactaggtggcggtcgggctatggtgcacaacaagttatccacatacacaatgcgcgcataaacccaccatccgctgttgcccacctccaactgagctcacgtactcccacgtagcccatatcctcgtttctctcaacaccgggtccncatcaatcctcccaagcttccacaacatccaagcaaaacaacattcaaacagaacaagctatcatagccaagcaaaacagagcaaaggcagaaaactctgccaaaacaccaaccaaaatcacagctttccacacttaaagaccccagtaacaattccttcgatccaattcgttaaccgttggatcgactccagaatattactggaagtctctagtacataagcctacattntaaccgttgggatctactaacaaaccttcagaactcattctgcactactc

SEQ ID NO: 138934 - DNA, 297 bp, Glycine max
agctttaatattaattttctctttccccttttactgccataacttaagcctatacataattctttaccccatgtgtggttcctaaagattattataatcatcacatactaggtatcttttggaattttttaaatgaagaagaggatactatttcgataatcaatatataatcataattcatgataattaatctaatcaatataatcataattcatgctaatcaatatatgctatttcaatactttcctaaaagaggatacatctgtatataattcaatctaattcattttgaaaaga

SEQ ID NO: 138935 - DNA, 473 bp, Glycine max
accccttcttatgatataatgacgtaccacaacttcatcttcaacatgtcctaattgggcaaacgctgtaataacaatcaacaaagtagtatcatcaagcaccacatttgctgaccttactatatcataaaatatattcaaagcctcgatgcaacaaccattctgaacatattcagccatcattgaattacaagaattaacatctctcctgggcatttcatcaaataaccgcatggctgcaagaacgtcacccgatttcgcttaaccatctatcaaactccaccccctcttcccacttcacatacccttcgatcatcgaattacaagtaatcaaaatcctctacttcatgccatcaaacaactcgcgagccctcgtcaccgctccacactatacatacccaacgatcatcgatgtatacgatacaacatccctgtcaggcattctgtcatacacttggcgccaagctccacac

SEQ ID NO: 138936 - DNA, 294 bp, Glycine max
  unsure (1)..(294): unsure at all n locations
agctttcacttcttgactatgntntttttatttaaataggttggtgtggacaaatgaatgaatgtgcttgacatgggatatgttattgtatgtcgatataatgtgatttttgttttgttgtcgctgaagcaaaacataagctttttcccccttaaaagtcaaccttgtatagatagcttatctcaatgcatcaaaatatatgcacactacatgaaaacatggatttaactaccaaaatttacccatgattttagaaaacacaagtaaagcataatgtttttggaggtttattta

SEQ ID NO: 138937 - DNA, 409 bp, Glycine max
aagcatcaacaagaatcaagccaaggctattgagcaagcaatcaatggggccaaacacaccaaatgattatgatgatggatggctcaaattctcacaaaggttaactcatcactctcaaattgagctttcacaactatcatgacatgtagaggagaatcaaggatttcaagtcacaaaatgtcaagaacttttattttcaaacaattacccatgtcttgaacatatcctataattcaaagaaaaacatgcaaagtcgtacacgcacaccaaattgacccacaatatttaacttataatccgaccaaactaacaacattatcaaattaacacaactaacaaattatccaaaccaacacaactcgcaagactggagaacactctcccccccctccatacttaaacaacaca

SEQ ID NO: 138938 - DNA, 296 bp, Glycine max
agcttgcattattttttattatggcaaacatggtgaagctccaccactgacttggccccaagaagaccccattgaggtgcactccatcatcaaaaggtatgagagcataaagaatgaaaaacttcccaagaacttcgatctcaataatttttttgagaataggaagaacatgcgtgacaatgatatttccaaagtccaaaaagagaccctcaagatcaaaaatccaacttggcatccaagcttcaacaacctatgtgtagaggagctgaggaatttcatcgctaggttggacatta

SEQ ID NO: 138939 - DNA, 287 bp, Glycine max
agcttctagccatatggacttaccttgaattaattcctttgatagcccttttgagccttgtttccctttccttgttttgaagctcactacaagccttaaatgaaaaaccatgatatcaccatatccttaaggaattttggagctttggaattgttttggaataagtgtggggggtttttgtttcattggataacttgttttgttggctatgcttcatgatgtattttgggccatacttgatgtacattgtatattggttaaatgttggacatgctgaatgacatgtt

SEQ ID NO: 138940 - DNA, 503 bp, Glycine max
  unsure (1)..(503): unsure at all n locations
attcggaccttgaaactaagcttactactcctgtgtattcttcccaaactctcctcattcttctttctcatactctccatcctttcttcatcttcataactcattcttctcatttgctcaccaagtttaatcatctccgccccgagccttgcagtttttggagatggtggagtaacatttgtacttgtagaagccatacctacaagaaaagttagtgcacaagtagaaaatagaataggacctcaccactcaacttagtgtttcactcaagttcgcttatgtattactctttcaaggctgtttcttttataatatgcacttatgccttttaccactcttatttctttttagttcttatgcagaaccttcaagctcaaaatcaagaagtattcaatgtganatatgtcacanatcanaactcaactcaagaagccaagaaaagaaatactctaagacaaaacaaaggaactntaatgacaagcanaataatgaaatgaatactc

SEQ ID NO: 138941 - DNA, 271 bp, Glycine max
agcttaggctattttacgttaaccttctgaaagctacttgcgctgagtctactcttacatgagggatctgcggacgaaactctgtataagttaatctaaacctaaaagggttgactaaatgaaggatttgcggaccaagcttggaataattcgacctaacgagggatcgaggatttagtaaattatgctacaacatacaacacaagagcatgattgattaaaaaaatatatttctatacatcaacattgtggcgagaaaaacccaacatat

SEQ ID NO: 138942 - DNA, 329 bp, Glycine max
ctctaacccccaaggccctagtgatatgttttactatgaaagggaccggcttcacacccatatacccccggacggcacccaagccaacgccatttgcatatcaaagtaataatggccgtccgtggaagcatacccgtcccgcgtcaagcgaaagacgtgcaaccgaagctgactctctatcgtgtaacgtaaccaacatcaccggcctcagtggcgtaaccagcagcggtcgggagttcacttccacttacccggcggaatggctcactacagggagagcgcccatggttcaagagcccacagatatagccaccctctcgaaagaagca

SEQ ID NO: 138943 - DNA, 285 bp, Glycine max
agcttaatttgttttttttatagtttgggcttggcctttttatctaaaaaggttttttaaaaagcttgagcttagcctttatagtaaacaagtcgagccgagtcgagccttacataggccgagccaaaggcccttgacaagctgctcgactcatttccacccctaactgcttccactggagctttcactttatttcctataaaaatgaacttctcatttgggcttatggtttggattgtaaggaatctctgcctagtattagaaacacgagttgtacatcaaaaa

SEQ ID NO: 138944 - DNA, 145 bp, Glycine max
aaagaaacatattatgtctgagctactgcataaggattctatccttaaagcggaaagcctacacgatcttattttctatgatgatgggagaatagctcttattaacagagctgtggctaatctcattggtggttacatgaaagat

SEQ ID NO: 138945 - DNA, 289 bp, Glycine max
agcttttaatgttgtgtttaccctctccaggaaagagttcgcttgaggagactttgccgcagaccaagatcttaagtgtatttgggatctcaattctctttgacattcaaggtgagctttcaaacagtcagcaaacgacccgtgtgcagtaggaagcaactagcattgacattgggtatcgcgctcgatcatgcaaatctcatagttgaaacatgtaaagccctttccatgtccacttaacttttggttgggagtgctgtagaagttgaattattgaaacttttggaaa

SEQ ID NO: 138946 - DNA, 354 bp, Glycine max
  unsure (1)..(354): unsure at all n locations
aatatacagtggaaggggcttttctccctaatccctgtgtcatatgcctcgatgcgtacagctaattgccaataatggaatgttaaaaaatactctcgtgctcgattgccattgaaacgtgatgtatattccatgaatctagatattatgctgtatcattgatctgttttttcctcaagagcaagactggcaatgggattataagtgcttgtggaggtaaaggatctgctggtggtggaagtggcatggtttcagtagatgtgttcagtatgcatgatgagcccaatatatatgtgcatggtgaggaattntggtctgtgcaccggctagatgttctcaaatactttgcaagga

SEQ ID NO: 138947 - DNA, 285 bp, Glycine max
agcttcaagctgttcaattgcttcagattgttgcacagaaaggcaaaggtctgtgtggtggtcggcaaacgaacataaaccacagagtctagcgacaagtgcagattttttattcatggccagttaggttaccaagttaaccaaggcatctagtttaccttcaagcttcttagtctcacctgatgaattcgtggctacttcatgcactcctctaatgacaatagcatcacttctggtactgaattgctgggagttggaaaccatcttctcaattaaatttctggc

SEQ ID NO: 138948 - DNA, 414 bp, Glycine max
  unsure (1)..(414): unsure at all n locations
ctaccatgtgagtgctatgtcatcanagcccaagatagtctacctaatcttcttctcttcactatactcatgacatgcaaagaattggtcaactttcatctcccacttaagatatgcctctaggttacgcttcatctgataattaagaattttaagcttctccctttttgatgcaatcctaccctccaagggcattggatagaagactccaagaagattgggccacagatgcaagagaaggccctagggttctcataagccttacggtagaattcgggcccatgggctaagtatgagcccacttatcgttgtacatattatactacgaagtcattatatttggtccttgtatctaaggctccatatcataagtacggtaccctagaaatattggatttttcaagccttgtattt

SEQ ID NO: 138949 - DNA, 300 bp, Glycine max
agcttcaagatttagttttcatgttgctcatgttgctccccctatctctaacacctccaaggtcgcacttttgtttcaatagcttcacattctcatcgctgcttcctctaattcccttctcaaaggcctaagtcgttgcagctctcaccatggcagttatttgccatggtagttgcacatcatcgatgtttgagagattacgaagggcaggtctgggggaaacgtgagcgaagaagaaaatagggagtcacgagtgaaccatactagaatcctcaattaattgatgaacaaatctaagga

SEQ ID NO: 138950 - DNA, 355 bp, Glycine max
gaaggtaaacttcctgctttattgtgactattcagtggacctggagatatgtcgtgggggtcaggagaccttggtgacgtcacgtggggtgctattgcccaaaaccaagcttgaccaatcccgacccaacccgggcatagtcggtcagtgagaacctgtgatgtacctaaacaggcgagctcctggcagtcaacagataaaatgaacaaagaccacaaagcaaggaggcttgtggtggctggtcagctgtgaattatgtgtaatatgtggattatggcctctggtaatcgattaccaagggtgggtaatcgattacaaggcttaacattgaagacaggaggctaagatggtctct

SEQ ID NO: 138951 - DNA, 293 bp, Glycine max
agcttctagcacttttcatattttttctcaaagatcccaacggttaaatcatggtaaattgtcttgtgaagtcgaaaaccaaatttaaagaacatccaacggttaacgaaggctggacagtgtttctaccgaggcagcttcatgtatatttctctagaatctttattaagaggcttcctccataagcttcattaaaaggcttttaactcactacatacatcttctaaacgatccctacggtcatatattggaaaagtttttttgtgaagttgcagaccaaatctccagaagat

SEQ ID NO: 138952 - DNA, 415 bp, Glycine max
agtgacactatgtaactctgacatgtctacgactattgttactagctctacatagttattttctttcatgtcttgaaacaaatttaaagcacaagtatcacaacacatcatcaaccttaattagttatcagactattgatttatcagactttttcattactattacatcttatcctgctttgaatcacaattaaaaagcacaactaaatcatgtatgacttatcctcttttgattaatcctattttgatgatgccaggcgaaatttgatatcccataggcttctgacagttcgacgaaaaggaagttacttcagaccgtgggcgagagattgaggtagtgtaaatcatacctcacgaggaaatgggcccttgcagccgatcacaacggtgtggacgacattgtctgtgagatata

SEQ ID NO: 138953 - DNA, 292 bp, Glycine max
agctttgaatgctctatttaatggagttgacaagaatatcttcagactgatcaacacatgtacagtggccaaggatgcatgggatatcctgaaaaccactcatgaaggaaccttcaaagcgaatatgtccaaattgcaactattggccacaaaattccaaaatctgaagatgaatgatgaagaatgtattcatgacttccacatgaacatttttgaaattgccaatgctttgcactgccttgggagagaggatcacagactacaagctggtgagaaagatcctcacatcctt

SEQ ID NO: 138954 - DNA, 475 bp, Glycine max
  unsure (1)..(475): unsure at all n locations
tggatcttcttcatcatggagtctcttgcttcttgaagtttaatggtagcggaatgaagaagaaagaaagattattggagacgccacttcaaggagaagatgagtcaagaagaagctcaccaccataggaagccatggataagagcttgaaggaggagaaaatgaagggagggagaaggatagaatgagcacgaaattttgtgcctcanatgaggtctgaactttgaagtgtaattctcaaatgattaaagttgaaaaaatgcacacacatgacctctatttatagcctaagtgtcacacacaattggagggaagattgaatttctattcacacttcactggaatttgaaattgaatttgtggagccaaaatttcactaattatgatttgtgaatttaagctatgggtcagcccactaatccaagatcaagttcaagattctccactatgtgtgcttatgtgtcatgaggcatgt

SEQ ID NO: 138955 - DNA, 289 bp, Glycine max
agcttcttcttgtttctctccccatttgaaaccaacatttttcttgagcacttcattgagaggtgctgccaatgtgctaaaatccttcacaaatcgtctataaaaacttgctaagccatgaaaactcctcaccttggtcacagacttaggtgtaggccattcttgaatagccctaaccttctccatatccacttgcactccttttgaactcacaacaaaaccaagaaacacaacatgattagtacaaaagatgcatttgtcaagattggcatacaattgttcttctcta

SEQ ID NO: 138956 - DNA, 474 bp, Glycine max
  unsure (1)..(474): unsure at all n locations
atggctagacatgatacatgtcagggcttggtttgtntcaaggataatagggatgccccacattatttccatgacacatatgcaaaaaatgatgatttggaaattttatgcaaaactggtcatgcgtgcgcctatggggacgctcaagtgtcaaatttttatggtcatgtgatgctagggctcaagattcattttctccattttaaatcaacccaatgtttccaaaatatgtccttttatcaatgtgtgcattcctccaagtccatttcgggcgtccggggaaatttcatagcattcacccttcatgtgtacacgatttgttttcaaaaactagctatgatcagcgagattttcttttatagaaaaggtggaaaccatctcttttcacaagcatgtcaatgtttagctagacaacttatgttctctttatcacctttatcttacttgcttcttttccttatttgtctcttttct

SEQ ID NO: 138957 - DNA, 297 bp, Glycine max
agcttgcatatattaattttgcaattgcatctcttctttcagttgcctgaacaaataatgtgagaaagataaacatacatgaaagtacatcaagtgagaatgtaagaggagctaatcttgattcttgagtcgtgaccaatgaccatacaaccaaaatggaaggtttaagattagatttaacattaaaaaaaaaaaaatcaaccatcaatatatggatgtatggtcaagattaacccctttcacttctcacactctcacttaataccattccccacccacgcatatatattgaaaata

SEQ ID NO: 138958 - DNA, 439 bp, Glycine max
  unsure (1)..(439): unsure at all n locations
gtagagataggggagcacatgagatgtcaatatgttctcatgatgaacaacctacagacttaagcttgtagcttaagaaaaaaactgaagaagtncttgaatatgttttgacttttacatgcctaactcccttaagtcacttgtattgtgtgttatttagtgtattacatcataatatcattaatcatcatggttagtatgaagaaaaatttctaagttagaaaagtttctttatagacaaaaactttttgtctaatcgattacaaaggtgtcctaatcgattatagcaaattgtctgaagcttatagagttaactctcgtatcagtctaatcgattatagtagtctcataattgattatactgttgcttgagacaatgactgatttattcaagagtctctactctaatcgattaccaagtgaattaattgattacttc

SEQ ID NO: 138959 - DNA, 299 bp, Glycine max
agcttgtgatattctctcattcaagttcttgtgaaaagaaagaaagcagaatggtgtgataaaaatactgagattgtgacaccctctaaactaaatgtgataccctctacccttacaattataactaattaactaaataaattatacaaaatttatttaaaagtttataaacacaaaaaagaaaagaagaaaaaaaacctaaggcaataattaataatttttctttaaacatatttaatttaaatcaattcaaaaggagaaaaggttcacatccacttagtgaaaacataatagaattt

SEQ ID NO: 138960 - DNA, 291 bp, Glycine max
agctttacattctattttagtaatgacccactaacctagaattaaaataacttaatgccattaacctagggaattaaaagaacttaatggctgagtgtaactgaaattgtggcaaccaaaagtcacccccaacagccaacaagtcagccaccatttggtctcccaaaaggctgatgcctaggttgccaattgggcccttattacaacttgaactaaacctaactaaagcccttttagttgattaacccaaaacatatttttggtcagccaactttacaaggattgggccat

SEQ ID NO: 138961 - DNA, 272 bp, Glycine max
  unsure (1)..(272): unsure at all n locations
cttcttttgtccattcttcttctggcttcaattcattagtgggctctccttctgtgtccagcatcttgggatgtttccagcctttgatgacagctttccanggtctgctatccagtgattngaggaatgccaccatccttgctttccaatattcatagatggttccatccanaatgggggtctgtcactggtctcctttttctcttgtctcaaaattatttctaggctcactatgattaagtgccgcttgtccaatgaaatttgaactggga

SEQ ID NO: 138962 - DNA, 291 bp, Glycine max
agcttcacaaggtttaatcatcttgatatgattgctttgagattaacctcaagctagcatgaccaaacttattatgacatacccagtgatgctttttgattgaaagtatgcatgataccttttgactggacagatcaccaagtttaatcttataaagatttccttgtctcttagcagagaagagtggtattgtatctactgtcacataattgacttatgctcaatagattatgtttcaatcctttaacaagcaaaacattatcaatagaagaatagggtggaataccctct

SEQ ID NO: 138963 - DNA, 464 bp, Glycine max
tctatggaggctggatctttgagcttttttgaggtcttctaatggagagattccaccatggagatccagcagaagactaaggagaagaggtaataggcggcgccatccactatggaataagccatggaagaaggagcttcaccaccaggatgagccttggataataagcttggagaggatgcttcaatggaggaatagaaagagggagagaaagagagagtggggatcacgaaatctgaatgaagaacaaagggagagaagttgaactttgagttgtgcctcacaagactctcattcatcatagttacaactagtgttacacatgctgttattgttagactaagtagcttcctcgagaagctgtcttgagataacttcctcgacatgcttctatgagaatacttccttgagaagctagagcttagctactcactcccctctcatatctaagctcacctgcctga

SEQ ID NO: 138964 - DNA, 252 bp, Glycine max
agcttgggttattttgcgcgtactgatgggtaccatgaggtgtttgctggggtttgacccacgcgggtgttgaagagacggcatgggcatctccttccttcctttttgcccctggtgccccgattcttttggcgttcacgtttgtggaggaaacgtaatcaaactttcctctcttcaatccaacctcgattctttccccggcaaacaccagatccgcgaagctggacggcatgtaacccactagcttctcat

SEQ ID NO: 138965 - DNA, 348 bp, Glycine max
atctcttcgatgcaacatatattatacttttctttgtctcatgaacggtacacaattattattctttatgctgctagtgactctggagcaaaaattgtgcccccacaaagaattttgaagatgcttccagaactctctgattattaagatcaaaatgttcgtgcattctctaaagggttgactcttgaacttgccgctggatggcaagatagcgttaatctattttgtttgagacactgagagacacaatggtaagctaaactagattgctaattttgttgctgttgggattcgctatgttctcctccatatgcaaatcttagaggacctttttccccatctctgtag

SEQ ID NO: 138966 - DNA, 291 bp, Glycine max
agctttatttgttatttgattttagccatagtttcactttggttattagtcaattgatccacggaaacagcttaaacgatcggttaaagctcattaaaaacggaagaaaagaatccgaaagtgaacgaaataaagatgaaagccaaaaaaacaagaaatgaattgaaagtctcggattcaaaaacttacccgttgaagaacgaagaacggatgaagaacggtgaagaacgacataaaaccttcacggatttgctcacggaaacgtctcggaagtgttacggaagcaccttg

SEQ ID NO: 138967 - DNA, 286 bp, Glycine max
agcttgttctattgtttttcgataattcatgtttgtgaatcctgaataaagcaattgcaatcattaaatttgacattaaaaacagttaaatctgagaaaagagacaattacaagtgaataaaaagaaaaataatatttcctcaagtcaaaatatactgctatttttttttcttcaagacaaatttgttgttttaactattatataaaaatatagatttaaatatattttaagtttcttaaatttgaaataagtttattttggtattctaaatttaaaaaatttctt

SEQ ID NO: 138968 - DNA, 453 bp, Glycine max
  unsure (1)..(453): unsure at all n locations
ctgtggattaggtcttcatcgatgaaaggatctaagngtgtctgaaaagaggcaaatttaatcattctgcttggatgaatgagaaaatatgggtaaatgaagagggtgagaatgaacgagaaacccatgctacgattgtcgttcctacatggaaacttcccaccagccaaacaatgtcattactcagccaatattaacccttctcattacccaccacccagtcattcacagatgccattcctaaatcaaccacaaagcctgtctaccacacttccaatcacgagcaccacctttagcacgaaccataacaccaacaaatgaatgaattcttctgcgaaaaagcctatagaatttaccctaattctggtgtctatgatgacttgctcccatatccactcaataaattcattggttgccattacctccaccaacggttcttaaccttcatttctt

SEQ ID NO: 138969 - DNA, 301 bp, Glycine max
agcttctaaatatatatgcattgtgaatttatgttgatatgcaataagtttagttgattttttttatatttgttcattagttaattaccatgttagttagatctagaaattgtaggggttggacattttaattcctttttgttataatatatatgcagtgttccaatgtaaatggcctagttttctctgtaaatataaatagtagtaagtcaaatatgctataccccttagcctcttttgggccctggatagtcaaatatagtaatgttgacctgatggaagccaaaaaaattcaaatgtt

SEQ ID NO: 138970 - DNA, 449 bp, Glycine max
  unsure (1)..(449): unsure at all n locations
attttataatagttcatagcttataagntattatattatatatataacttataaacttgttacgcttttctttttcttccatttttacattagtagcgtgataaactctattttttaataattttttgcattatcctttctaactgttttaatacacatccctactattttgaatttttcataaaatatttgatctttaaaaatataaagagtttaaggttaatacaaaatctaaaactatagttgcctaaaagtatttttttttatctactataaaatagaatctatacaaaaatttatataatgggcgaagcatatgctctgagtccatgtaattatatntatatctattaattttcatattaacaacttttatactttgaagaatatctatataatcacttagtggtgtcgtgacttacatgtaaatatatcatggcacatgatga

SEQ ID NO: 138971 - DNA, 280 bp, Glycine max
  unsure (1)..(280): unsure at all n locations
agctagttcggttttattaatntttttaaactatcagcagcaaccatgcaagcatataactatactaataactacactaagcttccagacagtcaatcctaatctataactatcttttacctttctaggctgcttcaaaagggaatactttaacagcatgaattgaatcagggaacaaagcaatatatctgtaactatgagttaaaagaaaacaaggggggtgaaaaatgaattttaccttcccataacaacatatgtagctgcaagattgctgtacacc

SEQ ID NO: 138972 - DNA, 408 bp, Glycine max
  unsure (1)..(408): unsure at all n locations
tctgctgcttatatacgcttattatatattataaatttatgctcatataccntaattaaatacacttgttctatagaggcacacaagtacacattcttataacatcaaggcctgcttttctactttactctttccaaattatctttttataaaaggaatatactttgtcggaagaattcctatgagattatgacagtctctatctaatcagcacactaataaatttcgctagcaaaggaaaatagagaaataagcagctgaggataagaatcctcccaaaagaatcaagaatatacaaaccacgcattgaaacaagacatatcaactaagcaacggtcatccatctctctgcattatggctattgaaactcgacaaccctctaaagagaccattaactgagcaccata

SEQ ID NO: 138973 - DNA, 292 bp, Glycine max
agcttatagcgcttttttgtctttattctcctaaatgcaacgcgaaaataactcttcctctgctttgtaatttttgcattagaaagtgtattttttcattcaacatgattctaacgcattcccaagcatgtactaaatgtgtgtttaaagacacatagaatcacgttgaaaaatcatggttgccttaaagctactcttcattgttgtgaaaaatcatgatgaaacatcgtgatttgggtccttatcacccatccaaacacattgtaacttcttccatagtaaagcttctcac

SEQ ID NO: 138974 - DNA, 446 bp, Glycine max
  unsure (1)..(446): unsure at all n locations
acagggtggatacnggcgccgttacagagggacacttcctaaggagaatttggacgtggcggctaagatgttctccagagataagatgagaagcactgatgatatcttggctgaactcaccattatcaatcgccttcgtcacaaaaaccttggtcgcttactgtgctagttcatttaatttctctctctgtctctctctctctctttttaattattaccaattaatgcttgcattttattttcgtaatgaacattcataatttggcttaagtcggattcggttatcactatcatgaacgcgtcctatattcgagttattaggaatttaggatctagatccgttagtggttctgtccagatcatcatacgcctccttaatgagatctttgaaccaatctacagcactaccatagttaggggcaagtatcgctaaaatctgtagtggc

SEQ ID NO: 138975 - DNA, 290 bp, Glycine max
agcttgttaggttgattacataataatattgggatttcatcagtttctcaaccaatgtctagaggctagtgggaaagaaggattcaaacagatattcacatggccaaaaaaccacttagtgaagcactctcaccaaacaaggcatcatcataatcatcatcaaccttgttagttgaaacaaattcaaacctctagtaagtaaagttattatttacatctatattcatatggccttgattactttctctttattctatttctttctttctatgcctctcttttatctactc

SEQ ID NO: 138976 - DNA, 489 bp, Glycine max
  unsure (1)..(489): unsure at all n locations
ctgtgtctatacaaagcatcttccttatcttctttatcaatgtcattcaatacttgcgatgttgtaggcacataccctgctctctatatctcccttcccatctcttccaccatttcatatatctccttgtactgatcatgtgacttatctcctgcaacaaactcatatatttcattattcatctcaatcatggtgctccctggaatcttcctcatccccttcacatccatcatctccctaaccttggtcttcttctcccagcgcagcaatgttgcgtaaatattcgacagcagcacatagttagactcgtgcgatggctcgcgcctgatcagctccttcgccacgctctcaccgagcttgagctccccgcgggcatggcaagcagtgactattgcttctcatatgacctggtttggctcaaccggcatggctcgaacaaactccanagcctcattcacacgtnctgctctactcaacatatcaaccatg

SEQ ID NO: 138977 - DNA, 298 bp, Glycine max
agcttcactgagaacatttccctttttctctctcgataatcgcattttcttgctacttgttgctgatcattgggttattgtagcttccgtttcgtctactcatttcattctgttgtgatcgttagcttaattagcttaccctgcattggattatgatcatgtcatatgtaatcaacaaaattcgacttctctacagatgcaattaaaaaactttttactttttaacaataattaattaattattattgttattaatattaagattttttttttttggcttatctattcaaagatcctt

SEQ ID NO: 138978 - DNA, 335 bp, Glycine max
tgtgttgtgctgtgatttgccggtgaacttacaagctgctctaggatgatcgcatctataacagacagtctgcgtgcatcccatggatcctccgagacctggacgcaccaaaagattttgttggagttacattaccatccaagagtgacttacaagccttgatcgttggacatacctgtgtggtgatgttgatcacataccaagcccaagtttgcttcatactatgataaagagctgggacgagtcttatagacatctgactcacgggagatgtgaggcacagcagtctaagagtttcctggcctcccacccatgtagaattctttgctgattga

SEQ ID NO: 138979 - DNA, 298 bp, Glycine max
agcttcttttgctttctcaatgtttgtgttatgtatttttatttagtatttttttccatttaaagtcatgactttcaccatatgcttttgtcatgcgtcttgtttgctttgctatattgcaaaagttcagctctcctaagtaataacttcaaaggcctgactgtattctattttattgtatgttgatacaaatggcagttggaaatatatactcgatgctatagtaaacaaccactggttattcaaggtgctggagctggaaatgacactactgctgctggggttcttgctgatatcc

SEQ ID NO: 138980 - DNA, 468 bp, Glycine max
gccttgagctctgcgtgttggtctttaaatgctatataatccttgtattgaaccccacacaacatctaatatattctggtattgaatccagagaaatttcaacaagacctgttaaggtatggaatcctacgcaaatactaatatatctagatattgaacccaggtcaatttcatatcaagactctatatggaacctacggatggattcatacatattttatagtgggagcaaaacaatacaagtttatagtattctaaaagacaatatcaattttaagtttttacataataaataatttcatggtaattctttaaaattatttaaacttctagaatatacaatattacaatgggatatatgtgtctgtcactcgcttggttaaaagataaagtgatacaatgaaaaaaattattaattctttcatctcataacttgttatatctatgtataaaacagcttcatattat

SEQ ID NO: 138981 - DNA, 297 bp, Glycine max
agcttgactatgcgagttgattttagccttagtttcaccttagttattagtcaattcggttaagaatgagaaatcccaaaaagaaaatgtccggttgattttccgcttttattttactaaaagatgttttttttattattatattattttttacctctttttttgatttccaacgtggttacggttgacgaacggtcggaattcattttaaccgaagtttacagataatacaattcaaacgatcgctggaaatttattttatttttaggttaagcgagaaatgacttaagtaaaatg

SEQ ID NO: 138982 - DNA, 400 bp, Glycine max
  unsure (1)..(400): unsure at all n locations
tgctctaacttacattgatggttgtatttatgggaagatgttgtacgctatttctgctttaagagtagagtcccactgtgaaaactaactatccaaattnttgccttcgcaggagatggccccgaggaagcttgcctcaaagaggtctatgaaggacaaggcagccgaaggaactagttccgctccggagtatgacagtcaccgctntaggagcgctgtacaccaacagcgcttctaggccatcaagggatggtcgtttctccgggagcgactcgtccagctcaatgacgactagtatactgatttccagcacgaaatatggtgccggctgtgggcatcactggttactcccatggccaagtttgattcataaatagtacttgagttttatgacaatgct

SEQ ID NO: 138983 - DNA, 287 bp, Glycine max
agctttgacctttttagtcctcaagtgtggaaggtgccagtatcaggctcaatgcctcaccagacatgccaatggtttctgaatgtcattgcatccaaccttggtcacgttcaccaataattctcattacccagatccatctaggtaagagccatatttggacacacaatatgtactacctgtagtggcagttcatgttttacattttacttgtatatatacagtgtacaataaatgtataagtagtaaggtctacaagatgacattactgaagtacaaattgtccc

SEQ ID NO: 138984 - DNA, 421 bp, Glycine max
tccgctcctgagtatgacagccaccgctttatgagcgctgtacaccaacagcgcttctaggccatcaagggatggtcgtttctccgggaacgacgtgttcagctcagagacgacgagtatactgatttccatgaggagatatggcgccggcggtggacatcactggttactcccatggccaagtgtgatccataaatagtccttgagttttatgccaatgcttggccaacagatgagggcgtgcgcgacatgatgtcttgggtaatgtgtcagtggatcccgtttgatgccgacgctatcagccagctcctgtgatatccgttggtgttggaagagggccaagaatgcgagtatggtcacaggaggaaccggtcctgatgggtccatgatgagggcatcgcccatctactatgtatacccg

SEQ ID NO: 138985 - DNA, 288 bp, Glycine max
agcttgtgcaaattaaatcactcctacatttcatctctagcatgcattttctttctttacccactcctcacgtttggttttttagggaaaaacaccataactaaacgcgccgctagggatccctattgcaccagatccaaatctagaacgatgggtgatcaagaggagacgcaagaacaaatgaaagccgacatgtcggctctgaaagaacaaatggcctccatgatggaggccatgttaagtatgaagcagctcatagagaaaaacgcggccaccgccgccgctgtc

SEQ ID NO: 138986 - DNA, 384 bp, Glycine max
  unsure (1)..(384): unsure at all n locations
tgattacgcgagncgattatcaccttagctttactttagttattacnccattcaattaagaacgagaaattccatcgagaaaacatctgattgacctttcgctcttattttactaaaaggtattttttgattattatatctattattttacccctttctttgatttccaacgtggttacggcacgaccgaacggtcggaattcattttaaccacatttaacggatgatacacagcagacgatcggtggaaatttattttatttttagattaagcgatatatgacttacatacatggcttaagcacgtcaaaagggcgtataataagtcaatggcatcgagaataataatacattgaacaacatgtggaccaccccggtccatac

SEQ ID NO: 138987 - DNA, 297 bp, Glycine max
agcttagaaattttttcttcttcatattgattgtagggttgtaactcttgctcccactgacaattttccatggagtaactcttgcaaccctgaatctccaaattttgaattgagttttgattggctttagagctagcttggtatgtcatgaattgcataaacacattctctagattagaaagtattttttcttcatattgatcataagggtgtaactcttgtccccaccaagaattttccatggagtagagatgacaattatttttaaaattctctcctccacaaaaattacaattt

SEQ ID NO: 138988 - DNA, 344 bp, Glycine max
tcagcttgattaaaattttttaaaatactcttattcatattttaatcttgattcctttatgaacacatatgtgaggggtggagggtgtcacagcgtatgccggaaaaatagagggtttttgggaaatgaagtagacaaaaggatctgagagaaagagatagcataaagacgtgttggaaatgtaaaaagtgtcctattatgtctctatttatagcttaagtactctgggcctattatttactctatttttctttattttatcatttgatagtaaaacaatgtatttcactaccacaaaaaaaagatatttctgacggaataattcccatggataaaattcatcg

SEQ ID NO: 138989 - DNA, 291 bp, Glycine max
agcttctccccctaatttcctataaatagggggataagtgaagtggaaaagggttcagccccttaggcacttctttctctttcgaatttgcttaaaaaaattgtttccgtgaagaaaatccaagccgaggcgcttccgtaacgtttccgtgaggaatgtcgcgaaggttttcgaccgttcttcgacgttcttcattcgttcttcatcgttcttcagtcttcaacgggtaagtacctcaaaccaagcttttcaattcattctatgtacccgtggtggtccacatttggtttc

SEQ ID NO: 138990 - DNA, 395 bp, Glycine max
  unsure (1)..(395): unsure at all n locations
cacctatattgaatctcctatgctgtacctacatataagaaacagtcccactcttcccattntacaaaatcatattcatacatcattgtggcatttcaccgagcacttggtgggcgcacgtttcgacataaattgcaagagaatggggacaatgtggcatgccccattgcttcagaatacagcataggcctaaggccttctcattcaaatcctcaactcaagaaaacaagcataaaaacaaaccaaaactgccccacaaatataagcacattctcacaatttggagcaccaaaagatgaagaaaatataccaataggaagctaataacatcaaggattgaatacttcgtggagtgaattataacaccaaaaatgaaagccaaaggcaaccaaaag

SEQ ID NO: 138991 - DNA, 287 bp, Glycine max
agcttgccttgtttgtcggagacaccacaccattttccaacgtaaatggttcgagcactaaagtgacagcttttcctaattcaaaacctataagctacacggtatcaaataaagatacacctatttaataaagatgatgaggcccacttataaggtgcgaataagtgtaacataaaatgaataacttacctgagcgtctcgtccagcatcatccatctcaaccaagacagctgcccttacttttgaatcattgcaaagttgtgccaaatcattatactgcacccatg

SEQ ID NO: 138992 - DNA, 300 bp, Glycine max
agcttatgctgcaaacatttataatagacctcctcagcagcaaaaccaacaatagctgaataattatgacctttcaagcaacagatataatccaggttggaggaatcatccaaatctgagatggacaagacctctacaacaacaacagcctgtccctcctttctagaatgttgctggtccaagcaagccatatgttcctcctccaatgcagcaatagcagcaacagtcacgacaaagacaacaagcagctgaggctcctcctcaaccttccttagaagagttagtgaggcaaatgaccat

SEQ ID NO: 138993 - DNA, 471 bp, Glycine max
  unsure (1)..(471): unsure at all n locations
tgatgcctgaaatgtcttttctgattcagtggttctagatgcacggaagaatttctccaagaataccctcttaaggtcatcccaactgaaaatggacctgcgagcaaggtagtatagccaatcttttgccactccctccagagaatgaggaaaatcctttagaaagatatgatcttcttggacatcatggggcttcatggtggaacaaacaatatggaactccttaagattcttatgaggatcttcacctgcaagaccatgaaacttgggcaacaagtgtattagtccagtcttgagaacatatggaacaccttcatcacgatatcgaatgcacaagctntcataagtgaaatcaggtgcaacccatctcctaagagtnctttcacgaggtggaggttgagccatgttctcagtatgaatattaatagctgaatgcttatnatcagaatattcagaatcaccagcaacaga

SEQ ID NO: 138994 - DNA, 297 bp, Glycine max
agcttacatttgtcattagtatcaaccaccgggtaaccggcggtgatggctttttgacgagctacagacaaaaatgcattcgtcattgattagcccggctagttgtcgcttttgccgtgactgctcttaccaccttttttacctgcttcagatgcgcgctgcgggtcattcttgaaattacccccgctgtgctgtccaccttttttacctgcttctgatgctctttcgcggtcttctgcaaaattgccggaaccgcctcgatggtttgccattactgacctccgtctgggtataaac

SEQ ID NO: 138995 - DNA, 339 bp, Glycine max
  unsure (1)..(339): unsure at all n locations
tatggcagccgccatacgccgcgttaattctagctatatgatgnctatacccagacggaggtcagtaatggcaaaccatcgaggcggctccggcaattttgcagaagaccgcgaaagagcatcagaagcaggtaaaaaaggtggacagcacagcggcggtaatttcaagaatgacccgcagcgcgcatctgaagcaggtaaaaaaggtggtaagagcagtcacggcaaaagcgacaactagccgggctaatcaatgacgaatgcatntttgtctgtagctcgtcaaaaagccatcaccgccggttacccggtggttgatactgatgacaaatgtaagct

SEQ ID NO: 138996 - DNA, 291 bp, Glycine max
agcttgtaaaaataaaaaacagtttgattaaaatgcatcatgtagaatttcaaaaattgaaaaaggaaagaataaaaaaaacaacctttatcttacatcaagtttcaaacagagatttttaggattagaacagaagtttcaattaaaaagaatacaaattatcaatggttttatttttaggattagatgttttttttactgcaaccaaatcagaagctcgaggaaaaccaatagaattcctagctagagtatgagttactccattgatctgtctcttaacaaaattaatag

SEQ ID NO: 138997 - DNA, 93 bp, Glycine max
ttattgtatttggagtaaatttgtaatattctttttatgcgaacaaagctttagaacattttattggattaaagacgatatctgtgcattttt

SEQ ID NO: 138998 - DNA, 294 bp, Glycine max
agcttcatgatgttgaatcaagattgattcaaggagttttgatgataacaaagatgatgacaaaaagcccaagagaatgagttcaagattgaatcaagaacacttcaagaatcaagaggaaatttgatttcaagattcaagaatcaagtttcaagattcaagtttcaagaatcaagaatcaagaataatcaagttgaagattcaagaatcaagaaaagattcaatcaagataagtactaaaaagttttttctaaacattgactagcacatgaatttttcacaaaacctttaacc

SEQ ID NO: 138999 - DNA, 440 bp, Glycine max
tcaagtgattcaagtgagtttgatatctacaaagttgatgacaaaaagcccaaagaatgatttcaagattaagtcaacaacaagaaatcaagaagattcaagaatcaagtgaagtttgatttcaagattcatgagaagatgaattcaagattcatgagaaaaaatcaagaagacttcacaagggaagtattgaaattctcttttcgaaaaacaaacatagcacagttttgttttttcaaaagagttttctcagaattttctaagttaccagagtgtttactctctggtaatcgattaccagtttcctgtaatcgattaatagtggcaaagtttgatttcaaaaagctttcaactggaattgcaacgttccaattgatttcacaatggtgtaatccgatacaagatatcggtactcgattaccagtgtatctgaacgttga

SEQ ID NO: 139000 - DNA, 299 bp, Glycine max
agcttatcaaattttgacttcaccaatcactcctatagtgtttgacgtgttttattattttttatcttaatcttttgatttatatcaaaaaagactttgattaatctaaaatttgacatgaaagtaaatatatcaaagtactttattataaatatactaaatttgtgggatatctaaatttaattttcaaataattattttttctcttttttttaaaggaggttaaagctcatcaaataatcactacttataattaaataattgaacacaagtgattgatgtgtctaagttaatattaa

SEQ ID NO: 139001 - DNA, 493 bp, Glycine max
  unsure (1)..(493): unsure at all n locations
atggcattctccaggcattagagcggttgggcaaatgttgcctaaagataagaangtgaatatgaatcacaatttcaagatgctgttatcttgacctgaattttttcttctcttccttttccgtacacggctacatcatcattgccgatatcaaggctatgctactcttcactttggacaaggccatgttagacaacaaaaatcaaggccatgttactgtttgattagcgagtttatgtcatgctctttccaaagctaaagtatataattgcagggattacatgaacaaatttggcatttagaagtagttaattatctctaaacgacgaatctgacattataattataatttaattcagagtcacaacttttattttaacaacctataaaacagtctattaaacatgtaattaaatagtttgagatacaagtgtaaaatgattctattaaagtaaatttgacggtgtgattatatttgatattttatataaac

SEQ ID NO: 139002 - DNA, 297 bp, Glycine max
agctttgatgcatcatttggagaggttaatgaaacaatgagatgatgcactccatgagaggttggatcaaatggagaatagagatcataatgaagaagaaaggaggagaagagggaatgatggtgttcctagacaaaactgaattgatggtattaaactcaacattcctccctttaagggaaagaatgatccagaggcctacttggagtgggagatgaaaatagagcatgttttctcatgcaacaactatgtggaggaccaaaaggtgaagcttgccgtcacggagtttttcgacta

SEQ ID NO: 139003 - DNA, 485 bp, Glycine max
  unsure (1)..(485): unsure at all n locations
agagataagaattcattgaagtttactctttttgtgttgtaaagaatctctaattctaaactaaacttttgtctatgaaagctaggaatgacttagtgactaaataatacttgagtgtttttagattcatgaggtgtctaatggttgtgccagtagtagccttgagaatacttgtaagttagaagtggcaaaaaagaatacttgttgtaatcaagtttgattagtggaactctttactggtttgtaaatgagagctagacttaacttangttgagcgaactagtataaaactaagtatttttactgcttttctttagcttgtcagaatattttcaaagtctattattgacacattcttgcacaaaattctttcattgaaaatacgttttacaaatatcattcgaggatagtccacatgcgcttaagaaaacttacttcagtcatttgatgagagntgntacacanntgtttatttatcatacatc

SEQ ID NO: 139004 - DNA, 295 bp, Glycine max
agctttgcttttatcgctttgcacctcatctttaacctcattgtctctcacagtctttagatttgggagccaatccaatccttgtgttcggactctcagccacttatgatagccgccgatgatcccattactgcttcccctaagctatctgtcctttcttcacgctgcatcccacgccttgcgaactccttggagtactctcgcgttgtggtcactaaaaccccgtgcgatgaaaggcgtgatgcttttgtctaatggcgctcctctcatggggtagccaagttgtcttatggcc

SEQ ID NO: 139005 - DNA, 346 bp, Glycine max
caccattttcttttctcttttttttcattatttcatttgcgtttcctcttcttggggggattttttgcctcctatccctctcttctcttttatgagggattttgctacctaaacatgcgcatatttttgtgagggatttatgccttatacccgcatattccagggatcttgccaccttaacctacatatatatgtttggggaggggattttttgcttcctacccgcacatctaagggatctctctaccttaacataccaaaatatatttgtgaaagaaattttgtttcataccccacatctaagggatttttacctaacatactatatatttttgggagatttttt

SEQ ID NO: 139006 - DNA, 292 bp, Glycine max
agcttggataggatgcttcaatggaggaaaagaaagagggagagaaagagagaggggggagcacgaaattgaaggaataaaataggtatagaagtggaactttgaagtatgtctcacaagactctcattcatcaaagttaccacaagtgttacacatgcttctatttatagactaagtagcttccttgagaagctttcttgagaaaacttccttgagaagcttctttgagaaaactttcttgagaagctagagcttagctacgcacacccctttcataactaagctcacctc

SEQ ID NO: 139007 - DNA, 438 bp, Glycine max
  unsure (1)..(438): unsure at all n locations
agagctcggncattggacaatcaaaatgtgaaggactttattgagactctagagcacgagtcaactcagaccaagtagacaccagagataatttctacgacatctagaaccatgccactacatccttatcataatgcatcgcaacaatatccactctagatcatcaagagtattatgataagtgaaaaatttctcagccttgaagatccactccatcaccgcgccgttccatcaaagtgagaaaatccaagtgaaatctctttaacaggcaaagaagcattaatcggtagcaccatcggggagccattcttcggagaactttctggaggttgagaagcattctgcaataacagattcatcgctaagtgtatttgatccatataattctgaatctgaagcatcttatcattcttctcttggtaatgcatatccatcatt

SEQ ID NO: 139008 - DNA, 291 bp, Glycine max
agcttagagaggaagcttcaatggaggaatagaaagagagagggggaacaaaaaattgaaggaggaaaagagggagagaagttgaactttgaagtgtgtctcacaagactcattcattaaagttacaacaagtgttacacatgcttctatttatagtctaggtaacttccttgagaagctagaacttaactacacacacctctctaataactaagataacctccttgagaaatttccttgagaagcttccttaagaagattcctagagaagctaaagcttagttacacaca

SEQ ID NO: 139009 - DNA, 298 bp, Glycine max
agcttgccttgttccttgatatatttgagggactcatggtcactatgaatgacaaattccttgggataaaggtagtgttgccatgttttcaaagcccgtactaaggcatacaactccttatcataagttgaatagttaagggtaggaccacttaacttttcactaaaataagcaattggatggccttcttgcatcaacacagccccaatcccaacatttgaagaatcacactcaatttcaaaagatttttgaaagtttggcaacgcaagtatgggggcattagttagcttttgcttaa

SEQ ID NO: 139010 - DNA, 401 bp, Glycine max
  unsure (1)..(401): unsure at all n locations
ctcaacacgttattgacaagattntccatagaccaaatggaaaggagtaactgagcaactgttttccataaagcttcatctaactttaggggccaatccttctttgactgagcaactgtttttgctagaattttcttaacttccttgttaaaaacttcaacttgcccattgatctgatggtggtaacgtgaggctaccttgtgtttgacactgtagtgttggaggacttttgttagttgggcattacaaaaatgagatcctctgtcacttattagtaccctatgtgtgccaaaccttgagaagatatctctttttatgaagtgaatagcgcgttttgcatctacaatgtgtaccgctattgcttcttccattttgtacatagtcacaaccaataaatatat

SEQ ID NO: 139011 - DNA, 290 bp, Glycine max
attttgtactgcccaacaatacagcggccataactaccaccatctatgatagtagacattttttgtgatgtctttgaaaaagttaacggagcataaaatttaacatctaatatagcccttggagttatttttttttacttgctctgtattttggttagtatttttggtagttgtatttcagctcttttgctaagaagccatgcaatacaagaacttaacttttatattcagaaaaaaaaaactttaccttttttatattttgcccctcttaacctcatggtgaaacgaga

SEQ ID NO: 139012 - DNA, 273 bp, Glycine max
agcttgacctttttggttattgccatgaatttgcgggtgaacaaaagatatggctagttgtatatggatctagaaattagaaaaaccatataaaataggttaggaaaggactctagtagctatcttaagattatattttgaaataggaaactaatttgactgcacagctcatgttatttcgtgtgacttcagtcggagtagaatgttaatgagttcttttggcctgttatcttttattaatattgtcggttgtttcttggtacaacaatggtc

SEQ ID NO: 139013 - DNA, 298 bp, Glycine max
agcttttgatcattattgttctacacttgctcatcaagtttgatattctgacattaataaacactgctcctgactccttggcaatagctttggcaagcatggagaagcaaggaccattctgcaacatcaatggagaaacaactatgttttatagaccattatgcaacatcaatggagaaacaactatgttgtatactcctactgaaagcaataatcttcttctctttctctttgttaaataattagttaccagagttgttattattatttatataatcatgcactttgctcgagttct

SEQ ID NO: 139014 - DNA, 292 bp, Glycine max
  unsure (1)..(292): unsure at all n locations
taaaatggttagaagctttacaagggtaaggtgctgaagttntgcaatcaatgctacttcctttttgaactcttctaacccttatccagacttctatgaaagccttttcaccgctaactcttgtccatctatcagtgtgccctgaaaaaaaaatctgctaaagatggaaagttttaaggaaaatataagttcaggataccagttctctatatcaccttgtatacctatccatagccacttctccaaggaaattttggtcaaaatttttcagtggatagctaaactgaccaat

SEQ ID NO: 139015 - DNA, 294 bp, Glycine max
agctttaacctctttgtctctcacagtctttagatttgggagccaatccagtccttgtgttcggactctcagccacttatgatagccgccgatgatcccattactgcttcccctaagctctctgtcctttcttcacgccgcatcccatgccttgcgaactccttggagtaccctcgcgttgtggtcactgaaacctcgtgcgatgaaaggaatgatgctttcgtctgatggcactcctctcatgggacatccttcgcatgaagatagaatcctgattcttcctttcttctaacg

SEQ ID NO: 139016 - DNA, 487 bp, Glycine max
  unsure (1)..(487): unsure at all n locations
cacacacccctncaatagctaagctctttctcctatatacatgaaaatacaaaaaaagtccctactacaaagactactcaaaatgccctgaaatacaaggctaaaaccctatactactagggtacccttaacttctatggtagggtgcccttaatttgtatgccaaaatgcaatgcccaaaaaaaggaaaacctattataatacttataaagaaaagcggactcacacttatcccacgggcccaagatataccctaaggcttatgagaaccttatggccttctcctacatctctggcccaatcttcttggagtcttctatccaatgcccttgtgggtaaggattgcattaagactagtatctatatatcttacaactcatcatcaacaaaaactaagaagtacacagtcttcatatactcttcatggttacacatcgggtttaacttcgtcatccaagatgaagcatcctcaagtatcttcttgaga

SEQ ID NO: 139017 - DNA, 414 bp, Glycine max
  unsure (1)..(414): unsure at all n locations
tgacggagagagagagaaagtggcatggaaaattgaacgaggaaagggagaaaagttgaactttgatgtgtgtctcacaagtttctcattcatcaaagttacaacaagtgttacacatgcttctatttatagcctaggtagcttccttaagtttccttgagaagcttcccttggaagctaatgttacagccctccaatagctaagctcatccccatgccaaaatacatgaaagaagagagcttccttgggaagcaagtgttacacccctccaatagctaagctcaccaccctcccccctcctctcgaagatacatgaaaatatcaaaaaanaagtgcctactacaaagactactcaacatgcattgaaatactaggcttaaaccctattctactatggtacctntaacttgtat

SEQ ID NO: 139018 - DNA, 424 bp, Glycine max
tatgttacgagcacgcatgagtgaacatggcatgcgaatgatgacgacataatgtatgatgattggctgaaaaacatgctaaatggatatgtataaaaatgcaatgacttatgcgaatgtagtgcatgaatatgataaatgatgaatgtggaaatgatatgcccatcgcgatgctatatataggcatatgaagtgatcgacgaaacaaggtggggtgagtctgctctgtgtccctaaatcaggaacctagcggacatggtcttaaatttcactatccagcgacaaagttcaacgatagtctcatgtaacctcactggcctctacagatatcattatcttgagtaacaacactacaatgatacggactacaagtgacaatgcatcacaaatagagataaactctatatgacgttcactggtatca

SEQ ID NO: 139019 - DNA, 298 bp, Glycine max
agcttgtaacattagttctttagatatggtttatttattgcagctttagtttaagaatacatgtgtttgttagttattgtgtgcaaaattatattgacaatgtaagagtttggtgttactcattgaataaatacttgagtgttgtatgactaagtaaatttaactaatattttgatgcatcaatgcttatcaaccacaaggtttcagttttacactgaatgcatgtatacttcatgcaatgtttatacttagtgtcttaagtagatgtagtgtaactcaagtttaatgtgactttgta

SEQ ID NO: 139020 - DNA, 481 bp, Glycine max
  unsure (1)..(481): unsure at all n locations
ataatattattatgcataaaatatatatgtattatttattcattaatactatattttaatttattttgataaagttttattattaacaaaaaatttgatgcgtatattagaataatttatttttatatgttattcttatttgaataatttaatatctttgattgatttatatctaataaaatagaattaaaaaaatactaataatgtaaaaaaacaatattacaataatttttagaatactatatatatctctaatagaatgatataatataatataatatattcgatgatattcatcttattcgataattaaacaatccaagctagcctactatatataaacaacaaaaatcaagcttataagataattaaatagtgtcatttattttgactatattctttcattgatttgaatacccaacattattattaatttttttttttttttgtgangactgggacgagcaattggaaaggaact

SEQ ID NO: 139021 - DNA, 255 bp, Glycine max
ctgccggcatgcatgctatcgaacttttttttttcacacttgctcgacataggtgaaagggagacattagtaaaccctggtattgactcttaggcaatcgcacagggattgatgggagaaacaaggaccattctgcatcaacctatgttctccaaaatatggtgcatgaaccatttttgaacatcaacggagaaatctggatgcttgtaaccgctactgaaagccgaactattctgttcttcatcggagtcaaaa

SEQ ID NO: 139022 - DNA, 384 bp, Glycine max
  unsure (1)..(384): unsure at all n locations
gtataagtaactcaccccttgcaatttttgtaccgtgtgggtggtacctatgatgattgcaaacctttgttcgtgggagtagaatgacaaccgttaagtatgagaagtgagagtctcttgtagaaccaccgagccgacgtgatgacgttgggattatattgggagagagttgtgttttgttaatcaactcctccatagttggttccatgattctttttgtttgattaagatgctaatcacaaatttaattatttgtatgaacacatgtactttctggtatgtgaatggtgtgtatcgagttactattcctatatatatgtgnattcacttacgtaatggcgattgtttggtgaaagattacattcatttacttaagaaaattaa

SEQ ID NO: 139023 - DNA, 267 bp, Glycine max
ggcaacctgccggcatgcaagcagcaacgatttcttttctcttattctctacagaggggagccaatccagaccgtgtgtcccgacactgaacaacttatgagagccaccgaggacccaactacagctgcccctaagctctctgaccgtacttcacaccgcgacgcatgccctgcgaactcctgggagtacccccacgcaagagacactgaaaccatggacgatgaaaggaatgatgctttcggcagaagggccaaccctaaagggac

SEQ ID NO: 139024 - DNA, 291 bp, Glycine max
agcttgtaggattatggggtacctatcccagtggtactaggtggcggtcgggcgatggtgcacaacaagttctccacatccacaatgcgcgcataaacccaccatcccctgtggcccacctccaactgagctcacgtactcccatgtagcccatatccccgtttctctcaacaccggatccccatcaatcctcccaagcttccacaacatccaagcaaaacaacattcaaatagaacaagctatcacagccaagcaaaacagagcaaaagcagacaactctgccaaaacgc

SEQ ID NO: 139025 - DNA, 369 bp, Glycine max
  unsure (1)..(369): unsure at all n locations
gcgctaagcacagcctgccgcgctaagccctagatgcttacgggactttacaacttcaaggtgggcttagcgctagggtaggctaaacgcttgggttttaaactcaaacgtcacgttggcacgctaagcgcaactgtgcgctaagcacgccatatgaatttcaatntttaaaaatcaaaggcagaggaactttgggtgttacctttgcacctaaacctttgcaccttcttacccttgagcacttgtgaactttctactgcgtgtgtactgctcgcttgcatcttcattgcttcattcaacaacaatccaacgatgttagcatatntctattcttatttntcattcttcaaaccttatgatagatgactt

SEQ ID NO: 139026 - DNA, 285 bp, Glycine max
agctcgataagcttctttttttttacctaagcttttgctacaacctttttctccccctttggcatcatcaaaaagccaaagatctcggaaatcattacaattataacaatggagttgcaaagatataagtatcaaagtattaaagacaatatgccaaactcataaaccaaaaataatctaaccagaatccaaataactgaaaatgttaacacccacaaaacatccagactggaaattaaaaatccaaacataaattaggaaatccttaccataataatggaaatt

SEQ ID NO: 139027 - DNA, 406 bp, Glycine max
catgccaatgctatggtgcaggctttcaatggcgcagaacacacctaatgattatgatgatgggtggctcaaattctcactaatgtaaactcatcactttcaaattgagctttccaaactatcatgacatgtagaggagaatcaaggatttcaagtcacaaaatgtcaagaacttttatgttcaaaacaattacccatttcttgaacatatcctataattcaaagaaaaacatgctaagtcgtacatgcacacaaaattgacccaaaatattaaactaataatccgacgaaactaacaacattaactaattatcacaacttacatagtagcagaaccaaccaaactagcataaccaaagaacactctcgccctccatacttaacaaacattgtctcatgtacacaa

SEQ ID NO: 139028 - DNA, 297 bp, Glycine max
agcttccttgttctcaaagatttccatagctgtcttttaccttgtaaatcacagggagcataaatattagccataagcaagagtgaatatagaagaaattaacatgactaagcataatcacaagctcccacaaatgcaagagtgaatatagaagaaagtcaacaagtaatttgagtataagacttcaaactagatagagggaaggaaatggatgcaggacagaatcaaatatattatttataatgtcattttgccttattttatttaatttgctaaactctaaattctgcttgtact

SEQ ID NO: 139029 - DNA, 273 bp, Glycine max
cccattctgttctacggaacctgtgaagatgattgcgacgtatatatgctgcaatcgctgatagaaatttgttcgacacaaagggtataactaaccccacgttataaagtgagaatgtgaagtcatgagcggaacaagagtgagactatgagagctgggaggctaattctggattctgtggttgatggaggctaaagcgacttaatactaccttgtaatgttatttacgacatgtgagaaacgttacgctcaacttgagagaaaaacacatga

SEQ ID NO: 139030 - DNA, 289 bp, Glycine max
atcttatcacctttaccggtgattgaaaaaagcttttaatgaagtcaagggcatgatagtgcaccgataccattaactggtgaatacgttcttgatcgggctaacaacatcaatactgtatttggaaagacccaaaagaaggaaaaattaaaacttccataaggaagaagaggtcaatattgtttgatcttccatactggtccaatctagatgtcagacattgtattgatgttatgtatgtcgagaaaaatgttggtgatagagtcatcgacacgcttcttaacattca

SEQ ID NO: 139031 - DNA, 288 bp, Glycine max
agcttccagattggtataccatgctacagctgctccggccaagctgtcttgaaagaaatggaccaacaacttctcgtccgcagaatacgcccccatctttcggcattacatccaaagatgccccttcggacatgtcgtacctttgtacttatcaaagtccggtactttgaatttgggagggatgacgatcttgggcacgagacataaatccgccaaatccgagaatgggtaattgccaaggccctggactgctcttaacctctcttcaagcgcctcaatctttccctt

SEQ ID NO: 139032 - DNA, 297 bp, Glycine max
agcttcggaagtatgtgatgaggtacaagccctaaaggcagagcttgaaagagcccgagtagtcgaagagaagttcaagtccatagccatcaaagtctgaaaagagtatgatgaactaagggacgtcaatatggccaccgctgatgccttggaacgagaaaccaagaaggcccaaaaggaagaacacgtgccagcaaagttttgaggggctttatagggcagcaatagtaagctcaagctccgaagaggtgaaaggaatcatcacgggtcaaaggcatgatcttgaaggacgagcta

SEQ ID NO: 139033 - DNA, 408 bp, Glycine max
  unsure (1)..(408): unsure at all n locations
cacttcatactaagcctgagatgacgaagtgttgaatggtgaaacttcctgctcttatttgtgaccacatagtggtacctggagatatgtcacggnggtcaggagaccttggggacgtcaggtggggtgctattgcccaaaaccaagcttgaccaatcccgacccaccccgagcatagtcggtcagtgagaacctgtgatgtacctaaacaggcgagctcctggcagtcaacagataaaaggaacaaagaccacaaagcaaggaggtttgtggtggctggccagctctgaaacttgattgatatgtgagatatggtctctggtaatcgattaccaagggtgggtaatcgattacaaggcttataaatgaagataggaggctaagatggtctctggtaatctgatacca

SEQ ID NO: 139034 - DNA, 296 bp, Glycine max
agcttgtctcattttttatgcgagacagagaccagcatgttagctatcatcgccaagtaccaagaagagttaggtctagccacggcccacgagcatagaatcgcggatgagtatgcccaagtgtatgcggaaaaagaggctagaggaagggtgatcgactctttacaccaagaggcaaccatgtggatggatcggtttgctcttaccttgaacgggagtcaagaacttccccgattgttagccaaggccaaggcgatggcagacacctactccgcccccgaagagattcatgggct

SEQ ID NO: 139035 - DNA, 459 bp, Glycine max
  unsure (1)..(459): unsure at all n locations
tactcaagctgactgcgcgtgttctctgccattgcttgatcaccaaggtttgaacatgctcaatgataccaattgatgtagcagaataggaactcagctaagggattcaaagttcttagacagacaaaggaactcaatgaaacgaatgaattctgatgggcatggtggtcatgcttttcattattagaagaaaaaattacaaggaggaggttgattacagattctattcaaaatgtttccttacttgccaattactacttatagttctcaaccactaactgcctaactactgtgaatgtatgatgattttgatgatgccaaagaagaatcanacaaggccgcttcgaaggataagcaatttgcttcaagattaatttaagaatgcttcaataaacaaagccttgtttcaagattcaataaagatcaagtcttgcctcataacaaanggtgtcaaagtca

SEQ ID NO: 139036 - DNA, 297 bp, Glycine max
agcttttatctgttttataatttaatgactgcgaaagcgagaagtttggtgtcccaaacacggtaaggcaaaaggaaatggatttcgcctttctgttcgcaagtacccggcatagataagttaataggttgcttaaggtaaataatatacttatatctcaaaaggataaaaagacgtgagtttaattattatttaagaattttgttggtggataatctataaatatttctatgagcgttttttaaatattaaaatttatcgcaatactgataagttctgttaaaaatccaacacacc

SEQ ID NO: 139037 - DNA, 452 bp, Glycine max
  unsure (1)..(452): unsure at all n locations
ctctggcctgttcctcaatctctctacatatctatctatctttctatcatcattacantttttagcatccttaataagtgagaactttgtcactactttttcctatcactttgtgcaaagatattctaagggaaaaatgacagaggagcaattaaaaaaggtggctcagactgagagtatntcccctaatcctgcacctgaacctgaacctgaacctgctgttccaaaagaggaagtggctgaggagaaatctgtaattccacaaccctcttcctctccttctgatgagtccaaagctcttgtcatagttgagagtatgataccataattcccctttatttcgctttctcttatcattacgttaatatctgctaccaaaacggtggnggtgatgatattatattattatatatccgatttcaaaacaaaatcaaataaaaaagtcgtcttat

SEQ ID NO: 139038 - DNA, 293 bp, Glycine max
agctttttattttcattatatgaagatgaatccgtggccacctcatggactcctctaagaataatagcatcatttcttgcactgaattgttgggagttggaagccatcttctcaatcaaattcctaccctcagcaggggtcatatcaccaagaactccaccactgacagcatcaatcatactcctctccatgttgctaagtccctcatagaaatattgaagaagttcctcaaaaatatggtggtgagggcagcttgcacacaatttcttgaatttttcccagtactcatacaa

SEQ ID NO: 139039 - DNA, 432 bp, Glycine max
  unsure (1)..(432): unsure at all n locations
agagattataaatatgtgaccatgtcatgagttctaataataattatcattatctctctcaatcaatctttcaatatctttcatctctttcaacagaactttctggtttcatttctcttcatctttctaaaagttttttatcaacactttctcttccaagaaaagttctttattcaaaaacttgtgctattcatctttttcattctcttctctcttttccaaaaagaattcaagaaggactaatcgcctaaattctttntgtgtctctcttctcccttttcaaaagaacaaaggactaaccgccagaattcttttgtgtctcccttttccctttccaagagaattcataaggacatagtttgaaaattcttttgattcttccctttcccttanacaaaagaatttaaaggactataccgctgagatatcttt

SEQ ID NO: 139040 - DNA, 301 bp, Glycine max
agctttgcaagttatgctctgaggctgtgatggagatggtaagtctcaaccagaagggttgtgtgctttgtgtcagcgaaacggtggtaagaggcgtggcaaattttattggtgagggatgaaaatttcgcaaagggttttcggaagacggtgttgctactactcttgctccctctgcaattggagttcaatagcaccaacacaaactgactctgactgtgagtgagtgcattcaccatttttcttccttcatttcaattttcaagctaatccctactcttatttattcatgcaccctttt

SEQ ID NO: 139041 - DNA, 517 bp, Glycine max
  unsure (1)..(517): unsure at all n locations
cactatcaatactaagcttgattatgttggaaccattggccacatacacgaggctctttgtcccgctcggtactcacgacaccattacaacaatatcatcaattggttttgtcctcttcatttttataaacgatgtacaaatggattttgggttgataactaagatgggaaagagggcatggaccattgccatatcgggattgctattacccatattntgtgcgctttcaatgatttggttgttgcattggtctcccacaccgtaatttcatttgcggtcatttctttcctccttagtgaacttcaaatccaaaactccgaacttgggaaattggcattatcttcagcattgatcagtgacatattgtgcacaatcgctaccgccatcggcactgcagttatgattactgagaattctaatgtcaaaggatgtataagaaacgtcttggcttttgatatgttggctatcttatccattagtgtgtcggccacaatgttatggatcatcaacataccc

SEQ ID NO: 139042 - DNA, 289 bp, Glycine max
  unsure (1)..(289): unsure at all n locations
agcgatcttttttttgaagtnctagcccgtgtgggagactcttccttgacaagactcttccaatctaagtttaagggcataaccttctattgcataaaagagaatgaattgcgtaaggtcttatttatggactccgaacatgccgtgtagcgatattccgttgaatgtcatatcgaatacctttggctaactaatttgatagggacatctttccgctgtcgtacatttattatatttcaaatacttatatagtatatgtacatgtctttcgttcctatggataagacaa

SEQ ID NO: 139043 - DNA, 421 bp, Glycine max
acccacttgccatgtgaagattaatccctagcttgagagaaatccatgggaagatagacagtgaacgaacgctttgagtgagagcatatttttgaattgtgaagggatggtggaagaattcttaatagaatgctttttcttgactcctatctggaaacttttactaaaccgctccctctcaactttcataacaaaagttcatgcttccatatgcccatgtcttacataaccattaaacccatcgcaacacatacatataaacatataatgtatcatcaaataaagtttaactaattgtgttcgaaacataaaattaattaaattcctttatatatttaatgaatcacttatcatacatttacaatttaccgggtatattagatcaaatcattaagtaatcgtcacaaaaagacttgatata

SEQ ID NO: 139044 - DNA, 277 bp, Glycine max
agctttacttatgtgtcaatttgtctcacttccctgttttctacattatattcaaactcggacaacttaagaataaagtcggcccgactccatgaaagccatgtagatcttatccaattgatatagaaactatatgctaatggcacgttctatcaaagcatggtgttccagggtcctctagcgagaggttcgtcatagtcatccacctattggtatgctcacctgaacacgatggttaagatcagtccaggatatcgacacaaactgctaagcggga

SEQ ID NO: 139045 - DNA, 291 bp, Glycine max
agcttcttatcttggcaattcttggtggtgaagctccttcttccttggcttattccctagtggatggtgcctcccctatcctcttctcctttgccttccgctgcatctccatggtgaaaaatcaccattgaaggacctcattgaagctcaaagatccagcctccatagaagctccacaagcaagcttccatcacttttcacacagaggtcagattcgggcacataatatgtcgagatgctcggaattgaaccacggaagctctcgagtaattcaaatggtcataacttttc

SEQ ID NO: 139046 - DNA, 426 bp, Glycine max
  unsure (1)..(426): unsure at all n locations
gcattcggacctatcaaactcagctgaatcgacctagtggaanagtatgttcttttaatctctcgagagctttcgntgtgcaatgtcgagcatctcgacatgttatgcgctcgaatcggacatccgtgtgaaaagttatgaccatttgagtttctcgagagcttccgtggttcaatttcgagcatctcgtgatattatgtgcccgaatctgaccttcgtgtgaagagctatgaccatttgaatttctcgagagcttccgatgtttaatttcgagcgtctcaatatattgtaagcctgaatcggagctcagtgtgaaaagctatgaccatttgtatttctcgaaagcttccctggctcaattgcgagcatctcgacatattatgtgcccgaatctgaccttcgtgcgaaaggtatgaccatttgaat

SEQ ID NO: 139047 - DNA, 288 bp, Glycine max
agcttatttcgttttaaaatttcaaattggttgaacaggttatttcttctgggcttggataagtatggcaaaggtgactggcgaagcatatcaaggaactttgtggtgacaagaacacctacacaagtagcaagccatgcccaaaaatacttcattcgtttgaactccatgaacaaagatagaaggcgatccaacatacatgatatcaccagcgttatcaatggagacatttcagcacctcaaggaccaataaccggtcaaacaaacggttctgctggaaattctact

SEQ ID NO: 139048 - DNA, 492 bp, Glycine max
  unsure (1)..(492): unsure at all n locations
tcttgatcgcctaagtgtggaccctctagtgcaatcttcttttcaccactttntttggagccccatgaatgtcattgcctagcgctgctcatgtgtgctccaccttcgagtctggagccccacgaatgtcattgcctagcgctgttagccaattctacattctccacttttattcggagccccatgaatgtcattgcctatcgctcgtcatgtgtcctccaccttcgagtttggagctatgcttcatgattgcctaagtgtggaccctctagtgcaatcctccattctccacttttattcggagccccatgaatgtcattgcctagcgctgttcatgtgtcctccaccttcgagttcggagccatgcttcatgaatgcctaagtgtggaccctataatccaatcctccatatcccacttttattcggagcaccgngaatgtcattgcctagcgctgttcatgtgtcctccacattcgagactggagacccgc

SEQ ID NO: 139049 - DNA, 286 bp, Glycine max
agcttcatgaacatatcagctgagttttcttttgtattaactttttggacttcaatcctcttctcagtacgattgaagtgatattggacgtcaatgtgctagtcctttcatgatggacttgatccttggcaaagcaaattgcactcagactgtcatagaaaatgatagctttattttatggaaacctaagattattgataagaccctttaataagattccttccttcgctgatttttccagagccatatattctgccatagagatgatgaactaatcaaatctctt

SEQ ID NO: 139050 - DNA, 288 bp, Glycine max
agcttgtgaaagtgccttatgacagcataatttacttttagtaagctaaaagtttttttttttatcggcaaatatttgtttttaattattagttttttgttagcaggggaaatcgaacccatgacctttccctccctcccttctccttttaccacccacccaaccttataactcctagtaagctaaaagttataaaagggtcataagccattttcacaagctcagcctttcaaaataattttattgaatataagagcttaattatgccccttatatcatgtttgtatg

SEQ ID NO: 139051 - DNA, 331 bp, Glycine max
  unsure (1)..(331): unsure at all n locations
atcgatggaagattggggccatgatcaacacatgangcaaccaactggagcacttcaggagatggagacagtcctgaacttgctttttttgaagagtgtgacgagcttgccactttcaaatttagaggaagcaagctaatgtcagattcaatctgctgagttcctacagctcctgtatgagaaagtagacgctatgatgggcccaatgggagtgagcttgaagcaccgttatcaacatggtggcttctgtgcaaatccctgctgttttcagcacaatctggaagaccccgactgaacttgtgtgatcttctcttctctttctttttgacac

SEQ ID NO: 139052 - DNA, 294 bp, Glycine max
  unsure (1)..(294): unsure at all n locations
agcttcacaaactatttatcgntgttcccttctggccttcattttgcgacacaactccaagccaaaggtcgtggtcacttaggacagaatttgcgaccgaatcgacgtaccactttccacctatgtagatcatgttctccaatgttattcggccttgctcgaatcctctggatgcggtgaattgtgaatcctgatgccctccacaagactgagaggcatttcataccaccagccatcaagaaaattatacttggccaccaccattctcatcaaaaatcacccccatggaggaac

SEQ ID NO: 139053 - DNA, 289 bp, Glycine max
agcttggaggggttgtttgattttttggcctcagaataattaagaaggggggttgaattaattattcctaaacctttaccaattaaaaagttactcttctacggcttttactaaattgttaagagaatgaggagtagaagagaaacttatcagaaagtaaaagcggaaattaaatgcacagcggaaagtaaaaaagttgggaaaaaggaaacaaacacacaagagtttttatactggttcggcaacaacccgtgcctacctccagtcctcaagcgacctgccgtccttg

SEQ ID NO: 139054 - DNA, 419 bp, Glycine max
ctatctcacagcaccaagggtctagtttaggccctctctctcttctcttttctctctctcttctgtctctcctattttcggttttagttttaggcttttcttagacacttttttcattttgcaattccacttttagtaataaaatttcgttcttcaatctataatttcgttctctattgattaatgcaaggctaagtctccagcgttgttttctcttgaggatcaagcacagttctctttgaggtcttattattactgttaaattctgttcagtttttcctcttcactaattactctgaatttggtgctattaattcatgcatgcttagtgcttgattaattgtctctgcacttaatttgcattcatgcttaatggatcgttatgattaattggcggatgtgttgcttaatcacataat

SEQ ID NO: 139055 - DNA, 291 bp, Glycine max
agcttgctgccatggttttttccgactatgctcttgtgtggtggaacaagctacaaaaggagagagcatgaaatgaagagcccatggttgatacatggaccgagatgaaaaagatcatgaggaagcggtttgtgccggttagtttcttaagggacttgaaattcaagctccaaaaactaacccaaggcaacaagggggtaactatggctcgatttcttaatggatgtgctcatgattcaagccaatattgaagaagatgaggagggtactatggctcgatttcttaatggc

SEQ ID NO: 139056 - DNA, 415 bp, Glycine max
  unsure (1)..(415): unsure at all n locations
actatcaatactaagcttctcgatatgtatgcgttgaatcggcatgcgatgatttatttgatctttntaattcccgagagcttccgctgttcaatatctagcatctcgatacgctatgtgcctgaatcggacatgcgagtgaaaagttatgaccatttgaatttctcgagagcttccgtagttaaatatctagcgtctcgatacgctatgcgcctacatcgaacatgcgagtgaaaagttatgaccattttaatttctcgagagattccgctggtcaatttcgagcgtctcgatatgttatgtgcctgaatcggacatgcgcataaaaagttatgaccattttaatatctcgtgagcatctgttgttcaatttctagcgtctcgatactctatgcgcctgaatctggcatgcgag

SEQ ID NO: 139057 - DNA, 257 bp, Glycine max
agcttcttagtttcagatgatgcagatgggtttgtagctacctcatgcactcctctaatgactatggcatcatttctggcactaaactgctgggagttggaggccatcttctcaattaaatttctggcttcaccaggagtcatgtctccaagggctccaccactggcagcatctatcatacttctctccatattactgagtccttcataaaaatattggagaaaaagttgttctgaaatctgatggtgagggcacct

SEQ ID NO: 139058 - DNA, 292 bp, Glycine max
agcttgtataatggctagacatgatacatgtcagggtttggtttggttcaaggataaaagggatgccccacattatttccatgacacaaatgcaaaaatgatgatttggaaactttatgcaaaactggtcatgcatgcacctatgtggacactcaagtgtcaaatttttatggtcatgtgatgctagggctcaagattcatttcctctattttaaatcaacccaatgtttccaaaatatgttcttttatcaatttgtgcattcatccgagtccattttgggcgttcggggaa

SEQ ID NO: 139059 - DNA, 387 bp, Glycine max
atgaagtttctggtgttctaaaccctgataacttgtgttattcattcttttcatctcttctccctttgccaaaaagaattcgccaaggactaaccgtttgaattctttttgtgtctctcttctcccttttccaaaagaacgaaggactaaccgcctgaattattttgtgtctcccttctcccttgtcaaagaattcaaaacgacacagtctgagaattcttttgattcttccctttccctaatacaaaagtgttcaaaggactaaccgcctgagaattcttttgtatccccattcacaaagtatcaaaggtttaaccacctgagatctttgtcttaacacattggaggatacatcctttgtggtacaagtagagggtacatctacat

SEQ ID NO: 139060 - DNA, 292 bp, Glycine max
agcttatcataggatagttttctatagaaagcttttcaaggaagctacctattctataaatagaaacatgtgtaacacttgttgcaactttgatgaatgagagtcttgcgagacacaactcaaagttcaacttctctccctcttttattccttcaatttcgtgctcccccctctcttattctctccctctttcttttcctccattgaagcatcctcccaagcttcttatccatgcttcttatccaaggctcatcttggtggtgaagctccttttttcctggcttattcccta

SEQ ID NO: 139061 - DNA, 440 bp, Glycine max
tggagaggatgcttcaatggacgaaaagaaagaaggagatattgatggacggggagcacgaacatgaacgaagaaaataggagagaagttgaactttgagttgtgtctcacaagactctcattcatcaaagttacaacaagtgttacacatgcttctatttatagactaggtagcttccttgagaagctttcttgagaaaacttccttgagaagcttctctgagaaaactaccttgagaagctagagcttatctacacacacccctctcataactaagctcaccttcttgagaagctttcttaagaagattcctaatgaagctagagcttagctacacatacctctctaatagctaagctcaccttcttgagatgagaagctagaacgtagctacacaccctctatgataactaagctcacactcatgacacaaaacatg

SEQ ID NO: 139062 - DNA, 295 bp, Glycine max
agcttaaccatttaatttttcaaatgcatgatttgaatggaagaggtgagtggaactatgttcatgatgcacatgcagaattcaattactgtattgcaaatttcaaaattaattgcatcaataaatttcactaagctaatctaataatagtaatttcaatcaataaacatttttcctttttttaatagtattcggtctttatttatctgctcctgacagatgatgatagggactgacatctatatgcatgcagttatcaaattcctacttgcagtttctgcttggacctggaacc

SEQ ID NO: 139063 - DNA, 486 bp, Glycine max
  unsure (1)..(486): unsure at all n locations
tncttcttcaatttattacgaagatacagtttattnggttccactatatatatggacgagcttgggttatgataaaagattaacagtaaatattgattatttaattttacaagaatggtttaattatgtctaaatacaattaatcttgatatttatataaaaccaaaagatcatagttgggtatatattgttttatctcaagtctttttttaacttaccatgctacattattacaaaatatatgttgattttgtggagggtaagctgtcattctcaacatgacaaacataagtagcaaggcatgtatatgtggtaattagaaagggcagcaacagttttaatatctacctggtccacttctctgcttccaacgcaggtctgcataacccttcgtgacaggacacaacacgtacattttaagccatcgtatacgtattacaatatccgttcaatttgctgacaacacgatgtaaattgtttattctg

SEQ ID NO: 139064 - DNA, 293 bp, Glycine max
agctacaccttttttcctttctaaaccctcaaacgctattatccctcctaacatatgtgtgctgaaataatccaatcctcatttaacataccaatacctcatagctctaattttccattgtagaatccgaaatttatacccaaccaagaatcgatcaaatgtaacataagttacttaacagctggggtccaatttccataagaattttcatgcacctatctaaaaagctaataatcttcacattattttatagaaaccgggaaggatcacccaccgtttccatccccattttc

SEQ ID NO: 139065 - DNA, 397 bp, Glycine max
  unsure (1)..(397): unsure at all n locations
gacactatacgaaactcacgcttntatagagacacaacaatgtgcacagtacttcaaatttataattattttcttactcgagaaagccttcggtgcaatccaatatttgttggatacgctggcatccatcacatgtctaatatcttttcatctcataaagcagtgatgaatttaaaatgaaaactctaatctattttatatatcgttttctatattattatactcttctattaatacattatttattattgctttcaattcttgatctataattaattgtatgtactacactcatctcaaaagccaacgattacgtgtaaaacttattattataaatctaatgttcatgaaagtgatggatgtggcataactatctgcatgaaatatgctaccatat

SEQ ID NO: 139066 - DNA, 290 bp, Glycine max
agctttttctgcagaaaaatattttctgtgtcctcaggctaagtgtgagtctgctgcgcttagctcctgagtaaagttttataaggcgcgctaagctcagcttgctccgcttagcgtccagtcaaaattttagtgttattttttgtgtttttgttgaaaataacttgtgctaatctcttgtgttttatcttatattttgcagatggcatctaagaaaaggaaggcttcttctacaccttcccaagtcagatatgatcagtctcggttcacatctcaagaagcttgggaga

SEQ ID NO: 139067 - DNA, 472 bp, Glycine max
  unsure (1)..(472): unsure at all n locations
gatagttttaaacctaatatgatgataagtcaatgggagatccaatgtcccttttatttgtttnttttttatgcatggagaaattatccatgttaatccaacagaaggtacatgataatcacttatggttgtctgtcaaagtttctccaaatgtgcctagcatttcccacttattttnttttataaatgattgattactttttataaaagcaaaagcgtctcaagttaggttggtcaaagaagttcttgatgagttttgtaatgcttctgggctaaaggttaatattcatatatctacgattatatgacctttagcaacatgtgttttaataaaaaatattacataacatgataatgtgactcatgtgaattaacggtcttaaagtgatttaataaaataaacggaccattgacacatatgggaagttataaacattatggagagtaaataacttctgataactaacttgat

SEQ ID NO: 139068 - DNA, 288 bp, Glycine max
agcttgtggcgattcatgatgaggatgtggttgctttgaaggagcaagttgctttgaaggacactactattaaaaagaataatgaggtaatagatgcaatgagtcagaggagggaaaaaaaataatggtcgaagagaaagaaataaaagaccaagaaagagaaatagaggtaggaaaagacagaaaaagaaatagttgaaaaaaataaagatgaagaaaagagtatgagtgaaaaagaaagagaaaaaaggaaagaaaaagcttaagataagggtacggaaataccat

SEQ ID NO: 139069 - DNA, 289 bp, Glycine max
agcttggacatttttccaaaacgtcatttgtagtgacatcctttataactaagttgttattatgtgccaacatgtttgtgtttgaagcccattacaagacacactagatcatgtccctattacatgcctgaacctataacttgcactcaatggtccattacttgcaatgtttccaatctgattttgatataataatgaagactttaatagtgatgatgattcttgtaccaccccagcttttactaggaaatcctccaaagtcatttccccaagtgctggttgccctttg

SEQ ID NO: 139070 - DNA, 207 bp, Glycine max
  unsure (1)..(207): unsure at all n locations
gtcttctctaagcctttactacctgtagctcgctcttactttatccgcaagctggaactcattaacattcactctccaacttgagggaggtatnatagctgtataaagggatgaaagttagctacaataactagcgtgggaagatagttattacagttgtatcaacagaggaacgatagtgttaacactcgacctatcattgcacct

SEQ ID NO: 139071 - DNA, 455 bp, Glycine max
  unsure (1)..(455): unsure at all n locations
ttagagtcacctgccgcatgcaagcttacaactacattgcatatntaagatctgacgtgataagtntattagcactcattgttccattaactttntcatgctcttgtactaagcccagcacaggcacagattgcaacacacacaacttcaatctatctacgatctctatctcactgcatttcatagtttgcatacatatacaatacaagtaaaaatntcttttaattatatataatatctgaagtacacaatattntaagattagagatcagcttgtaactaaaaactatgtttctcctagaaaggaaaatgtaacaaaaacttggtaagaaaaacagtctatagaagtttggaaatggtatacctttgtttcctatttttatttttgttgaatcgaagattcttatgcatatattttaggtccttaacagccatgaagtttaacccctttcttt

SEQ ID NO: 139072 - DNA, 431 bp, Glycine max
  unsure (1)..(431): unsure at all n locations
tagccgtgtgggtctttngaaagaaataagatagtggtctgtttttgaggagtttagaagggcaccgttcaattgaacaagaggagattgcctatggcatttttctagagtctaaaaccactttgggagctcttctttattcatgtactccattatctttgattcttctggtctttggtctctcattaccatgagaggctaacttacctattgttgggggcttggataccaaacactgatgtaatgatctctactattcatttaatgctatttcagtgttattgcatccttcctatgtttattgatctgattatggtttgatcacttatatacatatgtgtcatagcgttttaatcattgaaaaatgtttttacactaagaacttgaagaacttctaagtacccattctaggatggaaggattgatatcct

SEQ ID NO: 139073 - DNA, 453 bp, Glycine max
  unsure (1)..(453): unsure at all n locations
caaatggcatcttgttttcttntttacatctgtactgcatctaatagacatttccacaaaatattcggagcatttgtgcctctttaaagaagagtangagaataggggtgtttgtcacagtggtacttacctctcanacaatcttatacatatttgactttttgatgtggctgcccttggcatggctctccgtgaaccatcagaatttgttaggttatacttgtcaagagctaccctggtagatgtctcagcagacttggttgatcattggaaaacgcaaattgaatagcatgtgaggccttggcaattgcgggtttatgtttggactgagtatctaaatccatctgtgcattgtcttgcatgggattatgatggtgtcataactacttttagccgtttgagtgcagagtgtggcccacatnagaagagtgctttgaatcaagtgcattggtt

SEQ ID NO: 139074 - DNA, 436 bp, Glycine max
  unsure (1)..(436): unsure at all n locations
tagtataatacgaagcaccaatataaatatcctgatgtttactattgatatatagcatcgaacgtgcattgaactagctagagagaataaaaattgctgataatagtacactccatatgtggtcatgatgcgtaaaccacaactgcaagacaacactttaaaatatagtattagctcgtaattattgtggttgtgttgagcatgcttggcctcacatgactgacacgtggcgaatacatctgcctatatatgactctaccacaaacttccatttttactacttcttaagaaaatttctgatatgagacagtagaagaaaattaccatgagactttcatggctgagaatgaagaggcagntaaagagacgtatagttgtaaatgtgtctaaaatgtatgagatattatgcactgcacgtcaacttgtataatgagag

SEQ ID NO: 139075 - DNA, 473 bp, Glycine max
  unsure (1)..(473): unsure at all n locations
cgcgatcttaagcaccgcngctgcagcttagagtttccttttgaaacgcgttactcatttcaataatacaagatcttttgctcatctgttcttgcgccttcacccttcctcattcatttgcatatttatttctttctgctgcgatacagatccgacgacgagtcctgtgaaggtactaataccatggacccgactgtcgatttcgggcgagaagcagatcagatggatgaggaagaagacgacatatggttatccccggagatggaaaggatggccgcccaagaggaccgagcattgaagccgcaccaagaggaaacggaggtcatatatcttggtgctggcggcgaaaggaggtaaaggtgggaatgagcatgactgcctcaatccaaaacaagctggtgactctactgtgagactaccaagacgtcttcacctggtcatattgagatatgcctggcttagactctgacatt

SEQ ID NO: 139076 - DNA, 384 bp, Glycine max
gtctctctatgacttgatacattcacctatagcatggtttgttagaactgcccagttattgagaagatgggtgatcgttgatcggtaagtgtaccggggcacgcaagtagtattaaaacgggaagaattctgagtatcgatctcatggaacttagtttacttggtgaaagttgttgtttggcaagcaagcattggtgatacaattaatggttgaaaagagaaataaaagtctgatctagattaaatgaaagcgagtcaagtgagtcatggtgagtgacaacaaatatgcgaacatgttggttacttcttcacggtattgtgatgtaatttaaggatatttcttctcttaatactgctgtggattctatgtagaggtcctaacat

SEQ ID NO: 139077 - DNA, 398 bp, Glycine max
  unsure (1)..(398): unsure at all n locations
gctttatgatggcatgtaataaagaatttttcttattgttgtcctactgnggatagcatttgcttaaatatcaagctgttaattttttatttgcagctcttacttcattatggtgtcaatgatagaaaggggatccttccagataaacatgttatgctgtctgcaaaatgtccggtatgatatttgtgactttaaaaattctgtaattgtcaactatacagcgtgagacatgaatatgtgctgggtatgctgagattgcaacttctcatggataatgtangccttacctgaacttctctcttcactaaaggagggtggtcattgagccttgatctttagtcaatggacttcaatgcttgacatattgnagtggacttttgatgtcattggattgacct

SEQ ID NO: 139078 - DNA, 473 bp, Glycine max
ggctgcagcttcttataagctgaaccagtttatcatatttcacaagttgagttttattcagaaaattagagtttatctctgttatcttagtgagagtgattctaataaattcttgagtgattcaagaacaccctgactgcatcaaaggacttttacaacctttgtgtgttgccctcgtcggaaagagtgattctttccttcctttcatcttcaaccttgttctttcaaaccactattacagaaaatccacttctgcccagaattatctcgtggccataactcccattttacacactcaaattaagtgattcttgagcctaaattgaatttcaaaacgagacctctcacgtcattgtggaatcacctcatttggagctctgtagctagagttatagccatttctatctttctgtccagccaccacttaacctacgttgtaccatcccatttatccattttatgcaaagaaccac

SEQ ID NO: 139079 - DNA, 322 bp, Glycine max
ttttttcttcctcaacgtgggcctctggagaactcttggaagcccaatacgcctggaggctatttattacccctgctcacaatatacctatcctgcctttttatgctgatgcatttcacggtacggttcacgaacttcaacacactctgaaacgatcctgtgttttccttccgtaaaggcacggaaccttacggattacataatcatcctttttaggcttcaaatgttccgaacccactgattctgacaagcttccttgatttcggatgtaccaacttacggatcggcaacatgtctctttactctggccgaatggaactca

SEQ ID NO: 139080 - DNA, 368 bp, Glycine max
  unsure (1)..(368): unsure at all n locations
ttattgttgaccacagagtggtacctggatatatgtcgcgggggtcacgagaccttggggacgtcaggtggggtgctattgcccaaaaccaagcttgaccaatcccgacccatccctggcatagtcggtcagtgagaacctgtgatgtacctaaacangcgagctcctggcagtcaacagataaaaggaacaaagaccacaaagcaaggaggcttgtggtggctggccagctgtgaactttgatngatatgtgggttatggcctctggtaatcgattaccaagggtgggtaatcgattacaacgcttaataatgaagacagggggctaagatggtctctgtgtatcgattaccagcggatgtaatcta

SEQ ID NO: 139081 - DNA, 416 bp, Glycine max
  unsure (1)..(416): unsure at all n locations
gattcaacctcatacgggtgggaagaagggttggtaattcattaataacccaaatactacaatttctaaaattctcacagctcaatatttttcaaatatttgatacttggatgcccaactaaggcataaaccaagctatgcatggcatagtttatttgcttcacatatattggtcaaggatggaattctgtggggaatcgatgacaactccatcaatttttggagccaaccatgggtgccagcatcagcgagaccatatatcacttcatctaccccgctcggccttcaggatcttatagtcattccactcatctaccaccaccaacaatgntggcattaagatgtggtgcaacaaattgtcaatgacaatgactaaagaaatgtcgcttcactcctcgtgttgaacagtgaagtca

SEQ ID NO: 139082 - DNA, 412 bp, Glycine max
  unsure (1)..(412): unsure at all n locations
cacactatttgaatctccttatgctgtctttacatatataaaacagtcgcaacgtcccaattattggaaatcatattcatatatcactggggcatatcaccgagcactggtggggcgctcgtntagacacaaattgcatgagaatggggacaatgtggcatgccccattgcttcagaatacaacataggcctaattccttctcacacaaaccctcaactcgacaaaacaagcatggattcagatgcaaattgcttcacgaattttgcaaaaaatgagcaactaaagcaccaaaacacatcaatggagagccaaataaccaagggaaattgcacttacttgtggggagtgaacttaagcgtgaaaagggaagctaaaactcaacaatggaagcttggtggctgctgttctcat

SEQ ID NO: 139083 - DNA, 351 bp, Glycine max
accgtgtgtattaccaatcatatcatctctactcctacacctctggtaagagtatcactttttatttcataaaccactatcggagtagatgcatgttctggggattctaattaactacgtcggtttaaatataggtgttgccacctaacgctgaggatatcattgggcacagatatcaatatctcactgaagaagcacctcgcggtcatcagattcggagagatggctatccaagatgggctgcaaactctcgactgcacctaggtactaagtcctgatagacaataacttgttggctcgagatgacgtggtcttttattctcggccaaccaaggagtatcggagatcatc

SEQ ID NO: 139084 - DNA, 463 bp, Glycine max
  unsure (1)..(463): unsure at all n locations
agcttgctctntaattggtgatggatgatgttgtaccaatgttgcaagatccaggctagtgtccaaactgaatttggatactaagccccattctaggccatacagacttcaatggcttagtgaagatgaagaggtaaaactgactcatcaggttgaggtgtgtttaaccattggaagatacaatgatagtgtgttgtgtgatgtggttctaatggaggcgactcatataatattgggaagaccatggtagtatgataccaaagcatgatggcttcaccaacaagatttctttccagcaccatgaccagaagattattcttaaacctctatcccctagagaagtgtgtgatgatcaaatccgaatgagagaaaagagagaacaagatanataaaagagtgaggcaccaaagaggaataggaaaaagaagtgtgatacacatgagagaaagagtgtacacatgat

SEQ ID NO: 139085 - DNA, 467 bp, Glycine max
tactcaagcttaaagttgaattaatacgttcagaaactgttggttatctattaccatatatgtgtaatcgattacacagggcaaattttgaattcaaattttaatagctgttgtaaatcagttttggccactggtaatcgattacatcctctggtaatcgattaccagagagtaaatttcttgtaaaagactctttaacttaattttcttggccaaaccttttgctacttcaattggaattcccttcctatttaatataccctttctaagactctaaagactgtcttgatcatccatcttgaatatctttaattgctttgtcttgaataaagctttgagacgcatgtgatcttttggcatcatcaaaacatcggcttgatcctttgtctacaatctccacctctttgatgatgacaatccctgaaatcaagacaaactatatacaagatgatagcacgttcacacaa

SEQ ID NO: 139086 - DNA, 455 bp, Glycine max
  unsure (1)..(455): unsure at all n locations
agctattgagtgaaaggatgtttctcttctctatttaaattgaatcncaacgtgcaagggcactggtaatcgattaccaaaacattgtaatcaattacagccttttgaaaataattggaacgttgtaaattcagtttgaaaactttttcaaactcattttgctactattaatcgattacaacaatatggtaattgattaccagagagtaaaaactctntggtaaaggctttttcaaaaacacatggctattcaaagttttgaaaaaactttttaatacttatcttgattgagtcttttcttcattcttgaatcttgagtcttgaatcttgatcttgattcttgagatcttgaatcttgaatcttgaatcttgattcttgattctaggctttcttcttgagtcttgaattnttcttgattctcgaactcttgaattcttcttgatcacttgagttg

SEQ ID NO: 139087 - DNA, 467 bp, Glycine max
  unsure (1)..(467): unsure at all n locations
acacttagaatctcagcttgacttgagtcataagagattataattgttttcttgtatgaatnngaagaacaatctatcatttatctttcaatatcttctttcaacactttcaacacatctttctgatttatttctcttcatctttctaaaagttttgttcaaacactttgtcttccaagaaaagttctttgttcaaaaacttgtgttattcatctttttcattctcttctccctttgccaaaagagcgaaggactaaccgcctgaattcttttgtgtctctcttctcccttacaaaagattcaaaggactaaccgtctgagaattcttttgattcttcccttccccataagcaaaatatttcaaaggactaaccgcctgagatatcttttgtttctccttacatagattcaaaggactaactgcctaagaattctttgtcccaacacattggagggtacatcctttg

SEQ ID NO: 139088 - DNA, 437 bp, Glycine max
  unsure (1)..(437): unsure at all n locations
agcttcacactttgtagctattgctactattttcacacaaaaatccattgtggtcctgataactgcaaaatttgatagtcaattttggctaataatgatcgtaatttattcactttactattgtttttaataaaataacgaagaaattaacatctttgcaattttttattagcataagtcaaaaagaagaagaattcaagtgctttagaagaaaattgatgcaaacaatggaagaaaaaatccttgaagaaaagttggaagaattggacagctcgctcagcatgcaatccaggcttagcgtgtaacaccctgatatatatatctatatattattagtaattatgttggatgtttgattatttgttgcgctattttcatccgtaattatttntaaggaagctaatttaagtaatagaggggtggatagataaggatgt

SEQ ID NO: 139089 - DNA, 453 bp, Glycine max
  unsure (1)..(453): unsure at all n locations
tntcaatcgccttctgaggacctatcttttttttaattttaaatatccaaaatcttttcccaatgctcaccatccctgaaaagctcaaaagctatccttcacattaatgtaacaattgcacgataagagaattggatgagtaattgtgtatggtggcaagttttgtgcacggaaactaattttccttttaaatagttgggattcatatgcgtaggaatggtgaaataaatgaaatagcaaaaaacaaaancgttgcgattaaaatgctcgggtacttgttgatgaccaattgaagtattttctaagtcagcctagaccacaacctcttcgatttcatcttttcaagatgagattattgaatgataaattgaatgcacatatcatactaccatactatatataaataaatggaatccttgatctgttagtttcacagcctggattgactgtgcc

SEQ ID NO: 139090 - DNA, 380 bp, Glycine max
  unsure (1)..(380): unsure at all n locations
cgaacattaactactacaaaagtattttctacaatgctggatcagaaatattattttagtcatgcactctatctttattggtatatggtgctattaagaacaaataatgggggaacaattttataatatttattttcatatttatgtttaaaaataatatttgtactgaattttatatctgcatagataataattgtaatctttctctgcacctactaggtaggtacctatagacccatacttatgattcacattttacttatgtataagattaatantaataaatcaatagaaataattcaattgaaacaaacataatatngattcttctacacataagttataaataattaaatacaaagataattatttaaccatta

SEQ ID NO: 139091 - DNA, 443 bp, Glycine max
agcttagcctcaagttcttgcagaatagattcttttttttatgtgaaagctaaatggagtaatggaggtcatacaccggatgatgaatatttcttggttatgttctaagattggaaagacttgtgccatgtctttgaagttggctcatggcttgtaacatatcattatgttctttgtcaaaagatggaaggttacttttttaatttttgaaaatgactttagaagaatggttgcttagattcacatccttatttatcctactaaaatctatagttgcaatatacacaatttttctcttgagtttgtgttgaagtggaactcttcaagacgttgatttaaattcttcactttaatcattacatttataatgttataataaggtatgcacttgcgtggtttgcatgaggtatgttttgtcatcctaaagaagtatgtcaaatgtt

SEQ ID NO: 139092 - DNA, 474 bp, Glycine max
  unsure (1)..(474): unsure at all n locations
agaaactcaagctggaacgatgtaaacattatggtacttatctatgaaagcttgttttatctattttggtttatggtgtgaaagcttgccctgctgaaggattgcttgtaactagcatgcactggtgcatgtgctcatcatatgctttggtctatgaaatgaaattatggttgagccatgttggttctcttgtttaagaagtgtcaaatgaaatttgctagtagttttctgctcaggtgttggagcttttatgcaggctttggagcaatntctactagcaatttcctctgcatctatacaatttccatgacagtaaggaactattgatatggactaggaccactgttaaacctcatagcagcttgtagagtttgaaaaataatcacatgatttaatgtcttgtttcttctccttcttttataatttacacattgttttggagctgcagcttcatgtatttgaacttcgaattag

SEQ ID NO: 139093 - DNA, 472 bp, Glycine max
  unsure (1)..(472): unsure at all n locations
gtcacctgccgcatgcaagcttctccctatttgctataaatagggttgtagtgtatattaanangggtcagccctgtaggcacttctctctctttcgaatttgctgaggaaaattagttccgagaagaaaatccaagccgaggcgctgtcgtaacgtttccgtgagtgattacgcgaagattctcgaccgttcttcaagattcatcgttcgttcttcgttttcttcagtcttcaacgggtaagtacctcaaaccaagctttgtaattcattctatgtacccgtggtggtccacatttcgtttcatgtatttttattctcgttgtcatttactttttatacccccttttgacgtgcttaagccatttatttaagtcatttctcgcttaatggaagaataaaataagtttccaccgatcggttgaattgtatcatccgttaattntgggttaaatgaattccgaccgttcgatc

SEQ ID NO: 139094 - DNA, 478 bp, Glycine max
agcttgtaggattatggtgtacccatcacatgtgttactaggtggcggacgggcgatggtgcacaacaagttttccacatccacaaatcgcgcataaacccaccatcccctattgcccacctccaactgagctcacgtactcccacgtagcccatatcctcctttctctcaacaccgggtccccatcaatcctctcaagcttccccaacatccaggtaattcaacatccaaatcatcacaaactaacaaaccaagcaaaacagggcaaaggcagaaaactctgcccaaaactcaaaccaaaatcacagctctttctcacttacagaccctagtaacatttccttctttctaattcgttaaccgttggatcgactcgtatatattactggaagtctctagtacataagtctacatattgaccgttgggatctgccagctaacatctagaactcattctgcactactctttccacaacca

SEQ ID NO: 139095 - DNA, 457 bp, Glycine max
tctctgcagatcaagttgattcgtaagaaagttgcggattttctttatctgcaagcttattgcggatcaactagatccgtaaatgtgtatattaattttaaaaaatgtataacattctttgatatttgagcatatgtttccttctattgtactgcacaacccgttgccttctattttactgcacatctttgatatttgagcattcccatatgttgtacattcttttcactgtggtactttatttcccatgcatgaataacatgcctataatctggttaaataatgattggaacgtatgtcctctcttaaggaacttatgttaaacctatttattgtgaaagacattctcttcgattttacatgtgttttacattgtatatacccattaccttatacaatgaaaatactcagtctcgtgtagactttctctcataatcaatctatcatgtcttctatt

SEQ ID NO: 139096 - DNA, 416 bp, Glycine max
  unsure (1)..(416): unsure at all n locations
aataattaaggccattaacctagggaattaaaataacttaatggctgagtgtaactgaaattgtggcaaccaaaagtcacccncaatagccatcaatcagccaccatttggtctcccaaaaggctgatgcctaggttgccaattgggcccttagtacaacttgaactaaacctaactaaagcccttttagttgattaacccaaaacatatttttggtcaaccaactttacaaggttgggccattatttatacaaactaaacactctaaaattgagacaaagtggtgtcatttagtcctcctccatttgggccatgatacaactcacaaccttggacttttctccttgaaacttgggcttgtattcaaatagtatggacaacacttgttgaagagcttccttggctttccttgctct

SEQ ID NO: 139097 - DNA, 461 bp, Glycine max
ctgaccaagcgtgacattaatgattagtgaaccatgtttcttattttcttattcaacaagtataatgtataactctcgtataattgcattgtcaacattgcattctctgacatcatacttgattatgagaatttcctcatccatttctttcgttctatataacatttaacacttttcttatttgggtagactaaatggagttttgcattgaaggttagctaactttttaaaagtagttctgacagatatgtattgaaaccaaaatatcctcacgattcatttatcaacatgctaaaaggttagtgtgttcaatatcaacatactacattatcctgttcttggctattgtcattctcattctggtttccagaaccaactgtacatatcaggtctagcatgagatcactctatacacaaccatatgttacaagaactatacatgcatatcaatgctctcttat

SEQ ID NO: 139098 - DNA, 466 bp, Glycine max
  unsure (1)..(466): unsure at all n locations
agctngttgagaatctttccactgctgtaatttctattgtagaagaggggagcagaacgatcggtgggagcattatgttttggttactgctcttggcagtagaacattcaacatattttttttatttaaatttatattgtgcagaagaccagctactgtatctttaccattgctcttcgtttaccctttgttagcatataaattaagctctagttattttgattctctgccataaattcaaacttaaaattttctaattggcagctaacctttttgtgtaccttgaacctaatcattaaaaatcttcaaatcacaaaaatatgtttttaaaaattctaaatcttagaatttntgacttttttcttggaaagattgatttagttattttaatcaaattgctcaaagtatttcttgcattactaactgcagatctaaaaacagtccagaaatatttaggacaaatttt

SEQ ID NO: 139099 - DNA, 399 bp, Glycine max
ctataaaagctgcacagcacggcctggcccaaaacccgatcctcctctatcaccatgatgacgcccaaccccctccaaactgcaaaggttcataacatgctcatttatgatccacatcactgcaaacaaagctcaaaaatcgtcattgcaattctctacaaagcccgccgaccaaaataggctgaaacaagctacaatggcagcaacctcaaagaagagaaagggatcctcctccaccaccaccactgcaggccaacgccgccacggcacatccgaggacccaccaacatcaaatcctccttcctttacatctcccaagacataaaactatgtaaccgctcaatgaccagcgctagaggattattaccaattctccaacaggggattctcgaccctaag

SEQ ID NO: 139100 - DNA, 455 bp, Glycine max
  unsure (1)..(455): unsure at all n locations
agcttgtgactctgggaaannncnntatatttgtcactttattagnngngaccnnngaaaaaatcttcagaaacaagtcacttgttgaattgtgacttttggaaatgtatnttttgaaatcagtcactggtaatcgattaccactaaggtgtaatcaattacacatcaacagatgtgactattcatttttgaatttgaaaattaaaacgtttagaagctctggtaatcgattacaagtattgtgtaatcgattacacaagtttaaaatactctaaaactatttaaacataagttataactcttgaaatttaaaatcttaacgttttaaaacactggtaatcaattactaccttctggtaatcgattactagagagtaaaactctctggtaatgattntgcgaaaacttcttgtgctactcaatggtttggaacaactttttagtacttatcttga

SEQ ID NO: 139101 - DNA, 412 bp, Glycine max
gtgagccagcttgcccaggcgagctaattcttcttcttcttttttttttaaaaaaaattctctgcaaaaatttgattaccccccttgtcatatttatatattttaaaatcctatggtcgcaataattaaaaaaataggcttattcaaatataatagacaaataaattaagcaataattttaaaggtactaggctgcctcctagtagcgcttctttaacgtcttgagccagacgtgggatgatggttgattgatcataggcctatcacctgcttatacctgcccctaagctttttattataggaaatggcatcatgcagtaaaatgtgatacaaaccacataatacctatatcacctttcacttacctttgttccaatttggtgtgatattgatcactactcagactgaatct

SEQ ID NO: 139102 - DNA, 466 bp, Glycine max
  unsure (1)..(466): unsure at all n locations
agcttaactgcatatcacacgcatttatttgttcagtaatcgaaattttagtcacaggtctcatttatgcaaacaagttatattttaaaattntaaaacaaattaaatattattaatcaatcataagtattttcaattatttctttctaaataataattataaaagttaacaaaaaatatcatacacattaatatgtaatcggatgacattttacactattattagtatattagtagattctaattaattntacacatggcatatgctttctgttttctcaccgaagattggtaaagattgggattcctcaaaacgacaacgtttgaggcgtggtgttgatgagaaatagccgttaagaaaacacacacacacacaccaatctgttcgcttcatactacagttcananaaattggaccggtaggggaagtaaccgtgcacttgacacccaaacattacacacacta

SEQ ID NO: 139103 - DNA, 311 bp, Glycine max
  unsure (1)..(311): unsure at all n locations
gctttcactagttntaactntcagctatacttttaccttacttcttacagtatcatcttaattagctgttagcttatttacttgctaaaaatcttgtttgaccttattagtaatgtttggtgaatataataaacatgaccatataataataatgaatatttgcggtactattaatgaccgaacgtaaaagaattacgagcgtcttcatctatctcacactaagtaacatcttacgctgctattaatcttaaatatgtcaatactccgtaatattgcttcaaaagaaccaaaactttattaatcttatgaga

SEQ ID NO: 139104 - DNA, 453 bp, Glycine max
  unsure (1)..(453): unsure at all n locations
agcttgccgccagagtaatgttcgtattgctcttaaatatcatacccnctccgttatttcttttgaaacagaccccatcccgtaaattgtttttaaaaggaaccctctttcgtaaatttgccttcatagttgtctttctgaatttcacaatattttaatgcatttgaagttatataaattataaaatgaaaataaaaaatgaatagccaatttaattatttcagtgataataacattttagaattaaataaggattaatagtgatctttatctctaatactgacaaattcgtccgcaaaagatgaaaattcaaattttagtcatcgaaagtgaaaaaatgtgatgaatccatccatantgtaactttgtccgtctaccgtaatgaaagaccctaagtgacatagagagacaaaanatgtcattaaaatgattgtcaacatgactactatatat

SEQ ID NO: 139105 - DNA, 461 bp, Glycine max
  unsure (1)..(461): unsure at all n locations
cttggagctagaagaagnnnntncnttntatatgcccaacttctttgagtgacactngtattgattattgcatctcactttccattttttcatatgtacatcatgcattatcatgtagagacaggaagattgtttctaaagttataaacttcttcagtgcataaaattctctattttaatcgattacaacgttgatcgtaatcaattacacaagagtttgtagcttagagagagattctagtttcggtttaattgattaccaattaatcataattgattacacaatttagttgagaccatatctgattctttatgagtctctgctctaatcgattactaggtgatcgtaattggtactgcattaattttcttttcaaaatacaagtgatgagttggcgtaataattttgttaggttatacgttccttagagaaaaagtaggttatacgtgccacgcacaca

SEQ ID NO: 139106 - DNA, 444 bp, Glycine max
  unsure (1)..(444): unsure at all n locations
agctntaaaagatgttttaccatcacanattttaattttttgcactgngaatcgattaccaagtattgtaatcggttaccagagacaaattacataaaaatatttctagaaggattttgaaatttgaatttcaaatgttgtaatcgattaccacttgtctgtaattgattatcagtgacaaaacttcataagttaactttgaaaagtcatgaccttcaaaacataactgtgtaatcgattatcaagacattgtaatcgattaccagtgagagaatttttgtaaaatattctgaaaagtcacatctcttcaaaagtttttgaaaagccaccaaggacatataaatatgtgacttgtctatgaaaatatntagagttttctgatgcaatcctaccnccacaagggcattagatagaagactccaagtagattgggctagagatgca

SEQ ID NO: 139107 - DNA, 327 bp, Glycine max
taacagaactagaatatatataagcccatcctgtgatctatcttctcaacctcacccaagtacacacataaaaggatcaagtgagaaagaaaatcaaactatcaaacaccatacaaacaatggttaataagtttcaatgaggagaaaacacaataaaagcacctttgaatccagcacactactccataatcatccacatgaatatattacttatactcaaaaggacttttgaactccacaatggtggactgtccactcaaatgctgcatgagttgaatctccctcttcatgtcctccctggcagctatgctcataaacatcctcctc

SEQ ID NO: 139108 - DNA, 421 bp, Glycine max
accctcgcaacaccaagtgtatccccttgtacaccttgcaccccaatttaaacccacatacctatacccttgtgatgtcatctctccccatgaaatgacattaatggtagtagaaaagtgcaatctcacattttgaaaaagttggatgatgccattgtgaagttttattctcataatccaaatgccttcaaccttcatttttcaataattcctaagttgaaatgaccaaactccccattagttttcaaagtgtcgaacatcacttgatctttacaaatgtgcttcgaagaagcaaaatcgataacccattttgatttagccaccttcttagtaggtgccaaatactaatcctcattttcaaagttttgaccacattaacctcaaacttgtcatcatcggtcttcataactctcattttttg

SEQ ID NO: 139109 - DNA, 436 bp, Glycine max
agacttctgacaggctggcgtcatttctttttactcttgtcaacatcctcagaccaacgggtaggcatacgcagcctaaatagttatcctcagggccctgcatattagacttagcaagtctaatggtatacagaaagaggaactccctaatatactctcatcctaccattgttcaccccagacaacaaccaatgaaactccttaccgactcatatatgatacaaatatcatgatcattgtcgaagtcagggaaccgtcaacaaggatgctgcttttctatgaacagtataacaaagatattccaaggaggcttgtcaaacccgatgtccacccttggtgagtctcgtttctctaaagcctcactaaacccacagtccactattgtgagtatgccctgatgagcgcctttcttgctattttccatctccacaggaac

SEQ ID NO: 139110 - DNA, 475 bp, Glycine max
  unsure (1)..(475): unsure at all n locations
agctnggaaggtagtcatacctcacaaaatatatgtatgtgtgtttaggtagtaaaaataccctggatatgcatgtatgtaatttaggtagcaaaaaaatacctcacaaaatatacatatgtatgtttaggtagcaagataccttggatatgcatgtatatagcaacaatatatatgtgtatgtttaggtagcaagataccttggatatgcatgtatatagcaaaaatagctcacaaaaatatacacatgtttaggtagcaaaatacctcatgaaaaaaaaaaacaaaaaacaacaaaaaaattaaaataaaaataaatttggttagctaaaaagccaacatgcttttgaaaggaaatgaacttgccattcagaacacaaggttttngaagaanaatatgtatatacctgaagggtgaatgctatgaaaattttcccaaacgcctagaatggacttggatggatgcatgagttga

SEQ ID NO: 139111 - DNA, 386 bp, Glycine max
caggcgggctcctcaccttcttgttttttcgcgagctcagactaccggtgcggcttcccacgacgctcttctttatatctgcctgagtaggctcatagcctaacccatacttcccacgatttcctttggcttttatcatgcatagtatgccgccgttgactgtggccaaacccataccgggttccggaaccgttccccaacataactcgggccatcattactgctgcatcggacaggcaagcttgcccagagaaggagaccactgaggaaatgctcaccacctcaaaagactggaaaacggtttctaatgactactctgcgggctctacataaagcatataggatgggcatctcaccaagattgtcttcctcgcctgatagcaaga

SEQ ID NO: 139112 - DNA, 199 bp, Glycine max
  unsure (1)..(199): unsure at all n locations
ctgctagatccgaatttttttctacgaatgntcttctaaggagggagtcttctggattagatacagcgccccgacacgggagatgtggctgataccgccagttcgaggagaatatcttaatcaggatactatgaatgcacttcacatgatcatcttgtccgatgggagcaatctgaagccgttcctctacgacatcagg

SEQ ID NO: 139113 - DNA, 487 bp, Glycine max
  unsure (1)..(487): unsure at all n locations
cccttccttaagtcacctgcggcatgcaagcttatgctgcaaacatttacaatagacctctctttctctcatctgcanaatcaaccacaacagaacaattatgacctctcaagcaatagatacaaccctggatggaggaatcaccctaatctcagatggtctagccctcagcaacaacaacagcagcctgctccttccttccaaaatgctgctggcccaagcagaccatacattccttcaccaatccaacaacaacaacagccccagaaacagccaacagttgaggctcctccgcaaccttccctcgaagaacttgtgaggcaaatgaccatgcataacatgcagtttcaacaagagaccagagcctccattcagagcttaaccaatcagatgggacaattggctacacaattaaatcaacaacatgtccagaattctgacaagctgcattctcaatctataccaaatcccacaaatgtcagtgcca

SEQ ID NO: 139114 - DNA, 466 bp, Glycine max
taacaaacttagaaatcaagtgatcatgtattccgaaatatatgttgttaatacggatgcacattttatctatatacaattgtttgttgcttgcttgaatcttgatttcaggtattatattgtcatcatcaaaaagggggagattgtagatgcaattggttttgatgttttgatgatgatcatgatgatgtgttgcaattgatgcaaatgggcttttcaagattaaaaattcaagacaatacttcaagattacaagtcacaacatcaagatgatcactagaatattaggaagggaattcctaattgaattagcaaaggtttggccaagtgatttaaaataaaagtgtttttcaaaggttttactctttggtaatcgattaccagaggatgtaatcgattaccagtggccaaatacatcttataacagctataaatagttgaattcgaaatgttagactgtgtaatc

SEQ ID NO: 139115 - DNA, 360 bp, Glycine max
tatatttttttacacaaaacagcaacatcgcgatcgccgggtgtacaatatgccgagtatgcaacaaagatgtatactcccatagcgtcattcttcaaagcatgtccagacccaatatcgagagaaagaaacacaacaaactcttcacgaggaatcaaataggtcaatcaaacacatcgaaaaaacttatcatcagctgcattcgataacaatgagaaaataagttacaacgaacgtagtgaacacagcactaaaaaacgacgatcagatgcgggggtgctaatgcgaaacccgcagttcgcacaagtccacgaaggacgaaacagataagattaaacgaggccatagtacggatagaaa

SEQ ID NO: 139116 - DNA, 212 bp, Glycine max
  unsure (1)..(212): unsure at all n locations
atattataaaacaagctcgtttttttctcactnntgataattctcttatgcacaatctttataataaaccaaagatcaaagtgaaaacaaaatcatttgtacaagtcttttttataaaataaaaattaataaaagcatagtagttctctcatatcaagcagaaacttataagttaaatgcgtggtctgcacaagtattaagaatgcataata

SEQ ID NO: 139117 - DNA, 462 bp, Glycine max
gtgaatccacccaaggtatgggaagctcactctcttttttgtttttgatgatttcccgttgtttgatttgaatattgtgatctgatgttagtatttcaaagcttaagtgttggatgcttcaatagcattaatggggttaaaaactcatatttttgaagaactttgttgtagaatcttcaatttagttgagctaaaatttgtagttgtagctaaatttagatagaatggagtttgcaagaatttagctaaagctacgatttttagctgaagccaaatatatggtgaagctaaatttcgtggcttaagtagtggaaggtcttatattgcttatgaaactagagatagggtcatgaaggtgatgagcatgagtcagtgaattaatgatatgatggatgttatgtgattgtttgagatacttctacttacaaatgattatgttaagttgatatgtgtgtgtataca

SEQ ID NO: 139118 - DNA, 455 bp, Glycine max
  unsure (1)..(455): unsure at all n locations
agcttctcaaggaagctacctattctataattagaagcatgtgtaacacttgtggtaactttgatgaatganagtcttatgagatacacttcaaagttccacttctttccctcttttattccttcaatttcgtgctccccccttctctctttcttttcctccattaaagcatcctcttcaagcttcttatccaaggcaattcttggtggtgaagctccttcttccttggcttattccctagtggatggtgcctcccctatcctcttctcctttgccttctatcgcaacctacccttcggcgggagggcgacgcgtgactcgcgggatgcgtgttccacganaggaatatgcgcggagtcgccaccaacgtttatttgaggaaaacgtcggataaaccggantatgacgcgatctatgaatttttaagtganacgttcgggagttggtattacgta

SEQ ID NO: 139119 - DNA, 462 bp, Glycine max
  unsure (1)..(462): unsure at all n locations
agcttcaaatgccggcaatggatgacgactctcgcggagaagaagacctggacgcggggagaagactgctggacactnggagctctggtcgcggaagaagaagaactcgaaggtgaagaagctttgggtcacggaagaagaataagaaatcgaaggaggaagaagaaggctcttggtcgcggaagaaagtttcaaacaaaacgggggaaaggcttttntattaaaaaaatctaatttattaattttattataaggagcaattgtgtaacttcacataattgctgggtttgctaggtgcacctagcaacagcctaagagaaaacatactntgctcatgagaaatagaatgtatatcatgtaaggtcttgtaggccaattgcacactatatgtcccatttggttctggttcccaccaagacgcatcctccacctccttgtgaatttccaccgaaagcctcacgt

SEQ ID NO: 139120 - DNA, 464 bp, Glycine max
  unsure (1)..(464): unsure at all n locations
agcttattataggagggtactctaatggcgtttttttttaactccctnctaaagtacttcatcctagactcctttctccagagtccagactgatcntttttttatttagtcgatatccaatttgttcttttgaaagaaaaaaaacacacctaatttaatctctgaaaaattaacaagaaagttacaaaattgtcttttagaattataagtataagatactttagttatttttcttattttttagcacataatttatataaaaataaagaaattgcgtctctagtagaatgatgatgatgctcgtagagatattggcagagcttcaaaggatcacttatggcgtacggagtgacgcggtgatcaaatacaacaacaccaatcagtgagactcaaaatgaatgcatactcttactgcctttttaaacgaaacttaaaatatgctacttttctctatctgagaatta

SEQ ID NO: 139121 - DNA, 422 bp, Glycine max
  unsure (1)..(422): unsure at all n locations
acctactgaccttaaaattnaattggtcatatttattgattggtacgaagccaagcctagagggagagatatatgaccaatccaagtcatcatctaataactttaaattctaaaacgatgatgggtaagcacaataaatagatgttgatagtcttcataagtatattgacagtatccatatctcgaaatcgaatcaaactagtcaatctatatatttccatcttgcagtaaaactaaccgcgattgaaacacctccaagtcctcggtgattactgacaacaactttccatccacactttgctgtatgatatgcaagacgcttgagatactacaaagaaaggggggaaaggaaaaaggaatcataaactgtaagacagcaatataatatgaatgaaactcctaaacaacaaaagaagtgaaaa

SEQ ID NO: 139122 - DNA, 491 bp, Glycine max
  unsure (1)..(491): unsure at all n locations
tctaagtcacctgccgcatgcaagcttcattcctttttcactcatgtgtccaagtctttgatgccacatggntgaattatggacagcctcagtaactgctaccatatccttatctgcaatcatgtaaagatcctcgcttctttccacgagccacaacaagattttcttttgttaccttccaagctccatctccaaaagtggtgtgatgcccctcatcatccaactgccctatggatattaagtttctctttaaggaaggaatatgtctgacattgggcaatgtccatagtgatccactagaggtcttgatgtcaatatcacctcttccgacaatgtccagagattttccatttgcaaggtaaacttttccaaatcttccagaaatatagttagacaataaatttttagagggagtggtgtggaacgacgcacccaagtccatgatccatgaatcaacaggactatccaaactacaaatcaatgcatcatca

SEQ ID NO: 139123 - DNA, 475 bp, Glycine max
  unsure (1)..(475): unsure at all n locations
ttaaatctcagcttataagacttntaataagcctaagcctgatctatatattttattatgctcttaaaaaagtctgagtctaaccttttaataaataggacagttcacgtcaggctttatataggccaggtcgtagacccctgtaggccggcctgacctattcccacccctatttacaatagaagttcatacatgacagtaggaaccaaggatagctagtgggaaattgaaccacttccttgctagttatatatatatataatgaactaattaatggttggtctatatattggcatgtgcactttttataacagaaaatgaacttaccccattacaagtcttatgagaatgtctatgggtgtttcatggaaacgagtttatggtgaattcatactaaaacaggaaattatgcagaagttaagataaaatctgcagctctggatgaaagaggctctttctntatacctcttatcta

SEQ ID NO: 139124 - DNA, 484 bp, Glycine max
cttaagcaccgcagctgcagctgatgcatgattgtatattatggttcttatattcgggagggtgggaaacataaactgtatcttcaatgtatccatttaggaaaacacttttgacatccatttggtataacttgaaatccataaaacaagcataagcaagtagctatcttacaacctctagtctggctaccggtgcataggtttgaccaaagtctataccttcttgttggttatagcccttggctaatagccttgccttattcctagtgatcaaaccatgttcatcaaatttatttttaagcacccctttagtgccaatgatgttcatatttttggaataaggtaccaattctcatacatggtttcttttaaattggttcaacgcctcatgcatggaaattatccaaaactcatacttgagggtctcctctatagacaaggggtctacttgtgacacaaatgtagtatgctcacaaaataagtt

SEQ ID NO: 139125 - DNA, 439 bp, Glycine max
agcttcttagtctcacctgatgaagatgaattcttttcttcttcatgcactcctctaatgacaatagcatcatttctggcactgaattactgggagttggaagtcatcttctcaattaaatttctggcttcagcaggggtcatgtctccaagggctccaccactggcagcatctatcatacttctctccatgttgctgagtccttcataaaaatattggagaagaagctgctttgaaatctggtggtgaggacaactagcacataatttcttaaatctctccaagtattcatataggctctctccactgagttgtctaatacctgaaatatcctttctgatggtcgtggtcctggaagcagggaaaattattctaagaatactctcttgaggtcatcccaactcgtgatggaccttagagaaaggtaatatagccagtc

SEQ ID NO: 139126 - DNA, 405 bp, Glycine max
agaagctgactacgcctggattctttttttggtcttgaatgtaaaaaggcatgaatattctgacatgtctgacaggtttttattagaatttaaatttggctgccccatgaagaataccttgcacctacgtagcatggaaaatacctgtcaacggtatgtatatatgtgaatatatatagcatggaaatgccttgcaaagtgtgtgaacatatggcagtcaaataccttgcaaagtgttaatgcttatcaagtaatgcatttcagaaatctgtacttgctcgataagtagcgtaaaaatgccttataaaatatgtatatatgtggataggtagcataaggagccttttaaaaaatgtacccatgcaaaatggcacagaatgctaccaatgaatattgatgcttatg

SEQ ID NO: 139127 - DNA, 473 bp, Glycine max
  unsure (1)..(473): unsure at all n locations
catgcaagcttaacatcagaccacttccagggtactgtatctacttcacatggacttgatggggcctatgcaagttgaaagccttggaggaaagaggtatgcctatgttgttgtggatgatttctccagatttacctgggtcaactttatcaaagagaaatcagacacctttgaagtattctgagagttgagtctaagacttcaaagagaaaaagactgtgtcatcaagagaattaggagtgatcatggcagagagtttgaaaacagcaagtttactgaattctgcacatctgagggcatcactcatgagttctctgcagccattacaccacaacaaaatggcatatttgaaaggaanaacaagactttgcaagaggctgctagggtcatgcttcatgccaaagaacttccatataatctctgggctgaagccatgaacacagcatgctacatccacaacagagtcacactta

SEQ ID NO: 139128 - DNA, 472 bp, Glycine max
  unsure (1)..(472): unsure at all n locations
tatctgtgacannaatgaaaatattcttcttagctctctatggtctgacatgcttcattaggagttttgtagtgtcctataggccctgcataaggcagataggttaagtaagcacaaaaatccaaaaataagccacaatgatcaattaagctcaatctttacctaagaccaaaactaagttaaagtgagaaaataagggtcaaagaggtgtcaattgagctaaaaataatagcaaaatactaaactacaaatgctcaatcactcggcatactcctgacattatgtattacgcacaaataccatgttcctaaaggagtttagcaaatggacctaggtgttgcccaatttcatcataccttctgtagcactctccacctttatcaaacctaacaactgtcacctttctttctaattgcctttctacttcattctaataaatctctaaggcatctatntcttgagatttctcatg

SEQ ID NO: 139129 - DNA, 422 bp, Glycine max
  unsure (1)..(422): unsure at all n locations
agcttctggaggctntctctctagactatattactctacttgttctttggctattgagagccaaagatttatttctctctgacctttcgtcttgctgaagttcttgttcatgaactttgagagtaccaacaagttcttcaagggacataaaatcaagattctttagagcccttagtgttgttacccatggtctctattttttagacaaacttctcaagattttttccatatgatcatagttatcataagttctgcttagagatattaattcattaagaatggtttgaaagcatccaaacatactctgtatgtcttcgccttcttctatagagaagagttcatatttacgagtaaggagacctagtttgttcatctttacatgtgacgttcattcacgtngtatagctaaagtgtctcacatc

SEQ ID NO: 139130 - DNA, 193 bp, Glycine max
ttttttttcttgacaaaaccgcagcagcacccattgttatgctatccttacctgtagatatgtgaaggagcatctatactctcgactaacgaacttagatattgtttagttgcctaacatgtgaagtctacaaaattggcgtgatgcccaaaccatcaaattgtcctatcgattgctctagctttcattgaca

SEQ ID NO: 139131 - DNA, 68 bp, Glycine max
cacacccccaacaaaataaagcccacacccagcagattatgacctgaaccccaaaacacgagcaaccc

SEQ ID NO: 139132 - DNA, 309 bp, Glycine max
aggaacctatttctactacaagggagccaaacccgaccaccccaataaagaacgagctgaattactgcgagatggacgttagaaaatacaccaacgagcggctcacaaagtgggtctgaaccctcggaggcaacacctgacaaactcagaccaagattccccctcgggatgataaaagaagagtctagcgggaggggaacgaggcccaatagtgccaggggagaaaacccacagacaacctcaaaacgggattgcttggtggaaccatgaacccctctggggtaggcaaattctacacgaggaagacac

SEQ ID NO: 139133 - DNA, 455 bp, Glycine max
  unsure (1)..(455): unsure at all n locations
agcttaagaaaaagatggcctcagctaatttcttattttcataaggaattctatcaatagacctccaatctttaatggagagggttaccactactggaaaacccgaatgcaaatttttatcgaggcaatagatctaaatatctgggaagccatataaatagggccttatatacccaccacaatagaaagagtttcaatatatggtagttcatcaagtgaaagcataaccatagaaaaacctagagatagatggtctgaagaagatagaaaatgagtacaatacaacttaaaagccaaaaacataataacatctgccctatgaatggatgaatatttcagggtttcaaattgtaagagtgctaatgaaatgtgggacactcttcaattaacacatgaacgaactacagaatgttaaagatctangataaatgcactaactcatgagtatgaattat

SEQ ID NO: 139134 - DNA, 463 bp, Glycine max
  unsure (1)..(463): unsure at all n locations
gtttcacaatggtaagaggcttacattcacttatctaacatctatattaaactcgatcaaataatggaaaaattattttggctcaaaacaaggtaatgtcacatcctatcagagcattgtgtcccgacattcttcagcacaaggttccttaaagtaatacacctagtcatctgctcctccgaacacaaagtncaagatcattacaggatccaaacacagacagcagagggagtgagttatcacattcctaactaatagagaaaaataagacaacatataggtataaatattatataacaaatacaattcacttgagcataactcacgttattccaccacacgtctcattcattttcacaacattcgcatactcaatagtcaaaacatcatatcatctaatcaatctatatagaacaatacacaagcattatgtagcagatacactaagactcaatcctatatg

SEQ ID NO: 139135 - DNA, 391 bp, Glycine max
agcattataagcgcgggtctgggagacttaatactatttgtttcgatatacagagatgacgttctgagtacattggatttggtacgaccatgctctcctgagttccaactgtgaaaatggcgagtggaggaactccccggtatttacgcatcgagcatgatgtaaaccttcacggttttcaaagctctatagttgggcctatgctctagagttcttcttttgttaaggcttagtgtcttttgctcttgaattcataatacaaggatctttcttcatctgttcctatgtttctacccaatctaatccatgtgcatgtttactctcttatttctgaaacggcagatccgatgacgagtccaccgatagtactaatacctgtgacccgtctatc

SEQ ID NO: 139136 - DNA, 461 bp, Glycine max
accataaaactcagcttttgggtagaacatgggaccactcagcattttttttgaagtcggatccagacaaggtctgagagaccatacaagtttcctaacgatttctaattatgtgggccattaagtctatcatatgctgacaatagccgagaagcccatgaatctcttctggggtggagtaagtgtctgtcatcaccttggccttggctaacaagcggtgaagttcttgacttccgttcaaggtaagagcaaaccggtccatacacatggttgcctcttggtgtaaagagtcgatcacccttcctctagcctctttttccgcatatacttgagcatactcatccgcgattctatgctcgtgggccgtggctagacctaactcttcttggtacttggcgatgatagctatcatgttggtctccgtctcgcataaacgctgagacaagctttttgtggacctt

SEQ ID NO: 139137 - DNA, 437 bp, Glycine max
  unsure (1)..(437): unsure at all n locations
agctgttatctggatttcatttgnttgatctttgggntcgaactggttaaaccttacaatgctctttctgatattttctgaacctttattgcttgtagtttgagtttggtttggcggtgctcctgttatctcctgtgatatgttcaattatggctttccttcgatcacttacggcagaagaaatgtccatgacatcaaaaccaaggaaggtactacattggctgtttttaggattaaaaatgccaagttcatctactgaaatggatgaatntaattctcaacttctctatttgctgagctgactaatgtttggctacttgactagttgttgtaaatttgtaatataggaagcgcttttgttgccttataatgtttttgcgttatgatgcggcagcttggcttttaagatttatacattcttatagtgcacatgtatt

SEQ ID NO: 139138 - DNA, 449 bp, Glycine max
ttatctatcgttacatttttctgctactactgatttgttgttttcttaagaatatctggagaatgttgggtgagtcaaaagtcctctgatttatagtaacttatacagattttttgttcaatcacttctgtttactgaatatttaacaattctgtaatgctgccttctgtcgtttgcagcaaattcattagtgatattgtcatggccttatcatcttcaatggccatgcgagagcggaattctgaaagtgctcgttttgagattctgaatgatcagcataggttattttaatcagatacaatgcactcaaacattttttcccttatgatttagtcatttctggattgctcatttatatgtattatatgatgtcgagatttctttttccatcatttatctgtgcagcgtcattattctaaataatgtaaattcaagtattcatattgatg

SEQ ID NO: 139139 - DNA, 468 bp, Glycine max
  unsure (1)..(468): unsure at all n locations
gatcttaagtcaccgcngctgcagctgttattgatctctattctatttttgcattanaagggtatcccgatnagactatcctcctgcttcattgggataataaaggtgccattctgactcccattgataatctgcagaagaatagtctctttcaagctgaattcccttgctgtgcatggaataacaatcgcctttagagctagcttggtacatcatgaagtctgccaatacactttcaagatcaggagctctccctttctcataatagttgtacatggctgattcctgcctccgattaaagttattgatagaataaaaatagcaactgtcctggtgatgctctcctccagcaaaatcacaatttattagtggaatagagataacaatcttcatgatacagcggtaagagatttatcttccttagaaataattgagcccctgtangagattcatacctacaaatactaa

SEQ ID NO: 139140 - DNA, 457 bp, Glycine max
  unsure (1)..(457): unsure at all n locations
agctnttctaanatctctgtgctagtaatctatttcttgattctggtaatcaattacacagttcaagtaaaaccgtttaaggataattttataattttaatgttatgtcgtatttgccagttatatttttatttctccttttcctattgttttatttttgtatgctatgttattttcagttgcactcttgttgtgttctcatagagtccatcctttgtaaaggatggcttatgcacaataccgatttaatgtgtgcctttgtgctttctaccatttttagttntctatttgtctttgcatttgaatatcgatatccatgttcttttttctggttatgtgagtttctctcgaacaaactcaatttttatatactttggcatttttatgagtatatcaattgttactagtgtgactgtcataccctaatttcatctanggaccatccgttgttgggatg

SEQ ID NO: 139141 - DNA, 418 bp, Glycine max
atgcaatggaaccaattgggtgcagaagatctacacatgcgaacactaacagaaataatagttaacgcgattcgagaagaaaatgaattctaaactaaacaaatgttaaccgaaaacaaaaattggtaaatcaaagaataatgaatgaatgccttcaaactgaactagactttcaaaatggaaaaagttccctggcaacgacgccaaaatacttgttccgcactctgtgatactacttggtcgtgtggatgtgaaatctaccggcaagtgcaccgggtcgtgaagtaaataattaaaacggtgtgaaccgagtatcgaactcagggaacttgtgcatttggttaaggtttgttcaatgagcaagcatttgcaaacagaaatcatgattgtgaatgaaagttaaagtatgagctgctct

SEQ ID NO: 139142 - DNA, 471 bp, Glycine max
  unsure (1)..(471): unsure at all n locations
ttaagcaccgcagctgcagctataaataaagaaaaaattttttttggccctaccatattcttgccttacatttttgtaaaaatttagagaaattataattatatttcttttataaaatataaaaaagagataataaaaaacaaaaaanaagatagaaatgtctgataaaatagatagtgtagtaaatacaacaaaaatatactgtaaaacattattatataaataatataactaaaaggtataaagggtttgggaaattattttattcttggataacaagaaaaaaaatactaaaggttattttttaggatttaatttaaatacatttataaatgatttgtatactactaacatctaataataaattcttaattntcgtaataattacttttgaattcatatccatcataattgctaatngattaanaagtatacttgtattaacatgcataanaattaaatactatattt

SEQ ID NO: 139143 - DNA, 466 bp, Glycine max
  unsure (1)..(466): unsure at all n locations
ggaggcattgaaatgtttaacctttatggctgagaatttttatttcatatacagagcttgcttgtttctgttcacaataccccttgcaatgtcaatgtgggatttggtcttacttatgaaaacattaatagattgtcctcttcagcttgttgctttagtagacttttgtggggcctactcacatcttccacggaccaaacagatgctaaagatagtgatgaaaaagaaaaagtgttgatgtggaaaagtgagcatgcctctgaactggacagttgtatatcttctcttatggaacttaccaatgttttttgtaaacaaattgcttatcgagagtaatcaactttccaaaagttcacacaatacacaacattntgaagatccagccgtgaagttatccttgtcaagtaccaattatttgtcatctaaaagtttagtttctaaggctaatgccttagttggtacacaa

SEQ ID NO: 139144 - DNA, 460 bp, Glycine max
  unsure (1)..(460): unsure at all n locations
caccgcagctgcagctgaagtaacagatgcctggtattctgttacctatttggccatgaataaganatttgcacctgtcgccagactctgtggtttatgctcctctgccgaccaccacacagacctttgcccttctatgcaacaatctgaagcaattgaatagcctaaagcttatgctgcaaacatatacaacagacctcctcaacctcagcagcaaaatcagccacaacagaacaattatgacctctccagcaacaggtacaatctcgggtggaggaatcatcccaaccttagatggtcgaatccttcacaacagtagcaacaacaacagccttatnttcagaatgctgctagcccaagcagaccatacgttcctccaccaatccagcaacaacaacaacaacaacagccccagaaacaacaaacagttgaggcccctccgcaacccttccttgaagac

SEQ ID NO: 139145 - DNA, 461 bp, Glycine max
atgagccaaaatcctaactcaccatgaaccttgacccattgtgataatgtcaatccttaccctcggaagcaaaaaagaacgaaggaaatattccaatcaaagaaaaaaaagaaggaaaatttccaatcaaagagaaagcaaaaaaaagagagaaggaaaacttccaatcaaaggaaaaaagagaggaaaggaaattcccaatcaaagagtgggagaaagcaaaaagaaaagaaagaaaattcccaatcaaagaatgggagaaagtataaaaaaaaaaatacgaagaagaataagatggaaagaaagctcctgatcaaggatcgaaagagaaaaagaagaaatgtgcagaaaggtctttggaccggacaatatctgtacaatacagaatcgtcaccatatgaacaaaaaatagggaaaggaaaccactacctgaaagtggtcttctccctttgattaccaac

SEQ ID NO: 139146 - DNA, 471 bp, Glycine max
  unsure (1)..(471): unsure at all n locations
agcttggttatctccttcttcactacatcaagaatcaccgggttgagtcttctctgtggctgtcttactggtttagctccatcctctaaatntattcgatgcatacatgtggatgggctaataccaggaatgtctgtcaaggtccagcctatagccttcttatgcttcttgagaactgacaacaacttctcctcttgctcatcagcaagggaggcagatataatcactggaaaactcttgctatcatccaagtaagcgtattttaaatttgatggcagaggcttcaattctggtgtggtcggctggacagtggtagaaggagatggtttctcagcctttacctcataaagaaagtcagaggtatgtgtacttcctgaaacatggtttgtcctatctgactctataaaatcaatctcaagaggtaaaacaccaccaccagacatgcaatcaatatcactctcagattcactc

SEQ ID NO: 139147 - DNA, 466 bp, Glycine max
  unsure (1)..(466): unsure at all n locations
tcacgctgttcaattgctccaggttgctgcacagaagggcttttgtctgtatggtgatctgcaaaagaacatagaccacagactcttgcaacacgtgtacatttctgatacatggcaagttgggttactaagttgaccaaggcatcaagttttccttcaagctttatattttcagtaggtgaagatgaatttgtggccacctcatggactcctctaaggacaatagcatcatttcttacactgaattgttgggagttggaagccatcttctcaatcaaattcctagcctcagcaggggtcatatcaccaagagctccaccactggcagcatcaattatactcctctccatgctgctaagtccctcatagaaatattgaaaaaggagttgctcagaaatctagtggtgagggcagcttgcacacaatttcttgaatctttcccaatactcatacaatctntctccac

SEQ ID NO: 139148 - DNA, 481 bp, Glycine max
  unsure (1)..(481): unsure at all n locations
agctntacaaattatacagctgatcaagagctctttctataattactagatttctagcagtacacatcaaatagttaactagattttgttatactttctttctggtggcaaatgtgtgctaggacttggggcaagtgccctctctaccttaaaatttattttggaatatgcattattggtccactaaatattttaaattgcccactaatcaataagttatataaacatggaaaaaaaataaaattttgttacctgtaaactacaagataaaaaattatattgttttgaaccccagacctaagaaaccctcttactcttttgtctattttgcttttggtatgtgagagtcattgcctatgaaataaattttaataagaaatcagttgtagatagtaacttcttgatttcccctgtaaaatatttcacaattcaatataaactaacatactaatgtcaatgagtattgtttctaatcctttgg

SEQ ID NO: 139149 - DNA, 463 bp, Glycine max
  unsure (1)..(463): unsure at all n locations
ggctntaaagttggtgcacgtatgaagaatagtggcgtgtaagttatcacacctggattgtgaaaatggaatacaaattgcagaattgttaatgatttctagaatattccctttacacaaaatgacaaattccgttattagggaactggtataaataaaagcatttgtaaaccattgaggggcatgaatgaatgaaatagcagatttcttcccttagctttcttcttctcttcttcttcttggaggtgttgaccctcgaagttcagctagcttttccctgcacgtaacacataattacagtaaaaatgaagagtaatgcatcattaaggattgatccattcaatttctgggccttagcaattagatttatttatttatagagtatggatggcagatggcttcttcattgttagctntgagctaaaattattggttccaatgtgtctaaatcttcaaggggttc

SEQ ID NO: 139150 - DNA, 489 bp, Glycine max
  unsure (1)..(489): unsure at all n locations
atccttagagtcacctgctgcatgcaagcttcccatggatgctcttaagaattgttctgtgtcggttngatggctgcagaagaatntgtattcacaagaaaatgagaaatgcatattttcttacaagacaaaaaataaaaggaaaaaaagtaccaacataaaatgaaattacaggagaaaaaggtaacctaaaaggtaatgtttgggcccaagtgaatgaaatattagaaataagtttgggccgtgtaagaggacatgactcatgagtccagcaatggttgttgggcaattacttaatgcacactcttttgactggcgcaccaacaccattggacctccttctcacttgccacaccattttgtcctgtcgcacctccttcattgtagcaagcacagaaggcgtcacacctcacttacatggatgaatggtctttggtcaggtgaagccacacacaccttcgtcacacttgcaaccctacctctggctat

SEQ ID NO: 139151 - DNA, 442 bp, Glycine max
  unsure (1)..(442): unsure at all n locations
gacctgtaattcgataggattgcttatattatctgctacattgtactgcccggggggccgagaataaaccttagcgtaacagtaaggttgctgctntatgaactctatgccatgaagataaatattggaaacaacccttgttctaattggagtaattaattaaagcaccatatactagtgatcattatcttaggtgcacgaagtcttaattaatcaatggagcattctttcatgattgatcaactttcgaatctccacctttgcaactagagtgatcatctatttggagatgctaacttagctctcgcaatgtgcattaatatactttcattatgctgctaaccatattactgcatgtgagaatatacctatgaattatgacccggtataatgaatctgatgatattctggagtataactatgacttgacaatcatggatag

SEQ ID NO: 139152 - DNA, 431 bp, Glycine max
  unsure (1)..(431): unsure at all n locations
gcttacacgcttacacacacacactctttttttggnttttgtacaaaagtcgaaaggcagtaccacagaaaaccaacaaacgggtaatcgcgacatgtaacaaaataacacaacggacagtaacaccttaacgcaatgtcaaatcgattgaaagcagtaattatggggacaactgaatagtaaagtcagcacataataacaatgaaagcagtaacgtgcattacaataaatgaaaatagataataatggaaaagaaatcacgagtccaatgctcctgatcgcatggatccgccttcttcccaagaagttgaataagtcagccatgtcttcatcttcttgggctttgtcctcgactccgggggcccctgcgagtcctgcccctgtctgagcttcaggctagtctccaagcaatgcaactgcagctccgaact

SEQ ID NO: 139153 - DNA, 461 bp, Glycine max
tcctcaatttgtgtggattgatgctcttaagacggctgcatatatattaaaccgagttccaaccaaggctatctcaaagacaccttttgagttattcaagggttggaaaccaagtttgcgacaaatacgcgtttggggatgcctgtctgaagtaagaatttataaaacataagagaagaaactagaccctaagactattactgggtatttcattggatatgctgaaaggtctaaagggtataggttctattgtccatcccacaatactaggattgtggaatcaaggaatgcaaagtttcttgaaaatgacttgatcagtgggagtgatcaatttcagaacatttcttctgaaagggatcactatgaagttgaaccttctgggacaagtaatatgttggtagtcattcccacccctcaagttaaaatgggtgttagacaaccagtgatcgaagttccacaag

SEQ ID NO: 139154 - DNA, 467 bp, Glycine max
agcttgaagaaattgctaaggagaatgtggttattgtactaagtattcttcaacaattatatgatgagtatgtggctttaagaaatgaagagtcatcctcaaatgaaaggaatgttggtggcataaactcctcaactatccatgtgcctgatacattttctatgactaggtttgatcaattaatgagtcttgtgcatgaaaaggaagcagtcccaccaatgaaatcagaactagatgcttatcttgaggagaaaaatacttatatctctaataatgaaaactccacttttagtgccttggagtggtggaggaataatagtttcaaatataaagattttatcaaagatggcaagagatatactagttgctctaatgtcaaccgttgtatcagaatctacatttaacgctggaggtagagaaattgatgagtatcgttctagattgaatgacgaatctattgaagctct

SEQ ID NO: 139155 - DNA, 451 bp, Glycine max
  unsure (1)..(451): unsure at all n locations
gtgtgttttctacagatnggacatgcctgatgccttctctcactgtatccacttaaatttccatatgctggaaaatcattaatagtccaaaacaccattgtgcgtaacctgaacgtctgctgcacatttgcatcccacacatctaccccttcttcccacaattgtttcaagtcttcgattaatggtgtaagatacacatcaatatcattccctggctgccttggacccgcgatcatcatacacaggataatgtatttacgcaaaatgcacaaccatgggggaaggttgtaaatcatcagtaaaacaggccaggaactgtgtgtgctacttaagctaccataaggattcattccatcagaagcaagagcaagccttatgttccttggctcatcctcaaactctggatacaaacgatcaattgtcttccactgtggcgaatcggcacgatgtc

SEQ ID NO: 139156 - DNA, 470 bp, Glycine max
  unsure (1)..(470): unsure at all n locations
gatccttaagtcacctgcggcatgcaagctntaaagtaataaactaagttgactattctattgcttaaaaaaaaaaaataaaaaataaaaacaaggttaaaggaagcttacttggtgttgaccctcttccacatttcctttttccaaaatttgtaattactctttttatgcggaagcggtttaccggaaagtgcctcggatcgccaagtaaataattaaaacggaatgatccgagtgtcaaacacagggaacttattcctttggcaaagctttgttcaacaatcatgcattttgttgacagaaaataataattgtgaattgaagtaaaagtatgatatatcctaattgaaaagcagtaaacgtgagcaaataagtgtgaaaacagtgatctaaaagcattgggtcttcctattgaacaagttgatgcaattaaagatgtttctctaattaagaatggttttgtgttctat

SEQ ID NO: 139157 - DNA, 422 bp, Glycine max
ctcagctctgctgtctgagagtttggagagagaaggtcctatttctttatagttcgagagattttgttgtgtgaagacctacatagaccagagcttgagatgagtctgtgagtgattatgagatactagaggtggaggagacatccccactacttgtatttctacaatctttcatctatctattctctttgttgtaaaggaagcttcccacttttggaaagctaaatcctctgttggatcttacttgtaggtactcgatgtaaatatctttttatctatttaatgatgctttgtgtgtacactgcgctatcagaacttcattctaccatgcatttgccttgatcacatatatgcatgtgtcttttaggatcattcaacaattggaactggtatgattcttagaacttgataggacagggcta

SEQ ID NO: 139158 - DNA, 390 bp, Glycine max
  unsure (1)..(390): unsure at all n locations
gcagctgcagctttgcttcctaaatgaactttcttttttgatttgttgttgactatcttattattctttccccacttctntcttttctgatgaatgctagtcttgaatggtactgtcaagtggtaacgaatttgacggttgtaactactttggtatctatagaggccattctttcaatatatgcttgattagaagggagattatactgagcattgtctttatccaagatgatgattttcctggctgtgattgcttcgtcatatatattgaatactgcctaggaggtgttcttaatacacatctcttgtgctaggtgacttttttctgtatacatttcccactctgtcttgcttctctttcacgaattagtncaatgactgtactattgag

SEQ ID NO: 139159 - DNA, 467 bp, Glycine max
ctttaaactcaccgtgtaagaattcctctccttatcaaatgctgttaatatgtttctttaccaagctgtcaccaacctggtatatagactaatatgtcgctctcttttctatatatatatatatgtagttagcaggttctcaacagactctgaagctattctttatatatgagttgaaatattctttatactttatcaataaatttttggcttatataaaaagatagagcatatagtataaacttatattgcagacccgtacagaatatgagttaggaagtattcggcagataaaatataatgtgaaaggaagctatggttatgtatggctcactttttctagaagttattttaaagttaaagcttaaaatatcaactttaaaaacaaagcacaagttagtcaataattattattggttttcacttttaaagctcttctttaaagtaaaatctatctgataaaaata

SEQ ID NO: 139160 - DNA, 462 bp, Glycine max
  unsure (1)..(462): unsure at all n locations
agcttgtccataaaaatatgtttttgaagtttgtcattncaattncttactaagtaaatggatcatttttcaaggtccaacgccttaaaatggtcacctcttaagtaaaaaaaaagaatcacttgataagaaagaactacgtaggtctgatttcctcgtcgcaaattgaggaatacgtatgagcaaagggaaacacccttgtcgaccacaaaaaagaaaaaatataaaaagggtataaaggatataaggacataaaagggaacataaaaatcaaagtcatgtttgcacattcgattaaaggctgccgtcccttgggacggacgtgtggggtgctaataccttccccgtgcgtaaatacaactcccgaacctttcacttaaaagttcgtagatcgcgtcttttccgacgttttcctcaaataaacgttggtggcgactctgcgcgtattcctttcgtggacac

SEQ ID NO: 139161 - DNA, 408 bp, Glycine max
  unsure (1)..(408): unsure at all n locations
agaacacggaaatcaacagagngataataaaggagttgcaagatataagaaggagagtatcaaatacaagaagccaaactcataagcaagaaataagcaaaccagaatataaaatacatcaaatgtcaacaaccacaaaatatccaagactgaaaggtaaaaacacaggataaatgagcagagtacagagcataagaatgtaaagtctaagaaactaaaagccaaaagacacgggctagaaaagataaataatcagaatctaaaagctaagaagacggaggaagtggtggaagatcgaaactctgacgaatgtatatgacatcctctccaagctggagaagacaaatgtccataccggctaagcgcaaatctaacgagtgagagggtcaccaacatacgaacgaagac

SEQ ID NO: 139162 - DNA, 353 bp, Glycine max
gtaacttttttaagagtaggtgtggtgcaattggggtggatgaaatagatgtaagagctttggccggtattctacattgtaaaagtttaaccttcccttttgtggcatttgggaatccaattaaagcccaattcaagagaaggagcacttggaggcctattgttgacaaatatgtgaagaagctatcatcttgaaaacataggcaactttttttgttggggagggtatgcctcataaatttggtatgtacttctcttactttttttctttttttctttctttaattaggattgctagtggagtagtgaagagggtagaaagtaacatgagggatttcttgtgggaaaaaagta

SEQ ID NO: 139163 - DNA, 453 bp, Glycine max
  unsure (1)..(453): unsure at all n locations
tgctganatattacaatagacctcctcacctcttttcaaaatcaaccacagcagaacaattatgacctttccagcaacagatacaaccctggatggaggaatcaccctaacctcagatggtccagccctcagcaacaacaatagcagcctgctccttccttccaaaatgctgttggcccaagcagaccatacattcctccaccaatccaacaacagcaacaaccccagaaacagccaacagttgaggcccctccacaaccttccctcgaagaacttgtgaggcaaatgactatgcagaacatgcagtttcagcaagagaccagagcctccattcagagcttaaccaatcagatgggacaattagctacccaattgaatcaacaacagtcccagaattctgacaagctgccttctcaagctgtccaaaatcccanaaatgtcagcgccatttca

SEQ ID NO: 139164 - DNA, 392 bp, Glycine max
  unsure (1)..(392): unsure at all n locations
atccttaagcaccgcggctgcaagctgcttgnaggtctcggtntttaattatcttttatgaatgaaggggtatagttagtgtcccagtgccaccaactccaatgttaccaaaggaaaacactaattcagaggcactgtttgtgggattcattaaatgctcaaattgggtacagtgaagttcattaattttcttttttccttggagcttttttttttaataaatttgagtacgtatattttggtttaataatttttaaaataagaaatcaaattgggtacaatggagttcattaattttctttatttattttattaatatttctactataattttttaatttaaaataaaatagttttccttacctctccaaaactcctaatttaataacctt

SEQ ID NO: 139165 - DNA, 390 bp, Glycine max
  unsure (1)..(390): unsure at all n locations
aagcttgcggtgttgaagctaaatggatgctcgngaacaactattggttgttctggtcctaagtatgtctatgcctatgcctgattggagatattattctctgttttagattacagaagtttaaatcgagatttacgattgagatcatatatatgatttctgttgatttttaatctttagcttttcaaaatatatgtatggcatttttgttgaaagcacatctatgtgtctcctttcacaaaataaaataaaatgcgaacaacttttctgaaaagtaatctgaagccctgtgccgggttaaaaaatnttctgaaggattattttcttagatcaccatctttggtaagttttaattggcgcgcctgaatgaaatgcatatctgtcattgaa

SEQ ID NO: 139166 - DNA, 469 bp, Glycine max
agcttgattaagtccaaaacaatcatcacattgattttttattgtgatgtattgttgagattagacacctgagttaagagcttggacttatgtctgctataatacaaaagaccttgcactcgttttgtccaatacgatcacaaagaattcttatggttaggcttattctttaagagcttggactcaagtttgtcatcgtagggggcacatgcctaacctctttaatattctgatgacactttcagagtttaaagtcaaaatcaaaccgcttggttagctgtagtccctttaaaatcacccacagatagtacatttattaacctaggttgactcttgaattaatcttgatgatatatgcaagttgttttatttcaaaaatatctttgaaaggcgtaaccgacaaatcacaccaatgtacaaacatatacatgttgacattaagagtagatttctttaatagcttgaaaca

SEQ ID NO: 139167 - DNA, 465 bp, Glycine max
  unsure (1)..(465): unsure at all n locations
caaatataagctcaagattataataagttagtgtgaaaactttattttctctatataatataacttttttgtactatgggatacttgacgcaacctatttaaaaatgactaaactagtggcttgttatcatgaactgaaaaaatcaaattatatattacaatgacgtgtattgcttgccacattatattaatgtgtcattctataatntaatgatcaagtaaaatttttacattgacattaacgtgtaaaactatgcaataaattgaatttagatatggaatcaaccattgatcaatttatcataacggtatattgatattcatatgtccaacacaccatactaacagtacttgttggtagagactacaaatatcctttattcaagataatccagttccatactaatagtaaagtaaaacatcactaatggattgttatgcaaaactaaacatgacccatataat

SEQ ID NO: 139168 - DNA, 454 bp, Glycine max
agcttatagatactcctatggatcctaacactctttctcatgcttaaaatagggggatcccttttcagaccctaagaggtaaagaaggatggttgcgaaactgaattatatcatctgaacttgtccaagcatttcttttgtattcaaccgcggtgagccaatttcttaactctccatgtgaagaaattgagatgttgctaacaattagaaatatataacaggaggattgggaaaaggtctcttgtatgaggacaaaggtcacacacaagttgtgggatattcaaatgtatattgggctagcactcctatagataagaggtccacttctgggtattgtatcttcatgggtggcaattaacctcctggaacgtaagaaacaactattgttggagattattgtgaatcataattgacatgggttcactactgtgaattgtgagggtaaacactctga

SEQ ID NO: 139169 - DNA, 208 bp, Glycine max
ttgaccacacagaggtacctggagacatgaggcgggcgtcaggagaccacgggaacctgcggtggtgagctatcgcccaaaaccaagctcgacccatcccgaccccaccagcgacaaaggccgtcagagagaaccagtgaggtgccctaagcaggcgagcccctggccgcccacagacaaacggaacaaagaccacaaagcacggagg

SEQ ID NO: 139170 - DNA, 475 bp, Glycine max
  unsure (1)..(475): unsure at all n locations
agcttgccaccagccaataataaaacttatttattataactgaataaaatatccacccncctccttttccactcttcctacttttataacatattgtataaacaatttaacatcttttttccttttcactcaagtgcaaggcaaaactacttcacctaaagattaccaaataggttttaaaacacttgcaactatttggcaaagaataggtaaataaatcataagttgacaatcaagcatggcgtcaccaggcacttgccctttttctgaatatgaaattaccttgcctgtaccacctaaagtatgcatgggtgtactagaggtaggaactccatttggaaagtaaatttgtgcaggtgaggatttcatccaggtgttctcttcattatctacaggcaaataacaatggattataaggatctgtaacttctacatncatgaaacaaccatttttggccaattgaactgatctata

SEQ ID NO: 139171 - DNA, 462 bp, Glycine max
tctaagctgtgaattggaaagattaagattatataaagatttgtttttatttatctcgtcttcatttgatccatccccctccttagacactatctctttaattgattcacagcttcttatttccattattttgagccgagacaaacttttggctgttgaggatgtgaacaagttttccaacccatggcactcaaatacaaacaaacacatcagattggggaaacatatgggggatggtgccaagtttcttaaaactgaacaactgcttacatccaaggtttctagatttctgagaaaaggctcaatcaaagtgttctcaaaacctatggtttcaagctctgaaagggactccaagcttaatactttcagctgtgataggagtccagtatcatccacattaggactttgaaagcagaaaatttccttgaaggaactacaatacacctcaagcttctcaatatt

SEQ ID NO: 139172 - DNA, 460 bp, Glycine max
  unsure (1)..(460): unsure at all n locations
agctaggtgacatttctctaccttcattctgtgctcttttgcncttntaaanacatgcaacttggaagttaacataatcaccactacatggaagttaatatgataaccactacatgccactacatgctataataaccactacattaactatttctagaatgataattatccctatgacagtttccatgacagaacatctttttcttaacaattaagcatatgtcttactttgtattttttctctcgaacctggaatatgtggagaagaaaaacatcagagtaaagacatcaataaaacaattatatgtactgaataggattgacgaagaagaagcagagcatactcacaggcgataataggtgataattactggaaaagatatgcttcaattacaagtagcataacatatctatcatgattgacgaggaagcatttatgatacatatacaataatgtatg

SEQ ID NO: 139173 - DNA, 254 bp, Glycine max
ccgcccaaacggcctcatatcaacggcaaacacgaccatcccgagcacatacaacgcccacatcctctgcaccaccacacacaaccctgaccccatcaacgccttggacattgatcccaaccccccattccctaacaccaccgctgacgccatcagcaaatcctgaagcccaaagacgcccctctcctcattcaccaacacaacaaccccgctgtgacggcccaccgacatgcaagcacctacgcccccccaca

SEQ ID NO: 139174 - DNA, 461 bp, Glycine max
  unsure (1)..(461): unsure at all n locations
agcttaataagaataaaaatntaagcaaatangtctaataaagtttaatcaaaatccagtgacaatttaacatatttgcactaaattgtgacaaaatataaggagaggaaggcaatggagtttaactcaagaaaatcacctatcagatgtcaccaagataacaggtagacaaagcttatctgcacccaaagccattattctccatatcagactatcatgatacaggggtccactgactgaagactcatcattttcagcggcatgcttaagaacttcaatgttgttaatgaccagctttggctgcagttacttgaatatatcatcaatttgaacagcacaagtcacaacactatacaaaaccatgcaagtcaacatgacttcattgcatagataagtaagcatacaatcttgcaaaagaaactcatttccggattgatactagcatgaaatannatcttata

SEQ ID NO: 139175 - DNA, 449 bp, Glycine max
tctagccaaatggacttaccttgaattaattccttttattctccttttgagccttgtttccctttccttgttttgaagctcactacaagccttaagtgaaaaaccatgatattaccatatccttaaggaattttggagctttggaattgttttgggaataagtgtggaggggtttttgtttcattggacaacttgttttgttggctatgcttcatgatgtattttgggccatacttgatgtacattgtatattggttaaatgttggacatgctgaatgaaatgttgtttctcaaaggctaaagagtaaaaaaaaaaaaaaaaaattcgaaaaaaagaaaaagaaaagcaataaagttgagtgaataaaatctcaaatggcacaagaatgatgaaactcttggtctactcttcatgttcaatattatcttgacttctttatattttctta

SEQ ID NO: 139176 - DNA, 425 bp, Glycine max
  unsure (1)..(425): unsure at all n locations
agcttgtatacctacaagcaatnttttttttgtgattntgatnctttattnttgaaacttacaactccctcttaggacaatacaggttcaaccttcaatgattaaagttgagcaagacccaagtgtgcatatgcaaagcataaattcattggaggtagttgtcgcaacatgccantttgcgggcgagcgagggcgaggctcacgggtgcgctttccaaaggaggaaagatgtgcaaagtcgccaccaacgtttatttgtggaaaacgtcgggaaaaccgaaggaaaccggtcaaaatgaaaattctaagttcgggagttgtatttacgcttgaggaaggtattagcacctctcacgtttgtctcanaggacaacagcctattttttagaattgtggaaatggcgttaccttaacttttatttctt

SEQ ID NO: 139177 - DNA, 452 bp, Glycine max
cgcaggaactagttcaacagaggctaattatgagtatatatttttctttgagaaggtggcctggcctggagcccgaccttcttttgtgggagataatgaaagttttacagcctaggcacctcaacagcatgagccagaaccaaaaaatgatcactcatctgaagccaccatccctggagcttttgattttgcaaaaagaagattagagacgagatccaatgaggctgatcatcctggaccaatgccgacatcagctgatgcagcatttccaggagtggatccatcttcacctcagcacgcagcatactcttccactcctgttttagagatacatgaggcccagaccataccagtcctgcctttggacacttttcttccagctactccaatatggcatctaacagatgaggaggatggtcagacacatgacacacaggaccagtcacaggaat

SEQ ID NO: 139178 - DNA, 418 bp, Glycine max
  unsure (1)..(418): unsure at all n locations
ttatgatcttttagcactgttatgatgctgaggtcatttctccttatactatattgcaatgttagaactaccttgttctaattttgaagttaaaaataatactacctatttatttttgctagaaaacaaccatgtctatgattttttgtgaactaaataatcatacaaacttatacaaaacctgatcttatcggacagataagaataagttaaagtatatataaaggggttcttctatttagtaaaaatcttttgaataacaccttctacacatttaacttaatctacactctcttactcttatggggcccgcccgagttggccgacaaaacattagcagcatacaaatattagcctttactcacccatanataaaatataaatattactggcttttgaaagtgtggactgtatcaca

SEQ ID NO: 139179 - DNA, 359 bp, Glycine max
  unsure (1)..(359): unsure at all n locations
agcttttatacaagctaccaaacaaaatatttctatgatctgttgtntaaaaactaaaacataaacataaaatgtactgaagacaaaataatataaactgttcaaagtgcaagaaaataaatatcctaatcctgtcaattatcctgtgtagcatcattcaagtccagtgttggtgcagatggtggatcataagaaataggcaagtccaacactggtgcagatggctcaggctcatgctgagaagatggctctggtactacaacatcatcctgaacaataactggatcagtctcaaaactgtatggctcaaatggagagggctctgagatgttagcagaagcatccttctttgctggctg

SEQ ID NO: 139180 - DNA, 466 bp, Glycine max
ttgagccatattcctgactcaccataaaccttgacctattgttatattgtcaatccttaccctcggaagcgaaaagaatagaaggaaggtttccaatcaaagagaaagccaataagataagaaggaaaattcccaatcaaagagtgggagaaagcaaaaagaaaagaaagaaaattcccaatcaaagaatgggagaaagtaaaaaaggaagaagaagaaggaaagaaagctcctgatcagggatcaaaagaaaacagaagatatgtgcagaaaggtctttggaccggacaatatctgaacaatacagaattgtcaccaaatgaacaaaaagaaggaaaggaaaccacgacctaaaatggtcttctccctttgattaccaaccaaaatcccatgcgctagcgactattttcgccccgcactagacaaaagaaaaacagagaaagaaaaagcctgataaatcaaaagc

SEQ ID NO: 139181 - DNA, 366 bp, Glycine max
  unsure (1)..(366): unsure at all n locations
atactaannactaagtcttgtctgacttgatgattgaaatgatgcatgtttatgtgtgtatccctacaatgccataatcaagaatcaccaatcttacttactaaaccactaagttcatgaaatgatgcatgtgtaatgttttaacatatanatatcacctatccttttgctaatatggacaattgtcacaaaggtgactaatgctcaagaggttatgctttagtccatcaacatataaaacattctctatttgtgtcttgactgattttcaatgtntccttctcccataatattccctttattgttgcttcaaaagtgatgtatcctctctcttttgatacaaagtcaggaagtttgaacttgtca

SEQ ID NO: 139182 - DNA, 303 bp, Glycine max
  unsure (1)..(303): unsure at all n locations
cactcaatattatgatcagctgctaaagtgcttcgcgtttggggacttccagttagtaccgaccgtggatgaatttgaagaaatcttgggatgcccgctatgangaaggaagccatattctttttttgggttatacccctccatggctangatagccaaaatggtcaaaatctcaacgcaagaattggaccgagtaaaacaaaatagaaatggngtggttagaataccgaggaagcacttggaggagtgaaagccttggcggatcaaggtgaatgggcttcattcattgatgtcttaatgcta

SEQ ID NO: 139183 - DNA, 472 bp, Glycine max
  unsure (1)..(472): unsure at all n locations
ttaagcacctgggctgcagcttacaaagaaatatttttttatgatatacttgggaaacctcttataaagctatgcttatgtagttntgaggtcaacctcaagctcgcatgcccaagttttttacgccatacccaatgaccttctttgatagacatcaagtacgatgcattttgatctgatagctcacctagtctaatattaaagagattacctttcctattggcagaataaagtaagaacacatcactgttttggatgatacactcatccttgttataggaaacatcatattcactgtcagataattgatgtatgcttcacatattgtgttttaacccttcaacaaataaaacattatcaataacagaatatggaggtatacctatcttacacactcatgttattagccatttattattgccttcgaaagtacacgtccaccatgcatagggatcaggctatggaacataca

SEQ ID NO: 139184 - DNA, 439 bp, Glycine max
ggcatcggcattgtcttcaaaacattatcagttctttttattttgggtttttataactcttgggtccatatggaatgctttgaagattaagttatctacaaatggggatttgatatattttgacaagtttgggtagctgatcatgtattggaaattgaagctcaaaaacttaaaaaagcagttgtgttcatataagatcacttcaaattctaataggacattttgagtatgtctgtattcatgcttcttaggttggaaatatgtttgcaaaactgaggaattaattagagtctcaagtcttaattattttcctttagcataacacatttgaatcttttaatgacaatatcttgtaggttcactggtgttatttatcacttgaatggcatgatgatctattgtttgaagtgcttttgctatttgttagcatatcatcttc

SEQ ID NO: 139185 - DNA, 440 bp, Glycine max
  unsure (1)..(440): unsure at all n locations
agcttattgagttataatatgtcaaaataatattcagagataacccaatnttattaacacttggctggtgaatggtgataacatattattgttggacaagtggcctcaataacttaagaggggagagggtgaactaagtttcaaaattcccactaacaaaattttaatccccttttttaaatgattggcttanaatgcaaaagaagaacaataagcaatcaatttaacaatattcttttaaacgtgcaagaaaaaattgattgcaataaaataaacgagataagggaagagagaaatacaaactcaatttatactggttcagccacttctcgtgcctacatccagtcctcaagcaacccacttgagattccnactactntgtaaaaaacctttttacanactcgaacaccaaaggatccattttcttatgctagtaaact

SEQ ID NO: 139186 - DNA, 369 bp, Glycine max
  unsure (1)..(369): unsure at all n locations
tcttcaccaaatcacgtnccgtaagcccatcttctcttttcatcctcttcacttcaccgatcaaatctagaaaaacttcatcaaatggcagagccatcaaagaagagaaagggatcatcctccaccgctaccgctgctgcccatcgccgtcacggcccatccggagcacccacaacacctattcctccttctttgtcatctccaagatcatcaacactgttttcatccgatgatcaacatctacggtacctttctcagttttcttctagaataatcttagaccctaagtacctagacgtagagttctttaatgatgaaacgtctgattgtatcaagggttcaaaatctggcttgtgattcatgcattta

SEQ ID NO: 139187 - DNA, 489 bp, Glycine max
  unsure (1)..(489): unsure at all n locations
gtcacctgcggcatgcaagcttgtacagtaatagcaatacttgggtgtattcatctgtttggtttgggatcagctatttacttattataagagtgttaaaaaaagaatgatattgaatctagttgctaataagtttcaaccagcttaatgtacaatggctgtgtggtagggaaactataatcgagattctattgtggcataatcgaagtgtttcttgaggataacacaaatctatgatcattagtatatgcaagaacaattgatactgtgacttagggcataattccattacaaacttaaaatggaaaccaagtgcacttacaggaaaaaaaatgagaaaccaaaatgaattaagcctattctataagttaaaattaatttacgcataggttaatgtataaaatacaaactctcgataaaaggcaatggatatgtagccattcactccctttatatcaatntattcgttgattataggatttgatttcc

SEQ ID NO: 139188 - DNA, 365 bp, Glycine max
atcatacacggccctcataggactttaaccctcacttttcttttttgccacatacatacggggttgtacaaaaaatactttcatccgaataaaaccctcaactattgtacccacaactcacctagcatttgcatgaaaaagaaatacaatgcgaaatgaaacttacatttctcccttaaattgcatgctaagaacgatacccggaaaccaagctattagcgagagcacatagaatatagatagctccaacaaaaagccaaaacgcactgaaacgactaatgataatgttactgccaaacgcactatgcctcaaactcggggattaaatgcctcactcatgcatcaactcctacgtgagcatacat

SEQ ID NO: 139189 - DNA, 268 bp, Glycine max
  unsure (1)..(268): unsure at all n locations
agctngaatgtccacatgggtgcatgcacattattttttgcattattttcnaaancacccggtgtatttgcgtgtcatggaaataacgtggggagttccctttatccctgaaccactgtccacaacaagaaccttgacatactgttcccgccccaatgtatactactatgtttgtgtgggtgcgagatctatcgccaggtgcacaagattgctcagtatgttattaaaacagactgcacctacttcaaactcatggaaccagttttac

SEQ ID NO: 139190 - DNA, 449 bp, Glycine max
  unsure (1)..(449): unsure at all n locations
tccttgagtcacctgcggcatgcaagcttatctacaaacttgtcttctgggaatcttatttctctacctggtaattgattaccggtgccttgatatgttggaaataatgtgttttgaggcacaagctaatcaaccaatgagattcttttaatcttgtttgcttgaccatgaattaatctngaagcagactctctttgcttaaccttgaatgtttcttgaagcaatcttatttgattatactctggcatcatcaaaacctatattcatacatttacattctccctgttgttatgatgacaaccattatcaagtgaattctttctagcatcatccaaaactgcatgatccacatatttatcttgtaaaataatacttgtgagttattgacaatattttctagtgaattaattcttttaaaacaagcttaccttattaaataacggtaaata

SEQ ID NO: 139191 - DNA, 207 bp, Glycine max
catacatacgaaacctcaacaagaggctgtgggagaacctatcatacattcgaggacatagaaacggaaaccaacacaaggcggccaatggcacaaaataaatacaccaaggggctaaagatgccgaaaaatactattccaagaaggtttcacataaattatgccagaacacgctcacaggaaaaaaatttgggaacaaaacactca

SEQ ID NO: 139192 - DNA, 473 bp, Glycine max
  unsure (1)..(473): unsure at all n locations
ttaagtcacctgccgcatgcaagctttgtttgcccactaaggctgctcattctgtatttntccctttgtcctctcctatttgcacatcttggtctccagacaatgtgagtattatgttgggggcagttgggcataatttcatagttgtgtcaacctctaacccatgctatctgtttatccttggggttagatagctatcagcttatcaatatgaaatntatgaaatgcaacatttggtactgcagaatgagttatcatgcatttccatccctggacaagaaattgagcaaaaacaatcaaattcatccatttcagctaataatagtagcatctcttcttttcaaattcaaagtggagtggacatcaataaaacctttgttattggcacacataggccttctgtggaaatttggtattntgaccaggtggaggaattacagtagttgcttgtgggacaattttattaacgaata

SEQ ID NO: 139193 - DNA, 459 bp, Glycine max
  unsure (1)..(459): unsure at all n locations
tatcataactttccttttattttaaaacctttaactttggtcccatttngnngaattaattgcttcctaacctgattcaataaccacacccacgttgcctacttgatgttttacggccattttttttttctaaaaggaaaatgctgtctacataattttttgatagacaaaatgaaaaacctttggatagggtgtgggtggataaaaagttcagataatcacacatctaatttttattatataccaaaagaaaacaaaaaccaaaaagaaataattataaaacacatagttgattgaaattatacattcaaaaaaagattttacacttttcattttttccgtataatatttcatttcgtcgtatcccgaagaaactgaaagtagaatctgatgcaagcatgacaaccggaacagcgaaacttattaattcacagatgtagaacaactcaatgatgataa

SEQ ID NO: 139194 - DNA, 418 bp, Glycine max
  unsure (1)..(418): unsure at all n locations
gtcaccgcngctgcagcttgaggtgctagcccacctcttttatattagagtatcgataatgcgtctaccatcacgatcatcgtctccctttccatcattgggggtaccacctgngccgccagatccctccaccttttgggcgtgttttttgaaagatccatccccctttttgcaaaagttctgtagttgcatcctatccggaaccatatcaaaattgtactgatactgcctaacaaaggcaaccattaggtccttccaagaatggactcgagaagattccaagttagtgtaccaggtaacagctaccccagtaagactttcttggaaggaagtgtatagcaattcctcatcttttgcgtattcccccatcttctgacaatacatctttagatggttcttaggacaagtagtccccttg

SEQ ID NO: 139195 - DNA, 339 bp, Glycine max
aaaaccagcgccgacaaggcgacgctaaaagcgacaggacttccttaccctggcatatatatgataggtagggatgtatatacatatatatatactatctatatccacatacatccccgaaacaagacaccaatctggctcagaggcataatatacatctagaatcaaggctgtgaaacacgtacagagccaccatttcttttctggcaccagaaccacactcggacacataactaagtaattgcgaccgctgataacagaacacactagacatcacactcgcgacacaacaggcaagataatcacaggcgccaaacacgaagaacagagggagcgaga

SEQ ID NO: 139196 - DNA, 175 bp, Glycine max
agcttcttgcgtagccgctcttggtgctatattatcccataaacaaatccctcttattactagctattttgaattctttagttccttaatgtacaaccttcaaattgttgttcgttcccctctttgagaatgaggaggatcttcataagacttcatccagctgatgtttgtcggc

SEQ ID NO: 139197 - DNA, 398 bp, Glycine max
  unsure (1)..(398): unsure at all n locations
gaaaaacgcatggatgaactaaagngaagaggggaaaacttctgaagttctattatcaatgtccttatgcttacaacatgctgaagaatttgttatttggcgtacttaaagtgatgaactaaaaagtatgtccaacaaaataattgacattgcagaaaatgcatgcctatatatatagaactaaaatgaacacagcccctatatatatttatttgactttgattacttgctcaaaatgtgatccaagacatgcacactggtagaaaaaacctttctttcttggtcatgtggcttgcttattttgatcttaaaatattgtttgcttctaactttctaagcctctagggactgtctcaatcatattcaactaatagaaactctggagaagcctcaattct

SEQ ID NO: 139198 - DNA, 464 bp, Glycine max
ggaccataaaactcaacttccttcaaaataataaatacgcagtgggcacttactataatttgtaaatgagcccgcccattaccaaaatgacaaaattaaccattgatactaagtgaagttgaacgtgggtcattgaccttattttaattgctcttttgtgtgattaagaatcaaatcaaggtcttatataaaatctccacccagtgcactgaaaaaaaagtgagccaaaagcatcacaccactacaaatgtttgacattattatatacataatacaacataggctctttttatccttttagaccacgtaattaagccgcctaagatcatgtttaattggtgtcatcgagctgattcgcacctattaactctgtggtataatacaaaacttttttcatttcttacactatggcatacactatggcatgcacatcgttgtcctcctagcatgaatatcatgcttct

SEQ ID NO: 139199 - DNA, 398 bp, Glycine max
cactagacctcctatcttgagtggagagaggataccactacatggaaaactccgaatgcaagatttatattgaggcaatagatctaaatatttgggaatccatagaaatagggccttatatacccaccacagtagaaagagtttcaatatatggtagtccatctagtgaaagcataactatagaaaaacctatagatagatggtcacaagaggatacataatgagtacaatacaacttaaaagccaaaaacataataacatctgccctgtgaatggatgaatatttcaaggcttcaaattgtaagagtgctaacgaaatgtggaacactcttcgattaacacatgaaggaactacaaatgttaaaagatctaagataaatgcactaactcatgagtat

SEQ ID NO: 139200 - DNA, 347 bp, Glycine max
  unsure (1)..(347): unsure at all n locations
agcttcttagatgctttgttttctttcttttaatctcnaatcactagttgtttaactaaatcattttaaaggcttcaaatcttcaaaaatattcaagagagaagaagagtgaaaaatgatgaaaggcctcactagaaaatctattatgaccaccaaataacaccaataggttgctaaagaaaaaaaaatcttaaaaagaagttaaagaaattatgagcctcatacatgaagaacaaaaagacatgcactaaatgaaggaaaagaagaagctcaaccacaagtgttgtccatcaaaatgtttcaatcaaagaaatagatcaatgatctaaatcttccccatatatagt

SEQ ID NO: 139201 - DNA, 459 bp, Glycine max
  unsure (1)..(459): unsure at all n locations
taagaaacccgcttccaaatcaatacccaagactaatttctattttatttccattaaagcgggtgggtgatctttcatatgataatgcaattgttgaaacaaacttaccctatgttgacttgtgataaaacctttgcttgtgatacttgccatacagcaaaacagagaaaattctcatttcccaatagtgactcttatgcttctagtgctttctctttgatacatgtagacatttggggtccttgtgccacaactactttgaatggacataagtattttcttacaagtgtggatgatcatactagatctgtttagatttctataatgacttcaaaagctgagactcaaactcatttacaagcctttgtttcctatggtgagaggcaattcaatacataagtgaaagctatccgatcagacaatggtgcanaatatattatgaaatagttctatcataat

SEQ ID NO: 139202 - DNA, 142 bp, Glycine max
agcttattacgagataataacttatacgtttataccacaaaaaaattaattaattaaagaaagggaggtataacttgcctgggcgagtggctagctcgcctgcgcgaatgcatgtctagaagcaaaataaaaaggggggggg

SEQ ID NO: 139203 - DNA, 455 bp, Glycine max
aaaactcagctatccgagaaagaacatcttaaggaagttttgttgtttggcaatctaggcatttaaaagctttgctgggtgcacctaacaacactctttcatttcttggctaggtctgtgacttacccaacctaaagaggctctttcaataaaagctctttactccttgaactttaacggcttttggttttatgctctaaacataaaattgaccggccttggttccctatacaactagagactaaaactgctgaattttatggtttaaaaattgaaagtaaaaaacttagaaaagttcaagtgttaaaaacatagataacccttctcctccgtatcaaatgtgttcaattatgaattgtacgaacagctgagtataattagtaattctgcttccatttggcccattgtgatttaccaaagatatggccctttatacgctatgcagtggatgctat

SEQ ID NO: 139204 - DNA, 444 bp, Glycine max
  unsure (1)..(444): unsure at all n locations
actaacctcggagaggatgcttcaatggaggaaaagaaagatggtgatttatagagacggggagaatgaaattggaggaagataaaaagggagagaagttgaactctgagttgtgtctcataagactctcattcatcaaagttacaacaagtgttacacatgcttctatttatagactaggtagcttccttgagaagctttcttgagaaaacttccttgagaagcttctntgagaaaacttccttgggaagctagagcttagctacacccctctcataactaagctcacctccttgagaagcttccttgagaagattcctaaagaaactagagcttagctacacacacctttctaatagctaagctcacctgcttgagatgagaagctagatgctatctacaccctcctataatagctatgctcacgctcatgacagaattcat

SEQ ID NO: 139205 - DNA, 463 bp, Glycine max
  unsure (1)..(463): unsure at all n locations
nnagctttgttttcaatttgagcatctcgatatatttctggactcaataagacatccgaggcaaaacttattgtcgtttgaatttggaaggagcttttgttttcaatttcgagcatctcaatatattacgggactcaatcggacatccgagtaaaatgttattgtcgtttgaattttctcagagctcttgctctcaatttcgagtgtctcgatatattatgggactcaatcggacatccgagtataaagttattgccatttgaatttgcttagagcttttgttctcaatttcgagtgtctcgataaattacgggactcaatcgaacatccgagttaaaagttatatcggtttgcattggcaatcaacttccgttntcaattacaagtgtctcgatacattacgggactcaatctgacatccgagtaaaaattaattttcgctagaacttcctcaacgcttcta

SEQ ID NO: 139206 - DNA, 386 bp, Glycine max
agcattaggaaatgcgagagcaccactccatcaataggattatttcttgacatctcaaacaaacaaagcaaacgtgacaggacaattatagctgctgtatgaatacctcacccactcaagtgtatcacacaattatggcttgtctctaatgaaacactcttgccttttaccactctaattccccttgagttcttaggcaattcaagagattatggccacaacaaagaacaattcaccaatatgtgtcacgtaaggctagagagacaaggaaaaggttaaccaagaaaaaggctaacaatgtattgaataatattgggatgatgtccattacgacatgtcggctctcatcaacttaaactagttaatacggacaccactctcgagat

SEQ ID NO: 139207 - DNA, 464 bp, Glycine max
tccttaagtcacctgcggcatgcaagcttgactaggcgagttgattatagccttatgttttatcttatttattagtcaattcggttaagaatgataaatcccaaagagaaaatgtccggttgattttccgctctattttactaaaaggcatatttttgttattatattattattttatctctttttgatttccaatgtggttacggcacgaccgaacggtcggaatttattttaaccaaagtttacggatcatacaattcaaacgttcggtggaaatgtattttatttttaagttaagcgagaaatgacttaagtaaaatggcttaagcacgtcaacagggggtataaaaagtaaatgaaatgagaataaaaatacactaaacacaatgtggaccaccacgggtacatagaatgaatcgaatagctctggtcaaggtacttacctgttgaagatcgaagaacca

SEQ ID NO: 139208 - DNA, 293 bp, Glycine max
gcgggagtggagcgctaagcgcaattccaaccaaagagggaaacgcagtggagcgcccagaagtgcgcgaagccagacaccaacaaatagggaatggcgcagagcgacaagaggagcgacaagcgagccctagcgcagagggggccgcactaagccaaaatcccaaagcataacgcaagaagtggactgccgctgagcgcgacaggctcgcatagcgaaatcggcaacttataaatgcgttctcagagagaaaaacacgattattcactctcttctactcccaaacaccaccc

SEQ ID NO: 139209 - DNA, 473 bp, Glycine max
  unsure (1)..(473): unsure at all n locations
agcttcataatanaaggagctttccagtccctcctcataattgttagggaggaaataaacaacatataaacaccctccaaaaaacatcctcctcgaaccaaatatgccaaaaggaattatccccttggatttaatgagtattcaacagaanagtagccatggctgggtcgtattcaatggaaaatccaaccaggaaccaaacaacaaagggtataaaacaaggtaattaaaaaaatgatgacaattagcttagctgctctgaaattaaagatgatattctactttcttcaccttagaagttcttacataacacaagccatgaaagccgcactggttaaggcaacaatcagcaatccctaaaactctacattccaaatttatatttaatttcccaaaatcaaaaagcatacatacccaactttgaacgatcagaaaattactaagctgcttctagccttctacaacacataaca

SEQ ID NO: 139210 - DNA, 397 bp, Glycine max
  unsure (1)..(397): unsure at all n locations
tctaggagacaaagaagaaaagaaacatattctttctttctaatgcaaatctaaattgtgagggtgatgaaaaggtatatgactcttacatgcaactctctnttccacaccgaggtagtctctgagcacactcatcccttaacatacaatcaagcccattttcttaggcccaaactcactaacacaacaaacatatgcacgacatcaccacacagataattaatacactccaagaacttaatttaaatttaatcacactcgctaatcaattgcaatcactaaatcatgcattatgaaaaacacagtgtcacataatgaactcacatatgcgatcttgggatccctttggtggagatcaacacgtatgagcttgaaaaggtagcgaaggacgcacatg

SEQ ID NO: 139211 - DNA, 143 bp, Glycine max
  unsure (1)..(143): unsure at all n locations
cctctacagacanctgccgcatgcaagcttnctactacttctctctcacagcctgttgttgattgtttcctttccttacttccttctttagcctaagctggtctacacgcactcgacaggttgcttctatatttggatctgct

SEQ ID NO: 139212 - DNA, 449 bp, Glycine max
  unsure (1)..(449): unsure at all n locations
gctcataaacagaactttgttctgctatgcataaactgaactaatcggctttttgaacatgctatctttatagataggactcggcttatacaatttgagaaggacttcacaatccactatagtcactggtcaagcaatattatacaacgcttcttgtttatgtagagggagtgcacatatatcagcaatacttgtacaccacacaagtagacctatttgactacttatgtactacatataatagaccataccttngtaattagtacctctggtactttatttcaatataatatatttatcttcgctgataaaaaaaaaggtttaataagcatctttggaaggagctagatagctgagttctaagtttattgcaaatttcatgtaattgcctatttcctaaggactcatttctattcattggaccagtatccaacatttacatgaaacac

SEQ ID NO: 139213 - DNA, 347 bp, Glycine max
ggctggatctcatgagatcgccctgtgctcatctgattttgtgaattaatatattcctctttcggattaaaaaaaatgaattataatcagaactctcgttctatctaggcatttcccatttctcttctttcgaccatctggatggtcttgtgctccaaaatggattaaatcagaaagctaaccatggaccttaagttgtatatgccaagttctgaggttaatatactcttcttttccttttgggtgcttctctgcgacagattcaattgcaaggcgctcggagtacctctaccttggtggtatgcttcttctgggttgccattcataattgcactcttcaagttgag

SEQ ID NO: 139214 - DNA, 441 bp, Glycine max
  unsure (1)..(441): unsure at all n locations
agctttntattttcagtagatgaagataatctgtggccacctcatggactcctctaagaacaatagcatcatttcttgcactgaattgttgggagttggaagccatcttctcaatcaaattcctagccttagcaagggtcatatcaccaagggctccaccactggcagcatcaatcatactcctctccatgttgctaagtccctcatagaaatattgaagaaggagttgctcaaaaatctggtggtgaggacaacttgcacacaatttcttgaatctttcccagtactcatacaagctttctccactaagttgcctaatgcctgaaatgtattttctgatggcagtggtcctagatgcagggaagaatttctccaggaacaccctcttaaggtcatcccaactgaaaatggacctangagcaaggtagtatagcccatctt

SEQ ID NO: 139215 - DNA, 434 bp, Glycine max
tatataagcaaagaatatattaagatagaagagaattatttttatattagaggataagaatcctcaaggactaaggacacagcgaccaataattaaaagaaaaaaaaaaacacagaaacaaagatgagcacccgtttagagaacaaggcagcaagtgatggggtcaaatcacagatgatgggatcacttcggaaccaggttcatattatggggatttaaataaataaagagaataggagagaattttatcttcattggtgtgtaatgatattttacaaaagacaaagcactaaccctcatccttaagacaaggttccaaatcctaaattcctaataattaaaaaatcatcaaaaataattaaatatggaaaccactctcgagattaactaagatactctaaagtattctaaggcataataatattataaaacat

SEQ ID NO: 139216 - DNA, 453 bp, Glycine max
  unsure (1)..(453): unsure at all n locations
agctntccattctcttggaagttcatcattttatntgacttctactggaggatcttaattgcttcctttatcatttccttttgaatcttgttcatcaatattcatatgttctaaagaatctgcaatatcatctagcatattctttcttgacaagatagcattagattcatcaaaggtaacatgaatggattcctcgatattcatagttcttttattatataccctatatgctttgcttcgtaatgaatatccaagaaaaatgccttcatcagattttgcatcaaattttcctagattatctttaccattattgagcacaaagcatttgcaaccaaaaacatgtagatgagaaatattaggttntctaccattatataactcatatggggttctctttaaaatgggtcttattaaggccctattcatgatgtaacatgcagtattgaccgcttc

SEQ ID NO: 139217 - DNA, 474 bp, Glycine max
  unsure (1)..(474): unsure at all n locations
agcttaagcattccactctaaccaaagcattctttgcctacaaatagaaaatttcttcaaagtcctaccccaattttcttttcactgcaagtgtttcaaagagtttgattagacatttagtcttataaaactaggtaatgtagagttctatgactattaagggtgtttataacctatacaatccaattaactcagcctgaaacaaactaatttgacatgtttggttntagaaattagactcagaatgttcagagctggtttaggttttatttcagttgtctcgttgtccaatatcatctaaatctttntttttttaagaattctatattaatgataagactcctagacttcatggataacattntgtatatattgataatatttatttcataatattatatatatatatatatatatatatatatatatatatatatattataaaaatacactccttattcttacttctttaag

SEQ ID NO: 139218 - DNA, 296 bp, Glycine max
taggtagcaagataccttggatatgcatgcatgtggcacaaaatacctcacaatatatatatatatatatgtatgtttagggagcaagataccttggatatgcatgtaaggggcaaaacatacctcacaatatatatatgtatggttagatagcaagataccttggatatgcatatatatagcaaaaatacctcacaaaaatatacacatgtttaggtagcaaaatacctcatgaaaaaaaaagaagaagaaataactcgaaaaaaatatatctttctggtgataagcccacatgc

SEQ ID NO: 139219 - DNA, 430 bp, Glycine max
  unsure (1)..(430): unsure at all n locations
agctntctttataaagggagagagacctctatctctcttctgtanggaaattctnttccttttcttctctcttcctacattgtagaggggcttcaagtttcttaaaggtttacgtgattttctttcccaatttcttcttatgctcgtctcctttnttctcttctctactcactagaagcctcacatacctctttgctccatttttcattactaagctctacgagaggttcaaggatctcttgctacccatactcatctctttgcttctttgtgtcaacaaagaggtaagagagaattattcaatttcttaggatccatgctatgttgttatgcacttaaaattcattcatatgatgattgttgcatgttaaaccctaatcttgattttttaactatggtgctatctctgctgaaaatgaatttgtgaatc

SEQ ID NO: 139220 - DNA, 360 bp, Glycine max
  unsure (1)..(360): unsure at all n locations
acacanaaggtgcaggggaagaaaccgatgaacaaaaatccaagggcaacagagcgtgacccatcttactgggagtaagtacatgcttctcattctcaacaaagaaccaaagtcgtcagagaggcgtagtgcatcatcttcagaccaacccaatccaagaaggaggatgcctacgttggatcaatctcagccatttatccacgacaacatcgataatattgcggatgtcaaagctgatggaaaccgaggatattagacactcgccagccactacgtatgagtgaagacactcgagcgatggtctgcacacacctgcttatagaactcggcacattttcagaagactataacaagctcttt

SEQ ID NO: 139221 - DNA, 428 bp, Glycine max
gcttagctgcaaaacttactttatcttttgtatgaacaagtaacaattggttcagcagtagtacgagccgtattcatcaatggtagtggtcgtgttgctggatgcatggttacagaggggaaaatactaaatgactgtggtattcgagtcaagcggaaggggaaagtagttcatgttggtattcttgattctttgagacgggtgaaggagattgttaaagaggtaagactctgcttcagagtattacttcccatttttaggattcatacacaagtatatcgctgcaaccgttgcatggtacaagtatcaagatgattggacaaatgttccttaatttatcaaaacttaccaattgtgaagccatttattgtcagtccattttggtttgtatgtggctatccgaatgggcattagctatgttgtttttt

SEQ ID NO: 139222 - DNA, 459 bp, Glycine max
  unsure (1)..(459): unsure at all n locations
ctcagttcgtttcttcaacttgagctattactaatgtttttcttatgtctcaccaaaaaggtggaactgcagtgcttcttcttgttgcttccgtttcaaggaatgcagatgcaggtggaaacgaattgtcagaagctgctccaccagtgagtttgttatttccaatgatgaaaactatagcaacaagcaagttgttagtctcactccccgcctttatgactatgtcctaaaaaatgttcgagaaccagaggtaaggactcaggaacataccaattgctccatatatcaactgtgataatctgtgttcattaagttgcccttcgtacttattgtaaagcagttgcatttcagattctaaggcaattgcgacaggagaccgcctctatgcgtggaagtcagatgcaggtgcctccatatcatttattcttgtgcanatttacttgcacagttcactaatat

SEQ ID NO: 139223 - DNA, 363 bp, Glycine max
tatcttagccacaatcttttttatatcgctttgttgtgaatcactgcgaagactataataggctacactgtgcttcttggacggagttcatctaaggcattgctttgaagcaaaaatatccactcgggagatcttttcttccattcttttgctacattttcttgtgaaaagcccttgatgactatgaaagactaacttactcactggtgggggcttgagtaccaaacacttctgaatgggatgattcctactatcgatctaatgtcattccagcattattgcttcccttatatgttaacgcttcgctatcggtcgatcactatatacattatatattggatttagaattggatttactttact

SEQ ID NO: 139224 - DNA, 354 bp, Glycine max
gacatcctctgatgcaatctgcacgcacgaagcgaagcctctggcaaacccaactgctatctcataaagcagtccataccctaaggactcctattcatggaacaaatacctgtcaagagaaccattctgcatgtactccaaaccagagctcttacatctcttgcaaagcacaatccaatcaactgaacctgagcgaaacgatgaacatttccaatagtacccacttctgccataaatggtgactcaattctcttatctgagttacccacgagaaccttcacagccacagggataccaccactcaacaatcctatatagacatctccaatacccgctgatcccaacaatgatgag

SEQ ID NO: 139225 - DNA, 424 bp, Glycine max
agcttgagctcactgttgctgtcctacaaatctccacgacatttgactcggtcatgctcttccttgtgagccctcttggtttcttgttcaagggctcttgcggtagctgcattatcttctcgtaacccgacacactctatccgggcgtctgtagagaccgacttgaatttttctttggcaagtcttgcttttcctagttctgtttgtagagctcggacttcttcatcctcttccggagcttcgaagttctcttcattgataatctgtaacttggagagccaatctaaccctcgtgtacgaactttcagccattcatgataaccaccgatgatgccattacgaatgcccctaagtctttatctatcttatcgggcttccacaccttatggacttttgataacctgaacttgcgcgcgaatattac

SEQ ID NO: 139226 - DNA, 293 bp, Glycine max
agcttaatgttttgtcacatcaaataatgtcaaaaatcgtatcaaattatgaagatcatggtatgatattgtaagtgacatccttggccagagtgggtttgattgggatggcactaaacacatcatcacagctgagaatgaaaatgcttggaatgaatattgcattgtaagtattctttaatatattgctatttgttattcaaagaagcagattgtatttgaatttttctttttttcagtcacataaatcagttaaaccatttcgattcaaggtgcttcaaaactgggatgat

SEQ ID NO: 139227 - DNA, 305 bp, Glycine max
tctaaactttatacaagagtctttctctgataccacttgttggacaagtgacctcagttatcttaagaagggggggttgaattaagatacaaaaactattcccaattaaaatttaactctctttttgtattaacactgcacccttaatatgaagtattcaaaagaaaattcaaaataaatttctttaaagcaaaagataaatatcaataaataaaagaagtttaagggaagagagaatgcaaactcagattttatactaatttggacacgccttatgccaatgtccagtctccaagcaacccgct

SEQ ID NO: 139228 - DNA, 296 bp, Glycine max
agcttgaacatcattttttgacttgattcacttgtctcttaacaccacttgacaccaatcataaacaaagggagttatgtttgcaccaaaaacactgttaaataatactgggaactggactgctaataatacagtagaaaaatctgttatacagcatattttgttaaattcttgaaatcggctaagtatatcaaatagcatgtaaagtttgagacaagaagacatggaattgggggatataggagagttacattattttttttctaattgaattgctttttggttacaacatacat

SEQ ID NO: 139229 - DNA, 304 bp, Glycine max
ttatgctggttcaaacatgtcttttcttctccaaaacgaaaggctcccttgctcctctgaagtccttgagtctctttgggctcacacctctaaccctgcttccttccaaggtgatggatgattcatctctcttccttctcaattcccttcactctcttcatactttttttttcttttactacttcccttgctcatgaattttcactacctcaacttttctgtcacatgtatacatacatacctaccaaggtttttaaaaaacggtctaagtcacaacatcaagcttcttgtggtttccatgacc

SEQ ID NO: 139230 - DNA, 289 bp, Glycine max
  unsure (1)..(289): unsure at all n locations
agcttagtcaactcatctaagattacgctatgcaaaagctgcaatgtgtctaatgtctatgctcgagccaaagcttcttattagaaacttttgtgaggtttatagatacaatacaatttacaaacgtttgtatagaataagttacttaaagtactgacacgtatcctaatgtgatatcaatactccaccaatatgaatatgagaagtatncaagcctttaaaaaaaatagaatccttgtgctccttagataagaggcaaagtgaacaggatgaagcatcttgtatagaa

SEQ ID NO: 139231 - DNA, 232 bp, Glycine max
cccaaaaaatttaaagatccaggtacattcagcataccttgtattatagggaatagtaagtttgacaatgccatgctagatttaggagcctctgttagtgttatgcctttgtcgatttttaattctctatctataggtcccttgcagtcaactgatgtggtaattcatttagctaatagaagtgttgcctatcctgttggtttcatagaagatgttttagttagagttggtg

SEQ ID NO: 139232 - DNA, 291 bp, Glycine max
agcttcaaacttgcatcaaaggagttgagcaggtaaaaaagattcgtcttcaaactcttagaggtgactttgagcgtttgtttatggaggagtccgagtcaatttctgattatttttctcgagtattggtcgtagtcaatcaacttaaaagaaatggtgaagatgttgatgaggtgaaggtcatggaaaaaatacttcgaactttaaatccaagttttgacttcattgttaccaacattgaagaaaacaaggatttaaagaccatgactattgagcaactcatgggttcct

SEQ ID NO: 139233 - DNA, 305 bp, Glycine max
tgaagaggatgctttaatggtgtaattaaagagagaaggggggagcactaaattgaaggaataaaacaggaagagaagtggaactttgaagtgtgtctcataggactttcattcatccaagtaacaaaaagtgttacacatgcttctatttatagcttaggtagcttccttgagaaacttcattgagaagctttcttgagaaacttccttgagaagcttctttgagaagcttccttgaaaatctagagcttaactacacacacctctctattaactaagctcacctccttgagaaacttccttga

SEQ ID NO: 139234 - DNA, 296 bp, Glycine max
agcttgctaacctatttttttctcctaatatctcccacactttttggggtgggccattcttggatggccttgattttctcagggtccacttggaccccatttctaccaactacaaaacctaagaaaactatattatctacacaaaaggtacacttctctatatttgcatagagggtgtttttcctaaggactgaaagaacttgtctgagatgtcctaagtgatcatctaggctcctactatacactaaaatatcatcaaaataaacaactacaaatctacctatgaaatcccttaa

SEQ ID NO: 139235 - DNA, 305 bp, Glycine max
ttggggctgaaaaactatatatcttcaccaaggttctagtttaggctctctctctctctctcttctctctctcctgttttcctttttagttttaggctcctctctctctttttcgttttagttttagagtgctactctaaatttgttttactttctttttcggtttggagaataattctagttttcttcgcttctactacaatttcgttttctattgattaatggaaggctaagtctccaacgttgttttctcttgaggatcaagcacagctctctttgaggttctattattactattaaattca

SEQ ID NO: 139236 - DNA, 297 bp, Glycine max
agcttaaaacattgtttcaaggtccaatgccttaaacaacttttgttcgcaataacaataaacctttaaaaaaaaacataaaatcaacgtaacacaaactttcagacttaaagaactacgtaggtctgaattcctcatcgcacctgaggatacataggagcaagggcaatacccttttcgaccccaaaaaaaataagaaataaaaaaagggaaaatacaaaattttgaagtcatgttttgcacactcgattaaaggttgtcgtcccttgtgatgagcgtggggggtgctaatacctt

SEQ ID NO: 139237 - DNA, 303 bp, Glycine max
tggtaacatgtgttatagtctttatgttatttcttgtcaagatgatgtcgtcaacataaacaagaatagttgttatatcattatcattatcattatcagagtataagaaaagcgagtgatcagctgaagattgacggaatccctgggagagaagaaatgacgagagccgtgtgaaccattagcgactggcttgtttgagcccatataaggaatgctaaaggcgacaaacaaggttgggattatccacaataagtcctggaggaagcttcatataaacctcttcgttaagatccccatgaagga

SEQ ID NO: 139238 - DNA, 295 bp, Glycine max
aacatccctttttttttcttggaaggatctgattaccggcttcctaaggcagcatcaatacaattctgatatggctcctgaccgcactcaactgcagaatatgttcaagaaagaaggtgagacctttaaagaatatgcccagcgatggagggatttggcggcacaagtatctcctcccatggttgagaaagagatgatcaccatgatggtcaacactctgccagtgttctactattataagctagggggttacatgccgtccagctttgcggatctggtgtttgccagggaaaga

SEQ ID NO: 139239 - DNA, 302 bp, Glycine max
tctcaaggaaactatctagtttattttttgaagcatgtgttacacatgttgtaactttcttgaatgaaagtcttatgagatacaattcaaagttccacttctctccctcttttattccttcaatttcgtgctcccgccttctctctttcttttcctccattaaagtatcctcttcaagcttcttatccaaggcaattgttggtggtgaagctccttcttccttggctgattccctagtggatggtgccacccctctcctcttctccttttccttccgctgcatctccatggtgtaaaatcac

SEQ ID NO: 139240 - DNA, 289 bp, Glycine max
  unsure (1)..(289): unsure at all n locations
agctttgggaagttttagaggagttgattcaagacattctataagaagatttttttttatatttcttgtcttaaccatttggttcatcagggaaaaatgactctgattaatttgaagtttggacgaaaagtaaataaaatttgattaaaaattattttcactaatgattaaattcaaaaattattcgaatgattcaaccttaacttnaacacattaatcagttgtgctcaatcaaattattctatcaaaagaaaattttctcttaagctagaatttaaatgcatattga

SEQ ID NO: 139241 - DNA, 274 bp, Glycine max
  unsure (1)..(274): unsure at all n locations
gggccaancngggggaatttactttcaagaacctcccgaagatttctcttgatgaaaactataacctgcatccttttgagttcaaccattcccacttctgcaccatggggtttgttacctggtgggagaaatattattcgacccgttcagttggagacactactatcatgatctccagacttgagagtggttttacacaaccaacggtcgagaatatccgctcaaaccttcaagctcgaggtattaaattacttttgactttctaaattgatat

SEQ ID NO: 139242 - DNA, 287 bp, Glycine max
agcttccttgtttagctagagcttagctacacacacctctctaatagctaagctcacctccttgagatgagaagctagagcttagctacacaccccttataatagctaagctcatccccatgacaaaatacatgaaaatacaaaaaagtctctactacaaagactactcaaaatgccttgaaatacaagtctaaaaccctctactactagaatggccaaaatacaaggcccaaaagaaagaaaaaactattctaatatttacaaagaagagtggactcaaccttggt

SEQ ID NO: 139243 - DNA, 302 bp, Glycine max
tctcaaggaggtgagcttatttattatatgggtgtgtgttgctaagctctatcttctcaaggaagttttctcaaagaagcttctcaaggaagttttctcaagaaagcttcttaaggaagctacctagtctataaatagaaacatgtgtcacacttgttgtaactttgataaatgagagtcttgtgagacgcaactcaaagttcaacttctctccctttttcttcctccaatttcgtgctcccccctctctcattctctccctctttcttttcctccattgaagcatcctctccaagcttttt

SEQ ID NO: 139244 - DNA, 288 bp, Glycine max
agcttagtttgctgattctagaagatccctgttcccacccattttgttgaagcagagactgaaacccattggtggaaccatatgggtttggtttgtttgtcacattcatgactccctctttggtcctaaaatccttaatctatgtatgtaagcattcaaacaccttaccttaggacaatttgaattgctttcgattattgcaaaaccataggttatataaaataaaaaatcctttatatactgcatctgcacttttggtattttagggtggtggtatatgttggtata

SEQ ID NO: 139245 - DNA, 295 bp, Glycine max
tgccgtgtatctctccgacttttgtttgctgtgactttacatctctatgggatcaaagaggctgctgaattcgccaaggagtgggttccaacctgtaacattcatggggtcaagttaaggtgtcccaatgtcttcttctctccctctggggaggaggattcaactcactcttcgccacgatggattcagcacacaacgagacctcctcgacgttctatattatatttgtctatgcaccttattaagcacttatttaatcatcatcccgctaattatttcacgtcattacattcaa

SEQ ID NO: 139246 - DNA, 293 bp, Glycine max
  unsure (1)..(293): unsure at all n locations
agcttgacaaattattttctgaggtagtgtgcagtgccccaactattagcttctcgtaaagcaccaataaattcttgatcactacctagaaagctttttgcaaaacatgcttccctaaatgtaccatacaccacatcattgactgttctaatgtctttgtaagactgtgcacctttggcagaggaaagcatcattctgaggtaaaataatncgccagttgaaggtgggacccatataagtctgtctattgtatttccttgttttcttggttgctagcatcttttgtgggcagc

SEQ ID NO: 139247 - DNA, 298 bp, Glycine max
ttagaaaataggaaatttagtgtaaatataaattattttctcaaatttcacagtatattattgagaacaaagaaggtaagattcaatactttcaaatgatttatcagttgaagtagaactatcttctatagttccttttttttcattctcctcctctagaataatagatttagaatgttcatatgctacaatttaagatcttgtaagatacaattttatggttgtaagagaaaaaaaaatccaaaataaagaaaagaaaaagagtccaaccaaataatcagacacatagctgttaact

SEQ ID NO: 139248 - DNA, 282 bp, Glycine max
  unsure (1)..(282): unsure at all n locations
agcttaaaaaagggcttcctttccgcaagggcatgcttagcgccattctcgcgctaagcgtgagtaagtgagatttggcttagccccaatctcgcgctcagtgcagaagagacaaccgtctcgcttagcgagctgcatacgcactggtctcgctaagcgtggaagaactctctttaggcttatcctcggtcgctaagccactactgnctcgcttagtggtttggtctcactaagcgcatggttcgggcttagcgagacaacaacttttgcaccttcataatt

SEQ ID NO: 139249 - DNA, 297 bp, Glycine max
tgtgacgttaaaaaagctcttgctgggaggcaacccaacttttctttcccttctttatcttcatttttatttcttgcatgtagttaggacatctttcttgtgattgtgattgatttcagcttgtttagtaatgaacaaaaagggtttttaaattgtgtgtgaagagataagcagaaaatgacttataaaaattttcagattgcttatccgctaagcacaaaccttgtgctaagcaccatctcttcatgcgctatgccgagcttgctcgcgctaagcgcaaagacccctgattgattg

SEQ ID NO: 139250 - DNA, 296 bp, Glycine max
agcttggagtaatgcttgttttaagcttgagttaagaaggcagaagtggcagtgacaaatacttgtaacttgagtgaaacttggtggtttgtcaagaacaggacgtagtctcggtgagacaaaccaatataaatttcttgtgtctcattcttattattttctcttctactatttaaactaacccatggtttgaatttgatctttgcgtttgaaaaattccgtttgttttacaaagatttgaaactatcgtctgatttgctttgcaaaagtctgatatttggtttcttaagtcttgc

SEQ ID NO: 139251 - DNA, 303 bp, Glycine max
ttatatcacggagtttgacgagtttagaagggagttggagaggcgcaacctgcacaagcgtctcaccaactcaactgatggcagtattgatgtcgcggtggtcaaggagttctacgcaaacctctatgaccctaaagataactcaccaaagcaggtgagagtgagagggcacttgataaagttcgatgcagacaccttcaacacatttctggggaccccagtggtattggagcctggggagaccatccccacatattccagattttgcagactgaggatggatcctcaagagatagcggctcg

SEQ ID NO: 139252 - DNA, 296 bp, Glycine max
agcttcttgcgttttttctcttggtgctcagaaaatcccaaaaacaaatccctcttattactagctattttgaattctttagttcttgaatgtacaactttcaaattgttggtcgttcccctctttgttttatgcaaaaaatgaaatcaatatcaaacaaaacatgcatacaattgtcatcgttattgctacttgaaccataaggaataccatttaaagaagtacttcaaaacgtttatttattttttttggtattttttgaattacaatttgacttcaatatctaattttttaat

SEQ ID NO: 139253 - DNA, 306 bp, Glycine max
tgattatgagttgattttagctttggtttcacttggttattttccaactcattaaatgagaactttcaaagtaaatgaccagttgaaacttatttttttgatgattaatcgaggttacaacagaaatgatcagttgaattttattttaacagtgattaaacgagactacaacacaaatgatttgttgaaattcattttaacattgattaagtgagattatggcttaaacgattggtcgaaactcgcttaaaacaaaaaagaataccgatagtataagaatgaagatgaagacatgcaaagcaaggg

SEQ ID NO: 139254 - DNA, 292 bp, Glycine max
agcttgttgatttggttgttttgactgacttctactcatagatccattccagtgctcatggtgatcctcctcatcattaccttctgaagagaaagaagtgatcatcaagtcttaaaagtggattgaaagagtatcaaagatatctttgaggatataacagtgacaaggcgtagtctagaagaacaaatcatatagaaaaatcttcagctaatcatgtaaagacattgtgagtgcattaatagaacaataaatggatgaccatttcacttgcagtgtatcatcaaatactatg

SEQ ID NO: 139255 - DNA, 302 bp, Glycine max
tggacgaatccgaacctaagtttctgatgtgtgtccactaaaaaccagacactatcctactttctctttccctttctctctctctctctctcaaatccaacgatcctagcctctcttccttctctttctctacccttcgcagactctatttctactccgaacccttcttgcccttgccccctcctctcacctccatgacaacctcgatgacaagtggttcgccttcccctctttctctctccctccaaatctaggactccaacaatgacttcctcctcatcaagtcggaccttccacctcct

SEQ ID NO: 139256 - DNA, 291 bp, Glycine max
  unsure (1)..(291): unsure at all n locations
agcaanggaanatttttttcgggcgcccgagcgaaacccattcttaccccaagcttctaataaaaaggccgcgatcaggcattacatgcgactatctccactactgaaagaaaaaagaaaagaacaagcaaatccacaaatactaatataataaagactagaaataaaggctttctacatatacatatatcgtccaaaacaacgattcgnatcagctgtagcaaagaaagaaacctcatagaagtcaaaaaatgaagaaatcaatatggctagaaacccccatttctatgg

SEQ ID NO: 139257 - DNA, 307 bp, Glycine max
tccgcataatgtccttcacattgtgtctgacatccgttacggccgcaattcggctcaaaaaatctccgctccacaaccgtacctgagaatttcatctcagacggctcctcccttatgtgtgtaatgataaaaatacatataatcaaaaaagactgcagcattctcattattaactgaacagggctagtgttttcacaaaaaaatatctagccaaccttcctgtgaaaaatgaattcttaacattaagtatgtaggcactggataaaaaaaacagtaactccaacaatttctttgtcctcaacgctgc

SEQ ID NO: 139258 - DNA, 297 bp, Glycine max
  unsure (1)..(297): unsure at all n locations
agcttgtaatcaattacacaaatactgtaatcgattaccagagcagattttcagaaaatattctcaacagtcacatctttttatttggttcttgaatggctatcaaaggcctatatatatgtgacttgagacacgaatttgccaagagttttgaagaacaaaaaggtcttatcctcttaacaagcaaaattgttttatcctcttacaaattccttggncaaaacacttgtgattcaataaggaattatttgagtgctcaaattgttcaatctatctctttcaagagagatttcttct

SEQ ID NO: 139259 - DNA, 308 bp, Glycine max
tagggtctgtttccacattcagatcaaatcattgtttcaacaattgttcttttatcaagtccatgcaaaacatctaagtccgctttggtattcgggaaagtccttcattatttttatcctcaagatacacacatttttttcaaaaacccttttgttgtttcttttaaaaaagcttgttagttttggaaaaaaaaggttgaaacctagacaaagttataattcgagactacactataaaaaatcaaagagcgcgcgaaaatagaaaagaaaccacgcataagttttttttttagtttttagttttttgt

SEQ ID NO: 139260 - DNA, 297 bp, Glycine max
agcttgtacaattataagaaacatcttctccgaccttggtgattcttgactccatctcattaaatcgcatgtccacttgtaactccaaagtatcaaacctttcaccaacaaaggtttgaagaccatcgaacctatccaaaatcttttgaagaagagaggaatcttctccaccatgtccttcttcatcaacaggtcgagcaccctttttcacccaagagccatcatgctcttttttataaccaaaggatgcaatgacagcagcacctattagaaaggatctcttgattggaacataag

SEQ ID NO: 139261 - DNA, 305 bp, Glycine max
tctttgagaaaacttccttgttaagctagagcatagctacagacacccatctaaaaactaagctcacctccttgaaaagctagagcatagctacacactcccatctaaaaactaagctcacctccttgacaaaattcatgaaaatacaaaaaaaagtcactactacaaagactacccaaaatgccctcaaatacaaggctaaaaccctatactacaagaatggccaaaatacaaggcccaaaagaaggaaaaacctattctaatatttacatagataagcgggctcatacttatcccatgggccc

SEQ ID NO: 139262 - DNA, 276 bp, Glycine max
  unsure (1)..(276): unsure at all n locations
agcttacgttcttaattttttaccaacgaaaacttgcacaacacatcctattaactactaaaaatgcacacctattcaatcaaggaaggttcattacctaaattatttacatgtacttccaaggggtatttgtaatttacataacacactcctacttggcttaatttacatacgtgcatactcaaagcatttcagcgtaccaaaaaatgctnatnctctcatcttggaatcgctaatacctatacatatacaaactttaagatgaaacttgactac

SEQ ID NO: 139263 - DNA, 300 bp, Glycine max
tgttgaaattgccatgtctttttatttaatcatacccattctggcttatggcatgtgagatgatcgcggtgatgaccatatgctgaaaatgctgatggaaatctgtcttagacaaaaggtaaaactaccctagggttataaagtaagaatgatgatgcctgactggaaaaagagtgagactttgaaagttggaaggctaaagctgaattctgtgtgaaatggaggctaaagtgagttactactatcttgaaatgctcaatacgacttgcgataaagcttggactgtgctatacaaaacaa

SEQ ID NO: 139264 - DNA, 288 bp, Glycine max
agcttccgatctttttttggtggattagattataggtaatggttggaatatttgaccaaactttaatactacactgaatatagtaattattagtatagagaatgagaacgaaaaagatttgtctagaaggacgccaacaagaccagatgagtgtagaaccttcggtaagtgattccatgatacatgcatttttggacaaactttataatcaggtgccacctgtattttaatggacttacacgtagttccttacttaagcgatttagtaaagcaatatatttaccagag

SEQ ID NO: 139265 - DNA, 299 bp, Glycine max
tttaacttacatcataccgtttttgtataagattctataaattttagttttcactcttttagatgtcggatgctaaaatttggaataaaatcatatggaagattgataaagtgtctttaagatatggatttaacttatgtgagtaaatatttaaagagagaaagtaaacttttattttataattggtttgaaagatcgcggagctcctttaattgaatggattgacaaatatactattaatttttcatttgcataaaaacatttatttatatcataattaagtttagttaatatttatc

SEQ ID NO: 139266 - DNA, 288 bp, Glycine max
agcttgagcttgtttctgctgccccatagagcccctcggaacttgttctcgctccattcttcctttcgggccctttttgtttcccgctctaatgcttcgactatagtcatgttgacctctctcagctcatcacactcttttcggaccctagtgactgctgtctttagcttctccttgaccactctcgtttttttgagcttcgctttcaaagcttgcacttcttcgttttcctcagggacttcggcttgtttcctacttaggccttttagctttgggagccaagttatc

SEQ ID NO: 139267 - DNA, 302 bp, Glycine max
tcttatgtcatacccaatgatgctctttgactgagagtaagcatgccaccttttgactagacagatcaccaagtttaatcttatacaaatttcattgtctcttagtagagtccttgttctggatgatacacatatcctagttaaaagtgacattgtatccattgtcacataattgacttatgctcagcagattatgcttcaatcctttaacaagtaaaacattatctataggagggtatggaggaatgcatgctttacctactctaattattagacctttatgattccctccgaaagtgatc

SEQ ID NO: 139268 - DNA, 294 bp, Glycine max
agcttcttatcctatgctcatcttggtggtgaagctccttcttccatggcttattccttaatggatggcgcctcctctcacctcctttcctttgtcttccgctgcatctccatggtggaaaatcaccattaaaggaccccattgaagctcaaagatccagcctccatagaagccccacaagcaagcttccatcaagtggtaatcagagcacaagagcttcaagtaggtgctccttaaacctccattaattttttttctttaccttctcttccattgttgtttcttcattttttt

SEQ ID NO: 139269 - DNA, 306 bp, Glycine max
tgcttgtggagcttctatggtttctggatctttgagcttcaccccgggccttcaatggtgatttttcaccatggagatgcagcggaaggcaaaggagaagaggagaggggagacaccatccactagggaataagccaaggaataaggagcttcaccaccaagaattgccttggataagaagcttgaagaggatgctttaatggaggaaaagaaagagagaaggggggagcacaaaattgaaggaataaaagagggaaagaagtggaactttgaagtgtatctcataagactttcattcatcaaagt

SEQ ID NO: 139270 - DNA, 294 bp, Glycine max
agcttcacacattttatttttctcaaacttgagttttggaagaccaattactaagtctttcctgactagatgattgagatgatgaatgtttatatgtgcagtcctacaatgccacaaccaagaatcatctattttacttaccaaacagctaagctcatgaaatgatgcatgttcaatgtttaacatatagatattacctatccttttaccaatatggaaaacctcacaggacatggcttcattaataaggcagcaattcttgttgaattctattttgaagcctttgtcacatag

SEQ ID NO: 139271 - DNA, 299 bp, Glycine max
  unsure (1)..(299): unsure at all n locations
ttccaaaaagagtttcttgagttatgttggngagatctcctgattctgtaattgtagttacttttggttgccactgcctgcttaaacatctcaacactttgttaatgagatcttcattaggaaatatttttcctaatgatgcaagatgattaactatttgtgtaaatctcttttgcatatcttgtatgatctcatattgatttattctaaatagttcatattcatgtgtgagagtatttattctagatctcttaacatcagttgtgccttcatgtgtaacttgtaatgtatcccacatt

SEQ ID NO: 139272 - DNA, 286 bp, Glycine max
agcttggcctattataaaaggttcagtcattagtgtcactcaaaatcaaggttttaattaaaagtataaagaagtattcagaactgcagtctcatacacaccagaagaggaaagtaaactccaaaatttgacaaattacaatttacattagccagaaattttcaagatatagattaagcactcaaaacttatctgaacctcatgacaactagcaatgtgactgataagaatcaacaacttgagctcttatgaccctaacattcatatcacacacataaatgccctc

SEQ ID NO: 139273 - DNA, 300 bp, Glycine max
tgaagtgctttatagtaacttgttactcaaaacctttagaatgatacatatgcaactacttcatttttgttggaaaaatgattatgttttctagaatttttaattcattttagatttggaacattttgttatatgtttaattcattattggatcctgtgattgtaccaatttggtttacatgtgaattattgtgaactgagctttgttgctgtaacaatgtcataatagctttatattgttgagaagtcaatctcatttcagcattatgtgtatcttgactttattctagaacaacacta

SEQ ID NO: 139274 - DNA, 296 bp, Glycine max
  unsure (1)..(296): unsure at all n locations
agcttcattaagtatgctttctccagaagcttcattaagaggcttctagcacactccagacaacttctcaaagatctcaacggtcagatcatggaaaagtgtcttgtgaagttgcagaccaaatttagagaagatctaacgtttaacgaaggctgggcagcgtttttaccgaggaaatttcatgtagctttctctagaagcttcattaagaggcttnctncaaaagcttcctcgtggcttctttgagaagctttctcaagaggcttctttgagaagctagatccttatctatctac

SEQ ID NO: 139275 - DNA, 307 bp, Glycine max
tgcggactatatcttcgaccgatatcacggtcgtgtttctgtctaggcccggattcaaggcgggctgcagcaccggctccgcttccctaactgtactggaggcggttgcggtggctttatcctctatggttttctggagttttaacatgacctccgagatggaagacatttgatcttttaaggccgatagatcggccttcatctgttcctgcacgccctcttcattatccatttttctggatcgagtgttataggggtgccttggtgttttcttagttatgatgaaattcctaaagaaataaacaac

SEQ ID NO: 139276 - DNA, 270 bp, Glycine max
  unsure (1)..(270): unsure at all n locations
tctgaattcagacaactaacaagcgtaactccatccatgtgcagagaacatcaaagagatcatcttatgctgttcccaaaatctactttaagaccaagacgatgtctgataaaaaaaataactgaaaagctagctggtactggttactaaattgcgggttaacacgaggattttcttttagctaactcattgaataanaagttatcaaatcgccaaaggaagagaaataataaaactctatagcaatgcaaaacagaaagccacaaaaaa

SEQ ID NO: 139277 - DNA, 303 bp, Glycine max
tgcttaattaatgatggggtttttcttttacacatccatcatttgtttacttaaaaccaatgctttaatgataaaaatatggaaatattgtaccaagtccattataaaaaaaatagagtaaacaaaattcatcatacggtactctacgagcatgtaacaatttttgcttgaagatcttccaacaatcaatcaagtcttaggctagcaaaatgacccaaagcctaatattaacattcttcttattcattagagacagacagcaccactataatgctttaaaaccatattgacataaaaaaatac

SEQ ID NO: 139278 - DNA, 289 bp, Glycine max
agcttgaaggtgttttatttaccatcttctcatagtagaaaactggaaacatgtctactatcattgttatcatctccctctccatcattgggggtgctacttgagctgccagatcccttcacctttgggcgtattctttgaaagattcatgctccttgcacatgttctatagttgtattctatccagagccatatcagaattggactgatactgtctaatggactcaggaaggttccagtaggtccttccaagaatggactcaggaaggttctacattagtataccagg

SEQ ID NO: 139279 - DNA, 328 bp, Glycine max
aaagcgacactatgcgatactcaagctgctcaaggaagataactcaataaatatcttaattgaaacaacctaggctatacgacgaagcaaatgttacacttgatgggaccctgaagaaagatactcccgtgaaacaaacttggaagattcgcctcaaaccgcctacgggcccttcaatatcgagacccccgcatttcggggagcccgctaacttgccaacaccggtggaacgaaccaacagccacccatgcaaagccaagcttgggagagaagcaccttataacaggtctaaaaccgggtggatagcgcacaactctcacaaaagggg

SEQ ID NO: 139280 - DNA, 288 bp, Glycine max
agcttctagaggttgtcttgtgtatattagaggaaaggttcaatgaaaaatccagacaaggtaatgaaggccttgatatgactttctaggtctaatattaaaaagtgtgaaataaatatgatgcttatttttattgatctatatattattcttgtgtaatgtctaagattattatcctttcaatcgtaaaggaagaaaaaattaagaggaagaccaggcagcatcccaatgagcaatcccacattttgattgaggttgatttacttgctaatattgttgacataaggc

SEQ ID NO: 139281 - DNA, 302 bp, Glycine max
  unsure (1)..(302): unsure at all n locations
tgaagttggagccggtttgagttttttagatgagctngtgagtgattgtgagatcctagaggtgaaagagacatcctcaccacttgtatttttagcaatctttcatcttgttcttctctttgttgtaaagaaagcttcctggttatggaaagctaaatcctctgttagatcttccctgtaggtacctgatgtaaatttatttcgatctatttaatgatgttttgtgtgttctctgagctatctgctttttcacttctaaattgtttttaccttgatcatgtttatgcatgctttgttagggt

SEQ ID NO: 139282 - DNA, 255 bp, Glycine max
  unsure (1)..(255): unsure at all n locations
ccaaancaggggggggtcaaaacaaccacaagagcgggggnngggnggcacaaagacaaacgcnnaaggggccgacagacggagatataancggagaaccaagnccggcccgcaaggggggnaggagagnccaggaataacggcatcttgcctttcccatattagaatcatcaaagtgaggttttttattgggtgaagcaccttcaggtataaatattgttggaacttggccaaccatcactttttccagaatct

SEQ ID NO: 139283 - DNA, 319 bp, Glycine max
  unsure (1)..(319): unsure at all n locations
accaacaaacacaagcccngcaaagaggcaaggcggtttttcttcacttcccagacacaacagcgagctcagaccactgctactccttcccgcgatgcttctcttcacaattgcccgagtgggcttataccccaaaccatacttaccaccatatcctatggcattaaccacgccaaatatgcccccgacgactttgcccaaacccatgccgagatcccaacccttccccaacataactcatgccaccaatactgatgcatccgataggcaaagctccccacaaaaggaatccacagtggaaatgcctaccacctccaaa

SEQ ID NO: 139284 - DNA, 271 bp, Glycine max
  unsure (1)..(271): unsure at all n locations
agacaaaagcacgcgggaagggtcaaaccccaaaaccgccaggggatcaacacaagaagacatgcaaccacagggaagccgcctcaaaagacacggcggccacggaagaacaaaaaaagaagacaccagacagggcaaaaaacaaaaagaagcaggcctgagccaccccagaaacaccgaaaaggggcagaaantggaaagaagggaaccagcgcaagccgagagaaaccgcaaacacaacgaaagccaaaaaagagcgaaacaaaaaacg

SEQ ID NO: 139285 - DNA, 240 bp, Glycine max
ctactctagtgataaaggtttttttttcgtcatatatgtcgctgtgtggtacgaagttgacggctttgacatgggtggatttttcacagtttcatgaatctgcttatggctaccacaacatgcaggcctataagggaatgctacttgatcctataatgagattgatacgttgccttaaagatgacagattaactgttgaggaccttttgttgatctaccttttcacctacatttttttca

SEQ ID NO: 139286 - DNA, 284 bp, Glycine max
  unsure (1)..(284): unsure at all n locations
agctttgcttttttttaatgctagtgcgaaggagaatgtgatggacgtaaaaacactttaaaagaaggttctatatgtacgaaccttgtttgacccatgataacaggattatgcatcaagctaatgacattaaaagagcgcttactaggaggcaacccaacttttcttttccttttctctttttcattcttatctctagcatgtaannaggatagttgcttgtgattgtgattaattttgcaactcttttagttttgaacaagggggtttttaaacctaggtga

SEQ ID NO: 139287 - DNA, 158 bp, Glycine max
acactcccgaatactcaagcttcaatgaattactctgagctttttttttaatttgcatcccttcggagggcacgttctcccgagaagcattcttgaggcctcgaagattttatgttcagtgggcttggaataccactataattcatgcttagcccgta

SEQ ID NO: 139288 - DNA, 287 bp, Glycine max
  unsure (1)..(287): unsure at all n locations
agcttagaaaaaatttttgaacacgaaactatgctaagacccgctaatttctcgcttataatttgctctatattgagatcagaactggtgctaatctagaacgaattcgaatttatacttttgtgggtctctaaaatcaagtcctatctttcaaatgcctttggtctcattcaatttagagttccctacaatgttttatgactatnanaccaaaacagattcagagagaccaatctgtagatgactttgcatgtagagggttatttgagtaagtacatggtttgtgg

SEQ ID NO: 139289 - DNA, 299 bp, Glycine max
tgatgtgagaaacgtggaatatttattcttcctacttttgtttgttgaccacagagtggtacctggagatatgtcgcgggggtcaggagaccttggggacgtcaggaggggtgctattgcccaaaaccaagcttggctaatcccaacccaacccgggcatagtcagtcagtgagaacctgtgacatacctaagcaggcgagctcctggcagtcaaccaataaaagaacaacgtccacgaatcaaggaggcttgtgtggcggctggccaactatttatcttgggtgttatctgaaaatta

SEQ ID NO: 139290 - DNA, 292 bp, Glycine max
  unsure (1)..(292): unsure at all n locations
tagctngaattgttttttttatggaggaaaagaaagagagaaggggggagcaccaaattgaaggaataaaagaaggaaagaagtggaactttgaagtgtatctcataagactttcatttatcaaagttacaacaagtgttacacatgtttctatttatagactaggtagcttccttgagaagctttcttaagaaaacttccttgagaagtggcnnngagaaaactttcttgagaagctagagtttagctacacacacccatctaaaaacaaagttcaccttcttgaaaagct

SEQ ID NO: 139291 - DNA, 268 bp, Glycine max
aggacacttatctaactgctattctagacgtttttttaattcaatccttgcgtgcaacactgttttgaattgagctattgcctgtcaccaaggaaggctcagtttgggaaggttcaaaggagaggctagcttgattagtacagatttaatattttaccaaattaatgcttctgcacctgtctaactaattggaagtggaatgcctattctgttgttggatgtcttttttatggaaagcatatatattttatgcttgcataaaaaaagt

SEQ ID NO: 139292 - DNA, 290 bp, Glycine max
  unsure (1)..(290): unsure at all n locations
agctttttgatttttaaaaccaaataacaaaggagctattaaaacttgtgaagccatgtcctgacctgaaactttntgtcctccatcaaagaaactttgttgacttgaatctgtttaaagatactattattcctgcttttccaaaagcatgaaataacagcacaacataggacctgccaccaactcatccccgagaataacagattagnnccttcaatagagccaggtattgccgtggaaaaatcaggagcaaaccacaacatgcactcaattcatacgcttcactaaaa

SEQ ID NO: 139293 - DNA, 296 bp, Glycine max
tgttactctctggttatttatttccagaaggctgtaatcgattactagaagtccaacatttctgaaaaaggtttttcaaaagtgtaatcgattactatgacttagtaatcgatttccaatgcttataacgttcaaaaatattttgaaaaaccttgttatcgatagcacaaaacatgtaatcgattaccagtggctctgaacgttgaaaattaaaattttaaatgaagagtcacaacttttcaagaaagataaccgtgttatcgattacaccaggatcgtaatcgtttatctttggc

SEQ ID NO: 139294 - DNA, 286 bp, Glycine max
agctttgctttttgttcttccaccaagaagaggaagcttaccaacaaagccattcttttcaagaaataaggagttcaagaatgataatgatgaagtttgcaagataaaaaaagtgttggaaaagagtgatgttgggaacatgaacaggttgatgctaaggagagataaggcagaagagtatgtgttgcctgtgtttgggatgtggacaccaactccatgtactctcttgttttcaagagatgggtcttttcaagaagctatgtcttcattggcaattgggttaaag

SEQ ID NO: 139295 - DNA, 296 bp, Glycine max
agcttgaagagatgctcacaggtagtagttagttgcgatatgaacctcactatataattcaggcatcccaagaaacctcagacttttttctcagtgtgtggttcgggcatctcaaggatggcctacaccttgtcgggttccacctctattcctttctggcttacgataaagccgagcagttttccagacttgaccccaaaagtacacttggcgggattcaatcttagtcgatactaacgtagtcttttgaatagtttctgcaagttaacgagatgctcctcctcagttttagaatt

SEQ ID NO: 139296 - DNA, 308 bp, Glycine max
tcatgatgatgaattaagtatgattcaagtagttttgatgatgacaaaaagcccaaaagaatgatttcaagattgagtcaacaagttcaagatcaagattgatttcaagattcaagaaaagacatcaagaagaatcaagattcaagaaaagatgaattcaagaatcaagagaagaaatcatgaagcaataagtcaagacttcacaagggaagtattgaaaaggatttttcaaaaaccaaacatagcacaattttgttttacaaaagagttttctcaaatttttctaagttacgagagtatatactctc

SEQ ID NO: 139297 - DNA, 295 bp, Glycine max
  unsure (1)..(295): unsure at all n locations
agctttgcggattttttcttcgccagcgaaaggatcgaagtggatctgaaaagaggcaaatttaatcatcctgcttaaacgaatgataaaactggggcaaataaagagggtgaggatgagggagaaacccatgctgtgactgccattcctatacggccaagtttcccaccaaacccaacaatgtcattactcagtcaataacaaaccaccttnttaancaccacccagttatccacaaaggccatccctaaatcaaccacaaagcctgtctaccgcacttccaatgacgaagacc

SEQ ID NO: 139298 - DNA, 304 bp, Glycine max
tcggaagaaagtgatgaggtgctttcgctaaaggcaaagcttgaaagagcccgggtagtcaaagagaagttcaagtccatagccatcaaagtctgaagagagtatgatgaactaagggacgttaatatggccaccgatgaagccttggaatgagaaaccaagaaggcccgaaaggaagaacacgaccaaaacaagttttgagggactttatagggcagcaatagtgagctcaaactctgaagaggtgaaaggaatcatcatgggtcaaaggcatgatctggaaggacgagctaaaggcttgcct

SEQ ID NO: 139299 - DNA, 291 bp, Glycine max
  unsure (1)..(291): unsure at all n locations
agcttgcatcatttgttattaagagcatcttcatctaggggatgttcttttgcttcctctatctttttggtcggagaattctctttaattccttgttcttcatcttatcctccatgtatatcctccattggcttgtggtttggtgctgtttaaagtacattcccaaaaaaaaaaataaaccgattaaatcttagatctatacttgttnntgcattttctatggttcaaattttgtagatctactcttgaatcatgtttttgggttgatttcaagttctatcatttttcatt

SEQ ID NO: 139300 - DNA, 299 bp, Glycine max
tgcctgtccgatgcagcagtaatgatggcccgtgttatgttggggaacggttacgaacccgaaatgggtttaggcaaagacaacgacgacataactagcttgataaatgccaaaggaaatcgtgggaagtatggtttaggctataaacccactcaggcggatataaagagaagcatcgcgggaagaaagagcggtggtcaaagctcgcagttgaggcaagaaagtgaaggaagcccgccctgccacataagtagaagctttataagcgcgggtctgggagacgaaggtcaagtggtcgc

SEQ ID NO: 139301 - DNA, 291 bp, Glycine max
agcttccttgagtggtttttttgagaagctagagttttaactacccacacccttctaataactaaactcacctccttgaaaaataaaacatggataaaataaaaaaacaaatataatcaaacattgaatataattactaataatatttcagggtgttacaactctcccacccttttagaaatttcgtccccaaaatttacctgactcaaacagggatggatgagcttctcgcatccgactctctaattcccacgtggcatcttcttctgatgcacctccccagatcacctt

SEQ ID NO: 139302 - DNA, 306 bp, Glycine max
ttgatgatatggtcttcaccgttttttggatgaaagtgggtctaaaaagaggaaaatctgatcatcatgctttgataaatgccaaaaaaaaagtagggcaaatgaagagggtgagaatgagagagaagcccatgctgtgactgccattcctatacagccaagtttcccaccaacccaacaatgtcattactcagccaataacaaaccttctccttacccaccgcccagttatccacaaaggcaatccctaaatcaaccacaaagtctgtctaccgcacttccaatgacgaacaccacctttagcac

SEQ ID NO: 139303 - DNA, 294 bp, Glycine max
  unsure (1)..(294): unsure at all n locations
agcttgtgttttttctggaatccaagattccgtttgacacaagtcgttcaattttgttcttagaaatgtgacctaagtgcttatgccataatgctcttgagtttgtattatcaattctacgcttagtaccacacaattctacattaaaggattcaccataggaagctatagtgtcaagtaaatatagattatcattagccaagagtgaactannnccaacaatatctgaattgaaagacaacctaaacacattgtttccaaatgaacacaaataaccgaatttgtccaaataag

SEQ ID NO: 139304 - DNA, 304 bp, Glycine max
tatctaacctcccatcagtttatccttcattgagaaatactgcatgcccaggcaggtgtagggtcaggtgccacaatagccaaaggaggaccagtagcagccagctacagatgcgccaccatcgcctctacaagagacaccttccctggggtctatctctgcccacttgcggaggatagaactccagatgcacacatacatgcagcatgtgactagccagcaggcgactaatcacaggggccaggtgcaactaaatgagacattctactggtacaatatgcaccggcagagttaggaccccaat

SEQ ID NO: 139305 - DNA, 288 bp, Glycine max
  unsure (1)..(288): unsure at all n locations
agcttgaacttttatttttgattctagattcttgaaatcaaatttcctcttgaaccttgaagtgttcttgattaaatcttgaacatcttgaactcattctttgattcttgagatcatcatctttgttatcatgaagtgttcttaacctttgagctttttgtcatcacctttgttatcatcaaaacttctttgaatcaatcttgattcancatgaagcttgcttctacagaaatatctctagtgctatataactcactggtttaattgactaccgcatttgtgtaatcg

SEQ ID NO: 139306 - DNA, 302 bp, Glycine max
tcattgcttcatgatgatgtattctgattgattcaagatgttttgatgataacaaagatgatgacaaaaagcccttgagaatgatttcaagattgagtcaagacgaattctagaattaacagaaagattcaagagaaagtttgagaaagcttcatcaagaagattcaagattcacgattcatgaataatcaagatccagattcaagactcaaagattcaagaatcaaaagaagactcaatcaagataagtattaattttttttttgaaaacattgagttgcacatgaagtttttacaaaatc

SEQ ID NO: 139307 - DNA, 287 bp, Glycine max
  unsure (1)..(287): unsure at all n locations
agctacgttttgtattagaagcagacgagtttggggctacctcatgcactcctctaatgactatgacatcatttctggcgctaaactgttgggagttggaagccatcttctcaatcaagtttctggctttagcaggagtcatgtctccaagggcgccaccactggcagcatctatcatacttctctccatattactgagtccttganaaaaatattggagaagaagctgctccgaaatctgatggtgagggcaaccggcacatagttttttaaatctctcccattat

SEQ ID NO: 139308 - DNA, 299 bp, Glycine max
ctcaagctcgagatgaggaagcgaagttttttttaacttcctgcttatatgggtgaccacagagtggtacctggagatatgtcgcgggggacacgaaaccttggggacatcaagtggggtgctattgcccaataccaagctggaccagtcccaacccaacccgtgcatagtctgtcagtgagaacctgtgatgtacctaaacaggcgagctcctggcagtccacagataaatggatcaaagaccactaaccatggaagcttgtggtggctggcccgctgcgaattatgtgttctatgtg

SEQ ID NO: 139309 - DNA, 285 bp, Glycine max
  unsure (1)..(285): unsure at all n locations
agcttcactttgtgttatatcatgtggtatcaagagcaacttcatctaggtaatgttcttttgctttctctatcttttgttcagtcaattcactttcattccttgttcttcatcttattctccatgtatctcttccattttcttatgggttggtgttttttagagtggatccaaaaaaataaatcgattaaatcttagatctacactngnncttgcatttctatggttcaaattttataaatctactcttgaatcatgtttttgtgttgattttaggttctataa

SEQ ID NO: 139310 - DNA, 304 bp, Glycine max
tgtaggattatggggtacccatcacatgtggtactaggtggcggtcgggcgatggtgcacaacaagttttccacatccacaaagcgcgcataaacccaccatcccctgttgcccacctccaactgagctcacgtactcccacgtagcccatatcctcgtttctctcaacaccgggtctccatcaatcctcccaagcttccccaacatccaggtaaaaaacaacattcaaacagcacaaactatcacaaccaagaaaaacagggcaaaggcagaagctcaacccaaaacacaactcaaaatcaca

SEQ ID NO: 139311 - DNA, 292 bp, Glycine max
  unsure (1)..(292): unsure at all n locations
agctttttagctatttaaatggncataacgtttcactcggatgtcggattcaagcgcataatatatcgagacgctcgaaattgaataatggaagctattgagcaattccaatggtcataacttttaactcggaagtccgattgaggcacataatatattgagacgctcgaaattgaacaacggaagctctcgagaaattcaaatggtcataacttttaactcggaggtcggattgagacgcataatatatcgagacgctcgaaattgaacaatggaagctcttgagcaattc

SEQ ID NO: 139312 - DNA, 304 bp, Glycine max
tctgttttcaattacgagcgttttctatattacgggcctcaatccgacatcggagtaaaaagttattgtcgttagaatttgctcagagcttctgttctgaattttgagagtctcgatatactacggaacacaatcggacatctcagtaaaaagttattgtcgtttgaatttgctcagagcttctgttcttaattacgagagtctcgatatattacgggattcattcggacatccaagtaaaaagttattgccgtttgaatttgctcaaagcattcgttgtcaattacgagcgtctagatatatt

SEQ ID NO: 139313 - DNA, 290 bp, Glycine max
agcttcataccttagcaactcaaaatctaggtatctaaaacccctcaatttaatggactttcaaggtttgagaagtgaaaatgagaatggggtaaatttggagcaaactctcacctcaaacaagtctatatcatcaatctaaactcgctcaaactggttttatgacgaaaactctaccaaatcaaaatttgactcctcaacacccaattttaccctagaaatggctcttgttttcactttggtcactcatattcctcatttgcacagtctacactttctcataaagccta

SEQ ID NO: 139314 - DNA, 301 bp, Glycine max
ttgcggatttggacttttccggttgaaggatcaaagcgggtctgaaaagaggcaaatttaatcatcccacttagacgaatgagaaaactggggcaaatgaagagggtgagaatgagggagaagcccatgctgtgactgccattcctatatagccaagtttcccaccaacccaacaatgtcattactcagccaataacaaaccttctccttacccaccgcccagttatccacaaaggccatccctaaatcaaccacaaagtctgtctatcgcacttccaatgacgaacatcacctttagcac

SEQ ID NO: 139315 - DNA, 286 bp, Glycine max
agcttcatattattaaattagccctgctggtcactattataaaacttaagggcaggggcaattgctagcaacaaatagaggtaattaacttatcataggggcaattgctcgtcaccgttataaaacttaagggcaggggttgtatgcttcatattctcatcattggtttcatatttggtatcaatctaatagaactatgtaacaggggcaattgctagcaacaaataaaggtaattaacttatcatagtagtatgaataggaatacctcaagcagccttcaaagaa

SEQ ID NO: 139316 - DNA, 297 bp, Glycine max
tctaaagaggtttttgtggacttcttgtctcatcataccagtaatgccttctcctacaatattgaaaagcaagggagctaggggatccccttgtctcaaaccccttgtaggtgtaaattccttagagggaataccattaatcaaaacacaaatagaagctgaatggaggcatgctgatatccaagacctccattttgggcagaaccccaatctaaacagcatatagtccaggaaagaccaagacactgaatcgtaggccttttcaaaatccagcttgaagatcatcactggtttctt

SEQ ID NO: 139317 - DNA, 295 bp, Glycine max
  unsure (1)..(295): unsure at all n locations
aacataacataatttatgatttgtgatgacacgggattattgcggtttactttgaggaatataaaatgcgagtttatagcaccgcgagcgccaaataattttatgaccacaacctgtcgtattgtggtcataaaaaattgtcggctggagggagttaaatcctttacctcaatatactgcctgtcagcattagttcacaaacagtgcttcggtatngacgatgattccatcttccgcacctttaagcgccaggtttgcctcgtagtattgctttttatcaagcagtttctgcgca

SEQ ID NO: 139318 - DNA, 305 bp, Glycine max
tgatcaaaacaattatctaatcattccaatccattcaaatcatacaattgctcatccaaatcattctcaaacactcatttcatgcaaaacaatccactgcatatcattttcaatcaattcactgttccaacaagctttttggtacaagcaaacaactcaaagtgctgaaatttaaataactgaaatttgaagaattgaaatataaaaactgaaattaaaatgactgaacaacaatcataaaataactgaaaataaactaaaatgttcaagatgcacaaatttaaatgtcccgctcctgtggttgc

SEQ ID NO: 139319 - DNA, 295 bp, Glycine max
agcttaaaacttttttattttagagtaaatttcacaaattattctctcgttttttcttcttacattagacttctttcagtttatataatagccagggtaagaccatttatccttgtacaattattagatcaagagagattaaaataatgtcaaaaagggagaacattgagtgtaactggaaacacgagtaatttgtcctaaactttagaagcatcaatggcattaattatctacatatataacgtttcctgctccaactatatacaattcctttgcttctaattccaacagggag

SEQ ID NO: 139320 - DNA, 304 bp, Glycine max
tgaggttattcctcaagtaaattatttgttggatgagggtttggttcgtaagagcttaaatccttgtgctttgttggtgcccaaaataagtattataaggcaccaaatccctatgataggtggtatgatgaatctgttgagtggtgcaaccctcttttgtaaaatcactcatgcacccaacatcttcatgatttgtgtacatagggactcattaggtaggtttgttcttattttttgtttcaatacaaacttaggtgctcatatgggacaccttaggtttgtcataattttttgtaggaataat

SEQ ID NO: 139321 - DNA, 291 bp, Glycine max
  unsure (1)..(291): unsure at all n locations
agcttgtaggattatatgttacccatcacatgtggtactaggtggcggtcgggcgatggtgcacaacaagttttccacatccacaaagcgcgcataaacccaccatcccctgttgcccacctccaactgagctcacgtactcccacgtagcccatatcctcgttcctctcaacactgggtccccatcaatcctcccaagctttcccaacatncaagtaatataacattcagacagcacaaattatcacagccaagcaaaatagggcaaaggcagaaaactctgcccaaaac

SEQ ID NO: 139322 - DNA, 304 bp, Glycine max
tgccacccagctcgcctaggcgagcagggttgcttcctccagaagcaacagccttctggaggaatcttctggagggcccaagtgggcctggttgctatttgcacccccatttttgctaagtacacctccccttgcctttttttggtgattctttttttgtaaagttacggaaacttacgaatttcgtaacgatacttgttttctttccgtaatgttacggaaccttgtggattacataatcattccctttttgacttacggaatgttacggaacctcactaattgtgcaacgatgcttccattt

SEQ ID NO: 139323 - DNA, 287 bp, Glycine max
  unsure (1)..(287): unsure at all n locations
agctttgaatttctttttaccaatggagtatatggatgttattgatggactccttgaaacaccatttggagagataaattagagttagattggcaaattaataatctgaaagtcagttgaccaaactaagtgaaaacctaattaatcaatcttttggtccttataccacacccattttttgttttagttcttatacctaaaaactttaaggnnnntaatttatatatattctagtctatgttcttagttttctaaaactataaaaccatcacaaaatggagacataa

SEQ ID NO: 139324 - DNA, 303 bp, Glycine max
tgtactatttccatgcaatatgtattatggaacatgagcatcatcaatgcactgaaggttcacgttcgttcatccaaacacagagctttatatatcaaatcaaagataatttagtatagatttcaaagacaaggttaatattatattttggggtcaaatacccattcaatttaaaaaggggctaaaagggtgttttgagattcatatcaaagagaggtcattttgaaattttgatcacgccactgtgaccagggttcgacaaatgttacaaaaagaaaatttattctataaaaaggaaacttt

SEQ ID NO: 139325 - DNA, 296 bp, Glycine max
  unsure (1)..(296): unsure at all n locations
agcttgagatgatgttgtgttgaagggtgaaacttcctgcttttattgttgaccacagagtggtacctggagatatgtcgcgggggtcaggagaccttggggacgtcaggtggggtgctattgcccaaaaccaagcttgaccaatcccgacccaacccgggcatagtcggtcagtgagaacctgtgatgtacctaagcaggcgagctcctgncantcaacagataaaaggaaaacaagaccacaaagcaaggaggcttgtggtggctggccagctgtgaattttgtgtaatatgtg

SEQ ID NO: 139326 - DNA, 307 bp, Glycine max
tgagatgaggaagtgttgaagggtttaacttcctgcttttattgttgaccacagagtggtacctggagatatgtcgcgggggtcaggagaccttggggacgtcaggtggggtgctattgcccaaaaccaagcttgaccaatcccgacccaacccgggcatagtcggtcagtgagaacctgtgatgtacctaagcaggcgagctcctggcagtcaacagataaaaggaacaaagaccacaaagcaaggaggcttgtggtggctggccagctgtgaaacttgattgatatgtgagatatggtctctggg

SEQ ID NO: 139327 - DNA, 294 bp, Glycine max
  unsure (1)..(294): unsure at all n locations
agctttgatttctaattgtgactcaccataaaccttgacccaaggggagaatgccaatccttaccctcggaagcaaaaaaaaaaaaaaaaaaaggaagagaaggaaaatttccaatcaaaggaaaaaggagaaggaaaatttccaatcaaagagggagcaaaaaaagagaggaaaggaaattcacaatcaaagagtgggtgaaagcaaaacnaaaagaaagaaaaattcccaatcaaagaatgggagaaagaaaaaaagagagtaaaaaagaaggaagctcctggtcaaaaaaa

SEQ ID NO: 139328 - DNA, 304 bp, Glycine max
tgaaagaaatgtatcaatattttttcatctttcgcatatgctcccattttcctgtagtacacctttaggtgattcttggggcaagttgcccctttgtatttattgaagttcggtaccttgaacttcggaggaatgaccacgttgggtactaggcacaaatcttccatgtcagcaaaggcatgatctccgcctccttcaatgacccttagcctttcctctatctgatccaacttttccttttcagccatagcaagaagggctcttcccacagcaaaatgcaagggttgtggttgtgggcaaaact

SEQ ID NO: 139329 - DNA, 276 bp, Glycine max
  unsure (1)..(276): unsure at all n locations
cccacgggcccaagagggaaaggccacggaaacgaaagcaccaaaaagagaagggaaacgcaaaagacaggggccgagggaccaccgcctccgagaagaagaagaagatagaagaaagatgagaaaccttatacacacgaagtgcagcttaccacaaacgcacacaaaaacagagaagccccaaatagaaacgngaacctgggccaggaaaacaccacaaaagcgaaagcccaaacagaacagggcaaagccggcccccggagatccacaacaaac

SEQ ID NO: 139330 - DNA, 132 bp, Glycine max
ggtgatggattaaaaaatttatttttttttctaacgcgttatcgaggttgaaattatataatagtgccacgcacgctactaaatttcacgttttcgtgcctcacttctactaaataagacgctagataaaaa

SEQ ID NO: 139331 - DNA, 287 bp, Glycine max
  unsure (1)..(287): unsure at all n locations
agcttctattttttacctcgatcgggcatctctccatgccgacgtcagctatcatttttttcgatcaatttccgagaataatggttattatttgttttgggcgggatgggccaacgttttcttggcctcctaaatgagaagaacaacatgcccaggtccgacggaacgaaccctcggctgagctcgcacggaaaaacctagccganctaagttgtaaattttttaggcaacaccaaaacaaaaaacttcctctatcgtaaaaaaagaacattatcggccagcatttg

SEQ ID NO: 139332 - DNA, 302 bp, Glycine max
tgaccaatcccgacccaatcttttcatagtcggtcagtgagaacctgtgatgtacctaagcaggcgagctcctggcagtcaacagataaaaggaaaacaagaccacaaagcaaggaggcttgtggtggctggccagctgtgaattttgtgtaatatgtggattgtggcctctggtaatcgattaccaagggtgggtaatcgattacaaggcttaaaaatgaagacaggaggctaagatggtctctggtaatcgattaccacggggtgtaatcgattaccaggcttgaaaacgaggtcaggaa

SEQ ID NO: 139333 - DNA, 287 bp, Glycine max
  unsure (1)..(287): unsure at all n locations
agcttcttgaataattctgttttgcatcaaagcaatctcagaactcaatgaagaaggatgatacatgtttcttccttcaacaagagacccctcattacaatgaaaaagttgaagttgagttgcatccattacccggaaaccaattatcttctgccgtgtccgattatgttctgagattcttgtcaaactcaacaagagtcttggcttncactaaagggttgattctttgtaatcacgccacgagccacacaccaattgaactcttcatttgtaacccataaacaaaa

SEQ ID NO: 139334 - DNA, 303 bp, Glycine max
tgtgaaacgacttccaccgctaaacgcttaacaccttcaatttcttcgccttcctgtacctaaagtaaaaccatgccaccccaataatgaacacaactccagcaagcgcaaatatggaccacaaaatccacacatacctccgattcttactcttaccatgacaatgacaatcacaaagcccaagttgatgaccacagagcccaggattccctataaaactcgtcttatacttgtcattggcgaaaaaaggaggaatatccccagaaagctgattgtaagacaaattcagcccagtgagcttca

SEQ ID NO: 139335 - DNA, 296 bp, Glycine max
agcttccttatggctttttcctaaaaagacaaacattttgggaagttagtttcaccaagaaatgctaccttcaaaacaaaaaccgcatgcaacctcctccaataaacacaaacatcaatgtaaatttaaagcaaactcatgcacatatttccttacgaacatacattcgcacaagatattctgctaactaaaaattgcactcatgcacaatcaaggcatcttcgttacctagatcacgtatatgcacttccaaggcgtatttgctacctaaatcacatgcatttcctttgctaaat

SEQ ID NO: 139336 - DNA, 305 bp, Glycine max
tcacaagcaagcatccataacatgtgatatcccaagacagtatagctgtagatccttctaagatagaagttgttcttaagtgggagagtcctaagtctgtgtttgagattaggagttttcttggtttagtgggatattaccagaggttcatagaaggcttctccaagttagcctttcctttgaccaagctaacttataagggtcaagcttttgtgagggatgcccagtgtgagcatagtttccaaacctataaggaaatgttgacggctactcctctgttagttttgcctaacccaagagaaccc

SEQ ID NO: 139337 - DNA, 290 bp, Glycine max
agcttaacagattaccccatggcccgagaggtattggccatggaaacgagagcaccaaaatgataggggaatcgctagttactggtttcgagggaccagctcctccgagaagaagaagaagatagaagaaagatgagtatttttatattcatgatttgcagcttattacatatgcatatttatattgagaattccctaatagaattgggattctgtgctaggaaaatattacaatagcaaaagcaaaaacagaataggttattgttgtcccctggtgatcgacaacaata

SEQ ID NO: 139338 - DNA, 298 bp, Glycine max
tttttagtagcatttatcattttttttaaaacgatagcttctaactttttatattttctttcacttttatcttcaatatattttttcatttttctgttacattttttaaataaatcattattttattgtttttctgtcattttacactttttatctacttcaacaactagttttactgaacacttataatttaataagctaacttttcagctttcaactacttgctaacttttcatgtagttttgtcatacataaccttattctttgtaatttttcttgggatttcaaattttcttta

SEQ ID NO: 139339 - DNA, 286 bp, Glycine max
agcttatttaatatttaatgaagttctcattccgataagtatttaataatgtcactatatatggctgcttatttactattctactgcattgctatactagtatttattaatgtcactatatactagttatccttattaggagtactttattactattcacagggtattgtatgtcaatctcttgtatttagatgagaaaatatattcactattttatcttgaattcttggttttactcaatgaaactccatcatatcatgaatgtgctatgagttatcttctcacc

SEQ ID NO: 139340 - DNA, 301 bp, Glycine max
tcatcaaattttataatttctcatatccagtttcccaagaaaaatgtttgcgtcacgcagtattagtttaattaatatttagtcaacgttttgtaatatatatatatatatatatatatatatatatatatatatatattatctaatctctcattaatttaccgtagctttatcattcccagatattttttttaagaaggaaatcatatttaaaatactattaaatactcccaattcttaatactaaaaggcacaaattattagaaggaattgagggttcttttataaagtattttacagt

SEQ ID NO: 139341 - DNA, 286 bp, Glycine max
agctttagccgtttgacatttaacatggccactggtgattcttaagtatctttaatttcaatacaattattgttcaatgcctaatcattattttatgtaactgtatatatttctattaatatattattcaagtctgctcgtgggaaatgggaccaagttcgctgagaagtcgaatatatgtttatacaaggtcatcctgtcttagatggaacaactaggtaattattatggatgttggctatcactgagacatgttttgctttctttccacaacagatgatcatta

SEQ ID NO: 139342 - DNA, 305 bp, Glycine max
tgccacccagctcgcccaggctagcagggttgcttcctccagaagcaacagtcttctgaaggagtcttctggagggcccaagtgggcctggtttctatttgcacccccatttttactaagtacacccctgccttttttttggtgattctttttttcgtaaagctacggaaacttacaaatttcgtaacgatacttgttttctttccgtaatgttacggaaccttgtggattacataatcatcccccttttgacttacgaaatgttacggaacctcactaattttgcaacgatgcttccatttgat

SEQ ID NO: 139343 - DNA, 289 bp, Glycine max
agctaaaacccgtattttcgattcacgcgcataatatagcgagacacttgatattgaagaacagaagctctcgagaaatacgaatggacataacttttcacacggatgtccgaatcgggcgcataatatgccgagacgctcgaaattgaacaacggaagctctcgagaaaacccaagggccataacttttcactcggaggaccgaatcaggcgcataatatatcgaaacgctcgaaattgaacaacggaagctcccgagaaaatcaaatggtcataactattaacacaa

SEQ ID NO: 139344 - DNA, 305 bp, Glycine max
agccttgccccttgatatatttttttgactcatggtcactatgaatgacaaattccttgggataaaggtagtgttgccatgttttcaaagcccgtactaaggcatacaactccttatcataagttgaatagttaagggtaggaccacttaacttttcactaaaataagcaattggatggccttcttgcatcaacacagccccaatcccaacatttgaagcatcacactcaatttcaaaagatttttgaaagtttggcaacgcaagtatgggggcattagttagcttttgcttaagaacattgaaa

SEQ ID NO: 139345 - DNA, 289 bp, Glycine max
agcttgaaggtgctttccttcaccattttttcatagtaaaacactggtaatgtgtctactattattgtgatcatctctttctccgtcattgggggtgtcacctgggctgccaggtctctccgtctttgaaagattcatgcccctttttgcacatgttctatagttgcatcctatccggagccatatcagaattgtactgacactgcctaacgaaggcaaccattaggtccttctaagaatggactcaggaaggttccaagttagtgtaccaagttagtgtatcaaaaat

SEQ ID NO: 139346 - DNA, 306 bp, Glycine max
tgtctcagcgtttatgcgagattgtgaccaacatgctagctatcatcgccaagtaccaagaagagttaggtctagccgcggcccacgagcataggattgcggacgaatatgcccaagtatacgcggaaaaagaggctagaggaagggtgatcgactctttacaccaagaggcaaccatgtggatggatcggtttgctcttaccttgaacgggagtcaagaacttccccgattgttagccaaggccaaggcgatggcagacacctactccgcccccgaagagattcatgggcttctcggctattgtc

SEQ ID NO: 139347 - DNA, 289 bp, Glycine max
agcttgtatgattattggtcaccaatcacaagtgggactacgtggcggccggaccacggtacacaacaagtactccacattcactaattgtgcataggacttccataccttgataggcacctgaaagtgacctcacgtgctggcacgtatcgccatatatctaccttctttgaagaccggaatccgatcgataataccgatcttacctaacatccatgtaacgctacatatgatcctcacgtaccttcacgagcacaaaaagagggcacaggctaatatctctgtcctg

SEQ ID NO: 139348 - DNA, 302 bp, Glycine max
tgatatatctatcaatccaagtctttttatcgcatcagagttatctgggtcctcaagaacatgggaatttaacagagactctcgtataagatcctgataaccggactagggtataacctactgaaatagttgactcgcccgaattacgttgcacccttgctattgaggctaatcaagcatgtatttttgaaaaaagcatcatgagccttaattcatgggacatgagccttcattctgatacatttatcgaagagttgcctgatgtccttccgttcctaatggttctgactgacggaagatgt

SEQ ID NO: 139349 - DNA, 299 bp, Glycine max
agcttcatgatgttgtattttgttgattcaagtagttttgatgatgacaaaaaacccaaagaatgatttcaagattgagtcaacaagttcaagatcaagattaatttcaagtttcatgagaagaaatcaagaagattcaagaatcaagagaagtttgatttcaagattcaagagaagatgaattcaagattcaagagaagaaatcaagaagacttcacaagggaagaattgaaaagatttttcaaaaaacaaacatagcacaattttgtttttcaaaagagtttttctcaaaagctacc

SEQ ID NO: 139350 - DNA, 307 bp, Glycine max
tctttaggaatcttcttaaggaatcttctcaaggaggtgagcttagttatgagaggcgtgtgtgtagctaagctctagcttttcaaggaagttttctcaaagaagcttcttaaggaagttttctcaagaaagcttctcaaggaagctacctagtctatgaatagaagcatgagtaacacctgtcccaactttgatgaatgagagtcttgtgagacacaactcaaagttcaacttctctccctttttcttccttcaatttcgtgctccccccctctctctttctctccctctttcttttcctacattg

SEQ ID NO: 139351 - DNA, 291 bp, Glycine max
agcttttcttttatatttacatgataattaggcacacatatgaagtaagctagcatgcaagacaaatagcaaggaagatttcacaagccaatgcctcacgggcactgtttctctctaacacaattgtttaaggctatttctcaatcaacaaccaacgcaagtctcaatctttgcaattcatttcatgccatacagtcacaaacacacatattgaattcgaagggcttttcttggcttgtaatgaagctgggctgcaaacaaaatgtagtttttctaggatgcaaaaatctt

SEQ ID NO: 139352 - DNA, 186 bp, Glycine max
tagggatggaacacttacttttttgtgatgaacaaaagcgcaaaacggaatcaaaaaatgcgaaaaaggatgaccctagggctgcaaactcgtcaatcccgtgggtatggcttttgaagggggggggggaagaagttttttgaatgcataatcgaatacactatcgtaaatttaataatttggtgc

SEQ ID NO: 139353 - DNA, 289 bp, Glycine max
  unsure (1)..(289): unsure at all n locations
agcttgttacttattgtaatactcatgtcaccctataaatttgcacttgaagttgaggtgtcaactgttgtttacaatgtctaactctataactaggacactggtcatactaatggtttcttactcaagctttgattactaagctagttctaacaattgaaactaaactcacaacaagattcttgagaattttacccatctattttatcnnggattcaactgcaaagatcctcacaatgtatcaaactaacggtaatctctcccaaaatattatggtgaacaccatggt

SEQ ID NO: 139354 - DNA, 326 bp, Glycine max
tgacactatccatactcaagcttgtgctagagaaaattcttggtttcttagatttttcatatttttaaatttgtattgagtgtattaaggggaaaaaaaacaaacaaaaggaatttaggtgtcaaaagagctaaggatatcttagaaataattcataaggtattcatggtcctttccctagggatttatggaatggacatattttttattatgtttatagacaattactctttctttaattgatgagaagtcttactctctagatgttttcaagtctttcaaagatgaagtttaacttcaattggaaaagaaaattaaggttgtca

SEQ ID NO: 139355 - DNA, 289 bp, Glycine max
  unsure (1)..(289): unsure at all n locations
agcttccaacctttctgtttgaggggaattacaatttatagaagatgacagaagctcaaaggataacccatgtgacttagctatatgaatctcaacaaaataagagatttgaagaagatgttattgctactgctaccattacttaaagagaagtttttgccatcacccaagctaaagcatctgctaaagttatggatgacaccattgnacnnggggtcatcattgaccttagaaacactgctgttatagacaagactggtgaagtgtccaacacaattatggttgatga

SEQ ID NO: 139356 - DNA, 303 bp, Glycine max
tcccagatccgatcatggttttacttggcaactgccttcattaggcagtaccaatacaatacggatatgactcccgatcggaaccagcttcagagtatgactaagcgagagcatgaatccgttaaggaatatgcccaaagattgagagatctcgcagcccaagcgatgcgaggctcacgggtgcgctttccaaagaaggaaagatgcgcggagtcgcccatattcccatatttactatatttatactattaagcatgataacaactactttataattatcaccaattgcaccaaaagctgaaa

SEQ ID NO: 139357 - DNA, 290 bp, Glycine max
agcttcatcacttgatttgaaggatgcaaagaagtactgcaaaataaataagtggattaagacattacagcacaataaaaatacaaaagtaatgttcagggcataaattcattgaaatacaactagcttaaatgtaactccatgtccaacacaccttattgtttccggctagaatctcaatggcattgggaaagagcccagccgtctttgccctccttacacttgtgacttcagggaatgggattattttctgaaacataatcgttggcaattccaacacatggcaaaaa

SEQ ID NO: 139358 - DNA, 303 bp, Glycine max
tgtgtcgctatcttcatcatggtgatttttctcgccgccttcctccgacgttacctcctccgaccatgcgtcggacggcagggttcgtctggagttcgaatccacatcgcccccaacctcctccaccatccacaccttatacgtgatgccatcaacgcacacgtggacctccttcgaaatcgccggcgggagggggttcgaatcaacaagcgagctctgtccagacgccggcggtcttcagtgtcatcgtcaggttcaacgacgtcgccgaccgtagatacgactgtcttaaagtgctgcatg

SEQ ID NO: 139359 - DNA, 296 bp, Glycine max
agcttgaggcgatatttaaacaagagcactttttgcccaatatggaactccttcctaagaatcctagagtcatgaaacatcttcactttctccttgtaaatcttggagttctcataggcctttaagtagatctcctcaagttgttacaactgaagctttctttccatacccgcttcatcaaatgccaagttacaactcttcatggcccaataagcacggtgctcattctccaccaggaggtggcatgccttacaaaaaaccaccctatggggagacatccccaaaagtgtttagta

SEQ ID NO: 139360 - DNA, 304 bp, Glycine max
tgtaggattatggggtacccattacatttggtactaggtggcggtcgggcgatggtgcaaaacaattctccacatccacagatcacgtataacccaccatcccctgttgcccacctcaactgagctcacgtactcccacgtagcccttatcctcgttcctctcaacgccgggtccccatcaatcctcccaagcttccacaacatccaagtaattcaacatccaagcatcatgaactaacacagccaagaaaacagggcagaagcagaaaactctgcccaaaacacaaaccaacatcacaacttt

SEQ ID NO: 139361 - DNA, 288 bp, Glycine max
agcttgctgtctttcaaatataagtattttaactgcacactaagttactcttctctaccaagcaggcttttacacttcaacatttcattgaaatatttccaaccaataaaaacatgaagtttcacttgtcttgtcaaaacttgaacaattgcacaatcaaatcaaatttggcttctcttattgaagtaatagtcttttatacagtaagaagtaatagaatgacaagctatattattcatttaactataatatttttttatcacattgggcaacattcaatgcagaaaa

SEQ ID NO: 139362 - DNA, 300 bp, Glycine max
  unsure (1)..(300): unsure at all n locations
ttgttctttntataaaacgagtagttctgaactcatcacgttttctaaaaaaccttgaggtggatccaagtgctccgatcattcatttgcatattcatgttttggtggcatactcaccgttgtttgtttctttagggaattcaccataactaagaaagcgcaaaggcacccctataacactcgatccagaaaaatggataatgaagagggcgtgcaaaaacagatgaaggccgacctatcagccttaaaagatcaaatggcttctatcacggaggccatgctaaaactccagaaaactat

SEQ ID NO: 139363 - DNA, 290 bp, Glycine max
agcttcaagaattatgtttcaagattcaagaacaatcaagtttcaagaatcaagattcaagaatcaagagaagactcaatcaagataaatactaaaaaaaagtttttcaaaacattaagtagcacaagaatttttcacaaaatcttttaccaaagagttttactctctggtaatcgattaccaaaaggtagtaatcgattaccagtacccagcattgttttcaaaaattgatttacaaagttgtaatcgattaccatgaacatgtaatcgattaccaatgttttaaaatg

SEQ ID NO: 139364 - DNA, 325 bp, Glycine max
tgacactatccacaactcaagctttcaattcttcaactttagggttttttagcaagcatagcatgccttcgaagtatccatgtgctatttttaagatccaatccattgttaccgtccaattctggacctattaaattgtttttatcatgatgacacctgacctaggaagtgatagtttattactttaaaaactgccaattacaatttatttatgagccatttcatccgattcacttgatcaagtgatacaactaacaggcaaaccagaatgtagaatgttctttactattctacattgttgacatgcaagtatttatattcatca

SEQ ID NO: 139365 - DNA, 290 bp, Glycine max
agcttgtgaattttttttttttgattcagtaacttggacatgaatttctttagtttttaatatgtgttgttttatcaaatttaatcactcacgtggggaaaggaagagatggggaaacaaaatccctttatgatctactactatacaaaccatgacgtatacggcaaataaggcaggcaataattaatatgtaatccaatctaaggcaagcaaggaagatctcattaatttatttagcttgataccgattgactgaatttttgagggataatgactaattagggatgcaa

SEQ ID NO: 139366 - DNA, 306 bp, Glycine max
taaatgaatgcgatatacttaaagagacataataattaaaagacagaagatttactcgtacatattctaaagaacatatatagaactttgacctatttatataaactaacaaagtgtgtaaataaaaatgttttttagtgtaattaaatggaatacgtaaatataaatattattactcataattgatatgtgtggtcaaatagtagaaacgaaagaaaagatcaggaaactaggaatccaattgttgtcatcatcatctatcacataggctcccctaattattatataatttagatgatacatgtt

SEQ ID NO: 139367 - DNA, 292 bp, Glycine max
agcttctacagattgtttgttcctaatttctctacacttgtctcacctctcaatgagctagtgaagaagaatgtgacattcacttggggtgaaagacaagagcaagcatttgctttgctcaaagtgaagctcaccaaggcaactattctaactcttcctaacttttctaaaacttttgagctacaatgtgatgtctctgtagtgggtgtgggaattgtatttttgcaaggtgggcaccctattgcttattgtcagaccctaatttcgtccgaggcctattattcattgatgt

SEQ ID NO: 139368 - DNA, 306 bp, Glycine max
ttccgcaagacttacggaaagatcttagagttgaccttagcagaggtatccatagaagccattgcatcactcacccaatactacgaccagcctttgagatgcttcacattcggagacttccaattagtaccaaccattgaagaatttgaggaaattctaggatgtcctctcgggggaagaaaaccatatctttcatctgggtgtctcccctctttgagcagaattgcaactgtggtcaaggattcagcaagaggtttggaccgcataaaacagactcggaacggcatagcgggcctaccacggagg

SEQ ID NO: 139369 - DNA, 296 bp, Glycine max
  unsure (1)..(296): unsure at all n locations
atgctatttgaaattttattcttttgccactgggaatcgatgacaagaaactggttgtcgattaccagagagcaaaaactctggtaacttagaaaattttgagaaaaacttttattgtaaaacaaaattgtgctatgtttggtttttgaaaaattctttttaatatttcccttgtgaaatcatcttctcttgaatcttgattcttcttgatgtcannncttgaatcttgaaattaatcttgatttaatcttgatcttgaacttggtgacttaatcttgaaatcattctcttgggct

SEQ ID NO: 139370 - DNA, 306 bp, Glycine max
tcagcacaagaatattatgacttttaaattttaaacctaaaatcaacacaaaaacatgattcaagagtagatcgataaaatttgaaccatagaaatgcaagaacaagtgtagatctaagatttaatcagtttatttttttaatctactctaagatggaggatagatagggagaataagatgaataacaagtaattaaagtgaattgaccgaacaaaaagatagaggaagcaaaagaacatcacatagacgaagatgctcttgataccacatgatgtagcttcatgtagagcttgtaggccttggat

SEQ ID NO: 139371 - DNA, 292 bp, Glycine max
  unsure (1)..(292): unsure at all n locations
agcttcaagagttttttgaacatggcaagagagtccactctgaaacctcatgataatgttgaagtcaaacctgaactagctagcagtgacaatatcttgcatgtcacagaacctgcctcataaaattcatctgaggaccctattgtggcttatggtgcaagttgtgttcaccctcaccttcatcatcaggggacaaaagcttgaagcatannaatgagaaaactagcaagtctgcagtgtctgcatcttcaaggaagggccttggatctgtggctgggaacaaagggaaggt

SEQ ID NO: 139372 - DNA, 306 bp, Glycine max
tgtatgtttgactctgatgatgaatcaaaatttgaagaagcttggtatattttgctccgcaaatataatgttgagactagcacttggctagaaggaatttacaaaatgaaagaaaaatgggctagttgctatatgaaagatgcttatagtataagaatgcaaagtactcaacttagtgaaagtttcaatgctagtgtgaaagattatgttagatcaagcttggatataatgcaaattttcaaacattttgagcgagctgtggatggcaagcaatacaatgaattagaggctgaatacaatagcagg

SEQ ID NO: 139373 - DNA, 255 bp, Glycine max
  unsure (1)..(255): unsure at all n locations
atcattagcaattgagattgcaacttggttgtccacaaaaatctgcatgttttcttcttgtttcatatgcaaatctatcgtaattatcctgatccaaagagcttgattcactggaacaacaacagcttcatactttgcttctacgctagattgaactacaacttgttactttgnagccaatcaagaaaaaaaaaacctccagaaccaaaggaaaaacacgaaccagaggtggtggttatgtcatcaatacaacct

SEQ ID NO: 139374 - DNA, 310 bp, Glycine max
tagaaactcaacccccaataccagcggaacatttttcctgatttgcccaaaataataccggtgaaaaagactctgcaccgcttatcataaaaacaaaatattgaaaattaagagtgagagaaaactccatctattgctagagcgattatatattatactcaggcttaatatgtaaatagagggattcctatcaaaaaacacggaggttctgataaaaaaacaaatacatgtacgttctatacctgagcatatacatcccaaagaaatgtacacagcaataaatgctccaattcttaaccattcctggaaa

SEQ ID NO: 139375 - DNA, 285 bp, Glycine max
  unsure (1)..(285): unsure at all n locations
agcttggttttttgttcttacccgttgaagatcgaagaacaatgaagaacgaatgaagaacgtcgaagaacggtcgaaaccttcgcgaaattcctcacggaaacgttacggaaacatttcggaagcgcctcggcttagattttcttcacggaaacaatttttccaagcaaattcgaaagagagagaagtgcctaaggggctgaacccgnanccatctcacttcctcccctatttatagcaaaataggggagatgcttgccgcccaactcgcccaggctagccggg

SEQ ID NO: 139376 - DNA, 297 bp, Glycine max
tagtgcttgatcactacgcgtggctccagactcattggtggacgatgcatgaacgacaatcaatccatggggctccgaataaaagtggagaatggggaattgcactaggcaatcactacgcgtggctccagactcattggtggaggttgcatgaacgaaaatcaattcatggggctccgaataaaagtggagaatggagaattgcactaggcaatcacttcgcgtggctcgagactcattggtggaggatgcatgaacgacaatcaattcatggggctccgaataaaagtggagaat

SEQ ID NO: 139377 - DNA, 290 bp, Glycine max
agcttggatactttttatcattttgttggttgcctcatcgttgacggtattcattgttggagactattgatattgagcattatcacaagtacaaatgcaaaacatacttttcttggcctagtttatgttagagtccttttttacgttgttttatgttattaatgactattgttgtgcgtataattaatgtttatcatgagtgaaccttggattcccatttgagattcaatacaatgatacttgcagatagtttgcattaatcgttgtattgaatcttgaattgtccattt

SEQ ID NO: 139378 - DNA, 304 bp, Glycine max
tatagtaatcgattacacatttttttttgagacaatgattgatttttttaggagtctatgttttaattgattaccaatagatataatcgattactgctcttttaaaaagtgtatcagaagtgattaagaacactttaatcgattacattaaggatctaatcgattacatggttcttgaaaggtttccagtttttgggaagaacacttcgatcgattgaaatgataatataaccaattacttcttcaaaacaattgattacattgtatatttaatcgattacatgcagttataatcattttctct

SEQ ID NO: 139379 - DNA, 286 bp, Glycine max
agcttctccttttttttattaacttcctccttaagtcaaatgatttcttcttctcctcggcgtgcataagtttctgaatatttagcccgacttttatgcttgtaaagctattctgtcaatacctcaacttgaccctgagttttctttaaagcaaaatctttcttcttaatcaggtttactgggttgacattacccaaggattgcttcaattccaaaagcttttgaaccctagagtaacatgagtttgatactccttttcccctgacaagattaagatggtagaatc

SEQ ID NO: 139380 - DNA, 303 bp, Glycine max
tgtgctgattaaatcactgctatattttatctctagcatacatgttctttctttctttacccactcctgacgtttggttttttagggaaaatcaccataacttaacgcgccacaagggatccctatcgcaccagatccaagtctataactatgggtgatcaataggatacacaggaacagatgaaagccgacatgtctactctgaaagaacaaatggcctccatgatggaggccatgttaggtatgaggcagctcatggagaagaacgcgggcaccgctgccgctgtcatttcagctgccgaa

SEQ ID NO: 139381 - DNA, 293 bp, Glycine max
  unsure (1)..(293): unsure at all n locations
agcttcacatttattgcttccatcaatgttatacttagactatcctaaaaaatgatagctttttcaattggaaacccaagattgctaaccagacctttaagtcagatctcatcctttattgcttctattagagccacaatgggctaaagagtttccttcaaactatcaagagagttgccaatcatgaatgcgtaccttgtcatagttctncttgnatccaaatctacagcatagtcaaaatctaaataaccagcaagagcacaagacgtgtctccatggtagacaagtccaat

SEQ ID NO: 139382 - DNA, 296 bp, Glycine max
tctaaactttatacaattttgattctctgatactacttgttagacaagtggcctcagatatcttaagaagggggggggttgaattaagatattccaaactactttccctaatttaaaattctatttcactttttattcaagttatgaattcccttaatgacaatcttcttaaatattaattcaaataaaacaatttgaatatgaatataaagcaataatgaataaaggagattaagggaagagagaatgcaaactcagttttatactggttcggccacacccttgtgcctacgtcc

SEQ ID NO: 139383 - DNA, 291 bp, Glycine max
agcttcttgtagtttattcaaagatcaaattgagaggaaaaataaaagctatgctaaacaagccaacaaagggagaaagaaggttgtcttcaaacccggagattgggtttgggtgcacatgagaaaagaaaggtttccggaacaaaggaaatcaaagcttcaaccaaggggagatggaccatttcaagtgcttgaaagaatcaatgacaatgcttacaaagttgagctgccccgtgagtataatgttagttccaccttcaatgtctctgatttatctctttttgatgcaga

SEQ ID NO: 139384 - DNA, 297 bp, Glycine max
tccatcaagtttccctctccctttgaaaggatttgacctcaaatcccgaggttctccatactctgggctccttccctcaacacctgtaaaaagaacaaaaacatatgtattagtggtgtttggtatgttgaaataaggtaaggtctgaaaacccatttcctgggcatcttcccatgaaggaacatggtttctcaccaactcaatgagtggtgctacaggtatagaaaaatatgggataaaccttttgtaaaagtttgttaagtcatggaagccccaaatttttcttatacttggtgg

SEQ ID NO: 139385 - DNA, 290 bp, Glycine max
agcttttattattttcaagcaaaacaacattcacacagcacaagctatcacagccaagcaaaacaaagcaaaggcagaaaactctgccaaaacaccaaccaaaaatcacagcttttcccactcaaagaccccagtaacaattccttcgatccaatttgttaaccgttggatcgactccaaaatttttctggaagtctatagtgcataaacctacattttgaccgttgggatctactagcaaacatccagaactcattttacattactctttccacaaccagcaaaaatac

SEQ ID NO: 139386 - DNA, 298 bp, Glycine max
tgtaatcaatctcacatatactgtaatcgattaccagagcatatcctcataaaatattatcaacagtcacatctttttatgtggttctcgaatggctatcaaaggcctatatatatgtgactcgagacacgaatttgctaagagttctttagaacaaaaaggtcttatactcttaaaaagtaaaatcgttttatcctcttacaaattccttggccaaaatacttgtgattcaataaggaattatttgaattctcaaattgttcaatctatctctttcaagagagatttcctcgtatct

SEQ ID NO: 139387 - DNA, 292 bp, Glycine max
agcttttgcctttttcaccagttttttctcaaattcatcatagatcccttcttgaacaaacacacgggaacttgcaacacaaacttctccctatagtcacataggaagaaattaaatgttagcagagacataattaacaggatatgctatttgaaagtaaaggatttcctgaaagcaaattcaccttgttatataggatgcctagtagagctagctcagtagctttgtctatatctgcatcatcaaaaattatgaggggtgacttgcctcctaattcaagtgaaacttgttt

SEQ ID NO: 139388 - DNA, 307 bp, Glycine max
tgcattaaaaaactgcccaaggatgaggaaagataaaatctgtgcagttactatttcctaacacgaatggacattttctttttttgcagtaaatctgtatccattttgaaaaaatgtgatgaatgcaaaagtaataaatcgggttaaccggaacggtttaagtttgtttgttttcagtttcaggccatattgggccgaataaaaaaatattctgtgcatgggcccccaaacaaaagtccgaatgacttaaaaaaagttttttttattatttattaaaagtgtctcaagtaaaaatgttttaaagaaa

SEQ ID NO: 139389 - DNA, 292 bp, Glycine max
agcttgacacccactcttttgactaatactttgctaaccaattttgacttaggtgaagaggaggaaagacagattgatgaagttgaattcaataactaggtgatcgactgttgtagtatttggtcgataatgactttaggatgtgtttccttatgtttttattttgcttttttattgtattaatcctttgtcctcattaatgaaaaatgcacttgttctaatttactcgactaatgttcttcaatttttatgttgtttcatgactcatatcaatgtgatatatgtttgtcaa

SEQ ID NO: 139390 - DNA, 306 bp, Glycine max
tgaataattgcatggtcatgactactgttgctctgtctttacacttattgaatttccttccaggtatatggatccaataactacttgaggtttaaaattatgtaattctacttgaattttatttggtccttttaatgatgagtgtaacgacccgcctcgtcgctacgatatcaccactctaaaccgcgagaatttcaatttttaaaatgaaaactccattaatttgcttatgaaaaatgaaagtaattttttttctcgatatacattaaccaaacaacgcaccattacttaagtgaataaatatat

SEQ ID NO: 139391 - DNA, 290 bp, Glycine max
agcttctcaaggtattttctcaaggaagctacctaagctataaatagaagcatgtataacacttgttgaaactttgatgaataagactcttgtgagacaaacttcaaagtttaacttctcttcctcttttcttccttcaatttcgtgctctcccctctctctttctctctctctttcttttcctccattgaagaaccctctccaagcttcttatccaaggcactctcttggtggtaaagctctttcttccatggcttattccttagtggatggtgcctcctctcacctct

SEQ ID NO: 139392 - DNA, 295 bp, Glycine max
  unsure (1)..(295): unsure at all n locations
agcttatttgatgtgtttaacaggaacaatctgctcaaggctcaggatcaaatgaaaagatctgcaaacaagcatagaagggaactagtcatgtaggaaggagattgggtctttctaaaactgcaaccttatagaatgaagtttctagcaagaaagccaaatgagaagctaagtccacgattttatggaccctacagggtcatacagcgaattcnggaggttgcttataaattggaacttctagagggtagcatgatacatctggtgttccatatatccctgctcaagaaagcgg

SEQ ID NO: 139393 - DNA, 305 bp, Glycine max
tcgaaatgaagccatttttttatgacgtgtagatgacgactagtttgcaatttggcccacgaggacggcaggggtggttgtggaaaaaaaggaaggatgtttagttggattggaaaatatatatcatttattatttgaatatttcataataaataaaatgtttctaccatttaaaaaaattctaattttttaattcttatattattcttacattaaaaatattttatattaagaatatacatttccagcgcctgtgacacactttacttttgccagtatttacatattaggcattcagatgtttt

SEQ ID NO: 139394 - DNA, 291 bp, Glycine max
agcttttatcttttttatacgaggataaatttttactctgatgtacgaaacagtctcgaaagatatcgagagactactaatggacacccaaagcttctagcattatcaaacacacataacatgttacgctaatgacgtgaggaggcccgtatattatcacaacgcgcgaaaaaaaatgcccatcctttgatcgacttctaacgacgcttgccatttgacagaaatcacaaaatggatcgcgtgctttatcctgacgctcgaagtcttatggtgaggcactgagcaatttca

SEQ ID NO: 139395 - DNA, 184 bp, Glycine max
cttaattacttgcgtttttttacgcgattatacatcataaagcatgcgattaatgtaactacgacgctataagtgccatcagcgtagactaatttctgccgactttagtgaattattgaggtgtatgctatcggttcttgctgtttgtcttgactgctttaataggtctttaataattgtgaat

SEQ ID NO: 139396 - DNA, 290 bp, Glycine max
  unsure (1)..(290): unsure at all n locations
agctttgtgtatttgtttacactgatttggtaatcgattgccagtgattgtttctgaataaatcaaaagatgtaactcttcaaatacttttttgactttttcaaattagttttaagtttttctaaaagtcatgactcttctaatggttgtcttgaccatacatgaagagtctataaaagcaaggctttgttttgcattttcaatcaanctttctgaaatccaatcaatccaatacaatcctttacaagccttgaatctctttgaacttcttcttcttctttgtgccaaaa

SEQ ID NO: 139397 - DNA, 304 bp, Glycine max
tgaaggtttgtacatgaccttttttttagttaatcgtctttacctaaagcagtctttgtattcgtttaaaatgcatgaagatagatcagtaggagaacaattgggtttgtttaataaaatgattctagatcttgaaaatatcgatgtcaccattgatgatgaggatcaagctttgctattgctatgctttttgcctaagagttactctcatttcaaagagactttactatttggaagagactctgtttctcttgatgaagtgcatgctgctctgaatttaaaggaattgaatgaaagaaaggaa

SEQ ID NO: 139398 - DNA, 294 bp, Glycine max
  unsure (1)..(294): unsure at all n locations
gacctgaggcatgcaagctcaacgtaattcttgtagaaaacccatgtagaagcggctagtggtaatatacaagcttcaatttaggcaaaccaaacttgtttaaggacttcatttcctatatatggcaatgagaattggaaaaactgagagaatattttattgaaaacgaaggctaggctattgaaataagaatgaatctgaagtttggaactaagggaacatccccnntaaggaaatgaggcgatgactgcacatgacctgaaatatgagcacaagacaaggaaccattgggta

SEQ ID NO: 139399 - DNA, 301 bp, Glycine max
tgtatgcactattcagactttattatattagaaaaacatagggacgactagcttacaaccttacacaatataaattataaagtaaccttacacaattatgccaacacaacgtatctcccttggggcccaatctacaaaagaagcactctacaaaaaacaaaaccctaaaaaaccccaacttactataacagaatcccaatagcccaatcgcaataaaaaaatgggaacgaagaaggaacccataatgtgaaaacaagggaaacattacataaatatgtgaaggaattgaaaaaacaaacat

SEQ ID NO: 139400 - DNA, 283 bp, Glycine max
  unsure (1)..(283): unsure at all n locations
agctangcttattttcaacataagacggcattgagccactaaacaaaaagccactaaaatcgagagattctaaagaagggctaaacttagagggaaagctcccgtcaaaaatgttcttgcgccaaattcaaaaaccggaacccgaggaaaaccccaacataaagcgggaaggggccacacaacggggaaattcccaggaccaaaactaggagaatgtgcagaaatccaaaacctgagggaaagaggcccagaaagagagggatggggaaaccggagttaaaaa

SEQ ID NO: 139401 - DNA, 292 bp, Glycine max
agcttggagtctttttatatagggaaaacattaaaaaaaaaccatcaaaacttcaaaagtaaataaataaaataaagcacatttctgtaatcaccaatgccaatccttcatatgattttatttttgtactgattaagtagagttctcaatacagaatgtgatccatgggccagccattaaggtcattttgacaagagcatgtaacagaatatcctgtataaacaaaacaagattttcaagctacttttgaatggattccactgtttatgcacattctgaagctacttttgat

SEQ ID NO: 139402 - DNA, 295 bp, Glycine max
tcctctttggaccaaaagttttctcttttcctccttctctccatcttaaagcaagttccttgagtttgataggtaagagaagttttatccttttctatgctcaggtagttgcggattggtttcaaggctgctggaaaatgaatcatgtttttaaaaatggaagttcgagcatttgaggttttgagttttgaaatttgggttgttgtttatttgatgaatattgatcaaaagttcctatttgtaaagatttttaatgttgcttatgtatttggaattgatgggaaagggctcgggt

SEQ ID NO: 139403 - DNA, 294 bp, Glycine max
  unsure (1)..(294): unsure at all n locations
agctngcctgattgttcaaatngaagagaaaagaggaattttcacggncatatatctttcctcgcttatctgcttcccgatgagaaatcaactctccagtatactctccaaggtattcatgcttaccaacactattctggagggtgaacagattgcattagcagaaggaaaaacaacgcacaaccatataggatcatttattagtgaatacctttaagaaggctccccaacctgatatatcagaccttccaagaagaacctgtgtaagcatattatatgttaattgccatcaca

SEQ ID NO: 139404 - DNA, 298 bp, Glycine max
ttagctttggggagatgttgatgtctctctctttacatcccccttctagtaaaatcatttttctttattttcttttttctaaataggtgggcaaatgccaaactcttattgttaaattcatagttaaataacgagaattttaagaagcctgtgcagaaggaatccccttcattatttgcaatgggggtattaacgatctgtcttttccattgtattttttttttcttcattttaatcatgtgattctcatgaacttaatttttttttatatagatttgcccatataatactattacct

SEQ ID NO: 139405 - DNA, 283 bp, Glycine max
  unsure (1)..(283): unsure at all n locations
agcttcatctattttgtgaatacaatccaatagagtattgtatactctagcacacaccttcatgctaaaatcctatgggattgacatacatggacaatgcataggcctgcctacctagttctgaaagccaactttttattagaagagtatgggaggcatggatcaaagcatagatgtctatatcacagactttggtaccatgagannaactgactgtaaaaattgccaaagttgttatgcggaagaacaagaaaggacttattgaaatacttctttaacaaaa

SEQ ID NO: 139406 - DNA, 222 bp, Glycine max
aaaaataaggataagacaagtatggggaattagatacaaaggaaaaaggaagggagaaggaaaaaaaaagcgacaaataaagaaggagaaagaaatttggaaaggagaaagaaaaaaagaaaataagtagaaaaaataaagaaagaggaaaaaaaaaaaaggagattcaaataaaaggaaagatatgctcaaaaaaaaaagagtgaaaaaaaaaaaaaaaaa

SEQ ID NO: 139407 - DNA, 291 bp, Glycine max
  unsure (1)..(291): unsure at all n locations
agcnngaggtttttntaccaggnnncgacgatgctggaagaagggaaccnggagctcgctgggaacaacatttgcaggaccaagttgattcagaaaaagataataaaccgtcattcggagaaggctaagaatgaaatgaaggttgagggtcttgggaaaccccttaaagccctaaagaattataaaaagaaatctgattcaagcaatattaattctgcaactgaatattcaaagtttaatcgtgaggctgaaagctctccattgccctctattgaatcccaacatgaaact

SEQ ID NO: 139408 - DNA, 213 bp, Glycine max
acactactcaacacttaagctagaagaaagacaaatcattctttctcaactggcaaccaatatgagaaacgtggatcacaatccggccgcaaaacccattgtacaaagctcatacctacccctaccacacaaaaaactatgggttagccccccgattatgaaccctcgtggagacacaacacgtcagaatgacccaatcgcaccccacgccaa

SEQ ID NO: 139409 - DNA, 464 bp, Glycine max
  unsure (1)..(464): unsure at all n locations
tcttcatccttcgcactagctagaagctaccaacttctacttctcttactttctgccttgtcactaaacgacaaaaaatataatggacaaagcttcaactgggctgggactcatcatagttaacgggctagcacctattgaagattgaatggcccatattatgctgaaaaccactatggagttgctattctcatcctaggtttgctattctcaacggaagttctaatgcttaaacaaaatgcactgaatcaacacaatggatttttaagaaatagtaacctaaattatctctcaatttggtgtaccaaagacaatgtataaacccangttggaaggtntgattgtttgaattaagatataataagcatggtactatggatggtgtttttctgcatgaatagccagaaaagaacggccgagaaatacacagagaggactatgatgaggatatttgacaaaaccct

SEQ ID NO: 139410 - DNA, 400 bp, Glycine max
  unsure (1)..(400): unsure at all n locations
cacttcaactcattttctaacacagtccagtttaaatgcttcacaacgaaggttacaaagtcctcattgtcaatgttcattctactgatgcatgttccaattgggaaatcatnctgcgttcgtataacttttacccaggtgatagcatagctgccatagtccattccagagaatttcatgataacatcactttntcgaatctgccgtgcagcaagtacgtatctaataaaatatatataaaaattatgcaaatcatctcatattctatcaatgaagaatggatcatgtaatattaagataacgctcataagtctgaaacatacttagcttcatgcaacatttatttacttccatcggaacacttgttcttgtcacatgaatatattgcctttcaatcatc

SEQ ID NO: 139411 - DNA, 458 bp, Glycine max
  unsure (1)..(458): unsure at all n locations
tataccacaaatgcccaatcaacgacaaatgtatgttattntngacgctctaacaagaatcaagccatagctttcgagcatgcaaacaatggggcaaaacacatcaaatgattgtgatgatggatggctcaaatcctcacacaagaaaactcatcactatcaaatttgagcattcaaaactatcatgacatgtcaaggagaatcaaggattccaagacacaatatgtcaaacatgttatgtctaaaacaatatcaccatttcatgaacataccctataatacaaagaaaaacatgcaaagtctcacatgcacacaaaactgacccaaagttctaaactaacaattcgacgaaacaaacaacatttatcaattatcaataccaacaaaacttgctaaaccaatgaacacttcctcctatcattaacaacgaattgccctatactagcacaatgtaaaaa

SEQ ID NO: 139412 - DNA, 166 bp, Glycine max
ataagtctctatcatcacacttttataccccgctgctagagcggcacagatacttcaaatataaattgactgggaagagacactcaatgccaacaatatatgtccattcaccataaataattatgatcactgattatcgatagataataaatgaagatacatattt

SEQ ID NO: 139413 - DNA, 359 bp, Glycine max
  unsure (1)..(359): unsure at all n locations
actcacgctncntatccaacgctcatcttggaggtgaagctccatctttctttcttattcctcaatggatggcgcctcctctcacctcatttccatttgcttccgctgcatctccatggtggaaaatcaccatttaaggaccccattgaagctcgaagaaccagccttcatagaaggcccacaagccaagttccatcaagtggtatcaaaacacaagaacttcaagtatgtgctccctaaacctccattaaatttttgctttacctttctcttcatagctgtctcttaattattatccatgtatctccttacatgtcttgtgaataatggttgtaacactaattcttataagttccacc

SEQ ID NO: 139414 - DNA, 446 bp, Glycine max
  unsure (1)..(446): unsure at all n locations
gacacttgaatctcagctattatgaccatattcttgtcctaccgagccactattggttcaaatacaaataaaaaaatttgtttgtttgctttccaatgattaacactcaattgtcttaaagaaaaatatacaatcttagtatttagtctttttctctcaaggtgttgaaggtgttttaagagctttacaagaatatgcatagaagtctttacagatagaacttgactatgagtgcgaaggttcttgtttcatgtctttaaagctactggtattttcttcaacaagtgtctattatctctaaacatatagatctctagacttgagcttgcgtctgaagattgtgcctattggagtgtttaatgttagcattaaatacacgtacttcttcatgttggaaaaccatttgacttatctatcatgtcgaacactcnagtaagaaaccactt

SEQ ID NO: 139415 - DNA, 455 bp, Glycine max
aagcttgagccaaatcccactaccgtaaaccttgacctattgtgagaatgtcaatcctcgccctcggatgaagacaaagaaaagaaagttcccgacccaagaatcggaagaaaacaaagagaaaattcccaatcaaaagagtggaagaaagcaaaatataaggaaagaaaattctcgatcaaggattggaagaaaacagaagaaatatgtagaacaatatctaaacaacacagagttgtcaccaagttaaaaaaacataaaaagaaaggaaaacacgatctaaagtggtcctctccctttgattgccaaccaaaaatcttgtgcgctagcgactttctcgccccgcactaaacataaacagaaaaggaaaaggcaagaacactcaaagcctaatttcccaccaaataaacaccattcccaagaaaaagtcctattgatccatgatcacgcatgtt

SEQ ID NO: 139416 - DNA, 246 bp, Glycine max
cagtgtgcttgaacgtggaaattcaaattcaaatgtgaagaggcacatgctctcacaacaaagcttggtgtaatatattaccaatgattgtctctggatgaatcctaagatgtaactctttagatggcttttgacttctccaaaccggtataaagtatgtctaaaagtcataactcttctaaatgtgttctctagaccagacattgaagagtctgttacagcaatgctttgttttgcttttcgatt

SEQ ID NO: 139417 - DNA, 451 bp, Glycine max
  unsure (1)..(451): unsure at all n locations
ctttgatttgccaataggtggatgaaggagactcanaatggtaccccagttgtggtcacaatggagaaccctactttctctgttgtggagattaatggtgctgatgctgcattcatgccagtggagaaaacacgtggcaagaatgctaagcaagtcacatggttcttgtttctcaaggcttaccatgctattggctgtgtaacttggtttgccacagttttgtggtctttcatgggagctatagggaagaggttgattcatagggagggtttggccttggagagtgagaagttggagaaggggaagattctgtttagggtcatcaaggtgttcgttgtgagttctttggtggttatggtgtttgaggtggtggcttacttgcaaggctggcattntgggaatccaagtttgcacattcctcgccctgtggatntggaaggactgatgtact

SEQ ID NO: 139418 - DNA, 259 bp, Glycine max
aagcttggcaacatagttgacacagaaaggatatctcctctatattttagcttaatatcatctgcaaaagccaaatgagatagctgaatacttgcacagttgggatgaaatttaatattggcatcatccttaaggctgctcatatctctggaaaagtactccaaacaaagcacaaacagataatgggagagaggatccccttgtctaagaccccgctgccctttgaaatgaccataaatggatccattgactgccacac

SEQ ID NO: 139419 - DNA, 402 bp, Glycine max
atgcctctggagtgggagaaggaactgtattgttacaaggtgggcaccctattgcttatttaagtgaaaaacttcataatgccaccctcaacaaccccacctataaaaagagcttatgccttaataaaaacccttcaaacttgggaacattaccttgtcttcaaggaaattgtcattcatagtgatcatcaatcacttaagtacattagagggcaaagcaagtaaaacaagaggcatgcaaaatgggtagagtagctagagcaatttccatatgttatcaaatacaaaaagggaaacataaatgtggtacctgatgcactctctaagagacacacattgttttgctccctggaagctaaatcttaagattggaaacaataaggacttgtatgctttaaatga

SEQ ID NO: 139420 - DNA, 434 bp, Glycine max
  unsure (1)..(434): unsure at all n locations
cctataatactcaacttccatcngtggtaatcagagcacaaggcttcaagtttgttcttttaaacctccattaattttctttctttaccttctcttccattgacgcttcttcatttttctccatgtatctcctcacatgtcttgttctaaatgttgttaacatgattctttataagttccacaaattaaacttgctaaaaaactagattgattttctatggttaaatttcttgtcttgtcttgaaccatgaattggtgagttagatccttgaatttgtttgtatttttgtggtaaacctaaaccataaattttacaaaatttaagtgaagaaacctcaaatctaaggacttgtcacctttgagtttgcgtaaatcattctactctgaaactgccataacattcttatttggctgaattattctgttcttgctac

SEQ ID NO: 139421 - DNA, 464 bp, Glycine max
  unsure (1)..(464): unsure at all n locations
ctttatctagattatgcaaatctatgtaatcgagagtttgttttatanattaaaaattgttttattaaaaataaactaccttttaattgagattattttacaattataacaattaaatttgaacttatgatatgatgccaactatttaacctttcacagtttttacgtcaacctttcgcagttaacttacttttagtgtcttgaaatgaataaattaattatttaaagtataaatttcaaacttggtatattcaatttattttttattattactaatgaaatattatntaagatatatttttaaaattatttgttacaagaaaaactcgctaaatatacgaaaaaagtgattatatagttaaaattagtattttagttgttcaatgtagaagggtanattttattctttgttattaaaattataataaataatgttatatataaaatatattgaattaaatttt

SEQ ID NO: 139422 - DNA, 441 bp, Glycine max
actcagctataggaaagctataatagcagagatcttgtcatctcttcaagatgcaactaaaggagaaggaaaaagtcaaggaaatgaaagaagtcaatgaggccgaggtagaggtcgaggtcattgctgatgacaggttggacgtggcaacagtggacgagattcaaatttcatcaacaacaattacgagaaaggaaaaagctcaacaagagaacatggaagaggctatacaagcacaaggtatgataaatctcaaatccgatgctataactatcaaaagattggccaccatgcttcagaatgtagatttgccaagaataaagttgaggagcagactaactatgtggggcaaaaagacgagaagtttgaaacgttgctcttagcacatggagggtatataggtagccaagaaaacacatggtaccttgatactagtgcaag

SEQ ID NO: 139423 - DNA, 477 bp, Glycine max
  unsure (1)..(477): unsure at all n locations
ggacctataaaactcagcttctatatagctgaaccatnttatcaataaacagaagttgagttttattcagaacattagagtttatctcttttatcttagtgagagtgattatcctaaattcttgagtgattcaagaacaccctggctgtatcaaaggactttcacaacctttgtgtgttgccctcgctggaaagagtgattctttccttcctttcatcttcacccttattctttcaaaccacaattccagaaaattcacctctgcccagaattatctcgtggccataaatcccattttacacactcaaattaagtgattcttgagcctaaattgaatttcaaaacgagatctttcacctcgttttggaatcacctcatttgtagtcctgtagtttcaattattgccatttctatatttctgtccagccaccacttaacctacattntaccatcccattcatccattttatgccaaga

SEQ ID NO: 139424 - DNA, 430 bp, Glycine max
gagagaggggggagcacgaaattaaaggaagaataagggagagaagttgaactttgagttgtgtctcacaagactctcattcatcaaatttacaacaagtgttacacatgcttctatttatagactaggtagcttccttgataagcttttttcagaaaacttccttgagaagcttctttgagaaaactttcttgagaagctagagcttagctacacacacccctctcataactaagctcacctccttgagaagcttccttaagaagattcctaaagaagctagagcttagctacacatacctctctaatagctaagctcacctccttgagatcataagctagaacttagctacacaccccctataatagctaagctcacccgcatgacaaagaaacatgaatatacagaaaaagtccttactacaaagac

SEQ ID NO: 139425 - DNA, 326 bp, Glycine max
tctgagagcatagtgacaacactgcatctgatttcttgagctgaaacgatgaatgtgggcaccatacttagtagaatgaagcacatgaacataaaaatttgctaataaagcggaatgcaagaagagtgtgtatggaacttgtcattgcgtatccttaggctttagttctaatgtggctttcgtggtggaatccatacattgcccaagtagcttgaatagattgagctacggcttgctcgatgacaagcaagactctcagtttggcgagtagataaatgacacagctatcggagttttatatgtatgaatgcgacgttgatgtggca

SEQ ID NO: 139426 - DNA, 383 bp, Glycine max
  unsure (1)..(383): unsure at all n locations
tgcttctacaatctcccccattttgatgagaacttccttgaaatcaagaaacacatacacattctttttcctagtcgatcactcacttaattctncattttctccccctttgttnttgagtttaagcttcacttgaaattaagttatttaattatacgagttcttgatttaatccctattttctctccccttttggcatcaacaaaaagccaaagtgtgtaagaaatataaaaccatatataaatgactaatcatacaagagaatagaaaacaatcaaacaagataacttaaccattcatcaaactagaaagataatacttcatagaatgtcatataatccagaaagtcattcataataacccaaataaactactaatgcaga

SEQ ID NO: 139427 - DNA, 288 bp, Glycine max
catacctaaggattattgcaagctattttgacttgaactggagtatctacgttgttaattgtagctaaccgtgcagtttcgaatcttatcagacgtgtttgaactctgaacttgtggatttaaatgtaattatgatctttctcatgggttattcctttacaacatgaggaagtcttattgatcgagtcatctatgtaaactatgctatggaaaaggacgataaaactattgatcgtgctttcttgacacaagtcagaggtgaacatgactagcagtaatgtattgaat

SEQ ID NO: 139428 - DNA, 326 bp, Glycine max
ctctccttctgttttgtgctccaccacattgtgagatatgtgctctgatattgcactgggagtgacttcttgcagaagaaattatagtagagccaaagtctattctgatttatgagatcacgagtacttccaaattctttattgcctgattccaagaaataaccttactaagcaaaatatactttaagaaaaatgaatttcatgcattgattgcaagttttcaaaaatcaaaatgttgtgacagatatctaaatcaatgttctgacagatattaatcagaagcacctaatggcagataatattgcaattgcatgtgatgaatttaa

SEQ ID NO: 139429 - DNA, 178 bp, Glycine max
tattctaaacgcatccgtaatctatggagtggttgttacacagggactggatatccagctaacaatgacaatccctgagacggcgatatgcgaggaaccacatgcccctactgattctgtatagcacgcatcaagtatgtatgacacccctacaagtagaatatgccccttctatgaa

SEQ ID NO: 139430 - DNA, 381 bp, Glycine max
  unsure (1)..(381): unsure at all n locations
ttaaatctaagctctatccacgctatctggtgggatgctccacttactttgttanaccntaatggatggcgcctgctctcttctctgttccttttcttacgctgcatctacatagtggaaaaataaccataaaaggacctcatttaagctcatagatccagccttcatagaatcccccacaaatcatgtatccaacaatcttgaaatatatgtagatatgacacatctcacctggaataaactttatgaaacaagtacttaacatcttgcaacatgctatgcacaatgttgattgaacttatatgtatttaacaaccaaacgcactgtattttttacgttggtggatcttgactaatagcatcatctacccgcaacgttta

SEQ ID NO: 139431 - DNA, 452 bp, Glycine max
  unsure (1)..(452): unsure at all n locations
acaccaaacncaacttattcacttcaagttcatctgatagattttttctattctttgtctaatagcctgggtgttttacacatggcacgtttatgtgcacagagagagagtatgaggaccacaaatatcttctgcaatgtatctttaaagaagtatatcttgctagtgtcaccttgtgctcagagttgactttcaacacacaatttagataaaacaattgaaaactcccctctcaagcgctaggcacgaattacttattgaaccatggacgttactttctgatgacaactctctgttcttaacgattgagtaatagtaccatcttcattagacaatgagtcaagtgccaaagcacttgtcttcttatgactagacactgaggcaatatccgccaatgattgatacttcaattatcatccagagcctttctccccatgctttctgcttgtatc

SEQ ID NO: 139432 - DNA, 51 bp, Glycine max
tctctataagtatctatactaaattatttgactattctcacataatctgaa

SEQ ID NO: 139433 - DNA, 198 bp, Glycine max
cacaaaccagcttaaaaaaatacataaaagaaaacgaccattataaaatcacaccgaaacgcccatcaataggaactatgccacatttggcaaccacttaaacgaattcacgaataataaacccatgcctctcgcatgcaaacagcaacacttttgcgggtcaaaacccccgtatccgctaaagagccacacagacag

SEQ ID NO: 139434 - DNA, 392 bp, Glycine max
actcagcttgatcaccaccatcgctgccccatcatctatgtttctattatttttaatattactagtactttgttttctagtcgtgtatttggctatattatgacatttcggataatatagtatttctttatttgcatggtttgattgaacaattatgacatatgctatatgactatgtggtccttatatccgacctattcatgtctcttgcttcatgattggtttatattcttcaatgtatgtcttcgtgaatgacttatagtatatgatcgtcatatacttgttactcacttgggctcttcgttatgccacagggggagagatattgtgaatcaactacgaactcacatcagtaactaactcaatttcaactgaagcatccattaaccaac

SEQ ID NO: 139435 - DNA, 461 bp, Glycine max
ctgttgctcgtgtgctgagtgtgtgatgagatcgtgtatatgggtttgatggaacttatatttatattagttgagtgtggctgctagtccttgtttgtaggggatattgtagtctctgcagttaattctcggcttgtagatattaatcaatagcttacatataatgttagagataaacatttgcttatagataaaaaggtagaagataatcaaaccttgtagataatgtgtgggcttataaataattattttaactgccaatagataagatattcaaatacatttgaatattagtaggttagagataacctgtttgttggggagtccggctgttaaggttcaagcatccgtgttcctgtagcatggctaaaatggagggtggacacgtatttatgagtgccatgtaggatgccatgtgtattctgcgggtcctggacaacatataatcccctgaagctcta

SEQ ID NO: 139436 - DNA, 495 bp, Glycine max
  unsure (1)..(495): unsure at all n locations
ggaccttaaaactcaagctgtataatcattggggtatttttggctttaaagactatggttgtctttgcactactgatgggcaaaatctatgttgttgcataagcgatgatgcggcaggccctagccctccttagatactttcaaaattcagtgttttgtcattgtgtttataacacaagttttcttaaaaataagtgaaaataaaaataagtgttacaatttaaagtaacattgttatatgaattttatgattgataaatagtaagaattaacaaaggatgtgtgaattaaattaaattttaatcttacaatcatatgattataaataataaaaattaacaaaggatgtgtaaattaaattaaattttaatcttacaatcatgtgattatatttatggacaaaagttgagtttaataaaaaaaatctcataataacaatcanaatttanattcgtactaaaagtaatgtctaccatagcattatatatactactc

SEQ ID NO: 139437 - DNA, 346 bp, Glycine max
gaatgcaatgctaaagagagctaattttattttaccacaacgtcaaaagcggtgtctgtaaatttaatattcatccatgcataatatgtttcttattttcctttctgttccagaatttggacaataatttacatcaattttttattattctctaaattatttaaccagttttcttatataaagtttctttgaaaatggaaaacaaaactgaatctattttaacaactctaataattatcacacattattataaaagactcccccattgtgggttaagaatgtcaatttctttttatatactaacaagatttattcgatgagttttaattaaattccctttttttgt

SEQ ID NO: 139438 - DNA, 418 bp, Glycine max
  unsure (1)..(418): unsure at all n locations
aagggatgccccacattagtggcatgacacaaatgcaaaaatgattatttggaaactttatgcaaaactggtcatgcatgcacctatgtggacactcgagtgtcaaatntntatggtcatgtgatgcttaggctcaagattcatttcctctattttagtcaacccaacgcttccaaaatatgttcttttatcaatttgtgcattcatccgagtccattttgggcgtctgggaaaatcttcacagcattcacccttcaggtgtatacacattttttcaaaaactagttatgatcagtgaanttttttcaaagaacagatggaagtcatctcttttcaaaagcatgttggttcttcagcttgacaacttaatttccttttttctacttattctttcattatcattcgtttatttcttttc

SEQ ID NO: 139439 - DNA, 369 bp, Glycine max
aagctctaacatctatcaaagaacaactcaagtgaatcaaagaataattcccgtgaatccaagatcaatcatagaaccactcaagtgaatcaagaacaattctagagtgccagattagaatcgggaagaattcacgactctcgaagaaagtttagagtcaagaatcaagattcaaggttcaagattcaaggttcaagatcaagattcaagaatcaagggaaggctaatcaagataagtataaaaaggttttcccaaaaactgagtagcacatgatttttctcaaaacatggttatcaaagagtttttactctatggtaatcgatttccagtaccaaatggtttgaaaaggtttcaattgatttccacgt

SEQ ID NO: 139440 - DNA, 176 bp, Glycine max
ctttctaacagtgtatacagtaatccctctacgttggtcaggttcttactaatacctgctccgactacattctatacaagtcgcatcttgtacttgcttgtctaacatgcatacttgctcatacttctgaaaagaaacactaacctctatcacaatctattcattcaatcccaaaa

SEQ ID NO: 139441 - DNA, 375 bp, Glycine max
gctacgtgggagtacgtgagctcagttggaggtgggcaacacgggatggtgggtttatgcgcgatttgtggatgttgaaaacttgttgtgcaccatctcccgaccgccacctagtaccacatgtgatgggtaccccattatcctacaagcttgagatgatgaagtgtcgaagggtgaaacttcctgcttttattcgttaaccacatagtggtacctggagatatgtctcgggggtcatgagaccttggggatgtcaagtggggtgctattgcgcaaaaccaagcttgagcaatccccacccaacccgggcatattcagtcagtgagaacctgtgatgtacctgaacaagcgagcttctgcccgtcaactgataaa

SEQ ID NO: 139442 - DNA, 460 bp, Glycine max
tatgaatgacattacttggagagtcctgccctgccaattatataccaccaaatttggatactctgggcgagagagccaagcatcaaccaccaatttgctacaactcaaaagcaaaggattatggtctgagttatgctggtaaagaacctccaccaaagcttgagggaaaaggatcctccaatcaggattcaccatacatttgtctagcttcttacgaacatgagcgccattctaaacattcttccactaggtgaccccccccccccccccacacacacaacatgcatatcaatcatgtcataatgatccaaagctgaagtcataacactagctttattggaaaggaaggactcaccttggacttcagaggcaaaaatgacttcattcaaatctcctataattatccaaggtcttgttatagagttcctcaaggacaccaaatggtcccagaggttagatc

SEQ ID NO: 139443 - DNA, 408 bp, Glycine max
  unsure (1)..(408): unsure at all n locations
gctttgccggaatgtatatgtattgaatgttttgtatctcctatcctagtaaccatgcataggtccatgttcaatattttgttttaagtgaaacgggtttatgatcccaacatggttggctcatggtgcctaacacatgaaactaagaatgtagtgtgaaatntcacgcttccccctattttgtttttgtttgtagaggaaaacgcgaggatgagcaaacatgaaaacaaatggtatgcaattttgcagaccaaaaagtttgttgaacgcatatgcatgatgatgccatgactcatgcaaaatgtgaggctggaatatgataacggacaaatgcaggatatgtccattatgatngtatgaagagatgcttatgcgatgcatgatatgaatgcattttacggacacgag

SEQ ID NO: 139444 - DNA, 432 bp, Glycine max
  unsure (1)..(432): unsure at all n locations
aagcttccnagagctcatacatttaagttcggtctcatatctttctatctcggaaccaatacatattcaaaacaacaaagtatttcaaatcatccaaacagacaatagtcccagatgaaccaagtctaataaaaatcatcatcttcaaggcgggagattgcaacagaagtcacgtcagttatcaatggttctgtcgggtcacctatattgaaaaatcaccgttagaatataaatatttaacttgacaaatgtaattcaatctttaaaaagaataccttcatcatcagactccatttcagtgagtaaaatagcattttcatttcccacattaaaattaaaattacctatcaatataacacaatctaaacaatgacagtccttagaatatacaaaattattaactaattcaaatacattcatatttaaatgaat

SEQ ID NO: 139445 - DNA, 462 bp, Glycine max
  unsure (1)..(462): unsure at all n locations
tctcacttaaacttggtatgttagtataccaagctcttttatattgttntgtgtgtcatgatgtgattgatcctattgctttaaatgatattgatgatagcaatgagtggttattggaagaatcggaaggagaagaagctggtactgatctggtttttgatgaggatgatgatttgaattggttatatgtgctgaggcaactggggctggtgaacctttacaaaacacaagagtcaaacacatataaacaagacagcagccgcacttgcacctacaatgaaaaaggaaaaaaagtggtggaagtggaagaagagaatggagatgagggggaagaagagtacaattataatgctagtgagagtgatggatttcaagaacacaatgactttgatcttgaagagaatgaagattctgattagtaacttagtattaagaaatttgcatttgtctatttgaatttta

SEQ ID NO: 139446 - DNA, 281 bp, Glycine max
caagacatgaacggaagaaagcataaatatgagttcgacaacaatatacgtgagaagccagaaaaggtaatggtggtggatgatgaaactatcaacgaacatcagctgtatgaagtcctatagatgccatctagatgtgtatttctcaggatataggatctatattccatcacgcatccattgactgctgttacatgtaaatactttcttaacatgttttcccacattaattataattcaatgatgctgcacacacgtaagtaaattgctatgtacaaatg

SEQ ID NO: 139447 - DNA, 407 bp, Glycine max
gtcatatctagtcaaggtctaagagaccatacaagtttcctaacgatttctaattatgtgggccattaagtctatcatatgctgacaatagccgagaagcccatgaatctcttcgggggtggagtaggtgtctgccatcgccttggccttggctaacaatcggggaagttcttgactcctgttcaaggtaagagcaaaccgatccatccacatggttgcctcttggtgtaaagagtcgatcacccttcctctagcctctttttccgcatatacttgagcatactcatccgcgattctatgctcgtgggcctgggctagacctaactcttcttcgtacttggcgatgatagctaacatgttggtctctgtctcgcataaacgctgagacaagcttcttttggaccttg

SEQ ID NO: 139448 - DNA, 406 bp, Glycine max
ctgtgctgcatcttttcgatgtatgttgtttaagtagtataatttccttattcacagtggctggggaagacaaatagtagtcgggcttttattggtgtcaaaagaatgggggagcttgatggaaagccctttttgagtgcagcaaagagaaaatattctggtgatgaagtgaatctgaaagcagtggagttgtgttcacagtacgaagcttatcttagagatccaaactggtttccatttaaagttcaatagatagggaagggaaagccaaggtacaatcacttccagaattacttgttcatatagaagtcatctttctatccctgcggtttgttcatatggtcatttaattgcggaaatacctgattgcttattatccaagctagtaatatagggtatactttaa

SEQ ID NO: 139449 - DNA, 391 bp, Glycine max
tatccttatggcctgcctctggacttaaccgcttctttcttcttcggaagaatcgaggcaagcccctactttagaggggccactcccaccttatgaagactatcccgggcaagacgatggggaaggagatacccatcttggccccctgctccacctcaaagatccgtccccgcatgaacaaccccaatcaaacatagtctcgcataccccggcctcacccacacccataaaagaatctgttccctttgcggaatataagggaaagattgaggcgcttgaagagaggttgatagcagtcgagggcctcggcaattacccattctcggatttagcggatttatgtctcgtacccaacatcgtcaaccctcccaaattcaaagtaccggacttt

SEQ ID NO: 139450 - DNA, 399 bp, Glycine max
  unsure (1)..(399): unsure at all n locations
cagccttctggagggcccaagtgggcctggttgctatatactcccnccctttttactacatgcacccgccttttctatttttttgtaattctttttccgtaacgttacgaaactntacgaatttcgtaacgatacttatattttcttacgcaaggttacgaatccttacggattatgtatttactcttttttagctttcgaagaagttacggaaactcacggattgcacaaaaacacctcttttttattttcgccacattacggaatttcacgaatcacgcaagcctgcttcctttcgatttctgagacgtctcgggacttcattcattgcatgtcatcaagtaataatccccagacgaaattatggtatgacaatgcgcattatgttaagttaatcta

SEQ ID NO: 139451 - DNA, 403 bp, Glycine max
  unsure (1)..(403): unsure at all n locations
gtatccttgcacaaaatataacctcaaaaaagtataataaaattaagaatattgtttaaacaaaaggggaaattaaaccactctatgtaattgtattaatataaaattgatggacaaccgcaaatattgagaactctattgaggatataacattaactacaggtattccaacataaagagagataccccaggattatccaaatgcaactaataattttgagatatggagcacatacataggcgttagaaatagatcgaataactntctaagcaagatactttntagagtgaggaggtaaagttttatcatcttatggagttggaagtgacttttgaattgggaaaggtggcagaagttggttctggaatttatggtcaagtggcaatttacgaaacagggttt

SEQ ID NO: 139452 - DNA, 256 bp, Glycine max
accaggaaatgggcactcgcagccgatcacgacagagcggacgacactgcacgcgaaaaaaacagcatctgcaaggagaaaatggcccagcgtacgacaaccccccgagacccaccgcgggaggtgacgaccaccgccacgtaatctccaccccgaaaaactcggcctcataacacattcgagtagccatcccataacgccgacgcaacaggaagtgtggaaaaggcacaaccaaacaaagcaaacaccgccccca

SEQ ID NO: 139453 - DNA, 218 bp, Glycine max
  unsure (1)..(218): unsure at all n locations
ccggcattggatgaccgacatgcacgctctgtggtagacctcgagataacctttatggatgattgagtggagggagtcataccctaatttcgcccggggaccttcgctccatgacgtgcgaccatcccttcggccacgtgagggccttggcacccatcactaggcaaatggagaaataccaggacatgccganaacccaaaaaaatattgatgcccaa

SEQ ID NO: 139454 - DNA, 299 bp, Glycine max
gttatggtactcaagtatgaaactaggcaatccgccagtgaagacattgagatctaaagcaagatgagttaaggcaaggcattccagaaacatattcttacatgcgaattcaactacgaattagttcagccaggttttgttgatattacgcatagaggtaaatgtaaatataggaaaaatataactatatggtgtggtccacgtccgctgtggtatgtagtgattattattgaattccttgttttttaaaccaccataatgaaggtctttggttctctgacagcacaatgacttccatt

SEQ ID NO: 139455 - DNA, 451 bp, Glycine max
tgtgaaactcggcatcatcattcatttttttgacctttgctacaatctcccgctttttgatgatgacaatcccttgaatcaagacaagctatatacaagatgatagcacgttcacacaacccttactccccctatcttttggcatgtatgcctaactttacttaatgataaatttctaattgataattgatttctaacccaagttctctcaagttctctccccctttggcaacatcagaaagaactaagcaacataatcaaaatccaaacagagccaaacaataaaccagaataaatccatacattgtcataatcaaccaaatcaaagtcaagaaatataatataagtgcaagagtaccataactaataaataaaagccaaatacacggcgagtaatcaaagtactaataatacttaattactaataatacctaatcataatacttaagct

SEQ ID NO: 139456 - DNA, 408 bp, Glycine max
  unsure (1)..(408): unsure at all n locations
tgacgcaacactntgagcatgaaagtatgtcttctttttttataatgtatataccgcgtatggcacataagaatatattaagatgttcttgcatgctaacatgggtcataagacactttctacacaagcgcgtgtgcataaatggattacatgagtttggtctaaatcaagagggctaacaccaccttttcctattaaataaacattatcttgtaactaacttctaacgttgttctcgacgaaatggccccacgaaacttgcctcataaaatcctgaatgataaagttgccaagaaccattccgtcccgataagacatcaccgctcacgaacgtaacactaatctgttcaagccatcaacgatgccatttttacgagcacgcctcacttaggcaacacattccatttc

SEQ ID NO: 139457 - DNA, 440 bp, Glycine max
tctcagctgagataggaagtgtgaagggtgaacttcctgcttttatttgtgaccacagagtggtacctggagatatgtcgcgggggtcaggagaccttggggacgtcaggtggggtgctattgcccaaaaccaagcttgaccaattccgacccaacccgggcatagtcggtcagcgagaacctgtgatgtacctaagcaggcgagctcctggcagtcaacagataataggaacaaagaccactaagcaaggaggcttgtggtggctggccagctgtgaaacttgattgatatgtgagatatggtctctgtgaatcgattaccaagggtgggtaatcgattaccaggcttaaaagtgaagacaggatgctaatatggtctctggtaatccattaccaacggcgttaatcaaattccatgcttgaaaaccaagttaggaaac

SEQ ID NO: 139458 - DNA, 213 bp, Glycine max
  unsure (1)..(213): unsure at all n locations
cgattacattgttcttgagttggtttttagatgttggatgaacactntaatctattacttagataatctaatcgattactgtgttaaaataattgattaccttatagatttaatcaatttcggacaattataactattttctctatatacaaccagcttgtattcacatctacacatcaagagatcattagagaatactcaatacatctcgaa

SEQ ID NO: 139459 - DNA, 278 bp, Glycine max
  unsure (1)..(278): unsure at all n locations
actcagcttgccttacttttctacactgcttagctctcttctattantcactcctttacacattagaaagagatgttgaacaaaaaagctgctggctctgaagtataagacttcgccattttctcatcattcaaatatgcttttgacgagcgaaacaagagcattccgactctgaattaacatttaaacattcgtcgcgcttaggtgaaaccgcggtctatcacagacaaatcacgatcccaaacacttgaaaaacattgatgatgtcgcttatatta

SEQ ID NO: 139460 - DNA, 420 bp, Glycine max
tgcaagctcaccaccttgaggacaaggtgctatttttatgggaggggagtgttacgagtaatggagaatggttgcaggaagtaaatgggcagcaacgtgaagagaggcccaagaagaaaacaaaagctccaacgtacatggaggattatgtgcgaatcgggtagagctttgcatggagtgggaagcagataatcacttctgttagagagtgtagaatattctagaatcagttagaatatgcttgtacacaactaattccgttagatctcactctcatgaggtataaaagcttgtaaagaataagcaaaatataatttcctctttttctctccttcttctctctattacggaggcatcatggtccctcgagtccaagtcatacaatttggatcctatccgagaagacaaaagaccttttct

SEQ ID NO: 139461 - DNA, 363 bp, Glycine max
tttttgataataaatcttatattatcgttaatgtagtctctagaacatttccattggatttaatgatgaaatctgcgcattttcacgtgaaaaagatgcttatttttgaattgcaaaatgtatcagtggggcttatatcaacatttgggctaagcgcatatccaccgctaagcgcagattcagcgcgcttagtgcaaatgagaatctggcagagcatcagcatcaaatgagaatctcccttgcatttgttttcgtcatcttcgccacaggaagcccgaaagtctgcatagttttccttaatagcatgcattggacaccatgggtatgactgttaatgagccatgatacccaatgcattgtggg

SEQ ID NO: 139462 - DNA, 404 bp, Glycine max
caaacattcatcatttccatctgttaggaattatcatatacaaatatagcaaaatttaacatctaccgcattcttttccagttatggcattggattctttacttagtaatgtccattgatttttcttataataacaaatatacttgtgttacaaagtcatcactgaagtttgagctattatttgagtaatacacaccaaattaatcgattcaattacaagcattaatcaatttagtcccgaagattaagggagcgtttgacggggaaaattttttttgttcccaaaaatcatatgatgggaaatttagtttcctaatattaattttttaaaaataacatttctagctaatgatatttttcaggaatattttttaatcagagattctcacgaaaactgtttcatg

SEQ ID NO: 139463 - DNA, 378 bp, Glycine max
  unsure (1)..(378): unsure at all n locations
agcnttgagccaaaatcctgactcaccatattctttgacccagggtgagaatgccaatccttaccctcggaagcaaaaaaaagaaaagaaggaaaattccccaatcaaagagtgggagaaagcaaaaagaaaagaaaggaaaattcccaatcaaagaatgggagaaagttaaaaaggaagaagaagaaggaaagaaagctcctgatcaaggatcgaaagaaaccataagaaatgtgcagagaggtctttggaccatacaatatctgaacagtacataattgtcaccaaatgaactaaaaaagaaggaaagggaaccacgacctaaaatattcttctccctttgattaccaaccaaaatcccgtgcgctagcgactttt

SEQ ID NO: 139464 - DNA, 403 bp, Glycine max
agcttattcttctgcgagcttcctttgttctccatggcttccgctcctttcaattctatttcacaatcatttcccaattcagttgcagagaaacttaattagtccaattatctgcactggcgttaacatgtagatccagtgatcaaatcacacaagttgcagcgatttatggttaatcccgtcgttcctccacattacctcatcgaagacgatcgcatcactgatcgagttaatccaaaatatgaaacctgtgaggttcaagaccaaacgcttcttgtttggctataatctacactttcaaagtccgtattgtcgagagttcttggttctaatcacttatatcaaagttgggaaaaaaatccatgagtatatttacctccacaacaaatctcgtgcgtgacaa

SEQ ID NO: 139465 - DNA, 263 bp, Glycine max
ccacccccaaatataagaggaaatcaaatcgatgtaacacatacaacaatacaacatatatgcacactcatattattaatccctcgaatctgccatgtggagcagtacaatagaaccctagtgccggagcacttcgctttcagaaccaacaaggacgacaaaaccgcaggcgaaatcatcaaacaaaaacacaaagaccccgtgaaaaaaagctccgagtggctgaaagaaacctccaacatctgctccgtcaacgccgccct

SEQ ID NO: 139466 - DNA, 360 bp, Glycine max
cttttacatgcgcaaatcttttgcgtggcatttgtataggttatcaacttgactgatgcatcttagtacatttcatatctattttgcatgtggaagcaaagctaccatgatggtaatcgattacaccattatggtaatcgattaccaatgaatgtttttgaagaaaatgttaagagttatagctcttaacatggttttcttaaaaggtatcaaggttctataaatataagaccttggcacgcattttaaattttcaataacacagaaaaacacatttgattacacagaacttttcactgcttttctcttgcaataaacttgccaaagtcattctaagatttctttcaatctttcctgaag

SEQ ID NO: 139467 - DNA, 261 bp, Glycine max
ctcaatacgcaagcatgtcatagtgcgtggacaattgtgatagccatgttgcatacatgcgctaatcatcgcagtggcaccaaataatctatatcttaccgcaccaattccagaatcaataaagatggacgaggcgcaacaatctatagcacatagtgattaaaaataaaaaaacacgtggcattgtccatcaataaatatacgaaataaataaactattcctgataaattaatattcaacaatatataactgtaatatta

SEQ ID NO: 139468 - DNA, 349 bp, Glycine max
  unsure (1)..(349): unsure at all n locations
tagaatgaagcttgacaggttcaggtgcatgtgatgctattggtggaggcacttgaatttggttgccagacctcaaggtgatgacactcacatttttcggattctacacaatttgtgaaggcaatttgtcagaattttgggtctgagcttggttcatttgagtagccatctgccctatctaatttgttaaactctgaatggaggcttttgtctcttgttgaaattgtatattctggatggtcatttgcctcattaactcttctaaggaaggttgaggaggagcctcagntgcttgttgtctttgttgtgatagctactgttggtgttgttgtataggaggaggaacata

SEQ ID NO: 139469 - DNA, 350 bp, Glycine max
  unsure (1)..(350): unsure at all n locations
gaatcaagccaaggctattgtgcacgcaatcaatggggcaaaacacaccaaatgattataatgatggatggctcaaantctcacaaaggtaaaatcatcactttcaaattgagctttcaaaactatcatgacatgtagagaagaatcaaggatttcaagtcacaaaatgtcaagaacttttattttcaaaacaattacccatttcttgaacatatcctataattcaaagaaaaacatgcaaagtcgtacgtgcacacgaaattgacccaaaatattaaactgaaaatccgacgaaactaacaacattaacaaattaacacaactaacaaattaacaaaaccaactaaact

SEQ ID NO: 139470 - DNA, 335 bp, Glycine max
gctgatataaatggaatagttcttgtggagaaaaacttctacggatgtcagcttctgctcatcaaatagtcttaacttttttttataagtgcaacatataatttagcattttcttgctggtggcgatattattggtctttttttttcacgttatatagattgcaacggatatttatgcttaaaaacacttgaattttctccggtgcatatcagcttgggtgatgatccaacaacatttctatgttgtcgaatggccaaggatggccccgttgcaatccaaataagcttggactctgccatcatccttgtcaacactgcatttttattatcattag

SEQ ID NO: 139471 - DNA, 387 bp, Glycine max
ctgcagcttaaatttggctgagagaacttttctttttactgtggtttaagttactttccttgatatctgtcttatgcctaactccaattaattgtgcctgagtgcaccactcctgcggctgagcgcgaggaagaatctggaagaaggatgagctggacacacgcgctaagcaagggctcatcctgctaagcgcaccgcttgcatgcatcctctaagtgagaagacgcgcactaagccgaaattcacttatgtgtgctaagcgagccagagttgcgctaagcacgcaagcaccaaagaggccacctatttaagcctgaaatcataaatggagaggggatgttgggcttctccttgagcttttgcatttttagatatatctagagagag

SEQ ID NO: 139472 - DNA, 278 bp, Glycine max
cctcctactaacataaaactaccaatttacattttccgatgaaaaaataattaatggcaaccacaccgattgctttgatctcgggtccatattatatgagtgaaaatagatcctcttttattttacaaactttagagacgaattggtgacgagataaactaatggagttggtcaatattgaccaagctgggctctagtattatcattcatcatattcccaaagtattcatccaataattattaatgaaatggcctgagccggataccggcaaagaatt

SEQ ID NO: 139473 - DNA, 414 bp, Glycine max
  unsure (1)..(414): unsure at all n locations
gcttgaaactctgaataatantatttattttttgnaagnnagagaagaagaacacatcctatagtagcagagcaaggaagcatgaatagtaaatgcaacaagcaaaaaattaatgctaaaggacaaataaattctggatgaagcaaaagctacccgaggttacttcatacccaacttggattttgtgtcagctaaatcgatcttgctttatagcaaccaaacatcccaaatttggatcaaaagtggcttgaccaggatgaatgcaatacccgctgcaagttgtaaatcgccttttctctgattggctgttgtggcaaactctaaatctaatcatgcactttggctgctattgccacatgcaaaaatattcgagtgagtaattggactccagcgttacatttacattgggacact

SEQ ID NO: 139474 - DNA, 360 bp, Glycine max
acttttttctttttctaggccaggcaccgggaacagatcatgtagttgccctacacaccctcctgaacgaagatttataggtttcacttaatcatgacacagatatagctggcccataaatatttgcattcttaacatctccaaccagttgggttcggggttttagactatcattttgttctggcaaaacaatacttgttttgaaataaaaaatacgatcaaatgtttaattcgccgaaagatcctgacttgctcgtgcgtacaagttgatcgaccccacaggatcaatcccctggttggaacaaaacccgagctctacgaaaacttaggaactgattttacaaacgcgtaagtggcaaa

SEQ ID NO: 139475 - DNA, 316 bp, Glycine max
cttgagcgatcccctccttcctttctcttaacagaatagaaacaatgtggtatatatttggtttcatttagctcctggtttaccaaaaaaagaatgaatttgataacaaaattactggtttgcacttctagctacaatttttactttcattcagacctccaactctgtttagttattttgaacttttatcacttttttatttaggcaatttgcggggctaatgctcctttcctctctaaataacagatcttattctaacatcggaaaattattaccatgtggaaaaaagattaccttgaaggatctataatactgt

SEQ ID NO: 139476 - DNA, 385 bp, Glycine max
  unsure (1)..(385): unsure at all n locations
tgttaatnaacacaggagaaagaaactggtaaagcatgatgaatttcccgttggcacatagaatcatatcagatatataaacatttgcattaactgagttgagttatttcacacaagaaacttttttgagaatttcctactctaatgtttcggaaccagttaatcattctgttcaactatgtgaaaatatctcaactcatttcttctagaatttcattagccgcctcaaaaagaggtgtgggagcttttaagcttggtgattttatctctgctacgatttctcttntgttataggatcagcagtcaaactgaacttctcattcttttcattcttaaaaattttcctattattgagaaaaatttatcccgacattcaattcaagcc

SEQ ID NO: 139477 - DNA, 411 bp, Glycine max
cctgcggcatgcagcttacttctacatagcgtcaagatttttgtgtccatggacactcacctgggtcaagatggcatataccaactggctctctccgtaggggaggtcggaattatgattgatggggaggatgtctctgaaccataatgtcatccatatcattgtcacggtggtcatgcttgtgctcatgatccatgcccgttttccctccacgcttttggcaaagttctgcccttgaacacaatatcacttactgatggcctccttctcgaaccctgaggtctattctctctttgactgaatgcggtgcgtctgccctcatccaacaccaatgtatgccccatgaacatttatatcgcattcatcatcaacgggatccattggcgtcctccccaacagtgctagcttctg

SEQ ID NO: 139478 - DNA, 367 bp, Glycine max
tgatgataacaaagatgatgacaaaaagcccaagagaatgatttcaagattgagtcaagaacaattcaagaatcaagagaaatttgatttcaagattcaagaaaagatgaattcaagattcacgagaagaaatcaataagacttcacaagggaagtattgaaaagatttttcaaatttcaaaaaacaaacatagcacagttttgtttttcaaaagaagttttcacaaaattttctaagttaccagagtttttactctctggtaatcgattaccagattcctgtaatcgattaccagtgacaaagtttgttttcaaaagctttcaactgaatttacaacgttccaattaatttcaaaatggtgtaatc

SEQ ID NO: 139479 - DNA, 268 bp, Glycine max
ggaagtagaaccaaagccgacagcacccgacacaagggaagaaaaaagaccccggaggagggataaagacgagaacgcaagcaagcaagagaaccccacggacacagcgaagacacgagaacaccaaagcacagcgaaggcgaatctgcaccatagccaagagaagattacgataggaagcacgagacaagaccgtatagaaaccatagccatcaaacagagtcaaaagaaagacaagccgtggacaggagagaaaaaaaggggcaag

SEQ ID NO: 139480 - DNA, 254 bp, Glycine max
attcagcccataatgctgtgatcaaatcgaggccatatccatttgcccacaaagctcatacaattagattttgtttatcctaaaccccttcagacttggaggctatatcatccttttaccacgaaattctgtaatcctattcccctccccccataaaaattacttgcatgctctcatcatgagctgcctttgaggaatttgaaaagataacaggtaattggaaacattatgacagattatttaagacctacctg

SEQ ID NO: 139481 - DNA, 419 bp, Glycine max
gcaagcttgccctaacctgtggaatgagtcatgatttagccaaaacaactccctctagtgcagttgtaaagaaagaaagatacccacatataaaacatatcctcctaagaaagcaccagagtaataatgaaataacctaccatagcgaagggaaccatgaaatgattttaccagccttgggtgcatgaatattgatgttaaaagctctgatgacctgaaactcactcaaagaggatctctaacagcttgaagtaagataaccggcccacaagcaaaatatgagcaaacataaggatcattgcttgctgctatgagacaaaaagattatgaaagcaggcttgattgtggcaacttaagatcgcccaaaccacaaagatgaaactagcaagaacaacatctctagcttgcaggtgaacaac

SEQ ID NO: 139482 - DNA, 432 bp, Glycine max
  unsure (1)..(432): unsure at all n locations
gacccccagagtngagcaggaggccctgcaagcttgcaagttgaccataatatgactttttatttctatatacgttactcattaattcgttatatatatatatataatatcggtgtaactttaataattatattattcttataatctaatataacatataatttttattaattcaactattaaattatatttacatattatttagattgcttgtgtcaaacattatttttcttcaactatatataaatgtatttagtggttcagttataaactcatgtcataaggaagcatcgaaatgtggacaagctgcttgagaactataaatttctcattgatgtacaatcctttcaacctatcctttcccaggtaatgtgactttctttttcttttccttatatgtagaacaattctaaccctcctgcaactcactta

SEQ ID NO: 139483 - DNA, 115 bp, Glycine max
gcagcttctccttgggacaaacacttttgtttttggtttgcccgagcgttcacatgccacccactacgccaccgcacgtcatgaacatggtccctacgcagcataactggacagt

SEQ ID NO: 139484 - DNA, 420 bp, Glycine max
catgcaagcttgagtccggtgatgctgcccttattatttcctcggaactcggacgaccccatcttctttaggccctcttcgcttctcgctctaatgcttcttcggctatggctacgtaaacgtctttcaactcgcatactcttttctgaccctaatgggtgttttcttgaacttttccttgaccactcgtgttcttttcagtttcactttcaaggctggcacttcttcacttttctcagggacttcagcctcttccccacttgaactctttagcttcgagagccaagttatcccttgcattcaagccttcaaccattgatgatattcaccaataactccggtgctgcttcctctaagctccttatccttcctttgaccgcattccttgcttatcggactctttgaagcatctctgcattg

SEQ ID NO: 139485 - DNA, 274 bp, Glycine max
gcaacccaccagcggagaaaaacaagagcaagccgtcgccacgcacacacaaaagccaaccaaggcacccgagaaagcacaaccgggcagcccaaacaccgcagagccagaacgagaggcccccggaaagggaggacgagccgcagagcacaaggggggcaccccaccgcctagcccaccgaacaacaacagagcgccacccgcaacaaccccacccacgaaaaagagcgctaggcctcaacaagagcacccaaaacacgggaacacaaccaag

SEQ ID NO: 139486 - DNA, 419 bp, Glycine max
  unsure (1)..(419): unsure at all n locations
agcttaattgcttacggcagnnntgttttctttatcggatctcttaactgctcagggctagcttcactacacataaaatacatgatttttgtaaagcgggatcagatcttggcttagtgaaagttgcaggttttctgatctgcagatctcgctaagcggtagtattaactcgctaagctaagtatgtgtgtgcaaaaaaaaaaaaacccatacgactctcccgcttagcgaagcgttcgctaagcgggagcgtcgaaaaagcattggttaagtgtaacttcaacacaatgacaagtgctgagtgtagggacagctggagaattctgcataaaccatttcatctctttctccctctctcatctaattcagcatctgcattgggtcaactgtatcagcgattcaagtaaggtcctcatgat

SEQ ID NO: 139487 - DNA, 264 bp, Glycine max
aaataataataacaacgcagcacaacactactttagatccaaaacaggcgatcatactcacgaccgaggcaaaaaaaaagaagctctcaaatacaccagcacagggagggaaggaaacaatcaacagcttcgacaccaagaaacgcgaggctacgacatcagaaacttcactgtataaagaaaccaagcaacaaactatgatcaaataaacaagaaaaaacattcatatgaactgaataatgaaaaaagtgattatacaaaaac

SEQ ID NO: 139488 - DNA, 178 bp, Glycine max
gcgctatgaaaccaaccgcactacgacaagtgctaagagtcctcaatgtctaagcaaaaaggtcggacacagaaaacactggccgaccggaaagataggcgacccccagaaacacctcgagagcatagacaaggccaaactctgggcaggcacccgcaggaagccggagaaagaaccc

SEQ ID NO: 139489 - DNA, 380 bp, Glycine max
  unsure (1)..(380): unsure at all n locations
agctctctattccaaggttcatctgggtgttgttcttccttcttccatggctaattccctagtggatggcgcctnctctcacctcttctcctttgtctttcgctgcatctccatggtggaaaatcaccattaagggacctcattgaaactcaaagatccagccttcatagaagccccacaagcaagcttgcatcatcccgtttcagattctatacaacgattaatacagaaagtttgcattaatcggtgtattgaatcttgaattgtccgtttggacagtttgngaagactaatttttaatagtagattattatgtatagggttaattttctttcttaaaattggcaacatttcnggatagttcatctccttttgttctt

SEQ ID NO: 139490 - DNA, 385 bp, Glycine max
atgcatgtgaattaggaagcatcaacaagaatcaagccaaggctattgtgcaagcaatcaatggggcaaaacacaccaaaaaattatgatgatggatgactcgaattctcacaaaggtaaacttatcactttcaaattgagctttcaaaactatcatgacatgtaaaggaaaagcaaggatttcaagtcacaaaatgtcaacaaacttttattttcagaacaattacccattacttgaacatatcctataattcaaagacaaacatgcaaatttaacacaacaaaactaagaaaattaaactaatttaacacgactaacaaaaccaaaaccaaagaacacattcccccccccccccaatacttaaacaacacattgtcctcaatg

SEQ ID NO: 139491 - DNA, 424 bp, Glycine max
agcttgtaattcgtgttaagggaggtgaatatttatacgcagataaccactttctctctttttctctctttctctctctctctctctctctctctctctgagggaggacccttgggcctcgaataccaagcatagcagtttcctacctagtaggaagttttcgtgcatttctttcgtgtttctcttgcctgtatcaacatgaaaattgaggacgtagaagataaggagttagtttttgcaaatgatgttgttactaagatgcgcttgaattatcctttgtgtctagagggaaggtttctcacaaataaaacaatttgagtccatatcatgaaggagcaaatgatagatcgaggtttagagcccggtggaaggtatctcaatcatggaggcaagtaatggagtggtcatcttccactttcaccac

SEQ ID NO: 139492 - DNA, 390 bp, Glycine max
ctcagcagcaatatcaaccacaacagaacaattatgacctctccagcaacagatacaaccctggatggaggaatcaccctaacctcagatggtccagccctcagcaacaacaacagcagcctgctccttccttccaaaatactgttggcccaagcataccatacattactccaccaatccaacatcagcaacaaccccagaaacagccaacagttgaggcccatccacaaccttccctcgaagaacttgtgaggcaaatgactatgcaaaacatgcagtttcaacaagagaccagagcctccattcagagcttaaccaatcagatgggacaagtggctacccaattgaatcaacaacagtcccttgattctgacaagctaccttgtcaag

SEQ ID NO: 139493 - DNA, 418 bp, Glycine max
  unsure (1)..(418): unsure at all n locations
agctntntaaaaatgatgaagagtttattatttttaattgaacatgagtttaaaaggaaagctcttaataagagcgtccacacaaaaataaatagattttcacaaaaactcctataaaaacttgtgcgtccaaagataagattgaagtagctaaaaataaacaaattataacataagatggagcaaaaacactatgtttatactggttcactcaatctgagctacgtccagttctcttttacaaacagtaaaaggttctactaatctcaattgattacaaacgattttttactctatcactcttggctacaacaattattctttatgttgctcttggcttacccttaatctctcttgagattaagaacatccaagaattctttgatcactaagcctctcctagctttccaaacaacaa

SEQ ID NO: 139494 - DNA, 415 bp, Glycine max
agctttggcagttcaaatttgagattcttatgcgatgtgctgtaacttgaaattgcttagtgccggcaattcttgggacaccctttacgtgaatggtaagtgaagttaacctcaccacaattatcttatcatgcaagtgttaacagctgtgttttttaagaacaaaggtttaacatgatttttgcgcttcacatttacaggtataagttatggtttaccttctctttttttttatatacatttgggagggttaacttcatctttaattgaattaagatgaggtacctctgtcacgaggtgattaggtttaaatttgttactaagttaagttgattagctgtttacgttaaggataataacacgctactttacttcttgaaagataaatgtgtgatcagttctacttttaaataat

SEQ ID NO: 139495 - DNA, 403 bp, Glycine max
tctatggaggcttgatctttggtcttcaatgaggtttttaatggtgattttccaccatggagatgcagcggaagacaaaggagaagaggcgagaggaggcgccatccattatggaataagccatggaagaaggagcttcaccaccaagatgatccttggataagaagcttggagaggatgcttcaatggaggaaaagaaagagggagggaaagagagaggggggagcacaaaattgaaggaataaaagagggagagaagtggaactttgaagtatgtctaacaagactctcattcatcaaagttacaacaagtgttacacatgaatctatttatagactacgtagcttccttgagaagctttcttgagacaaacttcttgaggagcttctttgagaaaacttc

SEQ ID NO: 139496 - DNA, 412 bp, Glycine max
agcttcagaaaggcttttatggacttatttcttcaccaaagcaatggtgtaggacttagccacttccttcttgaacaaaatttcgagagaggacaagttgataaaatgttttccattaagaagtcctctcataacactctactcatgcaagtttatgtggatgacataatttttggttgcactaacaaatctctttgtcaagattttgtgcacaagatataaggagagtttgaaatctcaatgatgggaaagctaaattactttcttggtctttaagtgaaacaaatggaccgtggaacatttctccatcaagcaaatactgcaagtaacctctcaagaagtttgagatggaaaaaaaaaagcaaggaggctgcaactcctatggttactagttgttaccttagtgtggatg

SEQ ID NO: 139497 - DNA, 385 bp, Glycine max
caaatcatacaatcgctcattcaaatcattctcaaacactcatttcatacaaaataatccactgtatatcattttcaaccaattcactgttgaaacatgctttttgtacaagcaaacaactcaaagtagtgaaatttaaagaactgaaacatagaactgaaatttaaatgactaaacataaatcataaaataactgaaataaactaaaatgttcaaaatgcacaaatttaaatgtcctactcctgtggttgctcctgtgcatgctcattaagatccaacacctgagcagctagtgaatcgtgagagataggctgctctaactcagatgctattgcagatggtatggcatcattacgtatgggtgctggggatggctttgggatcc

SEQ ID NO: 139498 - DNA, 322 bp, Glycine max
actccatctcattaaagcgcatgcccacttggaattccaaagacgtcaaacctttcaccaacaaaggtgtacagaccatctaaccagtccaaaatcttagaaagaagagacgaatcttctccatcatgtccttcttaaccaacaagactagcaccctttatcacccaagagccatcatgctcttcttgataaccaaaggatgcaatgactaaagctcctattaggaaggatctcttgactggaacgcaaggttcacaatcaagagggatgctaaagtgttgaaggaccagaatgactagatgggatatggcaatgggcattc

SEQ ID NO: 139499 - DNA, 422 bp, Glycine max
  unsure (1)..(422): unsure at all n locations
cagcatgcaagctttatgtgaaaggatgngactctttcatttgaatttgaatttcaacgttcaaaggcactagtaatcgattaccaaaacattgtgatcgattacagctttatgaaattaattggaacgttgtaaattcaatttgaaaactttttcaaaagaattttgctacgggtaatcgattacaacaatctggtgatcgattaccagagagtaaaaactctttggtaaacatgttttgtgaaaaatccatgtgctactcagtttttgaaaaatcattttcatacttatcttgattaagtcttctcttaattcttgaatcttgaatcttgaatcttgatcttgattctagaagcttgatccttgaatctagattcttgaattcatccttcttcttgaatctagaagtgtcttcaactttt

SEQ ID NO: 139500 - DNA, 184 bp, Glycine max
tgacgcctaccggcagcactttttctaattctgcggcatcgcgggcaattaactcaaacaggtgctgagtcagcggcacaatcatcttttgcgattcggcaaagttaatgaaggcatccgggggaatttctcccgcgacaggatgccgccagcgtaacaatacttccaggcccgttactcacaa

SEQ ID NO: 139501 - DNA, 424 bp, Glycine max
  unsure (1)..(424): unsure at all n locations
agcttgcttctacanagacattgtcgtctttttacttagacattgaagtctttgaaatgtaaatgaagacattgtcatcttttgtaatgtaaatgaagaaattgaagtcttttgaaacataaatgaatacatcgtcatcttttgacaaaagacatggaaatgcaaaaaagacgttgatagtcttgacaaaagactctgatagtctttgatatgtaaaaaagactttgataatcttggcaaaagactctgatagtctttgatatgtaaaaaaaactttgatatgtaaagtgtaaaagcaaggcttcatggtgaatgtgattcataggtgttttgatgataacaatgatgacaacaaaagatgatgacacaggtgatgatcaataagctcaaatatcacagaacaactcaagtgaatcaaagaaca

SEQ ID NO: 139502 - DNA, 440 bp, Glycine max
  unsure (1)..(440): unsure at all n locations
aagtcgccagangcctgcagctagccaagaaggttgggcncggcagatattttcaangnnnnnnnnacaaacaccatgcgacaatattttttttcctaatgatgtttcaataagagaaaacttaggattgtcttgaaaacaggtataaaaagaaaggaactcaaccctaaccgcgatctgccggtagagcgaacactatcgagttcttaaccataaaacaaaggaaaagttctcacaatagagaaactctcaactttcattagtcttcaaactctgtttttggagagtacaagagttccctatttataggctaatcttgaattgctagaataattctgactaacatgcatttactgcatgcattgataaatgcatgcccactacctangaaaatgagaataaacatgaaaattaattcccgctagccactaaatgactta

SEQ ID NO: 139503 - DNA, 384 bp, Glycine max
agcttaggagtttagtgctagtgggagtttttatgttggaaactatcttctctcctactgtcgttgaatgcctagcagagttgagagaactggttgtacgatagtgtgaaaagttggagcatatcatttattcagatcatacagagcaagttggaaatgaatctgcttgttgcaaatcagcgtgcttccatctactgtatgtggttcacgtcttctagtgtaagaattggaaatgccttttctctcattcattgatttctcaatttcccaaggtagaagatattacagtagaggagtgttcttcaatagaacatgttttctatttcaatgaagatgatggacgtcaagaattagacgattggtgatctacacgacccaatctaa

SEQ ID NO: 139504 - DNA, 367 bp, Glycine max
  unsure (1)..(367): unsure at all n locations
cttagagtcacctgcacgctgcaagctntcatagaggaagttaggcgcaaccttctctttaatagtccnctcacgaggcggagattgacccatgttctcagtatgaaaatcatcaaccgcatgctcaaaatcacaatgttcagaatcaccatcaacagaatgcttggaatgctcaaaatgcacagaatgcacagattgattaggatgcgcactatgcctaactaatctatgagaggttctatctatttcgtatcacagggttgtaaatcacctagattgcccctagtcatgcactagatgcaacaaaccatgtatttctcaaacaagcaccacgggtcaaaagggggttaaactatgggtaaaacta

SEQ ID NO: 139505 - DNA, 417 bp, Glycine max
gcttaacaaggatgtctctcttattgtattgtcatcagaactccacgattcaatggcgcagacctagcaaacctcatgaatcaagccaccattcttgccgggtgaaaggggctataataaaatcacaatggaagaagttgatgactccgtaattcgcatggaaagaaccaagatgatgataaaaagcaatcttttatccactgcaaattaacttaaaaagactactaaaagctataaaagacgaaagagaataagataaaacttgagatatttcattcatttgattgatggcaaaagcaaaattctggtgccttaacatggttcataccaagtgaagatccatctctcatctctaagaaccaactacttgctagaatagttggaggcttatgggaaagagcaaagaggaagtcatat

SEQ ID NO: 139506 - DNA, 421 bp, Glycine max
  unsure (1)..(421): unsure at all n locations
agctngacgcagtacgcagaagtttaattattttgagctctcaaagtcgcatctctcaggaactgctctcaaagcaaagaagggacctttggaaagaagtggaacctccaaagatacagttttagaagaaggtgcacttatggatgcccatcatcatactcccgttaatgcattctactgatataaatctctcacaagaagatcgctcatcccttggcaagttacattagcagatgtacatgtgagatcaagccacaatgtacccttctagtctacacatctcaagggaaactgacattaagattgttgctgattgagtttgtctgcatctaccagtgtaggatgtttccaagaaaactagatttgagttgtattacaaagaaaaaatgcctactaggaaaatgaaggtggagattgtgaa

SEQ ID NO: 139507 - DNA, 372 bp, Glycine max
  unsure (1)..(372): unsure at all n locations
agcnagaactatagagaggaccgntttttactctctctcaaacagaataactcgcggacatgcaatcaacaaaaacttcctcaggaaactgaatacaatatgaataacggaagtacatgggtcgtntaacgctcgcacaaccctaaacattaggccatgtgcttcagagtaacaaacgaagaaataaccacactgtgggactggatatattgcaccggacaattgctaatgaggatcaaaatttaagatcaaaagaatggataactaagcttaacgtacgggaaaattgagtatgaaatttggtcaaacagatatattaataagaaaagaaacactacatcgaaaaaaaataacaaagaagacgcacaagaa

SEQ ID NO: 139508 - DNA, 413 bp, Glycine max
  unsure (1)..(413): unsure at all n locations
agcnngccacccagctcgcccaggtgtgttatttttcctagaaagcccaagcgcgcttggttattatttgcaccccccatttactaaatacaccacttcctttttgtgctgattcttttttcgtaacgttatgaaactttacgaattttgtaacgatacttgttttcttcccgtaatgtcacggaaccttatgtattatgtattcatccctttttgggcttacggaaagttacgaaacctcacgaattgtgcaacaatgcttccttttgacttccggcatgttacagaactacacggattgagcaacaatgctttcttgtgacttccggcatgtcacggaacttcatagattgtgcacaatgatttctttagacttccggcatgtcacagaacttcacggattgggcaacaat

SEQ ID NO: 139509 - DNA, 375 bp, Glycine max
gcttacacatgcatacttgatatctagtgacagggacaggatccgtttaatcaacattctaatatcgagccaaatccaagacagagacaaatcaaggtaagcggtaacgcggccacgatttgctacgcactatcatttcctgctttcatgtacttggggacgggcacgagtagaggctaggcccatgatcaacagatcgccgtcccacgtgcatctccggacaagcaagaagtgctactgagaggcagcctagtatcctttaaattcctacttattattgccgctgttcctttaacgggatggtcggatgcctaatttaccctcaggacttcgagtaagtaaacgccaacccctaaagagtgccgaccttcattg

SEQ ID NO: 139510 - DNA, 233 bp, Glycine max
agagggaaacgtaccacgttttgttgtcaggccggatcgggtgtctgtcgagctagtctcatcatccttgacctgtggactttatgagctacggcccaccgaaggcccccctatatttatctttggcacagtagcgagttaataaccatacgattatttcggaagccccagcatatgactccacttcattatattaaacgcagtgataaagcctactctaaacaaactgttta

SEQ ID NO: 139511 - DNA, 424 bp, Glycine max
  unsure (1)..(424): unsure at all n locations
agcttgagttagtgactgttcactttgattactttgtctatnactctcattttaatctcaactgcactatggggaaaacattagtaataacaaaagaaacatcctatctatatggaagattacaggagataagcttgaggcgagagttaaacaagagcagtctttggccaaatgaaacttatttctaagaatcctagagtcatgaaacctcttcactatctcctagtaaatcttggagttctcatagcttctaagcggatctcctcaagttcttgcaattggatctttcattctatacccacttcatcaaatgctatgttacaacccttcaccccccaataagcacggtgctcaatctccacaagaaggtggcatgatttaccaaaaaccacgctatatggagacattcccaaaggtgttcaat

SEQ ID NO: 139512 - DNA, 434 bp, Glycine max
  unsure (1)..(434): unsure at all n locations
ggatcttaagtcaccgcggctgcaacttgttggtcagagaaatatattttttatcatcaaanaggggtttgattgtgtcaacaaaaaatcacatgtttgtcatcatcaaaaagggggagaatgtgaatgtatgtatacatgattttgatgatgccaaagaagaatcaaacaaggctgctgcaaatgattaacatttgcttcaagaataattcaagagtgcttcaacaaacaaagccttgtttcaagattcactaaagaccacagtcttgccttaaaacaaagtgctttcaagacattcaagactctggtaattgattaccaggcagtgtaatcgattaccagaagatagggttgagaaatagctgttgaaaaaggttttgaatctgaattttcaacatgtaatcgattaccatatgtctgttatcgattacctg

SEQ ID NO: 139513 - DNA, 359 bp, Glycine max
acacgcttgtggttttttttatcactagaatctcaatagtgcgagcagctttgctaatgataatcatgtctcctttgaaggtcacgctaatagtgctttcttacatctcatgactccaatataatacttcatcattgagatgtcggacctgatggctcgcacaccctctttaatctttaggtctgctctattgtgtcttgtgcagctgtacctctcgttaaaacctgttcccttgcccattgtttaatacgatgcctattctggtatacttggcaccttatactatgccacgctaactttcagctgtagaacctgtgcttaattgctgcatctccacatttcaattaaggagaacttcc

SEQ ID NO: 139514 - DNA, 368 bp, Glycine max
  unsure (1)..(368): unsure at all n locations
tgcaagctntgaaagtgcgtagcccaccattttccattanttatatactgcgaaagcgcctactatcattgtcctcgtttttttgtcattgaggagccactttgagctgtcaggttctccacctttgggcgtattctttgaaagatttgtgccccctttttgcacatgtgctgtagttgcatcctatccgaagacattatactgacactgcctaacgaaggaaaccactaggtccttccaagaatggactcgggaaggttccaagtttagtgaccatgtaacagctacccagtaagactttcttggaaggagtgtttcaataattcctttatttttgcgcatgtcctcattttttcgatatacatctt

SEQ ID NO: 139515 - DNA, 443 bp, Glycine max
ggatccttaagtcaccgcggctgcagctgctcatataagtaataaatattctttacacttctttggcccacaaaaaagcagacataaactatcttttcgtagaatactgtccttaattgctcatcccgatcatttaagaaagcacgaaggatatgtaagagagagtcattactctgtctcacaccaaagaagcaacacagtttaccaatatcctgaagaagtgctctccttatatttggggtttgcttaggacccataacaagttcttggacaacctctgcaatggatttcctcagctgcagaagttgggcatcgccatttatcctcttcatccttccagaagtctgagtggatgatgtcaatggtttctgtggcaaactcaattcatcaaggacacctgcctcactcaagcttattgagcgtatcacgaatccataagcagt

SEQ ID NO: 139516 - DNA, 432 bp, Glycine max
cttaagcgacgcagctgcaagctgccttgccgcaccactcttttgttttatgggaatttaaacgctattaattatttcatatgtatatggtgattctaatgcaattaatgtgcctatgcatgctaccgtttttatttaattatttttcgtatatatgtctacaattataaacagtcgtcgtatttaagaacgttatacgttgcatctaagaacgttataaatagtcatatgtctatggtagatttatagtagtattagaattcctacctggccactttatggtgttagtgaaactttttttatagggcaacagcaaattctgaagcaacacaaaacaccccaaatatttacaagcaactatggcttcaagcaatggccgataagcatctgagatcttccaaggacaggctatcctatcccgatgcatgtttg

SEQ ID NO: 139517 - DNA, 409 bp, Glycine max
  unsure (1)..(409): unsure at all n locations
agctnttcctcattctctagagggtgtgttttaagattggctgtactaccttgctcccaggtctattttcaactgggatgaccctaagagggtgttcttggaaaaattcttccctacatctaggaccactaccatcaaaaaaaacatattacgcatcaagcaacttagtggagaaagcttgtatgagtattgggacagattcaagatattgtgtgcaagctgccctcaccactagatttctgagcaactccttctatatttctatgatggacttatcaacatggagcggagtatgattgatgctgccactggtggagctcttggtgatatgacccctgctgaagctaggaatctgattgataatatggctttccactcccaacaattcaccgtttgaaataacgctatt

SEQ ID NO: 139518 - DNA, 341 bp, Glycine max
ttctcttttgttattgaggaactatcgctcgctatcactggataattggtgttcgcgcaataggattttgttgctccacatctgttgtacacagggtttaagctttgataattaaacaggtgtggagccatggcaaacaacaacaatccgctggtgtttatggatgtgcccatagatggcgatcctgtcgaaaggatgcgctctgacgtactttcttttactcttacgaatcgccggttttaatgacgtatgaagcactgtctgcagcatttgatctcatctaatccctcggcgttattccctctcagctgtactatgataatgctccaaagactgcacaa

SEQ ID NO: 139519 - DNA, 304 bp, Glycine max
aaaggaagaaaagaagaagaagaacgaaaggacgacaaaaaggccaccgcagaagccagggaacgagaaaccaagaaagccccaaaggaagaacacgaccaaaacaagctctgaggggcgccatagggcagcaaaagagagcgcaaaccctgaagaggggaagggaagcaacaggggacaaaggcatgacgcggaaagacgaacagaaggccggccaaaggggaagagaaagagccccacaaaaaaaggaaaagaagggaaatgggggccacacacgagagagcaagagaagcaagaacagcgg

SEQ ID NO: 139520 - DNA, 315 bp, Glycine max
agcatcaagctgctcgattgctctatgttgctcatggaagggcaaaggtctgtatggtggtcatcatatgagcacaaaccacaaacccttgcaacaggtactgatttctgatttaaagtcatctgggttaccaagttaaccaatgcatccatattgccttcaagcttcttaatctcataagatgcagctgagttagtagctacctcatgcactcctctaatgactatggcatcatttttggcgctaaactgctgagagatggaggccatcttctcaattaaattctggcttaacaagaatcattttccataggct

SEQ ID NO: 139521 - DNA, 339 bp, Glycine max
attatttatatatcccatagcataaaactatgcgtgttgagctccctccctctaaaaatacagtccaaaaacccctaactgcttctacttcaccaccagaacttgccgtcagacctccgcacaaagaggaacgctttaatcggatcaaaatcctcagagttcacctcaaggattttgtggagaacgagctcccaatcctttctttcatagcttctctgaggtaaacttaacttctatgcctcttctcctagttagctggaacatctctaagtgactctagcgttgtgggtacacgaataagatatttaacacttccttcaaaaaccccatgaaaataag

SEQ ID NO: 139522 - DNA, 387 bp, Glycine max
ctgcagctttgcagctggatcattatcctatctttacagccaatgggtgagtcccgtccaggtagtcccgaaaaagactggcctcacagtgatcagatatgagaaggaggagctgattcctactcgggtgcagaacagttggagagtctgcattgactataggaggctgaaccaggttaccaaaaaggaccattttcccctgccattcattgatcagatgcttgaacgcctggcaggtaaatcccactactgtttccttgatgggttttctggttatatgcaaattactattgctcctgaggatcaggaaaagaccacattcacctgccccttcggcacttttgcttatatgaggatgcctttcggcctgtgcaatgtccctggttc

SEQ ID NO: 139523 - DNA, 421 bp, Glycine max
  unsure (1)..(421): unsure at all n locations
agctttntgatatgtaagtatcccttcctttttatgttatgatgttaagccacttcctagtacagttgattctaattctgtgagtgagagccaagggtagtttcaggttggactgagacacgtaccacattatgtccacattctattttcaaagagaacatagatatgcatatatcccatcttggcatctatcttaaatatgtgtagttgctcctgaatcctctttttatgcaatttttactttttaaaattacattcaagagtacttccctttgtgaacagaaaactgtcatagttaaaatcatgcacaattggttaatattgcaactatcttccctgagaatgagggatgtgcatagcctcatttgaatgttcctaactgtcaagataagctatctgtcagctctcctgttggatggga

SEQ ID NO: 139524 - DNA, 188 bp, Glycine max
actcaaacttatccccttagactctctcataatacccttgttttcctcgccctgggaacttcctttcttttatatatgtttgatggaatgctatatccatatcttatgttgaggttacggacctttgggcaatatcttgttattatttttgtcgcgctaacgaactcattgtttaacatatctaaatt

SEQ ID NO: 139525 - DNA, 395 bp, Glycine max
agctttctcataagtcctaaatgacatttctaactaggattaactccctttaacctccaaataccactaaatccagattttgccttccaactctcaaagcctcactctttttttcactcataacaccacattctcactgtctaaccctaggttaactctacccttcatctctagcaggtttccataagcaatttcagcacataaacatcacaagcatcatcataaaaaccctaaaatagaatgggtaagcttgactcacaccaaacatgacaagtttgacttgctttcatcaaattccttcacaaataactaccacaatgcataaacctagtaaaactacccatcatatctcccaaagccccatacccacgaaaatttatgtgagaagaagtcta

SEQ ID NO: 139526 - DNA, 388 bp, Glycine max
  unsure (1)..(388): unsure at all n locations
agcacaaactatcacagccaagaaaacagggcaaaggcaaaaaactctgcccaacaccaaccaaaatcacaacttttctcacttaaagaccccagtaacaattccttcgttccagttcgttaaccgttggatcgactcgaaactcttactggaagtctctagtgcataagcctacantttgaccgttgggatctactagcaaacttccagaactcatcctgcactactctttccacaaccagcaaatgcatagcatttttctgcacaaagccaaaattctgctgcacctatttgacagcaaaattctgcataagtgcagatttcgaaaatcacactttccctcatccaatcttgcccaaatcaaatcctacaaggtccatatcatgta

SEQ ID NO: 139527 - DNA, 422 bp, Glycine max
  unsure (1)..(422): unsure at all n locations
agcttctgatataatatagggctcatcttctatagtccattgnctcacaataagtagaattcttcacttgttcttcggttgatgaatgtnggtcgtgaaacatttattacttgcattaaatgtacatcctttcttcatggagtgagtccactctttgtcactggcgtgttgaacactgtaacaagtaatcactttctttttgttagagcaggtctatgtagtagagctcttcttttgatggtgattgaggaattttagatcttgacttaatttattcttcataggattcaacacatcctaggaaaatgtttctgcaaaacaaatcgcagacacaatattaagtaaattcttaaatgtcatctttaatgtcatatcagattatgggtttatctgactatcatttaaaacttcagacgcagatt

SEQ ID NO: 139528 - DNA, 422 bp, Glycine max
agcttgcatcaagtggcaatcacagttcttttatctttcagtaggtgctccttaaacctccattaattttttttctttaccttgtctaccattagggtttcttcatttctctcctgtatctcctcacatgtcttgttctaaatgttgtaaacatgattctttaaagcttccacctattaaacttgctatagaagccagatttgattttctatggttcaaatgtcttgtacttgttcttgaaccacgaattgtgttgagtttaggatcctttgagcttagtcttgttattatttttgcggctgaaacctttaccataatatgcttactaaaatattaaagtagaacaacacctcacaaatctagagtgacttgttcacctatatgtattttgtcatagataccatgtctagacatgaaacttg

SEQ ID NO: 139529 - DNA, 426 bp, Glycine max
agcttgaaggtaaactagatgccttggttttttctggtaacccagctggcattgaataaaaaatctgcacctgtcgccagactctgtggtttatgctcctcagtcgaccaccacacagacctttgcccttctgtgcaacaatatgaagcaattgaacagcctgaagcttatgctgcaaacatttacaacagacctcctcaacctcagcagcaaaatcatccacaacagaataattatgacctctccagcagcaggtacaatcccgggtgaaggaatcatcccaaccttagatggtcgaatccttcacaacagcaacaacaacatccttattttcaaaatgttgctggcccaagcagaccatatgttcctccaccaatccagcagcaacaacagcaacagccccagaaacagcaaactgttgaggcc

SEQ ID NO: 139530 - DNA, 325 bp, Glycine max
agcttgtcacatcttacgcgctatgccgccacccgtcctatgcatcccacctgtttgataagttgcctcagccaagcttgttctcctggaacgctatgatgaggttgtatgtccaaatggggcacccccttgatgtcctcaacttgtttgtttaaatgctcgggacgggtcggaccctgcctgacaaattcacatacccggttgttatcaaggcttgtggtgacttgtctttgattgatgtgggcgttggaattcatgggcagacctttaagtttggctatgattccgacacatttgttcaaaacactttgttggcaatgtatat

SEQ ID NO: 139531 - DNA, 327 bp, Glycine max
agcttcaacttatagtgagtgattcaggcttagcgccactacctgcgctaagcacacatccaatgatttcaaaacagaacgatgttggcgcttagcgcatcctttctcgctaagctcagcttgaaaggtcagcttacaaaatgaatctggggcttagcgtaggatggcacacttagtgcagctaaaataaattttcacagagaggaagtggcgcttagcacgtcatccacgctaagcccactgcttaaggtgcaacttacagtgaagatgttgggcttagcacagcgatgtgcgcttagctgaaccattgagccaatcaatcagggg

SEQ ID NO: 139532 - DNA, 322 bp, Glycine max
agcttggaaaaatcctcgcatagattcattagtagcaccaatatgatatcgtccgcatatatctggatgattatgaattgatttccataatctttgtgaaatatagtaatatctacctttcctctgatgaaaccattttcacttaaaaaagaacttaatttttcataccaagcttgaggagcttgctttgaaccatacaaagctttattaagtttaaaaacatgattaaggtagataaaactctcaaacccaaggggttgttccacatagaattcttccttaataagaccattgaggaacacactttttaaatcgatttgat

SEQ ID NO: 139533 - DNA, 325 bp, Glycine max
agcttgtaggattatggggtacccatcacatgtggtactaggtggcggtcgggcaatggtgcacaacaagttttccacatccacaaatcgcgcataaacccaccatcccctgttgcccacctccaactgagctcacgtactcccacgtagcccatatcctcgtttctctcaacaccgggtccccatcaatcctcccaatctttccccaacatccaagtaactcaacattcaaacaacacaaaccatcacagccaagaaaacagggcaaaggcagaaaattctgcccaaaacaccaaccaaaatcacagcttttctcacttaaagg

SEQ ID NO: 139534 - DNA, 322 bp, Glycine max
agcttttttgagattatatttgactcttcacaattaaatttgaatttcaacgttcaaacacactggtaatttattaccaaatacttgtaattgattacagcattttgaaattaaatggaatgttgtaaattcagtttgaaagttttttgaaaaccattttgctactagtaatcgattacaataatctggtgatcgattaccagagagtaaaaactctttggtaaaaggtgttgaaaaaaattcatgtgctacatagtttttgaaaaaactttttaatacttatcttgattgagtcttcttttgattcttgaatctttatttt

SEQ ID NO: 139535 - DNA, 271 bp, Glycine max
cacactagcccgattgtgggtcttgtaatccgcgtctttccaagcatccaatggggacatctttatctttagtcactacccactttttattttggtgtacatgtcttttaaatttttaaattgggtcccagatgttggataaccaacaactaaaactaaggtcatttaatgtattgcctttaattacatgggtttaaagtattacttattcgatttgagaaaagatattttatcttactaacaaatttaatatgtggatagcctatactgc

SEQ ID NO: 139536 - DNA, 322 bp, Glycine max
agcttgcccaccctttattgtttgccattattttgccctttcaccctcaaatataatagtaaattaatttgatgtaacatatacaacaatacaacatatatgcacactcatattattaatcccttgattctgccatgtggagcagtacattagagccctagtgccggagcacttcgctttcagaaccaacaaggacgacaaaaccgcaggcgaaatcttcaaacaaaaacacaaggacctcgtgaaagaaagctccgagtggctgaaggaaacctccaactcctgctccgtcgtcgccgccctaatagccggcgtctccttc

SEQ ID NO: 139537 - DNA, 320 bp, Glycine max
agcttgtataatggctagacatgatacatgtcagggcttggtttggttcaaggataaaagggatgccccacattatttccatgacacaaatgcaaaaatgatgatttggaaactttatgcaaaactggtcatgcatgcgcctatgcggacgctcaagtgtcaaatttttatggtcatgtgatgctagggctcaggattcatttcctctattttaaatcaacccaatgtttccaaaatatgttcttttatcaatttgtgcattcctccaagtccatttcgggcgtccgaggaaattttcacagcattcacccttcaggtgg

SEQ ID NO: 139538 - DNA, 318 bp, Glycine max
  unsure (1)..(318): unsure at all n locations
agcttgtcatagtatttgatctatatttatttgttccatgttacatgtgatgttttactcatatatactcatattaaaagcatacactaacttttcatgtctttcatcctcgcagncacgagaatcaaatgcaaaggcggtagaggtagcttacagtaaatgtgttagaaattatgattgcaatccctaccctccttatttggattgtatgagagtttcagttggttgttatcaagacacttattattgttattgggaatgatttgaggttgtaagaatcaagactccaacaatatggtctttgccagaataatagtg

SEQ ID NO: 139539 - DNA, 320 bp, Glycine max
agcttaaatgcatttttcatgaaagtggaacaagttctctttgacaagtaaattattaaggggtttggcaatcttagagaaatcttgtatgaaccttctatagaaaccagcgtgtcccgaaaagcttcttactcctttcgcgtctcgatgtggtgggagtttttcaattatttctatcttggcttgacctacttcaatacctcttgctaaaattttatgcccaagcattataccttcaattaccatgaagtgcaatttttgccaattaagcacaaggttcttttcaatgcatctttctaggacgttttccaagttgttgg

SEQ ID NO: 139540 - DNA, 319 bp, Glycine max
agcttttatccatggcctcctatgggggtgagcttcttctagacttatcttctccttgaagtggcgtctcctctctctcttccttctccattccgctgccattcatcttccaagaagaaaaggaatccattgatgaagaagatcctaggcctacaagctccaatggagcttacatcacattgtcacaacctaccctttggcgggagggcgacgcgagactcacgggtgcgtcttctaaggaaggaaaatgcgcggagtcgccaccaacgtttatttgaggaaaacgttagaaaaaccgaaaaggggtctacgaatgtag

SEQ ID NO: 139541 - DNA, 307 bp, Glycine max
agcttttaatttttgttaccagaccaaaagccaattatgaacatatacggcattaatgaggccaccattatttgactatagaattttctttaaactatgcttattttttgtatacttgagctgcgaacttaagagggtgaccatgctaaagtatcctatggtaacatcgcatttgggaccatttcaataatctaaaaaaactgcccaatctgatattggaatgttaccttgtaaatgcattgaatataccaggaggactgtgacaatgtactatttatatgccacagctagaatgcttcgagtaaaa

SEQ ID NO: 139542 - DNA, 322 bp, Glycine max
agcttgaccatggttgtttatttaatccaacatgggcagataagctacaggtttgatgattatatcgaacagtacaattgtatctttggccaataaatgagccatactactagttccagaagcactttgcctccaggattgcaatatatccagagaaaatgctctgagtgctgcaatcttgctaagtagaacagccaatgtgcaatatggatgagggaagaaacttatacagcttaacttaatgaaaaattagcgggaaaaaaaatcaaaattttgtcttctttctaaggagtataatataactaaaaccatgcaagttttt

SEQ ID NO: 139543 - DNA, 325 bp, Glycine max
agctttttaaatcttactttgccactggtaatcgattactagagagcaaaaactctggtaacttagaaaatattgagaaaaactgttttgaaaaacaaaactgtgctatgtttgttttttgaaaaatcttttcaatacttcccttgtgaagtcttcttgatttcttctcttgaatcttgaattaatcttctcttgaatcttgaaatcaaacttctcttgattcttgaatcttcttgatttcttttcatgaaacttgaaatttatcttgatcttgaacttgttactgaatcttgaaatcattctctttggctttttgtcatcatct

SEQ ID NO: 139544 - DNA, 323 bp, Glycine max
agcttaccttggttttacctattttcactcctacatgaacagtacacttactataaattaatatttggatattatcattaaattaccaatggaactcttatttttcaggactaaatataaaagttgtcggatgaccataaacaaatatagtgaagatgtataaaacatataaatattaaattatatcatgatcaatatgataataattagttattttatattattatcaagataaataatattatataaacatattatatgttattcaataattagctgctaacaatttaacatgttatagaaaatataaaagaataaaaaaa

SEQ ID NO: 139545 - DNA, 305 bp, Glycine max
agctcgacctttcttctttttttgaagagaaacacgtgtattatcattatgatggatgacacattctgtttgttacagatactcaacttgtggtttgaggtgccaaattgcatatatggtattgttgcgggaaagggtaaatttgcatcgtgatttttgggtgctatacttctgtcatcatctttaatagattcaaaatcttgacttgaagcaatggattgatattctcggctagaaagggaaaaatccccccttcctcccttttgatttgaaactgtctattagtaaaatgcctgatctcagcc

SEQ ID NO: 139546 - DNA, 324 bp, Glycine max
agcttcaagaaggcttcatcaaactacttgtttcccgagggaaattctataaatagacctcccatctttaatggagtgggttaccactactggaaaacccgcatgcaaatctttatagaggaaatagatttaaatatttgggaagccctagaacaaggaccttatgttccctctatagtggccggaagtgcaacaatagaaaaacctagagtagattggactgaggaagaaagaagattagtacaatataatttaaaggccaaaaatattattgcatctgccctaggaatagatgaatactttagggtttcaaattgtaaaagt

SEQ ID NO: 139547 - DNA, 320 bp, Glycine max
agcttatcaaggttatttaatttcttgatagttgaggaataagagaaaacccaatggaaaagctactcagagtttacaaattcaatgcactatatatttaccaaatgtcaaataacctataactataaagctaccttactcattgcgtctgaaacataacactttatcatatcctcatataaatcagctaatcgatgtatttctggtgcatcaggcgaatgttctaggaccaaataagcatattcacagaaagtgggagtttcaggagcaaagaatatagggtagtggagaaattttggaaattctgctgagagaaaaaa

SEQ ID NO: 139548 - DNA, 319 bp, Glycine max
agcttaatgttattttacatgagaaagataactaagagtcggctgagggatcaaagtaacgcctgatgaaactcatatcatcttcaagttgagtgatccgggtatccatggcatcaaaacgctcacccacaaatgttcgaagatcgcggagctctatgaggactttagtcaacagagaagaggaagcgtccctttgtggtggaggagatggtgtacactcatcgggaataggtggtggcaaatcttgcttgtagacccactgaccattcgcgtccttccggtaaccaaaggagataacaacatcgacaccaatggaaaa

SEQ ID NO: 139549 - DNA, 319 bp, Glycine max
agcttgcatttggtattgcgaaagccccactccatcattaggattagtacctgacatctcaaacaaacaaatcaaacgtaacaagacaattatagttgctgtttgaatacctcacccactcaagtgtatcacactatgatggcttttctctaatgaaacactctttccttttaccactctaattccccttgagttcttaggcaattcaagagattatggccacaacaaagaacaattcaccaatatgtgtaaggtaaggctagagagacaaggaaaaggttaaccaagaaaaggctaacaatgtttttaggcacaaatg

SEQ ID NO: 139550 - DNA, 317 bp, Glycine max
agcttgtctcaacttttatgcgagacggagaccaacatgctagctatcatcgccaagtaccaagaatatttaggtctagccacggcccacgagcataggattgcggacgaatatgcccaagtatacgcggaaaaagaggctagaggaagggggatcgactctttacaccaagaggcaaccatgtggatggatcggtttgctcttaccttgaacgggagtcaagaacttccccgattgttagccaaggccaaggcgatggcagacacctactccgcccccgaagagattcatgggcttctcgggtattgtcagcatat

SEQ ID NO: 139551 - DNA, 312 bp, Glycine max
agctttatttggtttttgacaaaattgtgagaggggtgggtggaacaattgtctatcatctctaggaaacattggaaagcaatcatggctgggaaacaccaccatgaaagcttttaatggaagctacctcgctaatgaaaacaagcatgacaaacacttggcgtaactccgtggaatgagaccatagtgacacacatctcatttataacttactatgtatatctctacatgaaccaagtgaatgctccaacatcttgatctacatacatttcatcattcttcggagcatactatccaagctgattatacaca

SEQ ID NO: 139552 - DNA, 300 bp, Glycine max
agctttttgtatttttaccgtttatgaagagaacttactactggctttaacagaaaataatatttctttacttgctcattgttacttgagcatacgactacttccttcctctcaacaaattgaaaacattgagccatatattgggttaaatttattttcttgttttccactaaaagaatgaattttcaatctaaaatactggttagcacttctaactacaatcttaacttctatatagtacaccatctctttataaccaatttgaacctaaaaaaatttcttagctcgacaatttgcagg

SEQ ID NO: 139553 - DNA, 325 bp, Glycine max
agctttagcaaggttttatacatattttccaaaattcaggatgttaattaacacaggagaaagaaactgtaaaagcatgatgaatttcccgttggcacatagaatcatatcagatatataaacatttgcattaactgagttgagttatttcacacaagaaacttttttgagaatttcctactctaatgtttcggaaccagttaatcattctgtacaactatgtgaaaatatcttaactcatttcttctagaatttcattagccgtctcaaaaagaggtgtgggagcttttaagcttggtgattttatctctgctacgatttctct

SEQ ID NO: 139554 - DNA, 325 bp, Glycine max
agcttcccaatcgttttgtttgttgccatcataaaaagcagaaggtgaagtgttgaggtgaagctgaagaagatgggaagtgacgttgtggcagaggactccataccagtggcaacagttggtatgattatgattccaagaccaaagcctatttgaagaatcattgagattattcttaaacttcaaaagtgtctcacgctcacttgggatgcacacactctctctgcatggtaagctgaacaaccaaagctggacaaagacaagaatataaatggaggaattcatgatcacacaagaatatatagaaaacaagtgtagttgttgg

SEQ ID NO: 139555 - DNA, 323 bp, Glycine max
agcttgaagaaaatatccttgacccttttttatttcactatgatagaatttagtggtttttttacctcaggtaatttcctttctccttttctcttctattttctgttaatgcgttttttctatttacaaagaaaattgatgttaacaggattttaaatatttaactttaaaattttattttattttgtatcaagaattttttttatatcttaaatataaagacaaaatgattctaaaaaatttatatatatatattcttatacctgcatatataacaactttaaataacaagatttattttgttcaaatatcaacttctaaaa

SEQ ID NO: 139556 - DNA, 321 bp, Glycine max
agctttgaattgtttttattttatagcctacacagttgaatgcttaatttcactatcaaacaggcaggctccattttacttatttgttatgctataattgtgttttatttatttttccatgttctttcacatacttaaaagggctagggagcttggtgactttcttctagttggtatccactcacatgagacagtgaggtatgtgatttatgattgtgcaaaattgattttatgggtattatccaggtgatggtgttaaccacagataggaaactaccaacttttctgcattgagcatataggaaatctctatccaattat

SEQ ID NO: 139557 - DNA, 322 bp, Glycine max
agcttggaccgtgcgcttatcaaggcttaatcgctaagcgagacatcagctacttagcgagtaagatgattattgaagagaatctgccatgtcatcacgcgctcagcacgtcatcagctcgttcaaggagaagattgtcttttttgtgcttagcgcgagaatgacgtttagccaaatttcaattactcgggctaagcgtgccttcatgaacaaaaagccctttttaagcctgaattgcggagaatgaaggggaggtctgaatagactacgtgagcctattgcagaacaaacaacagaggaaaagctgagcaaggaagaaaaa

SEQ ID NO: 139558 - DNA, 324 bp, Glycine max
agcttgcatatttttattgaagaaaaaaaaatggggatttgctgtgatcaaataatgaaaacaaactcaccaaaatcatgttcggctgcgaaaagttaaatcaaatcagaagttcgatacacatgtgttgaaggaaaggaactacatcagaatcatataatatgtgcacaaattcaagtgtatgttgtgatgtatctgcacacaggatttaagacacaaagagggggtaaattccatgcttcaagttttgattagatacacaatcgaatacgaccggtggagtatatatttgaactattggcacaatacgatttcaaagaaatg

SEQ ID NO: 139559 - DNA, 320 bp, Glycine max
agcttctattatgtttattccttcttcaacaagtgttcattgtctctaaacagatggattttttcacttgagctcacctttgaagattgtgatcgttgaagaatttaatgcttgcatcaaatgcaagtactccttcatgctagaaaacaaccccatgagctttaatgttgatcatttcagcagaaaaccacttgctttgagtgaaattgggtttgtcagaagcagtgcacatcttttaatggtgtttggcaattttcatatcttgaacttttttgttctctcttttggctctatttctcaacttttttagcttatgtgct

SEQ ID NO: 139560 - DNA, 319 bp, Glycine max
agcttcttttacttgtttttgaaatagcttcttcggccctgtcaaccttctcctcgatcatgtctatatatacaccttgccgcagctcaaggaaacgacatctcaggcttcggtccacacaagtctctcatctcattccctcgttctttgcatcttgctcttgttgatcattgtttgggttccaacccatatcacttcccacactgccgtcatcaattacgcatggatcatgagataaaagagccaccacctctctcatccacactctgttctcaaccctctcaattcagtcaaaacactcaagaaacttatccccgtt

SEQ ID NO: 139561 - DNA, 314 bp, Glycine max
  unsure (1)..(314): unsure at all n locations
agctnggtgttttatttggatcaaatngatgattgtagaatgcaatcagatatgattcgccaatcaagtgatgattacatagttggcaaatttttagaaataaatgaaaagctaaagcaatcgattgcccaagaggaagcctattggaaacaatgtgccaaaattttttggctaaaggatgaagatatcagcaccaaattcttccacaatgttgcaaatgctaccaaaaaaaaatcaaatctaatcgcttctctcactaaagataatggtgatttgctttacagtcataaagaaatttgtgatgtgacaatttc

SEQ ID NO: 139562 - DNA, 317 bp, Glycine max
agcttcgacattctatttcaagcgtctcgatatatgacgggactcaatcagacatccgagtaaaaagatattgtcgtttgaattggctcagagcttctacattcaatttcgagcgtctcgatatgttacgggactcaatcagacatccgagtaaaaagttattgttgtttgagttggctcagagcttcgacattcaatttcaagcgtctcgatatatgacgggactcaatcagacatccgagtaaaaagatattgtcgtcttaattggctcagagcttcgacattcaatttcaagcgtctcgatatatgacgggact

SEQ ID NO: 139563 - DNA, 314 bp, Glycine max
agcttgtcttaatttgatagttctcatcaactttgagaagggaaaggaaaatgtttcttgaaattattttagaaatatctaaaggcatttatcagtggattcaaattgatcaagaaataatgacattaatagataccccattaacctttccaaattattttgatgcatgtacgtcgcagtgcatacaattatgattagattaattattcatgtataataaatttaacatggagtataaaaaagactaaattacatatcattcatctattattatttgttaaattttatcatctaagtttttcttttcttgtccg

SEQ ID NO: 139564 - DNA, 325 bp, Glycine max
agcttctacacaatttatgttgtctttgtacgaaatatcacttgggcatatccgcctgccacctgacgcatgggtcaagatcagcagatgttgtctttgtacggataatcacttgggtatatctgtctgccacctgacgcatgggtcaagatcagtagatgttgtctttgtacggataatgacttgggtatatccgcctgccacctgacgcatgggtagggatcagcaaatgttgtgcttgtacggactaccgctgagtatatttgcctgccacctgacacaagggtcaagattagcatatgttatctttgtatggataaccact

SEQ ID NO: 139565 - DNA, 326 bp, Glycine max
agctttttcctcctattcttgtcaatgaaataaatgctcagaattgaaccaaatgcattgaggccagatatgatgagtgaaagaagcagtgctgttctgttagatgcaaaacctgccaactgaacaatggtaggactataatacatcacagtgttgattcccacaaactgctggaagattaagagtccaacgccggcatataaacctcttctcacagctgaagttctcaagagtttgactatgttgatcttctctgatgattctgcttccttaatttccatgtcaactgattccttcaaagcctggatttcaccttcaacttcggg

SEQ ID NO: 139566 - DNA, 322 bp, Glycine max
agcttgcaagtttgaccataatttgtacaaattaaatactatataggttactcattaatttgttatatatatatatataatatcggtgtaactttaataattatattatttttataatttaatataacatataatttttattaattcaactattaaattatatttacatattatttagattgcttgtgtcaaacattattttttttcaactatatataaatgtatttagtggttcagttataaactcatgtcataaggaagcatcgaaatgtggacaagttgcttgagaactataaatttctcattgatgtacaatcctttc

SEQ ID NO: 139567 - DNA, 323 bp, Glycine max
agcttgtgcctttttttcttactcactcactttggttggctttttcgcagcacaccggattacctgacccctgataacaagtttcctgtgaaaggcttcgatagcaacagtgtcgacttggtaagtggtaacgtacatatttcatttttacatttatgttcatatttttatatctttttttttcattttctttttcaggaagaggaagatggcccttgccccaagtcaccagagaagaagccaagtacttcaaaaggcaagcgatgccgaatgggtaagaattagactagttaccgaaactgttccaccctgaggagtttatt

SEQ ID NO: 139568 - DNA, 320 bp, Glycine max
agcttctccctctggtgacgaaacacgtggcggtgccagtggttttgccggaggtgtttcacattgaccacttacactaccgccaccgccacggccactgaaacatggtcccctacggcagcgtcatctggcacagtggtgctgctaacgcgttcggcccctgcgccactactagatattcacttgcctctctcccacgaccactgtatccgccgccgtcacccccaccaccttcgaaaccacctcccccaccaggagcacggtcggtgcgggtttgcaccttgtggacagtgatgttcggccgtcaaggtcttggttgt

SEQ ID NO: 139569 - DNA, 320 bp, Glycine max
  unsure (1)..(320): unsure at all n locations
agctntatttttttttatgaatagacggagtcataagtggatttttagaaacatacaaagaattttatgttttgcatttaatcaaggattagaattgatttttagtatataacatgactcctttgagaacattttcttaagtgagaacatgaaaataattaaaaataactattagatcatgattaaaaaataatagacaattaagattaaaatatttttaattaaaaaaattaatataaccattaaatctctaaaagatacaccaaataaataatgtcctaaaatatctcaattatgattcatcaatcattatcgtcatg

SEQ ID NO: 139570 - DNA, 321 bp, Glycine max
agcttgtggttaataggtttttttgtcgattgtcaagaggaaaactgatgatccaaaatgggtcatggttacttgatgattacctgccaatccatagtaatctctctgttcaatccaaccagccactatagttggtttctaaagatcttgattgtattcaacagagtgtatctttccattactatgtaggagatgccaaatatgctctaattcatcttcccatcttacaacaaagctcctactaacttcactataagattacatttaaagtaaactaatataagcaatattgatatgttatatcatgtcatgtatatttgg

SEQ ID NO: 139571 - DNA, 320 bp, Glycine max
agcttgttttatgtgtttatgcgagacggagaccaacatgctagctattatcgccaagtaccaagaagagttaggtctagccacgacccacgagcatagaatcgcggacgagtatgctcaagtatacgcggaaaaagaggctagaggaagggtgatcgactctttacaccaagaggcaaccatgtggatggatcggtttgctcttaccttgaacgggagtcaagaacttccccgcttgttagccaaggccaaggcgatggcagacacctactccgcccccgaagagattcatgggcttctcggctattgtcagcatatga

SEQ ID NO: 139572 - DNA, 320 bp, Glycine max
agcttttttcaactgacgggctgatgcaacaaacctggaaaagtagtaatgcaacatgtaaaattaggaagaggaaaacagagacttgttaaatcaagtgaacataattaagttagaccacaagtacatcaggaagaagttgtataagtggaaataggaaggggacatatcagacacatcactgaagcccaactatgacaagatgtggaaagacacgctaatttcctaacgcagcgcctgagtttagaagtcacataaaacccaggaaaaatatctttgaaaattaaaaactatgtatatatatatatctatatatatat

SEQ ID NO: 139573 - DNA, 318 bp, Glycine max
agctttaaatgctttattcaatggagttgacaagaacattttcagactgatcaacacttgcacagtggccaaagatgcatgggagatcctgaaaatcactcatgaaggaacctccaaagtgaagatttccagattgcaactcttggctacaaaattcgaaaatctgaagatgaaggaggaagagagtattcatgacttccacatgaacattcttgaaattgccaatgcttgcactgccttgggagagaggataacagatgaaaagctggtgagaaagatcctcagatccttgcctaagagatttgacatgaaagtcac

SEQ ID NO: 139574 - DNA, 316 bp, Glycine max
agcttcttatgactatgagaggctataaccccattgttgggagcctagcggccaaattcccttataatgtaatctttccttactatctatttaatgatgcaatgccaaattttattgtttctttcatgtgctttattgttattgtatggcctaatcattcatgcatttgttttaggggttatacatcgggaaatggtcatttctaaagaattgggaaaggacatctaaacaattcattactaaggataaaatgactttgttttgcctctgcatacatcttcatacttcatgttgtagaagcaagcttcatgatgat

SEQ ID NO: 139575 - DNA, 324 bp, Glycine max
agcttaaatgagcactttcatatttgtttttctgcagcctctctttctcttgcacacgatgagatataagctcattaagagatcatttgtccttttgagtgttatagcccgctttgaatggcccaaagtgtacattcccattagacatttccattattactttcttcatcaagctctagcttaagtgctttcagtcttgattccaagttagacatttccattatgtactttcttatattacttttttttcacccaaaaaataaataaaaaaaacaaaaactgcatgcataaaaaacttccttaaatatatatcagaagcgatat

SEQ ID NO: 139576 - DNA, 324 bp, Glycine max
agctttggagtttccaagttccaattcgtcttcttctttagtccagtcttcttctggcttcaattcatcagtgggctttccttctgtgtccagcatcttgggatgttcccagcctttgatgacagctttccaggttctgctatccagtgatttgagaaaggccaccatccttgctttccagtattcatagttggtcccatccagaattggtggtctgttcactggtcctccttctttctccatgttcatcagaatttatctccctagatctcactcagtgatttcgagtgtctgctctgataccaattgaaattctgatactgg

SEQ ID NO: 139577 - DNA, 322 bp, Glycine max
agcttggaaatagtaacgatgttaagtgaagaaatgaattaagtgttatggaatcgaatcaaaagaaataaaaatatttttttccttcttttattgaacagttttaacataaataaactgaggggtgttacttggtgcacccagcacccatggtgaaatggtaaaattgtccttcaccctaatattataaaactcctatttttctgtccgtacagtgccttccttctcctcctactccgcttcatcttcctcttcctcttcctctgtcatctttgtctcttcctctttcgcttcctttgttggtgcttgttggttgttcctg

SEQ ID NO: 139578 - DNA, 313 bp, Glycine max
agctttaatatgcttatattagggtctgtaaggtacaatttatatttttgctggcgaaattttaattttttttaaaagcacattctaaggcggttctctgaaaaatcgtcttagattccttaaaatatttttaattttttttataaaaaaaatcattctaagatagttctatagagaactgtcttagaaagtgcacccttctaaaacggttttcaactactaagacggttcttagttgaaaaccgttttagaagggtgcactttctaagacggttctttatagaaccatcttagaatgatattattttctaag

SEQ ID NO: 139579 - DNA, 322 bp, Glycine max
agcttgtccttggtttatacatgattgatatatgatttaggacttgtaggattcaatttgggcaaaattttattaaggaaagagtggttttcgaaatctgcactttatgcacaattttgctgtggaaatgtgcagcagaattttgcataagtgcagaaaaatgcttgtgtatggttggctgtggaaagggtagtacacatggggttctggacattttctagcagatcccaacggtcaaaatgtaggcttatgtactagagacttccagttaaattttcgagtcgatccaacggttaacgacttggaacaaagaaaaggttac

SEQ ID NO: 139580 - DNA, 321 bp, Glycine max
  unsure (1)..(321): unsure at all n locations
agcttgcctaatttttctaaaatngagagaaaatgattattaaacacacaaaatggaagtactaagtatttattacctatacttaacagaaaatacttataacactgcaaaataaccatgaattggaagagtttgatacaatttgcacaagttttatacacaaaagttagtcgtattcaccgactaacaactcccccaattttatagttttgcttgtcctcaagaaaaaagagaacaactcacttgtcctcaagtgacaataacatgcagtggctatgtacaaaggtgtatgcaacaaaagttactgattgcatgataaga

SEQ ID NO: 139581 - DNA, 320 bp, Glycine max
agcttgtgtattgttgttttctactaatatatggaattgcccattgctttgcctgagaataacaattggttgaccacaacagcgctgggggcagcaacggacaatggtctttcaaataaacctgttgtacatgaacaaacattatatcatgcgctgaccgtgccaaacgaaccagcgaagtcattgcataattgttacactaactatattcaatgtacctgaacaaaatgatttccaaacacgtgaccgacacatatgatgcggtggccagaagagtcaggtggtggttgacttctaagagggaaaaatgtcatgctttg

SEQ ID NO: 139582 - DNA, 315 bp, Glycine max
agctttggttgattggcgcggtcataccggctcctacctttacctctttcttttcctccgtggtccccaagattaccaattcggtttcttcttggtgaggcttcatttcacgttcttccttagcgaccagcctctccaactctggtgacaggacgtcttcttcctcttcctcgtttatcgtttggcttataactcgatcgaaatcgattgtcaaaccctcgttgttaggatcctcaaagaatcgaccctcatatctataccaaacaagacaaaagaaacaaaaaacatgcaaaatgatatgagaaaaggtgggac

SEQ ID NO: 139583 - DNA, 317 bp, Glycine max
agcttttcatcatttattattcaacatccattgattaaacattttatatcatatataataaaatatgcaaaacgtaaagaataatattttatataaggatgcccaccaaaaatattttatacaagcaggtctaaaactaatttttataaggaggtctaactaggataaagaatgggaaggtgggcttgaagggaatcaagtgactttgatggaatttaaactcagaaataagtaatctcaaaaactaatttaatttgtaccattagaacgtcatattggatttgaagaatacactattaatatttacttgaaaaatt

SEQ ID NO: 139584 - DNA, 318 bp, Glycine max
agcttaaagtacgctctagtcattcatccctatgagatgttgtcgaagtattggcgatcaaaatttattttctggggaaaatagggaggaaccaagctcatgcttttacaaaaaagttcatcaagtcaagttgaaatatggaagtaaccggcttgcaaaattgaggcaaaagatgaatcgagtcacatcactgcttcgtctactgccaaacatatttaggattattgatgtccttgttacttccagtttcaccttgacaaagatgtcatggaccatgttgaaaatctaaattgattccaccccatatcttgcgtaaaa

SEQ ID NO: 139585 - DNA, 317 bp, Glycine max
agcttgtggactataccttcgaccaaacacggctgtgtttctatctcggcccggatttaaagtgggttgcagcaccggctccgcttccctaaccgtactggaggcggttgccgtggctttgtcctctatggttttctggagttttaacatgaccttcgagatggaagccatttgatcttttaaggccgatagatcggccttcatctgttcctgcacgccctcttcattatccattttttctggatcgagtgttataggggtgccttggtgttttcttagttatgatgaatttcctaaagaaataaacaaaggtgagg

SEQ ID NO: 139586 - DNA, 317 bp, Glycine max
agcttaggggcagtatcgaacatgtgctaggcccatgattgatcaatcaccacctggcggccggctaaagacgttaaagaagcgctcctaggaggtagcctagaatccctaactttgatatttaattggctgtctcatactttatatggggggaactatgtcctgaatccgcctaagttcatatgcaattataagattttcagagagaaaatataacagtgaataacacaactttgcaaaggactttttgcacaaaaaaaaaaaaaaatagcttgcctaggcgagcatgactgtcatgaaaaacttcttagggaggg

SEQ ID NO: 139587 - DNA, 248 bp, Glycine max
agcttgcgacgcttttatttttctgcacaacgagaaaaccaaattggacgcacaccggaaacactctttataaacatgccgcttgaagagcagtgacctcagacaagggctgattcaaaagcacacattggttatggaataccgcgaaggtgatgacggcatcccgtggacttacgccaccgacaagatgccaccagcgaaacaaaactgccaagcccgcacctatcatagattgcgtagattgtgta

SEQ ID NO: 139588 - DNA, 325 bp, Glycine max
agcttcttatccattgcttattttggtggtgaagctccttcttccatggcttattccttaatggagggcgcctcctctcacctcctttcctttgtcttccgctgcatctccatggtggaaaatcaccattaaaggaccccattgaacctcaaagatccagcctccataaaaaccccacaagcaagcttccatcaagtggtaatcagagcacaagagcttcaaattggtgctccttaaacctccattaattatttttctttaccttctcttccattgttgattcttcatttttttccatgtatctcctcacatgtcttgatctaaa

SEQ ID NO: 139589 - DNA, 322 bp, Glycine max
agcttgctctaaatttacattgttgtttgtatttatgggaggaggttgtatgccatttttgttttaagagtagtgtcccactggtaaaactaactttccaaatgtttgccttcgcaggaaatggccccgaggaagcttgcctcaaagaggtccaggaaggacaaggtagccgaagaaactagttccgctccggagtatgacagtcaccgctttaggagcgctgtacaccagcagcgcttcgaggccatcaagggatgatcgtttctccgggagtgacgcgtccagctcagggacgacgagtatactgatttctaggaggaaa

SEQ ID NO: 139590 - DNA, 324 bp, Glycine max
  unsure (1)..(324): unsure at all n locations
agcttggtcattctctccttttttattntattttttattattcatagtaactctgataaattcaaaagaaaaatgtccagattatttatgaaattattcttcacttatgcatctcaaatcataatatatatattacaatgcattttctaaaagaattttagctagttaagtataaaaaaagggaaaggcatatattttgtttgacatataaactttggaaccataaagatattaaggcatgtatctgatatgcttagctctgatcaacattttgatcccaattttgcatcccaacaattagaaatagtatcaaagctctaacca

SEQ ID NO: 139591 - DNA, 273 bp, Glycine max
agctttcataagggaagatttgtgcacccaactacctaagagtcctctgacgaggtgggcactgcaccctatattcaggacgaaaagaagcagccgaatgctgcaaaaccaaatgttcacaatcaccgcccacagaatgctcggaatgctaacaatgcacacaatgcacagaaagaatgagacgcccactatgcctaaccaatctaagaaaggggcgagcaatgtcagtgtcaccggggtgggaaaaagcgaaatagtccctagacaggcgct

SEQ ID NO: 139592 - DNA, 320 bp, Glycine max
agcttgactaatctctacccaacccgggcatagtcagtcagtgagaacctgtgacatacctaaacaggcgagctcctggcagtcaaccaataaaagaacaaagaccacaaagctagaaggctcgtgtggtggctggccagctatggatcttgagtgatatttggaatatggcctctggtaatcgattaccaagggtgtgtaattgattacaaggcctaaaaatggagacaggaagttaagatggcctctggtaatcgattaccaaggggtgtaatcgattacaaggcctggaaatggagtcaggatgttgaggtggcctt

SEQ ID NO: 139593 - DNA, 319 bp, Glycine max
agcttgactcagttctcgtaaggcgaaagacaataggagctctcaaagtcgcatttctcaggaactgctctcaaagcaaagaagggacctttggaaagaagtggaacctccaaagatacagttttagaagaaggtgcacttatggatgcccatcatcatactcccgtgaatgcattctactgatataaatctgtcacaagaagatcgctcatcccttggcaagttacattagcagatgtacatgtgagatcaagccacaatgtacccttctagtctacacatcttaagggaaactgacattaagattgctgctgattga

SEQ ID NO: 139594 - DNA, 315 bp, Glycine max
  unsure (1)..(315): unsure at all n locations
agcttctttttcttttttggagntctttgggtcaggttgcacgacccaatttgcccatggtaatcctaatttcccattttctaactccatctcaatcgcatgatcgattttccctctctagcctctcttgctttgatcaaaaccctaatctcagcctagtagttcccaacttcattgagactttgttttcatctatttaacctctcttatttgcccatctctattttgttctctagcaagggagggtgttgattccttttgtgctatatgttccataaatgttctcaccaaaccatgacctctttgttatgttca

SEQ ID NO: 139595 - DNA, 312 bp, Glycine max
agcttgccttccatctcgcccaggcgagccaggttttctagaaggcccaagtgcgcttggtttctatttgcaccccccatttactaaatacaccacttcctttttttgctgattcttttttcgtaacgttatgaaactttacgaattttgtaacgatacttgttttctttccgtaatgtcacggaaccttatgtattatgtattcatccctttttgggcttccggaaagttacgaaacctcacgaattgtgcaacaatgcttccttttgacttccggcatgttacagaacttcacggattgggcaacaatgc

SEQ ID NO: 139596 - DNA, 316 bp, Glycine max
agcttgacagatatttttaaactatatgagctagatttccatttgtgcaagaattacaatatgcattttgtcgcaatgtactttgtctatgtgcgagaggactttgtgcaaggttcactctgagtacacgtcccaagggaggttagcacactaaactagaagattaggataagatttactaattttagcaaaaacaatttttaccatttttgcttaagtctactttagccatttctggttaaaaattcaaaaggaaaaatgcccatatatgccagcatttggcacgtgcaccatggctatcaaatgttcattcatg

SEQ ID NO: 139597 - DNA, 316 bp, Glycine max
agcttggacattgtttatatgtagaaatagctattctttttcctttatctttgttcaagagtttggtaggctatggagtttgtagcatgtgcagatatattgtgaaccaactaaactatatattatatattttatacattttttttttgctaagcatatgtacttaccaaaattcggagctgacacacgttagggtgaacgtgactaaggtggatttctgaacttcgcacgtcagactggaaaaagacctttgttaagaggacaaaaaaggagacctactgtcgcaacctacccttcagcgggaggacgagacaaa

SEQ ID NO: 139598 - DNA, 313 bp, Glycine max
agcttctactatattttgctagcattagggggcgcactggcgaacacatgggctcacccacttatgctcttgtgactcggtcaagatcgctgaagacaattagctccgagaaaaccttctagccgaggcactcccgtcacggttaccggacgctcccacgagatttgacgcgaacattcttgaccggctttcaagatctatgggacggtctccattttatgcaatgctcatcggctaaagacctccgacccacctgtttaattcattctacgtacccggggaggggcacgtttccttacatgcattaaaattc

SEQ ID NO: 139599 - DNA, 319 bp, Glycine max
  unsure (1)..(319): unsure at all n locations
agcttgaagnnccttttctttatcctctctaagaggagccatgacatgagttaccaacatttgagtttcttcattccgccttgacagggcttgatcaagcattgcttggatgtgatctttatttaaggaactacaggcagataagttaattagtgcaacatcaaagttgctagagaagacaacaatagcatcacgaacctccttttccactaaagaggcttcatttgaggtgttagcctacttggatgcaggttcgggttgatgtgttcaaacaacctcattagcttttgttgcattagactttataggggatgctgct

SEQ ID NO: 139600 - DNA, 258 bp, Glycine max
  unsure (1)..(258): unsure at all n locations
caagcacgaaaacaaagacacttataancgaggcggcccagaccccccaaacacaaaggacccacccaggacccagggaagaagaacacntaggaaagagcgcaaagaaagaagccaacccgaagcgaacaccacaggaagaaacagcaagacgaaagaggcaaacaaaggacagacacacgacaatccaccgaaacaaaaaaggaccccacaacacccaaacctgcccaccaaaggcgcaccagagcccacgaaggc

SEQ ID NO: 139601 - DNA, 322 bp, Glycine max
agcttaagcttctttaactgtacaaggctcttaatatttgaagagtatccttgtggaaccttcacccgactaagacactgacaaaaacttatcttctccttcttggacaaagtatggcaggctgggggcaagtaaattttcttcccatcagaccttggatgcaactgtgatcgtatacccatatcaactagatcttgacgggtattcaagccatccttcttcttgccttgaatgttaaggagcgtcccaatcacactatcacaaacatttttctccacatgcgtaacatcaatacaatgtctaacgtaaagatcaccccagc

SEQ ID NO: 139602 - DNA, 320 bp, Glycine max
agcttctcatggattttttttttgaaagatcctcaaggaagtttctcaaggaagctacataggctataaatataaacatgcgtaacaatttttgtaactttgatgaatgagagtcttgtgagacacaactcaaagttcaacttctctcccccttttcctccttcaatttcgtgctcccccctccctctctttctatctctctttcttttcctccattgaagcatcctctccaagctttttatccaaggcacattcttagtggggaagctccttcttccatggcttattccctagaggatgacgcctcctctcaacttttt

SEQ ID NO: 139603 - DNA, 321 bp, Glycine max
agcttctttgagattttttccttgagaagctagagcttatctacacacacccctctcataactaagctcacgtccttgagaagcttccttaagaagattcctaaagaagctagagcttagctacacatacctctctaatagctaagctcacctccttaagattggaagctagagcttagctacacaccccctataatagctaagctcacccccatggcgaaatacatgaaaatacaaaaaaaatccctactacaaagactactcaaaatgcctcgaaatacaaggctaaaaccctatactactagaatggccaaaatacaa

SEQ ID NO: 139604 - DNA, 320 bp, Glycine max
agcttgctaacccttttaagctcctaatatctcctacactttttgaggtgggccatttttggatggccttgattttctcaggttccacttggaccccatttctaccaactacaaatcctaagaaaactatattatctacacaaaaggtacacttctctatattggcatagagagtgtttttcctaagaattgaaaaaacttgccttagatgtcctaagtgatcatctaggctcctactatacactaaaatattatcaaaataaacaactacaaatctacctatgaaatccattaagacatgatgcataagcctcataaag

SEQ ID NO: 139605 - DNA, 318 bp, Glycine max
agcttgggacattttaaatggttatggaagaaggaaggagaaagaaatggcatttttccaaggctacacgaatcacaaaggctgaaacactcaagtgcttctgctctcggaaaaggaatgtttctcacacgttagacgtcgtatcgccaattgcaacggtcagatcatccacacctatcgtgtgaacctccagactaaatctcgagaagatccaacagttaacgaatgcaggagggcgtttttaccgagacaactcagacaacttccttgagaagctttctcatgaagcttctttgtgaagattccttgagaggcttc

SEQ ID NO: 139606 - DNA, 314 bp, Glycine max
agcttgggagtgcttctggtagctctgttttgttgctagggtttgtgtttttcttttgctattgatgaattattgtttgctatcagtggataattggtgtttgtgtaatggtattttgttgcttcaaatctgttgttcagagggtttaagttttgataattaagcaggtgtggagcgatggcaaagaagaagaatccgctggtgtttatggatgtgtccatagatggtgatcctgttgaaaggatggtttttgaggtactttttttttatctttatgaattgtcggctttaatgatgtttgaagaaatgtttgc

SEQ ID NO: 139607 - DNA, 313 bp, Glycine max
agcttcttagtttctgatgatgcagatgggtttgtagctacctcatgcactcctctaatgactatggcatcatttctggcgctaaactgctgggagttggaagccatcttctcaattaaatttctggcttcagcaggagtcatgtctccaagggctccaccactggcagcatctatcatacttctctccatattactgagtccttcataaaaatattggagaagaagctgctccgaaatctgatggtgggggcaactgacacatagttttttaaatctctcccaatactcatacaggctctctccactgagtt

SEQ ID NO: 139608 - DNA, 298 bp, Glycine max
agctttttttgttttatggcacaatgcagtttacatacccgacaaacgctagattggtgattacccaaagagcacaagctaccccctcttattgggggatcagatactaaataacaagcaaactgacttactaggtactcgcatgctatgactgagacatcaagaatctataattcaaatgatgcaaatgaattggtaattaccatatactaaattttcacaactaatgtattctttctgactcataagtgtactttatcaggaggccgtaacaaggcaataattaataacttacctt

SEQ ID NO: 139609 - DNA, 249 bp, Glycine max
agcatgtaaatttttattcgcacaaaataaagatgcccgatagcaaaaaacaatgccatttgagaattcaccctagaaaaataaagtccaaatacccataacttcatgtgcgtcaccaccaatacttgccaatagacctcgggacaaaaaagaacgccataatcgaatcaaaaccctccaagatcacctcaaggattttgtggagaacaagctcccaatactgagggtaataacttctatgaggaaagt

SEQ ID NO: 139610 - DNA, 322 bp, Glycine max
agcttcccaagttttttagttcttcctcaaaactatcctaagcaaagttcccaatgtcctattaacaacttccgtttgcccatcggtttgtgggtgacaagtggttgaaaataacaatttagtgcccaacttgccccacatagtcctccaaaaatggcttaggaacttagagtccctatcactaacaatgctccttgtcaaaccatggagtctcacaatctccttgaaaaacaaatcagccacatgggaagcatcatcaacttttttacatggaataaaatgagccattttagaaaacctatcaacgacaacaaaaatggaa

SEQ ID NO: 139611 - DNA, 321 bp, Glycine max
agcttgaacgaatgtaagttacatcttcttcaacctttgtgattcttgactccatttcattgaagcgcatatccacttgtaattccaaagtgtcaaacctttcaccaacaaaggtttgaagaccatcaaacctgtccaaaatctttgaaaggagagatgaatcttctccatcatgtccttcttcaccaacatgtcaagcacccttcttcacccaagagccatcatgctctttttgataaccaaaggatgctatgactgaagcgcctataaggaaggatctcttgattggaacatagggttcaaaatcaagagggatgttga

SEQ ID NO: 139612 - DNA, 319 bp, Glycine max
agcttctttgctgtaaaattccttccctgttggtgttttggtttgtgttaaggtggtgttcggtaatggatgttctgctggcgggccttgtggctgatttaggggtggcctttgtggttgattaggtattcttagctgatagggtgatgagtaatgagaagcgttgatattggcttaataatgacattgttgagctggtggggaatttggccacgtaggaacgacaatcacaacatgggttcctccctccttctcatcttttctaatagccacaggcttcccattcatcgaaacatgatgatcaaattttcctcttttc

SEQ ID NO: 139613 - DNA, 322 bp, Glycine max
agctttcataaaacatgatttgagttttgggggtgaaaagttggaaacaatattttgaacaatagctttttgagcacaacattttgagtactttatctacataacataaactgggtctttcataataatagtaatatgagaaatatttttatttaagtattgattttctgaccatgagcaaatatgcattgaaattaggttcacataatcatatcaaacatttaataatgagtgttgtgactaatcacttagagagcttagttatctaagtgtttgaacttctatgtcaagacttttttaacaccaaggtaatcttgagtaa

SEQ ID NO: 139614 - DNA, 312 bp, Glycine max
agcttgagatgtataagtgtagaagggtgaaacttcctgcttttattcgttgaccacagagtgtttcctggagatatgtcgcgggggtcaggagaccttggggacgtcaagtggggtactattgcccaaaaccaagcttgaccaatcccgacccaacccgggcatagtcagtcagtgagaacctgtgatgtacctaaacaggcgagctcctggcagtcaacagataaaaggaacaaagaccacaaagcaaggaggcttgtggtggctggccagctgtgaatcttgtgtgatatatgggttacggcctctggt

SEQ ID NO: 139615 - DNA, 320 bp, Glycine max
agcttctgatggaatttatgtctcatcttcaaaagaccatgggttcccaataggtagacttcttcccttgaatcttcgtttgatgaacgcggtccatgaaacctttattacttgcattaaatgtacatcctttctttccggagtgagtccactctttgtcactggcgtgctgaacactgtaacaagttatcactttctttttgttagagcaggactatgtagcacacctcttcttttgatggtgattgaggaattttacatcttgacttaatttattcttcataggattcaacacatccttagaaaatgtttcttgcaaa

SEQ ID NO: 139616 - DNA, 313 bp, Glycine max
agcttccatcaaattgttatcctagcacaacagcttcctgtatgtgctccttaaacctccattaattatttttcttctccatgtctaccattgacgtttcttcattctttttccatgtataatcctgacatgtcttgttcaaaaagttgttaacttgatgatttaaagcttccacctattaaacttgctgtgaaagctatattagataatctatggttaaaaagtcttgaaattgtacttgaaccctgaattgcgtaggatttaggaacctttgaactaagttcttgtactatttttgcggcaaaacccttta

SEQ ID NO: 139617 - DNA, 320 bp, Glycine max
agcttgaaggtaatctatatgccttggttaacctggtaacccagctggcattgaataaaaaatctgcacctgtcgccagactctgtggtttatgctcctcagtcgaccaccacacagacctttgcccttctgtgcaacaatatgaagcaattgaacagcctgaagcttatgctgcaaacatttacaacagacctcctcaacctcagcagcaaaatcatccacaacagaataattatgacctctccagcagcaggtacaatcccgggtgaaggaatcatccccaccttagatggtcgaatccttcacaacagcaacaacaa

SEQ ID NO: 139618 - DNA, 308 bp, Glycine max
agctttaaaatgatttaatgttgaagggtgaaactttctgcttttattcgttgaccacacagtgttatctggagatatgccgcgggggtcaggaaaccttggggacgtcagggggggtgctattgcccaaaaccaagcttgaccaatctcgacccaacccgggcatagtcagtcagtgagaacctgtgatgtacctaaacaggcgagctcctagcactctacatataaaaggaacaaagaccacacagcaaggaggcttgtgtggtggctggccatctgtgaatcatgggttaaatttgggttatggc

SEQ ID NO: 139619 - DNA, 88 bp, Glycine max
  unsure (1)..(88): unsure at all n locations
gatgactacaacaatggagtagttatgtgaatgttgggtctgaagaactgttccctaaacatacactnttaaaggatcaaatagcatc

SEQ ID NO: 139620 - DNA, 105 bp, Glycine max
cactttatctaactgttggtctggagatcagaatggtgctctgcctacaccagattctgacaactctcttcatatttctttgaggacttaccacatcgagaggag

SEQ ID NO: 139621 - DNA, 341 bp, Glycine max
  unsure (1)..(341): unsure at all n locations
tgacgcatgcaagcttnctttagaagctagagcttagctacacacacncctctaataactaagctcacctccttgagaagagaatctagagcttagctacacacccctataatagctaagctcacctccatgacaaaatacatgaaaatacaaaaaaaagtccctactacaaagactactcanaatgccctgaaatacatggctaaaaccctatactactagaatggccaaaatacaaggcccaaacgaaggaaaaaacctattctaatatttacaaagaagagttgatccaaccttgacccatgggctcanaaatctaccctaaggttcatgagaaccct

SEQ ID NO: 139622 - DNA, 480 bp, Glycine max
actaatcttctgtctaaatccattgtgctatatatatgtatatggatatataagttttcagatataaagtattttgtcttctgaaaaatgtgttatcaagcataagcatgataaagatattgagcatataggtttcagagaaaataatgtttacatgattgatatgaaacaacaactttctgattataggattgtattagaccatattcccataaaatgtgacatcacatgcaccatatatatatctaataacccagtgcttcactctataaccaagcacatagaaattaggcatcatttccttagagatcatgtgctaaaaggtgaccgcgttctagaatttgtagatacaaaaaaaccaactcgcagacatgttcacaaaccacaacccaaaattctgtctcaccattagaagagaatatgactttatatgcttgtgactacacaaaatgtttgtttatgtttgatgcttattgatca

SEQ ID NO: 139623 - DNA, 433 bp, Glycine max
  unsure (1)..(433): unsure at all n locations
acacttataatctaagcttcttggagggctggatcttgagcttcaatgggtgatttccaccatggagatgcatctgaatgcagaggagaagatgagaggggaggcaccatccacaanggaataagccatggaagaatgagcttcaccaccaagaatgtgcctcggataagaagcttgaagaggatgctttaatggatgaaaagaaagagagaaaggtggagcacgaaattgaatgaataaaagacggagagaagtggaactttgaagtgtgtctcataagactttcattcatcaaagtttcaacaagtgttacacatgcttctatttatagactaggtagcttccttgagaagctttcttgaaaaaacatccttgagatgcttctttgagataacttacttgagaagctaaagctgatctacacacacccctc

SEQ ID NO: 139624 - DNA, 295 bp, Glycine max
  unsure (1)..(295): unsure at all n locations
taatctattacaacctcctcgatattaaatggaactgtgccaaattcaattacgaaacgttttcaaaacaattttgctactggtaatcgattacaccaatctggctatctattaccaaagagttagaactctttgtaaacatgtttgagaaatatcatgtgctactcaatttctgagaaagacttntcatactcatattgattaagccttctatngattcttgaatcttgagtcgtgtatcttgagctagatcttgagatcttgaacctcgaatacttagtcttgactcttgact

SEQ ID NO: 139625 - DNA, 66 bp, Glycine max
  unsure (1)..(66): unsure at all n locations
gatgactacaacaatggagtagtgatgtgaatgntgggtctgaagaactgtcgcctaaacatacac

SEQ ID NO: 139626 - DNA, 308 bp, Glycine max
atcgaatgaagaacgtccaataacgggtgaatccttcgcgaaattattcaccgaaaacgttactgtaacatttcggaatcgcctcagcttagattttcttcactgatacaattcatccactctaatccgatagagagagaagtgccccaagggctgtaccctttttcttctcacttcctccactatttatatcaaaataggggacattgttgccgaccatctccaccatacgagctatgaagcaacaaccttatatatgaatcttctatatggcccaactgggcctgtgtgctatttgtacccccatt

SEQ ID NO: 139627 - DNA, 368 bp, Glycine max
  unsure (1)..(368): unsure at all n locations
cttgacaacacagcataattcaatgtngtattcacagcactagtagtaccctcagtgctctctctctctctaaatgcactttttgcacatgctttttcaatattaccttgatggcttgttagtatcatgtgagtaaagcaaaggattagntntttatgggtattntttattctaaataagaatgattctgtccagaactaataaaaggcatttataattcactttgaactaagaatattcacagaacagtcatgcatgactggtgtgaggagaaagagaaaaaactaaactcccttcatgatacatcagatccaggaaacagaatagcagctaaagatagtaacttttttgctaataacattcaatta

SEQ ID NO: 139628 - DNA, 318 bp, Glycine max
ataccctgatgaggatgtcccatatgttctttatactggactgatccatttgcttccaaagtttcatggccttgcacgtgaagacccacacaagcatctgaaagaattccatattgtctgctccaccatgaaaccaccagatgtccaggaggatcacatatttctgaatgcctttccacattctttagatggagtggcaaatgactggctatattaccttgctccaatgtccatcacgagctgggatgacctcaagagagtattcttagaaaaaattttccccgcttccaaaaccactgccatcagaaaggatatttc

SEQ ID NO: 139629 - DNA, 327 bp, Glycine max
  unsure (1)..(327): unsure at all n locations
tagcaacacacatgcccggtgtgatcctttcccagtactttacccacactgtcattagctgaaatnntctgtaagttggcactntgactcatttcttgtgtcatcttgtcctataaattagaaaagactctcagcatattcataaaaaactagcacaagcagtgaatgaaaagcatgatggaaaaagggcctatgcaagcaatatctatgcacattgtaagctgtaataccaacatcaaccaaaatgcttaaatctatagcaacaaccctcccttcaatacccnaaaccccaccaataccaatagcaagagcactacttncagtaca

SEQ ID NO: 139630 - DNA, 344 bp, Glycine max
tgtctggtatctcatgtcccaccagaactcaaatgcccttatcactgtggataaaataaaaaaaagacaactattggggtgtgctacactggtctctgtatccttaaccctactattgccctttcacgagaacaaaccatcattgttcaatgttcagaatcttgtggattctattctattccatgcgcctgcatgatctgcatatcactaagtgatgaccctcgtgctagtacaactattcaagccattacaaaacgtgaatttcttgcgttgattacttttatgaaacgtttggatggctttaatcgtgccttgagagccaatattgtccgcgttaaccattt

SEQ ID NO: 139631 - DNA, 168 bp, Glycine max
gctgcagctgtgctgttattaattctagatatatttcttgtgttccactatacggagaacgaggtgtatattacagcaaactaaaagtctggttgcttctacgcgcttttaattttgactgacgcatatactttcggcactgctagtccttgctacctttgtttgact

SEQ ID NO: 139632 - DNA, 274 bp, Glycine max
tgttcaaccctcctggtgtctgagaatcgcttaaaattagtgagaaaaatcgtttccgtgaagaaaatccaagctgttgcgcttgcgtaacatcttcttgtgacctttccgtgggtgatgttacagatgatgttcaaccgttcttcgtcgtacttcgttcgtgtctcttctgtttccaaccgtgtaagttcccgaattcaatcttctcaattcattctatgttccctatgtggtcctcacatgtttccgtacttttatattcatttcatgtact

SEQ ID NO: 139633 - DNA, 354 bp, Glycine max
gttattgtctagcgtctcaatatattatgggcctgaatcagacatccgaatctaaagtgttggctgtttgactatgccatgtgcttcaatgttcaattgtgagcatctcgatgtattatgcacctgaatcgggcatctgagtgaaaagttatgccatatgagttagccgagagcttccttgttcgatttcgagggtctcgacatattatttgcccgaatcggacattcgagtcaaaagttatggcagcttaaactttccatgtgcttccatgattaattttgagcatctcgatatattatgcacctgaatcggacatctgagagaaaagttatgccatatgagatatgcgtgag

SEQ ID NO: 139634 - DNA, 219 bp, Glycine max
  unsure (1)..(219): unsure at all n locations
cttaagtcacctgccgctgcagctgcaaatggagcaagatgttttcttggtggcgaataccctatcaatctgtctaacagctcttctattacttgctgtctttttataatcctaaaaagtggtcanaacactgttctattagagaaactatctttgcggggtggttctgaggcactcaagatcgctcgatcgattgggatactgtttgtctctctataa

SEQ ID NO: 139635 - DNA, 332 bp, Glycine max
  unsure (1)..(332): unsure at all n locations
ctaagctggtccacanacttgtattgagttaatatataaaaaagaatntaatattcaacaaatctgtcactgtaaaatcaaaattacattgtcataccttcccttcaacatgcattcctgttatgtgcagttntgcccacattccaaagcccaacctttttcttagtttcacagcaagtatagcactcatatcatcagccgtgagaaaattcaatcctaactccagaacctacatgaatcacacagtaatgtataaatcaaaatgaacaaaacttcattcacagatgcataacaacacaatcccttggtatgctgctgtataaatttacata

SEQ ID NO: 139636 - DNA, 225 bp, Glycine max
tcttgatatcatcaaaatcttcatgattgacattctccccctttttgatgatgacaaccacctgtaggtttggagcgacaacaaagaaaatatctatttgcatatagtatactccctcttggtcttacgatgattgctcatatgagacaattgaagacttcatcatttccatatataaaacagcagtctcatcagacaatagataattgttgttactattttata

SEQ ID NO: 139637 - DNA, 412 bp, Glycine max
  unsure (1)..(412): unsure at all n locations
acactttatactaagcttgcttatatttaagtcgagtcttgagagatatgttgattgatttaaatctctctacctcaatattttatcatttgtatcatattgttatgcatcagacgggcctaatgtctggaantaagaaaggaaaaaattaaacaaaagacatattataaggatgcatatacatggaatatatatattacgaaaaaaaaatatctttgtatccctatttactttttacttattcttgcactcttgggcctttatagcccatnttcttaaccaaaataaaaatgttgaatgacctacctatgatgcaccgacactgacacatatacgtggacacttgtatacgttatgtccataatatatgacacaaacacagctatttatatttatataattaaattaaatt

SEQ ID NO: 139638 - DNA, 363 bp, Glycine max
  unsure (1)..(363): unsure at all n locations
gctccatcacaagactagtcggagtggtatattacgttctgatcaaagcccatcaactcatgtttttggcggactttgtaatcatggacattgaagaanatgctgagatccccttgattgtacgttggacattcatcttgactagacagtgtgttgtggacatagggaagggaaacttaaagatgagtgtggaagaccagaaagccaccttctacttgtttgagggaagtaagcatcctattgataacaagactccgtctaaggtggaggaaattgagctaaagactaacctcgttggcgagcacctgaattntgtgttcctagaagaagatgaagccacaccaattgtgaatcattcagact

SEQ ID NO: 139639 - DNA, 374 bp, Glycine max
tactaagcttagtttatcattgttattaaatctaatagcataaacatactaattatatttagtaaaatagttaaattaaaatgtttaaaattcagattattatacaaaataaatatttactaaaataaatatattattatacaaaattcatattctaaaacatatattcacccaaagaaatatcttaaataatttaaataatataacaaaaatacttaaatttaataatatcattttttaataacaaaatgaaattatgaaataatattacataaattaatttaataaataaataattgtcaaattaattaagaataattgtatgtagtataatatttaattttaataatatataaatttttgtataaaaaaaa

SEQ ID NO: 139640 - DNA, 310 bp, Glycine max
tacatccttctatgctaataatcatttattttgttctctttattgaatggattaattattgtgatgtcaatctcataattaaaaatgaagtgaattactcatagaattagaattggtagaatcattaaaagacgatccttctatcaagatacctcaatgtcaactcattattatttataggctgatatcttataaactaatagagcatatctatacacctataaaaaatattgcagctccaaagataatagcttgagagactcggtcatatgcatttgcaatatacacaacaagatatgccaataatcct

SEQ ID NO: 139641 - DNA, 402 bp, Glycine max
attcaacctcgctctcataagattaaattcagttatgtgtacatttcttttggttaataaaaaaatcaacctaactaatgactaatgggtaatattattttaattttaattttcatcattggtagtaaataaaatttaattgattataattaaacgcataagacaaaatgagatacataaaaaataaataacttttaggttaaattattaacgcataatttaaaaaacaataatttgtgtacatattaataaacacaagttgtcatctacactagagtgcctaacatggttatcaaaatcacaatttaactcataaaatcgtacgagtttacgattccgcagtccctccacaagttaaatcaagagtagaatcacaaattgagtagaatcggtagtaaactc

SEQ ID NO: 139642 - DNA, 470 bp, Glycine max
  unsure (1)..(470): unsure at all n locations
gctatgctgcanacatctacaacagacctncttaacctcagtagcataatcagccacaatagaataattatgacctctccagcaacaggtacaatcccgaatggaggaatcatcccaaccttagatggttgaatctttcacaacagcagtagcaacaacaacaaccttattttcaaaatgctgctggcccaagcagaccatactttcctccaccaatccagcagcaacaacaacaacagccccagaaacagcaaatagttgaggcccctccgcaaccttcccttgaagaacttgtgaggaatatgactatgcaaaacatgcagttntaacaagagaccagagcctccattcagagcttaactaatcagatgggacagttggctacacagttaaatcaacaatagtcccagaattctgatagaataccttctcaatctgtccagaatcccanaaatgtgagtgccattaca

SEQ ID NO: 139643 - DNA, 478 bp, Glycine max
  unsure (1)..(478): unsure at all n locations
gtccctctgtgaacaaatacccctcagccaaatagaatccatcttgggcctttttcccacaactctcgtaaatgggagagaaatgttcatctaaagcatgcaagtccctaatattatcaaattctaaaatttgagctcctatggagcaaaacaatgtgtgtctcctatagagggcatcagctaccacatttatttttccctttttgtatttgataacatatggaaattgctttaggtactctacccattttgcatgactcttgtttaacttgctttgccctctaatgtacttatgtgattgatgatcactatgaatgacaaattccttggaaacaaggtaattntcccaagtttggagggctcttattaatgcataaagctctttatcatangtggggtaattgaggttggcactatgaagactttcactaaaataagcaatatggtgcccaccttgtaacaatacagcttcaacttc

SEQ ID NO: 139644 - DNA, 354 bp, Glycine max
  unsure (1)..(354): unsure at all n locations
gctttgtgtaatcantacacttattggtatcgttaccttttactgtttctgataaatcaanagatgtaactcttcaaataggtgttgactttttcaaatcggtattaagtttttctaaacagttataactcttctaaatggttgtcttgaccacacatgaagagtctataatagcaaggctttgatgttcttttcaatatacctttacaattattcaatcaatcctttacaagccatgaatctctatgaatttcttcttcttcttcttctgtgagccacaagctatctaaagttttctggtttctaaaccttgagaatttgtgctattcatccttatcattcccttctcccttt

SEQ ID NO: 139645 - DNA, 397 bp, Glycine max
catctattctaccatgcagttaaactcatgcgcatgttttgacaatgtgtataaaccatatgaaacagagtctatgagagatacaacctttatattcaaatgcaagaacaaaaaacttgatttaatggacctctcttgatctcaaatgtgtttacaactcactttccttttgaaagctctaagaaatgaaaattgaagtttatgagttgtaaagattcgttaaaaaacgcgttttttgatcgcttgaaagtgaacacaaagtgggtatatatagagaaaacaattattacacgctataatagattatattggcaatgtaatcaataatcttgagaaggaatcaattatattgtctatttaatcgactaaagtattcatgcccaaattttaaaacatt

SEQ ID NO: 139646 - DNA, 198 bp, Glycine max
  unsure (1)..(198): unsure at all n locations
tctcaacctactctaatggtactatgatatagagcagatgatcctcaagacaggctatgcattcgttaacatatatatnggaaatggctggtgctcatcgcgatggcgaattcacatggaactaccgggctgtatttcatacaaaggcggaataccaacactaggtatatcattgtctcacattataaactaatatat

SEQ ID NO: 139647 - DNA, 339 bp, Glycine max
  unsure (1)..(339): unsure at all n locations
tctctagatggttccacatggcctcggggatngaggttagtttattgaaccggtgtcttcacgtgacatggactggcatgagacctacacctcgagcaccactgctgtgtcgcacgttacgaacgcgatcctgttatggttctcgagcgggaccgctcgttggatggcgcccaccgcacatgtggctgcttataatgtctgctggaccgacngctgcttctgctccgacattcttgccgaaatggatcgcgcgatcgatgatggcgtcgacgtcctctcgctctccctctgcgacggctccgcgccatactttcgcgacactatcatcgtcggcgcttt

SEQ ID NO: 139648 - DNA, 307 bp, Glycine max
  unsure (1)..(307): unsure at all n locations
caccttctcgctaagctcatatgctggcttagcgagcattcgctaagcacgacactcctgtgctaagcgcgaggaagaatccagaagaagatgagctgtacaagttcactaagcgcaccacttcagttcatccactaagcgagaaaggcgcactaagccaaatatcactaacgtgcgctaagcggtccatacgtgcgctaagtgcacgagcacgaacaaggccacctatntaagcctgaaatcagaatttgtgaagggagtttggattgggattcagagctntgcatgtctanggtttctagagaga

SEQ ID NO: 139649 - DNA, 366 bp, Glycine max
  unsure (1)..(366): unsure at all n locations
ntgaatgtgcgtatcccaccattntccatagtagtttactggtaatgtgtctactatcattgtcatcgttttttcgtcattgaggtgccacttgagctgccatgttcctcacctttgggcgtattctttgaaagatccgtgccccctttttttgcacatgttntgtagttgcatcctattcgaagccattataccgacactacctaacgaatgcaaccattatgtcctcccangaatggactcgggaaggttccaagttagtgtaccaggtaacaactaccccagtaagactttcttggaaggaatgtatcaacaattcctcatcttttgcgtatgcccncatcttctgacaatacatctttagat

SEQ ID NO: 139650 - DNA, 416 bp, Glycine max
  unsure (1)..(416): unsure at all n locations
tgcagcttatctatctttaaatacatgacatccttgtcttatatatgctgaggacaaaacanaaaaaaataatagaataaacttccttatggatntaggtcacatcccaacagttattgtattgaaacanattccttgtgtcaaatattaatgcttcttctacattcttgcatcttttcttctcattntccttanaaataactttggatggtgaatgtaacccaacacatgccttattagatatgtacaatatgatgaatttgttgcctacactcgtccctatctcttacgatgaaatcaacaattggttgtgctgcttatatntattataaagggtttaaaacttcagaacattntgaagattgaccaatgtaccatggaatataatttataacattttaagatcctttctcttc

SEQ ID NO: 139651 - DNA, 465 bp, Glycine max
  unsure (1)..(465): unsure at all n locations
tcatgatgatgaatcaagattgattcaaggagtgtcgatgtttacaaagatgatgacaaanatcccaagagaatgatgtcaagattgagtcatgaacacttctagaataaagagaaatttaatttcaagattcaagaatcaattttcaagattcaagtttcaagaatcaagaatcaagaataatcaagttgaagattcaagaatcaagataagactcaatcaagataagtactaaaaagttgttcataacattgagtatcacatgaatttttcacaaaaccttttaccaaagagttgttactctctggtaatcgattaccagtttattgttatcgattaccagtagcaaagattgttccaaagagctttcactaaattacaacgtccaattgatttcagatggtgaatcgattcaatgatttggaatcaataccagatgttgaacgtgaaatcaattcattgtga

SEQ ID NO: 139652 - DNA, 408 bp, Glycine max
  unsure (1)..(408): unsure at all n locations
cactgcggctgcagcttgagccattanacacaatacttttactctgatgtctgatngagtccngtcatatatcgagaacgctcgaaatgaatgttgaagctctgacccaattcaaacgacaantaacttttactcggatgtctgattgaggcctgtcatatatcgagacgctcgaaattgaatgttgaagctctgagccaattcaaacgacaataacttattactcggatgtctgaatgaggcctgtcatatatcgagacgctcgaaattgaatggtgaagctctgagccaattcaaacgacaantaactnttactcggatgtctgatngagtcccgtcatatatcgagacgctcgaaattgaatgttgaagctctgagccaattcanacgacaataactttntactc

SEQ ID NO: 139653 - DNA, 438 bp, Glycine max
gacactttaaactcagcttaacattcatatttgagcgtctcgtaatattactggactctatcagacatccgagtaaaaatttattgtcgtttggattggctcaaagattcaacattcaatttcgagcgtctcaatatattacgggactcattcagacatccgagtaaaaagttattgtcgtttgaattagctcagagcttcaacaatcaatttcgagcgtctcgttatatcacgggactcaatcagacatccgagtaaaaagttattgtcgtttgaattggctcagagcttccacattcaatttcgagcgtctcgatatattacgggactcaatcagacatccgagtaaaaaagtattgtcgtttgaattggctcagagcttcaacattcaatttcgagcgtctcgatatgtgacgagactcaatcagacatccgagt

SEQ ID NO: 139654 - DNA, 338 bp, Glycine max
  unsure (1)..(338): unsure at all n locations
cttatcacagcnagttgaccaatgataacctgcataaagaatcaaccgtagccactaccagcatgcagcacaacaatcttattctcacagtaatgtacctcagactcataagtttgtcaaacatcaacaaaaggtaaaggcctactagactttttccttagactcatanaatctatgtacctcttaaatatgctctacgaacaagactactntacaggaatctgattctccatgtttgtgtaatctatatatgcanttactctcagttatgttgacatgttntttgtatgacaataaagaaaaaactaacgtactccggtgctagaatgctcatatgt

SEQ ID NO: 139655 - DNA, 396 bp, Glycine max
cttgagttagatgcttatgaatgaacaagagacaaggtatgtttttagcttcttgcctatgataaatgcgatccacgtcaactagaagatatatcatgtatatgaggccgtgattcaacaatcgatgtttctttcatattgtcatcctcatgtatggccatgaaggtgtgtctcattaaataaaaggacaataatataatttagtgtttaatcactacaaaaatcgtaacgtcacattattattgttcacgagaatatgtaacattgtgattcttgtgatgattaataatcatcagattctgtgatctacattttgtgatggtgagacctccataggtaaatattattatctctagttggcaaacgttgctcaattgtgacacatcatataaaatg

SEQ ID NO: 139656 - DNA, 292 bp, Glycine max
  unsure (1)..(292): unsure at all n locations
tgcacaacaagtntttncacattcacaatgcgcgcataaacccaccatccgctggtgcccacctccaactgagctcgcgtactcccacgtagcccatatcctagtttctcttaacaccgngtccccatcaatcctctcacgcttccacaacatccaagcttaacaacattcatacagcacaagctatcacagccaagcataacagagcataggcagaacactctgctcaacacatcaaccaaaatcatcagttttctcacgtaaagaccacagtaacaatactttcgatcca

SEQ ID NO: 139657 - DNA, 438 bp, Glycine max
  unsure (1)..(438): unsure at all n locations
cgtgaacttagatactcagctggtactccttttaccacatctagaagatttgttcattcgccgctatggctgcctcactggcttatctccatcctctataagtatcctatgcatgtaggtagatgggctaataccaggaatgtctgctaaagtccatccaatggctttcttgtgcttcttgaaaactagcaacaacttctcctcttgcttagcatcaagggaggcagagatgatcactatagattnttccttgtcctccaagtaagaatattttacggttgctggtaagggcttcaactctagtgtgggtggtggctgaacagtgggaggaaccatggtatgagaaaaagaaagttctttatcttctacctcataaagcaagtcagaaatagatgtactttctgcaacatgggtatcgcattctgactcctaaaaatc

SEQ ID NO: 139658 - DNA, 388 bp, Glycine max
  unsure (1)..(388): unsure at all n locations
tcgattaccatatatgtgtaatcgattacacacgtgcaaatttgaattcaaatnttaatagctgttgtaaatcaattttggccactggtaatcgattacatcctctggtaatcgattaccagagagtaaatctcttgaagaacactntntaacatgcattacttggcgcaaacctttgctacttcaattggaattcccctcctatttaatataccctttctaagactagagacttgtcttgatcatccatcttgaatatctttaatttctttgtcttgaataaagcttngagacgcatgtgaaactntggcatcatcaaaacattcagcttgatcttttgtctacacaatcatctttctttcttctcncattcgctaccattgaactt

SEQ ID NO: 139659 - DNA, 467 bp, Glycine max
  unsure (1)..(467): unsure at all n locations
tanggtgttcaattgctttagattgttgcacagaagggcttatgtctgtgtggtggtcggcagataagcataaaccacagagtctggcgaaaggtgcagatttttgattcatggccagttgggttaccatgttaaccaagacatctagtttaccttcaagcttcttagtctcacctgatgaagatgaattcatggctacttcatgcactcctctaatgacaatagcatcacttctggcactaaattactgggagtttgaagccatcttctcaattaaatttttggcttcagtaggggtcatgtctccaagggctccaccactggcagcatctatcatacttctctccatgttactgagtccttcataaaaatattggagaagaagctgctctgaaatttggtggtgcgggcaaatgacacataactttntatatctcttccagtattcatataggctctctccattg

SEQ ID NO: 139660 - DNA, 255 bp, Glycine max
  unsure (1)..(255): unsure at all n locations
acactcattaagtgacctctttatgtgttatacacacaagcatcaacatctcgaacttcctcaacattggtagagatagggggagcgacatgagcattgagcaacatgaagacctggtcttgaagctagaagaagagctngaagaaganttgtcttttacttgcccaactctcttgagtggcatttgtattggttgctatactgaatgtagcatcttantttatatcatatcatatgtgcatcatgcatcatcat

SEQ ID NO: 139661 - DNA, 439 bp, Glycine max
tcatgatgatgaaccaagcaattgtgatgatgtccaagtctcttgtctgaatcaagagtcaagcaagtttcaagaatcaaagagtcgttaagtcaagaatcaagattcaagtaaagaatcaagagaagactcaattaagataagtattaaaagagtttttcaaaatattgaatagcacaattttgatcaagagaatttttcaaaaagaaaaatcttttaccaaagagttgtactctctggtaatcgattaccagaaggcagtaatcgattaccagtagccaacattcttatcaaactgatttacaaagttgtaatcgattaccatgagcatgtaattgattaccaatattgtaaaacgttagatttcaaatttcaagagtcacaacttgtgataaaacattttcaaatcatgtcaaacatgtggtatcgattacacaat

SEQ ID NO: 139662 - DNA, 369 bp, Glycine max
  unsure (1)..(369): unsure at all n locations
agtcacctgccgcatgcagctcgtagaatggctagacatgatacatgtcacggctcggtttggttcattgataaaanggatgccccacattatttccatgacacacatgcaaaaatgatgaattgtgaaatttatgcanaactggtcatgcatgcgcctatgtggacgctcaagtgtcaaattattatggtcatgtgatgctatggctcaggattcatntcctctatcttaaatcaacccaatgtttgcacaatatgttctattatcaatttgtgcattcatacgagtccattatgggcgtgcgggagaatttcacagcattcacacttcaggtgtatacacattttttgttctaatatcgattatgat

SEQ ID NO: 139663 - DNA, 435 bp, Glycine max
  unsure (1)..(435): unsure at all n locations
tgctgtgttatggcaatcatttgttccggatatnttggatatccctagatcagttaaaacgtgtcgttcttcttggaagaaagctcaagacatntttgccaatgatattcaaagcttatttgatgcaaccatgaatgctacagccctcaagcaaaccagccatgacatgattgctcatgtgggtaaggctcatgctgccgtggaaaagctgagaaagtttcttgtgactgattcattagaagaagtgaacaggaaactggacacgtttacatggtccttatcctgagaagcttacactcatactttgatcatgttcgtgatcaagtactcgctgaggatcaggtaccatccatggatactctcataactaggctactcggtgcgcctcacttatcgaacgatgaaaatcctactgatgttgtgagacgtcactat

SEQ ID NO: 139664 - DNA, 399 bp, Glycine max
  unsure (1)..(399): unsure at all n locations
taagctaacaagcttttttatagttggactgtgaccttgttattttaaaaatctttgtaaaaagctggagcttgacctttatagttaacaaaccaagccgagccgagcctttaatatgccgagccattggcccttgacaagcagctcggctcatttccatccctacttgcactcctcacctccttgatggctagaatgcatccattgcctcaactcaccatcacttaaactatcatgcttagcgcatgtgattcaactgatttcgcatgttttataagtaggcaaggtaataattacatatccaatgtattaaagtcattgnttttctttgtttactgaaaggagcttatctaatttcattaataatcaactactcaatacatgtacaatgatgattga

SEQ ID NO: 139665 - DNA, 361 bp, Glycine max
gctggagtctccttgggtttagtcgctgcatactttgattttactcttctctcactaagaatattatcatatcaaataataaatttatcatggtctataacatgttattagataatacaatcaaaaatctgttcatagtgtattctaataaaatttataaagatagagttaaaaacatatttattctcagtaaacgtagacaccaaagaacaatggataatagaggggagataaatcactcataaatatgtactgagataatatagtattacaatgtgacacactaaataaaaaatatcaaatgggtgtatcgcaatctagagtataaagatatcaacattcaacactcaatcataaagtc

SEQ ID NO: 139666 - DNA, 465 bp, Glycine max
aatcttgtcttcttagtgtactatgtggggtcaaagttcattaactcgatagtttctttgccatgtgctccatatctactggtaattggcaagacttgccataaaccatttgtaatagatgtatgccaattgtggttttcaaaacaatattatatgctcatggtgcatcatccaatgttaattgaccgatcctttcgtgatgcattcactgtcttctcttatatcttcttgatttctctattagagacctcgcctcttccatcatgtgttatatgatatggagaagttatcttgtgatacacatgatagtgttaaagaaccttgctatattaacattgcataaattatatcctccatgtttatataaaacccatgtgacgcccattcttaaaagaattgtgttgagaaattatcacatattagcttagctcttatacttccaaaactccaccactgctacatata

SEQ ID NO: 139667 - DNA, 332 bp, Glycine max
  unsure (1)..(332): unsure at all n locations
cttgccacatgtgcctatgtgattggagcaaaagggcccactttctctntttgactgtgacccatactcagtcacaagagtgagaaaaatctgaccttcgtaacgctaaaatcctgcctctgtttgcgtgccgtttctctgattccagtttctcacgtttctctgcgtccgccggggccagtttttgaaagcgagctatatatatatcaaatcgctcagtattaaaccacgagcgtggttctgatgtgaggttctttaaattttaagtcgcacgcaaaacgatgagttttaactaatgtaataggaattaacccatataccgtccagttatg

SEQ ID NO: 139668 - DNA, 315 bp, Glycine max
attgtaaatcacacgttgtcttctctttttgtggagaatgcgaatgtgtgcatacgtgattatgatgatgtcaacacacgaatcaaacaatgcttatttgtcttcaagatctatgcatgatatttccaccatacaatgccttgattcatgatttctgtcttatcaaaccctgcctcacaatgaaaagtttcatgtctttcaacgcacatgttatcgattacctattcatgttatcgattttcaatggttcgaaagtgtgtaatctcttacacatcatctataatcgatttccaaaaactctgaacgttgcgaaat

SEQ ID NO: 139669 - DNA, 477 bp, Glycine max
  unsure (1)..(477): unsure at all n locations
tgcagctttaaaaattaaaattgttcanagaatatactagnatattatccctaactagaatagagtttgtctaattagccaataatataactaagtgaaagcaatgttgcacgtgaatgcagaccttgacatggaactaaatccccaagcacaaccatggccatatcaagcgaagagccttaatagaatgtttggaaatggtaatcctcacaacatntgcaaattgcaaggacacatatcactaacagttccctcttcccatgctgaaattaattaagagcatgttgttccagtttttcttattttcatcctctagtgtgctcagcatangagattatgtgactgctgaacgaaggggtttagtacgagatcttgatctatcatatcaaaagtatgtatggttctgactacaagttactcttggattcttgcttctggctaacattatcatcacactcttgcactatatattgttgt

SEQ ID NO: 139670 - DNA, 376 bp, Glycine max
tactaagctgctgattacattctctcactgtctcaagaatattctttattcttcttgacatcatcaaaatcttcatgattgacattttctgtatacacacgcattaaaaactctttctctttgatcaacactgtgtatataaaaactctattcctgttcaaagatttcttttccgatttcaacaaacactcgtggtgtatacaaaaatttatgtatatacactcattactcacacacaagaatgtctgttgacacattattttcacacacaaaatgtttccatacactttttacatattaaaactcttttttttcttttatatagactgacatttgttcacatacgcctcttcttttgctatcttagcgtatcatg

SEQ ID NO: 139671 - DNA, 227 bp, Glycine max
  unsure (1)..(227): unsure at all n locations
gtgcacaacaagtttttcacattcacaatgcgcgcataaacccaccataccctgttgcncacctccaactgagcacacgtactcccacgtagcccatatnctcgtttctctcaacaccgcgtcccgtaatatatcgagacgctctaaattgaattctgaagctctgagctaattctaacgacaataactttatgctcggatgtctgattgagtcccgtaaactattg

SEQ ID NO: 139672 - DNA, 186 bp, Glycine max
cacttgatactaagcttcagaattaatttcgatcgtctcgtatatatcttgtctttatcagacatctgaggaaaatagtttgggcgtctgtatttgctgatagcctcaacattcaattttgagcgtgtcgatgcattacaggactctatcggacatccgtggataaagtttctgctgtgtgaatat

SEQ ID NO: 139673 - DNA, 150 bp, Glycine max
ttgactgccgtctactgtacatgttcatcagagatatgatgatcaacgctctatgacatcggaaagtacatgtttaattgaccctgaatcactacttatgccctattttttatcaatctgtttctatcacaaggcgcatccacttcatat

SEQ ID NO: 139674 - DNA, 421 bp, Glycine max
  unsure (1)..(421): unsure at all n locations
ttcttgattcaagtctaacccatcatatattttaacatgcaaactctatctatgagctatacggtacacatgactcctcaantattctcanaataatattaacttgtcgcacctcaaagagatataacttgtcgagttcccacagtggatctcatcacaatacttatcgcacatacactgatcatnctcataggaccccactgtcgtgtgatngtacgaatcataggttacaactggatggcatctacatctcaatacacatgtgagatctcacaatgtaacacatactcaacttgtacttgctctcaattgattcagcatcattattgcagacaacgcgtggtatgccttatggtcattacatgtacacagcactatagtacatttatgtgatctagtgatatacatataccgcattaat

SEQ ID NO: 139675 - DNA, 381 bp, Glycine max
cattcaacttatatgctccagctctatgtgttgtgttggaaacagtttcttttcctagtttctatggatgctctgataccaacttatatgccgctgcacaagctgttcagtggacatcctatcatctgttttgcccccacagcatgttcaatatgcctgtatcatttacctcaactacttgcttgcatgactcatttcaagcatccttcaaatgcttttagttctgtcctttcaaataaaactgctgtaaatagtcctgttgttaccacaagcatcagttcaggtctcaagaatgttttgttgggatattttgtaatgtccttcatttaaacaacaccccatactataatgaatattaaatcacaaaattgtatttttctg

SEQ ID NO: 139676 - DNA, 328 bp, Glycine max
  unsure (1)..(328): unsure at all n locations
atcttaagtcaccgccgctgcagctggtggctgccctgcatactcctataattatctncccttattaaacagctcaattgtattgatagtcgatgtcgttataaaagaattattcgtacaagctacagttagtaactttagcggaagggaagtgtagaatataaaaatctatttgttacatatcctcttgattattcctctttgattattctagactaaatacaatattttattattattaattatatattatatttatatttatttatattattggtcaccattttaagattgtataaggtgtcatttcattatttttgtttaaaca

SEQ ID NO: 139677 - DNA, 383 bp, Glycine max
tccttcgtgtgtatccatcaataacattattccatgacactacactccgagcatgcatctgatttaacactgaacaagcaagttctacctcaccccattttatcaaaccagtgataaatacattccaacttactaagtgtctgtgctgcatttcgtagaacacctgtgctgcttcaacttaaatgcccgaacttgagtacatttgcagcagcccagtgttcacattgacatgaaactgaaaaccaaccttgtatacattggcgtggagctgattcccaaagtgggtgtaatttgggttggcagaagcatggcacatgaaggcaaaagatatagtgtccaaggaatggtatgtcaagaaagtgtggcaatgttggagtgttgtg

SEQ ID NO: 139678 - DNA, 429 bp, Glycine max
ccatccacaattccaagcattcatgctctatatgatgcatgcacctgacctcaactctcatgtgcaatgtggtatcataccagagaaacagcctacgtgtgtacacacgacactctcacttacgagaactaggtcgtaaatgtcaatgtcaccctgtcgtgcacaagcatctgccaccctccagctcgatatgtgagaaacttccattaatgagattcaatgaagacataatgggcgactaaaacaacttctaatacttgtgaaagcggcgttgaatcactgacatatactttgatgcctgcaatcatttgacatatttatagcgattgtagttaaataataaaatcatgatgactagatagtttttctttaaaaagcgacttagtggtaactatttctgaaacatccccactatacgcgggagaccta

SEQ ID NO: 139679 - DNA, 377 bp, Glycine max
  unsure (1)..(377): unsure at all n locations
ttcctatgttcaccagatgtatgtgaattgaaactatgatatttttatgcccaataagctgtatgttccaactcgacaggtatgtgacaagatattccatagaccaactggaaagacataagtcctgtgagggcctaatatgctattatggacggccacaaatcttaatctagtttcaaggaccaatgcttacctgattgaacaactattctctctagaacactcttaacttccctattagaaacttcagcttatccattggtctgacggtggtaaagagaagctaccttgtgtttgacaactgaatgttggacgacttangttaattgtgtattacaaacatgagatcctccgtcacttattaacaccctggctgt

SEQ ID NO: 139680 - DNA, 432 bp, Glycine max
  unsure (1)..(432): unsure at all n locations
acctgngaccggatggtctaaatntcaaatnntattaaacaatttgggagttgttaaagcctgaattcagccggttcattgctgaatntcatgccaatggggtatntacgagggggaccaatgcatctttcattgccttgatcccaaaggtgaaggatccacttcatattaatgaatacagacctatctcattaataggctgtgtntacaagaatgtggctaaactcttatcacataggctgaagaatgtgttgccaaacataattgatgagaggcaatcaacttttatctctggaagacagctgctgcacaacgttctgattgccaacgaggcagtggaggaagcaaaaaggctgaacaagccatgcctcgtgtttaaagtggactacataaaagcttatgaactcgtctcgtggaactttctatatatat

SEQ ID NO: 139681 - DNA, 445 bp, Glycine max
  unsure (1)..(445): unsure at all n locations
gctgcctattaacctganatngagaganaatgattattaaacacacattatggaagtactaagtatgtattacctatacttaacaaaaaatacttataacactacaaaataaccataaattggaagagtttgatacattntacacaagttttatacacaaaatttagtcatattcaccgactcacatgctcacgcatcatttcacacgtgattttccctttgtaatagttagtttacacatctgttcatataaatacatctcttttcacactagacacctatgtactaaaatagctgtactaagtaacacaagttccccgagagttcgatactcggttcttaccgttttatactactngcgcgatccagtgcacttgccgtaagcgagcaagttcttggcaccgtttgccgggaaacttcttttatttggaaagatagttcgttt

SEQ ID NO: 139682 - DNA, 109 bp, Glycine max
tgacaaaattgatgcagatgctaacaactactgcgttatatacactcaactattacagtctggacacacacagctgtactcgtgtgtactcttgtgaacgctatccact

SEQ ID NO: 139683 - DNA, 415 bp, Glycine max
  unsure (1)..(415): unsure at all n locations
ntgatgcctgatcacggcgacgagtacactgcatcacacttcaccatgttttctgacgaaacaagcgttgaccatgattttacaactgcttacacccctcgacgaaattggattatgcataaagaatcgacgatatggaatggtcagatgatgctccatgagaaagggctatctaatgaatataggacaaatattgcaaatactgcatgattcgtgctaaatcgacttcccaccatatcatcctacgaaaagactcctcttgagacttggtatggttataaaccttccttgaaaacatcaaaggatttggatgctcgcgctttacttatgtgccacagatgattagatacatggcttgacaaaatactgaacatcggctctttatgggatatatttcaagacctaaagcttatat

SEQ ID NO: 139684 - DNA, 232 bp, Glycine max
gtcatttctcgctttacctaacaataagataaatttccaccgcacgcgtgaataggattatccgttcacttcggataatatgaattgcgaccgcacggtcgtgtcgtaaccacggcggatatactaaagaggtcacttaataatctcattataagataaatacctggtagtataatacagcgacaaataattggacgtattggctgtggatttctcattcttaatcgaattg

SEQ ID NO: 139685 - DNA, 349 bp, Glycine max
  unsure (1)..(349): unsure at all n locations
gtagtccaccatctttcatagagaatactggttatgtttctactatcattatcattntttctccgtcattgatgtgccacttgagctgccatgtctctccacctttgggcgtattctntgaaagattcgtgcccacttttttgcacatattttgtagntgcatcctatccgaagccattataccgacactgcctaacgaatgcaaccattatgtcctcccaggaatggactcaggaaggttccaagttagtgtaccaggtatctactaccccatcaagactttcttggaaggaatgtatcaaaaattcctcatcttttgcgtatgcccncatcttccgaacaatacatc

SEQ ID NO: 139686 - DNA, 473 bp, Glycine max
  unsure (1)..(473): unsure at all n locations
acaacaagttntccacatccacaaatcgcgcataaacccaccatcccctgttgcccacctccaactgagctcacgtactcccacgtagcccatatcctcgtttctctcaacaccgggtccacatcaatcctcccaagcttccccaacatccaagtaattcaacattcaaacaacacanactatcacagccaagataacagggcaaaggcagaaaactctgcccaaaacaccaaccaaaatcacagctgttcccacttaaagaccccagtaacatttccttcgttccaattcgttaaccgttggagcgactcgaaaatttactggaagctctatacatatcatacattttgaccgtggatctgtacanacatcagacagatctgactactcttcataacacaaacaacatttttgactatcanatctgtgccattacacaaatctgtaagtgcaattgaacacctccctatcat

SEQ ID NO: 139687 - DNA, 378 bp, Glycine max
  unsure (1)..(378): unsure at all n locations
agcttcctttacataaagagaagagaaaatgaaggattgaagatatacaagtagtagggatgtctccttcacctctagaacctcacaatcactcacagactcatctcatgctctcatgatggcttactcttcacgctccattctctgccagtcttcttacaacaaaagctctcaaaactctctagaacttggatctttctttctctagaaatctctaaacatgcaaaagcttcgagaattgtccaaactccctctccatttttgatttcaggcttaaatangtggccttgttggtgcatgcgtgcgtatcgcaactctggctcgtttatcgtgcattaatgaatatcagcttaacgcgtgtcttctctctcatcggat

SEQ ID NO: 139688 - DNA, 398 bp, Glycine max
  unsure (1)..(398): unsure at all n locations
ctatgaatgacaaattccttgggataaaggtagtgttgccatgttttcaaagcccgtactaaggcatacaactccttatcataagttgaatagttaagggtgggaccacttaacttttcactaaaataagcaattggatggccttcttgcatcaacacagccncaatcccaacatttgaagcatcacactcaatttcaaaagaattttgaaagtttggcaacgcaagtatggnggcattagttagctnttgcttaagaacattgaaagcttcttcttgtttctctccccatttgaaaccaacatttttcttgagcacttcattgagaggtgctgccaatgtgctaaaatccttcacanatcgtctataanaacttgctaagccatgaaaactcctcac

SEQ ID NO: 139689 - DNA, 398 bp, Glycine max
  unsure (1)..(398): unsure at all n locations
tcggtattcaatttcgaacgtctcgatatattactggactctatccgacatccgagttaaaagttattgtcgtttgaattggctgagagcttcaacattaaatttcgagtgtttcgatatattctgggactcaatcggacatccgagtacaaagttattgtcgtttgaatttgctcagagcatcaatattcaatttcgagcgtgtcgatatattatggggctcaatcagacatccgagataaaagttattgtcggttgaatttgctcagagcttcagcattcaattttcagcgtctcgatatattacgggactcaatcagacatccgactaataagttatcgtncgttgaatttggtcaaagctttggtattcaatttcgagcatctcgatatattac

SEQ ID NO: 139690 - DNA, 365 bp, Glycine max
  unsure (1)..(365): unsure at all n locations
ctttgtataagagnggagcaacaacttataagaaagccttcttcaaaatcttatggctttcactcttatccaaggaaagacaaagcccaaggaatnttggnggcttcaccttcaaaacccaaggaagataanggtaagaccatatagaaatccacccctaagactagttcccaagagaggactagcaacattaaatgcttcanatgtcttgggagaggtcacattgtctcccaatgccccacatagaaaaccatgattatgaggggtcaagacatttatagtagtcaaggggagactacttcttccccttcctctattggaagtgaagatgatgtaaggggtganaagtctagtgaaggaagtct

SEQ ID NO: 139691 - DNA, 389 bp, Glycine max
  unsure (1)..(389): unsure at all n locations
taaaccaatgcaattcaaaatctaggtatctattacccctctatctggtggatnttcaagggttgagaagtgataatgagaatggggttattttggagtaaactctcatctcaaacaagtctataacattaatttaaatcttctcaaactggttttacggcgaatactccaccgattcaaaattngacctctcaacacccaatttaccctatatatggctcttgctttcacctttgtcactcatatgttctcatttgctctgtccaagcttacctacaagtgctaattgacattatttactagaatcaactcacttttgactccaatgttcactaactccaagtttagcttctgtaaaccatcaaatctcacactgtgttacctaaaca

SEQ ID NO: 139692 - DNA, 385 bp, Glycine max
  unsure (1)..(385): unsure at all n locations
tactatcattgttattcatctctttctccatcattggaggtgccacttgagctgtcaggtctctccatcttttgggcatattctttgaaagattcgtgcccctttntgcacatgttctgtagttgcatcctatccagagccatatcagaattgtactgatactgtctaacgaaggcaaccattatgtccttccaagaatggactcgggaaggttccaagttagtgtactaggtaacaactacccncagtaagactttcttggaagaaatgtatcagcagttcctcatcttttgcgtatgcctccatcttctgacaatacatctttagatggttcttgggggcaagtagccccttgtacttatcatagtccgacaccttgaacttt

SEQ ID NO: 139693 - DNA, 442 bp, Glycine max
ggatagaactacatgtttctgcattctggcactgactattcttgatgaaattgaaggcaaaggcataaatacagattcaatagagtcaggtctataactgttagtagtagtagtagtagtagttctccaaacattatagagcatctagagtcaagcgaaaagcattatagagcagctagagtcaagcgaaactgatgactgacttcttttattttactaatcaagtgtgcctatttaatgctactacccttcctttgcttcggctgaaacaaagacctaatcttgttctccaaactttgtgccgtatatttcatatacttgtcaaccttagcgtcattttctattgacaaacaataattgttgacatatgccctataaatgggtataataccttccaccaaatgcttgcatacattgtccctcaagatctcatcggatatta

SEQ ID NO: 139694 - DNA, 456 bp, Glycine max
  unsure (1)..(456): unsure at all n locations
tgcaagctatgttcttttaattaatataatttcttgtctctcttatntattattnngagatctcatatattattantttttaataagaataanattaaaaataataatcaatttcatctttaaattttaaaatgacaagtaaatgtttttttttcaaaagcgacaaataaagaataaaattagtttcaaatattttttaagtaaaagaaagctctttattttattgttgacacttatacttgaatatacactanaaaatcataattgtgtataaaagttgcatcatatatacttgaccattcttttttgttttacttggtgatcgactccaatttatattacgagtttattctttttcgtaagtgtctggttagtttaggtcaaaaataattctgttaagaataatcttanatgatngaatatgactaatatatacttannattaaatactatata

SEQ ID NO: 139695 - DNA, 461 bp, Glycine max
cttggtcaacatcttggattcaatggtaggtcttcaactctgatcgcttgcattatgccctacacatcacaatattaaccaagttctggccaatcaaaattccaagtgtagcagcaacacaacaaatgcattacctgaattcgatctccaccaaaaatacgaaatatgttatcttcaagacttaagaaaaagcgggagcttcctggatctccttgtctgccacttcgaccacgcagctttatggatgataaaaaaaaatgttccaattttaaatacttatttaacagggtaagagtggtagaagcagcagtagttattatagctgcaataataatagaagagggtaggagatatgcagatgtccaatgccacaagccagtacatgccagtttcccttctttcaaccttacaaggataatgaaagaagagaaaacctgattatcaattcgacgtgattcatg

SEQ ID NO: 139696 - DNA, 220 bp, Glycine max
attctctgaatatcctgaagaagataaaatcccaccggatttatgtaatcaatagaatatgatgcatatgggccccaaatcacaaatagtaaatatgtgagttttacttgatcattgagaagtatacaaagaaagaattgaatacctgattaacaagtacgactcgttgatcatgatgaataatcatatcacaaacaacgattattcactcatttattct

SEQ ID NO: 139697 - DNA, 411 bp, Glycine max
  unsure (1)..(411): unsure at all n locations
gcacttaaatactcagcttatgaatcgtagatctattaggagtgatgttataatagtgtttagaaacatggtattgttatagtgctcttggcttaagtaatgtgttcagatttgaaactntcttagtttgctctcttttttcttttcattttttttccagatcaaccctgatttgcattctttccggtattaaaattcttatttttagttccaatgaatggcttatggctatgaattgttacattttgacttcggtatctgcttgtgcacaagttggggcatttgagtttgggaagatttacatggatttgttaagaaaaaattgggtttgcttttgtgcgtgcatggaatggaaaaaaccactactacaaaatagactttctacattggttaaaagcacctttctacatc

SEQ ID NO: 139698 - DNA, 321 bp, Glycine max
  unsure (1)..(321): unsure at all n locations
agactgganagcggtttctaatgactcctctgcggcttccacataaggcatagaggatgggcagctcaccaagatgtcttcttcgcctgatacgatgaccagatgcccttccactacgaatttcaacttttggtggagtgtagagggaacaacccccactgagtggatccacgggcgccccaacagacagctgtagggggggttaatatccattattnggaaggtgacttgacaggtgtgagggcctatctgtactangagatcgatctctcccctaacctctcggcgggtgccgtcgaaggcacgaaccaccattgaact

SEQ ID NO: 139699 - DNA, 448 bp, Glycine max
  unsure (1)..(448): unsure at all n locations
tcacatatccacaattccttaatatatgcctaactcacatataatgtccccagtggagtcgccaactgtcgcaacgtgcccttttgctggcgagcgaatgcgatgctcacgggtgcgctttccaaatgaggatagatgcgcggagtcgccaccaacgtttatttgtgggaaacgtcggaaaaatcgaaggaaaccggtcgaaatgaaaattctaagttcgggagttgtatttacgtttgaggaaggtattagcacctcttatgtttgtctcataggacaacagcctatttttcaaaattgtggaaattgtgttatcttaacttttagttctttgtattttttgaggtcgacataagcggtgctcttgctcctacgtaccctctatcgaagaagaaatcagacctacgtaagtctttcttaagggtgaatcacacgatntctttttact

SEQ ID NO: 139700 - DNA, 307 bp, Glycine max
  unsure (1)..(307): unsure at all n locations
caaattgataatctaaaacatgatttggtgtctcggcggaatgagaaacatgaattataacagcagtgtgaaaagctgaagatggagctggattcaacaaacaaccagacgggtgaaattgaagagcagctgatagctaaagaccatgagaacactgaactgagagaggaaattntgagactgcaggaagcgattgctgcactggagaaaacattanctgagaaagaatcagagttatccactttacaggagaagcttcacgaanaagagagtgaggcttcagggcaaataattgccttcacgtctc

SEQ ID NO: 139701 - DNA, 464 bp, Glycine max
  unsure (1)..(464): unsure at all n locations
actttccatgtggtgagtgaaacaggatatggcaatgctgattattggtagcagctgaaacttgggataatcccaccaaattatgagggaatcctttaaggaaagagggaagtttcaaaaaaaggaagagagagagggagtacggtgattggaaactgatgagctcgaggctctatatattatggaagggtgggaaaaaggaaggtatcaagaacccccaaattgacagtcgtttaataaataaataaatgtaaaattaaattattatttgctttgctggtaagattggttttattttgtttttggattttgaagtggctgcaaattgcaatgcagacgttcctgatgatatgagaatgggacaatggcatgtggccttacagaatggangtcggtgaggtttaaaagtatctggttcgggttaaataaaattactgttcactcatagaagaataaaatatggg

SEQ ID NO: 139702 - DNA, 350 bp, Glycine max
  unsure (1)..(350): unsure at all n locations
gctaactggacccactatcaatttggcatgggtatactctttatntatccacgaaaaagacgtggcttcagcttatagagtctataccgaaacattatagaatttgtggaaattntccaaaacttccaacataagggccacttcttctcgttgtttgggctatacaaaaatgaagatccaagttgggccttgagatatatcactgcatagttggactcaacaatgacccacatgtcaccatttaatgagaactggagtttctttcctctgtggacccacagaaatacagtccttttgtcatttatantttttgatanatatctctctctctctctgtgcaaaaataaact

SEQ ID NO: 139703 - DNA, 469 bp, Glycine max
caaagcagaatattacagaaaacgaattatatagaaggaaattctgaatcatggtgaaaccagttaggaaggattgtggtaagcaaaagtaccatctgttctgaagacaagtcagcatgccactcattctgaaagtgatcatactccgttggttcatgaacatcaaagaactcatcagaatcattcaaccccattaaacttctacggccagaaggttctacttcatcttccatgacaacaagaggtggttcctcaaacttgtttttctcttgtgaaacttcagtcttaatatcctcctttacaccaagaggcaaccctatatcttttgtcattgcaagaagttcagaagagtagtttcctccttttgttctaaacaactctcttagtgctacaaaaaagggatatcatagtagaaacctggtaaatttcatgtacaacaaatatgtgataagacacaatctacataaat

SEQ ID NO: 139704 - DNA, 405 bp, Glycine max
  unsure (1)..(405): unsure at all n locations
gagtgagtgtgagatgctgagaagaggaaggggaatcccccttcttgtgtaaagaactatcattctctgattntaatctcatttattgttggggtttctttgtaatggctggctaaacaccctagttggggatttctaatgaatagctgatgtaaatacctaatatctaattgattatgtcttctgtgttcaatgcttccttcaatgcttaatgtttgtatgcttttggtctgatcacccatttgtgtgcacaattaggtgactttagcattgngaaatatactgttgccttagaacttgatngaagcangatcaaaacttaattntacatganggatctgcgggtaagtnntggtttaattatgtngttacataatgctatntagtttacgcctantcttacat

SEQ ID NO: 139705 - DNA, 285 bp, Glycine max
ttattccaagctactgtcactagttttctcgttgcaatatcactagaccaatttaaacaacaaatccacttgtccaaggatttaatcaaagaaactggccatgcataaacttgaaaactatatagtagaatgccttgaataactgattttactagttccactctacccattatagataaaagcgaacctttccatgatgcacgcttcgatttaatacgatcagctatcgagggtaggtgtatcttttttggcttaccaaaaaacaaaggaacactgagatatatg

SEQ ID NO: 139706 - DNA, 393 bp, Glycine max
  unsure (1)..(393): unsure at all n locations
catgaggtcatttcttcattcagctttgaagagaatgccatggatcactgtatataccagaaggtcagtgggagtaagaattgtttgcttgtattatacgtagatgatattctgcttgcgactaatgataaggatatgctatatgaggtgaaacaatttctctcaaagaactttgatatgaaggatatgggagaggcatcttatgtcatangcataaagatccatagagaaagatctcgaggcattttatgcttgtctcaagaaacctatatcaacaaagttttagagagatttaacatgatagaatgttcaccaagtgtagctcccattgtgaagggtgacagacttgctttgagtcagtgccccanaaatgattgtgagcgggaacacatg

SEQ ID NO: 139707 - DNA, 428 bp, Glycine max
ccgtgagctgtaattgttacaataagctccctgtctataaaagctgcatgtctcttcactgcgcataaccctttcttcctctgtctccttgatgactcccaaccctctccaaacttcaaatcttcataactttctcatttattatgcaaatcacttcaaacaaagctcaaatttcttctttttcaattctctacaaagcccgccgatcaaaatttgctgaaacaagctacaatggcagaatcctcaaagaagagaaagggatcctcctgcaccaccaccactgcatgccaacgccgccactgcacattctatgacccaccatcatcaaattctgcttccctttcatcttccaagtcataaactttgttcctttcaatgccagcgctaaagtgtattgccaatctcaatcgtgtgttttgacctagttt

SEQ ID NO: 139708 - DNA, 455 bp, Glycine max
  unsure (1)..(455): unsure at all n locations
gtacacacatctatcaacatcactagaggaaaaaccatcactaagcaaagtctaattaaacttttcatgccattgtttntgtgcttgtttcacacgatatggagattntaaaagttntcacactntgttttcttgattagcgaatttcagctatggttcaacccactaatccaagatcaaatccaaaattctccactaagtgtgcttatgtttcatgaggcatgttaagcatgaaggacatgcacaaagtgtggcaatggggtgtcacaagcaaatgctcacctcccncttaggctggtccanaatataattggattgaacttctgccaattaaattaaatttctctcccaacacacacatcanatagtgcacttaatgcatgtgataattacaaactacccttaatacaacaactagtctatgtgtccctaaacacgagggctgaaaatcctac

SEQ ID NO: 139709 - DNA, 414 bp, Glycine max
  unsure (1)..(414): unsure at all n locations
gacacataaatctaagctgtgtaatcatattagatcgttgcaactaggaaacttcattcttccgccaatgatgtgaatccttcatgttgtgtcatgtacacttcctctttcaactgttttcacatccattttccatatctcataatcatagtatgttgctatggcaagtagaatctgaattgatttgagcattgccatatgagaaaatgtttcgtcataatatattccttcatgttgacaatatcctttaacaacaaagtgagacttatatgtctagaccatttcatctgctgcaatattttttatgttaacccattnacaaccaattggtcgtatatccattgatgtttcaacttaagtccatgctgtgttgatgttgattgtttgtattttagattcctgggcttttgcatt

SEQ ID NO: 139710 - DNA, 434 bp, Glycine max
  unsure (1)..(434): unsure at all n locations
ccgaattaatgcttctatgttcttaaggaagaattacattggtgacattaattntattgttatatataaatttaataagtgaatgttagctctgataacttaatatctagtgatatcctatatatgatacaattttattgtaaattaataactaagggataaaataacgaataagatattatgtatatattataataaactcaccatttgtatttatttattcaaatgcaatattgtataaaaataatataatatagtataataataatatactatatttntcttacaataatcagtgttaaataaaactaagttatattgttatttatttaataagatcttaatatgatagattacatatatatacggtgatctaaaattatactaatctagtctcacttgataaataataaatggtactagaatgtactttc

SEQ ID NO: 139711 - DNA, 335 bp, Glycine max
gcataatggtttggctatcttggagaagtccttgatgaatcttcgacagaaacctgcatgtccaatataacttctgatacccttggcatttactagtagtggtaacttcttgataacatcaatatttgttttgtccacctcaatgccttgtgctgaaattttgtggcccaacattatccctgcttgaaccatgaagtgacatttctcccaattcaacactatattggtctcaacacatcttcgcaacacaagctctagattcgtcaagcagcaatcaaaggagggcctgaaaactaataagtcgtccatgaagacgtatatacacttatctaaca

SEQ ID NO: 139712 - DNA, 358 bp, Glycine max
  unsure (1)..(358): unsure at all n locations
tgaaatatgaaataagaatctatatactgttaatgtaatcatattaaaataaataaaatcaatttaattccatattaacttttgaaaataagaaaattgagacaatacatatttatgttccaaaattaacacgtaatgttgctgcgggtttttaaaatttaagtgaaagacatttttgtcacttcacttanattgttgtatgcatagtaatggtgctggtgcacctagcaacaccatctatttctgcaaaaatggactaggcccaaaatgagaaaatggtccatgtcttaaaaaanaaggtgtaaatagtgattcttgtntatttcagacatcacnaaaatggactangcacaaaatg

SEQ ID NO: 139713 - DNA, 265 bp, Glycine max
gacactataaaactaagctttgaataatgacaaaatgtcagcgtagtgcttctttttgttacttgaaaagcggccgtgacagctgtagatggattaagtcacctagtaaacataagaattgtgtggctcatgtttggatatcgaatatatgacatgctcgttgttcctgtaatccaaaactctcaatcaagacatgaatgttctgaatgggcgaaatgattaaagagtataggatcataatactattgctcaaaaagaaatgtgg

SEQ ID NO: 139714 - DNA, 294 bp, Glycine max
  unsure (1)..(294): unsure at all n locations
tggatacaaacacaaaggatcacattcacaaacaccattcaaatatganaacatcactgtgttggttaatttgaaaatcgagataatactggataaatctgaagtcgtgtataacactttcagattgaatcanatttcggggttcaaccaacattgttcaatcggataaaatcagaagattataattcaagagttttgttctggtcttgtatgttntgtcacccgttatgctntctgaaccacaatgattatttatgatcaaagaacaaatgggttttggcggttgatggaagt

SEQ ID NO: 139715 - DNA, 305 bp, Glycine max
ggatgtcattcataagacactgtgtcgacctatttgtagtcttaacatgcattgatgatgtaattgtattcattatgagatatgatacgtggttagccattactaaccaactaatattattaagtactcgtttccgctagaacaaagttagtttgttcgacaaaagtcaagtattcgcgtgcgatacatctttgccataggcgtgaacacatgatgatatgcatgcgtctctaagcttgagcgcaacaccacatcgactgactggagtacgcattgtgttggaaacatcaactctaaacgggttg

SEQ ID NO: 139716 - DNA, 450 bp, Glycine max
  unsure (1)..(450): unsure at all n locations
ataatatttcatacgatgacatttcatttaattattttggtgatcataaattttcatttatcaaaatcctttgtagatagttatttttaagacatcaataatcgattctaactctaacaccatttgattactctcatgattaatggatattccttgcaattaacacaacattttttaatatatnttgtcttcactactcaggttntttttacaattctttaaatgaatactcacctctcaccttatgagtgttcaagtccagtacatttaacagtaaaattctaaaataataagctatcaaacaanataatatatgtggttagtataaataatatcaattanaatgtttaaatgatcatcaattatatatataataacatatatacttgtataatctctaaagtctttcttattctcatatgggatcgtggannacgtacatagtcatct

SEQ ID NO: 139717 - DNA, 358 bp, Glycine max
atcccgtgtgggctaataccaacccagcttgttcacactttgatctaaatcagaccaacaactgttgggctgtcattgggccatttactatggtactaaaattgacatgtattggatgcaggcattctccttatatcatcatagtggatatgttgactcatatattgagaagtgacgatacatatgctcaagttgtgaagcaattttatagttttgcatatgctaccttgtatccaagttactcgcgaatgtatactatcattgaattgtgtcatcttgtgttggaaacttgttctgtgaaaagtgtaattgggaactatcttggctagacttatattgtgcatttatgaaggtcctt

SEQ ID NO: 139718 - DNA, 403 bp, Glycine max
tagagaggaagcttcaatggaggacaataatgagagatttgtgggcacacaattgaacgagaaaaaagagggagagaagtggaactttgaagtgtctcacaagactctcattcatcaaagttatgacaagtgtttcacatgcttttatttatatcctatgtcactaactaaatgaaatcttccttgagaagctaaagcttggctagacacacccctgttatatcttagctcacatgcatgccaaaatacatgaaaatgcttagttactcacacccctcttatatctgatctcaccctcatgtccaaatacatgaaaattcaaaaaagtccctactacaaatactactcatattgccctgatatacaatgcttaaaccctcttctggtagaatatgccatatac

SEQ ID NO: 139719 - DNA, 181 bp, Glycine max
tctatcacaatcgaatgacttgtgacgtcctcatatgtgtgtacaccatggtcatgttttcgttcctacaaataatttggaatatttggtagtgattctgaatgagtgagccctcttggcgcaaaaactaatgggtcctaataaatcgagtgttcatcttataatgggttgctcatcttcc

SEQ ID NO: 139720 - DNA, 301 bp, Glycine max
  unsure (1)..(301): unsure at all n locations
tgggaattatgatgagaataaaanatttcagtaatgtggagcacgtgtggtaggacaatgggggagaggacccacaagtttgtgaaataaaaatggatctgagatgtgatctaaaaagaataagactgagaattcanaattctcagtgaagccactaagaaagtacttcgagtttagtagtaaaagcaacttttgttagagatgtcacatggaagagtgcgaagacattattaaaacaagaattctgatcatagggtattgtattgaaggcatcgtattaaatagccacttggtttgtaat

SEQ ID NO: 139721 - DNA, 422 bp, Glycine max
  unsure (1)..(422): unsure at all n locations
ggatgattcaacttttcttctctatggacaacaagtcgatccagttatcaagtcccatcaacttcagcgattcgtcgtatatccccagattccactccgcttcctctctaaagatgatcgtcacgctggcattgagaatccagcttatgaaacttgggagcaacaggatcaagtgctcctcacatggcttcaatcgactctctctacgttgattntatcacgagttctatgatgcacccactcctatgaggtttgggaatgcattcacgattatttccacaagcaaacaatagccacagctagtcaacttcgcactcaactttgtgctatgacacttgcaggcaactcaatacgtgaatttntgtcacagattcgagcaatttctgattctctagcttctgttggaagccagattatgcttc

SEQ ID NO: 139722 - DNA, 390 bp, Glycine max
  unsure (1)..(390): unsure at all n locations
gctctggtgggacatcttgacttgctntncaatctgacattcatcacatattctgccttcttctatnttcagattgggaatgcctctaacagcacttatgtcaaggattttcttcatgcctcttaagtgcagatgtgcaaacctttgatgccatattctgacttcatcttctttggaggatagacatgtggaggagtagctggtttcttgaggtgtccatagagaacaattgtcctttgatctgctgcccttcattagaacttcactcttctcatttgtcaccaagcattctgactttgtgtaagttacattgaatccttcatcacacagctgactgatgctgatcaagtntgcagtcagtcccttcaccagcagtactttgttcagact

SEQ ID NO: 139723 - DNA, 430 bp, Glycine max
gtactgcagagagtttattcactgattcggcatggaaaatgctaagcacatggctgaaccaatgaacactgcttgctatttagataataatgaaaccggtcagtcaatagatgttaagcaatatcgagatatgatcggatcccttcgttatttatctactaacacgcctgatataatggttagtgtgtgtatgtttgctagatttcaatcaaatcccaaacaatcacatcttagtgtcggtgaaagaatcataagatatttggtaggcactatgaaaataagtttatggtatcctaggaattccacatgcaccttaataggatactctgattcagactttgccggttctaaaatagatagaaagagcacaagcggaacttgtcaattcattggatctgctctagtctcttggcatagaaagaaacaaaat

SEQ ID NO: 139724 - DNA, 376 bp, Glycine max
  unsure (1)..(376): unsure at all n locations
catttaaaaaggcattctttatgtcaagttgctgtaatggccaatctaaatttgcagccaatgataagaggactctaatggtgttaagttttgcaataggagcaaaagtttctgaataatcaataccataggtttgggtgaagcctttagcaactagcctggccttgtacctctcaacagacccatctgcattatacttgataganaacacctatntgcatcccatgatttgttttcctcttggtaggtccaccactntccaagtatgaaattttttctagagctctcatctcttccaagacagcttccttccacttangaacccttagagcttnctgtatatctcttggtatttctattttttgtcagtcacaac

SEQ ID NO: 139725 - DNA, 482 bp, Glycine max
  unsure (1)..(482): unsure at all n locations
gcttggaaaccttttatttcttctagtgcatgttcttgtctattggtctttcattgcaaaggatctttgaatttattggaccctgatagattcccatcaatatctgcagtctaatgggttgtacggttatgaacttgatcagcgttataagattcttaccatgttgattttctgcaggatgatgctacactctggagactctattactatgttgaagctgttgagaaagccaaaagtctttcttgtagtcaagcggcctagttttctaaatgctttctgaaagccttcgggccttaatgatagttcattagagctctcaaatagatgtttctgatcttcctaactctaaagtttagagtttatacagaatttcaaaatgcttacctcttttgcgacatcanggatactatagttcatcgactgagagtaaaatgccccttatacctgaagtgtatatagcatatagaatggtttttcttctt

SEQ ID NO: 139726 - DNA, 289 bp, Glycine max
ggtcttacacggctcactgggttggtggttgcgattttttatagcccgtgttttgggaggtttctggttaaacagtggcctttctggaccatttctgctttgctgttgctgtaaaagggagactgtgtgaagagccaacttggtatactgcaactgcaatcggtctgcatacttatcagtcttttaaggtccaaaaaaatgctaggactaacatggtttccaccttatgaattaagacaatgggcaattcataggggattataaaattcatttagtatggaaaaggagg

SEQ ID NO: 139727 - DNA, 464 bp, Glycine max
  unsure (1)..(464): unsure at all n locations
gacactttatactaagcttgtatgaanactntcttatttatgcattatgatatctatcattttgatgctcaaaacgttctaatgcaaatgcaatatatatgacaacaaataagttaatggtaaaatgaanggaaaaggaggattcaacacatggatttttatactaattcaccccaaccttggactacgtctattcctcacccaaactaatgaaatttccattaacacaatcaaccacttgttggataatttgtgttttgataacaactaagacatacatttatntatgtaatgatcttctgaacatgagaaaatgcacattgacattagtttctcataatcttatcaaacattcaataatgagtgttatgattaaccacttagaaagtgaactctctatgtgctatatgacaacaaataagttaatggtaaaaggaagggaaaaagaaagatcaacacatgga

SEQ ID NO: 139728 - DNA, 462 bp, Glycine max
  unsure (1)..(462): unsure at all n locations
tggtgatttccaccatggagatgcagcggaagacaaatgagaagatgtgagaggaggcgccatccactatggaataagccatggaagaatgagcttcaccaccaagtgagccttatataagaagcttggaagggatgctcaatggaggaaaagaaagagggagagaaagagagaggggtggagcacgataatgaaggaataaaagatggagagacgtggaacttttgagtatgtctcacaagactctcattcatcannagtacaacaagtgttacacatgcttctatctatagactaagtagcttncttgatagctttcttgagagacttccttgagaagctttttgataaacttcctgagagctagagctagctaccacaccctctctaactagctcactcttagagctcctaagaaattctaagagcttgactagctccatccttctatactaactactc

SEQ ID NO: 139729 - DNA, 469 bp, Glycine max
  unsure (1)..(469): unsure at all n locations
gggagaggatgcttcaatgggagaaaaganagagggagagattgagagaggggggagcacgaaattgaaggaagaaaaagggagagaagttgaactttgagttgtgtctcacaagactctcattcatcaaagtgacaacaagtgttacacatgcttctatttatagactatgtagcttccttgagaagctntcttgagaaagcttccttgagaagctttcttgagaaaacttccttgagaagcttctttgagaaaacttccttgagaagctagagcttagctacacacacccctctcataactaagctcacctccttgagaagcttccttaagaagattcctaaagaagctagagcttagctacacatacctctctaatagctaagctcacctccttgagatgaaaagctagaacttatctacacaccccctataatagctaagctcaccatcatgacaaataaacatg

SEQ ID NO: 139730 - DNA, 260 bp, Glycine max
  unsure (1)..(260): unsure at all n locations
atggaaatattcagaagccacattagaggtcagtaaaaaacaaatacaggttccttgcaaactgcattnttctnttttaactcataagcgacagtttggcagtgcactgaacttgctctttatcagttcaacattttaagactgaacggaaaaaacagttcagttttttacattcaattcggttcgataccagttcggtgcagttcagttcttttcagcccaccctaattgcaaggcagaatacaggcaaatatgtctta

SEQ ID NO: 139731 - DNA, 391 bp, Glycine max
  unsure (1)..(391): unsure at all n locations
ctaactaagccaaatgtttattcctgcttctttgcgaagtctaaanaaaaaataaaaagcctgcaattttgaatgtccgagacctatttaaaatgtgtgaatccagaagagaataatcaaaatttagtgaactttaactcacgaaaaacattcaacctatttgtttatgtgagaaacaacagtttcttttaacaaataagtggtgaagatgctgtaacacaatctcccttatcctctatcccttctcaagatattcgatgatgatgccttgagagtggcatcttcatcttctcagctaatgtaatttgtacacattaaattttgccaacattaccatttgagcatgtttatctcttaccaacgtttttcttcatgatgagccacaatactc

SEQ ID NO: 139732 - DNA, 433 bp, Glycine max
  unsure (1)..(433): unsure at all n locations
tctgagtctgcaggtcttggatggtggcactcacattctattgaaactgaatggtattggtggccatttgcttcattagctactccaaggaaggtccagaactactattcttcactggttgtgcaagtagaggtgtaaactattggaattgttgttgttgttatcgtttgaaaggcggagcttggtattttctggtggattgttgaaactgttattgtctgaatggttgtagctgttggtgtgtctgttgctattgttgtggaccaggaccatatctcaagtttggatgatctctccaaaaaggattaaaggtgttagactaaggattatattnngttgtgtgaggtctaaataggtgtctaggtngcatggcagaaacatcaacaacttngtctgtctcttggagtgtggaacatagatatattatatgatc

SEQ ID NO: 139733 - DNA, 359 bp, Glycine max
ctggactcatgagtggtaagttgaggtctaagtggattgtgtcatttgttgttactaaattttttccttatggtacagctgagatcaaaagcgactccataaacaaagagcttcaatgtcaatggacaccgacttaatccattcctcacaaacccttctttagtggacgtagtggtggaagagacttccttactccaccctactcttcctccaccatgacttatggagtttttcttttcctatctccttctttacttttattacatttgtccgattctatttgatggtttaattgcttttaatcttttaattgtgctacattgaagacaatgtgttgttaaatatggtgaggggggagt

SEQ ID NO: 139734 - DNA, 378 bp, Glycine max
  unsure (1)..(378): unsure at all n locations
gcagcacactcttctttcatatatcacacctgactcatgatactatatcttgtttttgcattntgcttaccacagttagagtgcaccaacctcagtcacttatccatgctaaaagtcaaagaccaaatattggttcccatatgatcactagttttgactctatatcatttgataattcaatgagtaaaatcaagtatacattcataaatagtattttgggtagaagatctagttagaaaagatttcaatttctccatgacttgtattgatccagaggatttgataatccaattagttaaatcaagtagacattcataaatagtattttaagtagaggatccaattagagtagatttcaacttctccatgatttttcat

SEQ ID NO: 139735 - DNA, 434 bp, Glycine max
  unsure (1)..(434): unsure at all n locations
atccttgagtcacctgcggcatgcaagcttatcaggcgttgcttcgatccccgaccgactctttatttattttcttatgntttatttccttaagctntgtggttatttctttaagccttgtattttggcttttattgcttaataatttggttattgttgtcttggatgtttaccattttcgtttgctgtgcgtntggttattttagactntgttttggatgattaagacttgcttggtttattctatggattgaatcagtttatggatgcattatgctatgattntgatgttgccttagttcctttctccaggtgtntntggatttttgttgttgccaaagggggatagaacaagggtagatattatcatgaacttangcataaattctaatcttaagggggagtaagggtgtgagcacgcatatcaatggata

SEQ ID NO: 139736 - DNA, 357 bp, Glycine max
gaaactcattaaaaatattatttagttgtttaatttactattattagttactttgtattgctattatatgttatgctttgaatattttttatattattattattatttattttattgtttattatattaaccatagatatagttgataatagtagttaagagataaagttaaaaagtaaaaacacacccttgtttgaaccccatagaaaaaaaaaacacccttgtttagaaaatatggtaagcggcccaacaagtttgaaaagagaaagagtgttgctaggtgcacccagcattattgctggtgcacccagcaaagctattaaatggcaaaattatccctgcttgtttttcttctta

SEQ ID NO: 139737 - DNA, 346 bp, Glycine max
ggtctcagcgtctatgcgagacagaaaccaacatgttatctatcatcgccaagtaccaagaagagttgggtctagccacggcccacgagcatataatcgcggatgagtatgcccaagtatatgcggaaaaaagaggctagaagaagggtgatcgactctttacaccaaaaggcaaccatgtggatggatcggtttgctcttaccttgaacgggagtcaagaacttccccgattgttatccaatgccaatgcgatggcagacacctactccgcccccgaagagattcatgggcttctcggctattgtcagcatatgatagacttaatggcccacataattagaaatc

SEQ ID NO: 139738 - DNA, 368 bp, Glycine max
  unsure (1)..(368): unsure at all n locations
atgtnctcgatcgggttaatcaattacaaccttatcataattgattatgtcgcaacctacccttcagcgggaaggtgaggcgtgactcaagggtgagtcttcctaaaaagaaaatgcgcgggagtcgccaccaacgtttattcaaggaaaatgttagaaaaaccaaaatggggtctatgaattttaagaataagggttcgggagttgtttacgtgcggngaaggtattatcaccccacgcatctgtcacaagggacagcagcctttaattgagtgcgaaanatcatgaagtcaatggttaatttattttccctcttatgttttttacattttgggcgacaagacatgaccttgctctacgtatctcag

SEQ ID NO: 139739 - DNA, 295 bp, Glycine max
  unsure (1)..(295): unsure at all n locations
cacattcacctttctaacatctttataaaacttgtccaaataaataataaattcactttggctcaaaacaatgccggctaaaacttcataccattaatattgaacctataccctaatgtcacatcctatcaaagcattgtgttctcgtgtcatctagcatcaagttcttcatagtcatccacctattcatcttgctccatgaacacaagggtcgagatcatcatatgatccanacacaaataacacaccgagagtgagttatcacattcctaacatattatcacaccgagagtga

SEQ ID NO: 139740 - DNA, 138 bp, Glycine max
atctcttgtcaacagactcagtcttcttattggacttcttctctggaacatgagaaatgaatgtatcataaattgtattgctataaacaaacttttcctgtgcaaggtcggtggcagatgagttgaatgcaactggat

SEQ ID NO: 139741 - DNA, 190 bp, Glycine max
agatggctatatattattatacgttgtcattattttttttagaataaacaaaaatattaaagaaaaattaactgtctaaatataattcaaattctttgccttttacttacctaatttcacaactttattgactatacaatacacatatagtgttactacaggtctaatattaaagatactttcaaatctt

SEQ ID NO: 139742 - DNA, 334 bp, Glycine max
  unsure (1)..(334): unsure at all n locations
attgagaatgatgtaaatntgaagcaaactctcacctcacaccagtccataacagtaatctaaacttgctgaaactggatttacgcttaaaatctcaccgaatcaaaatttgactcttccacacccaaatttgacctagaaatggctctgtgttcactatggtcatttgttnttctctctagcacagcctaacctttctcataagtcctaaatgacatttcaagctaggattaactcactttaacctccatgtaccacagaatccagaataaccttccagccctaaaaattcactctttctcactataacaccacattctcactgtctaaccct

SEQ ID NO: 139743 - DNA, 344 bp, Glycine max
gggggagcacaaaattgaaggaataatagaaggagagaagtggaactctgaaatatgtctaacatgactctcattcatcaaagttacaacaagtgttacacatgattctatttataaactatgtagcttccttgagaagctttcttgagaaaacttccttgaggagcttctttgataatacttccttgagaaacatgagcttatctacacacacccctctcataactaagctcacctgcttgagaagcttgcttaagaagattcctaaagaagctagaacttatctacacatacctctctaatagctaagctcacctgcttaagatgagaagctagagcttagc

SEQ ID NO: 139744 - DNA, 248 bp, Glycine max
  unsure (1)..(248): unsure at all n locations
tctctagctctttcttgtacaaaacacaagcatggcctatttgtgtgtaaccttgtcttgcccatataggtngatcttaccaaccctattctcctttggcttatgtacttnctaatctcctcagtgatgaaaaaatngatcacatgatcctctttcactgcngacttcatgccttcatcaagccttcgaacccgaacccgccttagagcaacattagcactatgaaatggcctaactatttgatcctt

SEQ ID NO: 139745 - DNA, 479 bp, Glycine max
  unsure (1)..(479): unsure at all n locations
tctgacggtaggacatagcagaaagtacttcagactgttgatgagctgtggagacaatttaaatctgatttgacaaggaaataggcacttgcacctgacaaggacaatgtgaacgacactgtttgtgaaacatacgacattatcaaggagaaatgggcccaattttgttagacccgcatagaccccttctgggaggtatgtactttgtcattttaattggtttccactaaaaattcagttcttataatacattgtagtaatgattttcattaatgttcgatttttgcaggatgtgcagaaaaaggcacatgcctccagaagcaaaacaccgccccccacgtgttgtctcgtgggggttatgaacacttagaacagaacctgatgggtgagaagataaagaanaaactggaggaagatgctcaatccgaaagcactgaatgcgtgattgaccctnncatctccatcacacgtgaagtgga

SEQ ID NO: 139746 - DNA, 381 bp, Glycine max
  unsure (1)..(381): unsure at all n locations
gtctctcttttcaatcatgttcctgtatatgcaaaactcgaatatgagatgctggttaatggatctcaacttacgttcactagaaccaacataatgttggttgagaatcatggtttgaatntatttctagaatgaanaatttaaaaagaattattaatataaaactaaaacatctattaattaagatattaaatgttattgaaaaaattaaacacgttcacgtatacatgaataatatctagaatataataattgttctattactgacctttataaaaatagtaaagacatgtcaacanaatgttgttatgaagaatatactactcattaatccaatatagaatattattaccttaagacaatagtgataactatcaaatt

SEQ ID NO: 139747 - DNA, 437 bp, Glycine max
gtgctacatggaagggctattgtctgtatggtgtgtagtagaagagcataaaccatatactgttgcgacaagtacaaatttcttattcaaggacagctgggttaccatgtttaccaatgcatctagtttaccctcaagcttcttaatttcagatggtgcagatgaatttgtagctacctcatgcactcctctaatgattatagcatcatttcttgcgctaaacttgtgggagttggaagccatcttctcaattaaatttctggcttcagtatgggttatgtctacaaaggctccaccactggcagcatctattatacttctctacatgttactgagtccttcataaaaatattggagaagaaagtgctccgaaatctgatggtgagggcaactggtacatagctccttaaatcatctactagattcatatacgctct

SEQ ID NO: 139748 - DNA, 304 bp, Glycine max
  unsure (1)..(304): unsure at all n locations
taatcttgaatatcatgattgtggtagaacaactgatgcctgtagctcangattagtaagccaagctactggtgttcagcatgatgacaattcagtgtcagcatttccaaatcatgggagttttatttcaaatgatagtattgaagaccagccgaataatgtaagcagtgtctcaaatacggaaacaacagttaatgatccagagtcatccttngatgagaaacatgatatggagaactctngtgttgatggactggatgctntggtaactatcaacacttctacaattgaagaatcagaaata

SEQ ID NO: 139749 - DNA, 406 bp, Glycine max
tgtgcttggcctgtctccacagcatatcaacagcatcttctctttttgtaggatactcgaattcataatgatgggagatgcttttgagttgcctccacatttcaatccatttctcctttggaaatttacgaagttgatcaatcatgtatccaggctgtaatgcctctttgaaagagaagaaaaccgagaactgggagtagtcaatatcatcctcaaatgggagttcaatgtgatcactcacaatgaccggaacgcagtgactcacaatggcatcaaaaagccgacaagatgatggtgtgtctcctgctggatgcaaacagaactttgatgaacgcatccctttagatgactgttgtatcaagatcagtgaataaaggaacactataattaatgattttggcatgat

SEQ ID NO: 139750 - DNA, 318 bp, Glycine max
  unsure (1)..(318): unsure at all n locations
atcattgaacttaatgaggtccttttatggtgatttttcaccatggagatgcagcggatgatatagacgaagaggtgaaaggaggcaccatccactatggaatcacccatggaattaaaaatttcaccaccaagaaagtgtcttggataataacaccaaagaggaaccttgcttgtgggtcnaccgagagagagaaagagagaggggggagcatgaaattgaatgaagaaaagagggagagaagttgaactttgaagtgtgtctcacaagactctcattcatcaaagttacaacaagtgttaaatatgcttctattta

SEQ ID NO: 139751 - DNA, 348 bp, Glycine max
  unsure (1)..(348): unsure at all n locations
gcagctctcttncatggcttattctctaggggatggtgtctnctctcaccccttctnctttatcttgcactgcaattccatggctganaatatctatggaaggaccttatcgaagttcaaagatccatcctccatagaagcttctcaagcaagcttccatcaagtggtaccagagcacaagagcttcacgtaggtgctcctgatacctccattaatattaagctttatcttcttcccattgttatttcttcattttcctccatgtatctcctcacatgtcttgtgttgaatgttgttaacatgatttttaagaaatttcaccgattaaacttgctatagaagctagat

SEQ ID NO: 139752 - DNA, 427 bp, Glycine max
  unsure (1)..(427): unsure at all n locations
ngctcaaacacaaacactatcgacaactcccttcttctttctcctgcgtggatggtctacacgaangcagcaacaaaagcttcttcttttctgcgtttttttttctttcgtgtgaatggtctacggcggaggggggatttaagcacctcaagcaattgaaattgctgttggggatggcgattttttccatacaactcgtcattgatcctgtcgacttcctgcaccctctgcgcgttgcagactgcaccctctaaaatggcctctgctgcctgcaaccctctgaactcccttaccctcaactcgccagtttgactggcgagtccaacctaactgatagcgctaacaccactggcgagaccagtgccaactgtcaccttgtcgccaaacttaccaacggctactgcgagttgtatgtgttccacgttaa

SEQ ID NO: 139753 - DNA, 114 bp, Glycine max
atttgcgtattttcctttgcactcatgtcatagaaccggtccccattctgtcctgcaacaacccgcaaaaacaatttcgccgcttacgatgaccacgtgccagctggtatggtg

SEQ ID NO: 139754 - DNA, 243 bp, Glycine max
  unsure (1)..(243): unsure at all n locations
tccaagagtgggagaaagcaaaaagaaaagaaagaaaattcctaatcaaagaatgggagaaagaanaaaagagagaacgagaagaaggaaagaaagctcctgatcaaggatcgaaagaaaacagaagatatgtgcagagaggtctttggaccagacaatatctgaacaatacggaagggtcaccaaatgaacaaaagaaagaaaagganaccataacctataagtggtcttcttcctttgata

SEQ ID NO: 139755 - DNA, 406 bp, Glycine max
tcttagtctcacacgatgcagatgggtttgtatctacctcatgcactcctctaatgactatggcatcatttctggcgcttaactactgggagttggaggccatcttctcaattaaatttctggcttcagcaagagtcatgtctccaatggctccaccactggcagcatctatcatacttctttccatattactgagtccttcataaaaatattggagaagaagctgttctgaaatctgatggtgggggcaactggcacatagtttcttaaatctctcccagtactcatacaggctctctccactgagttgtctaatacctgagatatccttcctgatggctgtggtcctggaagcaagtgaaagtttttctaagaatactctcttaaggtcatcccaactcgtgat

SEQ ID NO: 139756 - DNA, 287 bp, Glycine max
  unsure (1)..(287): unsure at all n locations
tcacctttacagagagggcaactcttgtgaagacttacttgcctctcatgcttctgctatctctgattttagctggtgggatacttcctctttntttgttgcagcagaaatgaataggaacagaataggattacctaacataggttcttatagtttcttccagcttgagtttggtttggcacctcaagctgtcttgtttgttttctcttctcatcaaaatatatcttcttgggtgtgcttagaccttaatgttgcggtgaactattgtgtagagttttattcacatc

SEQ ID NO: 139757 - DNA, 385 bp, Glycine max
cgtgacactattatactaatgctggttacaatgagctctgcctaccatcttcagagtctgtctttttcatgcacacgggtgatgaacagtacttgcgcgcttttgtgcatcgccggccgggaacatggggcaagttcttgccgtggatcgagttatctcataatacctcgtggaacatatgcacatgttctacaccttatgagataacatttggacgcaagcccttctcatttccggaatacctcgccggctcctcgaagcttgacactgtggatgaccttctgatgcatcgcgatgaagtgtttgatagtatttgccggaagttgatcaaagctcaagcttatatgaagcttactgcttatgtcaaacgccgggaagtcaatta

SEQ ID NO: 139758 - DNA, 238 bp, Glycine max
  unsure (1)..(238): unsure at all n locations
gactgaatgttatggtcgggtatgggggtgtacgccactgagtcttggttccactgtgactttccatgccgcattaatattcttctctttggaagcacaccaaccatatcttctcttctctttacattcattntctttcaccctcacaatgttaattctttttatccaaacataaaattgtgaaaataaaagaatatttatacactttccttcgcgcatgatggntgattctatattc

SEQ ID NO: 139759 - DNA, 407 bp, Glycine max
atagccactgtcggtagagatgatcacttgagcataatgtggtagtggtttaccaagagaaaataaagtttgaaaaaacttgaatctctcatgtgatgacacaaattaagagagagatgtaaatagcttgtatattatattcttacttgcctgcttgtcgcataatgatccacataattggttctacttacaattcaactaatcagtgttatgaaacagaaacgaataggacttcgagacacaactttcatctgacctcacgtcaacagttcacggcacgaagcctatatcaccatttgcaacacatagagactcttttttgcttattaaaagctactgacaacccccaacctgttatttttttcatgtccagatccactaattccctcttgtgcctttttaagaaa

SEQ ID NO: 139760 - DNA, 327 bp, Glycine max
  unsure (1)..(327): unsure at all n locations
ctaccccanagcgggtggtatcaatcaaatcatgagcatggacaaagggtgtccaattcaaactctgatcgtctatgaagcaagtctggatggaacattcgatgtggatccacgcgatgacactatggacatatgcccaaaccctattgaagaacttatcaagttacagctcggacccaaaccatggcaatatacacaactctatatggacctcactttccaccaacacagacgcatagctgatggtctacacaagaacacaaacctatttgtgttgcatccatactgcatgttgggtgttcatcccataataatatgccacaagct

SEQ ID NO: 139761 - DNA, 439 bp, Glycine max
  unsure (1)..(439): unsure at all n locations
tcttatttcttctcctagatgctctggagatatntatccaagcattgcccttagtaattatttggtggaggtttgcttgttttacttggctatatntactttntctttttaaatgtatgatgataatattaatcaatgtttacggatgacaggctcacacagtgcttgagatgaactatactgagcagcaattaacagcagctgtcgtttctgatggattacggcctgtccttgctgccgaggacttgggtataccgtcaagattattatcaatgattaaaaaatgctgggatgcagatcctaataacagacctgcttttgatgacattgttgaggaacttgatttagttatggagcatggtaagtaaagaaggcagaagatattcatatcagaccttataacttgcatgttgttcaacctgcgggcaagactgatcac

SEQ ID NO: 139762 - DNA, 150 bp, Glycine max
aaataactacccctccttttttactactctgttgaatactacaccctctttactctaccctgcaaacagaatcaaaaagctaccaaactcctagccaatcagtaactatctcttatgcaaaacagccaagaggaacttttatattacaaa

SEQ ID NO: 139763 - DNA, 309 bp, Glycine max
  unsure (1)..(309): unsure at all n locations
atcttagcacgagctgcagctgtatttgtgttattgatgtcctttgcttaatgcttaaggtatttctcgtgacatctgtgattgatggactgactgacacgttattgtacttgcttgatgtgggcagtgatattgtgctcaggaggaattacattgtacaactaccatccttacttgcaattgttanacatgtttgtggacagctatatgcctgtttccatggtctctattcctcttgatggcgtacatgagacaatatagaatagactaattggactttgcacaatctagaactgcttggttgtcctg

SEQ ID NO: 139764 - DNA, 411 bp, Glycine max
  unsure (1)..(411): unsure at all n locations
tgtctataacatacttagacacttcctgagcatgtacgatcagttatgcaagttggataacaactttattatatatgatcagcacagggtatgtgcgtggcgacagcaaatttgaagtgcagtcgtttcctgtgtcagaatgtacggacatagctttgatccactggctgatgctgttactgctgtgaagcaactcactgcagcatcctctatcatctactaatcttttccaggacgtccagacatctcatgtgacatcagctgtttgctccccctggctacatgctggtactgcatcttgtatcatgtactagcttcagttgcttacatcaatcatcatcagcatcacgcagtctgcggctcgaatgatatacatacaanctcccctcanaatcatgaatcatgcataca

SEQ ID NO: 139765 - DNA, 285 bp, Glycine max
tttactttaccatggttttcatgtctaagtcgtggtagacgctagaacacaatgagttagtgccattatacccttttctctgtaggtaagtggttagtctaatccctttcttcagttgagctatttcattgattcaacatgttgaagcttctcattatgggtaaaaaaaaaatttaactaaatatgtgtacatggcaattgtgtgtagtggtatgcatagtcttttaaaggaagttgaggaaaaggggtgttcgtatatgcatctttcttacgggagtcgagaaa

SEQ ID NO: 139766 - DNA, 427 bp, Glycine max
gatctcttgtggtggtctacaaaagtggggcttttgctcctacatatccttaattgcaatgagaaaatcaaacctacgtatttcttgcagaagtgggaaagttacatgttgattttatgcttttgaatggtccatgttaaccgatataagcatagatgaccgtttaaagaattggaccttataacagtttcaagtgatttttgcggacaaagcttgatttgtgagttgattttagccttaatttcactctggtttttagtcaattcattcaatgaaacttccaaagaaaaacgtccgattgatttctttgattattttattcaaagatattttaggtatttattataattttccctttcgattaactggattaaaacggaatgatccggtggatgttatttaatagtgttaaacgagataccactca

SEQ ID NO: 139767 - DNA, 445 bp, Glycine max
  unsure (1)..(445): unsure at all n locations
ctgacgctgcagctaccaagagcacatctgctatcttgcagnttatctattatctgcacttatagntcacagaaatggactgttaaataggtgatcatctaataagaatgcataccaaccatattacccttcacctgatcctatgtgggacttatacaaaatacatgttgttagtgcttagctctactgagcgttaagagattggctaagattttgtaaaacataagcacttagacaatgaatgaaagctggagttgctgcacatgatgtccaacgttatgtcaaggaataagatcgggctgcacaatgcacaaggcaagataaaatgtcaaatgaataattgaagttgcaggatccacgatgtcggatacaatgtcctgacattctgcccgagagtactgaagttgctgtcaatgcaagataaagtcaagtgagaagtgaactg

SEQ ID NO: 139768 - DNA, 301 bp, Glycine max
attctaaagatacatctaattggtacagatacttgatttgatttagtgatggctgcactttttgatagagaagtgtagaattatacttggtgattattaatggctaaagatgtaataaactttatatacatatgtaaatttgttacaaattacagagctgtgaacttaaaattcagagataaacttaacattcgatttctgtggtagttgtaaataatatgtataccagatttggggtttcaccaacgttaatgccattggtagtcaaggttattgggtttgattgaaatggagggtgtag

SEQ ID NO: 139769 - DNA, 408 bp, Glycine max
tgttgatcgtagcacttgtcggaaaaaattgttatcatcattataattatcaaaaagtcttttactcgaatgatattactggccaaacttcagtcttcttgatgtaaaatcttaaattgaagattttgaaaaatatatgagttctacatctttgtcatactattgtaatttaaatatcctttcttaatttttttattctttttcattgtacataatcaaactcatcactctagagatcattagtgaaaattaatatttgacggtaatataatgataccaaaaatctatggttgtaaaagaatcttggaaggaggagcgttggattatatatatggagatgagcgacgaaacacgcatgtgatatgatactgttcactctctttcttactgagtattaaatcatgaaaa

SEQ ID NO: 139770 - DNA, 343 bp, Glycine max
  unsure (1)..(343): unsure at all n locations
ctacccctcatatcttccaaaaccccatacccacgaaaatcaagagggaaagaagtccacccaaacctgaattttcgaagtcccactcgtagccacgcacttcacgaccccgaanatgcccttctttcgcgaattggagcagaaatgagcaccanagggtgtgagctttgtggggtttcaatggagaatggaggagaaggaaaaagcaacgtgaggaagagggagagcttctgaattntctggtttggctgagtgaggagagagaaaagctntntggttntaaataaaagggtgtcctctttttctatttatttattcaagctctggcacatgtccctatttg

SEQ ID NO: 139771 - DNA, 469 bp, Glycine max
  unsure (1)..(469): unsure at all n locations
tggaattgcgaaagccacactccatcattatgatttgtacctgacatctcaaacaaacaaatcatacgttacaagacaattatagttgcttgttgaatacctcacccactcaagtgtatcacacaattatggcttttctctaatgaaacactcttgccttttaccactctaattccccttgagttcttaggcaattcaagagattatggccacaacaaagaacaattcaccaatatgtgtaaggtaagggctagagagacaaggaaaaggttaaccaagaaaaaggctaacaatgtttttaggcacaaatgaaggaaataaaattcagaatttatgaattcaagtaacaatccttcatgcaaccaatatattaccttaaagagattntgtttannagtcttcaagcatgaaccattcagcccaattgttttttttttttttaatgttgctatacngaaatcttcttctt

SEQ ID NO: 139772 - DNA, 277 bp, Glycine max
  unsure (1)..(277): unsure at all n locations
tgcaaggactcgatgcacattacagaaggaatgcaaggcacaagaatatgcccaagcttcggtgaaaatgcagaactgcctagtgattacttttaatcacaattcgtattgctcgcttagcgcacaaacgcgcttancgagacaatataatgtttgggttcaaaataggcctgcacttagcccatctgtccgctaagcccaattacagaattttcaaattccagagataattacgcttagcgcgaagacacacacttagcgatgtctgcactctgat

SEQ ID NO: 139773 - DNA, 324 bp, Glycine max
gggagaatgtgaatgtatgtatacatgattttgattatgtcaaaagaagaattaaacaaggctcattttgcttcaagattaatacacagattgtttcaaaaaacaaagccttgattcaagaattcttcaagatcaagccttgcctcacaatgaaaggtttcaagtcattcaaggcacatgtaatcgattaccaatacatgtaatcgattaccaatggtttgaaagtgtgttatcgattacacatcatatgttatcgattaccatagactctgaacgttgggaatgtcaaatttaaatgaagggtcacaactgttcaagaaaaac

SEQ ID NO: 139774 - DNA, 425 bp, Glycine max
  unsure (1)..(425): unsure at all n locations
atcctctgagtcacctgcggcattgcaagctaagcatactngcacttatatgtatatacttgcttacttctccctcactcatattttacttgagtgtcagagntcctttgtttccangtcccctcttctgtcctctcaacaaaggccaccctcaaagctgatgtgtgaagtccaggaccccacttgagccacgtccaccctgacatgtcatggttccgaattttggtaagaacatttggcgcccactgtggggaacaataaaacatacactgcggtctctcatcaattctctctcattcatacatggntagcactcggtctagccttatacgcgagaccccncttgaagactctcattctcatccgacaattatgacanacacagatactctataacaactccaaaaccacatcacggagatgga

SEQ ID NO: 139775 - DNA, 332 bp, Glycine max
  unsure (1)..(332): unsure at all n locations
actggacgcattggttaacttggtnacccatctggccttgaaccaaaaatctgtacctgtcgcaagggtctgctgtttgtgctcctctgctgaccaccatacagacctttgcccttccatgcagcaacctggagcaattgatcagcccgaagcttatactgcatatatttacaatagacctcctcaacctcagcagctaaatcaaccacagcagaacaattatgacctctccaacaacagatacaaccctggatggaggaatcaccctaatctcagatggtctagccctcatcaataacaacagcagcctgctccttccttccaaaatgttg

SEQ ID NO: 139776 - DNA, 362 bp, Glycine max
  unsure (1)..(362): unsure at all n locations
aagaatgaaattattatgcattngcacacactcagaggaggaagcaacaacaagaagccatctgagagtgattngagagntgttaagtgattgtgaggtgccaagaagaggaggagggatcccccttcctgtgtaagcagcaattgctcttcattttctgtctgaattgtaatttaggtctccttgtaatggattaactaaaacctagttggggatttctaatgaacaatngatgtanatacttttcatatcntaataagtggtgtttatgtgttcattgcttctatcaatgctttatttgtgatgcctttggctgatcatcactantgtgtatgtagggaacttacactggaagtgtactg

SEQ ID NO: 139777 - DNA, 296 bp, Glycine max
tgtgggggatttttgtgtcaccggataacatgttttggtggctatgattcatgatgtattttgggccatacctgatgtacattttatattggttaaatggtggacatgcctaatgagatgctatttctcaaaggctacagagccaaaaaaaaaaatcgaaagaaaaagaaaagccattaaggtgagtgaataagatcctaaatggcaaaaaaatgattagactcttgggtctattctttatggttaaaatttatccttaagtctttttattgtttgtttcattgttttcttaatat

SEQ ID NO: 139778 - DNA, 418 bp, Glycine max
actttaattgtagcttctgcatcaaacagtcaattgatgtgattttatcgagtctggatgcgggtccaaacatgagctaagccaattttagtaaatgctctcttttattttaagttttatatttttttaaatgattctgtaatatttaaattttttttatgttacctcttcttattactttgtcattgttattcattaattattgtgatgactaaattagtgaggcctaagattaaaaaaatatgttatagtaaagggttaaaaatacaatatatttatagaaactaaactaaaaattatattctttataattgataaaaaaaagtaaaaatattatctaaaatggtgtcttattaaatggagttaattatattgactctcttaaaagtttgggttattatagtctatactccatttt

SEQ ID NO: 139779 - DNA, 321 bp, Glycine max
tttaaaataccaaagtacacaacatgaactattacctactgaatatataatagtcatatccaagtacacattctaataacaaaataaaacaagaaatgggtcttcactggatgaaaataaacgtttatcacattctggaattggatgacatttcatgtccaacatcagtgggacttcttatggaactggatctacttcatgatgaatacaaacttgtatctcattctcattttccaaagcattcttcacaaagtataatatatcttcatctattgtacaactccttaacccatgagtgaaatctaggtcattatcaatcaa

SEQ ID NO: 139780 - DNA, 477 bp, Glycine max
gcttatttcctttctacaagtcaatttcataatttccctaagttatactaatccatatggatgacataagttaattccaatcaaggaaaaagagaaataaagctaggttttatatacttcaaaaacaaggtatatagtaaccaatagtttataatccaaatcatttcataaaaagttatcttatacatgtacacatcagtagatcataatatcatagatcaatcaccaaatatcaccatgggaattcaaacatcaactatcaatagttataatcatcatccaatcatcaaaattaatcataacatcttacttaaacagcattgtcaacaacatactcttatcaacataatcacatatataataatcaatcctcacaatttctcatcagagtcaattatcatacactatgcagcaactatgccaccttaaacttatacctcaacactaactctacttcatagagttgtcacacaatac

SEQ ID NO: 139781 - DNA, 304 bp, Glycine max
ctgatgtataatatatatttataatatcaaaggcttatatggaaatgaaaataccggattgaatgtttaaaactccattccttaatttatcctaacatcaagcaatatatctttagaaacccaagcttaataaatttgattaaaacagaaagttttaacccttttcttggtttcatcaagataatttaataaatacagatttctttttttaaaataattatttaccgaatgcttaagaattatatctattaaaatttatatgcttcctataaattttgtttacgcagctaatactgataaataa

SEQ ID NO: 139782 - DNA, 397 bp, Glycine max
  unsure (1)..(397): unsure at all n locations
ataagaaattatttgattctatagcttttggcaatttagttatatgaaaatttgtacgcaatgggattagttgtaatcctaaaatacttaccaagntttaaatccaagtttaacatattgtggatttgttaacctacacacttatttttttggtattggtgcattagtaagttatatattgaaattatcttaaagtatatcaatgatataacttgttaacacactcaaatgaaaagatgtatatgttagcanatgtttgtggatttactaacctacatgcatgcattaacaaantacagctagagaatattgatatcctaacttattataactctanatatttatttccaacatgttggatcattgcacaagttatttttataaatatggaagaagg

SEQ ID NO: 139783 - DNA, 490 bp, Glycine max
  unsure (1)..(490): unsure at all n locations
aagcttaagttggtcttactcataatnnttttataaaacaataaattcattctgtttngacaataatcacaaagtttggaggattatgatctttggacttctaagtgggcttatgtcagattacattttctagagtatttagttacagcttatgtgtatatcttatattagtttctcttcctgttaactgtttcaattanggttatagtaactgaaaactctcttttctttctaactcttaactaacttttgtcactgcgtcttgcttactccatactcttgatctataatatttactagctgttagatatcacgacggtattatatatctggtacttcctcttggcaggaatcattaggttgttactttatgggatccagcggntcattagattttgaatccaagggcctggatgatttaaacattgatttctttgattttggagcatacgttacatcagttgtcttntgcatcctactataatcttat

SEQ ID NO: 139784 - DNA, 351 bp, Glycine max
  unsure (1)..(351): unsure at all n locations
gagcttgtagcanattcgaacgacaataacatttcactcggaagtcctattgagccccgcaatatatcgagacgctcgaaatttaaaaccgaagctcgtagcaaattcgaacgacaataacatttcactcggaagtctgattgagtctccgaatatatcgtgacgctcgaattttaaaaccgaagctcgtagcatagtcgaacgacaataacatttcactcggaagttctattgagtcccgtaatatatcgagacgctcgaaatttaaaaccgaagctcgtagctaattctaacgacaataacatttcactcggaagtccgattgagtcccgtaatatatcgagacgctcg

SEQ ID NO: 139785 - DNA, 422 bp, Glycine max
  unsure (1)..(422): unsure at all n locations
ttggttntanatttcgagcgtctcgatatattacgggacttaatctgacttccgagtgaaaagntattgtcgttagaattagctgcgagcttcggtattaaatttcgagcgtctcgatatattactggactcaatcggacttccgagtgaaatgttattgtcgttcgaatttgctacgagcttcggttgtaaatttcgagcgtctcgatatgttacgggactcagtcggacttccgagtgaaatgttattgtcgttagcatttgctgcgagcttcggttttaaaattcgagcgtcacgatatattacgggactcaatcggacttccgagcgaaatgttatttgccgtcgcatttgctgctagcgttggttttaattttgagcgttttgatatcatacgggactcaatcggacttccgagtga

SEQ ID NO: 139786 - DNA, 172 bp, Glycine max
ggagaggttaatgaaacaacgagatgtcgtctctccatgagaggttggatcaaatggagaatagagatcataatgaacaacaaacgacgagaacacggaatgatggtgatccttcaccgaaccttatcgtcgtcgtagacttccctctccctcattcttacgggcgtccgtc

SEQ ID NO: 139787 - DNA, 410 bp, Glycine max
  unsure (1)..(410): unsure at all n locations
gattcagcctaactagggatttatgtttagtaatttatgctacatcatagaacacaaaagcatgnattgatagagaaacatctttatatacatcagctttgttgttaaaaagacccaacacttttacctaatggttgcaatcttacttgcattttttactggttttagcctagacttagtttaattctattctaaaccatcaattatcaatgtttctttcaacaattccttatttctgaatttaaccctgtcgaatactagttccctgagtttgatacttggattcattcgtttttaatttaaatacttaacgatccggtgcactttctggtgaatcgaatttcccttaaacatatttgtataaagaanaattggaccaaaaagtaactgtaggggaaatccaacacctg

SEQ ID NO: 139788 - DNA, 501 bp, Glycine max
  unsure (1)..(501): unsure at all n locations
cacgtgacacttggaatctcaagcttcatgctgaagtatgtatggaagaacttcattattgctgttcatcacatacaagtgagctacgaacaaatcttctacacttggagtgataacatgcactcctcttgaatccttactgcccactctgtcttcatggcgagacttacgaaggccaataagatgagccttttcaatgtagcctgaacaaaactcaatggcttcttctgcaatgtacctntcaacaatagatgcttccgaatgatgtagattctttgtatacctctaaagatcttcatgtatcgctcaaccgggtacattcaccgccaataaataggaccacaacatttgatgtctctaaccaaatgaacaattaagtgaatcatgatgttcaagaaagcaagaggaaaatacatctccaactagcacagatgaattgcagccttatattcctggtcatcacacttgacaggatctaggactttgctacatatggcgtgg

SEQ ID NO: 139789 - DNA, 424 bp, Glycine max
ttatgatcacgtttctggcagacatacttttttttattttgaatttgtcaaacacttactacctctcaaatataattaattaaatgaagcacagattatataatcatcatttctaaatttattggccctatactcactgtcccttattttggctgcccatggccactgtagatgtacattggtagacatcatgttctataatatcttcaaaagaaggactaaaagagagagaaagtggagaaagaaatggaaaacaaaaatctaatactatatggaactttaaaatgtccttttctttctctttcttttagataaaatgcattttctttaaatccgaaatctttgtctcagtattacccatctcgggatgtaatgtgggatcagaaagttccaccaaaatcctactgaatccaaacaattatta

SEQ ID NO: 139790 - DNA, 491 bp, Glycine max
  unsure (1)..(491): unsure at all n locations
gggctgaagatgaatagagttgtaagatccacattagtgtaatctattgataggtacagtatttggagacaaattcactgcatgtaatatatatatatatatatatatattaaaagttatttatatggaaaatagtaaaaatcactgaattgaaatgttttaaaaacacaatatactaaaaattaaatcataaacatctaagcaaattataatctttttagaaaagcacaatgctaaaaataaaataatgaattaaaaaacaagaaaagtatttaaaaaaataataataatgtatttacaatcaaaaaataaatttaaaaattaaaatacaagtaattatcttatttatataaaatagtaaataaattatttaaccgaaatggcatataaagatattntaattatctntatttaaaataattttattattgtcattaccttaattaatatttttggtattcacgtcagtactaactaacttgataaatata

SEQ ID NO: 139791 - DNA, 380 bp, Glycine max
atgggccataaaatcttgtggaaagcttggtgtaagtcgacgctatggacgtctggcggtagggacgaaggccaacataaacccaatcaccaatttcaaaatgcacatcacggcaaagcttatcggctgaggctttcatggctctctgggctttgcaaaaatgacgttgcatagtggcatgaagctcggtcctatccttcagcatgtgatcaaagacatcaataggggaggtaccttgtacatactgggcaatggtatgtggggctttaccataaactatttctaaaggtgacacgcctaagctggaatgccatgttgtattatatgaccattcagcgagagaataacaatggaaccagtctgaacggcgatgatggaca

SEQ ID NO: 139792 - DNA, 405 bp, Glycine max
  unsure (1)..(405): unsure at all n locations
tcntatctcagctttattgcatctatcctggtacttatttgctcaacctcatatgacaaggacataaggtaatggtgacagaaagatgagatgcgagaatatatgagaacattgtgtaaaggatataagcaccttggggatgattgtgcaatgaaattgcaatgatagttagcaaggttaatgggtggtttatgtggtttggttgattgataaagaggttgaggttggacaagagacaatagtgttgatttgtttggtggagatggagaaggtgggatattgaggtctggttgatcaacattgtattaggaaggaaaggaagaatatggttcatctttggttcaattcgagatgtgatatgtggagtgggttgagttgacaatgaaccaatagttgggagacaaa

SEQ ID NO: 139793 - DNA, 417 bp, Glycine max
  unsure (1)..(417): unsure at all n locations
tcaccggatgacgccgatcgaacatttcctaaccttctttatgcatattacgntcagggattgaattgataactcgttatgcgacatctgtcgtgagatagcgaccgatatttatcagccgacattgcacaattctttttagataagctcgctggtcgattatggtctttatactgcagagtgagttttcttgatatggtggtgcataaaaaagctacaatgtacttcggctaggttttacgtgcgagttctaccgacactttgtttcggccaggaaaacattagcccacctctgcaaaaaaaattattgcataccgtcttcatgcatatttattcaacgattgaatagaagactcaataaccaacaacggtcgtgcatagtcccactgatgttttcatccgcattgtcattttttt

SEQ ID NO: 139794 - DNA, 387 bp, Glycine max
gttgatatgctgtgatgtgatctctacacataggacatattatattccccaaccaatttattcatcatcctattgtgacattaacattgaacaatgtatgtgcttacaccttcacatctcagaatgaggaactaagaaaaagtattccatgacgaatcaagaatcacctgaacttcttcattatggaaatgtctctgtattgtttccaatatatgatcagcgtgtgaacacaatgtagaatcaaattcagtgtctgaactagatggtgctccttcactttgaatactgtcaatcaaagaccggaactcattaaattggcttacttctccagcatgttcttgaaagacagacaatcttccatctactgctggaagagaaccttgcctc

SEQ ID NO: 139795 - DNA, 344 bp, Glycine max
  unsure (1)..(344): unsure at all n locations
acactatgaatctcagcttctccgcaatnttctataaatagggggttatgtgaagttatatagggttcagccccttaggcacttctctctttctcgaaatagctgaggaaaattagttccgtgaagaaaatccaagccgaggcgcttccataacgtttccgtaacgtttccatgagtgatttcgcgaaggttttcgaccattcttcgacgttcttcatcgttcttcagtcttcaacgggtaagtacctcaaaccaagctttttaattcattctatgtacccgtggtggtccacattttggttcatgtatatttattctcgttgtcatttacttgttataccccc

SEQ ID NO: 139796 - DNA, 426 bp, Glycine max
  unsure (1)..(426): unsure at all n locations
ngctatagttgagcgcgctgcaaagtctgttctcaatttattagtatatctggttcttatctatggacttaagtgattagttctcccattattcaatgtgaacttttaaatatgttcaggaaaaatatcatttacgacttaaagtgcttgatgagagtttgagaggaaattctaacagtgttatcgcggtgccccagagggaagaagtatgagcaacggcccttctcgtctgcaatccctatgcggagctgatgacttctcaatactaacctctaatgggtttgtatctaaaacatcaccatcctctcaactgaggtcatcccttttctctagcacagttttgaagcatgctaaaggaacatcttaattctttgatggtggttcaagatcacttgtacaggaggtaaatgctgcgtgtatggaaca

SEQ ID NO: 139797 - DNA, 346 bp, Glycine max
  unsure (1)..(346): unsure at all n locations
tactcaagcttaagtgtgtatccactcattgagtgattgaatctattatcatttatttatngttcgntngcgaaagctaggagtgacttagtattaaacaatatttaagtgtcttagattcaaaagaagtctaagggtgtgccagaagtggcctagaaaatactgttatagctagctgatacaatcctacccgccaagggtattggatagaagactccaagaggattgggctagagttgctaaagaaggcctcggggttctcatgaacctaagggtatattttttgagcctatgggccaaggttgtgtccactctacttcttaatattataataggtgtatccctc

SEQ ID NO: 139798 - DNA, 268 bp, Glycine max
atgtttgaccctaacccaaacgtcttccatctctgttaagcgtcttatacgactaacttttgtatagaaagcattttcaaaacttgtatagtccccaattatgattttttgtagaattttgaaataaatgttgtttattggtaagctgcgctacaatattccctctgataatgtgacattgtcaattcacgtgacaacggctaccataaccctcaaccgatctgccttcctcacctcggccacgcctcccccctccccctctcccccc

SEQ ID NO: 139799 - DNA, 427 bp, Glycine max
  unsure (1)..(427): unsure at all n locations
ntggagtttccaagtgccaattcgtctntcttctttgtcctgtcttcttctggcttcaattcattagtgggctntccttctgtgtccagcatcttgggatgttcccagcctttgatgacagctttccaggttctgctatccagcgatttgaggaaggccaccatccttgctttccagtattcatagttgattccatccagaattggtggtctgttcactggtcctccttctttctccatgttcatcagaatttatctccctagatctcactcagtgatttcgagtgcccgctctgataccaattgaaattctgatacagaggtcagatgtcgtaccggatgtcacgacatcacgcttcagaacatggagattatatttgactgtatgaacagattaaacaagtaaataacacaagatgaatgtaacc

SEQ ID NO: 139800 - DNA, 343 bp, Glycine max
  unsure (1)..(343): unsure at all n locations
atcgcatacttaacacattcatggggatgaaagaatcggaatacccatgctatgcattgccaaatggtaattatgaagattgagatgcccctgtcgcaacctacccttcgngcggagggcgacgcgagactcgcgggatgcgtgttccacgaaaggaatacgcgcggagtcgccaccaacgtttatttgaggaaaacgtcgggaaaactggaaaagacgcgatctacgaacttttaagtgaaaggttcgggagttgtatttacgcatggngaaggtattagcaccccacacgtccgtcccaagggacggcagtctttaatcgaatgtgcaaacatgactttga

SEQ ID NO: 139801 - DNA, 462 bp, Glycine max
  unsure (1)..(462): unsure at all n locations
taataaatatatatatggtttaaacaagcctcccatcagtgtttctttatgtttcatgggataatntcttcatttggttntgataaaaaccccatggagcaatgcatataccataaggtcaatgggagtaaaatatgttctcttgttctatatatagatgatattttacatgcatctaatgatcgagggttgctacaagaggtgaaacaatttctctctaagaattttgacatgaaggatatgggtggtgcattttatgtcattggcattaagattcatagagatagacctctangtattntaggtctatcacaagaaacctatattaacaaagttttagagagattttggatgaaagatttgttcaccaagtatcgctctcattgtgaagggtgataggttcaatttgaaccaatggccaaagaatgactttgagagtgaacaaatgaaaaacattcctta

SEQ ID NO: 139802 - DNA, 342 bp, Glycine max
  unsure (1)..(342): unsure at all n locations
tctactttaatcaantatcaggtgatataattggatacttatcttttaaaaagtggtttagaagtgatcaaaaacactttaatctattacatcaccaatctaatcgattaccttgttcttgaaaagtttctagtttgtgggaagaacactttaatcgattggaatggtaatataatcaattacttctttgaaataattgattttattgtatatttaatcaattacaaatgggtataactattttctctataaatagtcaccttgtgttctcacttctaccaagtttgacaacttctgaatatgctagaattatgagctgatattagtaaaagacataagaga

SEQ ID NO: 139803 - DNA, 469 bp, Glycine max
cgcgacacaatactcaagctaccagagggaatgaaagagcgtgttctaacaccccaacctttcttttctgtcatgaagatttccagttggaactggatcccatgctggcttactcggttgatgcaagaagatgagcacttgcaagataggccacattcataaataagcaatgatcccatgggagaagcaagtctttttttacaatcatatgccattatgccaccattcttaataatgcaaacacatttgtcacagttgacacatacatcttcacaatcacagccacacggaatcgttgcctggttgaacttatctgaatagatgctcttaacaatgtagtaaaaggatttgggtatatgaacacaacttgttaatgtcaccacccgaataggaaatctttcttttccttttgaaagatcgttaactcgaacaacattctcttggactacacttcctctggaattgtgtc

SEQ ID NO: 139804 - DNA, 364 bp, Glycine max
  unsure (1)..(364): unsure at all n locations
tcacgggcatgggattgaaagttgaaagaaataagcattggattgggtatgaatgagtcggagaatatagagatagatggcganatcggggaataagaatatgggatcaaccgcaaaagttcacccttccaatgatcccgaactggatcccgattcttacgccctggagaagttcagactctacgaaaccagagcggtaggaaattatatattattaattaattaattgatcatggaatcgaatcatttgtaattggaatttgaatttgaattgcagaggttctacctaatcggaagtgatcggaacaagagggtcttccgggtattgaaaatcgatcgatcagaggcgtgggatctgaatatc

SEQ ID NO: 139805 - DNA, 438 bp, Glycine max
  unsure (1)..(438): unsure at all n locations
tccaattgactntgtagctgtcaaccaccatatnttccatcttctattgttagccatccttcctgctgtacttgagtgctggagaaagggtgtacaatgaagaactctgtgttccttaacccaggaattggattcccaccacattggcaaaactttatgacatgtgaagaacaggtgtgaggcagtctcaggttggctttggcagaagggacaaagttcattatcaatctcaacttgtctcctagataagttatccttagtaggaagcctatcccaaagcaatctccagtcaaatgataaggctctggtagggattntgatatcccaaagctgttggagacccagacattggacatcagaaggctgctcagctttaataaagtggtatgcagatttagtagaaaagatcccattagtttcagcttcccacacccaagt

SEQ ID NO: 139806 - DNA, 162 bp, Glycine max
aatgattaaattaaccctgacattgtcgtaatggaaatggatgtccaacaaaataaggaaagataactcgaaattaaatagagaatggatttcccatatttgctcaaaagcttactgctatgccgagctatactgctatcgccagctatatatatctatatc

SEQ ID NO: 139807 - DNA, 454 bp, Glycine max
ggcctttcgttaatcttgctgcttctacgcagctctgcttctgtatgctgtgaacgctgcgggttgaccctcttccccgcgctgggttcatccaccttcactgacatgtgacaacgtaataataaataattgtgttacacattgctaattgaactgcggaacgcgattgaagaggttaaaagataagaactttgagacacccatcaatgaatcaatcgataaaccctggcgggtgttgcacaaccaatccaaactcagagagagagagagagaaacctttgaaagaggtgttattagcagttgatagttcttcttcatcatcgtcgccgaattcatcttgatgccctttcgcagacctagccatgcgtttctccagatgaagagaagtgtcatgtaatctgtacaacctacctagttagtaccagtagtctgaggacacgacgtgttataactg

SEQ ID NO: 139808 - DNA, 286 bp, Glycine max
  unsure (1)..(286): unsure at all n locations
cccctctttctgttctgccaaaaagaaaatcaaatgttgtcaaaacattgatgaagtnctaagaaaatcaatatcaaagaaaacatggatgatatcacaattaataagcacaactacctatctttcaaagtcctttggttaatttgttttgtcttcttatgtggtggggttttgcttaataatcttatactcttgcctgtcaaagaaactaatcactaatcctctttcattaatccaatttgtatgtattgataaaaatcatgggtttccacctgcttcactctct

SEQ ID NO: 139809 - DNA, 433 bp, Glycine max
  unsure (1)..(433): unsure at all n locations
ggtgggctataccttcgaccaaacactgccgngtttctgtctctttccagatttaaagcgggctgcagcaccggctccgcttccctaattgtactggaggcggnntgccgggctttatcctctatagttntctggagttttgacatgacctccgagatggaagccatttgatcttttaaggccgatggatcggccttcatttgttcctgcacgccctcttcattatccatttttctggattgagtgttataggggtgcctttgtgctttcttagttatgatgaaattcctaaagaaataaacaacggtgagtatgccaccaaaacatgaatatgcaaatgagtgatcagagcacttggatccatcccaagggttttttagataacgtaatgagttcaaaacttctcattntataaaaagaacaaagctttcat

SEQ ID NO: 139810 - DNA, 250 bp, Glycine max
atacatcatatggtacccgtaaaaaataaaataataacaccactcatattcgtaaatcataacataattaacaatcaattaaacaaaatgtattgcatactcttccaatctctgaaggtgttgcttccaaagaaaaggagtaagtgtagattccatggtttaagctttagtactgtccgcaagaaaaagttaacgaggactatatgaaaatgacagacagtgagtctgtgacgtagtgtatatgatgaca

SEQ ID NO: 139811 - DNA, 491 bp, Glycine max
  unsure (1)..(491): unsure at all n locations
tgcttctatgaaacctccaaaaatctgccaataagactcttttgtcattattatcgacctctntccctgctatcaatttggcatccaaatcattcaaatccctctctattgtctcaatttgagaatcacacctttgaaactcttgtttacaccatgccttcaaggaaagcttaagagactttagcttttccttgaaagcatagagtttccattgcaccccacatggttgagaccaactttccaaatctactttctttaagctcggatgttgagaccagaagttgaagaacttaaacggtttggccccccatttatactctccatatcacaaaataaccagacagtggtctgagatgtcctgatcacccacccattgaacagaaatattctaaagagaaatgaattattgagatagcaaaaatctatataatcttctcatggagagactgtctgcagtaaaccatgtataccttttacaaaacacaagtacc

SEQ ID NO: 139812 - DNA, 399 bp, Glycine max
  unsure (1)..(399): unsure at all n locations
ctgcaagcactcaatctactttacctaggaatttctcacaccactgcccagtcgtgctcaggtctacatcagtcgactgaggttctaaaccttttatgatcctatattgttggttgtcagacaagtcttttaaggaaataatcattaattgctggacttccaatcagcaaccaggatggggtggatatgtcctcagaaaaaataaagaggctgaagcaaaggatgaaaacgtggaatagggagcattttggagacactctaaggagggtcaagatgattgaagatgaactaaacaaactagaggaggatacaagccaaagacaattatctactcaagaaaagctgaaattgtaaccactgcangaagctctgtggacagctgcccaagctcattaatca

SEQ ID NO: 139813 - DNA, 419 bp, Glycine max
acggacctaagatactaagctttaaaatcttcatgtcttgatacactgtcttcttcttatgctataattggaggtaacttgtgtctttctcacatataggacatgcgtggtggcctttgacgctatatccactcaaattcccatatgccggaaagtcgttaatggtgcaaaaaatcattacacgcaacctgaatgtctcctgagcattcctgtcatacacatcaaccccttctacccacaatttcctgaggtcttcaatcaacggagcaagatacacatcaatgtcatttcctggctgtcttggaccggctatcatcatacacatcattatgtacttccgtttgatgcacaaccaacgaggaagggtgttaatcattagcataacaggccacgaactgtggttgcagctcaagttccca

SEQ ID NO: 139814 - DNA, 344 bp, Glycine max
agctcaggtctacataagtcgactgaggttcttaaccttccgagagcctacattgggactgcagacaagacttttaaggagaagagcatgaatcgctggacatccaatcgagaaccatgatggggtggatatgtcctcacaaagaacaaccatgctgaagcaaacgatgacaacgtcgaatatggatcattttggagacactctaaggagggtcacgatgattgaagatgaactaaacaaactacaggacgatacatgctccagacaattatctactcaagagaagctgaattgtcacaactgcggaagctctgggacagctgccaagctcataatcattgttg

SEQ ID NO: 139815 - DNA, 357 bp, Glycine max
  unsure (1)..(357): unsure at all n locations
tcaagattcaagattcaagaatcaagtttcaagaaccatgttttttagaataatcaagatcaagattcaagactcaagattcaagaatcaagagaagactcaattaagataagtattaaaaagcttttcaaaacattgagtagcacatgaagttttcacaaaatcttttaccaaagagtnttagtctctggtaatcgattaccataatcatgtaatcgattaccagtgtttttaaaattttaagattttcaaaattcaaaatgcagagtcacatctgttgatgtctaatcgattacacctttatgataatcgattaccagtgactggttttgaaaaattcatttccaaaagtcacat

SEQ ID NO: 139816 - DNA, 328 bp, Glycine max
agaacctgtgatgtacctaaacaggccagctcctggcagtcaacagataaaaggaacaaagaccacaaagcaaggaggcttgtggtggctggccaactgtgaattttgtgtgacatgtggattgtggcctctggtaatcgattaccaagggtgggtaatggattacaaggcttaaaaatgaagataggaggctaagatggtctctggtaatcgattaccatggggtgtaagtgattaccaggattgaaaacgaagtcaggaagctaagggagcctctggtaatcgattaccagcctgtgtaatccattacacagagggatgggtcact

SEQ ID NO: 139817 - DNA, 470 bp, Glycine max
  unsure (1)..(470): unsure at all n locations
ggaactaagaaactaagcttgaacctctaactaaaatggacatctctcttatttttacttgttagaaatcctatgaagaacccctaaattcaacaaaacattagaaaacagcaacagcaaaatctttatttttttattntttgaatgtaaaaacagtaaaatagtaaagcaacaaaacagaatatatataacaaggcagataatatgaaacagaaaacaacaacaaaaaatggaacaacatacaaatatagaaaaacaaacagaacataatacaactaagcagaaacaaaaaatagatagaaacacaaaaactaaaacataatatagaaacaaaaataacaacagttaaacaaatacaacaaatagaaaatagagaatacagaaaacactttgttaaaccctcccctacacttgaaatgcacattgtcctcaatgtgaacatgtaacanaatgcanacaaagagacaata

SEQ ID NO: 139818 - DNA, 423 bp, Glycine max
  unsure (1)..(423): unsure at all n locations
ncaagcttgntatncaatgttttatcttggcggtttatctccttcttgcatggcttattccctagtggatggcgcctactctcacctcttctcctttgtcttccgctgcatctccatggtggaaaaccaccattaaaggacctcattgaagctcaaagatctagcctccatagaagccccacaagcaagtttccatcagaaaccagacgtcttgtctttttgctcaccgaaccgctccgttaagcgaaaagaacaaaacattcttagtgggtgtaacgtcaactacacccactcttgaaaatttgcgccccttctgctccctttctctctanaaatgctccctgtgcgtttntgcttcttctactctgcatctacttgttttcatcaagcatccgctgcacaagtaagttctttgatctctat

SEQ ID NO: 139819 - DNA, 367 bp, Glycine max
tgtgacggactataccaagctctaggaaccagtgactgttaaagatctatatatacgcttgctaagggtagagagaggaagactatagatttggatcacgctaagtgtgttaaggatgaagaaggcaaagtcttagtgcatgaaaaagatatcaaggaaaggcggaaggcgtatttcacaacttatctaatgatggatatggatatgactctagcagtctagacacaagagaagaggaccggaactataagtactatcgtcggattcagagacaggaagtaaacgaagcgttgaatagaatgagtaatggtcatgcggtggagccacacaacatacctattgatgtgtggaaaactcttggagatac

SEQ ID NO: 139820 - DNA, 336 bp, Glycine max
ttaatggggatttttcaccatggagatgcagccgaagacaaacgatgagaggtgagaggaggcgccattcactagggaataatccatggaagaaggagcttcaccaccaagatgagccttggataagaagctcgaaaggatgctctaatggaggaaaagaaagagggagagaaagagagaggggggagcacaaaattgaatgaataaaagaaggagagaagtggaactttgaagtatgtctcacaagactcttattcatcaaagttacaacagagtgttacacatgcttctattaatagactagggtagcttcttgagaagcgttcttgagaaaac

SEQ ID NO: 139821 - DNA, 424 bp, Glycine max
tgcagattggtcttcgccagtgaaaggatcaatgtgtgttctattatttcaaatttgatcatcctactaggacgactgagaaaactggggcaaatgaagagggtgagaaagagggagatacccatgctgtgactgccattcctatacgaccaagtttcccaccaacccaacaatgtcattactgagccaagaacaaacctcctccttacccaccacccagttatccacatatgccatccctaaatcaaccacaaagcctgtctacctgacttccaatgacgaagaccacctttagcacaaaccaaaaacaccatccaagaaatgaattttctgcgagaaagcctgtctaattcaacctaattcagtgtactatgctgtcttgctccctctctactctataaatcaatggttgccctaaccccaa

SEQ ID NO: 139822 - DNA, 236 bp, Glycine max
tacaaccaatgtgaatctagctttagtttttgctcacaggtcagatgtttggagcttttcaacttatagaaatacaagagtttttacaagaagaatttgaatgatagcgcgtaggttcgttactcatttcttcaaagcatatgatatttataggttttcactttcaagtgtttattgtctctacacggatataattctcctttgagcttgcgtctgaagggtgtggtcattgatca

SEQ ID NO: 139823 - DNA, 463 bp, Glycine max
  unsure (1)..(463): unsure at all n locations
tctagagagttctacactactctagagttctccaggacattcatatataatttacactnttctagtctctccaattaaggagggatcccaacaaatctccccctcccgaacttaatgggaggtagtagcaaaccggcaccttgacagcaatcttcaaatgtctttgtcggtagtactttggtcatcatgtctgatcagttctcgtttgtgtgaaccttgtcaagatgtactttcttttcctcgaggacatctcggatccaatgataccttatgccaatgtgctntgtatgggaatgaaatgttgagttccttgccaagtaaattgaactttaattatcgcacttcaacacatacctatcttgatctattcccagctcctgcaacatgttctttatccacaacatcntcttgcaagctcagtggatgcgatgtactctcgctcagtggtggataatgcaacaca

SEQ ID NO: 139824 - DNA, 468 bp, Glycine max
  unsure (1)..(468): unsure at all n locations
gcttgacaatatagaatgttatggntgttatttatctgctactgctagctaantacatgaattacatgagtcgtcattcttactctaatcattatatgaagaagcttatctcagattaaccttcaacctctttttatgttctctcaacaccaaccaagataattactgtctttggtgaagtttgcttataatgtgccttaccatgatgtatttatggtactcttgcatataccccactacacttagtctaatacacccttagcttaaggtacatgattcctagttccttagttattccaaaatatcttaaattagcactaggaaatttcacatatctcatanaatgaaggaagttgttaaagtggtggcaataattggattnttctattccaactttntcatttggaccaacctatttaatattcctgtatggccttntcaatctcattcttaaccatggtactagct

SEQ ID NO: 139825 - DNA, 459 bp, Glycine max
  unsure (1)..(459): unsure at all n locations
gtcacagatttaggattacttcaaagttggccttattatttttatattattggaagctatttgctttgctgttctatagactcgacattntttcttttctttctgttgatatatatcaaatcgtacaaaaccttcttttttgcttttcgtgtacatgatgcaataatgcatccaatgatccagaacatgatctgacttctggcttaatgtgttttttctcttcttcaaattaatcctcactgttattcctttttattattttaagatggtataaacgatattattcaaaacagtactttttatcatcttcatctgaatttggaagtacttcataaagaccataacccctctgttttactaggaatggatactgacatgtgagatctcactcgaatctctcattgaaaactgaccatgactactctttattatgaaactatcttcctctactcttaatta

SEQ ID NO: 139826 - DNA, 416 bp, Glycine max
  unsure (1)..(416): unsure at all n locations
agcttcgttcactccaagctcagttcctctttttttatcacaatcacatgtngctctttcttccttcaaatttctctctctctcttgtctcttctttcgatttattccaattgcgcaaatctggttggttgcagttatagcaaggaagcgttagatgtgagcgcgaagcttctataagtgaatccagagtgctacacagcttggaattacagaaagctcgccgttcaacatcttctctctaactccgattccgatcctcactctatcttcgatgacgagctcaaactcgtgtgttctgactctcggcggctaatattattcaatataatactttcgataaataattactttgttttgttttttctatgaatcgaatgaaatactatgcttgattatttatttatttcgaattgtta

SEQ ID NO: 139827 - DNA, 407 bp, Glycine max
  unsure (1)..(407): unsure at all n locations
gcaagctntaataccacttgtcagacaagtggtctctatatctttagaagggggggtgagttaagatattacagactattccncaattaaaaaaaatctatttttaatttaacccaacaaccgaagattccttttaaacaataactcctagataataatgcaaattaatcttactaaatagaaataataagcaataaacaataaaagagtttaagggaagagaaaatgcaaactcagatttatactggttcggccacatccttgtgcctacgtccagtccccaagcaacccgcttgagagttccactatcttgcaaaatccctctacaagatctgaaacaaataaggacaacccttcctttgtggtatgattccttacaacaagagaccctcggtctcttaatccct

SEQ ID NO: 139828 - DNA, 475 bp, Glycine max
  unsure (1)..(475): unsure at all n locations
aatatattaaccatctagaatgtgttataattattttataattattataatggattatcagaacaacaccaaaaaaaatatttaatttatcaatgctaacttaaaatttagtaattatatatgcaaaacccattcctctttattttgaaattagtcttgcataaagtgaattgacattttctcatggatatgatatttagttgagagaacaaaatctaatgcttataaattccattattagtagacaattcacctatcttgttactgcaattccattaatttgtttttccattaagtattttgtgaacttggaatttaattgagctaatacctatntgaggatacttggcttcatgaaacttatctattgaancatcatgctcttgatactactatgtagtatgtatgggtacccctttgacactatggctttaatataaatcattataggtaacacggcaatagaagcatatat

SEQ ID NO: 139829 - DNA, 330 bp, Glycine max
aagctcctcacagaaattttctcatgatagtgtctcacggaagctacctagtctattaatacaagcacgcgtctcacttgttggaactttgacgaacgagaggcgagtgagacatacttcatagatccacttatctccctctaggactacttcaatttcgtgctcccccctctatctttgtctccctctttctttctcgtcattgaagcatccttacaagcttcttatccaatgctcatcgtgaaggtgaagctccttctaccatggcacatactctaggggatggcgcctcctctcaccacttatcctttggattccgcatgctcttca

SEQ ID NO: 139830 - DNA, 114 bp, Glycine max
agcgcgcggacacaagccgctatgatgccacgtatgaaatcagtcccgacactcgctactcccgatgcgtcaacattgtcgatggcaatattaataggtgattatagtatcgca

SEQ ID NO: 139831 - DNA, 294 bp, Glycine max
acgggaagccggaatgtccatatcaccttcataattggacacatggggcactgcgccctcaaatgcgctagtaagaagagataattttccgggctcttcgtgtcgtaaaatgcattcatatcatgcatcgcattagcatctcttcttacatcataatggacatatgctgcatttgtccggtatcatattccggccttatattttgcatgagtcatggcttcatcatgcatatgccttcgacgaactttgtgatctgcaaaattgcataccactttgttctcatgtgtgctcatt

SEQ ID NO: 139832 - DNA, 427 bp, Glycine max
aagatagggggacccatacatgtcgcactaagtggcggcccggcgacggtacacaacaagtctaccacaagcacaaagcgcgcataaacccaccatcacctgaagcccacctccaactgagctcacgtactcacacgtggcccatatcccgcattcgcacaacaccgggtctccatcaatccgcccaagcgaccccaacatcaaagtaagtcaaccatcacacagcacaagctatcacagccaagcaaaacagggcaaaagcagaaaactctctcaaaacacaaaccaaaatcacagcttctctcacgtaaagaccccagcaacaaactcctcgagccagaaccgtaaccgtcggatcgaaacaaaactgcactagaaagctctagtgcataagcccgcaatctgaccggcgggatccactagccaa

SEQ ID NO: 139833 - DNA, 449 bp, Glycine max
catgagagagtcaaagatcaaattgagaggagataatatttctatgctaaacaagccaacataagaagatagaaggttgtcttctaacccggagattgggtttgggtgcacatgagaaaagaaaggtttccggaacataggatatcaaagcttcaaccaatgggagatggaccatttgtgcttgaatgaatcaatgacaatgcttacaaagttgagctgcccggtgagtataatgatagttccaccttcaatgtctctgatttatctctttttgatacagatggagaattctgatttgaggacaaattcttctcaagatggagagaatgttgaagtcatgttctatatcaacggcaagtatccacttgaaggacttgatgacctatacaatgcttgatcaatgaatcctaagaacttttaacatgtgctctatttattgtatcatccaa

SEQ ID NO: 139834 - DNA, 367 bp, Glycine max
tctcagcttctgataccaattcagtcaaggctgggatagtgttttcaatgcactggaggagaactgcatataaatgaaactgtttttttgaaagcaaatagctcctcgtgatggtgccttcccctgcaacgcacaacctacaatggtgcgttcctgctgcactgcttcaacctacactgacctctggctacgctgttgcatcctagggccttcaacacgccagtttgactggcgtctgtctcaacgcgccattgctgcttgcgactccagcgccatgttgtgcacataggcaaggctctggtgggaatggcgacaccagcgccacgtgtcatctcctctccgaaagctccaacggtggtggcgccat

SEQ ID NO: 139835 - DNA, 408 bp, Glycine max
  unsure (1)..(408): unsure at all n locations
ctcaggtagtttagctcatgagacaccatattctcgattaaaattnnccccagcaatatcacattcaaagatgatctcatgcacagtggcatgctntgagacacatgccacaaagttacgaagaatcagtagactactcgacatatatcaatgtgggcattgtcaagactgtcttctacacaaaattttgaggcgggcaactgaatagactatctttgcccaacaattatgactttttgatctctaaaacctaaaataagatattgcagttgagactacgtagttgcattaataagcgtatgtaatagcaagtcacaaagtatcaatttttttccacacctcttgatagcttattttgatattgaaatttgcagctattttgtctgctactcttatcataacttcata

SEQ ID NO: 139836 - DNA, 410 bp, Glycine max
  unsure (1)..(410): unsure at all n locations
acacttagatactaagctgagcttatgatatctntgaacctccaacttgtggnggtcttttataagaagaaaatcacaattaaacagaagattatcatcaattccaaaacctattgtacaacctcatccttatcttttgtgcaattgtagagcttgctatttttttctctatcttgtttctattcataactatattttgttactaggatctagaatttgcttagatttatcttttctgttatttccttttaacttttctttcataggctgtatatatatacattccgcattccttattcataggagggaacgggaaatcattttcacccttttgtctgttagcatttccttccttgccttgtgtttccttttagggttttgtgttcattttaagtcatataacattgtgt

SEQ ID NO: 139837 - DNA, 405 bp, Glycine max
  unsure (1)..(405): unsure at all n locations
taaagtgtatgtgcaaactaatacactaaagtcagggcctaacaaaactgagaacaaggtagttgagtcagtagaatctactgaagtgtctgaagcagctttggatagtgttaacaaccctgaaagtagtgatgctcatgaggaaggtacatgttctttgtttcaattttcacatatgtcatgctntggtattgtgtttcaaagtcaggagaaaatgaattttaaagcaatatatcattntatttttgtaagtcattaagttggctgcttgtaactcagccaaatatttntcttanacatatntgtgcttctaataaacaaattcttctaacagttgaggggcactccatttacattcgaaatttgcctttaaatgtgacggctgctcagttggaactggagtta

SEQ ID NO: 139838 - DNA, 427 bp, Glycine max
aactgtcaggttactccaccaccctttggttatccttcttatgaagctccaccaccaccatcacagccacctcctccatcttctggctactctatatatggtgctccaccaccaccatcaccacacaagtcaggccaatctaagtgtcctcctgctgcaggtgttcaatgttgtacccctcctgcaccttacacttatggttatggttatggacctccaaatccttacacctatgtgccttatggggaaggtcaaggccctgcttctatggttctgccaattctagtccccctcatcatgcctttttcctctattcttctagtctgaatgtgccagttttttcgtgtttatcctcgtataatatcctggtgacaatactcaatagttataaatgctgctgtaatctattcatcttgtgtagctccat

SEQ ID NO: 139839 - DNA, 459 bp, Glycine max
  unsure (1)..(459): unsure at all n locations
ctaagcttatacttctatatatttcagtcaagttatcttggtcctgctatcctaaatcatgtaatacctcattcgttaagcatattttcccagcgaaaattacatgaagaaaattgaacagttattgatgatgcaaaagcaagctaaaacaatcaagcttggtatctagcattagcattataaacgataatatactttctctttttgagatagaaagttatgtggggaaacaaagcggtttaaagggagaaaaattcaacccggaaacatgacaatgctaaacaataattcaagattctactttagcacaactcactatatgtatttatagtttggtaaccctactcataaactggctatcattntcttagaaggattaatactgctcttgcaatcattaanaccaaatacattntttgttaatttgtanacaaataccaaagaattacaacaactcac

SEQ ID NO: 139840 - DNA, 412 bp, Glycine max
  unsure (1)..(412): unsure at all n locations
gcttatgctgcaaacatttataatagacctcctctgtagcaaaaccaacaatagcagaataattatgacctttcaagcaatatatacaatccaggttagaggaatcatccaaatctgagatggacaagtcctccacaacaacaacaacaacctgtgcctcctttgtagaatgctgttggtccaagcaagccatatgttcctccttcaatatagcaacagcaacaacagcagtcacaacaaagacaacaagcaactgaggctcctcttcaaccttccttagaacagttagtgaggcaaatgaccattcagaatatgcaatttctgcaagagacaagagcttccattcagagtctgnacaaatagatggggcagatggctactcagttgaaccaagctcaatcccaaaattatg

SEQ ID NO: 139841 - DNA, 442 bp, Glycine max
ctgaggagttggtcttcgccagtgaaaggatcgatgtggttcctataaagaggcaaatttgatcatcctactatgacgactgataaaactggggcaaataaagagggtgagaaagatggagaaacccatgctgtgactgccattcctatacagcctagtttcccaccaacccaacaatgtcatttctcagccaataaccacccttctacttacccaccacccatttatccacaatggccatccctaaatcaaccacaaggtctgtctaccgcactttcaatgacgaagaccatctttgctcaaaccaaaaaaacacctactaataggaattttgcagcaaaaagcctgtatgggtcaccccaaattccgttgtcatatgcctaactagatccctatgcacttaatattcatggtagccataccgcaccaagttcataaactc

SEQ ID NO: 139842 - DNA, 419 bp, Glycine max
  unsure (1)..(419): unsure at all n locations
gctcataaaaataaacacctagatttattttaagaggctttggagagacatggtgctcccattaaaagttctgctcacacagctggggatgtttngtgatacattgtgggtggaattccatattacaaaccttgtgcttaggagtccccataattggaataccatgttggtcagatcatagaacaaacgccaagcttattgcagatgtttggaatataggaattagaactcccattgatgagaagaacattgcgcgacangaagcttctaaacattgtataaaagagataatggatggagacaaagagatgaagacaatgtcatcaatggaggacttaactatattaagactatcagtgacgggaagttctatgaaatattataaattcgaatatttatttattataacctgatatgct

SEQ ID NO: 139843 - DNA, 468 bp, Glycine max
actaagcttgtaggattctaccgaaatcattgtgattgaatgttaatttattatataaagtaaatatgatgctaggacaacaaatggttgtcattctgagatgattaatacactggcttagtacttcaatttattctttagaaccaataaggagactgagtattttaaagtaaaaatacagaggacttccatattttggaaacatgaatgttgaaacaccgtggacatagcatggtcatgatgaatggcattgctttttgtaacatgttgaaattataggtactgggtggaaaactgaaaagagacaatatactttattttaccaataagactctatataattgttatatttcaataataaatcactaatgttgatttcctatttatactaatattctagatcaattactagtgtgatactatgaaattatgcacacttgaacccaatatcactccttacataacact

SEQ ID NO: 139844 - DNA, 282 bp, Glycine max
  unsure (1)..(282): unsure at all n locations
tgcagaaaaaaaaaaattgttggcacactctatctgattaaactccttacagtacctaatgcctaacattaaacttgatccacggtcggcggacttaattgaaatattgggttaacttaagctatgctaccaagacaatcatgatggtgtttataagattatttattatattaccaaatagattattaaaaaaaatattatttagtagagtgtgaattgcatttcctttacgcaaccaacttgggctangcaagggtgactgattaacgactaatgagtaaa

SEQ ID NO: 139845 - DNA, 487 bp, Glycine max
  unsure (1)..(487): unsure at all n locations
tcactaataattaagtatttacattgacagcatgattcattatattaatnaataactntgcgggcattgcttacaatataatgtattacactaccaatataattaattaattataattttttacattaacaaagttatttattaatataatgtatcatactgttaaatgttactccctatattttttttagaagagttactccctaaatcttaaaacagaaacatctataaaaactactaaataaatagtttaataaatacttaatcaatatctgggagagatgaacaatcgttttatgtgtccctatatcacgttttccactttagagagccgtacaagattctggaattagatatcattatatcaagagggaaaaaaactaaaatgatatcttgcttttatatataacatatttaaaagaatatcaatatctttataaattttgttattatgtctctcaagtgacactcaattcattcatctcat

SEQ ID NO: 139846 - DNA, 457 bp, Glycine max
  unsure (1)..(457): unsure at all n locations
caaacatctattataagttcctctacctntgaatagacattatggtctagtaagtgcttctcttcatcaaataggacaaagctgatcttctgatcatctatgcccatctccaacttaccctttcccatatccaccatgcaactggctgttaacatgaacggacggcccataatcatgggaattacagtgtcctcttcaatatccataaccactaaatctgcagggaaagtaaaatgcttcacccttactagaacatcttcaatcacccaatatggtcttgctatacaacgatctacaagctgtagtgccattctagtaggcataatctgcaactctccaattctcctacacatggagagagacatcaagcttatactcggccgcanatcaatgagagccttaccaacatacactgaacctatagagcacgggattgtgacactccccgaatcatatg

SEQ ID NO: 139847 - DNA, 484 bp, Glycine max
  unsure (1)..(484): unsure at all n locations
agcttgatcaaaactagttacatcttattttgttagggatggacaatgatgttttatatgggtacttcgatcctgcggcatttgcgcacacacaagcaaaacaaagcaatttcaaataaacaaaattcaaatctaaaaaccctcttaaaattagaaccatgtgaacgtcaatagagaactctgtaatcaacattcaacagccacacatacaaaggaaagaagctntattaaggtgtgaaaaccagaaaattaattgaaggaaaacgtacttcttggttagtgttatatcgggtaacaaagtcaaatgaatatggtgtaacaaagtcaaatcaatgcaaatgcataaagaccaatcgcagaaataacttggacccataaataagaaactaatggagggtgttggaagttngaaccatgaagcttcaatctttggttggaggcttatcanagaatcaattgtgacacctctaccccacacatatat

SEQ ID NO: 139848 - DNA, 475 bp, Glycine max
  unsure (1)..(475): unsure at all n locations
ctctcaccatagggattacatactacaatggttgagtgagaatgaagagctatttgtagataaacaagttntacttggaaggcctcggcagtatgataaggatgttgtccataatggtgtcataaaaaaaatttcatttgtacataaagggcaaaaggttacccttacacttttgtctccaagtgagatttgtgaggatccaataaaaatgagagtaaaaaagaacaagagataaaagaagagataaacaaaattgatgaaaagagaaagaacaatgaaaggagagaaaagatagacaatagtgaaattgtaaaacaagatgaaaatctagaaaagataaaaatacatgttggaccttgtggcctcaataacttatgaaggggtaaattaatnttccactaacaaacttttaacccgcttttaaaagagatagacttataatgcanaagaagcagcaatcaatttaataatgttc

SEQ ID NO: 139849 - DNA, 445 bp, Glycine max
atggacttacctttgattcattcctttgatagcccttttgagccttggttccctttccttggtttgaagctcactacaagccttaagtgaaaaaccatgatatcaccatatccttaaggaattttggagctctggaattgttttgggaataagtgtgggggggttttgtttcattggacaacttgttttgttggctatgctttatgatgtattttgggccatacttgatgtacattgtatattggttaaatgttggacatgctgaatgaaatgttgcttctctaggctatatagtaacaataaaaatctaaaaagaaaaagacagcataaagttgatgaataaatcttaatggccaaaatgataaactctcggtcactctcacgttaaaattaacttactcctttatttctatttttataaaagcctattcccttgctcttattc

SEQ ID NO: 139850 - DNA, 400 bp, Glycine max
  unsure (1)..(400): unsure at all n locations
ctcaagctgtnattgtatattcattagatagaaattagataacactttcttgagtgaatcccttttgaggtgaagatctacaatctgtgttgtaaaaaacatagataccttttaccgttgtaagtccaacagtggttgccaaagctgaaatccaatgttataactggtctagntctggttaggttggaagtccaatgttataactggtctagttctggacgtagcccaaggttggggtaaaccactccatactttgattttgaatagatctatcaaatgcttgcttaaacactacatgtcataccctaatntcgtccggggattattatttgttgatatacaacctttgattggccgcttcgagacacttggcgtcctttgttcacaatgaatgaagtcc

SEQ ID NO: 139851 - DNA, 320 bp, Glycine max
  unsure (1)..(320): unsure at all n locations
ntactgaacctatcacacacacacncatatacatattactttattctatgattcanagcgtgtgactactgaaatttaattcatacacgcacagatgaacacaacacatagttttttctgtcaggcggagtcgttatattttagggtgttataactatgtataggcatttacaaaaatacccttcacttttaaactctcatgacttaattatcccttttgtatttcaagatatctaggattaccgataatcaaccttaattatccccacctaatgtctaaccttacattaattactaatttcttcttttaagcttctaat

SEQ ID NO: 139852 - DNA, 323 bp, Glycine max
  unsure (1)..(323): unsure at all n locations
ggcaacacctattcaaaatacaaaggactaccttagctatgagttcccgttaccacccttaaatggatggacaatcggaagctcttaataagtgcttggaaatgtatttgcggtggtctacttttgataatccaaaggcctgngctaagttgttggtgtaggcaaaattctggtacaatacctctttccacagtaggttaggaatgacaccttttcagtccttgtatggaagggaacctccagctntacttagatacaatggtagctctcaagacccgccagtagtgcgggaagtttacataacatacacatgctatcggaca

SEQ ID NO: 139853 - DNA, 370 bp, Glycine max
  unsure (1)..(370): unsure at all n locations
gtganatatagtcgattctcatggtgattctatttactgttcataagactctggtagagttataaagctgcaacctctgatgatgcctttgggcatgagaatcaacttgaatcaaatggagttctatccaagtaagtttttcagtgagtttcgttctttaccgtcaaatctatttgtgggaccgtgtttgctaccatgcaaatcagtttgtaataagcctctccattgttcatgcttcaagttcagtgactcatcccaaaaattggtaaggaaatattttttagaagcataanattacttttgttcctttgtgtaacaaaaatatagtctttcaagtcaatctagacanattcagtgtggctactttcat

SEQ ID NO: 139854 - DNA, 301 bp, Glycine max
  unsure (1)..(301): unsure at all n locations
ccccaagagaatgtcttggattaaaagcttaaagagaaaactttcatgaanggagagaatgagagagagagagagagagagagaaagtgacatggaaaatttgaggaagaaagggagagaangtgaactttgaagtgtgtctcacaagactctcattcatcaaaattaccacaagtgttacacatgcttctatttatagcctangtagcttncttgagaagttagagcttagctacacacacccctctatagttaagctcaactctttgagaagctagagcttagctagacaccccctcta

SEQ ID NO: 139855 - DNA, 426 bp, Glycine max
  unsure (1)..(426): unsure at all n locations
acctagtcatatttgccgaacatcctcagacctacangtaggcagaggcagctaacagagtcattctttgggccctgcatgctaaactcgacatgtctaagggtctatggaaagagaagctcgccagtatactcttgacctaccactgttcaccccagacagcaaccaatgaaacacattaccgactcatatagcacacatgccatgatccccgtggatgtcagggaaccctcgacaaggagactactattccagcaacaacaaaatgaagaaactataagggtagaaccctatgatccttttcaaagtttcttatcaagataagaacatccatagccatatctncaagggctttaaaacccaaggaacacccttggtgagccctctttctagtacaaagtctccaatatgtgtcactcatagtga

SEQ ID NO: 139856 - DNA, 476 bp, Glycine max
  unsure (1)..(476): unsure at all n locations
ntctctgcgaggtacgtaggttaacttcgtgtatgctaagttatattgtgtgttcatcttttattgatgataataataataatacgtcttcacttgcagtattgctgattgacgtacgaggaaagcttcaagtttcatgccattttgttagatctcactaccattgtcactgtttgggttcgaggtaagcttggtctctttttcatttgtagtttagttaggaaagatgttgaagtttgtccgcgttgcttgatctcactgtatgatgtgactgattgggttagtgaaaattgattgggcagggtctgagcagaaagttggtacatatattgtctgngttgctttttctagtttgatgggaaattttcaggtatcccatttcttcaattctttaatatntgatactagtttacgtgtgtgaactgcgatacatngattgctggtgttgccgcaatggtttgactgttctgatgtaa

SEQ ID NO: 139857 - DNA, 492 bp, Glycine max
  unsure (1)..(492): unsure at all n locations
ttagagcacctgggctgcagctagtgttaagttttgctgcaacattttctctaattaaacagntcattacaacctttaatattgtctttgtttgtttggacatgaaaagacttgtctctcggttaatagataactgagcatactacaactgaagatgacaactggtaaagtctagatagagtatttgtcctcatatccgaatttgaaaaaaaaaatttcatactcgccctcataccctcagcaatttcaatccgcagcttcaccaagtctcaattccttgatttcctcaaaatttggatgctcctttggccttnggggatcaacaaaatcttatacaatgatagatagatgactcatgatttcctttgttggataatcaatgttccctcaaataaaattatccaaacttacaaagatcatgagaatataacaaatattacatcgtaagaaaaatattacagacaatattaacgtgatcggatctttgttact

SEQ ID NO: 139858 - DNA, 476 bp, Glycine max
  unsure (1)..(476): unsure at all n locations
cttttggaaaggagtttaattaanatattaataatataaagatatttatttcatcatttaattataaattattatgcgtaataatatattcntattgctatttaaaagtcacatacaaaatatgcttcaattaattattagtataataattcttaaactacaacatattaaaattaaactctcttcaaaattatttgctattgatagtacatattctttatccattagaatcaaagtagtataaaaaaaataataatataataattcatccatgttcaattaattaagttacacatttcttgattattaacgatacatataatacacactaaatctggtagtagtataagaaacttagaagtaaaaatgtcatcatcacacggaaaatgttttcgttttggtactactggatttctattaatttntcgagtaaatgatcactgtaatctgtagaactatatcttattatcacatta

SEQ ID NO: 139859 - DNA, 324 bp, Glycine max
  unsure (1)..(324): unsure at all n locations
ctgtcaagnggcattcggaaggatcaaatgatgccttatgaaatcctctgtgcttacgccactaatgcctggaagggccattaatctatacatgactatggtggatgaagcaatggggtgtatgctggggccacatgacgagtctggaaaagaggaacatgccatctattacctaaaccagaaagtcacatcatgtgaaatgaactactctttgcttgaaaggacatgtngtgccttggtatgggcagcccaccgtctaaggcagtacatgttgagctacaccacctttgtggtgtccaaaatggacccagtcaagtacatatt

SEQ ID NO: 139860 - DNA, 460 bp, Glycine max
  unsure (1)..(460): unsure at all n locations
actaacctcgcctaactagcctatatatgcanaggaatgatcactaaatacttttattgggataataagtacttattacctatatttaacanaaagagattacaacactacaaaatgaccataaatgggaggagttatatacaatntacacaagtttcttacacaaaagttagtcgcattaattgactaacatgggatctttcattctccaacctggcccctacttctcacacttctgacatcacactggacagggccaggttgatatacgacatcatccagaagatggacacgaacttggggtatattatctcaagtaagatttctatgattgcacagcatgactcctcgaggctaggtttccctgccctcatcattgctttatgcacagcctgtggagtcatttctgattcattatcttttgagagtctcagtccagccattaatttgtcttatgtga

SEQ ID NO: 139861 - DNA, 488 bp, Glycine max
  unsure (1)..(488): unsure at all n locations
ctcagagtcacctgaggcatgcaagcttgccgcccagctcgcccacgcgagcttgttgtcttctccaaacaacagccttctggaggaatcttctggagggcccaagtgggcctggttgctatttgcacccttttttttactgaatgcacccccatctanttttttggtaattctttttccgtaacattacgaaactttgcgaatttcataacgatacttattttccttccgcaaggttatgaatccttacggatcatgtatttactttcttttagctttcgaagaagttatagaaactcacggattgcgcaaaaacacctcttttcgattttcgccacattacttccttttgatttctgagacgtctcgggacttcatttattgcatatcatcaagtaataatcctcggacgaaattagggtatgacagttgcccctctttacttacctctcatccgagataaaaggaaagcanacatangacactga

SEQ ID NO: 139862 - DNA, 471 bp, Glycine max
  unsure (1)..(471): unsure at all n locations
ntaatgatatggtcttcaccatagataggatcaaaatgggtcttattttaggcacatctgatcatcatgctgtgataaatgcaaaaaanaaaaactagggcaaatgaagagggtgagaatgaaggagaggaccatgctgtgactgccattcctatacagccaagtttcccaccaacccaacaatgtcattactcagccaataaacaaaccttctccttacccaccgcccagttatccacaaaggccatccctaaaatcaaccacaaagcctacctaccgcacttccaatgacaaacaccacctttagcgtaaaccaaaacaccaaccaagaaatgaattntgcagcgagaaagccctagaattcactccaattccagtgtcctatgctgacttgctcccatatctacttgataattcaatggtagccataaccctaaccaatgttcatcaacctccatttctgcgagaata

SEQ ID NO: 139863 - DNA, 160 bp, Glycine max
tctggaacttgaggagaagccaccatcacatggagttcgtcacaggacaagatgctgctatcccactatgaactacaagcccattatggctgattcaccggcctatcgcgagagaaaccgccaatatacattggacctaccactgggcgccccttaccct

SEQ ID NO: 139864 - DNA, 492 bp, Glycine max
  unsure (1)..(492): unsure at all n locations
tctatcacagaaatgtccaacagagaatttatcttatgtttctcaagtaaatattaagacactctcaattagcaaactgaacaacttttcaaaagaagacaagtgcctggaggattacaataatgagtaatcctttgtattctaattctaatttcaaaattaaacaagcatcaaaattttgaggcatgaaaaatcagattacagaacaaaaatgaaaaatctttctgttgcaaaatataagaataaatataaagaatttaatctagtctcaatatatattcataaatttcagaactaattggttgtatcatttagctnttaacctctcgcagattggtctaagacatggaagatgaataaaatacttgattgatgaatgagagttgtaacataggaattattttattagtagaatctcaattctgcagcaatggtattccttttgaccaatcttaactcttaagcctatattattgagcactagatggaaat

SEQ ID NO: 139865 - DNA, 493 bp, Glycine max
  unsure (1)..(493): unsure at all n locations
tgaagaactacaaagttcacttgaagcacatgagctaagttttatagaaaggaatcctgagaagcacaatgatcaagccttacaagcccaaacaagcagaaaatntgacaagcaaggagacaaatccaaaaataaaaaaggaaagtggcatgatgagaagtggagaaagactgaagattcaaaatgtggtgattctggatcatcttcacagaaagctgtgtcaaatccaagaagccaattctcagggaaaaagaaatgggtcgacaagaagaaggtgcagtgttacaactgcaggaactttggccattttgcagctgattgtagattcagtagaggatttcaagtgaaaggtgaagaagcaaggttggcacaagaggagaatctagaagatgatcattatctgctgatggttaccaccaaaaatgatcttcagtgtgctaacttcttgtacctagaacactggtgctcaaccatatgtcagagagaaagaatg

SEQ ID NO: 139866 - DNA, 329 bp, Glycine max
ggctcatatccgcttgcttttagacctgttgcaattttgaacctctgtccattattcttttcttaaagaatcgagagttgggacaccccccgcccaagattttttttacccaataaataatgctaatttcatgtttctcttattcctaaattttctgaccatttgcttatatctgaaatactcggccagaattatttctgcttaaaaatggtccattaatgtattgaaatcaaaaaaaatccacaaattttggagtataaaaatactagcttgaattaattaggaaccctggcttatttataaactgaaacataatgtagatttaaaaa

SEQ ID NO: 139867 - DNA, 481 bp, Glycine max
  unsure (1)..(481): unsure at all n locations
ngaactccttatcctacacttctgcagaaaagctttaattgttgcttccttcaaggatgcaacaccctctacatataaaaatgcgaaattaactaaaatgattatattcaattaacatagaagagttcatgtgagtaaaagagtcatatttgctttaatattatcaaataaaacttattaaaacatatccggtttataaaagaaatcttgttaaattattgagataaaataaaaaataatatcatgcaattaaaataaaaacttatccctgatgtcatatcctttagagcattgtgtcttaacatcctttagcacgatgttctttaaagtcatgcagctagtcatctacttccgttcgagattatcacgggatccaaacatatataacacacatgaagtgagtatcacatttaaaanataaaatacacaagacgtattataagaattataaagtattatacattgtcaactatacagtcac

SEQ ID NO: 139868 - DNA, 393 bp, Glycine max
  unsure (1)..(393): unsure at all n locations
tgattgtcggtattctacctctcttctagtaattaactaatcctcttcaccactaaacatcttaattgtttaagaagcaaaaactgctaactaaaaaatatcaaaaagacatatgaacttattctagatatgcaaaaattatgttgaaaataagaaaatataattaattaactatgaagcccaaaaactaagtaaaccaacccagataaaaaataatccagcctacagatgcatattaaatgttggaatcattgtgcaatatttttttntaagttagctgaaattatcttcaaattatagacatgtaacaattcttggatggagttcaagtttagacaaactntctttagttctaaactcttgactaatattagaaagcctatttaattctct

SEQ ID NO: 139869 - DNA, 427 bp, Glycine max
  unsure (1)..(427): unsure at all n locations
ntctggaganaacttccttgagaagcttctttgatataactttcttgttaagctagagcttagcttaacacacacatctaanaactaagttcacctccttgagaagcttccttgagaagctagagcttagctacacacacccctctaataactatgctcacctccttgagaagagaagatagagcttagctacacacccctataatagctaagcgcacccccatgacaaaatacatgaaaatacaaaacaaaagtccctactacaaagactactcaaaatgccttaaaatacaaggctaaaaccctatactactagaatggcctaaatacaaggcccaaaagaaggaaaaaacctattctaatatttacaaagaagagtggatccaaccttgacccatgggatccanaatctaccctaaggttcatg

SEQ ID NO: 139870 - DNA, 285 bp, Glycine max
  unsure (1)..(285): unsure at all n locations
tctaccgtgggtcgagtggtctcatatacatcttgtaatgtttcactggagcaactccgtacgaagtcaccttcggtcggaaaccctntaattttccggagtacattgcaggatcttctaacattacggcgatagaagaaatgctgactgatcgggatgacaccttccaagccattagatacaagctcctaaaggcacaagataatatgaaaaagcaggctgatggaaaacggagagagatgcaatatgagattggtgaatgggtccttctaaaactgcgacccc

SEQ ID NO: 139871 - DNA, 291 bp, Glycine max
aatttttaaatgaaaagtctcgtgatttgcctatgaaaaatgaaagtaattttttctcgatatacattcaccaaacaatgcgccattacataagtgaatacatatgtatatataggaatagtaactcagtacacatcattcacataatggaaaggaaattagctcatacatataattaagatcgtgatccacatctttaattcaacaaaagaattatggaaccagctatggaggagttgatttacaaaacacaactctctcccaaaataaccccaacgtcatcacgtcagc

SEQ ID NO: 139872 - DNA, 467 bp, Glycine max
  unsure (1)..(467): unsure at all n locations
ggcttgtggggtttctatggaggttggatctttgtatcttcattgaggtcctttaatagtgattntccaccatggagatgcagcggaagacaaaggagaagaggtgagaggaggcgccatccattagggaataagccatggaagaaggagcttcaccaccaagatgagccttggataagaagcttggaaggatgcttcaatggaggaaaagaaagagggagagaaagagagaggggggagcccgaaattgaaggaataaaagagggagagaagtggaactttgaagtatgtctcacaagactctcattcatcaaagttacaacaagtgttacacatgcttctatttatagactangtagcttccttgagaagctntcttgagaaaacttccttgagaagcttctttgagaaaatttccttgagaagctagagcttatctacacataccccctctcatactaagctca

SEQ ID NO: 139873 - DNA, 264 bp, Glycine max
  unsure (1)..(264): unsure at all n locations
tctctgaattttaaaatgatatgtgtgaatgagaacatgatgaagggcatgatttgtggatacaccagccttttgaccaaacaacttaccttggaagataattggatcctttgctccttttataagctgaatgattntgtcataaattgaaccctgaacataaataattatctcctgataccttgcttagattcttggagagcatatggttcaaggcaaaatttaccccaaatttaggggagtaaagtcagttagaattcaaag

SEQ ID NO: 139874 - DNA, 471 bp, Glycine max
  unsure (1)..(471): unsure at all n locations
tactaagctgctttatcacaaagctggacaactgatgctgtcatgatgctcatgtnttttatctttaaaagaataaactacaagccagataaagtactactacctncataggtgcttctatcattcaactcgagcatcactctncaattcatgtagaagttaatgcaataatacccatttcaaggtttngatgatcaaaaggttgaagattgtcaacaacccttagatgatgttgcaaaaacaacactagaatctaaagttgaagtggatgttgataagagtgttgaaaatcaagtcattgtgaccaacaactctctaagcccaaacgatattcctcctattcaattgttgtcccaagctcttaagaaacaagaagaanaacatcaagccatcatttgggctttcactaaacaataatgggctgagactgacaacacangcangctacacaagtagcaatggctgaacagt

SEQ ID NO: 139875 - DNA, 415 bp, Glycine max
  unsure (1)..(415): unsure at all n locations
agctntataagtgcgggtctgggagacgaatgttttttttcgcgatatgtgaagatgatgttccaagtacttcggattaggtccgaccatgccctcctgatttccaactgggaaattggcgaagggaggaacgccccggcatttacgcaacaagcataatgtaaacctttacgggtttaaaagctctatagttgggcctaggctttagagttttcattttgttaaggctttgtgtcttttgtttttgaatttataatacaaggatctttcttcatctgttcctggtctctacccattctcattcatttgcatgtttacttctttttctgaaacggcagattcgatgacgagtcccccgaagtactaatacctgggacccgtgtatcaacttcgagccagaaatgaaccaaacgga

SEQ ID NO: 139876 - DNA, 474 bp, Glycine max
  unsure (1)..(474): unsure at all n locations
tactcagctaatacgtcttggtcttgctcanaatcagataggaggtgttatacttatggagattgggatgctngctaagttgaatgaactggttttatggggaaaccaattttcaggacctattctaaagagatgggaattgacccatcttgagaacttgctctgatgggaatatcttgttgacctatnacctaagggaatgggaacctcagatcattgaggtgtctgtatctttacagaaacaagttgaatggaaccattccaaaggaaattggaaatctttctaaatgtttatgcattgatttctcagagaactctttagtaggtcatatcccttcagagnttggcaaaatacgtggtctaagtttgctctttctctttgagaaccatctaaccggtggtataccaaatgagtntagtaacttgaagaacctgtcanagctggacctgtcaatanataatctcacagggtca

SEQ ID NO: 139877 - DNA, 471 bp, Glycine max
  unsure (1)..(471): unsure at all n locations
agctntnttcanaccatgatagatttcccatctttctgtaaacagaatngaacaagaaccaagcttcttttgcaaagcccaaaggaattcaccataatcacccttgatcacgcctccacaagtttctaaggctcccaactgagacactgtaatcaatattaatagcaatctccccttgatgaggcatcttccaagaaataagctcacttctaccattcaaaatatttctaacaaaataatgacaatcatgacctatagagatggacataatactcttcgaaattttctccttcacatctccaaaattccaacctttatttggaatcattcccagaccaccaaatcttatccaaagtaactccaaatctcanaaactaatctctaactggaccaatatagcatagactatgcagcaaccgggccttccaaatagaaacttcanaaaaggaatcaatcctagatatatgaata

SEQ ID NO: 139878 - DNA, 501 bp, Glycine max
  unsure (1)..(501): unsure at all n locations
tctaatttctatttctagaccaaaatccaataattaacattttgttcattaatgagtngaccattatttgaccagagaattttctctgaattatccttattctttctataatttagcttaaaaacttgagagtttgaccatgcttagatatcctatggtaacatatcatttttttaccatttcaatagtctaaaaacactacctaatcgcataacaaagcaatacattgtctacctcacacacatcgaaaattgggatgttacatcttttctgttagaaaatggttttatgagaggtaaagtggatattactttcttttgtgcaagggtttgtctgatctaatgaagaatgagtttgaaatgagcatgatgggagaacttaatgaaattctgataccgatgacagatgtcgtaccggatgtcacgacatcacacttcagaacatgcagattatatntgacagtatgaacagattaaacaagtaaataacacaagagaattg

SEQ ID NO: 139879 - DNA, 460 bp, Glycine max
  unsure (1)..(460): unsure at all n locations
agcttgattcctagaanaatcatgatntttttgctattccagccacgttacaagcctaataaagtccttagtgatccacattatgcatgtgtgatagcattcactaagatgatgttgcaaagttgagaatttactattcatttggtataattcaaacacttttactgagacacttctgggattgagagaaacactagccttgtgaggacatgtttggtgattattccttgtgatctgtcattcttgctaaccatttcatttgaagtacaccttgttttgctcttttcatgaacttatgacaactgtgaacttgagaattaaccaatgaagcttnttggaatgtattcagttatctcatgaactggtgatggaaactctgaacttttccttttctggaggacaacaaagatttaaattgagggagttgaaatggctaatatgagtacatttggggtaatat

SEQ ID NO: 139880 - DNA, 463 bp, Glycine max
  unsure (1)..(463): unsure at all n locations
atacttgtccttcatttaactgtctntgggcttgtttgttacactcaacaaagtactttcgacacctactgtacgttgatttgaccaatgctgttatgggaatgttgcaacaatccttcaaaaccttattgatacaatttgagaggttggttgtcatgtggccatatcgacgtccttctctatcataagccatcgtccattnttcctttgaaatgcgatcaatccatgttgctgtggctggacttagttgacgaaattnttctaaattttggtaaaaaaatgtgcttgcaaggagtgtaggctgcataaaatgagttatgaataacaattntaagtatatattaaataaacgtgaccatcaaatatgaaatcttacccaatttcttcaacattttctttttgtttggcattattgaattccgattgaagtcgcttgctatgtgtcacacgcagcagacatgat

SEQ ID NO: 139881 - DNA, 442 bp, Glycine max
  unsure (1)..(442): unsure at all n locations
catgcaagcttctgcatgtctagagagntctagagatatatatgtccaagttccagagagcttgagagatnttgctgtgtgaatatctacagagaccagagcttgaagaggaagccgtcctgagagcttgagatgagtttgtgagtgattgtgaggtcctagagatggaggagacatccctactacttgtatttctgcaatctttcatctttctcttctctttgttgaaaggaagcttctcagttatggaaagttaaatcctctattggatcttccttgtaggtacttgatgtaaatatctattttatctatctaatgatgttntgtgtattcactatgctattagaacttcattctaccatgatnttgctttgatcatgtagaatgcatgtgttttaggatcattcaacaatggagactggtctgattcttataacttgat

SEQ ID NO: 139882 - DNA, 455 bp, Glycine max
  unsure (1)..(455): unsure at all n locations
tgatggtgttgagaagatatcacatgtttgtcatcatattaaatgnttataatgtgaatgtatgtatacatgattttgatgatgtcaaaagaagaatcaaacaaggatcattttgcttcaagattaatacaaagattgtttcaacaaacaaagccttgattcaagatttcttcaagatcaggtcttgtctcacaatgaaaggtttcaagtcattcaaggcacatgtaatcgattaccaatacatgtaatcgattaccaattgtttgaaagtgtgtaatcgattacacatcatatgtaatcaattaccagagactctgaacgttgggaattcacattttaaatgaagggtcacaactgttcaagaaaaacaactgtgtaatcgattaccagagagggatttcaatgaatatcgtcaacagtcacatcttatcatttgaatcttgaatggccatcaa

SEQ ID NO: 139883 - DNA, 236 bp, Glycine max
ggacgccacatacaatggtgcaaatctcaccgaatgaacatgagcatggatggctcatactctcgcacatgataactcatcactttagaaactatactcacatgtataggagaatcaaggacctcaagaccaaaatgtaataactttgatgcacatacaataacccatcacgtgaacatatgctatgcctaaatgaaaacatgcaagacttacatgcacacaaaaggtgacccaaa

SEQ ID NO: 139884 - DNA, 426 bp, Glycine max
  unsure (1)..(426): unsure at all n locations
acctaaacccacctaatcagaacctgaactaattcttctgatggaactagcccccctaattntatttacttccttcccgagctgatttaactgctcatgtactggcaattgaagactatctacagacattatacatctgtcatgccctacaacactatctggaaactgatgcatagcaacttcatcaggttcatgacgatgtaccaaagaccagaatgtcttagtttcatctgaacccaaacgaaacctgtctagcattttctttagcccaaccacctccaattctttctgagcaattttctcagccgcctggtcctcaacagcattaaccatgcccttaatgacagagtcactcaccatcctagatatagtcaaccgctcatcgaggtcctccagaaaggagtccatatccttaagtatgtcaaa

SEQ ID NO: 139885 - DNA, 102 bp, Glycine max
atcatgaccacagagatactctgtgcattatgcctagtctatctatgaaccaccttatacacaccagagcacgtccatgctgaaaacatctatgtatacgaa

SEQ ID NO: 139886 - DNA, 345 bp, Glycine max
tactaagctggtcaggactacccgtgaagatcggaactattaaattctattgaaaacgtcgaagaacgggggaaacctttgcgaaattcctcacggaaaacgatacggggatgtatccgaagcgtctcggcttatattttcttcacggaaacaatttctccaagctaagtctaaagatagagaagtgccaaaggggctgacccttttcttcttcacttcctcccctatttatagcaaaataggggaggtggctgccgcccagctcgcccaggcgagccatgttgctacctccataagcaacagccttctggaggaatattctggatggcccaactgggcctgggt

SEQ ID NO: 139887 - DNA, 379 bp, Glycine max
  unsure (1)..(379): unsure at all n locations
ctgcagcttctcacgtttcctccatttcttttattttaaccttcgantctcactcaaatcttcaccaaatcacgtcccgtanaggcccatcttcctctttttcactcctctttcacttccaccgatcaaaatccagaaaaacttcatcaaatggccgagccattcaagaagagaaagggatcatnctccaccgctaccgctgctgcccatcgccgtcacgggccatccggagcacccacagcacctattcctccttctttgtcatctccaagatcatcaacattggtttcatccgatgatcaacgtctacggtacctttctcagttntcttctagagtaatcttagacccttagtatctagacgtagagttctttaatg

SEQ ID NO: 139888 - DNA, 501 bp, Glycine max
  unsure (1)..(501): unsure at all n locations
tcntttggaccttgaacaagcaactaactcctctttcagttccatgctatgtgctcgcgactggtctctctcttcccttcgcagcttgagttcactattgctaccccatagagctccgtgaaatttattccggccatactctttcttgcgagccctcttggtctcttggtcaagggcccttgtggtagttgcattctcttcccgtaacccggcacactccttccgaatgtgtgtagcggccaacttgaacttctccttggcaagtttcgcctttcctaactcgcttttgagagcttggacttcttcgtcctcttccggtgcctcaaaactctcttcgctgacgactnttaacttggcgagccaatctaaacctcgtatatgaactttcagccattcgtggtacccaccaatgatgccattacgaatgcccctaagctcttgatctttccttaacggnnngttccatgccttatggattctttgtatagccttgaaatcttg

SEQ ID NO: 139889 - DNA, 450 bp, Glycine max
  unsure (1)..(450): unsure at all n locations
ggaccttaaaactcagcttatctttgatgtaaaggaccaactttctttatgtttcttgttntggttgaaacattctggtgaacacaaaggtacaccatttttttttaatgaaaaaccttctttaaattctagctttatggtttaagagataaacatgtattctatctcttccctctatcttctctctttttctatatcacacatgttttctatgatatggatctggaaccactttgtctttaatgttcatgaaaccaccttcacttgttgggaacaaatcaaattggatttttgtaattgcatgctcaacaatattagttgagccacctctgttgtgcaagccaaaagcactacacatataannggttattttcttattgttacacgtgctggtatttaaacacctcttctaattgtgtgctcagttatcatcgattcgcattggtgact

SEQ ID NO: 139890 - DNA, 359 bp, Glycine max
  unsure (1)..(359): unsure at all n locations
atggtctcaagactggacttatacatttgctggccaaggttcatgggcttgcaggtgaagatccttattagcatcttaaggaatttcatattgtttggtccaccatgaaaccccctgatgtccaaaagatcatatctttctaaggcttttcctcattctctggaggggatggcaaaagattggctctactaccttgctctcaggtccattntcagctgggatgaccttaagagggtgttcttggagaaattcttccctgcatctaggaccaatgccatcataatagacatttcaggcatcaggaaacttagtggagagagcttgtatgagtactgagaaagattcaagaaattgtgtgc

SEQ ID NO: 139891 - DNA, 408 bp, Glycine max
  unsure (1)..(408): unsure at all n locations
ntgtgtgtgcatntatttgaactgggtaaaatgtaaatatctgttgtctatttcacattctttacactgcattctaagcacccacgggtttgagtaaaaaaggggccctatacccgggttcatgggaatttaaggagtgaaggtgaatctatcatcatgctaagtctccggcttgcttgataatagtgaaacctcgtctagagctttctctctttataatgtgttgtcgctggtattccataccgccacaatattattatcttgagtgatgatacctctagaaaacagtcgtgtgagttataaattgttggggagtagttattagagacccctagatattttcctataggttcccaaatangggcaaagagcaaacacgctctgtgccattcgttctcatgccatttt

SEQ ID NO: 139892 - DNA, 256 bp, Glycine max
aaagtacttgctcagtactaccacattgcccaaactctaattgacaactttgaatgctttgagatgtactacataccctaggagagcaacaccagagaagacttgctctccaaactggcttgcaccaaaaagaccggtcacctcaagactatcatccaggggacgctccaaactcccactatagacattgagaaaattatggccgaagaagaggaggaaccaaactggatgaccccctacaagaaattcctaattt

SEQ ID NO: 139893 - DNA, 249 bp, Glycine max
  unsure (1)..(249): unsure at all n locations
ttaaaagatggcataacattagcagtggacaattgatgtgtaatgggggtggtagtagtaattaacataactatctatctattcattatagnctatgnntttttgtacaattcacaactagtgcaatgggctggccatggatactattgtctcagttggtctccaattgtaaacttgaatttggttacatagtctcctatgaagagaaccttcaaggctggaggatcctaaacactctgatgatgacgc

SEQ ID NO: 139894 - DNA, 323 bp, Glycine max
ctattaaatcatacatttctataactatcagttggtaatgactgatcacttgatcgatactatacctctctttgtgtgttctcttataaatggaaaattatccaacatcagtgttacacaaagtccctgttgaaattgacactcagactttcgagcttttactacgtggacatttggtgcacttgtcataccgttggccaaaatatacacacaaatattgaatcatatcgtgatcaatatgatgataattagctattatatatcgttatcaagataaccaaaatattatatgaatatattatatgttattaaacaactaacta

SEQ ID NO: 139895 - DNA, 449 bp, Glycine max
  unsure (1)..(449): unsure at all n locations
gcttatgtaactctttccttcgtggtaaacaacatgcaaggccaattataagctntcccaacaatcatccaaagcttctccatcttcccctttctttgtaaaatccaataaccttgacgtgaacccttctcatcccaaaataaaaaccgcaaaacccaaacccattttcccatagattcacactttcacaaaatggcacctctcacttatctcttcttcccactctttcttctctttgccttaacccactccagaaccacaccacactctccccaaacgacactcctggacgtcgtttcctccctccaaaacgcacacaatgtcgtcgccttcacccaccaccaccctaacaaacaccaacgacaacaagaatcctcgcttctaacgtcgtcgtttggtattcagttacactcccgagcctcaattcagaaatcctcccacagcgacta

SEQ ID NO: 139896 - DNA, 478 bp, Glycine max
  unsure (1)..(478): unsure at all n locations
taagctnttacaccttgtgcggntntcctttattcggttggaaccagtgtttctcntttgctcctttagaaacgaaaatgcaaatgtcttaatctcattattagntataagaaagtgtgtatgtatactttcattcctcattcgccgcattatttaaagaanaatgcgtgtttaatctgagcagtttggggggttgtttcttcaccaagcgtgttcgcattttagtgaaagctttcaaagacttcaatgtcttcaggcttatacatttcaagacttcaatgtcttcagtctttacatttcaagacttcaatgtcttcagtttttacatctcaagactccaatgtcttctgtctttacattataagactttaatgtcttcagtctttacatctgaagacttcgatgcattcgagctttacatttcaagatctcaatgtctcaatctttacatgtcaagactacaatatctttcgtcttt

SEQ ID NO: 139897 - DNA, 346 bp, Glycine max
  unsure (1)..(346): unsure at all n locations
agtcacctgagctgcagctatgaactctgtctcgcgaaaactttttttcgncaaaccaacttaccacagtcatcaaagctctcatttcccttttttgtaaatcaatacctgacggaaccttcgtatccaaaaaagaccgaaaccaaccatgttcataactacacttacaaaggcgcttcatatcttcttccactttttctttgcttaacactcgaaccacaccaacttccaacgaactctgacgcgttctcctcgaccacacagactgattacacgcactaaaaacatgaacaaagccctttacggcctggatgagccgcgcgcaattaaagccaaccagaataag

SEQ ID NO: 139898 - DNA, 153 bp, Glycine max
  unsure (1)..(153): unsure at all n locations
cctttattcggntggaactcttttttttttaatgctcctttagaaacgagaatgcaaatgtcttaatctcattattagttataaaaaactttggttgtatactttcattcctcattcgccgcattatattaaagaaaatgtgtgttttatctg

SEQ ID NO: 139899 - DNA, 426 bp, Glycine max
  unsure (1)..(426): unsure at all n locations
agctngaaactctacatgtcctatgtccatttgatttcttctgcgtcgtgtaactatctacaacaatgccagtgatatcaaccacatgctcgctttcaccttttttgttggtcttcttctggactaactgaatgtaggagtaatagcccctaaggcatgcatagtcgttaggggtcaaacctgtactgtcccgggaacttttccatgcctcaattcctaactgaacacaacagacataaggttcacaacatagcgttctaagttgtgatcagcaattcaatcacggtcagtgtaaatataatgaaaaccatgcaaattttcctgcacgctagagaacacactcgctgagaacggggagagacagtgatctaagtaaaatatagcaatctcatttaatcttggaacactgctctaaagcctgaatac

SEQ ID NO: 139900 - DNA, 494 bp, Glycine max
  unsure (1)..(494): unsure at all n locations
taagcttagcaattcaccttgacatttaccaatatgaattagtattatttatacggattagtgaggaattaccttataaactccatcaacaacttcgttggagattttggttcctccaaatgaattgatgatatttccaaagtcattaaggccatggagattccattcccaatagcaccaacagaccccataaacatcaaaataatgatccaaaggatcatcatatgagaaaagcttctatagggcactgtntttgcagattcatctttggcctcactgttctttgagtctttcttgctgttaggatctccattcaagtcaatatcctctgccattttcttcattgaagactttacacacccttatactaattagtaatcacttgtaacggaaaatacctgcagaanatgcattacaggttcaagttagtaacacacaagaatgtgctctccaaagcgtaacctcatagngaaaattcattttttcttcttctg

SEQ ID NO: 139901 - DNA, 420 bp, Glycine max
  unsure (1)..(420): unsure at all n locations
gctgaagccaatcaacttagactaatcacacaactaggttgaagtttacgttttcactctatttctatatatgacattctgatatgatatagttgtatttagcagtcttactatatcttgcaactgattgctattttgactcttcagttggttttagattagccgttgtctaacatgtgtaatgatgagctgaaatcaattaatctacttttgcatcctaagcatgatttatcctacaaatcaaatccccccactgagtgatatatgttcgaacttattgtttgaatgaaaaatacataattcttcttattatggcacatgtttcaatgtaaaacctattatgatgatntagttagacatnatttaattcaatgaacatatatcacttaatggngggaaaagactgtcacaatggaaccc

SEQ ID NO: 139902 - DNA, 474 bp, Glycine max
  unsure (1)..(474): unsure at all n locations
ngaatcatctacctcatttctgacagccagngggttgttttctttcaagtggccctaagaagacagacctcacaataattaagaatgaaagggatgagcttatccccataagagtgcagaacagttggcgagtctgcattgattataggaggctgaaccaggtaaccagaaaagatcattttcccctgcctttcattgatcaaatgcttgagcgcttggctggtaagtctcattaatgctttcttgatggtttttctggttatttacaaattcatattgctcttgaggatcaagaanagaccacatccacctgtccctttggcacttttgcctataggagaatgccatttggcctatgcaacgcccctggtaccttccagtggtgtatgcttagcatttncagtgacttcttagagagttgcatagaggcgtatatggatgatattactgcgtatggatcctcctttgatgcat

SEQ ID NO: 139903 - DNA, 481 bp, Glycine max
  unsure (1)..(481): unsure at all n locations
gatccttaagcacctgcngctgcagctaagtgccatgttctgcatttttataatgtatgntcaacacatttatactatccatgacacattttttccatattttgaatgtcaaagaatccaaaaaaaatatcgtgcactagttccatggaccaccaccttaaaataggagtacaaaataaaaataaaaactaggatttggagcctttcaactatgccttaagtcccatgttctgcatttttttaagttatgtccaaacacatttataatatccgtgacacattntttcagtagtttgaacgtcaaagaatctaaaaaaatatatcgtgcaccaattccatggacaaccaccttcaaataggagtacaaaataaaaaaacaaaaaaaactatgattggacccttgcactattctaagcgccatgttctgatttttttaagtatgtccaacactttatatatccggaccattttacgagttgat

SEQ ID NO: 139904 - DNA, 471 bp, Glycine max
  unsure (1)..(471): unsure at all n locations
ctaagctggtggcaaaaactntggagacaaaggacaagatattgtactctcacgctngaagaggtatcacaatgcggtggcataaacgagcaccgcaaccactccacgccaattcatccacaacaccacattagcaactaagcctttgccgaaaacacgatgaaaggatgagaaactaagacaatgccaatattttcagaagaatgaagaatgaaggggttagaatcatcaatggcagtcatggccatgagagagaaaaaaaagaaccaaccaggcatccgaaaggtccccttaaaaaaatgattcataaggaggtggcctatccagttatataaaaacttaatcatcaatgatatccatggccatgagagaaataaaaaaaagaaccaaccaggcatccgaaaggtccncttaaaaaaatgattcataagggggtggcctacccaattatataagaacttaatcatcaat

SEQ ID NO: 139905 - DNA, 455 bp, Glycine max
  unsure (1)..(455): unsure at all n locations
agcttgaagatgtatagcccaccatctttttatatctggaatgtgcctactatcattgtcatcattctttctccgtcattgaggtgtcactggaactgccaggtctccacctttgggcgtattcttttgaaagattcgtgccctctttttgcacatgttctgtagntgcatcctatccgaagacatcatactgacactgcctaacgaaggcaaccattatgtccttccaagcatgggctcgggaaggttccaagttagtgtaccaggtaacagctacccccagtaagactttcttggaaggaatgtatcagcaatttctcatcttttgcgtatggccccatcttccgacaatacatctatagatggttctcggggcaagtagtccccttgtacttgtcaaagtcccacaccttgaactcgggaggggtgatgatgtggggtactaagaacaactc

SEQ ID NO: 139906 - DNA, 442 bp, Glycine max
  unsure (1)..(442): unsure at all n locations
tgtcagtgtacctgaagatgctattaagcttagtctgttttcattntctttatctggngaggccaagagatggttgtgttcattcaagggcaacaatttaaagacctgngatgaggttgttgagaagtttctaaaagaatatttcctagaatctaaaactggagagggaaaagttgtaatttcttcattccatcaatttcccgatgaatctttgagtgaggcattagaaagattccgtagcttgctatggaaaactcccactcagggtttttaagagcctatacagttgaacatcttcattgatgggttatggccgcagtcaaagcagttactcgacgcttttgcgggaggaaaaattaagttgaagacacctgaagaagccatggtgttgttggatcaagtggcctcagaataattaagaagggggggggttgattaatta

SEQ ID NO: 139907 - DNA, 462 bp, Glycine max
  unsure (1)..(462): unsure at all n locations
tcatgctgacacctgaaatgaagatgagatagttgctctttagatgaagtntactcatcagggagctaacaaaaattttcatgcaggtggaccttcttctagctactcatttggaaaaggagatcttggagaccttcaggaaagtaaaggtgaacatacctctgctggatgccatcaagcaggattccaagatatgccaagtttctaaaggatctatgcacccacaaaaggaagctcataggcaatgaaaggattagcatgggcagaaatgtatcagcattgataggtaatattggtcctcatattcctcagaaatgttaggacccaagtactttctgtataccttgcattattgggaacaacaaatttgagaatgccatgctagatctaggagcatcatgtagtgtcatgcctctgtccattntcaattcattatctctgggacctttgcaatctacaaat

SEQ ID NO: 139908 - DNA, 113 bp, Glycine max
aggtcaacaacacctgcactcggtggttacagaaacccctatgggaaatgagatcaccactcgtaacaactaccaacccgtgagtagtaggctggcgggcgcaagcccattaa

SEQ ID NO: 139909 - DNA, 420 bp, Glycine max
  unsure (1)..(420): unsure at all n locations
acactataaaactcagcttaggtactgganatccaatctgcgttgttctgtgttttctgtaatcagaggtgaagatacaacttcaggtgaatccggtgaggaagagggaccaacaatgacattttggtcggagtcatctagaggataaggagaaggaatagggagaacttcctgaagagatgaagaatggtcttcggaaggtgagaagaatggtgtgtcttcaaagaaggttacatctgcatacatgtagtatcttctcagggtcggagaataacatttgtaacctctttgaagacgagaataacccaagaagacgcatttaactgacctagcagagagtttgtctaaaccaggagacatatcatggacaaaacaagtacaaccaaacactttatgagagacatgaaatagttgatcatg

SEQ ID NO: 139910 - DNA, 377 bp, Glycine max
  unsure (1)..(377): unsure at all n locations
gtcgtatctagtcaaggtctgagagaccatacaagtttcctaacgatttctaattatgtgggccattaagtctatcatatgctgacaatagccgagaaacccatgaatctcttcgggggcggagtaggtgtctgccatcgccttggccttggctaacaagcggngaagttcttgactcccgttcaaggtaaaagcaaactgatccatccacatggttgcctcttggtgtaaagagtcgatcacccttcctctagcctctttttccgcgtatacttgagcatactcgtccgcgattctatgctcgtgggccgtggctagacctaactcttcttggtacttggcgatgaatagctagcatgtggtcttcgtctcgcata

SEQ ID NO: 139911 - DNA, 261 bp, Glycine max
tacctgttacgtacctaaacaagcaagctcctgacggtcaaccaatgtaagaatatagctcacctaccaatgaggcattgtgtggcagctggccaactataaatcttgagcggcctctggaaaatggcctcttgtaatcgaataccaatggtgtgtaatcgattacacggcctataaatggagacatgaagttaaaatggcctctggttatcgagtaccaaaggtgtgtaatctattacagggcctttaatttgatacaag

SEQ ID NO: 139912 - DNA, 240 bp, Glycine max
ccacaaaccatggcgtggtatacaaagtcttccccacccatttgaaagggccaacccttcattgggttggtcgtttaccttccaacataagtgaatctttttaaaaggtggtattttggtttggcacccaattgggaacaatcagacttacaaactaaccttgatggcattggtcaacaaacaccaagagaacaaggaacccttttggacattcatggaacattttggatagaccaccca

SEQ ID NO: 139913 - DNA, 134 bp, Glycine max
cctggagatatgtctctggggtcaggagacctcggagacatctcgtggggtgatattgcccaagacgcagcttgaccaatccctgcccaactcggacatagacagtctctgagaacctgtgaagtacctaaaca

SEQ ID NO: 139914 - DNA, 283 bp, Glycine max
  unsure (1)..(283): unsure at all n locations
attgtacataagtgcttttaacaacatgaggataaaacccctcaacaatntccctaatattaaagtcaaggaaacaaatcatagttcaaccacaaaacaccaagaacactcaatttatcaaccaattgattaggcatcaatggccatcaacatacattttgtattatacaacagcaaatacatcagtaaatccaaaaacctcataagcttaagatcctacctgtcatcgacccaataggagaatatccttatctagcgctacatgtgatcgaggaagggactt

SEQ ID NO: 139915 - DNA, 307 bp, Glycine max
  unsure (1)..(307): unsure at all n locations
tgaacaaagaggttcaaagctatcatgttaactggacgaaagatacttgggcgaatagagtgaatctttactttgctaagctatatagcttcactgtattcaagcttattgtgctaacactctttgagtgattagaatacatttgctatcaaacatatattctctgcgaaaaccaagagtggctcagcgacaaagaatacttggatcttaatctcaaggagagattaagggtagtgctgggagtatcctagagagaactccttgtagccnacagttgcataaagaaaacttggttttaatcaaacat

SEQ ID NO: 139916 - DNA, 472 bp, Glycine max
  unsure (1)..(472): unsure at all n locations
agcttaatggaaaacaacattntgagtgtttttgtgttgagtcactttaagcanatcagatctttatttgaaaaatcccacttcatttcaacattcccccatattttctctctcttcaccccaaacacttaaccatcatcatcataaatcacctcgacctatcactatcaaccttctgcaaactctctctctcataaagttttgcacccaaaaccctctccttctcttagaatcttccagaaaccctaacaatggccaacaaatagaaccaaaaacaaaccacccatgctgaaccagactntaggaataacccaccttctacttcatccaaagaaggaaaagttctacaaatcgctaaacttgcactagtgtccatcattgctgcaaaagtttcactaaaagacaaggagcccaaggttcacattgaacacttcttcaacatcgagtcattggagaaatttggtacgatatc

SEQ ID NO: 139917 - DNA, 478 bp, Glycine max
  unsure (1)..(478): unsure at all n locations
tttacttatttgtgagtaaaactctaagtttattagttgatactcattagtgtcatccaacagagcttgttgatgtacatccattggtagtgtttttcttagctactcataatgattgtacattagtttctaatggaagaacaacatcatgcccataggttagctgaaatggnggtaaactntgttgctgtagatggagtattttggctattcaattaagattttttacaatttaaaaaaaagtctcatgatattcaaaagtatacaaatttcgatagattctttcttatgattaattntaatggatttcatgagacattntatgagaaaacaaatattaaacaatctcactcaaacccttgagaattcatgagactntctttctttctttngcanatnngacaaattttcttttctcgtcatacacaatcccttgtctcttttgtgaaagcgataagcattcanntattttttttac

SEQ ID NO: 139918 - DNA, 435 bp, Glycine max
  unsure (1)..(435): unsure at all n locations
agctntaactggccccttatctagttagttttctctcattntggatcggnggcatttatttcccctgtattgctatcaagtaccaccaccgatcctcagaacagaaaccctaagcataatcactgattactctctttcggcgacatcaacactgagtgaagaagaagaagaaggagaatcatcgttccctcttttctcgatacaccaaattgctgaagcagaagttccgaattccgtctctctctctctcaaattgtcctcttaacttcgcccatggcagnttcctttctctctctctctgctttgcacccaactactacacttcatttatctcanaccttcaacttcacactatacttagggttnttggttggtgatttttattatgggtgggtgtgagncgcgagcatcatcgccatccgtcttcgcacccgc

SEQ ID NO: 139919 - DNA, 410 bp, Glycine max
  unsure (1)..(410): unsure at all n locations
cttggaaagggtgctttcaccttctcgctaagccaatcttctgtcttatcgagcatccactaagtgcaacactcctgngctaagcgagaggaagaatctagaagatgatgagttgtacaggtttgctaagtgcaccgcttcatctctctaagtgcaccgcttcagttcatccgctaagcgagaaaggcgcgctaagccaaaaatcactaatgtgcgctaagcggtccatacatgcgcaaagcgcacgagcacaaacaatgccatctatntaagcctaanatctaattntgagaagggagtttggactggcattcagagctntgcatgtctagggtttctagagagagaaaggtcaaagttccagagaagtttgagagattntgttgtgtgaagatctgcaaagactagag

SEQ ID NO: 139920 - DNA, 419 bp, Glycine max
  unsure (1)..(419): unsure at all n locations
ctcagctttagataatgaaacaccttgtacatgatgtatttgttttatttccatcattacatagcattttgaccaaaatttacattgcatattttgcatttatgccttagtcttaacttgtgttcattgttttccccttcttttagaacttggtatgcgtgtcttttgttgttagcataggttttgggcttggaaacactcangtcattggaagacatcaaggaatgtagccaagagtttttaaggtccaatgggtgaattgaaaacaatntgggagagtctggaacatctcatggcctatgagatccactgtttttaaacttgtaaatcttgtagagcatctcaaggtcgtgagttgcatctcacacatgtgaagtcgacagcataacactntatgaaattttgtntttaatgtattt

SEQ ID NO: 139921 - DNA, 332 bp, Glycine max
  unsure (1)..(332): unsure at all n locations
gtgggcctggttgctatttgcacccccatttttactacgtacaccccctgccttttttttggtgattcttttttcgtaaagttacggaaacttacgaatttcgtaacgatacttgttttcattccgtaatgttacggaaccttgtggattacataatcatcccctttttgacttacggaatgttacggaacctcactaattgcgcaacgatgcttccatttgatttccggtgtgtcacggaaccttaaggatcgtgcatcaatatattcttttgttttccggcacganccggaatttacaaattgcctaatgatgggtgccagcaccttaca

SEQ ID NO: 139922 - DNA, 492 bp, Glycine max
  unsure (1)..(492): unsure at all n locations
tctccccncaatttctataaatagggggagaagtgaagtttgttagggttcagccccttaggcacttctctctctctcgaaatagctgaggaaaattagttccgtgaagaaaatccaagccgaggcgcttccgtaacgtttccgtgagtaattacgcaaagattctcgaccgttcttcaagattcatcgttcgttcttcgttttcttcagtcttcaacgggcaagtacctcaaaccgagcttttcaattcattctatgtacccgtggtggtccacattttgtttcatgtatttttattctcgttttcatttactttntatacccccttttgacgtgcttaagccatttatttaagtcatttctcgcttaatctanaaataaaataaatttccaccgatcgtttgaattgtatcatccgttgatttcggttaanaatcaatcgcaccgtttctctttgggagttctcattcttaattgaattgactaataact

SEQ ID NO: 139923 - DNA, 174 bp, Glycine max
gcacgagaggaagagcgtgctttcctacctggactaatgcgaacttatcatgctttcccaagagcaacacgatattgacttagagcagagaaatgcttgtgggccgtttggatgcggacgtctattgctaactgagcatgggcatgttgctaggcaaccctcggaccatatgat

SEQ ID NO: 139924 - DNA, 404 bp, Glycine max
ttatcaccacatattatacatatattttcctgtcagatcattgaaacaattatggacacacattctaatattaagccatgaaacaagctataagtttaaatggtcttaagataaaggaaaaacattggctatcaatagtcctagattaaatctaactcgactgaatatttacagtgaactgcacacaaagtcaacaaaacaatcacaagacccaggattcattattggctacatatccactaaacatattaagaaaataagggcaacacaacaatcaactaaatgtagaatcaaatattccttagcatatctcctattggaacaccgtaacaaataagagcagtggcgttctcttgtcacctaaagcaactaaatgtgtgtcattacaagtacaacaagtttta

SEQ ID NO: 139925 - DNA, 395 bp, Glycine max
  unsure (1)..(395): unsure at all n locations
gattacgtgataataataatttaaaaactttatgccaaataatgttgtgcaccattccatgttcccctaacaacatcatggaaagagttgttcacaagccagcaagcatgaaatttgaaaggcttcacacccccaacaaaattatcctgggttgtacgtaaaagaataaccttatggttagatttcaagaataggagatgaatcacagtagagtcaagaaaaccaaacctccataactcattcccaactgcataatctaacatctccttaacaccacgtccctcccaagtaaaaagaggacctttgaaacccanatcctccaaccgacaactaccaagacactcattataanaatacatagtagactggctagggggagctttctcactcttctt

SEQ ID NO: 139926 - DNA, 337 bp, Glycine max
gatcggagtgagaaatatgtgttcattggctattatgcacgctcaaaaggctacaaattgtacaatccacacaatggaaagacaattgtgaaccgagatgtcgagttctatgaagaaggcacatggagatgggaggacaaagaagacacttatgattttttcccgtgttttgaagaaatagatgaagaagccttgactccaaatgattcaactgcagcactttcaccaaccccttcaaccaatgaagcctcatcatcttccgaaaggagttcaagtgaaaggccaagaagaatgacaaatattcaacaattatatgatgaaactgaagctataaatg

SEQ ID NO: 139927 - DNA, 474 bp, Glycine max
  unsure (1)..(474): unsure at all n locations
tactcagctaagaaattattatggttanaacaagcctcctgtctgtggtaccttaagtttcatgggataatttcttcattnggttttgataaaaaaaaaaccccatggatcaatgcatataccacaaggtcagtaggagtaaaatatattttcttgttttatatgtaaatgatattntacttgcagtcaatgattgnggtttgctacatgaggtgaaacaatttctccctaagaattttgacatgaaggatatgagtgatgcatcttatatcattggcattaatattcctagagatagaccttgaggtattttaggtctatcacaggaaacctatattaataaaatcttagagagaattaagatgaaagattattcgccaagtatcgctcctactgtgaagggtgatanngttaattngaaccaatgcccaaagaatgactttgagagggaaccanatganaaacattccttat

SEQ ID NO: 139928 - DNA, 398 bp, Glycine max
ggacacttagaaactaagctacaagagggcattagttgaatagtgagtgatatgattaatataaaaattaagagcagttgacattgaccgtacttttaagataaagaaagcgagcgacataagtaacacatcaaacataaatggtaaaacacgagattagccaccaatacaaaatccagccaacaacttctcacttacatcagaaatgagcccaaaaaaaactaaaatgagtaccagacatctaagcacgtacaatattatacatttaatttatagtattctctagagaagctgttccatgtatacataaaataaattatgcgacataaaaacagcttcctctttacaggttagaatcatcgtagagaacccagagataaaaaagtcaaagaacaaga

SEQ ID NO: 139929 - DNA, 405 bp, Glycine max
  unsure (1)..(405): unsure at all n locations
tgttacttgcagatgatgcagatgggcttgtagctaccttatgcactcctgtaangactatggcatcatttctggcgctaaactgctgggagatggaggccatcttctgaattcaaattctggcttcaacangggtcatgtctgcaatggctccaccactggcagcgtctatcatacttatctacatattactgagtccttcataaaaatattgtacacaaagctgatctgaaatctgatggtgggggcaactggcacatagtttcttaaatctctcccagtactcatacacgctctctccactgagttatctaatacctgatatatacatgctgatggctgtggtactggaagcagggaagaatttttctaagaatactctcttaaggtcatccagctcgtgat

SEQ ID NO: 139930 - DNA, 325 bp, Glycine max
  unsure (1)..(325): unsure at all n locations
tattgatggtgttgatgctcccaaatacaaaatttgattgaactggggtaggttgctgacttgtgtggaggtagaggctgctgctgtcggagtaaatgaaaattgaggagttgatgcactggagaactggtagaagtaaccaacatagtggatgatgatgatgtactaaatgtggaaccaaatgtagacttaatgggctgccaactaaagtagaacttggaccatattggagttaacagagtacaccacccaagaggaagcaggggttgcaagttcaaaagatgtggcaggacttgaaaanggagacaacaatcccacaaacaaa

SEQ ID NO: 139931 - DNA, 438 bp, Glycine max
tctacctttttgttcataaacgtcgttcgttcttctctttctgcttgatttgcagagagatggtatctgaagccacaaaggttgcacctatttgttcataaatcataaacgctgtttgttgctcgttatcagcttcatttgcatgtatgatgttttgagtacgatttacgatttttgtaggagtgtttgttgctatgtaccattatgctctaggtctgtagggttttgatgttgcatgtgcaccattaactacctttctgaggttgtttgattcatagcaacgagaaacgttacacctttgttcattctttatgatgactagtaagaaagtatccacctttgttcatttttatgattataccactgggtcaccttctctgtatggttggaagttgatcccccattactacctatgctgttatgtaccacatacaaatc

SEQ ID NO: 139932 - DNA, 289 bp, Glycine max
acggatctttattacactaaaaacggagcagaccactaagacatctacatagtatagatataccagctgaaggaaaaagaataagggtgacaatattcgaaggggaaaaacgattcaagttgtgaaatgaataataaaagatcccatattaaagaaaaatagttgaataaaaaaatataatctacaaatcaccctgtcaaggaggagaagaatcgttaaagaaacacagcctcacaaacccaattaaaaagaccccgtaaaaaatctaaagaagactttcgttaaaaga

SEQ ID NO: 139933 - DNA, 290 bp, Glycine max
tttttctttccagtcctctcatagtcacctcatcttttaggggacttcaacaacaacaaaacctcttccttttcttgtgcttgacggtggggtctataaaccccgaaacttaaaaatgttggttagctcaaacacccttcaatctaaccttgttcattcctttttatcctctgaaatcttctctcatgttcttgagttatgttgaagcttgttttctactcaagagaactgcattctttgttgcacaccttcttctcacgttgagactacaacaggtaagggggtctctc

SEQ ID NO: 139934 - DNA, 316 bp, Glycine max
agcttctccaaaaaatatagtgtcatcagcatattgaagaatattcataggcaccttattcttccccaccaagaaactttgaaagtagtttttggttattacttccctcatcaaacctatcagaccttcatcaaccaaatcaaataaaaaagaggccaaaggatccccttgtctcaagccttttttaggcttaaattcagtggttgggcttccattcactaggatatatatagaagctgaggtgagacatcccttgatccaactaatccatctctcatggaaccccattcttctcatcatgtagaaaaggaattgc

SEQ ID NO: 139935 - DNA, 311 bp, Glycine max
agcttgcattgaatttttatttaatggacagccggggtcgatgtctttccaggatcatagggaacccctaaatctgttaccagaaatagaggctttcaacaacattctgaaattctatccaacatgggtcaagcctgcacccaaagtgtgcattcaatagttttatttttgacaagccatgtagccgctacggcgtaaggtacattgacgctattttattatttccagtgagaagaaaggtgatgaaaatataagcatgcctaatattacagaaaaccctggcgtccgggataagctgaaaccaatactct

SEQ ID NO: 139936 - DNA, 315 bp, Glycine max
agcttatattatcttaattgcctaaatcatttccaaatatgcatgtgaattaggaagcatcaacaagaattaagccatggctattgtgcaagcaatcaatggggcaaaaacacaccaaaagattatgatgatggatggctcaaattctcacaaaggtaaacttatcactttcaaattgagctttcaaaactatcatgacatgtagaggaaaaataaggatttcaaatcacacaatgtcaagagacttttattttcagaacaattacccatttcttgaacatatcctataattcaaagaaaaacatgcaaagttgt

SEQ ID NO: 139937 - DNA, 353 bp, Glycine max
ccgggatccattccagacgacctgctagcatgcaaacttctaatttttttacttcacgatgcaatgatgcaaaaccattaatttgtggtaacccacaaccacaaacttttttacaaaacctttgtcatactcactcaaatttatttatatctatacatttgcaccgaaacttttctttaatcttgctcattttaattatgttaactgtgttggtttcctctaggttttcgaaaaccataatactttactagtttttaagttaaacagagaattatatgggcttaacaaagcaccaagataatggtttgacagacttaaaaccattcttttgcatcttggcttctttgcaagca

SEQ ID NO: 139938 - DNA, 302 bp, Glycine max
agctactttttcttttttctataaataaggggagatatgaactttaaaacggttgagcccctcacgccatactctctcagtcaaatattgcgtaggaaaatagctttcataaacaaaatcacatccgacgccctaccgaaacgttatctgaaaccaatcgcgtgactttttctccaaatgtttttaaccattcttcgacggtcggattcgcatttcatcgtacttcactcaaaccggtgagatacatccatccaacctccttaacccattcttatggcaccccgtggtccccatttggataa

SEQ ID NO: 139939 - DNA, 311 bp, Glycine max
  unsure (1)..(311): unsure at all n locations
tagcgtgaaactattttctattttattcanaaagaagagaaagaatagaataaaaaaattgatattgttttttaacagtaaatacacaatttcttatatatatgaaattatcttttacacagactttagtcactaaaatttgtttatatttataagctatatcttaaagcaatagaactttccattaagtctgtcttttcaaaacaaaagtgaaatatatataatacaaactaacaagatatatatatatatatatatatatatatatatatatatatatatatatatatatatatatgtaatacaactta

SEQ ID NO: 139940 - DNA, 323 bp, Glycine max
agcttcctcggggtcatttttgctaaggcaaacatttggaaagttagtttacaagaaatataacaatcattacaaacaaaggccaaacaacacttctcatggcacgagtgtcaacatgcactttataaaataatcatattggggtcgtgctattttatgacacatacgtatttgcacacataaaaattctgtgtgaaacattttacaacacctatccatgtatatatttttttgacaaaccttttcaatgctacatcctatatatatacacacatttttttggaaagcttcttttgttacctactcacaaatacacatatttt

SEQ ID NO: 139941 - DNA, 268 bp, Glycine max
cctatgccagttgaaagccctggaggaaaaaggtatgcctatgttgttgtggatgatatcttcaggattacctgtgtcaactttatcagagaaaaatcagacacctttgaagtattcaaggagttgagtctaagacttcaaagagaaaaagactgtgtcattaagagaatcatgagtgaccatggcagagagtttgataacagcaggttcactgaaatctgcacatctgaaggcatcactcatgagttctctgcagccatttacaccc

SEQ ID NO: 139942 - DNA, 316 bp, Glycine max
agcttatctgatcatggagaagctagtgacctctaaatggatgttgttgttggtggcaagccttttccttaacaagcccttttctctggcttcatcaggtatgagacaaacgtgtggctttatcttctagaaagggtgctgaggaaatttggacatgtttagtgcatcccatgccatccaccatagtgtctcacgtatgaggcgtctgatacagagtgggtagagtggtagcaacatgtcatttaatgggcgatgctgtgccacccaagggtccttgggattgcacccctgactatttgccttggttttattgggt

SEQ ID NO: 139943 - DNA, 333 bp, Glycine max
  unsure (1)..(333): unsure at all n locations
accatggagatgcagcggaagacaaatgagaataggtgagaagaggcgccatccactatggaataaaccatggtagaaagagcttcaccaccaagatgaagcctggataataagcctggagaggatgcttcaatgtatgaaaagaaagacggatagaaagagagaggggggaacactaaattgaaggaagaaaaagggagagaagttgaactttgagttgtgtctcacaagactctcattcatcaaagttacaacacgtgttacacatgcttctatttatagactangtagcgttcttgagaagctttcttaagaaaacttccttgagaagct

SEQ ID NO: 139944 - DNA, 296 bp, Glycine max
ttttttgtggggatactacctctgccttgcctaagccccataaggacggtgccacctctctcctcatctcctttgccttccgaagaatgcctataaggaaagtgcaacctttaaagacttcacccaaccgcggagggacctctcacataaaagcgcccctaccatggtctaatgggagatgatcaccatgatggtagacgccgctccagtgttttactgcgataaaatgtgctgctgtatcccctctaactacgccgacttggtgtattccggggaggaaattgaataaaggatga

SEQ ID NO: 139945 - DNA, 316 bp, Glycine max
agcttgccgctggttatctattacaatcctgatgtaattgattacacagttatctttcttgaaaagttgtgactcttcatttaaaatttgaatttccaacgttcagagccactggtaatcgattacatgttttgtgtaatcgattacaaggtttatcaaaatatttttgaatgttataagcactagtaaccgattacaaagctaagtcatggtaattgattacacctttgaaaaaccattttcagaaatgttgggcttctagtaatcgattacaatcttctggtaatcgattaccagagagtaacaagcttggaaa

SEQ ID NO: 139946 - DNA, 314 bp, Glycine max
agctttgttttactttattagctgtaagcatatgttgttgttcccaaacgggtggccatatccctttctggagcttaataacaagtgggctcctatatggtgggtgacacacaatataaaattgctcaagtcttgccttattcgaattgccttttacttattaaactacatacaatgcaggtatttgtgcttggcagtaattcatgccccttgctatggcgtgtattatcttatagtgcgagacaaaaataccattctccccagattgttccctcaagcatttttgtcacaggaagttccagagtatgaaggaa

SEQ ID NO: 139947 - DNA, 230 bp, Glycine max
ttcctgcaccataacaaaaacctcattcctaaatacttttaatcccttggctagaaggtccgtgaaagcctcttaacagcaacctcttgtccatctgggaggattccctaaacacataacatttgtgcgaaagaaagttaaacgtagtgactaaaaattttcaggcgttgacatttcttatttatcagtaggaaaatgctcacataccttggatacaggcccaaaaccac

SEQ ID NO: 139948 - DNA, 261 bp, Glycine max
aacataattcatgaaattaaagaattggcttccaagcaccagaaccttctcaggaagaagaatagttgagaggagagtaatttgctaatttcattcatgcctgatgctattattacataggcctatatgtactgcattctatgtaactaattttggcattttgtgaattctagaatgttcagaactcaacaatttggttttcttgtccttaaatgccaacatcaaatttcattctgacacacacttctggccatcttctca

SEQ ID NO: 139949 - DNA, 313 bp, Glycine max
agcttagggttattttatataatgctttttatctcactttctctttttatcagccttgccttggtcagtcttgccttttccaaccttccctttcttcaaggcggcaaattgagcccttgcgtccataaatgcttatgtaaaaataaaaataaaaaacaaaagaaattgcattgcattgcaggaaaacgaagatagtcagaaaaatataaaagaaaagtccttaaccatattagccggaaaatcttccaaggaatacatatcaaactaattgggaggaactaaagatgtcatctcttgccaaactcaaagagaa

SEQ ID NO: 139950 - DNA, 427 bp, Glycine max
tggataccgcatgtccacattactcatcatttcttttttaatgctcactgaaaagaaaaattcttctcaatatttcacttaacatttatacaaaagcaaaaactattgtgacatgcctgttagaattcatccgatgtgggacttgggtatttcccaacaatgcataagtcacatatgcaggatattctagtctctagacatcagctcctatcaaatgaatgacacaggaaacaaattaattgtttcattcacttacatcaaccaagtccaaatttgctactctatatatgtgtgcctaactagcgtgcgtccagacaagatagactaacagaatgattatcccatcgtgattgatacaaatacagcactacatcaaattgagaggatatgcaatataaatgaccaatgcccaatcatctttgtggaa

SEQ ID NO: 139951 - DNA, 312 bp, Glycine max
agcttcccgcatctttacttggaaggatatgatcactgccttccttaggcaatatcagtacaattccgatatggctcccgatctcactcagttgcagaacatggttaagaaggaaggtgagacctttaaagagtacacccagcggtggagggaactggcagcacaagtggcccctcctatggtcgaaagggagatgattaccatgatggtagacaccttaccggtgttttactatgagaagttggtaggctatatgccctctagcttcgcggacttggtattttccggggagagaatcaaagtaggtttgaa

SEQ ID NO: 139952 - DNA, 116 bp, Glycine max
ataactgccgaacgcggaagcaggcgcacactttttttacgcaaaaccacgtggggattggagacagaccataaaccgaatttgtttacccgtcgtggaagccgtgtcagacattc

SEQ ID NO: 139953 - DNA, 312 bp, Glycine max
agcttcaattgttttgtcatgagctttaaattaggatccatatggctttcaacaggtctacagttttgcatacctgtttcttctaaaatatcaagagcatacttcctctgagagatcacaataccatcttctgattgagccacttcaataccaaggaaatacttcaaagatccctgatctttggtctggaaatgactgaataatggctccttcagctggacaatcttagtagtatcggtccttgtaatcactatatcatcaacatagaccattatatagacacattttccaggagatgtatgataataaaat

SEQ ID NO: 139954 - DNA, 390 bp, Glycine max
  unsure (1)..(390): unsure at all n locations
ttaaatctcagcttgaacaatatcttggacttcattaactgtctttatgcttgtgtttcacgctcaacaaaatactctctacacctactgtacgttgatatgaccaatgcttgtatgggaatgttgcgacaatccttcaaaaccttattgatacattctgagaggttggttgtcatgtggccatatcaacgtccctctctatcattagccatcgtgcattttttctttgaaatttgatcaatcatgtggctatggctggactcaaatcaccaaattttttaaattttgatcataaatgtgcttgccacgagtgtagactgcctaaaaataactatgaataacaatnttaagtatatatgaaacttaaataaacgtcccactctaatatga

SEQ ID NO: 139955 - DNA, 314 bp, Glycine max
agcttgtttatttttaatgaaccatcaactttaatcacctccttgaagtcttacaggcttagtgcatacactgaaatgttgaaattgtcacttttctcactgctaatcaatcctcgtgattaagaatatgatttaaaacatgtaccttagacatatcaatacataaaattaacaatatactatatgctttaattggctgaaaatgcttaaaggagacaattgaattgaccattctaaatccaaattgaaaaatagaacactaatgaccatatacctctcaatcaaagttattggtttatctaacaagaatgaaa

SEQ ID NO: 139956 - DNA, 300 bp, Glycine max
agcttttgatatttcttcttgagaccctcattgtctttttaaaggttctcaatctcttgggtgttgttttgctttaagaagttcatctctctgtagggtgatgatcaataagtgatcatctagctcctgattagaggtgctcatggttggctatttaaataaccctaaccataactaataaataactatagccataactagttataataactatagccataactagttatgatttggtataactggttattgcttttaaaatatggttatataactatttatgaatataactagttatat

SEQ ID NO: 139957 - DNA, 322 bp, Glycine max
agcctcttagttgttttgctttgaaagttgagttgtgacaaaaacaaaccatagtatatcatactattcatagggataaaaatttagggtgcaaggttcattgcttctagtgttgatctttaattaaaattagaattttatcctattaacccaatgataaaggtgtagattaatcttgaaacactattgaggtgaaattacatttttttttatttggatcctcaatataatccaagttaagctggatgaactcatttaagagagcaaaacccttctggtgcatttttttctcattctcattactcaaaccccataccttatt

SEQ ID NO: 139958 - DNA, 322 bp, Glycine max
agcttgtaggattatggggtacccatcacatgtggtactaggtggcggtcgggcgatggtgcacaacaaattttccacatccacaaatcgcgcataaacctaccatcccctgttgcccacctccaactgagctcacgtactcccatgtagcccaaatcctcgtttctctcaacatagggtccccatcaatcctcccaagcttccccaacatccaagtaattcaacattcaaacaacacaaactatcacagccaagaaaacagggcaaaggcagaaaactctgcccaaaacaccaaccaaaatcacagcttttctcacttaaa

SEQ ID NO: 139959 - DNA, 316 bp, Glycine max
agcttttagtacattaggaaaagtgaatccatctggatgcactcctgtccatctcatccatctatacatttcaacggtgtccctgtacatattgttcctcgaataactcctaatgatagcattccacataaacacgtcagggtaacaaaattcatcaaacagcttgcgagcataacaaatttgtccaagatttgaactcccattaaccagtttggtcatgagaaacccattatgttgcagcccggagataactaaccggttatgtatttgatcaaggtgtctcttgtgggtagaattatcaataagagatgcatac

SEQ ID NO: 139960 - DNA, 323 bp, Glycine max
tactcagcttatcattaaataatctaaatggttgatgatgccattatctatatctttcaattggtgtatgattaattgtatgatatgtttaaaagtattcggctgattgttcatgttttccaaaaccattatattatataaaattattttcaatatattaaaactttctatgttcatcttggtaagtggtgatctttgttgttgtcgttttaaaagaagtgtttggtaatctattatcttcttatgtaatcgattacaggcagttaggctaagtgtaatcgattacaaaattccttgtatcgattacagagcgtctgtgtcta

SEQ ID NO: 139961 - DNA, 184 bp, Glycine max
tgatggattgtttgccattgattgagtttaccttacaaacatttgttaccaagccagaattggtatggctccttttgaaaactttatatggaccaaagggccaaactcctattttgtgcgttgatgatggagaaaccttccttcttggacctgaaatgcctccacagattaacgaaccagtgag

SEQ ID NO: 139962 - DNA, 317 bp, Glycine max
ctgcagcttctaaattttttcatttccatggccacgctcctcagccaggacctcaaccctcgctcctctctctaccagcaggtaaattaatcaattcttcgatctttagggtttctatctgactttcatttctttataattctctccaattctggaagagtatttcttttgcatttaaaaaaatcgtgagaattaaatgaagggaaaattaggtcattaccgttatggaaagtttctatcagtgcctgcaaatgaaaaattttacacggcttgtatcttagaccgttatgcgcgttgtaagaatgtgactgaactga

SEQ ID NO: 139963 - DNA, 322 bp, Glycine max
aagcaagcttgaatttattttctctgagagggggatcctaaacgtggagggaacgactagcttcgagtaatagtctctgcatcaatctttgaaatttaaaatgaaatgtatgaatgaggacatgatgaaggccatgattgtatatacaagccaattgaccaaaaagcttaccttgaattataattgtatccttttcaccctttgtgacctgaattacattttcaaaattgaactccgaacttgaatgaatacctccagataccttgtttagattctaggagagcagatagttgaaggcaaaataccccaaaatttgggggag

SEQ ID NO: 139964 - DNA, 55 bp, Glycine max
agcttagtttatcttatcatcctcaaacagatagtcaaactaaacgaaccattca

SEQ ID NO: 139965 - DNA, 308 bp, Glycine max
agcttacatttcttttatcttaaaactaattctaacaaaacataaaaaacctaaaaatcaaaagctacagttaaagtcttctaccctaaagttaagacaagaaaaagagaaaaaagatcaaggaacttacttggacggtgtatgattgatgcttcaaagtcgaaaatgcacaaagagagtacaaatgcaaaatgtgcaaatttttggagagagagaatgtagaggcgaggtttctgtaatctggaaaatgtgagtgtaactgctgttacattcacttaagcagtttcgatactttcgcttagcggacc

SEQ ID NO: 139966 - DNA, 317 bp, Glycine max
agcttgtttttattatcaattatgtctttaaaacaagttgaaccattgaattatgggttactatgttttactgattacccaagccattttggggtatggttgaatatatggcaataattgacacctggtgccttccacattttgaaatatgacagaatctgaactataagtgtcacaattatcctgtgtagtacgttattttgattggcataaaggaacatgggatatgatattttttagtatttacatttacttatcactatgtatttctcttaagttaataagaaatgtatgtttaaaatttttccttatataat

SEQ ID NO: 139967 - DNA, 234 bp, Glycine max
  unsure (1)..(234): unsure at all n locations
cccccaaagccttcttaaaatcttccactatgggttccaactcctgaatgatctttagaagagctaatgatcacctatcttttttcaatctcaagacatccctagggctcattngggctaataggtatacctgcttctcatgtatcgcaatgtgaaatttctttctcgatcccccaacgatacccataaatggcaattgaactcccgattatcattcgaaattcctcctcacaa

SEQ ID NO: 139968 - DNA, 347 bp, Glycine max
  unsure (1)..(347): unsure at all n locations
atagatactcagctgagatgaggaagtgtnaaaggtgaaacattctgctttcattctttgaccacagagtggtacctggagatatgtcgcgggggtcaagagacctctgggacgtcatgtcgggtgctattgcccaaaaccaagcttgaccaattccgacccaaccccggcatattcagtcagggagaacctgtgaagtacctaaacacgcgaactcctgacagtctacagataaaaggaacaaagaccacaaagcaatgaggcttgtgtggtggctggccagctgcgaactttgattgatatataggatatggcctcttgtgatctattaccaacggtgggtaatc

SEQ ID NO: 139969 - DNA, 317 bp, Glycine max
agcttggtgcatatgatttatatgctccaacttgagggggagtgttgaatatccctatagtttagccatgtttggtaacttagttggtagccttcttcagaaggcaacaatgcattgtcactgtcatagcctctctcccccctctctctctctctctctcttttgtactctctacatatatgtaccattttgaattcaagaaataagagaaaagctttttacttttttactctggtccttcaactcctttatagtcgcttacaaactgtttgataaaaattctccatttctgtttataaatgaataaatgtaggaac

SEQ ID NO: 139970 - DNA, 321 bp, Glycine max
agctttgatttgagtcatctaaagattataaatatgtgaccatggcatgattttaatcaagagatccatcatctatctttcaatcttctctcaacatcattcaatatctttcaactctctctatagaattttccgattcatttctcttcatctttctaaaattttttgttcaacactttcttttccaagaaattttatttgatcaaaaacttgtgttattcatctttttcattctctgcttccttttccaaaagaacgaaggactaaccgcctgaattcttttgtgtctctcttcgccattacaaaacattcaaaggactg

SEQ ID NO: 139971 - DNA, 315 bp, Glycine max
agcttctgaaattttttttctgattgaggagagagaatgtggcttgtgtttaaaaggcttcctattttttttttttaaaaaaagctgtgccacatgtcttcttttgagtggagcaaaaaggggcccactttttctcttgatgtgactcatactcagtcacaagaagagaaaaatctgaccttttgaaacactaaaatcctacctcggtttgcgtgccatttctctggttccaatccctcgcgtttctctgcacccgtcggggccagtttccgaaagtaggcaatatatataccaaaacgctcagaatgaaacccc

SEQ ID NO: 139972 - DNA, 295 bp, Glycine max
agctagaagcatttttttttcagagagtttcatctgcagatcagcagtgtaggttggccaaactgctaggctatcaatttgaagttaagtacaagcctgacttagagaatagagccgatgatgctatgtccagatgtcatggtgaggtagaaatgaactctattatctctttaccctcgggggctgatagacagaaacttttggatgaaataactaatgacccgtacatttaaaagttactgaaagaagtgtaggagtctcctgatgtcagacctgggtttcacgtgaaacatgg

SEQ ID NO: 139973 - DNA, 184 bp, Glycine max
tacatgcacgtgatggcaattgtatattgggatgaatctcccccgtgactaactataataggagtttgaaatttgtggcttcctaattaaatacctactcatgtgaatgtgccacatgattaattaaaattccttgtgaatgaattgcattctgaaaaatacgtgcttctttatttgataaaag

SEQ ID NO: 139974 - DNA, 315 bp, Glycine max
agcttgaaaacaatttcatcaggcagggttgtgttttccaacaagttgtggtatttgttgatttgcaccttgatgtccttatcctcgatcattgtcaaatgataatagttgctgatgatgaaccattgtctgaccacatccttagtagggtacttcagaacaaaggagtcccaaatctcctttgcttccttgtaggaacaatagtcattgaacaactcgtcagataatgcactctgaaaggtgtgatgacataccttattcgcatgatttcgatgttcaagctctttggcaagtattgcagagtttggcttcttg

SEQ ID NO: 139975 - DNA, 319 bp, Glycine max
agcttttattatgatattaataatgattacaaaagtggccatgaggataacaatgatgacgacaaacgatgatgacttatcactcatgaaaatcgaataacatccatctcaaaaaaatctagaacaagtcaaagagttcaataatcaagaagaattcaaggcttaagaagaaagcctacaaacaagaatcaagattcaagatctcaaaaatcaagatcaagaatcaagactcaagattcaagaatgaagaaaagactcaatcgagataagcatttaaaagtttttcaaaactttgaataggacatgagtttttgacaaa

SEQ ID NO: 139976 - DNA, 224 bp, Glycine max
atgcacccaatggtgtcgatacataagctccgaagtttagatagatctaatgtcgctccacgttaagcttggagaccttggaacttcttcatcaatggagacctttgcttcttggaaatcaatggcaccgaaatggaggaggaagaagacatgcgattggatacgccacttcaatgagaaaatgagttaagaacaaacttcccaccatatgaaaccatggataa

SEQ ID NO: 139977 - DNA, 311 bp, Glycine max
agctaattttttttattttgaactttcctttggaacccaccttagaaaggatggcttttacatgcatacatagtgtatttttgtcatttttttaatacttagtaatgggcatttttggtaatatctagtagcagaattgttaaactgtcgaagttaagttgaaccaaatgataaaaaaaattgatttgatttgattcaaattttataaataatttaaatcgaattaaatcaaccacataattttttttttggttgagactagttttacataaaaaatcataccatattacactgcggacacccttaactaa

SEQ ID NO: 139978 - DNA, 308 bp, Glycine max
cataaattttcatgcaggtggaccttcttccaatagttctaacttgcagcagcctcctatctctctttcatttccacctacagctatttcaaacaaaaagatggaagaagtggataaggagatcttggagaacttcaggaaagtagaggtgaacatacctctactagatgcccttaagaaaattcaaagatatgccaagtttctaaaggagttgtgcacccacaaaaggaagctcataggcaatggaaggattagcatgggcagaaatgtatcagcattgatagggtaaattgataccttgcattatt

SEQ ID NO: 139979 - DNA, 308 bp, Glycine max
agcttgctttatatttgggcaccagaattgggtgaaagttacaggcgagtaccttacctttccaggtggtggaacccaattcaaacacggtgcacttcattacattgacaccatacaacaggtaaaatatatactctattattgtcagggttgactattagttgcttttagtgttgagtctttatatacaaatccggatcaccttttgctgcatgttcaataaagccatattgtatgtgctattttaccttaaggcactaaaagtattacattctcaagatattaaatgcttgttatttttatttaaa

SEQ ID NO: 139980 - DNA, 312 bp, Glycine max
agctttttttttctttttcaagcgcttccttggtatcccaaccaccccatttttattttgtttcacacggtctaactcttgtgctaggatcttgaccacttttgctactcttgccatggaggggtataacccagaaaacagacacaacttccttcctcctaacgagcatcccaagattccttcaaactcttctatggttggtaccaactgaaagtccccaaaggtgaagcaccttatcagctagtcatagtactgagcgagggaggcaatggcttcaacggaaacttttattatagccaaatcccagatttt

SEQ ID NO: 139981 - DNA, 305 bp, Glycine max
  unsure (1)..(305): unsure at all n locations
ctgtgctcgcgactggtgcctttctttccttcgcaacttgagttcactattgctaccccatagagctccgcgaaaattggttcggccatactcttccttgcgagccctcttggtctcttgttcaaaggctcttgcggtaattgcattctctttccataacccgacacactcctttcgaacgtgtgtagcggccaacttgaacttcttcttggcaagttntgcctttcctaactcgcttttgagagcttggactttctcgaactctttcggtgctttaaaattctcttcgctgacgactttttact

SEQ ID NO: 139982 - DNA, 298 bp, Glycine max
tatattttcccacctgagggggagtgacgataatcccgataacttacgcatgcgcgggaaactaacctggtacccttcttaaaaggctacaatgcattgtcactggcataaccatcctccccccactctctataactcatcgtgttggactctctaccatatctgcaccatcctgaatccaagaactacgagacaagctttttacttttttacccaggaccttcacacaccaaataagcgtaacaaactgattgagaaaaaatcccccatttctcccgaataaacgaacaaacggcgg

SEQ ID NO: 139983 - DNA, 169 bp, Glycine max
aggaacacgggggaaaagaaggtaaaaacacgaaagcaaaagaaccaacggaacgagcgaaaacaaaggagaaacgccagagagccaaacaccgggaagacgaaaaacggccgcccccaaggagaagagaaaaggcgcaaaaaaaaaaagagaaggaacccaaaagcaa

SEQ ID NO: 139984 - DNA, 385 bp, Glycine max
  unsure (1)..(385): unsure at all n locations
aaagtatgatttaagctttttaagttattggtttttcaatgtttactgaaatcttcacttatttttacatnttttccccttttatattgtatttcttgatatatggntgccatcttgttgtcccctatggtgcactgaaaatgatgtggttgccatctcgttgtatcaatatagttaaggactctgcattgtgacttatggntatattagttccgcttttgtagttcagctgttatctgacaagcatccttatgctctgtttgccaggtatttcaaaattgaaccattacctggacggaagtaagaatcttctctccactcttggtattctggttggctttatcttaagtcaatggataaacctgttcctgcatcttgatacttt

SEQ ID NO: 139985 - DNA, 320 bp, Glycine max
agcttcagaaccaatcaactcataatctaaggatctaaaacccctcaatttagtggattttcaaggtttgaaaagtgaaaatgagaatggggtaaatttggagcaaactctcacctcacacaagtctataaccttaatctaaacttgctcaaactggttttacgcctaaaattccaccgaatcaaaatttgactcctcaacacccaatttaccctagaaatggctcttaccttaactttggtcattcatttttctcctttgcacagcccaagctttcccacagtcctaaatgacatttcaaactaggattaactcccttt

SEQ ID NO: 139986 - DNA, 316 bp, Glycine max
agctttctaagttttctggtttccaaaccttgttctttcacagaaaaacaaaagtgtgctgctatatcttttcatcctcttctccctttgccaaaaaaaaaatcaacaaggactaatcacctgaattctttttgtgtctctcttctcccttttccaaaagaacgaaggactaaccgcctgaattcttttgagtctcccttcttccttttcaaagaattcaaaaagacacagtctgagaattcttttgattctcccctttcccttaaacaaaagatttcaaaggactaaccacttgatatatcttttgttttccctt

SEQ ID NO: 139987 - DNA, 317 bp, Glycine max
agctttttctacaatcttttctccccctttggcaacatcaaaaagccaaagaactcgaaaatcaacacagatataacaatggagttgcaagatataaatatcagagtattaaacacaataagccaaactcacaaacaagaaataatcaaactacaattcaaataacataaaatgtcaacaaccacaaaatatccaagactgaaatttaaaaaccaaaagataaataatcaaagtacttagcataataatgtaaattctaagaaactaaaagccaaaatacacggcttataaaaagacatataatcagaaactaaaat

SEQ ID NO: 139988 - DNA, 313 bp, Glycine max
agcttctcgttattttatgtgcctgaatcggacctccgagtgtaaggttgtgaccatttgaatttctcaagagcttccattgttcaatttcgagcgtctcgatatattatgcgcctgaattggacctccatgtgaaaggttatgaccatttgaatttctctcgagcatccgttgttcaatttccagcgtctcgatatcttatgcgcctgaaacggaactcccagtgaaaagttatgaccatttgaataactcaagagcttccattgatcaatttcgagcgtctcgatatcttatgcgccggaatcacacctcc

SEQ ID NO: 139989 - DNA, 311 bp, Glycine max
agcttgtatttgtttttttctaagccctgtaacaagcttaaaacaataaacttggccttctcttaattgtctatgggcttggcgaccacgatcaataaagtactttcggcacctactatatgttgacttcaccaacgctgttattggaatgctgcgacaatctttcaacaccttattcacacattctgataagttggttgtcatgtgaccatatcgtcgtccagatgtatcgcaagccatgctccatttttcctttgagaatcgatcaatccatcttgctatagctggactcaattgacaaaatttttcta

SEQ ID NO: 139990 - DNA, 437 bp, Glycine max
tacttgggtcgcaaatacacttatttctctcttcattctaaaatggggcatgcaaagtttatgaatttattctaattaaaatataattttctactatataacaatggcagagagacacagtgttctttgttttgtctccgctaccccattggttaatcacgtgatgatggagattgatccgcgtatagacattttggggcctaagacaaaaatatttaagggatcttttttttacaggaattttaaagaaatttaatatattatataaaatatcacatcttatattaatcttttaattctattagctggatattgtgattttggttaaataagaattcttatgggcccctaaacatcatatttttaagaaaaaaaatatactaatttttattttcttggaaatactatgattatcaacttattactggacacacaca

SEQ ID NO: 139991 - DNA, 308 bp, Glycine max
agccttttattttttttttatgaagatgaatttatggccaccttatggacccctctaagaacaaaagcatcatttcttgcactggattgctgggagttagaagccatcttctcaatcaaattcctagcattcagcaggggtcatatcaccaagggctccaccactggctgcatcaatcaaacttctctccatgttgctaagtcccttatagaaatattgaagaaggagttgcttaaaaatcttgtggtgaggacagtttgcaaacaaattcttgaatctttttcagactcatacaagttttctccact

SEQ ID NO: 139992 - DNA, 306 bp, Glycine max
agctagtctttcttttaccaatgctaaacaccacctttggcaccaaccaaaacaccaaccaagaaatgaattttgcagcgaaaagcctgtaagattcaccccaaattccggcgtcatatgctaacttgctcccatatttacttgataatgcaatggtagccataacccctgctaggttcccttaaacccccatttttctgaggatatgactcgaacgcaacatgtgcatattgtggagggccctggggcattccattgagcactgtatgaccctcaagcgtaaggagtaaggtctaatttgaggcg

SEQ ID NO: 139993 - DNA, 383 bp, Glycine max
ctcttcctcgggtctctagaccaattttctcttaagtataacaaagttatgaaatggtagacaattagaaaagtacgaaatttacaatttcagataaaataaaacaaaatcacattactatccatttcaaccattaaactaatttattaacagaaggataagttaccctaaacccctggaaaaaaaagtcttgatgatcttttggaatcgctccccatgtatgccaaggctgaccaaattgttgcctaatggacaaagtgacagccttttccgcaaccttagatggatgaaacctaaatataaaaaataatttatcctccataagtaaaagatcaagcgatgtaacatatataatgataattatataaaatttttaatactta

SEQ ID NO: 139994 - DNA, 310 bp, Glycine max
agcttggcctcttttactgagatattatatacatttatttagattaggaaacttcatataagagatttgttctgagatcatatgttagtactcttacaaatataagtcacacaaaagtaccatttcaattatattgtgaaccggagacagcgtcgtttttgtgacttggttgccaatcttctaatgcatttttagtggcacaataattggagagaaacacatcaaatcatatcatataccttgaaataataatggagagagcaccatcatatcatacacgtagataacaattatgcagcagaggaaagag

SEQ ID NO: 139995 - DNA, 409 bp, Glycine max
ttatagcaaggctttggagtataagtgtagaggattcattccttatccaccaagctttaggatctaatgcccatctatcctcaattgaatcaaatgaaccaaaggcacccgcacaagatgagaatttagagaattcttcataaacttttgtcctaacattaacatgtggaaaatatctcttaagacatttattcctttggctagaaagttcatcatctctatgaggaggaaccctatttggaacctcattaagccaattattactatagcacctataaaaaaatatatgtatacatcttagtcatactatggttgagaaagagctaagctagccatacacattattgaagaattgatataaaatattaccttggatctagagaatgagctaaacaatggaatggattac

SEQ ID NO: 139996 - DNA, 403 bp, Glycine max
  unsure (1)..(403): unsure at all n locations
tatgaggtgattattgatttaggacatctttatgaanatttaaaaattggcgtggatctcatactcatatatctatactctactttattttagataatttactctcttttttttatatctcaattcactttaacaccttttgatggtttctataacaaagttatgacaattagataaaaatgtatttatatctgtttccccctaaagtatttatgaaagtggagtggagccactggcaggtatcatgataggtccataagcctagtatatttgggatacacttgctttatacttaaactattgctttactgaatacacactttcaatttataaatacactctatgttaatacccttattgttccccctttttcaaatatacctctttttcgtctcgttacact

SEQ ID NO: 139997 - DNA, 317 bp, Glycine max
agcttgaactggtctgctctatctttgtaggttcctctgaattgttatcaagttaccgtcttcaaccagattaccctaaaacttggagaatattagcatatctttttgaactggattaaggaaggtacctaggtctcgcaaaaaaggttgaggctactatgtgaggggaatatgatccacattctctgtggactctattgctccctcaaattgggtgtcctccacttctgtgtcaggctctatctccacttcaacatcgggctccagtgctgggataggagcagattgcaggcactccccgacttggacaacttgag

SEQ ID NO: 139998 - DNA, 137 bp, Glycine max
aatgaaactaactgaaatatttacatctaccaaaattaccataaattgggagatttatttacattttggaaacttttctatacaaaaattattcgtaaaagatgactaactgattgtaggttcattaaaatgttcgc

SEQ ID NO: 139999 - DNA, 317 bp, Glycine max
agcttggtttgatcttcttgctcaatttctttgctttcttgttcataagcttttcctcttatcttctcgagcaatagcctctatttttctttatctcgatagctactgcacctaatgtgcagatttgtgcgtggtgattctctagttcaagcttgatttgtgacaacatcaacatcgattacagagtctttggcatccgaaggcggttcaacttttgaagaagaggaagggtccaacaacttcttggcctttctaaaccaactttcggaaggagtggtcaataacatggagagggtagcgaatatagatgttgctca

SEQ ID NO: 140000 - DNA, 399 bp, Glycine max
  unsure (1)..(399): unsure at all n locations
cattgctctgacgccgatgccggaagcgtctgtctctacagtaaaaggtagctgaaaattangccagacgagaaccggagcggctgaaagggctttgttgatgtgatcgaaggctgcttgagcatcatgggtccaccggaaggggtccatcgtagttgctttgaccagtgtgtcatctatcatggcatatcctttgataaatctccggtaaaagccagctagcccgagaaagctgcgcaacgcctttgtcaaacggggtatcggccactgggatacngcagccaccttggccgcgactggttcgaccccacgagctgacactaagtggcccaagtacttcacctgcgattgtgtaaagaagcacttatagagcttgagaacaaatgattatcgagcaat

SEQ ID NO: 140001 - DNA, 316 bp, Glycine max
cccggaccttaatcaccgcggctgcagcttgaacacttttttttgttagcaaacaacgagcaaggccaagaccgtgctgtcccaacagtgaatgaaacctcctccaccactcgctttctgcgaacaatcacctagccctgtctgagcgctaataatgctaactggaaacgaaagataaccctcccgttggatcatacatgcacacacctgcagaaaggctcctcacacttatctaatgatgccacgcgtgcttctctgtgccttaagccactcaataaccacaccacacttttcgaaaacgacaatgcatgccgtg

SEQ ID NO: 140002 - DNA, 313 bp, Glycine max
agctttacggaatttcttttccgtaaggggcacagactactcctctcgcgcacacccagcggaaatgtgtacctcgtatggcgatgacgatgaaccaaccaccgcaacaatgaacactgacccctttaccttcacccaagctcacctatctcaagaaaaaaccaccccaaagaaagaaacagaagaacaaaaaaagcatggaggtgtaaaacactggtcacccagctttttaaggaaaaagatagaagaggggcatttttggcattttttataaatgaggggggcacaagcaaatacggtggtgaaccctagc

SEQ ID NO: 140003 - DNA, 315 bp, Glycine max
  unsure (1)..(315): unsure at all n locations
agcttgcaacaaatcttttntttaaagagaaagagaaaaaagatatttgttcagaagacacgaaaattaaagccaatttccaaaagtcaaaaaactgatcaaaaaattatgaatactatcacaatacaagaaaaattgacataccaatccttcaagatgcttcagggtcaacattagtttatggggtctagataaagtcatcaaccattgcatcatcaagagtcctcgagtgtttagtctcatgtaacacaatcttgattcacagtaccaagagccctaagacgagtaggaatgagttcaccattgaccctcatg

SEQ ID NO: 140004 - DNA, 309 bp, Glycine max
caagcaaacctaatttttattctggccccccgtgacagggccaagcataaaccctataccaccatctgggccaccccccacatacaggagggcgaacaaccgaggcagccccaccaaagaggaaagcttgtacgccgctactatgcaaaccagggcaagatttcgcccctgccgctgcaaaaaaacaaaggtggagcatacacaccgacattgaccctcttacgcagatgtaagggaagacggtacttagccacatccagcccaacgaccggaatgacaagacccccctgcggaaaaagtagctggatc

SEQ ID NO: 140005 - DNA, 233 bp, Glycine max
gatgagactcctcttctcagaggacatgagtctagaagaagctcaccaccatatgaggccatggataagagcttggaggaacaaggatatgaatgaatggagatggagagaacaccacgatagtgactgctctcacagagctatgaaatcgtaagattaattttcaaatgatctaagttgagaaaatgcacacacacgacctctgtgtatagcctaagtgtcacacacaattg

SEQ ID NO: 140006 - DNA, 315 bp, Glycine max
ccccagagacaacccgcagcgagcagagcggggccgattttttgccagacccacgcgggcaggacaaaacttcaccaacaaacagcccgagcacaaaccaatattgttctttagctcaaaagcgacggcacgtaaggcgcacactcgaacctggagattcactagctcaagccgcataagggacaacagcaacaacgcgcacagagcccttagcacacgaacgcaggtcaagctctgaaggacaggaagggggccacaactccagggcctttgcaaaccaactttcggaaggagcggccagcaacacggagaggg

SEQ ID NO: 140007 - DNA, 199 bp, Glycine max
catgagaagatgaaacaagaacaaactcaccaccgtatgagaccatggatacgagcttgaagatatgagaagatgagtggggggaaacagagaaaaggagcaccataatgtctgccctcaatgaagcctgaactttgaagcataaggctcaaataatccaagttcaaaagatgcacacacgatgcctctatatacagcg

SEQ ID NO: 140008 - DNA, 310 bp, Glycine max
agctgtgatttatgttgaataagctgctgctcatgttcaacaagattcggtggaaattaatttatctcaccctcatttgccacaagatattgatttggagttgatggtaaatatttgtcacaacaaagtagttttatcttaacctaatttgttgcagcactccatttttatatattacaattattcatgtttggcatttgcatgtaggcccctgccactattattgttccaccaataacaaggaataagctaactataacaagagacaaacaaaggaaggttgctgataaagatgatgcaatataaagaa

SEQ ID NO: 140009 - DNA, 212 bp, Glycine max
aacccaagaaaaaaacaaaatgtctatatctgtacgtgagcgggacaagcaattagttgagaagcaaataattatgacactgggtaatattactccaccaattgaattgtatgaaccaagagtttgaatatcggtgatattatttaatactactcaacaaacttaaaaaaatgaggttcaattgaagaaactattggaatactatatctata

SEQ ID NO: 140010 - DNA, 294 bp, Glycine max
agcttcctttattttatttttcataccagaaaacttaaaacctgcgattttcactcagttcttcacccaacaaggttccgtagaggccaatcttgctagttttaaatcgtctgttactttcaccgatcaaaatccagaaaaacttcatcaagtgggcgagccatctatgaaaaaaaagggatgattcttcaccgttaccgttgctgcccatcgccgtcacggcccatccggggcacccacagcacctattgctccttttttggcatctccaagatcattaacattgtgttcatc

SEQ ID NO: 140011 - DNA, 191 bp, Glycine max
gctatgtgctcacgactggtctgtctgttcccttcgcagctcgagtatactattgctaccccatagagctccgtgaaatttatttcggccatactacttcttgcgaaacctcttggtatcttgtttaacggccctttgggtagttgcatattcattcctgaacccggcacactccttccgaatgtgtgtag

SEQ ID NO: 140012 - DNA, 193 bp, Glycine max
aaaaaaaaaatggccaacccccccaaaaaacactgatgtcaaacctaaaatagggggtcgggttgagcaaccccccttaacacaaaatggaaacgcttaacgcccaaaaacgaaagcaggccaagcccgcttctcccgcctaacggaagaaccgaaataatgcccctggagaaccggaacgggggccctaaac

SEQ ID NO: 140013 - DNA, 315 bp, Glycine max
atgagaaattccaaagagaaaacggtcgattgattttccgctatattttactaaaagaagtttctcgaatatttatattatttcttacccctctgtgatatccatcgcgggtacggcacgaccgaactgtcggaatttattttaaccgaagttcatggagtatacaattcaaacgttcggtggaaatttattttattttaagttaagcgagaaatgacttaagtaaaatggcttaagcacgtcaacacggggtataagaagtccaccacacgagaattagaatgcccgaacacaatgtgaccactacgggtcata

SEQ ID NO: 140014 - DNA, 301 bp, Glycine max
agcttttacctaaatccaaaacgagaatcaattgttggtggtatggagaatgctttcaaactcatttagaagtgcatgttggcttcttaaagagcatgcatgccaagaaagtctcttaattaggatttaagatttgattcctatcttaataatagggatacaattagagaaatagagttacaaaaaatggagctttatttcctcccaaaaacaaaagaatactacaactttaacttgttgttcttaatattagaaattgtgtttaaaccttaatattgaaattttgaaattaatattttat

SEQ ID NO: 140015 - DNA, 239 bp, Glycine max
  unsure (1)..(239): unsure at all n locations
tggatctgggagcaaggtagtacaaccaatcttttgccactccctctagtgaataaggaaaagcctttataaagatatgatcttccaggacattaaggggcttcatggtgaaacaaacaatatggaactccttaagatgcttataaggatcttcacttgcaagaccatgaaactcgtgcagcaaatgtattagtccagtcttgagaacatatggaacatcctcatcanggtactggatg

SEQ ID NO: 140016 - DNA, 323 bp, Glycine max
cagcttttaccaaattgttcatcagtcaagttgaaatatggaagtaaccatcctgcaaaaatggggcaaaaaaagaatcgagtcacatcactgcttcgtctactgccaaacatatttaagattattgatgtccttgttacttccagtttcaccttgacaaagatgtcatggaccatgttgaaaatctaaattgattcaaccccatatcctgcgtaaaaattcgcaatacttcgactgtacatcattcgcatgcatccatgcttttcattggttgcattgctcattgcattctttccttgaaaaataaaataaaataaaatgaa

SEQ ID NO: 140017 - DNA, 335 bp, Glycine max
cggatcttaagcactgagctgcagctggaagatttttttggaggaaaagaaagagggagagaaatagatatgggggagctctaaattgaaggaagaaaaaaagggtgagaagttgaactttgagttgtgtcttacaagactcttattcatcaaaattacaacaagtgttacacatgcttttatttatagactaggtagcttccttgagaagctttcttgagaaaacttccttgagaagcttttttgagaaaactttctttaaaagcttgagcttttctacacacacccctttcataactaagctcaccttcttgagaagctttcttaataagatt

SEQ ID NO: 140018 - DNA, 272 bp, Glycine max
tgagagattttgctgtgtgaagatctgccgagacgagagctcgaagcgaaagccgttctgagagcttgagatgagtttgtgagtgattgtgagatcctagagatgaaggagacatcctcaccacttgtattttttcaatctttcatcttggtcttctctatgttgaaaggaggtttccgaactatggaaagctaaatcctctgttggatcttcccttgaggtacctaatgctaatatatttctatctatgtaatgatgtttgtgtgttctct

SEQ ID NO: 140019 - DNA, 316 bp, Glycine max
agcttcggactttttatttggagtaagttcctaagcttgagattaattttattatacgaaattaaaggtgattttcacaaaagataattatatttgaattggataaaatcattaaagggtgtattggattagaattttaaaaaaatattttgacataaaaagttttagaaattttaaaagattatggaagaatattataacttatcagatttttttaaaagagttttataattaggattttatagttttaaatttatattttaatggatttatatgttgagaatttaaaacatttgaaagtattttatgaatttgt

SEQ ID NO: 140020 - DNA, 314 bp, Glycine max
agtctaagctgcattttttttctaattccgggagttggcttccacattcatctagtggagaaaaagatctatcaagaaaattttgtttgaggttaatggtcaggggatcatactcctatgaaacctatataagccttcttggtatgcatatcatgatttatttcttgacttttttaacttaacttttccccttccgaaacaacccccatgaaaaggtttgccttggaaacctcaagaagttccactctgataactttaaaccaataactttattgcaaaagtagtttttgaaatgtctacaaacggtatatttc

SEQ ID NO: 140021 - DNA, 416 bp, Glycine max
  unsure (1)..(416): unsure at all n locations
aaaacataacgattattaattatgagttaataaataagacaccttgtaattcaatttacttacatcatccacagaggtaaccgaatggcaagtgtaccaattttgtgacaagtagtaaagtactcggaagtccgagagtcgaatccacaaaaactttgtttgtacatagattgatgcaaacccaatttaaaagcacgagataaggaaataatagataggagataagataatgttgggacctagcatgcctaactacccttgatgcaatattaatgatgttctctatagaatgctntcctaatttccaccttacatctncaaatatactcaatacggatccctcatgttgaagagcttatattatatattctctctcccacaatcctttgcnagacagaaataatatacacattaag

SEQ ID NO: 140022 - DNA, 319 bp, Glycine max
agctttgcttctattacttattcaccatttcagaccacatatcttcaaatttaacaacttgataatcacccaacatgactttcttgaagcatttcgtgaatgtcaaaatatggacattagtgtttgcattaggaatcaagtgccatgcacatagtctatggttcacattgggaaaaactatcttgattgcattctttattgctaaatccctattagttatgaccaagatcaatggctttcctttcgttgattgaaggaattgctctaacaaccaaatatatgttttgtgagtttaattagacacaagagcaatgccaaa

SEQ ID NO: 140023 - DNA, 460 bp, Glycine max
aaactcagcctgtcttgattttcctcagtcttacaaccttgtttttattcttggacttcatttaactgtctttatgcttggcggccacgctcaacaaagtactttcgacacctactggacgttgatttgaccaatgctggtatgggaatgttgcgacaatccttccaaaccttattgatacattctgagagggtgggtgtcatgtgggcatatcgaccgtcttctctatcataagccatcgtgcatttttcctttgaaattcgatcaatcatgtggctatggctggactcaattcacgaaatatttctaaattttgatcaaaaatgtgcctgcaaggagtgtatactggctaaaaatagttatgaataaccatctttagtatatatgagacttaaataaacgtccgcctccaatatgaaatcgtacccaactttttcaacatttctttttgtttgcatta

SEQ ID NO: 140024 - DNA, 114 bp, Glycine max
attagttttatcaaaagaattgtccattaatattggataaataaatattgggttatctaattttagttgtgcacatttttaaaagtcctccaataaagtgcatcattggaatct

SEQ ID NO: 140025 - DNA, 374 bp, Glycine max
  unsure (1)..(374): unsure at all n locations
ctaagtttcatacaattaatatagaacctatatcctaatggcacatcttatcaaaacgtggtgttcccgtgtcctctagcatgaggatcttcatagtcatccacctatacatctgctccctcgaacacaaagttcaagatcatcacaggatccaaacacaaacaacaaaccgggagtgagttatcacatttctaactactagagagaaacaacacaacatatagtagccaaatacaatttacttagcatatctcacactatgtcatcactttgtcattcatcaatcacacttttcaatcatcaatcacaatacacacgaatcacacactctgatcaagacatanatacacatcaattcataataaaccaataca

SEQ ID NO: 140026 - DNA, 259 bp, Glycine max
tatcatcgtctgacctacaatcactcacacataaattgaatctgaaaggctctcttggctcgtaatgagactgggctccacacaagtcatggtttttctatgatgcgaaacttatgttctaagagagcattcattcttagatcaactctttttctttgtattcccaacttctattaacttgccaatcaacatttaacgcacttaagtaacaacacacacactactttattcttgaaatatctcctctttcttatattat

SEQ ID NO: 140027 - DNA, 308 bp, Glycine max
gctattttattaattgcctaactatttccaaatatgcatgtgaattaggaagcatcaacaagaatcaagccaaggctattgtgcaaaatcaatggggcaaaacacaccaaaagattatgatgatggatggctcaaattctcacaaaggtaaacttatcactttcaaattgagctttcaaaactatcatgacatgtataggaaaaacaaggatttcaaatcacaaaatgtcaagagacttttattttgagaacaattacccattacttgaacatatcctataattcaaagaaaaacatgcaaatttaac

SEQ ID NO: 140028 - DNA, 389 bp, Glycine max
cacaaaccatggcgaattgggtcaagattgagaagtatgaggatgcttacaagttggtctactgttcaagtgtgtgcaacgattgcaggtatccatgcagtgatattggaatataccaggatcaatatggcaagcgtcttgcactaagttctgaaccatacaaagtgaagttcctgcgggcttaattattgaattgataacaaaactgattaaagcataatgaataagtgtaatgaactactttatgcttttgctgcatatatggtaaatctcatgttgagttccttgccacggacttgataataaataacaagttaattctattttagtctttaaaattctagttctgtcgtcttgtcgtgttgcattggatgatattctgattaaat

SEQ ID NO: 140029 - DNA, 320 bp, Glycine max
taatgatgatgggcagcctttaaagatattgaggattatctatcccagacatggagcgttctttccttctctaacctcattcccacctctcacacatctgatgtgacactagacaaagccaaattgatttatgggattattatgaagatggacatgaacctggggtacctcatctcctatcagatctctctgattgcacagcatgacacatacagacttggattccctgtcttgatcacaactctatgcaatgccagaggagttcagtcatactctatatcccttgagaacttgagccttgtcatatactctgcatatat

SEQ ID NO: 140030 - DNA, 290 bp, Glycine max
catgccacttttgttttttactcccagcgatgatcttctcttccaaagaggcttactaatgcttgaggattgaaacttcccaaactatttatcttctctctgagagagactctctacttagattttttaagaatgaatgatcctgcccgtatgttttctactccaactccacaaataatagtcgagatttcctgtatccgtcgatggagacttattttctatactactctcacaatcttggagaatcttcactctgcgaatatctaacctacattttgcttatgttccat

SEQ ID NO: 140031 - DNA, 312 bp, Glycine max
cttcttttgaaaagcatctctgctagtgatatgccggatttggacttatgttttaggtttcacgaattctaccaaatagtcaacagggcattctctgcaaggcaatatatgatggaatccacaagtttttgacaggtgccgggaaacttgatgaagctgagaatgttgttaatcatatgagaaatgctggctatgaacctgataacacctacatacaatcaagtggtatttggattctgtaagatgaggaggctcgaagaaacatcgtaagtgctggaggagatggaatcttgtggatgcattcctgatatt

SEQ ID NO: 140032 - DNA, 281 bp, Glycine max
aggcacccgcacgcgtgctgactttctgtttttctccttgcaagcctaccaccttaaaagtagaaagagttgcactcaaccctacatggagacattccaagttgaccctgcatacaataaaaccttaaaagtagaaaaccagcagagatatagacaaatctacaatccttctattgccatccaataacatcccctctaaatatcaggttcaagaatgaaacacgaaaagaagggggctccccaacaatggaaataaagggcacaaaaataataagaagtgc

SEQ ID NO: 140033 - DNA, 389 bp, Glycine max
aaccatcacactatgctgatgataggaaaaagcttcttgtctctcttctagaatccttaaagacttcttttgtgcttgggatagtgaagactcatctagcggctgcgtataacctttttcaaccatgtttcaaacatcatgtgcgtcaagaaagaacctcatttcgatgctctaatatgcataggcgctcctctctaaaatgaaactggaaggatgcgctcaattgctggcataacttagaggaattctattaaaccctagctctaaaccactttgttggaaggagatggaatattttacaaaaatggggaggggagaactctgaaaaaaggaggttaatactgagaacggtgggtgtgccctctttggcttcgaatttacaaaacaac

SEQ ID NO: 140034 - DNA, 291 bp, Glycine max
  unsure (1)..(291): unsure at all n locations
gtgttgaaaaaaacgaagatattggctacgtgggaatacgtgagctcagttggaagtgggcaacaagggatgggggctttatgcgtgatttgtggatgtggaaaacttgttgtgcaccatcgcccgaccgccacctagtaccacatgtgatgggtaccccataatcctacaagcttgagatgaggaagtgtanaagggtgaaacttcctgcttttatttgttgaccacagagtggtacctggagatatgtcgcgggggtcaggagaccttggggacgtcaagaggggtgct

SEQ ID NO: 140035 - DNA, 316 bp, Glycine max
agcttttgcttgtttatgttgttctagagagagaaaggtccaggttccaaagagttctgagagattttgttgtgttaagatctgcagagatgagagctcgaagcggaagccattctgagaacttgagatgagtttgtgagtgattgtgagatcctagaggtgaaggagacatcctcaccacttgtatttttgcaatctttcatcttgttcttctctgtattgtaaaggagggttccggaccatggaaagctaaatcctctgttggatcttccctgtaggtacctgatgtaaatatatttctatctatgtgatgatg

SEQ ID NO: 140036 - DNA, 332 bp, Glycine max
  unsure (1)..(332): unsure at all n locations
tctttctatatatatcctcatttactcaatagctatcacaaattcgctgatcataatatcaggctctctcattgtatcttgtgcttcctcaaatttagcaagaatacaagatgcctcttgagctctctgagctggaatgatctttgcctctccaacttcaagttcaagtgactgcaaaggaaaaagcattgtcttaacattattcagtcaacaagtgtctatcatcatgtaatcggcgccatacccgaatcagataaacattagaatgtagtatctaagaagtgatcctangtcgtctgccagtgagcaatgatcaaacactagttcataac

SEQ ID NO: 140037 - DNA, 290 bp, Glycine max
agcttgacatagttcttcttcttgacgcgttccaccccatgaactcgagagtctgtggttcaacctagggactactcttagggaaccagtcccggcccttgccacgaaaaaacctgtggtcaggaaccctttcctacgaataacgactatccctatggctatacaagcagatttacctacaacatgcaaggggtgaacacccccaaacccagaccacagtgcgtatacacaaatacaacactgtgccgaaagtgaacctgataaaaaaagcgcgcatgccattgaagcta

SEQ ID NO: 140038 - DNA, 310 bp, Glycine max
agctttatggactttttttattgcctaaggaaatgcttttttaaggaccttttacacaagccacatgtatatgggaacactttatcctgaccaaaacacgcataatacatactactatctgggccccctggatcctttgcttggactttataaaatgtcccaaaagtcattcagtttacagcctgatatgacttactacaattggataatactatcacacaggtgcacaaactagatatcggctaataacccaataaagaactggtactctacctttgtcaaaggataaatctcacctaaccttaacact

SEQ ID NO: 140039 - DNA, 319 bp, Glycine max
actcagctatcatgagccagctctgggttgcaactttcttttttttcttcaccatccgagcaaggtcatcccagttcataccctctgcaagagctacacgaacaacttatatagcagcatccacatcttccaaggtatattctatcaattctaccatcttaacacagtgatcagcttctttcctcaaagcgtgtactcaattttcctacacagcagaaatgagatatattatgttgagtatcaaatattattttttgaagatatatttgtgtcatgtgtgactacattcaatcataaaatgatggtgttaatttataga

SEQ ID NO: 140040 - DNA, 310 bp, Glycine max
agcttgtaagcaatctcacccaacctctcaatgatctgaaacggcccataaaaccttgcagccagtttaggattgattctctttgctacaaattgctgcctatgaggccttaacttaagaaaaacccattcccctactgcaaactgaacttcccttctcttcttatctgcatattttttcatttgttgctgagctctcagcaaatgagccttcaactgattcaaagcctcgtctctttcacacagctccatagctacagcagcaactttggtctcattactcaagaaacggatgatgtttggtggctgcc

SEQ ID NO: 140041 - DNA, 315 bp, Glycine max
tcttcgatgcaacaaggataacttattgtctctgactatttcaccaaactaagggttgtttgggatgaacttgagaattttcgtccggatccgatttgtatatgctctatcaagtgctcgtgcaagggttcttttattatagctcaacgaaaattaaaagaccgagctatgcaatttttatgtgggttaaatgatcaatataacaatgttcgggcacatgtgttacttatggaacctttgcctcctatttctaagatttttttcatatatagctcagcaagaacgtccattacttggaagatgtaattatgatac

SEQ ID NO: 140042 - DNA, 314 bp, Glycine max
agcttataataacttaattgcctcaatcatttccaaatatgcatgtgaattaggatgcatcaacaagaatcaagccaaggctattgtgcaagcaatcaatggggcaaaacacgccaaatgattatgatgatggatggctcaaattctcacaaaggtaaactcatcactttcaaattgagctttcaaaactatcatgacatgtagaggagaatcaaggatttcaagtcacaaaatgtcaaaaacttttattttcaaaacaattacccatttcttgaacatatcctataattcaaagaaaaacatgcaaagtcgta

SEQ ID NO: 140043 - DNA, 243 bp, Glycine max
tttatatggcttaaaacaagcccctacggcttggtatgagcgtctgagtaagttcctcttataaaagaatttctctagaggtaaagtggatactactcttttcattaagaggaaattaaatgatattttattagttcaaatctacgctgatgatattatctttggatctactaatgaatctttatgcaaagaattctcttaagacatgcaaagtgagtttgaaatgtcaatgatgagagaact

SEQ ID NO: 140044 - DNA, 319 bp, Glycine max
aggcgatgcatattttttaagatgaaaaccaagcacgagaccttgggccggtttctcgaattctccagcgaagtttctagaacttcaaaaagtcatagcaaatgcccggacaccgtcttgcttaaataaataaggcctggccggtcaacaggaccctcggcagaggaataacacggctaaacaccttgagaaatccaccgtcacacatccaactcttgaccttttattaaaggggggcccccgcgcatggcaaaccataaccacgtattcgattaccctgagcattcaatgaaaaggtatgactctttccaattgaatt

SEQ ID NO: 140045 - DNA, 338 bp, Glycine max
gagaaaattcccgatccaaagaataagaaaaaagcacaaagggaaaattcccaatcaaggaaaatgggggaaaacaaaaaaagaaagagaattctcgatcaaagatcggaagagaaaagaagaaatatgcagataggtcttatgaccagacaatatctgaacaatacagatttgtcaccaagtaaacaagaaaagaaaggaaaccacgacctatagtgggcctctccctttgattgcaaccaaaatcctgtgtgtcagcgacattttcgccctgcactaaacaataacagagaatgagaagccctatacattctaagccaaaattcccacaaaaaaca

SEQ ID NO: 140046 - DNA, 313 bp, Glycine max
agcttgtgttattttggaatccaagattccgtttgacacaagtcgttcaattttgttcttagaaatgtgacctaagcgcttatgccataatgctcctgagtttgtattatcaattctacacttagtacctcgcaattccgcattaaaagattcaccataggaagctacaatatcaagtaaatatagattattataagccaagaacacaaatatctgaattaaaagacaacctaaacacattgtttccaaatgaacacaaataacccaatatgtccaaataagaatctgaaaccaaattccatctaaatgatgg

SEQ ID NO: 140047 - DNA, 314 bp, Glycine max
agcttgctcttctttactttcctcaagaattccagcctttttcccacttagactttctagctttgggagccaagtcatcccttgcggtctagactgcaaccacttgtgatagccgccaatgacgccattgctacttcccttaatctctttatcttgccttcctactctatttcatgctttatggattttttgaagtatcttcccattaggttcattgaaacctcgcgcgatgaaagtggtgatgatttcctccgacggaacacctctcagagggtagcctaactatcttatggcccacacaagattattattaa

SEQ ID NO: 140048 - DNA, 310 bp, Glycine max
agcttttttttttttattactattggaacagtcgcgtgaccagtgtagactcttaatttctgctcaacaatcatatatattcataccgggaataataatcttcctcttgttggccctgaaacatgtttcttcaagtcgctcaagtagaattagtacgtttcttgtaaatgctgtgttacttgaaagagataggagatttcatgttatcatacgtgatgcgtgttgcttgtgatctcatgggtagaaatacttggtttaatgatgccacaaaaacaaccatcctttttatatctggaatttattttgtaaa

SEQ ID NO: 140049 - DNA, 308 bp, Glycine max
agcttctaaaattgtcaacaatgcacctcactaatggcgttactttcaaatttaacggcaaagactattttgcaacacttatgcaaagatagggactattttttacatttaaaaaagatagggactaatttgcaaaatgggtacaaagttagggatcaaaatgtctattcactctagaaattgatcatatactaactaaattttgatcaaatataatattgagataagatttcttgaaaaaaatattactatatattttataattttaaaaataaatttaagaggtaaaatctatttgcataataatt

SEQ ID NO: 140050 - DNA, 354 bp, Glycine max
  unsure (1)..(354): unsure at all n locations
tcatcctgcttggacgaatgagaaaactggggcaaatgaagaaggtgaggatgaagtanaagcccatgctgtgactgccattccaatacagccaagtttcccaccaacccaacaatgtcattactcagccaataacaaaccttctccttacccaccgcccagttatccacaaaggccatccctaaaatcaaccacaaagtctgtctaccgcacttccaatgacgaacatcacctttagcacaatccaaaaacgccaaccaagaaatgaattttgcagcgagaaagcctgtagaattcaccccaattccagtgtcttatgctgacttgctcccatgcctactngataattcaatg

SEQ ID NO: 140051 - DNA, 386 bp, Glycine max
tctaccatttgcttctagatccattcctacgaagaaagagaaacctgattctgatcttcttgagactttcacgagggtggaagacaacatttccctcttggataccatccaagaattccaaaatatgcaaagatcttataggatttgtgcagccataagaagaagctgaagcaaaatgtgcaattaaagatggtcagaaatgtttcagcactcatatagagcatgactaattctaccattgcaccatgtatcttgccacaaaaatgcaaagatcctggcactgtcactttccttgcaccattggagactgcacttttatagacgatatgctcaaccttggagccttattaatgtcatgcctacatcagttacacatcactacatct

SEQ ID NO: 140052 - DNA, 476 bp, Glycine max
  unsure (1)..(476): unsure at all n locations
agctngataaatctattaacaatggtgcatgtattcttactcataaggatacaaggttaatcatgtcaccgaatagggagtttgttacctcttcctagccatacgcctaagttttcacaactttacatttatgatacagaaaatgagatacataatcggattcaatcaatgggatatgtataaaccttctgataatagtaattaaaattttaatgtagtttattctattatcttagtgtcagatactatactagtaatgccttaatgatactttaattaatgtaggaaccaaaagaacatagatgctgaaattgtgtcaaagttatcagccgtgctagatgaatacaatgtacatgcaaagtcctttagaatggcgaaggaaaggctaaaaactgaacttgttcataatctanaaatagtgctaatttctaacataaataaagatggtagaatatataacataccatctatatatc

SEQ ID NO: 140053 - DNA, 290 bp, Glycine max
  unsure (1)..(290): unsure at all n locations
actcgcgngcaacaatgatgatntagaaatnnatgcaaatcttgncatgcatgcacccatgcggacactcaagcatcaagtgttgtgtgtcgngtgacactatggctcatgactcaagcatcaatnaatgcattcggtcgagtccattttgtgtgttcggaaaaatccacagcattcaccctttatagtaattatgctacctaaacatatgcatatcttgngtgtggcatctcngcgaccttaacatatacatacatatgcaaagcatggccgcgacccaaacatataca

SEQ ID NO: 140054 - DNA, 483 bp, Glycine max
  unsure (1)..(483): unsure at all n locations
tgcaagcttgttgatcatgtatataagaggaccattttgctagtctctattgtgaaggacggagaaaagaaggaagaagaaaagaaagaagaggagaaaaaggaagagaaagaagaagagaaaagaggtgaagaagaaaacaagggaggagaagataacaaaactgaaatcaaacgaagtgaatactggccatccaaaaactacatcgactatgcttatgaccccgagattttcagcgacgagaacccaaatgcctgctctgttatgtaaaccagcaagtaattccgtatttcagttggaacagtaattagctgaagtagttttcttttcaatgtttttctaagaatatgtaccagtgtgagtatgttaagggtacattggttcctttacatagcgtccctcanagttagatgtcttatttcttgtgcttttgaggtttcaagtagtatattcgttgccatatcagtttgtgtaagtgtaaca

SEQ ID NO: 140055 - DNA, 349 bp, Glycine max
  unsure (1)..(349): unsure at all n locations
agtcacctgcggcatgcaagcttgagatgaggaagtgttgaagggtgaatacttcngttttattgttgaccacagagtggtacctggagatatgtcgcgggggtcaggagaccttggggacgtcaggtggggtgctattgcccaaaaccaagcttgaccaatcccgacccaacccgggcatagtcggtcagtgagaacctgtgatgtacctaagcaggcgagctcctggcagtcaacagataaaaggaaaacaagaccacaaagcaaggaggcttgtggtggctgaccagctgtgaatattgtgtaatatgcggattgtgggctctggaaacaattaccaagggggggt

SEQ ID NO: 140056 - DNA, 211 bp, Glycine max
  unsure (1)..(211): unsure at all n locations
ggaagaacactctaatcgatcaaaaagataatctaatcgatcacttggtagatnnaatcgattactatcggggataactatnttccctataaacaaccagcttgagttcccttcaaaatacatcaagtgaatactcaatatctcgaaaataaccaacaagactctatataagttaaagacctcgagctatttctagttaaaatagaataga

SEQ ID NO: 140057 - DNA, 188 bp, Glycine max
  unsure (1)..(188): unsure at all n locations
tggataagaagcttaaagagaaaacttcaatggaggaagagaatgaggtanagagagagagaggaagtggcatggaaattgaaggagaagagggagagaagttgaactttgaagtgtgtctcanaagtttctcattcatcaaagttatgacaagtgttacacatgtttctacttataacctagcacat

SEQ ID NO: 140058 - DNA, 393 bp, Glycine max
  unsure (1)..(393): unsure at all n locations
ttctcatagaagcnnctcatggaagctacctaggctataaatagaatctcgtggtactcttggcgtaacttcgatgaatgatggtcttgtgagacacactttaaagctacacttctctccctctttattctccttcaattacatgcccgcctttctctctctctctctctctccctctctctttcttttactccatcaaaacctcctctctaagcttcttatccaaggcactctttttgtggagaagctcctccttccatggcttattctgtagtggatggcgcctcctctcacctcttctcctttaccttacactgcatatctatggtttaaagtcaccattgaatgacctcaatagagctcttagactcacattcatagaagcttctcaag

SEQ ID NO: 140059 - DNA, 460 bp, Glycine max
ctgcagcttgaccatgttgagattgtttactttttataaagaacaattatgggcttgcttggaaggcttagattgtgaagaaaatatgcctgcaggggggaccagttttgaagaattgaaaagcggaagtccacctgagaagaccaaggtggagctaaagatcttacctaaccacctgaagtatgttcttggaagagaacaagaccaagcctgtggtgatcaatagtaagcttacaacagaagaagaaataggttgatagagttcctcaagagacagaaggaggcaattgggtggcacatattagatctaaaaggaatcagcctgcctactatatgcacaagataataatggaggaagaatatagacctgtcagacagccctagagaaggctcaacccatcaatgaaggaagaggtgctcaagcttctagaggctgggcttatctaccccatttccgaca

SEQ ID NO: 140060 - DNA, 434 bp, Glycine max
  unsure (1)..(434): unsure at all n locations
cgatgaagaacgaatgaagaacgtcgaagaacgggtgaaacctttgcgaaattcctcacgggaaacgttacgggaaccgttcggaagcgcctcggcttagattttcttcacggaaacaatttttccaagccaattcgaaagagagagaagtgcctaaggggctgaacccttttcttcttctcttcctcccctatttatagcaaaataggggaggtggttgccgcccagctcgcccaggcgagctcagctcgcccaggcgagccaggttgcttcctccagaagcaacagccttctggaggaatattctagagggcccaagtgggcctgggtgctatttgcacccccatttttactaagtacaccccctctgctgttntttttggtgattctttttttcgtaaagtacggaagcttacgaatttgtaacgatactt

SEQ ID NO: 140061 - DNA, 446 bp, Glycine max
  unsure (1)..(446): unsure at all n locations
agctntgagcaaattcaggcgacaatatctnntatctcgatgtccganngcgtcccgtcatataacgagacgctcgaaattgaatgttgaagctctgagccaattcaggcgacaatatctttttactcggatgtctgattgaggcccgtaatatatcgagacgctcgaaattgaatgttgaagctctgagccaattcaaacgacaataactttttactcgaatgtctgattgaatcctgtcatatatcgagacgctcgaaattgaatgttgaacctctgagcgaattcaaacgacaataacttnttactcagatgtctgatatagtctcgtaatatatcgagacgctcgaaattgaatggtgaagctctgagccaattcaaacgacaataactttttactcggatgtctgatngagtgccgtcatacatcgagaccgctcaaaatg

SEQ ID NO: 140062 - DNA, 339 bp, Glycine max
  unsure (1)..(339): unsure at all n locations
tcacatttatnttgagcgncgcgcaattttactggacttaancagacantcgagnaanaagatattgtcgcttggatgggcacaaagacncaacattcaatttctagcggcgccatacatgacgggacccatgcagacaaccgagcaaaaagcgattgtagacagaactagcgtagagctccaacaatcaatgtcgagcgtctcgacatatcacgagactcaagcagacacccgagcaaaaagcgattgacggatgaagcggcacagagcatccacatccaatacggagcgccgcaagagatgacgggcctcaagcagacacccgaggaaaaagttatt

SEQ ID NO: 140063 - DNA, 460 bp, Glycine max
  unsure (1)..(460): unsure at all n locations
agcttctntgagaaaacttccttgagaagctttagcttagctacacacacccctctcataactaagctcacctccttgagaaacttccttaagaagattcctaaagaagctagagcttagctacacatacctctctaatagctaagctcacctccttgagatgaaaagctagagcatagctatacacaccctataatagctaagctcacccccatgacaaaaaacatgaaaatacaaaaaaaatgtccttactacaaagactactcaaaatgccccgaaatacaaggctaaaaccctatactactagaatgaccaaaatacaaggcccagacgaaggaaaaacctattctaatatttacaaagataagcgggctcatacttagtccatgggctcgaaatctaccctaaggctcatgagaaccctagggccttcccttggatctctatcccaatctacttg

SEQ ID NO: 140064 - DNA, 343 bp, Glycine max
  unsure (1)..(343): unsure at all n locations
tgcctcatagaggtccaggaaggacaaggcagcagaatgaactagntccgctccggagtatgatagncaccgctntaggagcgcggnacaccagcagcgcttcgaagccatcaaggggtggtcgnnncnccgggagcgacgncgccagctcatggacgacgagtataccgatnnccatgagggaaaagggcgctggcggtgggcaccactggntactcccatggccaagtngganccagaataagtcctggagttnaatgccaaggcctggccaacagaggatggcgtgcgcgacatgagaacctgtgttaggatgcatnggatcccgctcgaggtcgacgct

SEQ ID NO: 140065 - DNA, 457 bp, Glycine max
  unsure (1)..(457): unsure at all n locations
cgatcctctaagtgacctgacgctgcaactaaagatgcccgancattcattttatgagatgangnngaagtattggcaatcagaattgccattcccgggattatagggttgaaccaagctcatgcttttacaaaaaggttcatcaagtcaagttgaaatatggaagtaaccgtcttgcaaaattggggcaaaagatgaatcgagtcacatcactgcttcgtctactgccaaacatatttaggattattgatgtccttgttacttccagtttcaccttgacaaagatgtcatggaccatgttgaaaatctaaattgattcaaccccatatcttgcgtaaaaattcgcaatacttcaactgtacatcattngcatgcatccatgcttttcattggttgcattgctcgttgcattctttccttgaaaaaataaatagaatgaacttaatcattggtataa

SEQ ID NO: 140066 - DNA, 378 bp, Glycine max
  unsure (1)..(378): unsure at all n locations
tcttctcaannnctataaataggggtgagattgaagnanattagggnncagccccttatgcacttctctctctntcgaatttgcttaggaaaattgttnccgngaagaaaatccaagccgaggcgctcccgtaacgtatccgtaacgtttccttgagtgacatcactaaggttnnctaccgnncttttacgnnctncattcgnncnttaccgcttttcagncttcatcggttaagnacctcaaaccaagcttttcgatncattctatgtatcacgttggaaaccaaaaaatatatgtaaataataatataataataaaaaaataaaaaaatacccctctagtaaaataaagtgaaaaatcaaatgtacgtcgtctctt

SEQ ID NO: 140067 - DNA, 461 bp, Glycine max
  unsure (1)..(461): unsure at all n locations
agcttcttggatgggggctataatttcngttttataaatatagagncggatgggatctgaaaatccatgagtaggcgtctttcttagtaacccacgaaatctttccaaagcctcactcaaggactcgtctggaaattgatgaaaggatgagatgacagcttttccttcagcagtcttggactctaggaagtatttcttcaagtatttttcaaccacttcattccaagtcttaagactgttaccttaaaatgaatggagccatctttttgcctctccagacaaggaaaatgaaaacaagctcaatctaacagcatcctcaagcacaccagccagtctgacaatgttgcanatctcaatataagtggctagatgtgcatacgggtcttcattgcgcagaccatganacaaattgttctgaatcaactgaattaatgaatgtggatattgtatattctatgctt

SEQ ID NO: 140068 - DNA, 320 bp, Glycine max
  unsure (1)..(320): unsure at all n locations
gatgccatacattgatgatatattttgcgatgcatggcacaatggaaaacaaaacacaaactcttttcaatgaaaaacaatatccccacctcaacacatctatagtngtnacatcttgatatgtgtgtgctaactagaacaacanccataagtggatagaagtatgaacctgncatagtggacgactactctatatgtcgaattatagtgcttgaagactcgaagactacncttacgatcttttggctnaataannctgcaangccaaacatatcactaaatgcatggaatacgtattgtatgctcctagacctatcatg

SEQ ID NO: 140069 - DNA, 461 bp, Glycine max
  unsure (1)..(461): unsure at all n locations
agcttaaccatactggtaatagaatatccttttgatccaacataacatagaaataaactcgtaatagaggagcctatatgataaacaaattgtcaacatacgtggtaaactcagatcatatgccttggagttgctagatgtaaataagcacaaacagaaccctaaaaaatggttttgagagctaaatcagtaagtgtgacgagctcctttgaaccataattgttatacaagtaaaagtaacttagtaagcacaacacaaggttgaacacacaaataactaagctacaaaccaaactgtgtttgtagtacaagaaaccagcattatggaatccttttctctcactattttctctgtgggccactngcactntcttccatacccaatacacaacaagcacaagtaacaaaactaggttgagtgaagcagacacccctcgtgtgaaaataggttggaggagaaa

SEQ ID NO: 140070 - DNA, 424 bp, Glycine max
  unsure (1)..(424): unsure at all n locations
ttntagtaaataaataacaaagtaaatttattatttaatatagaacaaataataagttgagtaccctaggtataaatatctatgttaagtcaggggcctcctcttggcctcattttcattantccccttctcctctcaaaaccctttctttttcccgcagctcactaaacctctctcagaaaaataataatcccagactcattctccgttggatcattgtgaaatncaaacactcacgttcacgatccagttccgagcattcttaccgtttgtgaatttcaaaatcatgtctgaaattatatgaaaaacctttgtattgtagccttttaattncctgcaaaaacccaaaactgtcttcggaaaactatgatctcgttttcgcntaccgttggattttcatgaaacatggtcttgttgtataaat

SEQ ID NO: 140071 - DNA, 501 bp, Glycine max
  unsure (1)..(501): unsure at all n locations
ctctcagtcgacctcgccgcatgcaagctnntgtgaaagctngccgtangagctgatttattttctgtcctaactccttaaggctggtgacatctaggcccttaatcttgactngatagaatctttttccgatttgattggtccccatcatttacctaaaaaggggtgaatcaaggctctgatatgaatgatgcaatgcacatgcatgaaacgaaaagaagaaaaacaagtggtaatttacatatacgagaccgaaaaagatccatctttttaatactacgctctaggcattgtggcgccccaacgtatgcattaaaaagtgacgcgttactctagagagataagatatcactagatatacaacaaaactataatttatgagctatcctcagaagaatgcatgagaacaaatggtatagagcgtgcttgctccatgcccctatttgggaacctatatgataatatctangggtctctaataactactnccaacaatccata

SEQ ID NO: 140072 - DNA, 497 bp, Glycine max
ttaagtcacctgccgcatgcaagcttcccaagtttttaagttcttcctcaaaactgttttatttttagttcccaaagtcctattaacaacttccgtttgcccatcggtttgtgggtgacaagtggttgaaaataacaatttaatgcccaacttgctccacaaagtcctccaaaaatggcttagaaacttagagtccctatcactaacaatgctccttggcagaccatggagtctcacaatctccttgaaaaacaaatcagccacatgggaagcatcatcaacttttttacatggaataaaatgagccattttagaaaacctattaacaaccacaaaaatggaatctctaccattgcttgtttttggcagccccaaaacaaaatccatggataaatcaatccaaggatactccgggaatggcaatggagtatacaatccatgaggctttaccttagactttgccttttacatacaatgcaatgttcacaaaatttctg

SEQ ID NO: 140073 - DNA, 51 bp, Glycine max
  unsure (1)..(51): unsure at all n locations
ccaaacaaaacaccgacaacncatgggaggaaaggaagaacgcccgaaaga

SEQ ID NO: 140074 - DNA, 417 bp, Glycine max
  unsure (1)..(417): unsure at all n locations
ggccattttccttggcattcttaatcatgttcaaattggtggtaaagttaggtcttttaatcccaaaaaggaaacttggttaccatgtgagaataatttggataaatgaaaatagttttggttgttatatgcatgagtatttcgatgcttgtttgcaacaatgtattataaaaaagtacctaccacatagagagtggctatgcaatttggaatgcatcaagaagtttcagattgtgtgattgcattctctgacaccaaagctattgcattgaaaaataactgcatacccaaaactactttaaaaaattgcaaacaatattacttggcaaaaaagcattctaaagctactntgccatcatggacctcatgtatcaaaagcaagtacaaatggtaatgatgctgatattgcacctgaat

SEQ ID NO: 140075 - DNA, 347 bp, Glycine max
  unsure (1)..(347): unsure at all n locations
aagcctacactacttctttgaatctatcctaaagtaacttttnaataaaaatatttattttttattttaatatttttcgttaatttatagcattacatatagttgtatggtttcattgaacttgatttacatcatggatgaggataaaagcaatgcatatataaatttaacctacacttctttttttgttgtcacataattaaaaatccctttttatatagntttaaaatatctattatctcatattaaaaatatctatcattaaagcnaaaaaantaatatctatcataatctatgatccaataataataataataaaatatacttacagcatatatacatattat

SEQ ID NO: 140076 - DNA, 398 bp, Glycine max
  unsure (1)..(398): unsure at all n locations
acccaanctccgggntcgaagacaaccttctttctcccttcgttggcttgattaacataacttttatttttcctctcaatttgatctttgactctctcatgaagcttcttcacatagtccgcctttgcttgaccttctttatgcttaaaaacagaaacattaggcataggcaaaagatcaagaggagttattgggttaaaaccataaacaacttcaaaaggagaacaattagtggtgctatgaacagctctattgtaagataattcaacatggggtaaacaagcttcccaagtgtttaagttctttctcaagactgtcctaagcacagttcccaaagtcctattaacaacttccgtttgcacatcggttggtgggtgacaagtggttgaaaataacaa

SEQ ID NO: 140077 - DNA, 361 bp, Glycine max
  unsure (1)..(361): unsure at all n locations
cagacctaaactaacgaaattttgggacctaaagagcctacataaccccctgctaatgagttggcacccttatgttagccacggcctactttgatgattaacctaaagttacacatgctcaaagtatttgtcccgtgcgccataaaacctgctgaacattttgtgactccatgacatgaaacattncttaagattggancctcacaatggatgaaagaccaatgncggctttatgnctacagctagatggtggaggaacaacatgtttacgtgcaaccagcggacgataaatgacctaaaaagcctaaaccttttggaatacacttcaccatgaacatggcttctcatagaccccaacacc

SEQ ID NO: 140078 - DNA, 159 bp, Glycine max
  unsure (1)..(159): unsure at all n locations
ccgaccagacatgaagagtatataaaagcaaggcttngnnttgcattttcaaataatccatcctctcaatcttgaatacctttccaatcaatccctgacaatcttttacaagcctngaatctctttgaacttcttcttcttcttctttggaccaaaagc

SEQ ID NO: 140079 - DNA, 412 bp, Glycine max
  unsure (1)..(412): unsure at all n locations
accattaggaggagcagcacatcttttactattaatatatatatcttgagagagacacgttgggttacagtaaagtatcaggaggccatctgttatttctttttagaattgagattgcagttaagatataatcgctcgaataagcaattcttgattaagaagaaaatggatctacttaaataactcaatcatatttcacctttataaattctctcttagtactacaggaatcctaatgagatagagagtaccatcaacatgttcaccaatcactataccagaaattataaaacttttaatttggtaaatttctttccaatnttctgccactctcaaggcccaatattaagaagtcaccagaagttgcttcattntaacattacatgaatgatcttaanataaataaataaag

SEQ ID NO: 140080 - DNA, 440 bp, Glycine max
  unsure (1)..(440): unsure at all n locations
agctntatgaagcctatttgcaatgttatctttcaaatttcagtagcatctctactacaataccagttatgaaaacaatgcacgaattctaaactgcaacacttagcagaagagtgaatttgtaaagttcatatagcaattcaattctaatccaaacataacgtattttatatatattcatattccccaagagtctacttttcaaaaataattttattttcatcaaccggtatgtgaatcaaacaaagtaaaaaactgtgtgaagtatgtcaaagctgaaatttgtaaaacagcatgtgtgcacaaactttcaacaccaaataatatagaaatgagtctaagagcccatactcatggagggataacctcccaaaccaaaatgacattaaagaaaatagaaactctcaataccttgagagaattgaagtcttccagagttc

SEQ ID NO: 140081 - DNA, 310 bp, Glycine max
  unsure (1)..(310): unsure at all n locations
aaaaaaagaaacttggntatcatgttagagtaatttggataaaccaaatataatttttgntgctanatgcatgagnatttcgatgcttggcgcaacaatgtattatatataagtacgnaccacatatagagtggctatgcaatttggaatgaatcattaagtttcatatagtgtgattgcatnctctggcaccaaagctatggcattgaaaaattactgctaaccataaattacttaaaaaaatggcaaacaatattacttagcaaaatagcagnctaaagcttctctggcatcatggaactcatgtatc

SEQ ID NO: 140082 - DNA, 464 bp, Glycine max
  unsure (1)..(464): unsure at all n locations
agcttatatatcaaagatctgacaatttagttgttgttgactactcagactcaaattttgctggttgcgttgactttcgtaggttgacatctagatacatcttcatgatggctaatggagcaatatcttggagaagtgcaaaacaatcattagttgttacttctaccatggaggctgagtttatttcattatttgaagcgacatcatagggtatttggttaaaaagtttcatggccggtctccaagtgattgattctattcctagaccgatcaagatatagtgataattcaactactgtttttctggctaaaaacaataaaagtggaagtcgaagcaaacacattgacattaaatatttagtcatgagggaacatgtcaaagcaaatgaaatcatcattgaaaacatatgtactggactaatgatngtagatccattgacaaaaggcatgcaaacaaagtcatt

SEQ ID NO: 140083 - DNA, 159 bp, Glycine max
  unsure (1)..(159): unsure at all n locations
nngaactgatattcttaataagcaaagctttcctcatcttgtaaacaaagncatccaaagcatgtcttgtattagcccacttcatgaacatcctatcatcaaccttgaaattctcagcttcatgaatcattcctataatcacctcagctgaaagccttt

SEQ ID NO: 140084 - DNA, 434 bp, Glycine max
  unsure (1)..(434): unsure at all n locations
agcntttccacaagtccacttgagcattcttgtagatgacctngnncatgtacttccagatactgtgaatagcagaatacaaattatcttcactatttctccttctttcatatggaacaccaaattaataagggaggaaaaggaaacaatagatattaaaccttggtttgtttgtgggaaggaagtattattcatgaggaatttttcaaaaaatattgtgggtctcacattttttctctattttaattcaaatattttttcttccacaccctaaatgttacgagattaatattgacttgatagggtgccatgtattataatgagatgatatgataacatgttttactagtatacacaagtttttaaattacagtgaatttcaaagttntatcatgattcttgatattgtgagaagtataaatgaatgcgactat

SEQ ID NO: 140085 - DNA, 447 bp, Glycine max
  unsure (1)..(447): unsure at all n locations
ttttgtgtnagctangagatcatctacttgcctatataaatcagtcttgtagnngacaccctttcacgaccacctccaatntcagaatagctcatcggcatcncctcatgtatcactatgttagnctgcaaactccaacattactaccccattgaaccacaaggaaaaagcctcattcacacaaaaacatcccaacccaatcagactaagttctcagtcaaacaaaactggctttatttatgtgactagcctctntatccttgatnttgacaatntccaccagaattngctgcacaaataccattctactccttcgattggccatntcggcctcaagaccaccttggctcgantggcatcatctttctattggtctgtgatntacaacgataccatatngnctctcatatagtgtcttagatgccaacaaatatagtttncaatctc

SEQ ID NO: 140086 - DNA, 431 bp, Glycine max
  unsure (1)..(431): unsure at all n locations
agctnttaatagttatntaagcctttttcttatccttaaancgataaaatgaatttcaaccgatcatttgtgttgtaatctcgattaatcactattaaagcaaaatctaaccgatcattcatgttgtaacctcggttaaaccaaaaaaggtaaaataaataataaaataatcaaaatatctttgaataaaataataaaaaaaatcaatcggacatttttctttgaaagtttccttgaatgaattgactaatcaccaaagtgaaactaaggctaaaatcaacccacaaatcaagctntgtccacaaaagtcactcaaaaccgtttcaaggtccaacgccttanaacggttctctttgcttttatcggttaacatggaccgttcanaagcataaaatcaacacatatactttaccgctttgcaagaactacgt

SEQ ID NO: 140087 - DNA, 252 bp, Glycine max
  unsure (1)..(252): unsure at all n locations
aactgccataagaaatttgaatttaaatcttcttgttgtgtaatcgattacagtaatntggtgaacgactactactgtttaaatattcaaatctcaaatatgtagaggcataactctctataagttatcgtgtaatcaattacaccattatggggatcgatttttatgatggatttttgaaaataattcccaaaaagcacaccttttcatttaaatattgaatggccatcaaaggcctatatttatgtgact

SEQ ID NO: 140088 - DNA, 418 bp, Glycine max
  unsure (1)..(418): unsure at all n locations
cacctgaggcatgcaagcttctacttatgtggagggcgggcttccttctttttcttgtctccnacgcgagctttgaccactgttcttccttcccgcgatgcttcttttcatgtccgcctgagtgagcttatagcctaaaccatacttcccacgatttccttgggtatttatcaggctagttatgccgccgttgtttttgcctaaacccatcccgggttcataaccgttccccaacataactcgggccatcattaccgctgcgtcggacagacaaggcttgccaaagagggagtccacggaggagatgctgaccacctcaaaagactggaaagccgtttctaacgattcttctgcggcttccacataaggcatggaggatgggcagcttaccaagatatcttcctcgcttgacacgatg

SEQ ID NO: 140089 - DNA, 474 bp, Glycine max
  unsure (1)..(474): unsure at all n locations
agctnggatacaaagtacctattacctaaattatatatttattaattacaatactaccaaaaacaactatacatgggaggagttgtatacaatttacaacagttttttacacaaaagttagtcgtattgaccgactaacaatggtggcctggtctatagaactttcagagttcgatatctagtatgaaccccacaaccccatgaagacatagttctggcagacttccttgcaaaattcattgggaatgaccaaaccacccagactggtggagcctgtacattgacgacccgtctaatgtgaagggaaacggngtaggaatcatccttgaaggccttaacaatgccattctaaagcaagccctcaagctcaacttcaaagcctcaaacaatcaggctaagcatgaggcgcttattgtaggtctaaaactagcaagagaagtcagaggcaagaagctatgatgctacacaaacttg

SEQ ID NO: 140090 - DNA, 179 bp, Glycine max
  unsure (1)..(179): unsure at all n locations
gaaaccacttaatggctggttacgaatctttcctcatcataagtctgncaatatgagcatatatatcagttagncagataggctcttcaaaagccaacatgatcatcctctactccaaactatccaccatatcttccatggatacatactccatagcaccacatacttcttcctatcgt

SEQ ID NO: 140091 - DNA, 459 bp, Glycine max
  unsure (1)..(459): unsure at all n locations
agcttaataaaaattaattaaaagagttaacttgtatgtttaactagaattcgaannngaattgaggaagttttgagaagacaaattcatcgatgtaatttataaatattttgagtagaaaatgattattcatttattttaggtagaaaaaaaataacaaggagattaaaccggctaagttttttaaaaatagaaaggattaattaattaaaagaccttgaaaaaacaaaatttcacataatcaaaacaaaagggaaaaaaatgtatgcagtcttgtatttatttctcattttaaaatttcaagataggagtaccgattagtattttctgaaatatatcctcgttaattagaaaaaagagaagcaatgtgtatgaaatataaaataataaatgaaaagaataaggacttattatattctaaataattttaatataaatgagaaataattatttctctta

SEQ ID NO: 140092 - DNA, 117 bp, Glycine max
gagaaaaaaaatagaagagacataaccgcggcgctctagtcacgggcacattaacgcctcttggctcgcagacatataaatgcccactgatttggaatcgacacagattatgttagt

SEQ ID NO: 140093 - DNA, 495 bp, Glycine max
  unsure (1)..(495): unsure at all n locations
atccttaagtcgacctgcggctgcagcttactcatanggttccgggagtttgttggttttatattcattgaagactggtaatagtaagtggaaaaaggttcaaacattaacatgatgggagagttttgatctgaatgtccagaaaatagctgaaagaagaatccattgtttggagttggagagcttgtggttgacggtttgattcacggaccactctttctgtggctatgaccaagggagctcacctgaatgcacaggttgttttcgtggctgaattttgaatgtacacagccatgataatgaaggcagggagatctttgtacatggaggatgatagaaatgatctctatcttttttctctttgttttttttttccgtgaaagggggcagggtttgtggtcacaaataggatatgaatatgatgtgaaaaatgattgaggagacattaaaatgtttctcagagattggattcaaaatgcgtggatagttttttgg

SEQ ID NO: 140094 - DNA, 409 bp, Glycine max
  unsure (1)..(409): unsure at all n locations
ncggatgataggangagggacaagccctaaatgtatatgctgaaagagctcctgnagtcgaatataagttcaagnccatagccattcaagnctgaatagagtatgatgaactaattgacggcaatatggccaccgctgaagccttggaacgagaaacctagaaggccctgatggaagaatacgaccaaatataagttntgaggggctntatagggcagctatagtgagctcaagcttcgtataggtgaaaggaatcatctcgggtcaaaggctatgancttgatggatgagcttaagggtngccttatgtcgaaaagaaanttngcccaacagttaagcgagactgaatggaatatgtgggccatcatcgttaagggcaaagagaagctataactagcggcgactcacg

SEQ ID NO: 140095 - DNA, 379 bp, Glycine max
  unsure (1)..(379): unsure at all n locations
aatgcacttatcctgagaactgcggaatttcatcccttcaagcaaaaagtcatgtgatgtggaatatcaccagagcctccttttaaatccatcacgtatacttgggatttttacataatgaaactaccttactgaagtctaaccattggtacatatcagggacaggaagggattcttccattaatgatgaatttacctagagtattaattaattcctatgatagagtattagagcagcttctgtaaattcgtgatcatctgaggacagatgcaattatcagctctgataactaacattcttacaaatatgganaagtagggatgctttctaaactcagaagatgacatgatatctcctcttactctaagaactagcact

SEQ ID NO: 140096 - DNA, 462 bp, Glycine max
  unsure (1)..(462): unsure at all n locations
agcttgcttctacaaaagggatgtgttatattgattttatgnttnttgaaagattgattttaattgcgaacaaaagtcgtttaagacattggaccttgaaacgatgttttaaatttcaaaagcggagagaattgtcaaggcgttggaccttgaaacgatcccaagtgatgtttaatgaaaagcggagagaatcgttaaggtgttggaccttgaaacgatctcaagagatatttgatgaaatgaagaagtttatgagttagttttattttggttttgcttattaaccttcaatccttttttaagataacttacagcataatgatcggttaaaattactttacaagaagaaaatgagattactaatgatagaagaaggagatgaagatgcacaaaacaagaaagaggaacccctagggtgcatagatcacattcaaatccttaaaacaaaaactaaccaaatga

SEQ ID NO: 140097 - DNA, 421 bp, Glycine max
  unsure (1)..(421): unsure at all n locations
tgcctaccaagaactaaatccatttttatttcttattgaatnaactaactaactaactaactaattaacgtccactaatatatacatngactactcagaatgaattgatgtgcctctattaggcctatctaatctacctgattaaactaattacccaaagcaaagcccaaattcatagcccaatcattctagtgtttatgggccaactttcaagtccaatttgaccctcgaaatagaagaattggtcgtagcttatatatgacaaaatcgaatatctttttctttgatttttatggactactcacatgctccatttggagtgctatagtgtcctataggcccagcacaaggcagatatgtcaagtaagcacaaaaatatgaaaataagccacaattatcaataaagctctatcatttgcct

SEQ ID NO: 140098 - DNA, 458 bp, Glycine max
  unsure (1)..(458): unsure at all n locations
gcagcttgagccattaaacgacaatactttttctcttttgttgangagtcccgtgatataacgagacgctcgaaattgaatgttgaagctctgagctaattcaaacgacaataactttttactcggatgtctgattgagtcctgtcatatatcgagacgctcgaaattgaatgttgaagctctgagccaattcaaacgacaataactttttacacggatgtctgattgagtcccgtcatatatcgagacgctcgaaattgaatgttgaatatctgagccaatccaaacgacaataactttntactcggatgtctgattgagtcccgtaatataacgagacgctcaaaattgaatgttgaagctctgaggaaattcaaacgacaantaacttttactcggatgtcttgatgaggcccgtaatatatcgagacgctcgaaattgaatgctgaagctctga

SEQ ID NO: 140099 - DNA, 404 bp, Glycine max
  unsure (1)..(404): unsure at all n locations
gaatataatactcaagcttctaataagatncctaaagaagctagagcttatctacacatacctctctaatagctaagctcacctcctctagatgagaagctagagcttagctacacaccccctataatagctaagctcacccccatgacaaataacatgaaaataataaaaattaaagtccttattacaaagacaactcaaaatgccccgaaatacaaggctaaaaccctatactactataatggccaaaatacaaggcctagacgaaggaaaaacctattctaatatttacaaagataagcgggctcatacttagcccatgggctcgaaatctaccctaaggctcatgagaaccctatggcctttccttggatctctagcccaatctacttggagtcttctag

SEQ ID NO: 140100 - DNA, 399 bp, Glycine max
gcgaggcatcgcgacataatccgcaaatccctctggtattatttattttacttaaacaacattatcatcacaacatattttgaaaccacaaccacactatccatacctggttatgaggctattgagtcctacttttatcaagttctaagacaatagtaaatttcccaatgctaaagtcacctaactgtacacacaaatgggtgatcagttgttccttataaatccccaacaatggtgtttagccaaccattacagaaaaaccctaacacaaatgagatagagagtacaaaataattgttccttacacaagaagagggatccctcctcctcttcttagcatctcacaatcactctacaacatactaagctctctctaattgaagaaccctaggcctctct

SEQ ID NO: 140101 - DNA, 167 bp, Glycine max
  unsure (1)..(167): unsure at all n locations
ccggccatcccaatgctgttgtggagnnacgccccgcgccagcctgggggcgcagcaccactcgatgaaagcacgatcagtattgggcccgacgccctcgctgggggcaacatgcacccccctgaactgacagagacccgcaattagagcctgacaactccaagacc

SEQ ID NO: 140102 - DNA, 426 bp, Glycine max
  unsure (1)..(426): unsure at all n locations
agcttgcggactataccttcganaaactcttttcgtgngnctgnctcggccgggattaaggcgggttgcagcaccggctccgcttccctaactgtactggaggcggttgccgaggctttatcctctatagttttctggagttttaacatgacctccgagatggaagccatttgatcttttaaagccgatagatcggccttcatctattcctgcatgccttcttcattatccatttttctggaccgagtgttataggggtgccttggtgttttcttagctatgatgaaattcctaaagaaataaacaacggtgagtatgccatcaaaacatgaatatgcaaatggatgatcggagcacttggatccaccccaagggttttagataacatgatgagttcagaacttttcattntataaaaataacaaa

SEQ ID NO: 140103 - DNA, 321 bp, Glycine max
tggaagaaccatcttgcaaaaattggggcaaaagatggatcatgttacatcgctgcttcgtctactgccaaacacatttagggttgtcaatgtccctgttacttccagtttcaccttgatggagatgtcatggaccatgttgaaaatataaattgattcaaccccatatcctgtgtaaaaattcgcaatacttcaactgtgcatcattcacatacatccatgcttttcattggttgcattgctcattgcgttctttccttgaaaaaaaaacttaatcattgttataaaaaagaaaagagcacgctttacggtgcctttacc

SEQ ID NO: 140104 - DNA, 396 bp, Glycine max
  unsure (1)..(396): unsure at all n locations
gacactaaaaactcaactatttctttgtcgngggatgcaactatgttgtgtgtgtatagngtataatgnntccttgcacacaaagcatgaaaaacttgggtgacataaaacacactagctaatgtctgaacattgtcgccatacaattgtggattatgtaagtaaacctaaattatactcgattcccgaatatattgggttaaattgatgtataatgtactttcccttagcaacaacaggcctatgaatgattaagtctacaatcgatgaacgccttcgtgtttgaataccacgagctccacatcatattgagatctgggccatctcagctcgaatctgaggatgatattaagacatgaatgcgaaactcatatatatatgctaccctggagccca

SEQ ID NO: 140105 - DNA, 447 bp, Glycine max
  unsure (1)..(447): unsure at all n locations
cctcttcacgtctggaatatgaatgtttttatttattcaagacccttaggtgctttgttgatggcttcttcccgttcccaagcttcaaattggagtcctgtcttttacagacttagttggacatcttgtgagtatgtaaacagcagtgtagactgcttcagcccataatgtgttaggtagtcccttctccttgagcatcgatctagccatcttcataattgtgcgattctttctctcggacactccattgtgttgaggagaatatgcgactgtaagttttctctcaatgccttcatcctcacaaaatctttcaaactcgcgagaggtgtactctntgccgcgatcacttattagtacctttatccgctttccactttgatttcagcaaggccttgaacttttgaatctccaggaatttgattttctttagacatatccctggcatct

SEQ ID NO: 140106 - DNA, 325 bp, Glycine max
  unsure (1)..(325): unsure at all n locations
ggacacaaaaactcagctgccctgtaacgtgaacggctaatgttttttcataagcgcccaagactgtagattcaagngccgcaacttcgnacctgtatggggctcttgacccactcacacgccacgatggataagcgaatcgaggnccccacaaacaatgtgactttctgtgcctagccagaaccaccaccattgaagccctattgaaccaataagccccgaggaacctggaaaaatgcatccgtagcagttgaaaggaaccgcccccaacgccacatatatttatgtgagagatgaaaaacaccttgattgctcgactcaacat

SEQ ID NO: 140107 - DNA, 472 bp, Glycine max
  unsure (1)..(472): unsure at all n locations
tgcaagcttctagccaaatggacttaccttgaattaattcttttgtttcccttttgagccttgtttccctttccttgttttgaagctcactacaagccttaagtgaaaaaccatgatattaccatatccttaaggaattttggagctttggaattgttttgggaataagtgtggggggtttttgtttcattggacaacttgttttgttggctatgcttcatgatgtattttgggccatacttgatgtacattgtatattggttaaatgttggacatgctgaatgaaatgttgtttctcaaaggctaaaaaaaaaaaaaaaaaaaaaaattcgaaaaaaaattcggaaagaaaaanaaaaagaaaagcaataaagtcgagtgaataagatcttaaatggcacaagaatgatgaaactcttggttctactcttcatgttaaattttatccttcttntattgtctaaattttttc

SEQ ID NO: 140108 - DNA, 463 bp, Glycine max
  unsure (1)..(463): unsure at all n locations
ctgcagcctatggagtcgtatttgagcttctgagatattttgtttggtattttgtggctaaaagaaggtgctccttcaggaagtggggtattttgcacatggctccaaatctgaggctaaaattgggtgttcccttggtggtttttgtggtgagttttctcttgaattctaatgcggaattggatcatcgagtttcacataaggtcatagctgctcctcataaagatgtggggacaaatgtaattgatggcaccggtgtaaagaatgcttttaattttgagaatggcaatagcgtggtgggtagtaggaagggtggaagcaataaggtttcngtttcaactgtttgcgttgttacgctggcaatggcagctgccactggtttaggtgccgtgccattcttctttgtggagcttgatccgcagtgggctggattatgtaatggaatggctgctggtgtcatgtt

SEQ ID NO: 140109 - DNA, 299 bp, Glycine max
  unsure (1)..(299): unsure at all n locations
taaagtttttgtgtggactccactctttgtggatcacaattatggttcatntntactctcattaacaatacagtaatgtggaaacttcaattttctttccttttcttcgcaaaagagactttctccgctctcttttcgtngcaactgtaaatacgcttctggttttgcttnctttatntctaaattacagtctaatntatacttttcggaaccaaatngattattaatcctgaaaaaaatataagaacaccttatttatcccaaattcatatggngtacatcacaatatcaccatatat

SEQ ID NO: 140110 - DNA, 386 bp, Glycine max
  unsure (1)..(386): unsure at all n locations
caactatnttataatttgggtttggaactaactcaacctgggaaaacgacttgtaagggagggttaccccccacttatgtactttattgtgggcatatcactaatcaatatgggatctctaacaaggtgagagagaggacctttattacgaaactgacatgtcctgtttgttacatagggagaggctacatgcatatagggcggagggtaataataaagggaggcatctttagagaaagaaagctaaagagggttctcttgtaagagctcaagaaccatacgctctggctgttatcttcctcgtttacgagctcattttcacgtaaaatatcaaaacgttttctctcagtttacgtgtctatcaaatcatattattctacctcctc

SEQ ID NO: 140111 - DNA, 466 bp, Glycine max
  unsure (1)..(466): unsure at all n locations
agcttcaacaatcaagccatttgcatatttattcttaatctcattcttacatatccttcanacacaagcttctcctgtttccaaagccaaaaaatgtcaaccaccattgatgttcctgaatcaagcaatgttgctaaaggcaaagcagttttagctgccccaccaaggccaggagggtggaagaaaggggtagcaataatggactttattctaaggttaggtgccatagcagctgctcttggtgctgcagccactatgggaaccagtgatcaaacactccctttcttcactcagttctttcagtttgaggctagttatgatagcttcacttctttccagtatgtggccttcggaactctattntatatgccttttcgaaacatcaacattgacaatcttatttgcattcaatntctatgcatccacggaatatattntnttttattgtccttcaatgagaaatcat

SEQ ID NO: 140112 - DNA, 329 bp, Glycine max
  unsure (1)..(329): unsure at all n locations
atggggaacacaactcttcgtttgatgtaatatagtagcctatagacactctntcgactagtgattgtaaatatgcaacaactacttcttgtgcttgcctatgcatccgcctcatgaatgactcattaaagccgggcatgtcacgagatgagctaactaagatttttgtggataataattcagncattgctctagcaaaaaatctatcgtgttatgatcgaataaaacatatggatacccattcccactacatattggagngcatagcaagaaaggatatacatgtagaatatttgaagcctcaagatcaagtagctgacatcttcaca

SEQ ID NO: 140113 - DNA, 356 bp, Glycine max
  unsure (1)..(356): unsure at all n locations
agctntcacaacacctgcctaacaggagggtttatctttactatcactagctgactctgaaaaaatggcctgagacgtcaggctcatgttatgaacggccacactaccttctctatcatctggtaccgctnttcatcatcatgaaggacacgactggcacagtaaattgacatcttcttggactaaggtcgaaccgatggctttttccggtaccactacgtaaagtaacaagggtacctctggctcttgtccacttaagatcggtggcgtctcaataattctactgaaagctaagaaggcttgcttgcgagttgagcccacacgaatggctcaccttccagagtactcgacaatgg

SEQ ID NO: 140114 - DNA, 425 bp, Glycine max
  unsure (1)..(425): unsure at all n locations
ctgcaagcttataatatattgatacgctcgatttattatattcgaaacaacagggaaactcaaatngtggtatcttgtcacaccgcagcccgattccggctcataatatgatgacaggctagatattgaacaacacgaactcttaagaaatcaaactggcctcatattatacccagaaactacgcgtgagttcataaggacttacatatgcacagaagatgaacgttctacgctgatagatgaacatccactgaaaagctatcctcggtaactctacctaaagacgagggcagataatgtttcacaccgacgaacgtatttgtcgcttaatgngcacttgacgtaataaatggcacaacggacgctcttgcgctacatacaagagcaatactaacctcaacgctgtcccacttgcgctgattaca

SEQ ID NO: 140115 - DNA, 420 bp, Glycine max
  unsure (1)..(420): unsure at all n locations
ctgcagctntggattatagggcatttttttttctctttgttgcttaacatacatatttctctttagcttggtctgaaaatgtggtgttggggcataaatgcacgtcttattttgttgaaaaccattcttcatcgctagcgtgttgaacaccacaacaaaaatcgcttcttttgcatagacaggtctgtgcaacataactcttcttttaatgacaattgagaaatttcagagtttgacttcatttattcttcataggatttgacagatcctaagatattatctctgcaaaatagatctcanacacagaatattaaattaagtcttaaatgtcatatttaatgttgtatcagatcatgatntcatcttgctatcgtctgaaatatcaaatatagacttcgtgacacataatttgatagcgta

SEQ ID NO: 140116 - DNA, 439 bp, Glycine max
  unsure (1)..(439): unsure at all n locations
tgcttctacaagaataatacaaaggaagataaaatattcttttacgagatcgancanaataatatgaatcacaactatttcctgcaaattaatttcttgcaataagctttgctgcaatcatatttactacaactagttgtgttacaagcagattcgctgaaacaaatgaacaaaatatgatctatcaatattataaacatgacagaaaaaataaatatgaaataaggtgaaacaaataacaatatacatgaaagtaatacttttataagttccaactcttgtggnctaaacacttgcaattccaacacttggagtcccaatatttccatgatttaaagcgaaaccaaataactctaaaagatttatttggtttcatttagctcgattcgattttgatcgaatatataaatctaatctcgtgactcaacccttacgtgaa

SEQ ID NO: 140117 - DNA, 419 bp, Glycine max
  unsure (1)..(419): unsure at all n locations
agcttcccgcatccacacctggaaggatctgtttactgttctttcttangcagnattagtacaactctaacatggctcccgaccggactcaactgcaaaacatgattaaacgtgaaaatgagtcctttaaagaatatgctcagcgttggagggacctggcagcgtaagtagcccctcccatggtcgagagggaaatggttactatggtggtggataccttgcctatattttagtatgagaaattagtgggctacatgccctccagcttcgcggacttggtcttcgccgaagaaaggatcgaggtgggtttgaaaaggggaaagtttgattacgtctccccggtaggtgccagcagtaggaggaccataatagctggcgcaaagaagaaagagggagatgcccataccgtcactttaaca

SEQ ID NO: 140118 - DNA, 221 bp, Glycine max
  unsure (1)..(221): unsure at all n locations
gacacaagaaactcagccgccctaagaagccaggaagacatgcggtcttagatacagnnccgcctcggagnacgacaggcaccgctttatgatcgttgnacaccagctagcgtntcgaagccatcaatggattgtcgcnnacccgggagcgatcgcgccagctcatggacgatcagnatactgaatttcaagagggaaaaaggcgccggcggtgggcacca

SEQ ID NO: 140119 - DNA, 360 bp, Glycine max
tgagtcacctgcggcatcaagcttcacgaaggcgaatgtgtaaatgtgtattaacgacaagaaaaagagagttttaagagtttcttaccaaagcttggagaggagtctcaagatactactatgctacttggaagaataaaaaaatggtgggctcttccttcttgaagatctcatgctagatggagaggatgaaggtccaagtttgtgattttttagaggaaattatgagaaataaggcaaagctagcgatgtgctcgattgtcaagcatgaatgaccattgtttaggccatgggggacatgcaagaggctgccacaaatgggtggctttggtttttgaatttagccacaaatggataaag

SEQ ID NO: 140120 - DNA, 276 bp, Glycine max
  unsure (1)..(276): unsure at all n locations
tgtncagatagagacaatatgtggtcattctcattcgaagttgaaggagcaacacacatctttggctgttcatcaactccaatattcgaatagcctctaatgtaatgattggcgtggccacaccttccacatggcaacttagccaacaacctctttagcttatgtcctgtgacaaggncctcatctacagatctcgatctatttttcagtggccttcctctttggaccctattatgtggcggaacatggagcgcaatactgtgccagggcccaata

SEQ ID NO: 140121 - DNA, 450 bp, Glycine max
  unsure (1)..(450): unsure at all n locations
agcttgntcgcacatcgttcgcgtgtatgacttccactccacaaggttagaagtaaaggagaccttcaatcctattacgcaacctggcggacaaaaatgggcagttaacttgaatggtcattattgtcaatgcggaaaggtatttgcgcttcactatccatgttcacatattattgcaacttgtggctacctgagcctgaactactaccaatatatagatgttgtttatacaaatgagcacatcttanaagcttactccccacaatggtggcctcttgggaatgaagcggctattcctccttctaatgacgcatggacacttatccctgacccaactacaattcgtgcgagaggtctgccaaaatcaacaaggataacgaatgagatggattgggtcgaaccatctgactaccaacaaaaatgcagtagatgtggagccgaanggcataa

SEQ ID NO: 140122 - DNA, 396 bp, Glycine max
  unsure (1)..(396): unsure at all n locations
ncagcctctattggaagaatattttcatcaaaattatactgttttgcactgaaaagcacacctctattgcatttgttgtgtaaaaattcctattctcattataaccttacattttttttttttttttcaaataatccaacagaaaggatatggcttgatttataaaacaaattcaattaacaaaattttttgtacaaaacgaaattgattaactaaactacttttcatttgaatattttatttgaaaaaataaagtttgaaatccaggctaaatttatttcgaaccttatcattaatttaaaatgaattaacgatttggttagaatcaactttttaaaactaattcgaaactcgactaatttctaaattaatttaattatttaaatataaaataaa

SEQ ID NO: 140123 - DNA, 458 bp, Glycine max
  unsure (1)..(458): unsure at all n locations
agcttcttttggaccttgaacaagcaactaacttctctttcagaaccatgctatgtgctcgcgactggtccctctctttccttcgcagcttgagttcactattgctaccccacagaacttcaccaaatttatttcggccatactttttcttgcgaagccttttggtcttttgttcaaaggctcttgcgataagtgccttctctttccgtaacccggcacactccttccgaatgtgtgtagcggccaacttgaacttctccttggcaagtttcgcctttcctaactcgcttttgagagcttggacttcttcgtcctcttctggtgcttcaaaactttcttcgctgacgacttttaacttggtgagccaatctaaacctcgtatatgaacttttaaccattcatggtacccaccaatgatngccattaggaatgccctaagttcttgatctttccttaac

SEQ ID NO: 140124 - DNA, 295 bp, Glycine max
gactaatttcgctcctgaatattacaatcaccgctttatgaatgctgtacactaacaacgcttcgaggccattaagggatggtcatttcttccggagccacgccttcaacttaaggacgaccaatataccgatttccaaaaggaaatatggtgccggcggtggacatcactggttactcccatggccaagttcgatccaaaaatagtccttgagttttatgccaatgcttggccaacagaggagggcgtgcgtgacatgagatcctgggtaaggggtcagtggatcccgtttgat

SEQ ID NO: 140125 - DNA, 359 bp, Glycine max
tttgaccctttgattgacactgaattgacattaacaacttcacccacattggtcatgaaaactatgttgaagtatgaatggccactaattgtgaaccttaataccttatttgaagctttattcacacaacatacactactgacacaaaatttcttgaattatatatgtaggaaattcttcaattctggcttattagctgtcacaagctagctggcctcttcataaggtactcacctacacaagttttggcatgttaagttatttgatttgtgcatactgttatttcatttattaaatggatgttcatatttaattttccttcgggtttatagcaacctaactttaacttgaattcacac

SEQ ID NO: 140126 - DNA, 98 bp, Glycine max
tgttaccaccgcaaagcgaacaccgcgagcaagcataatgccgacaccatgcaatgctacacatatgaccacactggaccatagtgaaggcaccctaa

SEQ ID NO: 140127 - DNA, 408 bp, Glycine max
agcttcatggcaagccagtggttagaggacaatgctggatggtgaagttgatgtgtgggattcataatcatgaatttgccaagtcattagttggacatccatatgttaggcgattgagtaaagctaaaaagacacttattgctgatatgacgaagtgaatggtcaaaccaagaaacattctgctaactctgaaggagcacaatgccaatagttgtacgaccatcaaacaaatatacaatgcaagaagttcatacccttcttccataagaggaagtgataccgaaatgcaacatctaatgaagtttcttgaacgggatcgatatattcatttgcacagattaaaggatgaagatgtggtttgtgatatcttttggtgtcaccctgatgcagtgaagttagtcaatgcat

SEQ ID NO: 140128 - DNA, 370 bp, Glycine max
  unsure (1)..(370): unsure at all n locations
agcttgtgcctcttcacgtctggaatatgatttgttcatatagatccaaagacccttaggtgctttactgatggctttttcccgttccaagcttcaattggagtcttgtcttttatagacttagttggacatctgttgagtatgtaaatagcagtgtagactgcttcagcccagaatgtgttaggtagtcccttctccttgagcatcgatctagccatttccataattgtgcgattctttctctcagacactccattttgttgaggagaatatgcgactgtaagtttacgctcaatgccttcatcctcacaaaatctttcaaactcgcgagaggtgtactctntgccgcgatcacttcttagtactttta

SEQ ID NO: 140129 - DNA, 434 bp, Glycine max
  unsure (1)..(434): unsure at all n locations
actcaagcttgcacctgctagcccacggtattattgggtctatctatattaaaaataaaaaattaaaaagataaattttataacgtatagntggaaccattttaagaactatgaattatcaaataaaaaattatttgtccaaaataattacataatttacatctcaagtcacctaaataaagtattcttttcatatcatatttacttatttttgaattctatattaaatcaaaattatcaccattcaccaaaccattgaaaaatatataaagnacttacattctatatgtgntntataaagttattnttnncttaatncatgccccttatntattagtatcatatatgttatattaaancataataagtctggcagnaaatctggcntaacactcaagtaaatggactgggctaaaaaanttgcattttaaatg

SEQ ID NO: 140130 - DNA, 435 bp, Glycine max
  unsure (1)..(435): unsure at all n locations
tgcagctttaattaatatgcgatatttgtttttttttttgcaggangaccgcagtgtacatatctttcaacctcaagaagaaattacctgatgaaaacccacgaagaaattccaagaagaaaacccccgaataagttacagacacctaagagagttagaatttctcatactactgtgaaagtgaagatatatcatatagacaacgcaaacgtcctcactcctagcgagactaggcatgccataccgtcttacattcaggaaatgttatgactcattagtccattgcaaattagggggagtatcatatcatgagttcaatatcacgtaataaagattcataggagactcaatgaacataataacaaacaacaagccaattgttattgttaagtatgtgcaaataaaaatctctacgctggaatgggcctaacttta

SEQ ID NO: 140131 - DNA, 457 bp, Glycine max
  unsure (1)..(457): unsure at all n locations
agcttccatcaccatggaccctaaatctatttttgttaacctattagaattggcattcctgttagctctgtaatgactggaagctagtaatggagtgctaccagttctagagaatcggtacgatgaataccggccctgtgttttcttccagaatttggtgcttaaaaattcagcaccaggtagcaggcaacaagtattcttaggagcatcagatttagatatccttccacttgatacagccaaatcataagagatctcatccaatgctaactccaggccatgcacacgagtctctaaagtatgcattccattttcagagttccccatgaatttctgcaaaaaaatatatggtggatattgtcagacatgcccatcattcgagaagtggatactctacatatatgtacacatacaananaggaagaatttaaacacagcatggatattaaccaataac

SEQ ID NO: 140132 - DNA, 437 bp, Glycine max
  unsure (1)..(437): unsure at all n locations
atagcttgggcttatgagtgcagcgacacaccctttttttatatcttagctcacctcctagagaaagctgcttaagaagcatactggagaagctatagcttagctacacacaccttatgttaaaagacatgaaaatgcttagctacacacacccttcttatagttaagctcaccctcatgccaaatgacatgaaaatacaaaaatgcctctactacatagactactcataatgccctgaaatacaaggctaaaaccctatactactttaatgtgcagaatactaggcctaaaagaatgagaatctattctaatatttacatggaggagcggacccaaccttggcccatgggctctaaaatctaccttgaggtgcatangaaccctagggccttctgtagtcgctctagctcaatcctcttggagtcttctatccaat

SEQ ID NO: 140133 - DNA, 366 bp, Glycine max
gcggctgcaagctgaacgctctttatgtgcctttcttagattattttgaggttcatagatacaaagtgaaaacaaatgaaacaataagctctaatatataaaagatcgtataggtaaaacacaacaagttaacttgttgacacgaagtatgaactcttactatggaagatggaaagatatacaagtttgtttggacgcttcaaactatttaaatgaattacgttgcttaattaaacatttgaaattatgataatattgaaaaatttaagaaatttatcaaaagtggagaccacaagtgacaacattgaaactataagaactgattcatgtcattgaaagatattggaccttaaagttatagttgac

SEQ ID NO: 140134 - DNA, 218 bp, Glycine max
  unsure (1)..(218): unsure at all n locations
gcattcacctcttctatgcacactctcaacataaacgcaatatttnaatcacatcactttgctttctttcttttcacaagaacttgattgagagacatttcacaagcttaatgaaacaaacaaaagcataaccctaagccataacaatattgagaagaaaaagaaatcaatgaagatttggtaatccttgagaccaacaaatgaagaagaaaaaatga

SEQ ID NO: 140135 - DNA, 394 bp, Glycine max
  unsure (1)..(394): unsure at all n locations
agcttacatcaaggaatngatggaactcttttatgatatatcatttcaccatattcctagagaggaaaaccaagtggtttatgctcttgccactctgtcatcgatgttcaaaataggccctcacatagacttttcgtgcatagacatcaaatgccatattaagcctgtacactgttgtttgatagaagaagatgaggatggtaacccttggtatttcgatatcaaaacatacatcaaggacaaggaatactcgtccgaggcctctgacaatgacaagaggacattacagaggttggcagccagtttcctcctgagtggggatgccctatataaaagaaaccatgatatggtattgcttcagtgtgtgaatganaatgaggccgagcagatacta

SEQ ID NO: 140136 - DNA, 296 bp, Glycine max
  unsure (1)..(296): unsure at all n locations
cgggctacggcgcacaacaagattatcacgtncacgacgcgcgcataaacccaccatctcctgttgcccacctccatccgatcttacgaacactcacgtagcccataatctcgttgcactcaacactcgggccccatcaatcctcccaagcttccacaacatccaagcaaaacaacattcaaacagcacattcttttatgtgaatcaaaacacggcaaaggcaaaaaactccgctcaacacaccacccaaaaacacatgttagctcacttaaagaccgcagtaacaacaccttcga

SEQ ID NO: 140137 - DNA, 478 bp, Glycine max
  unsure (1)..(478): unsure at all n locations
gagtcacctgcggcatgcaagcttcgtgggaaaccagtgattgtanggtttttgttgatggncaagnngatctgtgggattcataatcatgaattggtgaagtcattagttggacatccatacgttgggcgattgactaaagatgaaaagagaattattgttgatatgacaaagtcgatggtgaaaccaagaaacatcctgctaacattgaaggagcacaatgccaatagttgtacaacaatcaaacaaatatacaatgcaagaagtgcataccattcttccattagaggaagtgatactaaaatgtaacatctaatgaagcttcttgaacgggatcaatatattcattggcatagattaaaagatgaagttatggtacatgattntatttggtgtcaccctaatgcagtgaagttatgcaatgcatgtcatttggtgtttttcataaatagtacctacaaaacaaacaggtatagac

SEQ ID NO: 140138 - DNA, 447 bp, Glycine max
  unsure (1)..(447): unsure at all n locations
taagatttctaggagtttagatgtattatactgccatgagactaacctccacaagccaatcaatcagaatccctcgcatgcttggagtgatatcttgctgcaacatattcatgtaatcacttgacggtctccttncaaactggatagatttaaccaaaatntattatcaaacttttgtagngaaacttatccattntattctaagttctatatagntctatttttaaatttaatnaattcaacaatattatattgntactgaataaatatgctctctgcttttaatactttgaaataatgttatatatgcattgagtcactgagaaaatagaagaaaaacaaaaatcataataatgttaaagagaagctactataatgtctccagtcaatgaatcaattatagtataggatcaataatccatatattagatgacatntctacaacac

SEQ ID NO: 140139 - DNA, 458 bp, Glycine max
  unsure (1)..(458): unsure at all n locations
agcttcaatggagaaacatcagctatgtngttattctcaagattgccaagggaaaaaaggttgtagtgcccaaactacaaatgatagcatgcacttctctcaccagcaacccaagaaaagtagagctcgaccctagagaagcaaaggccagagcataacctactaaagaattgaaacccttccaacttaacaaagaatccaattgtaacactgtggattttttaaaagtatgttaaatgtttgataaatactagaggaaagtaaatttagattcatgatatttataattgaatttaataaatggattgttttgttatgtgacgtagtgttattgataactttcatgagtgtttgacctaaagtgtggggtataagatngttagaacctatagttgagtttcctttagttgtagaagaaaggggtgtgcttagaagaaataaagagtagcaattttaag

SEQ ID NO: 140140 - DNA, 278 bp, Glycine max
  unsure (1)..(278): unsure at all n locations
tacactaactctncaagggcaaaaatctggaatgaatacctccctatttgtgtgaaaacattatacttacattccctcaacatcttacccaaatcatacaccaacatcccatacaagataggtgtatgttagagccaaataagcaatggacacttatataactatacaaaactctatggatgattattgctatctagtctaaataatcctatactatcctcacctcagacatttatgatagcataatccccccattaatgttcaaataatatcctatt

SEQ ID NO: 140141 - DNA, 398 bp, Glycine max
  unsure (1)..(398): unsure at all n locations
actttattttcatccaaatgatatttttttgcatgagaagggtttaaatgggaaaaaattaattttcatgaaaaataacttttcaaaaaatatatgtaccacttatcttggagaatattggcccaaaattttccccaattattataaagtgatatgataatatttagaaatttttgtgtgaaaatacggttgtaggacaacaaaggaacaataactatgaaaaatagattcttgtaatttgtttggcttgagaaaaatatgacatattattaaggttaaggaaattccctattaaattntataaaattcagaggtgtgtaagtactttttttaattaaaaatagtgtttagaataatttcagtgtaaaagttaaattggaagaaaagttctatatgag

SEQ ID NO: 140142 - DNA, 326 bp, Glycine max
  unsure (1)..(326): unsure at all n locations
ttgcttttgccaataaaaacccgttctcgtcgttgcacttatagaggtaaacatgtgattggtttgcgttaagtaataaaaaaaaatctagtagttagccccttgaattgaattattgaaaccaattaggtggggataaaaaaaaaaaaagaatgttgaatcccaagcgaacgtggaatccagagaagagagaaacataacgcatcatagaccacacaaggttggtcccaatatctgtttcagccaataacgtctcatccttccatatctttatcttttcattntttttctctctcatttctatnttttctctcaaccaaattaac

SEQ ID NO: 140143 - DNA, 213 bp, Glycine max
  unsure (1)..(213): unsure at all n locations
tttcaatttaaggngacaccaatgacttttattttattgtccccttaaaataatttacactacattcttcactatttaaagcatattgcccgcttatatatttnaagacaaaaaaccaaataaaattatttacaaagactaataaaatttaattttacaaggacccaaaacataaaacactaaattataatggataaaaatattataattata

SEQ ID NO: 140144 - DNA, 403 bp, Glycine max
  unsure (1)..(403): unsure at all n locations
tttatactctcaatggttaaggtggttgaatcacaccttaacttttttacagcaaatacttgaccctctgacattttcggtttataaactattcccagggcttctttcccaatgccatacttgttggcaaaggtcttggtagcttcaattatgtctctatacacaactttcccattgaagtaccaaattgaaaatggattcggacttttgaatgaacttatttgccttggagctcttgattttctcttgaagcaaaagaaaacaatcccaagtaaccccaaagaaataaaaagagccacctccaaggaagcaacaatagggatcacaaccttggttcgttcactggatccaccattanggatagtgagaatacaangggttcaagccccgaattgcccacata

SEQ ID NO: 140145 - DNA, 384 bp, Glycine max
  unsure (1)..(384): unsure at all n locations
actgaggcatgcaagctttgggngtataagttctgtctcaccaattacatctattatcgatcgattaaaaactggatgataaacttcattcctttgattattagctgatagaagaaatgttaaagctatttgcaaagtacacctctattggtgtgctgaacacccttatacactgggtggtttttgggggttgtatttatgtcgcgcatacaaaccaagctcttgcaaacttcgcaggtttcgttgtggctgtgagctttagcttcttcgcgaatgcaaaatttacattcaaggcatcgactacaacgatgccctacatgctatatgttgggttcatggggacactgagtgctactgatggatgggctgttgataaatgcacac

SEQ ID NO: 140146 - DNA, 437 bp, Glycine max
  unsure (1)..(437): unsure at all n locations
agcttgagctcattgttgctgccccataaagctccttgtatttngtctcggccatgctcttccttgcgagccctcttggtttcttgttcaagggctcttgcggtagctgcattttcttctcgtaactcggcacactctttctggacgcctgtagcgactaacttgaatttttctttggcaagtctttcttttcctagttcagtttttagagctcgaacttcttcattctctttcggagcttcgaagttctcctcgttgataattttcaacttggagagccaatctaaccctcgtgtatgaactttcaaccattcatgataaccactgatgatgccattacggatgcccctaatttctttatctttccttaacgggctttcccacgccttgtggactctntgtataatcttgaaactttgcgcgccgaaatctctcac

SEQ ID NO: 140147 - DNA, 259 bp, Glycine max
  unsure (1)..(259): unsure at all n locations
ctcacagagaatagcagcaactaacgncaaaacgaaatcaatgcccgtgacaaataggaaacccgtcgagtacctgtcccatgcacattgatgcagntacacactcaacncaagacatngttgaagctttagtgtttagaagaaaaatggaaagaacaaaaaacttgatagttagaaactatctntggctaacctttctttgtggatgtatagaagaacagccagaagcttatacccagcaatattctcaaccgcaaga

SEQ ID NO: 140148 - DNA, 430 bp, Glycine max
  unsure (1)..(430): unsure at all n locations
agctntaaacaaacagcaaactcccctcacttatctatatctctctggtagnttcttacaacgttgttttgagatctcttaggttcacgtccattcgtccaaacatagagctttatataccaaatcgaagacaatttagtatagatttcaaagacaagattaatatcaaattttgggggttaaatacccattcaatttaaaaaggggttaaaggcgtgtttcgagatccacatcaaagagatgccattttgaaatttcaatcacgccattgtgatcggggttcagtgaaggttacaaaaatgaagtctattttataaaaagtcaacttgtacaccatctcattttcaagggtttttcaaaggaagtgtaaaaacacccaataacaatacccaagtcacaatagatgcaaagataggctcaaactaactag

SEQ ID NO: 140149 - DNA, 240 bp, Glycine max
  unsure (1)..(240): unsure at all n locations
cacatgtgccattttccattggcctttctcaccatgacaacattggctagtcaggtcgagtatttgacctatctaataaaatggacaacttttcgatcttttcattgaccacctcatttatnttnnctcccatccttctcttcttttgtgagactggcctggccagngggcagatagccaatccatggcatatgatctatgatggatgaatggcatatcagatggatgcctagcatattt

SEQ ID NO: 140150 - DNA, 419 bp, Glycine max
  unsure (1)..(419): unsure at all n locations
gacccttcctataggacgagacttgcgaacaagctttcatggctttcaagaagaccatagtcataccgccaattttgagtcaacacaggccaagggtacccctacttctatatctctcagtagctgacaaagttgttagctcagcccttgtacaagaggaagggaagcaccaactccctatctatttcactagccgtatacttcatgatgccgagaagtcctaccaaatgatagaaaaggtggcactagaactcattacctcgggtcgacgacttangcactacttctagagtcatcaagtggtagtcaagacgaactaccccataaagaanggtttgagaaagcttgaacttgtagtaaggatgatggccctacctgtagaaacttcagaagttgacatccaatacgaatcacccggc

SEQ ID NO: 140151 - DNA, 386 bp, Glycine max
  unsure (1)..(386): unsure at all n locations
tgatgcaaggctatttagtgngtatncattggctatccttatagatnnaataggnacaagctgtggaaatggaatcgggggagacaagatgcatcaccagcattgatgtaaccttcgatgagagcagaatgacaacgctaattaaggagcagaaagatagcagctcaatgtatgagacaaccaattttgaggtggagcaccctgaaactttagaacattgttgtgtagangcttttganctcactgatcaatgagaagctggagataatgaagagctgattactcagcatgacttgtccaattatcaatcgactagagatagagaaaatagtgtgataaagcctccatataggtatggncatgctgatattataagctatgccttt

SEQ ID NO: 140152 - DNA, 462 bp, Glycine max
  unsure (1)..(462): unsure at all n locations
agcttctnttggactcgatcccttntgttctttatgtccaaaatcttttctacagctccaatatctttcatctaaaattcactattgagtagtgacttcaaattctgaatttcaggcttgtcttaagatgttatgagcatgtcatccacacagagtagcagatagatgtgggaaccattctctatcttgctatgatagacacatgaatcataaggacttttgttgtacccatgagaaacaatgaactcatcaaatctcttttaccaatgccttggagattactttgacctatacaaagaccctttcaacccacagaaaaaatttccttcccttgcaaatcgaaaccttcaggttgttgcatcagaatttcttcctccaatcctccatggtgaaagggttatttgacatcgagtngctctaactccatgtctagagtttctacaagagctagtaaatacatat

SEQ ID NO: 140153 - DNA, 393 bp, Glycine max
  unsure (1)..(393): unsure at all n locations
agcttgaaggtgcgtagcccaccattttctttattttattatctggaacgtgnctactatcattgtcatcgtattttcgccattgaggcgccacttgagctgccaggttctccacctttgggcgtattctttgaaagatacgtgccccctttttttgcacatgttttgtagttgcatcctatccgaagtcattatacagacactggctaacgaaggcaaccattatgtcctcccaagaatggactccggaaggttccaagttagtataccacgtaacaactaccccagaagactttcttggaaggaatgtatcaacaactcctcattttttgtgtatgctcccatcttacgacaatacatcattagatgggtcttggggcaagtaatcccctt

SEQ ID NO: 140154 - DNA, 272 bp, Glycine max
  unsure (1)..(272): unsure at all n locations
ctaaactcaacaacggaagccacctatgttcaatnntagcccacaaacaaaactcaccataatgtgctcacatgccatcgaggcatttcaccgagcacttggtgggcgcacctttaagcatgataaagtgtgaatgggggctatgtgacatgcctaatcacttcagaatatgcaattggtctatggccatcccataccaccccccaattccaacaaacaagcatgaattaatgcaactggtttgtgccatcttggaaccaatcatgtttatg

SEQ ID NO: 140155 - DNA, 457 bp, Glycine max
  unsure (1)..(457): unsure at all n locations
agcttggtgttgctctaattgacatgtattctattgttttttcattgagaatgctatctcagtgtttgagaatgttgaacaaaaatgtgttgatcattggagtgctatgatcggcggtttatatattcatggaatggatgaaatgactttcgaatttctcatggagatgggaagaatttctgttattcctgatgatatcacattcattggagtattgagtgcttgtaggcatgctggcatgttgaaggagggactaatatgttttgagctcatgcagaaagcatacaagctggaaccttaagtgcaacactatggatgcatggtggacatgcttagtcgtgcagggcacgttgaagaagccaagaaactcattgaggagatgcctgttgaacccaatgatgtgatttggaagactctactcagtgcttgccannaatatgaaaacttatctatagga

SEQ ID NO: 140156 - DNA, 252 bp, Glycine max
  unsure (1)..(252): unsure at all n locations
catatcaggacnatgccacgcttcctcactaatctccttattgtgggccatttcaccccccttccaagccctcttacgatatatgacaggatatttatggaacaccactcctatagcccagcttttctgcctctttcctgtctttgaacnccaaagcccttatgtnatcaatgatacttttatgcttccgatcccatgacacccacatnttggctgccatcttccatttatgnnctgcctcctggaaatctt

SEQ ID NO: 140157 - DNA, 364 bp, Glycine max
  unsure (1)..(364): unsure at all n locations
ttgaatctcatccacgtcncactgagatgcttgttattctgtcaatacgactaactattgtgaaaaaactgctgaaattgatacgaaccctccaatatagttgttccgaataatgagacactttctgtaattaaacaatatgcactagcatcccaancttgcgtatntaacgatcattccttttcaaatccacgaaaaatgggcaaaattgttgaagtgcatgatntatgaacncactaagccacgccacgcgctatgcaagccatccgctaagcgcactatcctccggctaagctctgcagtaaatctggaagatggatgagaattatagatgcactgagccagtggtaactcgctaagcgca

SEQ ID NO: 140158 - DNA, 409 bp, Glycine max
  unsure (1)..(409): unsure at all n locations
agcttgtattcaaatgggttatgtttcaatgtttaataacaattttcataacatgatcgtttggatgtcctaacctgaaacaacagattttgagcctatgctagagctattattgacagtagcaattgaataagagaagtcagcatttgtaacaggggcagaagtagacatcagcagggaaggattgccttgaagctggagattgtgaaatgaataaaggccatcaacacccacaactccttgaaggaggaccttatgtgtctcctgagatttcacaagacagatatgaggatgaaactcacaaaacacaaagttatctttggcaaactgactcacaattaacaaatttttcgaaatagaaggaacatgtaacaanttgtgaagttaaaggttataccagtgtcgttag

SEQ ID NO: 140159 - DNA, 185 bp, Glycine max
  unsure (1)..(185): unsure at all n locations
tctcaaggaagccacctagnctataaatagaatcatgtgaacacttgtcgtaacctcgatgaatgaaagtcccatgagatacactttaaaggtccacttccttccctcttttataccttcaatatcgngctccccccctctctctttcttttcctccattaaagcaccctctccaagcctcttat

SEQ ID NO: 140160 - DNA, 368 bp, Glycine max
taaggcaaaataatgggaatcccaattgataaacttgtgccatttccaacttaagtagcttgtgacttgtgatttagcatgaactagtaccctttgtgggagtagtataaagccagaagcagctcataatattgactgtgggcattgcgaaattgaaggatcctccacgaggttgcatgatttgtcaagatgtctttagatacttgccattaaaatatgcaagtgaaattcatgtttctatattatacagtatacaatcttttatcaattcttatgtgagcaacaactatctctgattcaataatgccttgttgtctaaaaaaatgaatgtttattgagaactttagattgagtttgcctttgataat

SEQ ID NO: 140161 - DNA, 367 bp, Glycine max
  unsure (1)..(367): unsure at all n locations
caaaaagaattcgccaaggactaaccgcctgaattctttttgtgtctctccactcccttttccaaaagaacaaatgactaaccacctgaattcttttgtgnctcccttctcctttgtcaaagaattcaaaacgacacagnctgagaattctttcgattcttccctctccctaatacatatagtgtcaaaggactaaccaccttagaattcttttttatccccattcacaaagtatctaaggggtaaccgcctgagatccttgnctcaacacattataggtgacatcccttgcggnacaagtatagggtacatccacttgtgctcgaccaagaacaagataggtgacatctcttttgtatcagctcta

SEQ ID NO: 140162 - DNA, 414 bp, Glycine max
  unsure (1)..(414): unsure at all n locations
aatgaactatctcatttaccacacttttcaataaagtttgttcaggccagccaatcaagttatttatgtcttagtccgagagtttatgttagcttacatgtttttttatttcattccagcatgtattcactctcttgtagcaatgaaattatatgagcgtttctttgtaaaaaaaaaaatcaaaaaacaaaaagaggttaaataaaatacaagaatgaacggtgataattgtttaatgaaaattaaagataaaaatgtctaacaaaaagtgtatactaaattgaaatcttctcattataataattatagaccacatcatgttatgcatataaaagtanataaaaaaagggattcacattaattagttcaaagaacaaagtatnggatcgatcaactcactgtacttttaatcat

SEQ ID NO: 140163 - DNA, 457 bp, Glycine max
gagtgaaataatgggactcttcacttttttatttgaatttcaaccgtcaaggatactggtaatcgattaccaaaacattggaatcgattaccgccttttgaaaatatttggaacgcttgtaattcagtttgaaaacattttcaaactcattttgctactggtaatcgattacaacaatatggtaatcgattaccagagagtaaaaactctttggtaaaggttttgtcaaaaactcatgtgctattcaaagttttgaaaaaactttttaatacttatcttgattgagtcttttcttcattcttgaatcttgagtcttgaatcttgatcttgattcttgagatcttgaatcttgattcttgattgtagactttcttcttgagtcttgaattcttcttgattcttgaactcttgacttgttcttgatttacttgagatgttctttgattcacttgagttg

SEQ ID NO: 140164 - DNA, 319 bp, Glycine max
cctatcaaactccgcggctggttctaaagggaaatagagaagcgaaatcttctgagtattctttgtcgcctaggttctcttatgaataacattaagggaataataaactctttcttttgatttttatctattatgagtattatctcaagacatatttgtagaactatggattgggttctttgcaggtatacaattttttaagagcatgtttctaatttattgttagccaacttagattgatctattttcattgactgttatgtgactgttacaatacccataagttcagctagtgcttctttgccttgtgttcccgagc

SEQ ID NO: 140165 - DNA, 454 bp, Glycine max
agcttgatataacctagtattctttttcctactctgtcattgttggctctatacaaatcaacaaatttgttgtttgtttgcacaatgactaacttttaatcatcttataggcagatatacaatcttaacacttagtcttttctctcaaagtgttttgtgagcttttatgaactatacaagaatttacaaagagctttttacaaaatgaatttgaatgatagcgtataggttcgtgtcccatgtcttcaaagcttttgctatttacaggccttcatcttcaaatatttcttgtccctaaacaaatagtttccatcacttgagcttgcgtctgatgattgtggttgttggagcatttaatgctttcatataatatacttacttctttatgctggaaaaccacttttgtattctttcatgtagaacacttcaacaggaaaccacttctttagtgtca

SEQ ID NO: 140166 - DNA, 472 bp, Glycine max
  unsure (1)..(472): unsure at all n locations
agcttagagagaaagcttcaatggaggatgtattatgatagaggggggtacgaaattgaaggagaaaaagagggagagaagttaaactttgtagtgtatatcataagtttcacattcatcaaagttatgacaaatgttacacatgtttctatttatagcataggttttatgaatttcattttcatttcatgtgaatctaagaggaatatttcaaggatatgccaaaggcatcttaacatatttcctttagatgtcacaagaataggtgtaactctagtacatgagaaagtaatacgccacaagaatataccaaaggaatattccaagaatatgtcaaatgcatctttgcatattccttgagaagctaaagggggagctacacgcacccctccaatagctaagcttagtcctatngccaaatacatganaatacanagaagttcctactacanagactacttannatgtcttg

SEQ ID NO: 140167 - DNA, 458 bp, Glycine max
  unsure (1)..(458): unsure at all n locations
agcttgttcattatctgatgatatggttaattctattctatttctatggggagagcttgataggatcacaagaatagccagccttaacaaaaacttgggtttatggctttggatttgaaaacctaatcatttttagcctttccaagcccatccaatgtaagcccaaaagtgattcttcagtcatgcaccccctttgcttttgtcgtaaatattttggcgaagccaatgatgaatgtttaaaactttaaataaatataaaatggttattcaattgtttctaattaagtttctccacacttgttctgccaaactgcaatcacgcatggcacaaggagtagttnttttttcttttcacgacaacaatgtattctcacaactaanaagaaaaatcatgagaataaagcattttcctttgttttaattatttatgtagntagntcataaaaaagtaaatcatg

SEQ ID NO: 140168 - DNA, 466 bp, Glycine max
  unsure (1)..(466): unsure at all n locations
ggacactatgaaactaagctaagacagagaagaagagantgctatattcttatattctcttctaagaatacaccacctatatatagttatatgcgctggctacaagacaaaagctaataacagaatctctaatgcactaaataacagaattataaaagcataaggcactactcctcctaacagaatcaagcactactgctcataacagaatggagcactacaaaataatggatttggtaccaaaatcccttagacataatccttcaagngctattgtgttttggntngcctcttgttgagnccttatcttcctcttcctatcatggagactgnttgtngtgatttgggaggaaatncatactgnnatgattacagccaggcctgaaatcttgctgtttaaaatctcaagtgacggcttcgatgacaagattgaccacttgacttggccaaattcatgacacaccct

SEQ ID NO: 140169 - DNA, 420 bp, Glycine max
  unsure (1)..(420): unsure at all n locations
agctnggattcctaggcctagaattgcattcngtctctcatcttaaatccttcatgctgtccctatacatataaaacagtcccaccatccccagtttacaaaaccatgctcatatgtggttgaggcatttcaccgagcacttggtgggcgcatgtttaagcatgaatagcaagagagtgggggcaatgtggcatgccccattgcttcaacatgcaccctatgcctaaggccatcccctacaacccctcaactcaaaccaatcaagcatgaaaacaaaccaaaattgccccacagatttgagcacattcccacaatttatagcaccaaaagacgaccaaaatacaccaatggaaagctagaaagctcaaggatgagatactttgtagacaagtggcctcagatatcttaagaagggggggg

SEQ ID NO: 140170 - DNA, 352 bp, Glycine max
  unsure (1)..(352): unsure at all n locations
tagtcttctatctccttgacagaaaaatataatattatatcattgataatcaaaacatattcaagtgatnngnacatgatgtacgttatacactatctccaacatatgagtgacaaataatgtagaaacaagctncatgatgatgaattaagtcgattcatgtatnttngatgaagacaaaaagcccaaaagaatgatgtcaagatngagtcatcaagtttaagatcaagaataaagaaaagacatttagttgagttcaagattcaagagaagaaaccaagaagcatcaagncaagacttcacaatcgatagattgtaatagatntttcanaaacctaacatagcacaattt

SEQ ID NO: 140171 - DNA, 337 bp, Glycine max
  unsure (1)..(337): unsure at all n locations
acttctcttggaggcgcctactgtcgtaatgtgctcttttgctggcgagcgattgcgatgctcattggtgcgctttccaaatgatgaaagatgcgctggagtcaccactaacgtttttttgngcataacgttggaaaaaccgaaggaatctgggcaaaatgaaaactttaagccttgttgttgnatcnacgcttgtttattgattagagcctctcatttttgtctcaaaggacaacagcctattttttattaatgtggatatatggcaccttaacttcatttctttttattatttgatgacgacaaaagcggggctcttgctctcacgtaccctcca

SEQ ID NO: 140172 - DNA, 381 bp, Glycine max
  unsure (1)..(381): unsure at all n locations
aaaatagtattagaggaagttgctcaacttccccaacctccaacactaaattttcttcgtcggtggagacggcaaagagttcatgttgattcattcctctattgacaacaagattcangccatntgcaaagggttgactgagttgtggaaacaaagaaaaatctagttacgtgcatggaaatttgaacccacaaccaaagaattgagaaataattggttctttgatatgattttgggtgatttcttgtcatggtgtgaataatgcatttctttgaattttttttctaatttttggagnagggagacaatntatgtatgaaacanttctagtactaaatcataatagacaaagttcggcggagcaaattaatcaagaactaa

SEQ ID NO: 140173 - DNA, 363 bp, Glycine max
  unsure (1)..(363): unsure at all n locations
tcttagntccntcacgcattggatttggnnttgaatgatgaaaagcggacacaactatnttcgctaaaactatgacttacagnctattttagtttaagtttatgtcgatgacattattttcctggactataaaagaaactctctatgtagattcttctaagctgatgcacactatagttgaaatgagcatgatgggagaaatgaaaattttccttggcctacaaagcaagcaaacaggcaaagaaatatatattaaccagaccatgtatgtgattgagtcatcgaagaaatccaatatggatgacgcanaggaaatgaagacaccaatgcatctaaccacatacctatgacttgtcgaggaat

SEQ ID NO: 140174 - DNA, 446 bp, Glycine max
  unsure (1)..(446): unsure at all n locations
agcttgtagacgttggatcttctttatcaattgtatcccttgcttcttaaagnttgatagcaacggaatgaagaaggagaaggatgattggagacgccacttcaaggagaaaatgagtctagaagaaactcaccaccataggaagccatgaataagagcttgaaggtaagagaagatgaatggaaggagagggagagaaggagcacaaaattttgtgcctcaaaagaagtctgaactttgatcatttgctaaaactcaataacaattgatgcctaaattgagattataattatacattattcacctccccaagaaagaaaaaaagggataataacaaagaagaaacaagaaaaacttgtacaatataataaactataaagaaagacacttaatatacaaccagaagaatatataagacattatgatggcagctccctaattatatc

SEQ ID NO: 140175 - DNA, 416 bp, Glycine max
  unsure (1)..(416): unsure at all n locations
nctcatacaacaaagctcaaagtgtccctctattctacttggacccatagaaaactattgctttcaatctactatcatctaacagactcatttgcaggctgcatcagcgtctttagccgctcaatcaagtctccttacacttcttgggcaaccagcttctttcaacctcctttaccgtaacaaccaccactgccactagagtgacaatgacgtcttcatcatctttctctctttggaccctccatcatttttntatgacataagtggtatgaaggntagaaanntgatatatgtaaaggcactctatgtgaaaccatatatactttattgttgtngtntngctgacaactcgtgtcttatnnatccatccaccatttatatatacatgcctgctctggtccatatattctcctaac

SEQ ID NO: 140176 - DNA, 456 bp, Glycine max
  unsure (1)..(456): unsure at all n locations
agcttagaatttatcaagttttattttgagtttgttagggnggagaatatcatccacaccactcaatattcaagtgaaaagaccaagagaaaagaaaaaggaggcaaaagaacatttgagcctcttaaaattcttcaaattagttagaacatattgattagtgtttgaaggaaaaagttgagaattaggtcagcatcaacataggttgaatgcctcctgatactgcatcaaggatacttgacaacagacttagaaccataccacttaagcttcaactgtttccataacatgagttaataatcaagaaggtaaattaagttgagtggtgaaatgatgaaatagatagatacctctactctatcaaacatgtcatcaagtatcaaaggggtctcacttgtatatgcatcacgtgcctatttaataaagcaaattaagagcagctaaagaaataatgat

SEQ ID NO: 140177 - DNA, 241 bp, Glycine max
  unsure (1)..(241): unsure at all n locations
gacactataatggggcttcaaaacctccagcacaaacccaaatagtgttttgtgcacctggatgtggagaccattcggctagcatctcaagtgcacactcacctatggtgttgtgttgngctacgctccagacatgacaaacccgactttattattattagatgcatagacccataagtatgtgtgagaacacatgtgattgtgtctaaagagaaacaaaacccttaaagtcaaatgaaca

SEQ ID NO: 140178 - DNA, 323 bp, Glycine max
  unsure (1)..(323): unsure at all n locations
tattggtgcaataaatgctggcatgataatctttgcttttctcgggccaaccaatacaacactttcccctgtcgaaccgactcattgttttggacctttcttatttattttaaaaagagtagntccttattctttaagattattatgagagctgctaatatattatgattaatgtaaatattacgaacacaacataatatgcactatcatttatcttgaaaagattcataagggtgactcattttgattaaagaatttaacaaatcattactcattcaatatttaaaaatgacntatattcagctgttatcaaatataaattg

SEQ ID NO: 140179 - DNA, 312 bp, Glycine max
acgcaccgatatacattcaaagcatctgcgtacctagagcagacatcacgaccttcttggtgtataagctacaaacacgacacacatgtctgaggctaaatacacatacaggcacactcaaagcatttcggggcaccaaaaaccgctcatgtgcacattttgtgggtacaacacctatacatacgcaaactgcaagacgaagctcgactaaccacacaatatggagctacattccatgctctttcaattcatatgctagatacccaaagccgcatgcaaagacaagcataatttgcttcgcggactaaaatt

SEQ ID NO: 140180 - DNA, 410 bp, Glycine max
ttttttaagcatactaaaacatatggaatgggtggtgggtctataatgccacattaaaatcatacttgcccattaaaaaggaaattaacatttcagtacctcttcattgaaaaatatttattttatatttgaagcgaagaataaactgaagcctactaaaagaaacactcagagtgagccccaaagcaccctaaaaattaattttgcaaacagcaagatcagtagaagggctggagcctggaagctcccatttttgcaagggaatctcatcgattttggattctctaaatgtactacaagaaaaatgtcaggtacgggtaatattttattttattgtaacgaattttgatgttgtcagctattcatgccacatacacagtcgataataatagcttgcgtgagtatgttat

SEQ ID NO: 140181 - DNA, 252 bp, Glycine max
tgctctctatctttgcctccatgaaagcaacctcctcaagcgacacatccgaggcgatgcttgtgggtggaagcccatctaccttggctgattatctagtggatggggcctcccctctcctcttctcctttgccttccgctgcatctttattgttgaaaaacaccattgaaggacctcattggagcttatagaccccagccccattaaagcccacaagctagctgccataagtagactctagtctataatag

SEQ ID NO: 140182 - DNA, 128 bp, Glycine max
ttttggagggatgtgtgggtaggggaggattctttgaaagacaaatactctatgccttttctcctctcccaacaaccagatgcacccataaaaaatatgggttcctgggtggagaaatggggcgtttc

SEQ ID NO: 140183 - DNA, 265 bp, Glycine max
  unsure (1)..(265): unsure at all n locations
ctataaaactaagcttagcatcttanacagaggctaaagatctgaagtttagacttcatatgagacctgngcagcaaagncaaacagcttcaatagaaaccaaatgacttggtagaatctatgccaggncaaccctctgaacaacaagtgaaatgacctaagaaaacccatgctgaccttngtgaaaaagctactatgcttgagtctattgggatgcagaaancatgatgcagtcggatcatagagggggacagcaacacatcct

SEQ ID NO: 140184 - DNA, 409 bp, Glycine max
gcttgtagccacatggacttaccttgaattttttcttttgttgcccttttgagccctggttcccttttctttttcttgaagctactacaagccttaagtgaaaaaccatgatattaccatatccttaaggaattttggagcttttgaaatggtttcggaataagtgggggggggtcttgcttcattggacaacttgttttgctggctatgctgtatgatgtattttgggccatacttgatgtgcattgcatattggttaaatgttggacatgctgaatgaaatgttgtttctcaaaggctggagagtaaaaaacagtcttactcttcagacaaagaccgaataagacaagcagttaagttgagtgaatcacatctttctttgcacaagaatgatgaaactttggcctac

SEQ ID NO: 140185 - DNA, 304 bp, Glycine max
  unsure (1)..(304): unsure at all n locations
tgatgcatggagctgacccattagctatcctaactctttcttactgtcgacncccacgcccgagagcttgacttgatagaacctccttaatagaagcgcctgactcacccttgnttactaaagcgcaactagcgaatcaagactccgacatctataatgggtggaatggatgaatgcatgaataaangcgtatggcacagatgcatttaacgaatatgggagcctgggagattggccccttcttagagacaacattcaggcagcctggcgcttgatgaatgcattntagaaggcgacacgaacc

SEQ ID NO: 140186 - DNA, 462 bp, Glycine max
  unsure (1)..(462): unsure at all n locations
agcttcatgatgaatcaagagtgattcaaatatgttttgatgataaccaagcatgatgaccaaagatgatgaccaaggtgatgaccaaaagctcaaaggtcaatcaaagaatgagttccagatattccagatagaatcaagaacacttcaagtttcaaaaggaaagttgatttcaagaatcaagaatcaagattcaagagatcaagatttcaagaattaagattcaagagatcaagactcaagatagattcaagaatcaagagaaggcttaatcaaggtaagtatgaaaaggttttctcaaaaattgagtagcacatggattnttctcaaaacatgtttaccaaagagtttttactctctcggtaatcgatatcaggttgttgtaatcgattaccagtagcanaatggatntgaaaaaagtttcanactgaatttacaacgttccaattaatttcaaaaagc

SEQ ID NO: 140187 - DNA, 392 bp, Glycine max
tggctttttcttttgcttttgattttggcagtaggtcacatggatcttctttaggagagagagagagaaagaaatcaaaggcttataaaataatcactctaaaaatcctacaacacagtttatagttttatttgtgtgatttaattccagacaattgcatttaattcttaatgctcatgacatgacttacattgcaataaatatgtgtttatggtagttaaaaataaactgaagggtttaatatccatattgttttatttacatgtataagtgagaaaatttccagaaattaattctagagtgatatattaatcaaataattcgataaaggggtaattaattagattataatgatgtggaattagaaaataatattacatttaggtcaaaat

SEQ ID NO: 140188 - DNA, 380 bp, Glycine max
  unsure (1)..(380): unsure at all n locations
acatgattgctaacgttatgtcaaagaataagatcgggctgcacaatgcacaaagcaagatgtaatgtcaaatgaagaatcgaagctgcatgattcatctatgtcggatataatgtccaggacatcctgcccgaaaacactgtatgtgctgtataatgtacaatgcaagattaaagtcaagtgtataagngaaactgtatgatccatctatgtcggattctatgtcctgacatccggcccgataatactggacatatgaatctgttatatctttaacagattatggtgcagntagcaagagattataagatctatctctaggaacgaactaaaagataattaaatntcgaatcntcaagtattagatnctgccatggata

SEQ ID NO: 140189 - DNA, 299 bp, Glycine max
atgaagaacggcgaagaacattcacgaattttgttacagaaacgttatagaagtgttatggaagcgcctcggccttgattatcttcttctttctccttcttttcactaattttaaagcaaatatgccttcccagggtgttgaacccttttccctcagccccaaatgccattttatagcaaaaatgagggaggtcgttgtcgttcagctcgcccatgcgagctatgtagcttccacatgaaacagccgtcctacaaaagattgcatgatgggccaggaccaggtacacccccctaaattg

SEQ ID NO: 140190 - DNA, 91 bp, Glycine max
  unsure (1)..(91): unsure at all n locations
tttctcacacctcgcactcatttcactgaaatatgtccactaatgatgctgaaccccttnccctcagccccncacgcccaatnatagaaaa

SEQ ID NO: 140191 - DNA, 215 bp, Glycine max
tttgcgagacatcttgccaaacaaagtcaggttagccataactcacctgtgctttttcttccatgccatatgtagcaaagtcgttgatcctgtcaagtttgaagagctggaaaataaagccacaattatactgtgccaagtggagatatattttccccctgctttctttgacatcatgactcacttgattgtgcatctggacaaagaaatccaat

SEQ ID NO: 140192 - DNA, 311 bp, Glycine max
  unsure (1)..(311): unsure at all n locations
ctctttctcgtacggtaccatgggatatggcacttccatacccttatctgtagcttgnatccccttttctctttcatttacactcctactcttggcttcatctatattttgttgaccttatctttctcttcgttttcttttgctttctggacctccatttcttcttttggtctttnattaccttctcttcgatcatttttatggtnccccccctctgactcatagtttcgganaccccaatcttcttatttacatgtagtgccttgaaagcaactagctccttcaaagcaacaacatcctcatacttagcc

SEQ ID NO: 140193 - DNA, 301 bp, Glycine max
atccctgagtcacctgcggcagcaagcttcaacaacctacctagagattttaattctgttcatgagcagaaagacttgccaaccccttgaggatgaagtaaatgttatcactgggcgagtccactcaaacatgttaggcatggataactctcaatgaaaagagaggcaagttctgttcttagattgagacatgcgctggcgaaaaagctacccttcttaataactttctggagttgggaaacgaactgaatgatcttcaaaaggagctgtgagaactgaatgcacttcatcttagcctaga

SEQ ID NO: 140194 - DNA, 391 bp, Glycine max
  unsure (1)..(391): unsure at all n locations
acattataacatgagaaaaacaaaccgcctactcaactcatttctaaactttattttttctgaattctcatttaatggcaactatccctactctagatttatntattatgtcttaatatttaatgttctatacttttgtagatttaatttatcgttctaaatatactatagcaatgtgtgtgcgcacacgaatttatgcatttttaggtttggtgtatattttntatcaacaattatcaatatacctcctctaaccgtttactttttctttaataccaaagtcaaaagctagcctccataattctatattgggttatccgattntaacctttgcaatcatattttattgtattctcaatgtccctttgtccatatgtctctcaattgaaca

SEQ ID NO: 140195 - DNA, 112 bp, Glycine max
  unsure (1)..(112): unsure at all n locations
tgntcgtgagggatcccagttctttaacaagctctgaacaatatagccggcccncaaataactgtctgagggcttggcggccacgctcaacaaagtactttcgacacctact

SEQ ID NO: 140196 - DNA, 254 bp, Glycine max
gcttcgaatgggcatcactttatttgtgtttcattgactacttcaccaaatgggttgaagcggcttcgtacgcccagtgtgaccaagagtgtggtggtcaggttcatcaaaaaagagataatctgccggtattggttgcccaggaagattatcactgattatgccacccatatgaacaataaaatgatgaaggaaatgtgtgaggatttcaagatccaacaccataattctatgccttacagacccaaaatgaa

SEQ ID NO: 140197 - DNA, 442 bp, Glycine max
  unsure (1)..(442): unsure at all n locations
cctataaaactcaactcacctttcttattgaagtgaaaatcaaatggaaagagaccttctaatggncagaaggcttctangaggctaatctngtcatttgatccaatctcaaagagagaatatttttcacatatggtgtaaaatcttctataacacacgctctctcattgtatatattggttcatgttgcaattgnnngagcacaagaatagncttttagangagccttgctatcactccccatccaaagccttactaacttcaatggctcaatgaacaatgggagattatagtcaatcatccagttaaagtgcccttctccattggaacatataatgattaagtgatttgtgatgagancctatggaggcaggacaccttctcttatgaggccatgcaatatgaatgattatgtctataatggcaactaatgaacaccctc

SEQ ID NO: 140198 - DNA, 381 bp, Glycine max
  unsure (1)..(381): unsure at all n locations
atagtctgataacactgaatctgcgaaatttaatctatcttcaggtgtctccaaaagaatctcctctatctgaaaagtctctccaaacttggtgcgatcccaaggaaggacaacattgagggcacagatgatgcctatcaaggattgatgctactgttctgtcgtgcaatatttttctctctgcgttgtttcttctaaagggtgcttcaatttctaaatccaatggaaccaattcacctacaaaagatctacgcatgcanacactaacaggaaaagcagttaaccaattcaagaagaaaataaattctgaactaaacaaatattaacaaaaacacaaattaataaatctaagaataatgaattaatgccttcaaactggac

SEQ ID NO: 140199 - DNA, 306 bp, Glycine max
  unsure (1)..(306): unsure at all n locations
nntaatagaatacaagngacatgtgtctgctncctagcctattgtggntctccagccccattattgtcgggcctctaccaacagcctatagctacaaacaactttgcttttcaaactcccttccgcttacatattttttattagcacacgcgacctatatattaagttggagtaccatatgnaccttacagcacataaaggaccatacttatgtggccacaagcacacattgatattctgaaagggaacctcagattggatatatatctgccttgaaatttacattaaataagtctcgaacaatgt

SEQ ID NO: 140200 - DNA, 172 bp, Glycine max
gctgaacaccacccctcactgttatctctatcatttgtagaaaccctgcttgaatcaatggactccttaagacctcagtatcggatggattgagtactcaaactatggagaggagtcataaagattgacctacagacgccagctctttcttatcatgactttggtgaatttt

SEQ ID NO: 140201 - DNA, 396 bp, Glycine max
cccactggcctgaagtagaatttgcatctgtcttcaactctgagtttatgctcctctaccgaccaccacacaaacatatgcccgtttgtgcactcatcttaaagcactgaacagcctgaagcttatgctgcgaacaattaacacagacctactcaacctcaacagacaaaccagccgcaacagaataattatgaccatctccacatcaggtactatcccggatggaggaatcatcccaaccttagatggtggaattcttctcaacaacagcagagacaactacgaacttatttcatagtgttgttggccaagcagaccatacgttctcaccaatcagatgaacacagctatagcccagaacagcaatagtgatgccctcgcaccttccttgagact

SEQ ID NO: 140202 - DNA, 238 bp, Glycine max
actagacactgaacaaccgggcaataagacgggagaaagaggagaaacacacgccgagactgccattcctaacgggcgagtccccaccaacccaacaattgtattactcgagcaataacaaaccgtcttacccaccacccagtgtccacaaaggccatccctatatcaaccacaaagtctgtctaccgcacttgcaatgacgaagacgacctttagcacagaccacaaaacacccaca

SEQ ID NO: 140203 - DNA, 287 bp, Glycine max
  unsure (1)..(287): unsure at all n locations
aaggggagaatgtgaatggatgtatacctgaatttgatgatgtccaagaacaaatctaacaaggcttgcttcaatgataaacatttgcttcaagaattattcaagaatgcttcaacaaacaaatccttggttcaagaattactaaagaccaagtcttgccttaaaacanaatgctttcacgacatgcaatgctctggttatcgattaccaagaagtgtaatcgattaccagaagacagggttgagaaatagctgtgaaaaggttctgaatttgaattttcacataaa

SEQ ID NO: 140204 - DNA, 326 bp, Glycine max
  unsure (1)..(326): unsure at all n locations
ctaggaggcaacccggntctttttattttcattgatcattgcatatagttaaagatccaacttgcgttgtgatatgtttgagtcaaatcatcaccactgttcttgcatcataaaatatgaggggtgtccaaagccttctttgaagctcgtggatgaaaaataacttacaaaatgtttcagttatccactctctcagtgcgccttgtacgctaagcgaatcattatgcatgcgctgagcgagtcactgctctcactaagcacatcaacccctacctataggctgatggggtctcgctatgcgaagtctgtgcgctcagcagcaaaaa

SEQ ID NO: 140205 - DNA, 274 bp, Glycine max
aggaagagctcagctaaattatcaattagaatgagtttaacccaacgttaccctgccacgtaatttatcaacttatgcatgtaatacaagcagtgaaatcaacaacctaggatgatacatctaaaaaattaatcatttaaaaatttcgaatcttgacctggagcatacaaagaatcttggaaaatttgttattatggcaccttgtgccactggatccttctaatataagatttccgagattgaacgtgatttgtgataacctgagcctgtctgg

SEQ ID NO: 140206 - DNA, 318 bp, Glycine max
  unsure (1)..(318): unsure at all n locations
cccggaccctaancgaccgcagctgcagcttgctcaataggtcaagaaggatatgcgcttcactgactcgtctcntcctgagatgaagccaccgctcaagagtgctgccactacagccctcgaggcattaagatggacatctcccggagcgaccgtctacctaggtcgacaagtatactgatcgtccacaagatatatggtgcccgcggtggacaacactggatacttccattggctgtctcgaaccagaaatactccttgagttgtatgccaatgcttcggcctacaaacagagggcgtgcgtgacatgagatcctg

SEQ ID NO: 140207 - DNA, 390 bp, Glycine max
  unsure (1)..(390): unsure at all n locations
ggaccanagcactgagctgcagcttatggcagccagggtagaggacatgctttattttaaattcaagtgtaggattcataatcatgaatctgccaactcactagttgcgacatccatctgttaggcgactgagttaagctaaccacacacttattgctgatatgacgaattgactggtccaaccaagaaacattctgctaactctgagagagcacaatgccaatacctgttcgaccatcaaacaaatatacaatgcaagaagttcatacccttcttgcatagaggaagcgataccgcaatgcccacctaatgaagttactcgaacggatcgatatattcatttgcccacaataaagataagatgtggttcggatatcttttgggtcccct

SEQ ID NO: 140208 - DNA, 292 bp, Glycine max
tgaaccttctatggacagacttgcaacacacttcatgggcttcaagaagaccaacgcatccggcaatttgagtcgacacagggcaggggcccctactttatattcctcacagctgacaagtggtagctcacccttgccaagaggaaggaagcaccactgcctattattcactgccgatacttctgatgccggaagcctcccaatgaagaaaggggactagactcatacctcggccacgactacgcctattcatagtctcaaggggagctgaccactcccctaagaagtttcg

SEQ ID NO: 140209 - DNA, 254 bp, Glycine max
accaacacgagccgcacaaaaagccggcatacttcatgcccccccagagcgggaacaaggcctccccgggaaacaaccaccctgttgccaagaaaccacaagacagacaccctccgactacaaaccggacacagcaagccggcggaaggacgaagcaccgggcaccaggatgacgaacccaaggccctacacccccagaaaaccagccaaaaccccaaccggacatcccgccagaatgcacaggaacaccctag

SEQ ID NO: 140210 - DNA, 258 bp, Glycine max
gcaccagcacccaatgcatgtctaaacgataactcgttccttcctctcgcactcgggagacgtcaaaatactccaatggccacacgaagctttatcatatgtgtcagctatcagagagaaacctgctgagccttatgaatccgagaaacaatgggcaaaagcagctcagatgctgacgggatcgaccttgatcaagaatgacgcccacaatactcacccccatattatcccttgggaaacactatgacataacgcacc

SEQ ID NO: 140211 - DNA, 411 bp, Glycine max
  unsure (1)..(411): unsure at all n locations
atgctcaatcatatttttatatgcatgtgaactaagaaccctcaaccataattaagctcaagctattgtgctagcaatccataaggcacaacacaccaccatgaatatgattgatgggatggctcaaaattctcccaaaggtgaactcatcactttcaaattgagcgttttaaactatcatgacatgtaagagaagaatcaaggatntcaagtcacaaaatgtcaagaacttttattttcaaaacaatcacccatttcttgaacatattctataattcacagaaaacatgcaaagtcgacatgccataaattaacccaaatattaactacaatccgacgaactaccacattacaattacaaaccacaaactagcaactaagacactccccctactaacacaattgcctcat

SEQ ID NO: 140212 - DNA, 258 bp, Glycine max
gcatttacaaaaactggtgtttatggcttttgattcgaaaacctacacattttagcctttccaacccatccaatgtatgcccacagtgattcttcagtcatgcacccgcattgattatgtcataaacttattggcgcagccaatgatgaatgttaaaacgttaatctatataaacgggattcacaggggactaatgaagttcttccactcgatctggccaactgcatcacgcctggccacggagtagtttattttttt

SEQ ID NO: 140213 - DNA, 51 bp, Glycine max
caccccccccgagatgttggctcgaccgaccaacacgggcgcacacaaaaa

SEQ ID NO: 140214 - DNA, 216 bp, Glycine max
ccgagagatggagaataccaaccgggggcgccgcaaccgaggtacttacaacttgagaaaggtgatggaacccactggttaagactttggataaaccagagaacggagtataaactgggcagtcgtgttaggtatcatggaatgacccccaaagatcctggggaaaatatcgacagtaaaagcttgtaataaggttgatgcggaaccattttaata

SEQ ID NO: 140215 - DNA, 304 bp, Glycine max
  unsure (1)..(304): unsure at all n locations
gtcacctgangcatgcagcttttatccaggcccatcttggaggtgatgtttctttttccatggcttattccttaatggagggagcctcctctcacctcttctcctttgtcttccgctgcatctccatggtgaaaaatcaccattgaaggacctcattgaagctcaaagatccagcctccatagaagctccacaagcaagcttccatcaataacttttcacacggatgtccgattccggcccataanttgtcgagaggctcgaaataaccgaagcacttgatacacttaaatggacataccatct

SEQ ID NO: 140216 - DNA, 376 bp, Glycine max
  unsure (1)..(376): unsure at all n locations
agcttcttatccaaggctcatcttttgtgtgaactccttcttccatggcttattccctagtggatgacgcctcctgtcacctcttctcctttgtcttccgctgcatctccatggtggataatcaccattaaaggacctcattgaagctcaaagatccagcctccatagaagccgcacaagcaagcttccatcaaagggtatgaattttaaaatccaatcctacagtttcttgaattaattaaattcggtattattgtgtctgtaattttatgtatttttgacacactaaatccgaatatatctgttatttcattcctttagttattttcgtcaaataaacacacccatgatanttcgattaaacttgtacttaact

SEQ ID NO: 140217 - DNA, 404 bp, Glycine max
  unsure (1)..(404): unsure at all n locations
acatgctagctatcatcgctaaggaccaagaagagttgggtctagccacggtccacgagcatagaatcgcggacgagtatgctcaagtatacgcggaaaaagaggctagaggaagggtgatcgactctttacaccaagaggcaaccatgtggatggaccggtttgctcttaccttgaacgggagtcaagaacttccccgcttgttagccaaggccaaggcgatggcagacacctactccaccnccgaagagattcatgggcttctcggctattgtcagcatatgatagacttaatggcccacataattagaatatcgtaggaaacttgtatggtctctcgaccttgactagatacgacttgctttttgaataaaatggattggcccatgttttactcaaaaagc

SEQ ID NO: 140218 - DNA, 328 bp, Glycine max
agcttcacaagacgatactgatcgaacatttcctaaccgacatcatgcagatatcgctcacggattgaaatgaaaactcaatagccgacatcggacgtgaagaagccccgactgatatttttcagcagacgttaagcaatttttctttaataatgctcgctgggcgaaaaaggcttttttttaccggaaaaaaaattttcttgtctcggcgggcataaaaaatttacaacgcaggtcggctaggcctctttgtgcgagctcaaccgaccttttgtttgggccgaaaccggcgtggtcccatttattcggccaagataaacatagccca

SEQ ID NO: 140219 - DNA, 234 bp, Glycine max
acattcttctttaagtgcatgataaaaggtatggagtcccaagtggaaaatataaggggattcccaagggaattacccaaaaaggactcaacgcaacttggggacctaagtcaccctttaaatatgttggaagggtgcctaacagcggataacaactatggatcttgatacaatggctaaggatatgacggggaccagcaaagctatggaggtcaagaaggagatttgacatat

SEQ ID NO: 140220 - DNA, 347 bp, Glycine max
agcttcggaagaaagtgatgatgttcattccctaaaggcagagcttgaaagagcccgggtagtcgaagagaagttcaagtccatagccatcatagtctgaaaagagtatgatgaactaagggacgtcaatatggccacagttgaagccttggaacgaagaggtgaaaggaatcatcacgggtcgaaggcatgatcttgaaggacgagctaaaggtttgccttatgtcgaaaagaaatttgtcccaacagttaagcgagactgaagggaatatgtgggccattatcgataagtgcaaagagaagcttattctagcggcgacttacgagctaaggctagaggatgagta

SEQ ID NO: 140221 - DNA, 291 bp, Glycine max
ccgtaagaggttgcccagaggtaggatgaggatagttgggaagtgggaacactgaagtattgtgccatattttcttttcccaaaattaatgtcactttttgtttcacattttctcattttatattgtgaatggccgtacaaacatttatcaattgttaaaaaagaaatgcatattgtgttgccgagagttactctcccctcccttgagaaatgcttcaattgtattgccatctccttttatttttaaagatacactgatctctcctaagagatttatatgtgctacaattt

SEQ ID NO: 140222 - DNA, 304 bp, Glycine max
  unsure (1)..(304): unsure at all n locations
cccccccccccacgatccttgactcccatttcgttaaaacacagccggaggattgatcgttcatcaggccccaagnnacgnacgctgcaactganctgacccctatataactgtaattttgagtgggtctcagaaccggaagaaagctttatccactacagnagaacattggcaccaacaccacaacgggtggagcgggaaaaggtgatgtgaaccttacggggcggaacgcttgatacacgctacaggattttggatgaagccactttcagtggaagaagaaaatcacggtagaccgccccag

SEQ ID NO: 140223 - DNA, 365 bp, Glycine max
agcttcccaagttccaactccaaacacttgtcttctgttcggtaattccaacacgacaaggaatttccctccgaggccattttcggaattcaccccactcccaatgacgtacgaagaccttttgccatgcctcatcgccaatcatttggccgtggtaactcccggaagggtgctcaaaccccctttcccgaagtggtatgaccctaacgcaacctgcaagtaccatgggggtgtcccggggcattccattgaaaaaagcttggcccttaaatacaaggtccaacatttaatggatgctggatggctgactttccaaaggatcggcccaatgtgagaaccaacccgctcgccaatcatggaggggg

SEQ ID NO: 140224 - DNA, 455 bp, Glycine max
agcttgtcataataacgcttactttcttttgttcccataatggatacatatgatcttcctctgaccggatgaatattgcaatatttggattaacaacataaaaattctgacaaagaaataaacaaattgagaaatgagatgataaggcaggaaggcaaaacctttttcctaataataataaagaaattcatattcacaacagaagcttaaaaaacatctcataggtagggtaaaaattttactcatattcacaatactttcaatagagttaaacatgcaacaaatgataatagaagctcatttgctattgctaggaaaaggctgatttcattatggcaaggaaacaagctccaggaaaataagaaaaggaaatatactctcaccagttgtagcctacataatgtaatataacaagcttacatgtatcattctcttaagatatcttcatccgctta

SEQ ID NO: 140225 - DNA, 471 bp, Glycine max
cttagaacgactgcggcatgcaagcttaaataggaatctgccctatggatgacttaattgttattaaaaaaaatgcataagtatataattattttacttcttatttcaattttcttgcctaaacttgtaagcaattttttaaattttaagattataaatgtttgaaatttattccgctttcttaattttaatcatgatcaactataactttaagtgaaagcatttttaaaataaatttaatctttgtctacaatcataagctagaaatttataattgatatttaaaaacatcaaatttactccaaagagaatatgagaagcaatttgttgcaaatcatatatttcattactctacgcatcattaaataaaaaaatcacttgctgtaagctttacctgtgttatgacaagctgacggccaagcactatacaatcccttgatataatgctttgaacttaagtgaacaaaattt

SEQ ID NO: 140226 - DNA, 264 bp, Glycine max
  unsure (1)..(264): unsure at all n locations
agctntatatatataaaaaaaagcttatttctatttgttgctgaaaaagtgataaaaggcatttttcttagaatagagaactccggccaccaccaagccataaacaatgtggaggagcatgtaagcttaaccagaggatgccactgtttgcggatgaatgttgtctattgtgcaacaataacaaggcaagggtgaattgacccgattcgccgctgaaaaaagagcctcaaaagcctcaagatggaagggcgttctaacctcgga

SEQ ID NO: 140227 - DNA, 410 bp, Glycine max
  unsure (1)..(410): unsure at all n locations
agcttattgtgtaaacactctntgagttatttatcacactntctatcaaaaatctattgtttgtgaaagtcaggagtggcttacagacaaaaagtacttgggtcttaatctcagggagagattaaaggtaatgcccggagtggcctaaagagtactcgttgtatccacaagtggcatagagaatacttggttgtaatcaaagaattgattaacaaaacctttcaagttttgaaggaaaactggatgtaccccaagagttgggataaatcaatataaaacctctatatgttttactgcttatgtataacataaggctacataaacacaagactgcattctaacaccaaacccaacatccacctatcccaattaatcataatgaaacaccccaagaatggggagatagataa

SEQ ID NO: 140228 - DNA, 336 bp, Glycine max
acctttctatgacaaagataggtttaatttccattgctgggagcctggcaaccaaatttccttgtaatgaaatatttccttactatctatttaaagcaatgccaatttttattatttctttcttgtgctttattgttactgtatgacctgatcatccatgcattagttttaggggttataccatgggaaatgataattctaaagaactgggaaagggcatctaaacaattcattgctagagataaagtgactttgtttttgcctctcgatacatattcatacttcatgcaatttactattctatgtttgcaaagggatttgagagacacaaaaata

SEQ ID NO: 140229 - DNA, 419 bp, Glycine max
agcttggtggtactatagctgcactaatttgttgttgtggtaatcaaatgcagatgcaatgcagtagaagggggtaaagacaatatattactacaattatatgaaactgactaggtaatactaagaacagaatattactagcatgaccaaaaataaaatagccgctgtgtcaaataacataacaattgtctcaaatataggaaaaaaaatactcctacgccatcattagcctttttacttattgctgtttttaaaaaaaatgttgcccatttctttcgaattgtggtgatgatgtcgatgtccaacggtgtgtcattagcaaaccactgcaagtattcataattgtaagttagtactgcaaatataaaaattcagttccaattgcactgaaatttatgcataccatggaccagtcactc

SEQ ID NO: 140230 - DNA, 387 bp, Glycine max
agcttgaattaaacttgatcttgaacttgttgtctcaatcttgaaatcattcttttggctttttgtcatcatctttttcatcatcaaaactacttgaatcaacttgattcgtcatcatgaagcttgcttctacacattggattccatagaagcctttagcaggaacacaattctaaccttatgagattccaatacacatcaacggggcaaaatgctcatacaactataaattacaccaaacaccttcaatacaatcgcacaatttcacacaacctaacttcacaaaccaaattcaatcttaatactatggcattcttaggagaaacaagccagtagaccatcgctaactcaagattagtctttatttttccaaatggatcaatcact

SEQ ID NO: 140231 - DNA, 256 bp, Glycine max
gcacgacaagaaacatttcttgagttattctccatacgctctgggaaagctgcctgataaaaaaaggacaaatcctaagctctcaaaatcccttatacttgagagaaaaaatcaaaagtgtggagtgagatatccggctataagacaatcacatattcagcgcaagcgcaacctcgcaacaaggcatggcgaatcccgagagccaatagtggcttggtaagacaaagaacatcgagttaaaagcaagcttacggta

SEQ ID NO: 140232 - DNA, 365 bp, Glycine max
tgcagcatgcagcttcagctgctcaatgctcagttgtttttgtaagggcaaaggcctgtatagcggccagcagaagagcacaaaccacaaacccttgcgacaagtacagatttctgattcaaggctagctgggttaccaagttgaccaacgcatccagtttgccttcaagcttcttagtttcagatgatgcagatgggtttgtagctacctcatgcactcctctaatgactatggcatcatttctggcactaaactgctgggagttggaggccatcttctcaattaaattctcggcttcaccaggagtcatgtctccaagggctccaccactggcagcatctatcatacttctcttcatattact

SEQ ID NO: 140233 - DNA, 461 bp, Glycine max
gcatgcaagcttctaatttctattactataccattttccttttattcacatctaggccattaatgagttaaccattattcgaccaaagaattttttctgaatcatccctattctttttagactttagcttaaaaatttaagagcttaggcacgctaagatatcctatggtaattgtcataccctaatttagtccggggactatcattcgctaaaattttgattattgctatctgaactgagctgcttgacaccaattgctgcacaatacaaaaggctttttgatgtttcggaaaagaatgtggaaaatacccaaaagtgtaaaagcaaatgactttgatggtttgatgatgatcatgatgatttgatgccaatgatgcaaatgcgctctttaagtttaaattcaagacaatgattcaagaatacaagacacaacattaagatgatcactacgtatttagga

SEQ ID NO: 140234 - DNA, 196 bp, Glycine max
ggaaaaacgtaatatcttcttctatatcccgtaccgagccatgtataaagtacccagaactttctacatcaccccccgccaccattagccaccacaaaccaggcggggtctccacaccgagaggaacccttcaaccgaagcggaatctccaacttggctcgcggtttcgggagagaacgaaaccctaatctaacct

SEQ ID NO: 140235 - DNA, 265 bp, Glycine max
  unsure (1)..(265): unsure at all n locations
aaagatagcgaaaatcctgcgaagagccaaaacacaaacacaatctccaaaagaaacaatataaaccattgcatttctgggaggctcttcttattatgtttggttatccgaaaaaacatgactttaagccaccacagagtgtgcgggccgtaccattgtttaaaacatcattggcttacactacaaacacgacaaacaacagggattnctatatcacaatgtaaccctgaaatcaatcacgcgttcttatctataaggctcaaac

SEQ ID NO: 140236 - DNA, 417 bp, Glycine max
  unsure (1)..(417): unsure at all n locations
ggacatcctgtcctatgattactgatggaggagctagagtggatgatgaagggatgtcatctgttctagcccttnttcttgatgccatttgtaagtaaaaagaactcaaaattccttaaaccaaatttaatcaagttaaaaaaacagaaataaaggctaaaactaacgatgggcgcttagcgggatatatctcgctcagcgcgtcctcagaaacataacatatcggcttagctagagccaaggctcgcttagcccaatggttgccgtgatgaaatgcgcttagctcaggaagactcggcttagcatgtggctttcaacacaaatatttttaagttacttgggctcagcgattcagcctcgcttagccataagtatctcaacaggaggatgagtgttcatccacaaaagatgaactcg

SEQ ID NO: 140237 - DNA, 311 bp, Glycine max
gcggtcgggcgatggtgcacaacaagttttccacatccacaatgcgcgcataaacccaccatcccctggtgcccacctccaactgaactcacgtactcccacgtaacccatatcctcggttctctcaacaccgggtccccatcaatcctcccaagctttcccaacatcaaaggaatacaacattcacacaggccaagctatcacaggcaagcaaaacagggcaaaggcagatgactctgcttaaaacaccaaccaacattacagcttttgtcacttaaagaccccagtaacaattccttcgatccaattcg

SEQ ID NO: 140238 - DNA, 186 bp, Glycine max
cgactgcagcagcaaccttacttacgaaaacattttattcttttgctatgggggatcaaaagaaaattaacccgggccatacgaaccaaagaacgaaaacccgcgggacttctccacgaacggcacaggaggaacaaagcagagaccggccgcacgagcccacaactgcccaaaatagtggcgcca

SEQ ID NO: 140239 - DNA, 356 bp, Glycine max
agctcctatataagctgttctcttttatttattaacacacagtgagctgtattcagaaaattagagtttatctctcttatcttaccgagagagattctcctaaatccttgagtgattcaagaacaccttggctgtttcaaaggactttcacaacctttgtgtgtggccctcgctggaaagaaagaatgttaccttcctttcaacatgacccctgtgttctctaaccacaattccagaaaatccacctttggccaaaatcaatttgtggccctaactcccattatacaccctccaattaagtgattcttgagcctcaactggatttcaaaacgagacatcttaccttcgtgtggaat

SEQ ID NO: 140240 - DNA, 427 bp, Glycine max
  unsure (1)..(427): unsure at all n locations
agctntattttaaaacatcttatttattttcaatcagcatgagttcaacgctcgttttcctataatatttcatgtaatcaactccttccggttaatatatttttcaatccataaaccttcttccaatttcatttttagtctttaaacaaaaatttaacctatcttaattcttacattgtttttcccatttaaccgtttaatatatatcacgggtaaagaattgatgcatgatcaaccaatccgatgtaacattcatgtccaaatttgtgttgtaaactattactagccccttatcattctcataaaagccgcttataggttccgaattttatttttacccactcttagcccttatttcttacacaaatcaccttaccctctccatataaattcttcaactcccgttaccctctttggtccgattagc

SEQ ID NO: 140241 - DNA, 447 bp, Glycine max
ctaagtgacctgagctgcaacttaatggaggctctggaaatctttgtataatggattataaattctgggtgttcattccatatgacaccaaataagccctggtttgaaaagttcactgagctatagggagggccagtgttacttggaaacaataagccacgtaaaattcaaggtattggatcaatcagattaaaattgcatgatgggattgaaaagattatccaagatgtgagatatgttcctgatcttaagagaaatctaatttctcttggcgaactagacagaaaaggttatctgttcagagatgaaaatggcacattggaggttatgaaggactcaaggattgtcatgaggggtgtgaagaaacatggcttgtactcattggaaagaggggtagtagctgggtcaatagcttcagttcctgtaagacacatgtcaagaattgag

SEQ ID NO: 140242 - DNA, 422 bp, Glycine max
gatgatatggtctgcaccgacttaaggtttataatgggtctaaaaagaggcaaatctaatcatcatgctctgataaacgcaaaaaaaaaaaaactagggcaaatgaaaagggtgacaatgagggaaaagcccatgctgggactgccattcctatacaaccaagtttcccaccaacccaacaatgtcattacttaaccaaaaacaaaccttctccttacccatcacccaatcatccacacaggccatccctaaaatcaaccacaaagcctacctaccggacttgcaaagacaaacaccacttttagcataaaccaaaacaccaaccaagaaatgaattttgcggtgaaaaagcccgtagaattcacacccaatccaatgttctatgctaacttgctcccatatctacctgataattcaatggt

SEQ ID NO: 140243 - DNA, 448 bp, Glycine max
  unsure (1)..(448): unsure at all n locations
agcttctaaactatgaacaagaaagaattcttgattcctcttgatagaccagaggcctccgatatcttaaaaagggggggctgaattaagacattccaaaccgtttcccctaattaaaaacaactatttcactttttaatcaagttatgaattcccttaatgacaatcttcttaaatattaattcaaatgaagcatcttggattatgaatattacgcactaataaataatggagactaagggaagagaaaatgcaaactcagttttatactgggtcgggcacacccttgtgcctacgtccagtccccaagcaacccggttgagagttccactatcttgtgaattgctcttacaaggtctagacacacaaggacaatcctgtctttgtgtttagagatcctttacngacaagagactcaccagctctttaatcccttgagaatgagaag

SEQ ID NO: 140244 - DNA, 387 bp, Glycine max
  unsure (1)..(387): unsure at all n locations
ttaatcactgagctgcacttgaagcaacggagcgttgtcttttgtttacccaactagccttgaataagaaatgctgtcttgccgcaagggtttgtggtttgcgctcttctgctgaccactatacaaacctttgcccttccatgcagcaacctggagcaattgagcagcctgaagcttatgcagcaaatatatacaatagacctnctcaacctcagcagcaaaatcaaccacatgagagcaattatgacctttccagtaacagatacaaccctggatggaggaatcaccctaaccttagatggtccagccctcagcaacaacaacaagcagctgcttctttctttcataatgctggtggcccaagcagaccatacatttctccaccaa

SEQ ID NO: 140245 - DNA, 407 bp, Glycine max
agctctaggatagaatacctacccgctggtgatgaataaaagcgcaaaacagaatcaaaaaatgcataatatgatgaccctatggctgcaaactcataaatcccgtgggtatggcttttgaaaggggggaaaaaaagtttttgaatgcaaaaacgtccgccctttcgtcacttttatattttggtgcaagggtggctcgcccaagcgagctaacctgcattttttttttgagaagaacattaaccatgtcccctcctttcttatgggttaacgtgttgcctaacttgaacttacttaagttagaaataagcggtgattacttatttttaacacaaacgaatatcaaaaaaaaactgtgaatacaaaggatacagggccgccttgcacaatgttctctgtttgttaat

SEQ ID NO: 140246 - DNA, 447 bp, Glycine max
ttaagtcgactgcagcatccaacttggcttgggaatacactcctttgacgtcccaaagctcctgacccccgcgacatatctccaagtaccactctgtggtcaacaataaaagcaggaagtttcacccttcaacacttcctcatctcaagcttgtaggattatggggtacccatcacatgtggtactaagaggcggtcgggcgatggtgcacaacaagttttccacatccacaatgcgcgcataaacccaccatcccctgttgcccacctccaactgagctcacgtactcccacggagcccatatcctcgtgtctctaacaccgggtccccatcaatccctccaagcttgcacagcaatcaagcaaaacaacattgaaacagcacaagctatcgtcaccaagccaaacagagcagaggaagaaaactctgctcaacacatcaaacaaa

SEQ ID NO: 140247 - DNA, 418 bp, Glycine max
  unsure (1)..(418): unsure at all n locations
cgactgcagcatgcaacttgacgactttgctgagtctatttacgttattatttattcggacaagtttgaatatgatgtagaaaaanatgaatgtgagcctttttcccctttgaaagacttgtaaaaaaaaatgttttaaaaatacttttaattaatatttgaattttatttttccttattagtatatatatgtgaggggtagagggtgtcacattagctgtttcttccgattatttaacatgcaccatgcaagtacactgaacaagtgcatcacacttgaaacaagctaaacaagtgctaaaattaattaatcatatagtaaacatgaggcctacaaacattcacctttctatgttgcttatgacattaccatgtagaaaaacaaataacatttgtaataaagagctcttatggtcga

SEQ ID NO: 140248 - DNA, 327 bp, Glycine max
gatcctatcccttatatgagtccgtttcttaaaagataatcttgggtgggttaccaagcatagagttgaaagtgcttcaactggtagggcttccacttgtagggttcaagctggaagggagcttttgaatttctctgggcgagcataggctttgtaatacattgaaattcataaatgaaacatccaactagggttgacgggtataactggatataggtccataatgactgaaccagaataaatcttgctgggacctctctactcttacctagttagaacaatgatgcaatggaattgtataagatttatcaaaatgccgtattaaag

SEQ ID NO: 140249 - DNA, 379 bp, Glycine max
cagctttgatcaatactagttacattttattctgttagggatggacaatgatgttttatatggttacttcgatcctgcggcatttgcccacacacaagcaaaacaaagcaatttcaaataaacaaaattcaaatctaaaaacccttttaaaattaaaaccatgtgaacgtcaatagagaactctgtaatcaacattcaacagccacacatacaaaggaaagaagctttattaaggtgtgaaaaccagataattaattgaaggaaaacgtacttcttggttagcgttatatcggcgaacaaagtcaaatgaatattgggtacaaagtcaaatcaatgcaaatgcataaagaccaatcgcaaaaataacttggacccataa

SEQ ID NO: 140250 - DNA, 421 bp, Glycine max
gatcttaagtcaccgcggctgcaacttggttaataatctaactttcttggatcgaggtttagtactttaggcttcagcataaaacacgagaacatgatcaattagagaaatatcttcatatgcatcaactcgtttgttagaaagacccaacgctttttacctattgttgtcaacttttaattgcttgcatttactactttttaacatagaatctagtttacttttgtttatattctcaattatcagtgttgttcacacaatgccctatttctgaataaaactctgtctaataagaaagttccctgagttcgatgcacggatcattccgttttaattttaaatacttggcgacccggtgcgctttccagtgtatcacttcccctctgatataaggggtttataaatttaagaaaaaggaact

SEQ ID NO: 140251 - DNA, 459 bp, Glycine max
agcttcccttcacgtacgtagagtatattccttcttctccaaacatatatataaatccgtgaagtcattgttttccttactaaaatatgatgttgctgaatcctcagtctgaggagctattaaattaatttctatctcatttgtttgcgttgtatattaaattaataagttataaatatttataagctctagagcgagttgtttgattcgttgtcccttgttccaaggtttgattagctacaagccaattacttgttaactatcttatttatataattaatctctacgtttcgagacggcattatttatgctttagtttgccgtcccgcttattcgtctgtaacagacaataaataaattatacatctgcatcaaagtgggtctcaatcaaaattacatgcatagtcctcactaaccaaaggactagcacttatatccttgacaatataatgccaacta

SEQ ID NO: 140252 - DNA, 283 bp, Glycine max
cttgaagagcaatgacagtggaatgcagaaagaggaaacgtgactggagaagccacttcaggaaaagaaagtcaagaacaagttcaccaccataggaagccatggataagagctagaacggtggacaagatgaacggacggagagggagagaaggggcccgaacatcatgcctcgaatgagggctaaagattcgaagtgcaacttctcatatgagcaaaggagaaataatgcacacaaaatgcctctatttactacctaagtgtcacacgaaatgggacggaa

SEQ ID NO: 140253 - DNA, 411 bp, Glycine max
agcttcaacattcaatgtcaagcgtctctatatttacgggactcaatcagacatccgagtaaaaagttattgtcgtctgaattggctcaaagcttcaacattcaatttcgagggtctcgatatattacgggactcaatccgacatccgagaaaaaaattattgtcgtttgaattggctcaaaggttcaacattcaatattgagcgtctcgatatgttaccggactcaatcagacatccgagtaaaaagctattgtcatttgaatttgctcaaagattcaacattcaatttcgagggtctcgatatattacgggactcaatcagacatccgagtaaaaagctatctgcgtttgaattggctcagaggttcaacattcaattcgagcggttcgattattaccggaccaatcaa

SEQ ID NO: 140254 - DNA, 466 bp, Glycine max
ttaagtcacctgcggcatgcagcttgatgcaacatttggaatgttttgtaacaacgagatgatgcgctccatgagaggttggatcaaatggagaatagagatcataatgaagaagaaaggaggagaagagggaatgatggtgttcctagacaaaaccgaattgatggtattaaactcaacattcctcggctaggttttttcgttcgagctcaaccgaagttgtgtttcggccgacaccggcatgttttcatttgattggcaaggaaaacattagccaacctcggcaaaaacaaatgcaggatacaccgatactgatcgtaataaatgctagccgacgtcggccaggataaatgaccgatcgaggtttaaaatagaagcatcaccggattacgcggatcgaacattttctaatagatatcatccaaatattattcagggattgaatacaacatacaatagacaacat

SEQ ID NO: 140255 - DNA, 397 bp, Glycine max
  unsure (1)..(397): unsure at all n locations
tgcagcatgcagctngaaacctcacatgggcttggttatccatacctttgatgacattatgagagctactgagaatctcaatgcgaagtatattgtagggtatggtgcctctgtgactgtgtacaagtgagctttaaagaattcccggccaattgcaattaagcgaccatacaaccagcatccacacaactcaaggaagtatgagacagaacttgaaactattggcaatatcagacacaggaatcttgtcactttgcatggttatgctctaactcctaatggaaatctctctttctatgactatatggagaatggctctctgtgggatcttcttcatggtaatattcactcaccttgaaataactccttggaattttctaatgtgatatgaaatctt

SEQ ID NO: 140256 - DNA, 407 bp, Glycine max
  unsure (1)..(407): unsure at all n locations
agcttgcacatgtttatgtatgaatgctctttcatgnggaagaacacaaaaatcaattacatttgcttcttaaggctgcaaacttttctcgtagtcaaattgatgtcattcctagaggttagtctaatgactattgcttttccttggtatttataagataaactagcttagtttgctttaaacttgagaaagtaatatctaaatataatattgactatgaaattgcactttctgtttttcataatgctgctcatttgcccatttcttttgcttttgcagtaaaagtatttggacatgcacatgttttattggctctgatttctttcctctttattattatttacttcataattaaagtttaaaatccaatttgaataccatttataagaataaattaaaaaccaact

SEQ ID NO: 140257 - DNA, 279 bp, Glycine max
agctcttatggagactggatctttgagtcatattaagtccttcaatggtgattttcaaccatggagatgtagcggaaaataaaggagaagaggtgagaggagacctcctgcactacggaataagccatggaaggatgagcttcaccaccaagagagtgccttggataacaagcttatagaggaagcttcaatggaggaaaataatgagagagagagaggtggggagggggggaggcaccacatgaaggaaatatatgggtgagatcttaaacttaagtt

SEQ ID NO: 140258 - DNA, 463 bp, Glycine max
agcttctatagaaggttcgttcctaatttctctacaattgcatcacctctcaatgagctggtgaagaagaatgtggaatttacctggggtgaaaaacaagagcaagcctttgctttgctcaaagaaaagcttactaaggcacctgttctagctcttcctgacttttctaaaacttttgagctagaatgtgatgcctctggagtgggagttggagctgtattgttacaaggtgggcaccctattgcttattttagtgaaaaacttcatagtgccaccctcaactaccccacctatgataaagagctttatgccttaataagagccctccaaacttgggaacattaccttgtttccaaggaatttgtcattcatagtgatcatcaatcacttaagtacattagagggcatagcaagttaaacaagaggcatgcaaaatggggagagtacctagagcaatttccat

SEQ ID NO: 140259 - DNA, 458 bp, Glycine max
  unsure (1)..(458): unsure at all n locations
agcttatttgtacagatgagaagatcagttttgattttgactctttatagngatgttctctccttcagccattgcttgagctaatttcttaaattcttggatgtatgctgataatgtgtgaggaccatacaatgttgaagcagcctgcaaatttttattattacttattagcaataatttacatctattttctctcanaggtaaagcctaaaagtatggtagcatgtgctgctttcttatgcctgatataatatatcagggtaataacgaaagcaagtgcatgtttggcaaacgattatttatgggaataattactctttttttcttccaaaatctctttttgaatcatttcttcaaaataaactgaacacacacattgaattagtcctagcttctatttattagacatntattgacttaatttaaattaaccttctaccactattgtagtataataa

SEQ ID NO: 140260 - DNA, 260 bp, Glycine max
  unsure (1)..(260): unsure at all n locations
acaacatgcttttgcttgaanggtttgattaaagcctggctttcaaggtaaacatgagtgaacaaatactgatgcctcggtaacacactttcataccattactacattcttctgcaaataatggagcttcactcaccaaaagccgttattttcagataataactatgtgaatcatttctttatctggaaaggtccgaaagcgaaaagggatatctttaccacccttaggataaaatgtgacggctaatattcctgatgta

SEQ ID NO: 140261 - DNA, 413 bp, Glycine max
  unsure (1)..(413): unsure at all n locations
cccccccccgccgacctaatgatgacggataaacaaaacaaaaaaagaagggaactgattgtggcgtccaggcaccctaagtcacctgcggcatgcgaaccttgactccaagagaaaccatgagttcttttctancccacccacggtacaagccgaaggaaggccctagtgatccacattatgcacgcgggatagcatgcactaagaagatgggccaaggggagaaatttactattcattgaggataacccaaacacttgtactgagacacttccgggatagagagaaacactatccttgagaagacatgtagggggattataccttgtgaaccgtcattctggctaaccatttcatttgaagtacaccttggtttgcctctttcatgaacctatgacaacggtgaacctgaa

SEQ ID NO: 140262 - DNA, 421 bp, Glycine max
agcttccttaaaaagatacctaaagaatcttgttctttactacacatacctctctaatagcgaagctcacctccttgagatgagaagctagagcttaactacacaccccctataatagctaagctcacccccatgacaaaaaacatgaaaatacaaaaaaaagtccttactacaaagactacttaaaatgcccccaaagacaaggctaaaaccctatactactagaatggccaaaatacaaggcccagacgaaggaaatacctattctaatatttacaaagataaacgggctcatacttagcccatgggctcgaaatctaccctaaggctcatgagaaccctagggcctttccttggatctctagcccaatctacttggaggcttctacccaatgcccttgcggagtaagaatgcatcatt

SEQ ID NO: 140263 - DNA, 432 bp, Glycine max
agcatgaagagcaaaaagacttttgtatttatttaattataatcttaaaaatatgagaatttaacctaagtaataagtttcaagctattaatctatataaatcactcttatatttttctttttatatttaacaggttcagataataattcacaatgtatcacattttcaggtggtgcattcttatttattttgctatttccctcgtcatttgagttcaaacttccttttactttcaaaacaaactaacctttttcagtacgtaacaccctaaccctatcttaaggaagatccaatcgcttgaattctgtcgttgtgtattttaattcaaatataattctatcaagaaaatatctttgttttagtcccatcccgtgcggactgtgtgctccctaaagagaacataacaatcttgttctctcgtgtaaatatta

SEQ ID NO: 140264 - DNA, 402 bp, Glycine max
  unsure (1)..(402): unsure at all n locations
agcttgcctgagctagctgggctgtatctctctcctttnttctcctataaataggggaaagaaggcagagcaaaaatgtccaccccttctggtattgaagaatcactctaaattagtgagaaaatctgtttccatgagaaaaatccaagctgaggtgcttccgtaacgctttcgagaagtttccgtaagcgattttgtggagattcttcaccatgcttcatcgatcttcggtcttcaaccgggaagttcttgaaatcgaatctttcaattcattctatgcacccttaatggtccctacttgtttcgcgtacttttattatcatttcagttggtttcccgacccccttttaacgtgctttaaccgcttatttaagttgttttctcacctcataaatgataaaa

SEQ ID NO: 140265 - DNA, 378 bp, Glycine max
agcttattgaaaataactctgataatattcattctttttccaaatgcttgcgcaagttcttataccataagttaagttcaaataagtggtgaataagctcttcctaatagaccctaaataatacatgtacagactcacggtggaaaagtcttttacactatcatctaatcacggatcatcatgtatgataagcccattgacttttataataaccaccttaaaagtcattcaaaggacaagttcttattgtgtgatagcataaaaactttaatattgacagcgttgatctattagaactctttggaatctcgtgtacctctacatttggttaaacaaaagtgtttttctaaggtctgggtactggcttcataaaggaaa

SEQ ID NO: 140266 - DNA, 457 bp, Glycine max
  unsure (1)..(457): unsure at all n locations
agcttgatgtcattcanaacacactatgtttacttaaatgaagactaaacattcattggttatttatttgtattcattatgcgatataattcgttgtaacccgtcactaaccaattaatattatcaactactcgtttggttaagcaaggaaattgttggtccaacaaaaatcatttacgcgtacaacatacatcattgtcataattgacaacacataatgacatgcatgcgtgttacagtttgagcgtgacaacacattggttgacttcagtacacattttgaaactagcagtcgctcaacaacacattggttgacttgactacacattagcgacaacacattggctgacttgactacacatttacgcgtgtctatttttttgtaaacaaagttaaacaaaggctcggtcacaaccatctatatatatggcagactaggctactaaatcacacatta

SEQ ID NO: 140267 - DNA, 458 bp, Glycine max
ttaatcgcctgcagcatgcaacttgatggtgtcgaaagaaacatcttgttttcatcatcaaaaagggggagaatgcgaatgtatgtatacatgattctgatgacgccaaagaagaatctaacacggctgcttcaaatgataagcatttgcttcaagaataatccaagattgcttcaacaaacaaaggcttgtttcaagattcactaaagaccaagccttgccttaaaacaaagtgctttcaagacatgcaaggctctggtaatcgattaccaggaagtgtaatcgattaccacaagacagggttgagaaatacctgctgaaaaaggtcttgaatatgaattttcaacatggaaacgactaccatatgtctgatatcgaataccagcaacgaaactttggaaattcaaaatcaaaagtcataacccctcacattataactggcggaacgattacaccaa

SEQ ID NO: 140268 - DNA, 410 bp, Glycine max
agcatgcaagctctgccttcaatatcagcgaagctctagtatttttatgttggtgatagagcgaggcatttgttgctcccattcattgggaagctctttaaagaggcgtgcatctgtatgctttataaaatagaacatatatgttagccacatatatggatatgctacttattttattatgtcctattttaatgggcaattactgattgaatacatgtcacatattgtagcaatgtgtatcaaccattactgagattgatccaacactgatgggatccatcacaccgcctaagcacatgttgccattatctaatagtcaagtggatgaaataccatgtgaagattaatcatccatacaactatgctcaactactctgggcacacagcctatcatgatcgaatgatcacca

SEQ ID NO: 140269 - DNA, 369 bp, Glycine max
  unsure (1)..(369): unsure at all n locations
tcaactatgtggaaccgggttataaacaattgtgtttgtcatgtttgccacgtgaaaaacatgatgcatgtgaacgaagggggtcaagatttatctgcgatattcacagcacttgtaagtgagatcgatcaagatattctcttgagactttctttacctagtcatttctgagcattagtatttgatgatggcagtcactattacatgaagtggaatctactatgactttgttctcatttcagcgtaatctggtgcttgggcgatttctcacttattaaagtgatcaatctttatttatcacgagattatggccttgtgttnagatttgtacaaacattgtcaaatccacatataatgtggaagttgctt

SEQ ID NO: 140270 - DNA, 448 bp, Glycine max
agcttaagtgcccaagatctgcgttactttatatttatgcccaaacacatttgtactattcatgacacattttttgcatattttgaatgtcaaagaatccaaaataaatatcgtgcactagttccatggacaaccacctcaaaataggagtacaaaataaaaataaaaactaggatttggagcctttcaactatgcttaagttcccatgttctgcattattttaagttatgtccaaacacgatgataatatccgtgacacattttttcagtactttgaacgacaaagaatctaaaaaaatatattcggctccatttccatggacaaccacctcaaaattggagtgcactataacaaaactacagaaactatgatttggacccttgcactattcttaagcgccatgttctgcttttttttaagtatgccaacacattataataccggac

SEQ ID NO: 140271 - DNA, 360 bp, Glycine max
  unsure (1)..(360): unsure at all n locations
agcttgaagatgcataacccattatctttctatactnggaatgcgcctactatcattgtcatcattttttctccgtcattgaggtgccactggaactgccaggtctccacctttgggcgtattcttttgaaaaacacgcgccccctttttgcacatgctcagtagatgcatcctatccgaaaacatcatactgacactggctaacgaaggcaaccattaggtccttgcaagcatgggctcgggaaggttccaagtaagtgtaccaagtaacagctacccccagtaagactctcttggaaggaagtgatcaacaatntctaatcttttgcgtatgcacccatcttaccgacatacatcttt

SEQ ID NO: 140272 - DNA, 335 bp, Glycine max
cctaaaaccaacaacgacaagcacctatgccaaaccattccataacccaaatcatagaatgtgctcaaaagccattgaggcatttcaccgagcacttgaggggtgcacctttaagcatgaaaaaggggggaatgggggcaatgtgacatgcacaattgcttcaaaatgcaccataggcctaaggccatcccctacaacctcccaattcaacaaaaaacaatcacaaattcaaagataaatgcctcacagatttgagcaagaatgaacaaagtgatggtgcacttacttggatggagtgaacaacgatacccaaatggaaagaaaacacaaaaatg

SEQ ID NO: 140273 - DNA, 396 bp, Glycine max
agcctttgcttgtttaagaagttctatttagagaaagggccacgttccaaagagttctgagagattttgttgtgttaagatctgcagagatgagagctcgaagcggaagccattctgagaacttgagatgagtttgtgagtgattgtgagatcctagaggtgaaggagacatcctcaccacttgtatttttgcaatctttcatcttgttcttctctgtattgtaaaggaggtttccggaccatggaaagctaaatcctctgttggatcttccctgtaggtacctgatgtaaatatatttctatctatgtaatgatggtttgtgtgtgctctatgctatctgctttcattcgagcatgctttaccttgatcacatgatgcatgctttgttacggcat

SEQ ID NO: 140274 - DNA, 449 bp, Glycine max
  unsure (1)..(449): unsure at all n locations
agctcgctaacccatggatagttttaatatctcccacactttttggggtgggccattcttggatggccttgattttctcagggtccacttggacctcatttntaccaactacaaaccctaagaaaactatattatctacactaaaagtacacttctctatatttgcatagagggtgtttttcctaagaactgaaagaacttgcctgtggtttagccttccatagtcatcacaaatagaagaacaaaaaaaattgcccaagagagagaagaacagagttgaagagatgaataaatacaaagaacaagttagagaaaaagagagagaagagtttgatctataacttgcactagaagtttctcaaaatgggtttttttacaaaaatgactgtactaactaacttactaactaactctgaaaatatactaagtagaaaaatatatactctaac

SEQ ID NO: 140275 - DNA, 380 bp, Glycine max
cacttaactggccccttatctagatttttcactaccattttggatcggtggcatttatttcgcctgtattgctatcaaggaccaccaccgatcctcagaacagaaaccctaagcataatcactgattactctctttcggggacgtcaacactgagggaagaataagaagaaggagaatcatcgttccctctgttctcgatacaccaaattgctgaagcagaagtccgaattccgcgctctgtcttcaaatgacctctaacttcgcatgggcaggtcttttctctctctctggttgacccaactcacacttatgtatttaacactcactcacactatgctaggtcgggggatgatcttaaatggcgggggaagaaggacca

SEQ ID NO: 140276 - DNA, 377 bp, Glycine max
  unsure (1)..(377): unsure at all n locations
agcttgctaacccacggtagcttctattatctcctacactttctggggngggccattcttggatggacttgattttgtcaaggcccacttggaccccatttttaccagctacaaaacctaagaaaactatattatctacacaaaaggtacacttctttatatttgcatagagggcggttttcctaaggaccgaaagaacttggttgagataggctaagtgggcatctaggctcctactatacacttaaatattatcaaaataaacaactacaaatctacctatgaaatgcctttagacatgatgcataagcctcataaaggcgcttggtgcactagtgagcgccaaaggcatcactatccattcctataaaccaaac

SEQ ID NO: 140277 - DNA, 162 bp, Glycine max
cctgagatgcaagcttgcacccagctcgccagtgatcttggttgcttcctccacaagcagcagccttttggaggaatcttctggagggtccaagtgggcctggttgctattgcacccccatttttactacgtacaccccctgccttctttttggagattcct

SEQ ID NO: 140278 - DNA, 386 bp, Glycine max
  unsure (1)..(386): unsure at all n locations
agctttgcggatttgagcctcgccaatgtttggatcgatgagggtccgaaaggaggcatatctgatcatcctactaggacgactgacaatactggggcaaatgtatagggtgagaaagagggataaacccatgctgtgactgccattcctatacggtcaagtttcccaccaaacccaacaatgtgattactcagtcaatatcacacctcctccttacgcaccaaccagttatccacataggccatccctatagtaaccacatagcctgtctaccgcacttccaatgacgaagaccacctttagccaatccantataacaccaacacagcggaattctgcagcaaataagctgttgggttcaccccaaactccggtgtcatatgcta

SEQ ID NO: 140279 - DNA, 350 bp, Glycine max
tttcataatcgaatatcgggaaagagtctaccatcaccattatcatctccctttccatcattggcggagccacttgggctgccaaatccctccgactttgggtgtattctttgaaagattcgtgcccctttttgcacaagttctagagttgcatcctatctagaaccatatcgaaattggactgatactgcctaacgaaggcaaccattaggtccttccaagaatggactcaagaaggttccaagttagtgtaccaggtaacagctaccccagaaagactttcttggagaaaatggatcagcagttcctcatactttagggatgcccccaactcccgacaatacatcttt

SEQ ID NO: 140280 - DNA, 449 bp, Glycine max
agcttgatgatcggagagagaatcatgtgttcattggctatgatgcaagctcaaaaggctacaaattgtacaatccaaacaatggaaagacaattgcgaaccgagatgtcgagttctatgaagaaagcacatggaattgggaggagaaagaaaacacttatgattttttcccgtattttgaagatataaatgaagaagccttgactccaaatgattcaacttcagcactttcaccaaccccttcaacccatgaagcctcatcatcttccgaaaggagttcaagtgaaaggccaacaagaatgagaaatattcaagaattatatgatgaaactgaagctataaacgatttgctgtgtctttttgttgatagcgaaccctctaactctgatgagacaataaagacaaaaggtggaaccaaccattgagaaaacaacacttgggagttatca

SEQ ID NO: 140281 - DNA, 380 bp, Glycine max
agcttagctacacacacccatcttatttctaacctcacctccttgagaagcttccttgagaagctagagcttaactacacacacccctctaataactaagctcacctccttaggaagagaagctagagcttatctacacacccctataatagctaagctcacccccatgacataatacgtgagaatacaaaaaaatcctactacaaagactactcaaaatgccctgaaatacaaggctaaaaccctatactgttagaatggccaaaatacaagggccaaaagaagaaaaaaaaacctattctaatatttacaaagaagagtggacccaaccttgacccatgggctcaaaaatctaccctaaggttcattagaaccctaag

SEQ ID NO: 140282 - DNA, 408 bp, Glycine max
agcttgaagttttggacaatgctttaattgcatatacatgagtcatatgaatgcttaaagttgtttggattgaattggcctaattgttcggttaaacttgttgcactagggtgggtacattgcacatgaattgcaatacaatatcaaattctttctttcaaaataataaacactgagttgtgatttttattagttgtatggtaacacatacaattcgtgaaaaccacacaaaattgattgacttattggttgctatacttgggataactaaaataatatggttatgtatctcatgcaaaatatttttatgctaaattttagttggatgtgcctctcacgggatagctctaaagacgctctctgctataagggctatgaaagccactgatgtgccatcattttccttta

SEQ ID NO: 140283 - DNA, 210 bp, Glycine max
tatatcagaatatcgcccaatcaatagttaatgtgcaccccaattctgactgagggataccagataatagcaagtcttacatatggtaactaagactaagcaatcacgtataagaaatataaattaagctaaaacgagagggggagacaacttacaatgtcactctctaactggaacaagtctccgcacggattacagaagcgcccactc

SEQ ID NO: 140284 - DNA, 357 bp, Glycine max
tgggaaaaacgatcagctcaacagataaaatacccatgcaggaaaaaacctattagcacatttttcctaaagcaatcagaataatgtattactgaaaaacatgcactggacaaaaaacaatgagctacaatgtacttcatcaatcaatctttgacgtcaggaggtccaaattcggatgtgctttctgtgattagtggcaaggcacacctgtctttttctgtagttaatgaccccacgcccatctggttgggggcatgaatgcatcaatgcactaagcgtcctatgctaataattaatcagctaggagagctctcttcaatgtagaatgcgctcatgttatataatggttacttttca

SEQ ID NO: 140285 - DNA, 450 bp, Glycine max
  unsure (1)..(450): unsure at all n locations
cagctgcagctatcataatatttatattngattnttttcatgcccctgatatattgtgcactngccataacaagcattattcgtcaccatgaaacagagtaccttgcttctcttgatgttctgaatttgtctttgtgagctagggtcttttcgtctttctattgtaatgatgtgcacatgatttactaatgaacacaacttgacaggcatcatatctaaaccttcctgattctactttcaagggaaccatggttatatcatcccgcatttttttatattctaagcttcagatgtggcatttctaagaaatccatggctcttctcgattccattcaagcaatccttgtcctaaccttttctataagcatcatgtgatgactgagaccaactcatctagatgtnttcttttatcctctactaactcgataattcatttattgtccatcatgt

SEQ ID NO: 140286 - DNA, 334 bp, Glycine max
  unsure (1)..(334): unsure at all n locations
gagcagcactagaagggattttacaaggctgttaagccggttggggtcttcactaaaaggtcttgaattaaagtctttttgacccatttaaggatgtgaatgacagtgaactgcttgatgaagaagacatggttngttgttaagaggacaccaatgaagagcaagatgatggggccaatgtttangtcgtactttctgtatttttaattttattgtcatcttggccttgtaaatctgacaatgtttttctttgttcaatgcactttgcttttgctacctatggaacttgctattgtattgattattcatgatagtatactcttgttaatacaat

SEQ ID NO: 140287 - DNA, 400 bp, Glycine max
  unsure (1)..(400): unsure at all n locations
atctgatgcagctaggggtcacatgcactganaattgttttatgcacggctagggaggagaatanggcactgtttggatagggaaatcaaaaatcacatgcatgcatggcagctttaagagctaggcatctaggaggtgaccatacagaggtactttaataatggtgtataaatttgcgtacgtagctttttgctaaaaaatttctttaaatagagcaaacttcaatcatactttgcacttacataaatntgagactgaagagagtattgtgaaagaggaagaaagagtntgaagtttattctatataaggatgtttatatntattcattaaagtttcttcattttgttattatgatgacaaaattttatttgacgtacaatatatggtagaatgaattg

SEQ ID NO: 140288 - DNA, 444 bp, Glycine max
  unsure (1)..(444): unsure at all n locations
agcttctaaactntatactagaatgaagctcttatgccacttgntagacaagtggccttagatatcttaataaggggggttggattaagatatagcaaactatttccccaattaaaattctatttcaatttcaatgcaagttgcaagttcccttaaaaatgaactcttaaataatgattcanatagaacaatctgaatacaaatataaatcaataataaataaatgagtttaagggaagagaaagtgcanactcagatttatactggttcggccacacccttgtgcctatntccagtccccaagcaacccgcttgagagttccactatcatgtaaaatccttttacaagttctgaacacacaaggacaatccttcctttgtgttcaaatttctttacaaaaagagaccctcggtctcttaatcccctttgagaatttagaaaga

SEQ ID NO: 140289 - DNA, 447 bp, Glycine max
  unsure (1)..(447): unsure at all n locations
agctngaagaactatctggaaaggtcataccctttacatggaactctacttanttgaagttgtactacaattaactcttgtaaaagttgtgtactctntttcctacctcgactttttatctataaaatgtgaaagggttttttctaagaaggttttaatgaggcacacctaaacatatactatcaatgaagggtgtttctcaacaattatacttgacatttcatttttaacaattcccttctaaataacctctncaactgaggacgaactcaaaatgatatcataatntccctcccaaataacctctttgcccgatgacgaactcaacaataaatcataagttccctctcaataccttcttcggccgaggacanactcatcatattaattaaaatatattgacatcttataagcaagtccaagcacaaacactcatctatatcatag

SEQ ID NO: 140290 - DNA, 402 bp, Glycine max
agcttcttttctctaccacttgtcatccacattctgatgggcaaacagaggtagtcaataggtctttatccactcttttaagggctcttctaaaaggcaaccataagtcttgggatgagtatcttcctcatgtagaattttcctacaataggggggttcatagaaccaccaagcaatccccttttgaggttgtctatgggttcaatcccttaacacccttagacctcattcccctcccacttgacacttcttttatacataaagaaggggaatctaggtcagagtttgtaaagaagttgcatgagagggttaagacccaaatagagaaccaaacataggtgtattcaactaatggcaatagaggaagaaatgagctagttcttaatgagggggacctaggtt

SEQ ID NO: 140291 - DNA, 382 bp, Glycine max
  unsure (1)..(382): unsure at all n locations
agctntaagctncaaactagcataagaatttatttcactctaaaanataattggaaacaagataaaatttataaatgactagcatccgattgctacaactattctccaaanaatattaggaaaaataccatcaaataattattggtaaaaatatttcaaatttaggaacattaaccacttatctggttagtggttaataaacaactacctacagacctcattaggataatgattagtataaataattgttagtactcaaggtttgatgaatatcataatctcaaaatatttagtctttatcctcttctttttcccccctttatatatataattcccacaatttcaacagaaaaatttaatatccaagaatatattgactact

SEQ ID NO: 140292 - DNA, 440 bp, Glycine max
  unsure (1)..(440): unsure at all n locations
agcttgtatcntttatgatgaagcagccatcatgtatttttcactaggtgaggctagctacataaatcaaaagacaccattggtttctatcttgaactaaaccttttgctagtccatttagataanatataaatataaaaaaaatccaggttttcatgcctactctagtcatgatgatcaagttttaggtaatgaaacacaaataactgttaatattttagagagaactaaataagaaaaatcctaacaataaggggaaaaaaataattaggaaaatcaagagatgtacacattacagatgtacaagaaagcaggatagtgagacccttagatcaacaaaaaaaaggatatttagatttccaaatgtntttattatagggtgtaggagattcagattccaaatggttgtgcccctgatgtattctatgagaccatggcag

SEQ ID NO: 140293 - DNA, 231 bp, Glycine max
  unsure (1)..(231): unsure at all n locations
aaacataatcaaatagatattaagtatttacatcagctgttcattagaaatcctcaaccagggtgtntagccaggcattacaaagaaaccctaacaataaatgagatttaaagcagagaattatagttcgttacacaagaaggattcctcctcctcttctcagcatctcacactcactctccaacgaactaatctctatcaaattacaaaacccagacttcaatgcacaag

SEQ ID NO: 140294 - DNA, 371 bp, Glycine max
  unsure (1)..(371): unsure at all n locations
tcaaatgggcataacttttcacacggatgtcccattccggcaaatcacatatcgagacgctcataataaacaacggagctatgagaaatttatggtcaaacttttcacacggatgtccgattcacgcgaattacatatcgagacgctcaaaattgaacaacagaagctctcgagaaattcaaatggtcataacatttaactcgaatgtccaatntaggcgcatcacatatagtgacactcgaaattgaacaacggaagctctcgtgaaatcaaatggcataacttttacactgaggccgattaggctataatatatcatatgctcgaaataaacatcggaactctcgcaaattcaatggtctaactttcca

SEQ ID NO: 140295 - DNA, 395 bp, Glycine max
  unsure (1)..(395): unsure at all n locations
caagaattactttgatatgagacagtgctaaacaatttaggatgagagataccataatgaaactcatgatttcttcttcgatgaatctaactatgagatatgctagaaactggtagaaaataaattccaaggtaatgaaagaatgagaatagggagttaaaaacctttagtacaatatcaataaaaagaaaaaaaaaaacaaattaaaggtaatgattactcacccaaatagaaaatgttagacaacaaattcaaagggtaggaaagaatgtgagtaaggcagtttaataccattgtgcttacaccaagtgaggtgcctagttcctgcangtgaatgatacctttactttatcctcttgcaaaaatctactacatccaaaattagcaaaataaat

SEQ ID NO: 140296 - DNA, 409 bp, Glycine max
  unsure (1)..(409): unsure at all n locations
gcttaataagatcatgttcaaacgaaacacatatatgcaacctagtttagccttatactaaaaaaaggaacaatatacaaaaatcgaaacttaaaaattaaatcaaaaaagaccttgattctattagaaacatattgtcaaacacttcataagcaaaacaaatttcaacaattaaagtaagtaaaagcaagactaaaaacaccagaaaaatatgaaacatatatcaaataaaaatctcataacgaaggtggtagcgcaacggcggagtgggatcgacgaagaggggggaggagaatggtttggttggagataatgcattacgacgatagtggtgcaacaatgctattngttggtggtcgaaagttggtcacggtggagagttggtggttatgataatgcaatgactttt

SEQ ID NO: 140297 - DNA, 405 bp, Glycine max
  unsure (1)..(405): unsure at all n locations
actgcatntgggcatctatnttgactttcctacgctgtctctacatacacaaaatagccccaccatcccaaattngcaaaatcatattcattcatcatttggggcattcaccgagcacttggtgagcgcatgtttgaacataaattgcaagaggatggggacaatgtggcatgcnccattgcttcagaatacaacctaagcctaaggccttctcatccaaatcctcaacccaagaaaacaaggatcaaagcaaaccaaaactgcctcacaaatataagcatgttctcacaatttagagtaccaaaagatgaagaaaacacatcaatgggaagcaaaaaacatcaaggatggaatacttgctcgttggagtgaattgaaacaccacaaacgaaagcaaaacgcaat

SEQ ID NO: 140298 - DNA, 458 bp, Glycine max
  unsure (1)..(458): unsure at all n locations
agcttgaaccaaaaacctgtgagagtgtgaccttactctgtgagcgaacgactaactgtgaataatgatctttgcataaatctctaaattctagaatgatttgtataactcacaacatgatgaaggccatgaattgtatagacacaagctcttttgaccaaatagattaccttgaatgatacttgtatcttttgctcccttgtgtaagcttattgattatctcctaataccttgtttagattctaggagagcatatggttcaaggcaaatttactctaaatttgtgggagaaaagttgaaaagaatgaaaagaaaaaggttaagcatcaacacacacaacaaataagttgtatgttaaaaaaaagagaanataagttgtgctgttacaataaaggtcaaaagcaacttaagaaaagggaatagtgagaaggctatttgtacaaaacaagaaaagatca

SEQ ID NO: 140299 - DNA, 439 bp, Glycine max
  unsure (1)..(439): unsure at all n locations
agcttcgatcttccaccatcgtcgccaccatcatcttagatttctatnntaatattattagtactttgattntcagccttgtattttggctatattattatggtaattgaacaatntactattaccttatttgcatggtatgtttgaacaaatattaagtatgttatttgactatgtggattntatagttaatctattcatgattgttgcttcatggttcttgcttcatgatttggttgatatttttccatggatgttgtatggatgtttagttatatttgaatacttcaaatttgatacgcacttttgctttttgttgatgccaaagggggagagaaatagggattaaatcaagaagtcacatgagntaatcaacttaatttaagataagcataaattcaaaaacaaagggggataatggaaatttatgtgagtgatc

SEQ ID NO: 140300 - DNA, 342 bp, Glycine max
  unsure (1)..(342): unsure at all n locations
agctggggccatntctctatttagagggcatttttagcttggaagtcagaacctctgcacttgaataatcgggttaccagtttggactttggtttgtgtaattagtttaattaggtagattagattgacctaattaaggctcatcccttctttctttttctctcaattgttcttcattcttcttcctcttttcacttctgttcttcctttctcttgcacaaattttgtgggttttccattattgatgatcatggaagcctaatgatgcaatcctccctaggaagagactagtcactagagccatgagcaagaggctccaagaggattgagctagagcgactg

SEQ ID NO: 140301 - DNA, 463 bp, Glycine max
  unsure (1)..(463): unsure at all n locations
agctngcaaacatgcatgttccgtacaagtccttcatttaaacctacatttgcaccacacgagaattcaaaaaataacatttaaatcactcaaatttcaatatttctatgaaacaataattaaatctgacaaatttattttgattgattgtatcatatggagtaataataaaaggaggggagagcttaaaaaaataagataacaaataaaatataagtgtcggggtcaaactggatgtatataatcgaattattataaaacaattctttcttttgaggtttcaaaaatgattttccaattcgattgaatctaaaacacaaaataattggtttacagtataggagaaactcacgtatgtcatttgttaaaagcctacgatggtggtagaagtatgaaataaagtngaattaaagggtgtttaagaatattaattctanttttaaaaaaaaatagaaaaagtggg

SEQ ID NO: 140302 - DNA, 416 bp, Glycine max
  unsure (1)..(416): unsure at all n locations
agcttgaaaatttcaaagtgacatgttcagtgtaattcaacaacaagcacatggttcaggagttggagagaccctccttacctcttgaagaactcacaaaatcttgaaggagaatgaagaatattcaggtttttcaaggtttcctttcatgagtaaaacaagtgatagttccaagttaatagaaaaactagaacaagagaatgaagaggaatcaagtctaggatgaagaatgaagctcatttacctaaacttggtgactcaagtgctcaagaacacaaagaattagcagggaagaagaagaagaagaacaattgatctccctcacctcaagctttaatttcgtgcaaaanaattgaagggataagactacaaaagaaattttatttgctaagactcaacccagtgattcttgatgt

SEQ ID NO: 140303 - DNA, 318 bp, Glycine max
  unsure (1)..(318): unsure at all n locations
cagagaaacatccatactgaaacacatgttattattgcttcaccactttgtaattgggtttaagataaacttcgctctgaatgtgacncactgaacaatgaaagacattgaaggatgcccaaagagatgtatttcgtggtttacgttggtatttctattatgttgcttgagaagatgttgtaatgtgataataactatgctcataattttttataatgctattctctgaatatatatctttgtcatttagaggtggtggaacatgctngtgggatggcaactcttgcaatgtgggagtatgtttccatgtatcacatg

SEQ ID NO: 140304 - DNA, 244 bp, Glycine max
agatatccccaccctcgagacatcgagagattttgacacgtctccttttttataaaattgtcctaaactggagaagagatgtagtccgacacaacaactaattggacaaatgtgcgagctttacgtttagcttttaagaaaaatttgctgtctttgaaggacagttttacgggcgggaacgactgcgacttttgtgggactatgaggtgtctgaggagtaggcaatgcattttatattctgaag

SEQ ID NO: 140305 - DNA, 284 bp, Glycine max
cttgaccccatttcttaccaactactaccctaataaacttttttctccacaatagtccttcttattttcataacggttcttccaaggacgaaaactgcctaaattcctaggaatcttgccctctgtcactaaattatccaaataacactacaattccttaaatccaaaacattactaacccataagtgttgggcttagatccaaatgaacactcattctcaacaaactatcttaatgttttcctaatcctttcatcctattggatacacttagacaattttaaa

SEQ ID NO: 140306 - DNA, 203 bp, Glycine max
ctatctgaaccgtcttttctctttcttattgactctttcgggtatataaaatatatacatgtgtgctgagtaattactcacactttctacgtatgtgttctcaaccttaacatgtgtcttactaacacttggattccacaatttccttattaatggtccacaactctgcaagttataaccaaaatcttatttcatatctgttc

SEQ ID NO: 140307 - DNA, 420 bp, Glycine max
  unsure (1)..(420): unsure at all n locations
cttagattgtatatctggccctactgattaaggcttctaatttgattaatncacncctgacgatggagccagatgttgagagtttgtctttcatgggcacacacacagactgcatgcgcaataatttggaagaaccaaaacaagataactctttcatggtaatggctggaggtataatttgatttttggtttggcgtttttgcttaatgccctgtgtttcattttgtagttggaacatcacaggttaaaattntagtctaacattnggtatcaaagcattaattgcctttggcttgtcatttttggntttcggtatttntttgatttaatttcgtttatggtatttagagccttattcgttaaaaataagaatagaaatcctgtattttgggtgatctccttatttttgggctttgaatc

SEQ ID NO: 140308 - DNA, 218 bp, Glycine max
gaacggtcctatatttatacaactgagtccttcatatcttacctataagtggatctgttaaagaaaatcttgtatgactgtggaacttgactattggcccctgcagtggaggactgactacataagcgaaaactttctctgaatgctctgagatgatttcacaaaggctgaagcacttggttttatgtgtccgaatattcttctctgccactgttaaa

SEQ ID NO: 140309 - DNA, 308 bp, Glycine max
accagtacaatacggacatggctccccatcggaaccagctttcaggtttgactaaacgagagcatatgtccattaaggagtatgctcagagatggagagatctcgcagcccaagtcgtgccgcccatgatggaaagggagatgatcacaattatgggatataccgtacccacgttctactatgaaaagctaataggctacatgccaactaactttgcggacctcttcttcgtcggagataggattgaattctggctacgaaaaggcaagttcgaatatgctgccaatatggcccccaacaacaacaga

SEQ ID NO: 140310 - DNA, 384 bp, Glycine max
  unsure (1)..(384): unsure at all n locations
agctngcaccaacattcattagtccaatacactctcaacanatagtcatcatccatccacaactccaatcattcatgctcaatatgatgcatgcacctaacctcaactcttatatgcaatgtggtaccatccccaaggaaatagcctaagcgtgtccacatgacactctcacttatgaaaactaggcagtaagtgtcgaggtcaccctctcgtgcataggcaactcccccccccactccctcccgatgtgatcagcttgagtcataagggattttcaatcaagtgacattgtctctagttcaagaatttctcctcactagaaacttcaacgtctcactaacaaatattatactatantaacgtcatcaagaagtatagacacat

SEQ ID NO: 140311 - DNA, 328 bp, Glycine max
  unsure (1)..(328): unsure at all n locations
agcttcttggttggtaagaatanggagcctattttcatctttcagtatgctgatgatactgttttttttggagaggctgtgtgggacaacattcatgctattaatgccatcttaagaggatttgaattaacttctggttaaagattaattttgccacagccaatttggggttattggtgatggtgttaatagtgccattgaagcaacttataacctgaactgtcggcagctggaatgttctttcctttacttacgcatacttaattgtggcttacccctttatccagctggtgtgggagtctatcattactaaattcaagttttaatt

SEQ ID NO: 140312 - DNA, 347 bp, Glycine max
tgcaagcgtttggaaggatctttatgtgccttatgtatcctcccgagctgatgcccaccagacgtggaaggcctctcattttgtacatgacaatcttggacgagtcaatggggtgtatgctggggcaacatgaccaatcctgaaagagagagcgcgctgtttactacctgagtaagaagttcacgacctgtgaaatgaaatactcgttgctcgaaagaacgtgttgtgctttagtatgggcatcccatcgactaaagcagtacatgctgagccatactacctcggtgatatccaagatggacccggttaagtcatatttgaaaagccagctctactggacaaatcgc

SEQ ID NO: 140313 - DNA, 428 bp, Glycine max
  unsure (1)..(428): unsure at all n locations
agcttctacaatatccaagcaattcaatatcctaacatcatgaactaccctaaaccaagaaaacagggcagaggcagaaaactctgcccaaaacacattccaataccacagctttccctactcanataccccagtaacattctcttcgttccgatacgttaaccgttggatcgactcgaaaattttactggaggtccctagtacataagtatacattntgaccgttgggatctgccagaaaatgtccagaacccaatatctactacctttcccataaccaacaatgcacaagcattttctgcacaagaacaaaaattctgctgcacaattcaacatcaattntctgcataatagggcagaatttcgaaatccctcttgccctcatccaattttgctcaaattggatcctacaagtcctaaatcatgta

SEQ ID NO: 140314 - DNA, 228 bp, Glycine max
tgagtttgcgagtgatcgtgaggtcctataagtggaggagacatacccactgtttggatttcagcaatctttcatactcttgtctttgacgtaaggaagcctaccgagtatggaaagctaaatcctgtagtggatcttgcttcgaggtacttgatgtagatatcttattatctatacaatgatgttgcgcgcgttcactatgctatcataacttgattataccatgct

SEQ ID NO: 140315 - DNA, 386 bp, Glycine max
  unsure (1)..(386): unsure at all n locations
cttatgtaaatacctaatatctaattgattatggtttctatggtcaatggttcctttcatgcctaatggttgtatgcttttggtcccgacatccatttgtgtgcataggtaggtgactttagcattgggaaatgtactattgccttagaacttgattgaagcaggatcgaaacttattcttacaagagagatctgcagattaaagtttgtgtttaattatgtngtacaataatgctgtttaatctaggcctagtcttacaagagggatctgcggacgaaacttangctaaattangctaaactttcgtaagctacttgagctgagtctagtcttataagagggatttgtggacgaaactcagtctaagttagtcttaacctaagta

SEQ ID NO: 140316 - DNA, 410 bp, Glycine max
  unsure (1)..(410): unsure at all n locations
gacatgtaatcgattaccaatggttcgaaagtgtgtaatcgattacacatcatatgtaattgattaccagagactctgaacgttgggaaattaaattttaaatgaagagttacaattgttcaagaaaaacaactgtgtaatcgattacaccaattctgtaatcgattaccagagaggattttcaaggaatatcgccaacagtcacatcttatcatttgtgatttgaatggccatcaaaggcctatatatatgtgtgacttgggacaaaattagagagagttntgctggtccaaaatgtcttatcctctcanaatanaatgagagagattccaagagaacttcattgtcaaatgctctctcaataactcttgggaaaacacttgcaaatccattaagagttcatctatgga

SEQ ID NO: 140317 - DNA, 419 bp, Glycine max
  unsure (1)..(419): unsure at all n locations
tatatatatatatatanatatngggatggatggatggatggatggattgatggataattaatacctggcaaatatggcaactactggacatatggaacccattactaaggtcattaaggtggaccatattgcatgcattttaatgaacaatatggttgtgatgaaagcattaaaggaggacatcaaggtcaacaatgaggagctcttgttgtccgatttgaatggaatcatcaccaaatccattgggtgcaagctttattagatagaaaagcctgttggattagagctagaataggtgctaaacattcttggctttggatgggggttgtaagctcttcaattnggaggaaaggagtgccttactgtcaatagaactccctatatgtngctctattagatagtatatagtatatactata

SEQ ID NO: 140318 - DNA, 395 bp, Glycine max
  unsure (1)..(395): unsure at all n locations
agaagaagttttatgagattcaatgtcttgtaaaggatggatcaatgaatggtgaaagtatataagattgaatgaatgaatttaattgaaaatgaaaacaaagtcttgctttatagactcttcatgtctggtcaagaagactatttaaaagagttataactnttagaaaaaacttaaaaccaatttgaaaaagtcaaaacctctttgaagagttacatcttttgatttattcagaaacaatcactggtaatcgattaccanataagtgtaatcgattacacaaagcttttatgtgaaaagatttgactcttcacatttgaatttgaatntcaacgttcaaaggtactggtaatcgattaccaaaacattgtaatcgattacagctttttgaaaat

SEQ ID NO: 140319 - DNA, 186 bp, Glycine max
  unsure (1)..(186): unsure at all n locations
tgatctagccatttccataactgggcgattctttctctcgaacactccattttgttgaggagaatatgcgactgtaagttgtcgctcaatgccttcatcctacaaaatctttcaaactcgcgagaggtgtactctntgccgtgatcacttcttagtacntttatccattttccacttttgatttca

SEQ ID NO: 140320 - DNA, 419 bp, Glycine max
  unsure (1)..(419): unsure at all n locations
agcntagagcttanttatgttaagntgagggtgtgagcagcattatgatattttgagcgggtaatatttagggcgggtcgtcccatgagaactaaagtaaaaattgaaatttctttttttactttaatgaaaagagtgatatgtgaaacctagcctaatattttntactttaaaaaactaataacaaatgttagtaggcctaaagtgatagttttaattattttacctctggactgagcatgaaatattatcaatatctagattctcattgaatntctaatgtctcttccagcttggagtagatacagttccagtcctcattggccctgtatcatacttggtgctctccaaacctgccaagggtggtgataaatccttttgtcttctttctctccttccaaaagtccttgctatctata

SEQ ID NO: 140321 - DNA, 424 bp, Glycine max
  unsure (1)..(424): unsure at all n locations
agctntagcaaatagaatcatagggttgccttcttcaatngccttgangtgcttcatttcgagactaaatccggcgatacgccgtgaggtccaagttctgcaaccttcgttgagtcaagctgtaacatatgctagattgcgagaagaaaagcagaacgatgcatggaggacattttgaccttcatcagttaaaggagctaccccaagctctcggccaccgctattacccactccatcaaccaatcccccactgttaccaacgcctgcacgaacgacatcttccagcattcggttcaagagactcacgctngaagaattggccatgaggagagaaaagggattatgctttcagtgtgatgagaagtactcacgaggacataagtgttcctcttcacttttcctgttatagttgaggatgacaatg

SEQ ID NO: 140322 - DNA, 403 bp, Glycine max
ctgcagcttacaaaaactaagatatgtcttttgatttgtattaagggacaaagaactcaaaagcatttgcattgaacaataatactcaattagtaaacgacttaacagagaaaggagaatttgagtgccccaattagtgagaaatcaaatcagctaagtatttgtctagttcaacatgtgcacaaattcatgtagaatcaataaaatgcttcttaattacaagagagaaaagtggtaaaagataatgtcaaacaagctgaggaagctaagcccaaaattgagcatcattgaactagagacataaacagaagcaatcacatgacttctcaggtcaagcaacaaaccaaaaccaaaaccaatggagcacagaagatgtgccctaagcaaacgttacgatgaatat

SEQ ID NO: 140323 - DNA, 417 bp, Glycine max
  unsure (1)..(417): unsure at all n locations
agcttaaattaagtaagatgcttctccttcatattcgttggctatntctactattctacctgaaattatggttgtaagcaatgtagtgtgtagtcaaacccacatggaaatcataggaagtggtcacgttattccgaataaatcaaggcatggaattaattggactacatgcaagaccaaatgcgacaaaccatgttatagagcaatatntgatatttgataagtactactcaacaaattgaaatccattgtcaactaattttgttcccttccattcaaattcgttttaataattcttttagctgcatgtnntggtgcaaaattgtgtggttcgcaagtaaatattttctattaatcaagtcaaaagacttaaaatacaaaccagtcctaacaatatttgaaaattgttaaagatca

SEQ ID NO: 140324 - DNA, 423 bp, Glycine max
  unsure (1)..(423): unsure at all n locations
agcttctgatagtcttggnaatgtaaagaagattgttatagtcttgacacaaaaagactctgatagtcttgganatgtaaagaagcagatgacaatgattatgttagcatgacaacaggctttgatattcttgaaaatgtaaagaagactgtgatagtcttgacaaaagacattgaaaggtctttgaaatgtaaaggggcaaataacctcgatcgtctctgcgagccaatagacttggtagtctcggaggcaaaagactctgacagtctttgaaaggtaaaaggcagatgacattgatagtctctacaggacaaaagactctgatagtctntgaaaagtaaagggtagatgaaccttgatggtctctgcagccaacatacttgatagtcttgaaaagctttcactanaacgtgaacacgctta

SEQ ID NO: 140325 - DNA, 248 bp, Glycine max
  unsure (1)..(248): unsure at all n locations
gatttcaagtcacaaaatgtcaaaaacttttattttcaaaaaaattacccatttcttgaacatatcctatgattcaaagaaaaacatgcaaagtcgtacatgcacacagaatttgacccaaatattaaactaaaaatccgacgaaactaatcaacattaacaaattaacacaactaataaattaacaaaaccaaccaaactaacanaaaccaaagaacactcccccccnccatacttaaacaacacat

SEQ ID NO: 140326 - DNA, 381 bp, Glycine max
  unsure (1)..(381): unsure at all n locations
gaaatatgttcancccttctggtaattcgagaatcacttgaaattaatgaaaaaaattggttccgtgaagaaaatcccagccgaggcgctttcgtaacgttttcgtgggtgatctcgcgaagatgttcaaccgttcttcgacgttcttcgttcgttcttcatcgttcttcggtcttcaaccggtaagttcctgaaatcgaacttttcaattcattctatgtacccttagtggtcctcatttgtttcacgtgcttttattttcatttcatttactttccgtacctccttttgacgtgctttagtcatttttttgcctaatcaaaaaataaaataaatttccagcgatcatttgaattgaatatccgttatttctgtaaaatg

SEQ ID NO: 140327 - DNA, 381 bp, Glycine max
accttggcttttgacaccatgatggaattcaccaaaaaaccgaattggtgaaacacggagttaccagaattgcttccactttcttaactttgcaaagattgcattagaaaaaggcccaacttttgaagattgttacttcggatgaatggttgaagtctaaggcagctaaagatcccaacgggaggaaagcaatagatgtttgtcttatgccatcattttggaatgatgctgtctacattttaaaggctatggaccctattgtaagtgtgttgaggttggtggataatgaaaaaaaacctgcaatgggtttcatttatgaagcaatggatagggccaaagagcaattcaaagagctttcaataaccatgaagagaagtataa

SEQ ID NO: 140328 - DNA, 94 bp, Glycine max
aaataagatctaggctgaactctaattccgggtatggttttgaaagggggaaaagagtttttgatgcaaaacgtccccctttcgtcactttata

SEQ ID NO: 140329 - DNA, 472 bp, Glycine max
  unsure (1)..(472): unsure at all n locations
gcttgctgaagaatgggcagttcccttganaagcgttgaagatatatatgatgtggtgttactgaacttgcaacattgctagagtactcttactaacactccaacatcatctaaatttatgccttttgttacatatcagaggtttaaactgtattgccttggaaagttgagaagcaatccttggtcagaacttgatggtcttcagcctgagacaaagatcataaatgagcagctggagaagattaacacaaagggcttcctcaccatcaatagccagccagctgtcaatggggaaaagtcagattctcctactgtaggtgggtgtaaaagaagttaatttttatctatgcatgatatnttctggatgtaggtttagagcattctagtttgtactagctatagattgatgactaactttctgatacaagttagatggttgaatatttctaaagggttctattttggaatgagg

SEQ ID NO: 140330 - DNA, 372 bp, Glycine max
  unsure (1)..(372): unsure at all n locations
ctggtggggacttatgggtaccttgccccagaatatatcaaccatggtagggctagtaaggaatcagacatttacagttttggggttgtagctcttgaaatngcatgtgggaggaggacttatcaaaacggggagtttcatgtacctctcgtgaactgggtgtggcaaaaatatgtggaagggaatgttctggatgttgtagatgagagattaaacaaggagtatgatgtggatgaaataacaagcttgattgttgtggggttgtggtgtactaacccaaacgacagggaaagacccagggctgcacaggtaataaaagttcttcagcttgaagcgtcgtcattgcctgtgcttccctttgatatgcatgac

SEQ ID NO: 140331 - DNA, 407 bp, Glycine max
  unsure (1)..(407): unsure at all n locations
ggatccttaagcacctgggctgcagctttaagatgatttttaaaggtcattctcaagatgttgtaaacattcgtgaggagatngatactttaaatgaaatcgtagccaaatttgttagagggtctcaatgccttaacaaactgttaaggtacaatagaagtcctgtggacaaatcttgtcatgggtacaaagcaaagaagtatgttcatgatgaagatacaattgtgtgttatttctatggaaaagttagacatatgacatccaaatgcaaggacttaccaaagaagggtatgtctaatgcattcaacactagcaagaaaggacccaaaaagattattcttgttgcaaatagataaaccacttctttagtgatattttgtgtgaggttntgtgccatttacatgcat

SEQ ID NO: 140332 - DNA, 444 bp, Glycine max
  unsure (1)..(444): unsure at all n locations
agctntgaacagttcccattttcctactccatactttntggttgtcaaagcagctgggtggctcttagacttgtcaaattcagtagcaagttcttcaacaaggcttcttccaacatgaaatgatctatgtgcctctgagaactctttggatgtgacaaatctataaggctgatctttgtctgcccagtactgctcctgatccttccttgatgttacctataacataataattaatggtcaaaattaaatgtatataacattcttttaccagtgcagacagattaaattattgggacagaacacaagaccacttacttcttgcaaaaagtctgccacacctttcctctcaggacatttaaaacccattgatttgaaaaattccagcacatgttcgcggggaccctggtacacaatatgactatcagagagtagtataatgtcatc

SEQ ID NO: 140333 - DNA, 434 bp, Glycine max
  unsure (1)..(434): unsure at all n locations
agcttagagaattatggtatgttagggacccttattgaaggaattaagcaaaaaaaaaaaatgcaaacatgacttagagtaacaaggtagcgaagttcatgaccaacccatgaattccccattgcacgtgaaacactttcagacatgataacaaaaatcatgaccaacccgtgaattctctacttcccatgaaccatatgtagcgctcccaaaatgcaaaagatcattgctagcccatgaattccctattgcaatttacccgtgaaacacctacaataattnttatgtttttaatttgctagggtctagacttacattggaccattagtttaaatgagacttttagacatagtaaacgattaaactagcttttgagatcaccatagaaattgtagataattgtcttatgattacccacagataagaatcaacat

SEQ ID NO: 140334 - DNA, 420 bp, Glycine max
  unsure (1)..(420): unsure at all n locations
agcttatcatctcatgttttcttatcaagtatatagaatcattttaaggtccaacgccttanaatgatcacctttcaagtaaaaaagaattgcttgattcactcttaagaaagaactacgtaggtttgatttcctcttcgatggagggtacgtaggagcaaaagccccgcttttgtcgacctcaaaaaataaaaaagaaataaagttaaaggtaacacaatttccacaattctaaaaaataggttgttgtcttttgagacaaacgtgagaggtgctaataccttcctcaaacgtaaatacaactcccgaacttagaattttcgttttgaccggtttccttcggtttttccgacgttttccacaaataaacgttggtggcgactccgcgcatctttccttctttggaaagcgcacccgtga

SEQ ID NO: 140335 - DNA, 373 bp, Glycine max
  unsure (1)..(373): unsure at all n locations
aaaaaaagtgtaagtgggactagntatggaaattataaaattaaatggcaaatttgttatgtaccttnttgtgggtcttacaatagagtgaaagcacacttattgaagatgacaggaaaagagagttagacaatgtcaaaaggtaacaaatganaaacttataaaattgaagaagatagataatgagctgcattgaagatggaaaagtcgaaatcaaaattggtctctttaactttggtttcttatcaacacaaaaaattcccatcatcaatggatacgaacgttggtggtgttgatccaaaanagagaaagactaattgatagactaaaagagaaagggcaatgaaaaactttgatgtcacattactagaat

SEQ ID NO: 140336 - DNA, 358 bp, Glycine max
gcaccccctttatggccttaacttggttggttaaatgcttcggaccggtccgacccttgcttaccaattcacatacccggttggtatcaaaggttggggtgacctggcttttaatgatggtggccgtggaattcattggccgaccttttaagttggctattgattccgacacattttgtcaaaacacttttgtggcaatgtatatgaatgccggggagaaggaagcagcacaactggtttttgacttgatgctggaacggactgtgatttcttggaataccatgattaacgggtactttttgaataactgtgtagaagatgcagtaaaggtttatggtagaatgatggatgtgggtgt

SEQ ID NO: 140337 - DNA, 430 bp, Glycine max
  unsure (1)..(430): unsure at all n locations
acccctcaatttagtggattttaagggttgagaagtgaaaatgagaatggggtaattttggagcaaactcttatctcacacaagtctataacattaatctaaactttctcaaactggttttacaactaaaactccaccgaatcaaaatttgacccctcaacacccaatttaccctagaaatggctcttgttttcactttggtcactcattttcctcatttgctcagcccaagctttcccacaagtcctaaatgacattntaaactaggattaactcactntaacctccaattaccactaaatccaaatttagtttttcaaatccttaaagcatcacactnttccactcatatcattacattctcactnnttaaccctaggttaactctacccttcatctctatcaattntccatcagcaatttcagcaca

SEQ ID NO: 140338 - DNA, 403 bp, Glycine max
  unsure (1)..(403): unsure at all n locations
caaagcttatacaacatcgatgttgagatcgttctattaatcgatttttaaaaatcgatactaataataatatcttatttacaaaaatattcaacgtgtattttttagcataatgttaccaagtcatttttattagtaatattttttcttcctcctgaaatgtgtgttccagaggataaccacatattggccgacgaaatctcccaatttacacaaatataanaatgctaattttaaataatatttcttatttagtggatttaaataaagaaaaaaatgactcatactgcctgacctcccccaatgaattccaaatgcctgccgatggcatcaaatcaaaatgcatgtagcatntttttaattactttgtgcatcataatanaagatattgggaaataattag

SEQ ID NO: 140339 - DNA, 453 bp, Glycine max
  unsure (1)..(453): unsure at all n locations
gctntaacactgaacatttactattnttttttgtttaaatgctatgcttaagtagttaactataattaatgtaatacaatcatatatttaactgttgtcttctttttttatgttaatgcctcttgcctttagttgggcatgtcctttttagtgcctcttgcctcaaaatgttaaaaccttaaggattgatgaccttgatttactgacattaaatcatacaaaaattagtatttaaaaaatattgacagtagtagccttagcttttatttccaatgactatggagctggtagaatgacttcaaaaccacggagggggtcactaaatttgagtcctatagtaacaacgggtgtacaactaactttntagttttgaaaatcattataaataactntggggctgatagaattgatatgaagaagtgcaaatttaactttctattggatgatgatttt

SEQ ID NO: 140340 - DNA, 445 bp, Glycine max
  unsure (1)..(445): unsure at all n locations
agcttgtgctgcattcttcttcagctctttcttatgtctaataacctcaccaagtaatgatgctttgtccatctatatgttcaaaagtgaacatgagaaactcataattttaaacaatgaatgaaatctaacattgtttacttctactgacatcagaattcataaatcaaactataagcacaactaagttggattgataatatcaagttcctctcgccccctttttaggaaagaaaactcanattgaatccttggcaatcaaagcaacaaatcaactactaccaactagcatagttacattcaaaaatttcaagtacccaacacttcattaatacatgttgagatggtcatggaagcagaagagagtgctaatganngttattgctctaaaaatactccaaaaagtcaaaagctgttatgaagatgaatgcaaacatgatatgta

SEQ ID NO: 140341 - DNA, 434 bp, Glycine max
  unsure (1)..(434): unsure at all n locations
agctngccacatgtattcaacaatcagcaactgcagattaaaatatatttttggagcccttgcggcggcacaaaacgacaacgcgccatgagtgagaataaacgacgatgtgaggcgagagaagagagtttatttaccgggagtcttgacgactctgtgctggttggatntggtggcatagctgtagcgcttgcagtaggtgagacgttgcaccatcttctccgataagcttcttccaaaccctagagtttcactcttccacggcaaacaaagaaaaaggttntcgtggacgcgctggggtatatataatgagagtgtttctgcagcaccctaaatctaagtaataatatttgagtgatactattaaggtatntaaatntaagttcttataanttcatttatggccgggagagggaaaanaataattatatgag

SEQ ID NO: 140342 - DNA, 431 bp, Glycine max
  unsure (1)..(431): unsure at all n locations
agctgggggctggctatgaaaccataggtagttatatccacaatatgatatgcaccatcaacctaaaatcatttgtacatgataggatgctgctgctttaaatatacacatgcttttttggctataagctttggctttgtgaaaaagaattgatctgaacttaccttttaaagagtatatcaccaatagcccgtgtaatagccagctgaccatttatgcgaggcacaccaccccaattttgaacttgaccaccacctgtttccaccccaatatccctgtcataattatgtcattataatttgtagctgaaaaattgaaagtttaatcacaattcataatctttctcaccgttagcctctttgggagactaaanaattttagagcacaagatggccttaaagtctccaatattggcaaccaaaatggtatta

SEQ ID NO: 140343 - DNA, 376 bp, Glycine max
agcttcttagtttcatatgatgtagatgagtttatggctacatcatgcactcctctaatgactatagcatcattcttggcgctaaactgttgggagttggaagccatcatcttatattaaattttggcttcagcaggggtcatgtctccaagggctccaccactggcagcatctatcatacttctctccatgttactgagtccttcataaaaatattggagaagaagctgctcagaaatctggtggtgagggcaactggcacatagtttcttaaatctctcccagtattcatataggctctctccactgaattgcctaatgcctgaaatatcctttctgatggttgtcgtcttagaagccagggaaattttttcta

SEQ ID NO: 140344 - DNA, 396 bp, Glycine max
  unsure (1)..(396): unsure at all n locations
agctntgcgaaaggctngtcgctggagctaatccatcaactgtcctaactctttcagactggcgattcctaggctcttgaccttgacttgatagaacctctttttaagcgaaggcgcctggctcaatcccatgttcttactaaagtggaataaaaaccagtgcgaatcaagactccgacatctatcataggtgaaatggatgaatgcatgaagaaatgtgtatggcacagatgcattttactgatacgagagcctgngagattatctttttcttaaatacaacattcgggcagcatagcgtccgatgcatgcatttaagaaggcgacacggaccttccgtcttctcgtgacaaagtgaggggattaagacgcaacccgtgcatgatgacatgatgc

SEQ ID NO: 140345 - DNA, 441 bp, Glycine max
  unsure (1)..(441): unsure at all n locations
agcttggttggcgaaacagaaagccattgttattgaatatggcgattgggatgagtcatatgcgaaacttttgtcgtggctaacacacatgcaaaatcattctcctggatcgtattttcaaatactacatgacgantttatcgttggaaatacgggtagtcgcgaacaccgccaatttcatagagttttctggacttttggccaatgtaaagaggctttcaagtactgtaagccaatcatacaagttgacggcacacatttgtacggcaaatatcgtgggaccctcttaatggccacatcacaagatggaaatggnggtgtcctttctctagcattcgccgtggtcgaaggtgagacgttgacagcgtggtcatgggttntggcacacttgcgtgaacatgtcacagataanaatggtatttgtctgatatctgatcaaca

SEQ ID NO: 140346 - DNA, 183 bp, Glycine max
gaaaaatttttataatttataataatatatggaaattaatataaattatatattaaggaactaatatttatttaaggataattgaagtaaatttaggaatttaattttagaaattaattatatttagattttgattttgtatttttattgaaaaatgtagtggtggattatatttattaatgt

SEQ ID NO: 140347 - DNA, 375 bp, Glycine max
  unsure (1)..(375): unsure at all n locations
atgcctatggtggtggggatgaattcttcaaaattacctgggtcaactttattaaaaagaaatcagacacctttgaagtattcaaaagagtgagtctaagacttcaaagagaaaaagactgtgtcatcaagagaattaagagtgaccatggcagagagtttgaaaacagcaagtttactgaattctgcacatctgaaggcatcactcatgagttctctgcagccattacaccacaacaaaatggcatagttgaaaggaaaaataggactntgcaggaagctgctagggtcatgcttcatgccaaagaacttccctataatctctgggctgaagccatgaacacagcatgctatatccacaacagagtcacactta

SEQ ID NO: 140348 - DNA, 461 bp, Glycine max
  unsure (1)..(461): unsure at all n locations
gcttcgatgagcttaactctgcgggagcatcattggccaatggcttagcgtngaatcggttttggttaactgcataacagccacagaacttggaaatggaactatntatatactgtnatttttttccttagtatttatcttcaacttagctgttattcttggcttaaaatttgcagcattgttagctgtaattctgtttaataacttcatcatttgagcttagaaacaataagtacacccgtagggcgttactttctttttattattgnttgatgggtagagatcacatggcagcatttcgttacatgtgaaataatagaaaggttattgatgtatgtcttgtttattactgagtatagatccatagtgatcaatttttaactgatgtgtttggaaagttggatttttctttggtactttatctgccactngattattgtnctatcatacacttgctatat

SEQ ID NO: 140349 - DNA, 453 bp, Glycine max
  unsure (1)..(453): unsure at all n locations
gtgttggtttctatgctacattggatttataanggaatcattcctgtntgctggggcgaccgggtgagggttgaaatttctgtcaggtgagtcacccgcacacttactttaaataaaaagaaaagtaacgtgcatgaacaaaagagccaaggcctactattatccattgatttcaaatggcaaatacataagatcaagtgcagtgcgcaccttnttcggttttgaacttcacctggagagaagtttctagcaatgaattttggggtccaagttcatcgagagagaaatgagacttttggtggaaaaagacgagaagagaattaggagtgtgaatggtttgaaatttaattgcttcactgacgggcatgttcttaaatatataattgatgagaactatttgatcatttactatgttaacacctacgctagttgaagcagtgaaattcttctcat

SEQ ID NO: 140350 - DNA, 409 bp, Glycine max
agctgcagcttcatagcactgtctctttcccttttctgagatgaaagcgccatttcccaattttactgtggaaacaatggctttgtcaagttctttaaagaggttcaggtcattggttatatggtttgtgcagccgctgtctattaaccatgaatcactggaactattgcttgtggcaaagcatgttgtgacaaagagttgctcatcttcttgttcctccacaaccacctttgcttcctttgatttgaacttgcatattcgctctacatgtcccatattgccacaatttccgcacttgacatctggcctccaccaacattatctttcaagatgatttgtctttcgcaatgcggacaatgaggaaaggtctcaccttgcttgcttgtggagccttctagtctcttgttcc

SEQ ID NO: 140351 - DNA, 406 bp, Glycine max
  unsure (1)..(406): unsure at all n locations
tagagtcttcatttctgtgccttaggaaccttgatggagtggtgaacatctgactgactaccaataatgacagattagaaagcgatgcggatntgatgcaantattggctcgaaggtggctagtttcgctggtgcttgtntggacgactcgtgttggtttacgaatctatgatcctgtcttgttttattattagggcttgcattgttattgctaggatgtccatttgcatctttatgtatgcttgcatatgggtatacattaagattcatccgatgggatccgtatgatttgtagttgttacttcttggtaggcttgcttcatttacatatgcattacgtgttctggacctgacatttcttgctctagcacacctgggatgtttattttatatatatcttcgctat

SEQ ID NO: 140352 - DNA, 434 bp, Glycine max
agcttggagcatactatctatatgctcccgtttgatggggagcactagagtatgttacattttcttgttagattatattatctgatgtattagtgacagcaataaagcttgtatagttgtatttactcacttaagcttcgtgatgagaatcctgaaactggccaaatacatgcttaatgcccaagtggagaatgacgaatgtccaagatgagaaggactacacccccgagtgaagaaggatgaagactcagaggcaaagacactatcaagattattaattgttgtggaaggcccataataaatatgttctatatttctttataaatattttttaccgaatctattctgaaggcccatgtctatatttatctttatgtctagatacgctataagtattggtttttgtttctataaaaggaacttttgcttttcat

SEQ ID NO: 140353 - DNA, 350 bp, Glycine max
  unsure (1)..(350): unsure at all n locations
tcatgtgttttattataatcatcttatcatattgatcattgtctaagctcattgctccaaattaattcttgcaatatgttcttcaatattttcatcataaatgcatttcaatatgtgggcggtcttagattcttaccttataggttagtcttgtaaataactagtcactaacccgatgcacaagtcgctccactatttttgttttgttagtattgaaattatacgttgattaaaaacgacattattgtaataaaagtatgaacaacatcacaacaacgccttatcnactaagtggagtcggcttattggtcaacttctgccttaatgtctatcaagtaccatccttctat

SEQ ID NO: 140354 - DNA, 248 bp, Glycine max
gatcttaagcactgagctgcagctcactatgggagggtgcttctcacttctgctaaccggagcttataccgtcttcttccacatgctttttatattgctgagggctataccaaacatacttccatgattctttggattatcggctagtatgcgcgtgctttgctaacccattcggtcataaccgtccccacatactcgccatattactgtgattgacagcaagtgccaaaagatcacgagaatgctac

SEQ ID NO: 140355 - DNA, 425 bp, Glycine max
  unsure (1)..(425): unsure at all n locations
gctgtttgaaacctgctttgtaagcttttgatattatcattggatgcttaaatgttcttatgtagatgcatcatatttgacatttaataacataatgcagagatgattcaacgcaaattttgtatattgattcacctcaactttagattattgttagtcttcacccaacctgatgagatntctactaaaacaatctntaagatcctgaaaaacttgagtatgactaattttcttgtcatatagagcttgctacttaactaataatactcctacttacccgttaatttactaagctataaattaacaccttaattattgaccacacacatcttctttgtggtcatttgacatacacattgattttttaaaaaaaataatggttaaacatatgaattacacactaattaaagtccttgcataatact

SEQ ID NO: 140356 - DNA, 198 bp, Glycine max
gtgatctcgccgaagatgttcaaccgttcttcgacgttcttcggtccgtcttcaatcgtcttcggtcttcaacccggaagttcctgaaatcgaacttttcaattcattctatgtacccttagtggtccctcatttgttcacgtgcttttattttcatttcatttactttccgtacctccttttgacgtgctttagtca

SEQ ID NO: 140357 - DNA, 393 bp, Glycine max
  unsure (1)..(393): unsure at all n locations
aaatatattagccttcttttgaaaaaaaaaaaaaaactgacattataatggaataattntttttaccctatcatgttaatcatgaattattatatataataatattattgactttntaataatcattttaatatatatatatatatatatatatatataatgatttctaattaattaataatataaaaaaaattatactgaaattatattacaattaaactctaaaaatatgcaagatggtacttgtgtcatattgaattccactacttaattaatatagtcttatgtaaatttggtaagttatgtattcactaaataaatgtatatagtaaagggacctttgctacgatatatngccttttttctctctggaaataaagcaactttgcacca

SEQ ID NO: 140358 - DNA, 446 bp, Glycine max
  unsure (1)..(446): unsure at all n locations
nngcttagggttaaaagttcaagcatcgtgatttgcacaaggagcaatntaacaggttgattggctaatttgaccaaaatgttatgaatttggactctaatgataaaantttgtgtgaagggggaatagtggatgatggtgctagattccctttgtgagtagagttttggaagtgtttaagaataaatgaaagtgttatagcccaaagatcacaggctcgatggattaaggagggtgatatgaactcccgttactttcgtttctctttaaggccgcacagagatctaactagttgattgcacttcattgtggagatcaatatatggaaagtgtggaggaaataaaggatgaagttatcagtcactttaaatagatnttctctaagccaatttctatcangcctcatcttcctggtatagaagttaaacaacttttagctaataata

SEQ ID NO: 140359 - DNA, 423 bp, Glycine max
  unsure (1)..(423): unsure at all n locations
agctatcctaaatgacacttcttgtaccactctaatcctaactcaatcacttntaatgtcttgctgaatgagtacaaagtgacttgttgcagtttggtgagtaactcagcactgtatataatcagtacaaaagatttgttttttctaaaaaccgatgttgtggtttactaacagcggttttcaaaaaacgatgttggtgagcataaactaacatctggttttcaaaatccgatgttaacattgatactttaacatcagtagtttaaacatcgattaataaccgatgttggaagtccttattaaccaatattaaaagtctattttctagtagttctcgtaacctaccctatgatgggtgtgtgagcgtaaagaaaaagtgcgtcttctaaaaagaaaacgcatgggagtcaccaccaacattta

SEQ ID NO: 140360 - DNA, 385 bp, Glycine max
  unsure (1)..(385): unsure at all n locations
ccaccttctgggaaacttcctggaaggcccaagtgggcttggttgctatttgcacccccagtttactaaatacaccccctaccttttttgctgattctttttccgtaacgttacaaaactttacaaatttcgtaacgatacttgttttctttccgtaatgtcacggaaccttacggattacgtaatcatcccttaaaggaacttcacggattgtgcaacaatgcttcctttngacttctggcatgtcacggaacttcacggattgtgcaacaatgcttccttttgacttccggcatgtcacanaacttcacggattgcctaacgatgggtgccaagtacctcaaagtggtcaaatgaaggtcgcatctgatgcaatcctaccccc

SEQ ID NO: 140361 - DNA, 458 bp, Glycine max
  unsure (1)..(458): unsure at all n locations
agctnggtgctaanatctgtgtccaacagcatattagctgacttaatatccctatgaagaacactctgctctgcatcctcatgaagataacgaagggccaaagctaccccatatgctaccttgtacctgtgaagagaattgagaatataaaagagaattaagaataattgtgaataataatgtttaatttcactagcataagctaattccatcacaagagacagaactgtatatacaaagcaaaaaaaaaaaaaaaactaagaaaataatggttaccctatttggataagcctccttataagcacttaaatatatatataaaataatcttcttgcataaggtcaagttaagttatgcataagttaaaatggtctttgtatttgcatttactggtagagtgttatgaaacacaaacacaagtgaaaaacccctgagggatcataaataataaaatacat

SEQ ID NO: 140362 - DNA, 422 bp, Glycine max
agcttgtataaagcaatcccatgtatttatcttgctatgtacacccgtgagataactaacttatctgaaataaatacaagacttaactgagagatttaaatgaaaagaaaatcgaaagttggcactctactctcaactaatgtagatgaggggcaagacgttataagttctatatacccacacatgggaagtttactctggctaggtcgaaccgagtttatggcacatagtcaaataagcaaagcttcataccacatttcagtttataaataatgacatggtttgagttggaagcaccaaggagtgtcatttagacatttacttgtatttgtgcaatccaatataccaattttgcctaatgggatggaaactgtcattttattggtgaccttaaaggctcaccacttatgaagaatggtctc

SEQ ID NO: 140363 - DNA, 437 bp, Glycine max
  unsure (1)..(437): unsure at all n locations
agctttnttctatgatgaactataattttttttttgttcataattaggagaaagctacaccataacaacataacacagaaatgtctaatcaaaggtgacatgtagaagctcaagtgatagagcctttggatcctgttgcgcaagtggagcctgtagagaatgttggtcatgcgtagcatgcggagcaccaggagccacaaccacccgttctgtttcctggtgcccctgaggacacattactattgacctcatatgtcgatcatgtggcttgtgaagtatggaatgacatggtaaactactaagtttgtttcaatatttaaaatttcttcgactattgaatgatntatttttatattggaacttatttagtaattatttatgtacttgtacgaacatggtgacctaaagttagtatcacatgccagaaagatattatg

SEQ ID NO: 140364 - DNA, 407 bp, Glycine max
  unsure (1)..(407): unsure at all n locations
agcttcacatccagaaagaatgttatttctgttgcaagacggaaaaaacgaaatcaaacttcaatgaaattttaaaaaatagtcaatgaaatacataattaacattatatatactgatagaaaaatcgatagaacactcaattcttgccacgatttattaaataaagggaaataatgtttggtacgaaggttaatgctcgaatattatacacgaagtatccttggcggttttccgttaattccttaattttattcatttcttgagttatatgattatccaatcaaaacaagacaaatacgattcgtgcagttntttacggaaaatctttgtaccaaatagcataactcttaaatagatggtatatccgggtagttttcaaaacattaataccggtgagttgactatt

SEQ ID NO: 140365 - DNA, 402 bp, Glycine max
  unsure (1)..(402): unsure at all n locations
tcaacatataggggcatataacacaaacattaaacaaaatgattcatatatcagaatatggaatatatatttaagataaantatacccttaggttgaataaaattatattgattaacattactttcctttctaatattataggctaaatggaaactttagncctctatcatctcaaattttggatttngattcccctgaaattttgtagcaacattttggcctctcgantttaaaattttgtgatttngatcctggcgctaatttctatgcatggactattacgttattgacattgattggcaattagatgatgtgacatgactaacatgagctcattaaaatagaaatatgatttaattaattagattatgtcataaataattaaaaagaaaatagaaaca

SEQ ID NO: 140366 - DNA, 218 bp, Glycine max
gaggagggaaggaagaaaagggaagaggaggaaaaagggggagagggagagaagagtagggaggaaagaaggggaggaaggaagaaaggaggggaaagaaaaggaagagaagaggagagaggagaaaaggaaaaagagagacgagagagaaagagggaagggaaaaaagaaaagagaagggaagaaaaaaagggagggaggaaaaaaggaaaagaaag

SEQ ID NO: 140367 - DNA, 150 bp, Glycine max
aaaaaaggaaatttttaagaggttgggaaataagaaggaaaaaagaaaggagaaagaagaaagagagaaggaaaagaaaaggggagaaggggaaagaaaaaaaataatgaaagaaagaaaagaaaggtggaatgagaaagaggagtaaga

SEQ ID NO: 140368 - DNA, 348 bp, Glycine max
  unsure (1)..(348): unsure at all n locations
attatancataaatatcatctatatgctctagatcaatcgaagaattaaactttactgatgagatngaatccgatgattaaggtatattcactttttgctgntctattntcctntaatatcattatacatatctaatttctcaaatnctctaaaatttttgtggatctctggtcagtaacatnacttaatgcttgcaagaatagtagacattatttttgttcgtgtaagcaanaactatactcatcnactaatttgtngtgtgtatttaagacctgaaacatctaaaatttgatgttngattntataaatatcacgntgaacgctgtagaagtaatgttgatgacatc

SEQ ID NO: 140369 - DNA, 101 bp, Glycine max
  unsure (1)..(101): unsure at all n locations
ctacaaatgctcaatcaaattcccccatactatatcttnacatctctgggcaaactaaagaaagaatgaaaatagaaactaacttaagataccacaactaa

SEQ ID NO: 140370 - DNA, 338 bp, Glycine max
  unsure (1)..(338): unsure at all n locations
acataaaaaataccagcatggcttacacttgcagagccatgcctacatcgccagcagccacctctgcaactatggacattgcaaaagagcataatgggcttcgccgctcgcaaccagcacagaactatgctcacggtccatgatgtggaggtcctatgcagacgaccacctatgttgctccatcaatcgcatacaagccacatcagtgccgccaaaacttaagagcaatcgaacaatgggcaattccccaactcaatatacaggctccatgcttccaaattcactgcgctccttcttgagtgacccagacacaagcaatgatgtaagngtggaggaga

SEQ ID NO: 140371 - DNA, 423 bp, Glycine max
  unsure (1)..(423): unsure at all n locations
agaaagctattgatatgattaccatccatcatgggcgaagcaatcctcttatagnnttgcctccacacaagacaacaatcatggtatcaatttattcaaacttagatcggaaaaaaataacgtaagaaacataaaacaccaaataaatatactttgatggatgatttnntataagaacatcctaattaaagacaccgatatactcgtgtttgtttngtcgcaaaaatcctgataaactaataacttcataaactattatcttnggttaattcttntatgacaattaacatgaaaatcataacaatattaatctatgattaatgaaaatataaaactcatttatactatcataatataatctattgtaaaactgtattagaaaaaattatttctcttctattataactctcttctcaaggtata

SEQ ID NO: 140372 - DNA, 412 bp, Glycine max
  unsure (1)..(412): unsure at all n locations
tctacttcaaccgatatgcccttatgcacgtgcatacataacatagaaatcacactcggatagggtggacaattagctagagcatcatgtgctgtagcgaaactaatcgccaaagaggtgaaatcggccacaataaaattacctcctgttatgtccgnntgaanccaaaaactgctcgcaacagtcggtcaagtgttataatgttggagaaaccagaaaaatttagtgagagtcggatcttaatgttggctaggttagcgtccttgatgaagaggatgaggnatgaatcccgtagaccattcgcattgttgtgttgattgtagggccccatctggtagaaaaaaacccgcaactccttgtggtgtcctgcacttggaagatcaacgacacaaacgaagaaatatatngataa

SEQ ID NO: 140373 - DNA, 336 bp, Glycine max
  unsure (1)..(336): unsure at all n locations
gcatccaccatggaataagccatggaagaaggaagcccaccaccaagatgagccttggaaagaagcctggaaagatgcttcaatggaggaaaagaacgagggagagaaagatagatgggggagcacgaaatngaaggactaaaagagggatagaagtggaactttgaagtatgcctcacaagactctcattcatcaaagntacaactagggctacacatgcttctatttatagactaggaagcttcctngagaagctttctggagaagcttcttngagaaaactccctcgagaagctagagcttagctgcacacacccctctaataactaagctca

SEQ ID NO: 140374 - DNA, 342 bp, Glycine max
  unsure (1)..(342): unsure at all n locations
tactagcttcacatggagcttcatcaagctataagtaacttaaatntataaataaacatatgttatcttattttgcttaatggacttcactcgactatgtncattatgtggaggcttatgcattagaagacatcccatagcacccttcattntatgaccttttctatggggctaagcctattctttctgactttccattgattgaacatgaatgactttggcaacaatagaatcctaagactaaaaatttaaattcataaggaaaaccatcactatagagtcctgaatgaccagctcacaactctatttagattcattactttctgatcactcataacctct

SEQ ID NO: 140375 - DNA, 340 bp, Glycine max
  unsure (1)..(340): unsure at all n locations
catggactgagcaaaaaggctcgggncattaaagactatgcatcntttaaggcacaaagcttggatcagaacaatgaaacccctatcctacactctntaaaagactgcgatgagaaaattacagaggacaggaatcccttggggaaaccacagaanaataaaaacatgcatggacttccttaattgcctcagatcttaagtatagnattgcttgactacgtctgaggtcacgggcgattgtagnttctcgncattcatggtagcaagcacaagggcccctcctgagaaagccctctacacgacgaaaggccctttatatttcggggcccactttccccta

SEQ ID NO: 140376 - DNA, 224 bp, Glycine max
  unsure (1)..(224): unsure at all n locations
tctagcatctcgatatgtgacgggactgaatcagacattcgacgataaagttattgtcgnttgaattggctcagagcatcaacattcaatttctagcgtctcgatatattacgggactcaatcagacattcgangaaaattntattgtcgcttgaattggctcagagcatcaacattcaatctctagcgtctcgatatatgactggactcaatcagacattcga

SEQ ID NO: 140377 - DNA, 450 bp, Glycine max
  unsure (1)..(450): unsure at all n locations
ctcagcttgccagacaacgtacacgtgctctnttttcttgttctntgactatagaatatatatcataggtccattcagtagaatcttgggtgctctgtaaatcttgcgaactctctgcttcaaccattttatgttgtagatcatcctacataaatacaccttattaatgattatcatacatcaatatcctgaatacttcaatatcactaaacaaaactcatctccacattagttactccccctcaccccataaccttctattagaaaattgagcaaaacatagataatgtattgaaataaaaattgaaactcttacaattacgatagcagccgtttcagtaataatgcttccatcttatcgagttctagtgtcaatataaatctctgccctataaagttgcactcccttatcctttgtagtctaacttgagataagataatcaatcatcc

SEQ ID NO: 140378 - DNA, 350 bp, Glycine max
  unsure (1)..(350): unsure at all n locations
ccactactggaaaacctcgaattaaatttttatngaggcattagatctaaatatctgtgaatccatagaaatatggccttatatacccaccacagataatgagttcaatatatgtgagcncatcaagtgaaagcataactatagaaaaacctagagatatatgtgctgaagaggatagaaatcgagtacaatacaacttaaaagccaaaaacataataacatctgccctgngaatggatgataatnttatggnttcaaactgttagagcgctaagataatgtgggacactcttcgattaacacatgaatgaactgtatatgctattagatctangataaatgcactaact

SEQ ID NO: 140379 - DNA, 403 bp, Glycine max
  unsure (1)..(403): unsure at all n locations
ctaagcntgctcagcgnnatgcgagacggagaccagaatgctatctatcatcgtcaagcaccaagaagagtcagggctagccgcggcccacgagcataggatggcggacgaatatgctcaagtatacgcggaaaaagaggctagaggaatggtgatcgactctctacaccatgaggcatctcatgtggatggtatttgnncgcnctcacaccgaacgtgaaacaagaacatcctcgattgctagccaaggccaaggcgatggcagacacctactccgccccccaagagacacatgggcacctccgctaaagacagcatatgatagactcaatggcccacataactagataccgcgaggaaacttgtatgggctcacagacctagactagagacgactccctca

SEQ ID NO: 140380 - DNA, 326 bp, Glycine max
  unsure (1)..(326): unsure at all n locations
aaaactagctcaaatagacacttcaggagtggaacacttaatggatngaagggcccagcaagacgaaagcccgcggaaagaggacgcccatgttgccgtggctgaacgcaacagatgtacctgggcgaaacctatgcgagagaaatcacaaacccttgacgactcatagagttgacgccaagactctcaagagagaaagactgtgccaccaagagaatattgagggaccatgggatagaatttggaaacagcagagtcactggaagcagcacatccgaaggcacacgcacgagtccccggcaggcatcacaccacaacagaatggg

SEQ ID NO: 140381 - DNA, 441 bp, Glycine max
  unsure (1)..(441): unsure at all n locations
cacacagtataagctatcacagccaagcaaaacagagcaaaggcagaatactctgccaaaaataccaatcaaatattatagctnntcccactcaaagaccccagtaacaattccttcgatccatctcgcataccgttggatcgactccaaaactncactggaagactatagggcataagcctacattctgaccgttgggatctactagcaaacatccagaactcattctacattactctttccacaaccagcaaatacatggatttttctgcacttgcgcagaactctgctgcacaattttacagcaaaatctgcacaaagagcatatctcgaaaaccacacttgccttcatacaattatgcccaaatcaatgcctacaacgcccaattcatgtatcaatcatgtctaacccacaagcaagcgtcanaacacaacaacaca

SEQ ID NO: 140382 - DNA, 222 bp, Glycine max
ctgctaatcacggatgtatgcgcctctagttgactaataaatatggaaggcgggtggaatgaaacgctggtaatgctattatcaagcactcacttaatgtacttggaaataaatgattttacatgggatctatatgggtgtcaagcttattttatttgagtgtatgcatcggggacaatcccttctcaatatgaagggacataaaattgcatctctcaaatg

SEQ ID NO: 140383 - DNA, 333 bp, Glycine max
caaaatttatgtgccaagaaacttagacgacaacacgctaatagccccgaacaatctacgaccctcaactagttccacattatgatcgacaagcacaacgctgctatcatattgatgcccctgacctccagctctatgtccatctatgcgataaacatacagaacatagtatcgtgtaaagcctacacattgaaaatagaacaaaaaaaaatacttaaaagctactactaatatcgtgcttagataagctattctatgtgttgatggagagcaacatctacttgatctctgatagaactggggcctgacacagaataatacgaataacgtaca

SEQ ID NO: 140384 - DNA, 251 bp, Glycine max
  unsure (1)..(251): unsure at all n locations
agcttcctgatcaaggcaagtatgcgcctccagntcgcgaatntatattgaagcgcgggtgcttgacacgctggttacgcgcagaccagcctgagacaatgaccttgaggggaacacaatacaaatctggtgccttctttgcccattggggagtcaagtgaccaacctgaaccctatgctacaaacatttataatagaccccctcagcagcaaaaccaacaattgtggaataattttgatctgtcaagcag

SEQ ID NO: 140385 - DNA, 368 bp, Glycine max
  unsure (1)..(368): unsure at all n locations
ttcatctgggtcatttatgcctatgtgtgctcttcaatgncgacagacaacaactgattgttgatttgctttacaactgattgttgtaccaaacaaagtaaacacatatcctgttaaggatttcattgtgtctacattttctgcaacatctgcatctacatagcctgtgattgctacctcgtgtgctatcttcttgtaccttaatctagctttcaaagatccatttagatancctagtgtccacttcacagctttccagtgtgcactgccatgatctcccatgaatctgcttataatacatacagcatgagccaagtcaggtctgctgcaaaccattccatacattatgcttccaacaccattggcat

SEQ ID NO: 140386 - DNA, 251 bp, Glycine max
  unsure (1)..(251): unsure at all n locations
aaactctcattgaagtggcatggaaaggctncattcacatgaagctattgttggaggaccatgcccccacctattacatgtatggtgccttgccctacaccggctcacgtgggcatatagacgaacccaaaaccacttcgatttcccttgaagtccaccaagctggccacaccatttttgatgttccataagcacattacagtctcatatctgtgccctaacatcacacaagctaccatcatcgtagcatc

SEQ ID NO: 140387 - DNA, 421 bp, Glycine max
  unsure (1)..(421): unsure at all n locations
gcgaatntatattgaagcgcggttgtttgacacgctggttatggattgagcaggcggtaaatcgttgcaagtgggaccggggatgtcacctgttgcacagattaaccctttggtttctcgtgcgcactgcgacaaagtgtgttcattcctcgacgatgcgcaggcacagcaagcagagctgattcgcgggtcgaatggaccagccggagaggggtattatgttgcgccaacgctggtggtaaatcccgatgctaaattgcgcttaactcgtgaagaggtgtntggtccggtggtaaacctggtgcgagtagcggatggagaagaggcgttacaactggcaaacgacacggaatatggcttaactgccagtgtctggacgcanaatctcntccaggctctggaatatagcgatcgcttacag

SEQ ID NO: 140388 - DNA, 379 bp, Glycine max
gcccttatgagcctggattccctttccttgttttgagctcatacaagccttactgaaaaaccatgatattaccatatccttaaggaattttggagctttggaattgttttgggaaataagtgtgggggggcttttgtttcattggacaacttgttctgttggctatgcttcatgatgtatttgggccatacttgatgtacattgcatattggttaaatgttggacatgctgaatgaaatgttgtttctcacaggctaaagagttaaaaacaaataaattcgaaaataaaaaatttctaagatgaaaagacaagccataagttgagtgaaaagatcttaatggcacagatgataaactctggccactctcatgctaattt

SEQ ID NO: 140389 - DNA, 302 bp, Glycine max
  unsure (1)..(302): unsure at all n locations
gcagcatgaacatatgaacttgtataaacnactgggcaccgcgcactacattaactgagcttaaagctctactaaattctctagacatctggaccaaaatcataaacaaaagaaccccgagatttggattaaaggataaaataagaaaaatcgctcaaggtggcagaaaatttagtgtccaggaaaaaataatgttcttgtngtcttggctcaaatattggactatatttggagcctatacgataccaattctatctctgaaatttcaattgaaaattatcgtgaaatcaagcgccaaagct

SEQ ID NO: 140390 - DNA, 330 bp, Glycine max
  unsure (1)..(330): unsure at all n locations
ctcacactctcattacctgccaagaaccaaatcttgnnctttctggtcaattaggngcatgcaaatcccaaagcattgcatatctcattctgcacgaaattggcaacttcaatcttggactntccaccagcttgacatgtttgggattgaggtaacatcccgagaaattnnatgaaatatgtttgatttggattcaataagtggaaaaatggtgccaaacatttatacccactatctgntgtntcgtagaacatgctaaccttgacatcaacagccacaggaataatgttattggtgagctcagaaaacaaaggactaaaccttagcaaa

SEQ ID NO: 140391 - DNA, 416 bp, Glycine max
  unsure (1)..(416): unsure at all n locations
gactcaccatataaccttgacctctgggtgagaatgccaatccttaccctcggaagcaaaaaaagaatagatgttgaaatttcgatcaaagaaaaatagaaggaaaatttccaatgaaagcaaaaaataaatgaaggaaaattccccaatcatagagtgggagaaagcccaanaaggaaaagaaggaaaatcccccaatcatagagtgtgagaaagcaaaaagaatagacaggaaaattcccaatcatagaatgggataaatgtaaaatggtagaagaagaatgaaagaaagcttctgatctaggatcgaaagacaccagaataaatgtcatatattgctttggccagacatatctgtcagacataattgcaccaatgacgaaaaagattgaagggaccacgactatatagcttct

SEQ ID NO: 140392 - DNA, 249 bp, Glycine max
  unsure (1)..(249): unsure at all n locations
cataaccataacccatacatgaataatcgatattatattaatcaattaatctaacgtgaactattgncttcgtctatgtggaaccaaccatatcatataaggactcttgcaattgatatcgtaaacttatcagaaaaaaacatatcttctagttctatcaaattcatccataatattaaaatactttcaatatatatatatacatatacatatatatatatatatatatatatatatatatatacaaca

SEQ ID NO: 140393 - DNA, 149 bp, Glycine max
caggccaacgggggtttacacgcctgaaacctacccgaggctcaccagggtggaccttgggtttaacaagctttgggagaattgacactcacaagggggggccttggggttggccgacctttgggaaaagtgacactcaccaggggggg

SEQ ID NO: 140394 - DNA, 377 bp, Glycine max
  unsure (1)..(377): unsure at all n locations
cacacacacacacacacacacactgtattctattcgatcactcacatcaacttccattctccctttttgtttttgaatgtatgcttctcttaaaattaagtggatcactcatgtgagatcttgatccaatccatatttctctccccctttggcatccacaaaaagctaatttgcgtatcatgtataagacaaacatatactattaatcattcacaatgcatacattgtagaatataaacctatcatgaagcaagaaacctaattagatcagatatatagaaaaatcatattggcatatagcataatncattatttgtcagncatactaagcaaatattaaaagatatattaagcgctctnatgtcataataacatag

SEQ ID NO: 140395 - DNA, 249 bp, Glycine max
  unsure (1)..(249): unsure at all n locations
tgttgattcaatctcatcaattccatatcatgttccttgaacctaccaaacaacgtagaaagagacatgttagatagatctcgcgatacagtaatggctgttaccttttggtgtcattccctgcttaagcatcgcaaaactatatagattagagcttcatatggaaatatctnccctaaagatgcgagatgattaattttgtggggaacctcanttgcatgtcctgtatgctaatggcataacatgccc

SEQ ID NO: 140396 - DNA, 373 bp, Glycine max
  unsure (1)..(373): unsure at all n locations
tatcgagacgctcgaaatctaatgtngaacctacgagccaatacaaacgacaataactttcnactttgatgtctgatcgagtcccataatatatcgagacgctctaaaatttatgttgaaccttctgagccacatcaaacgacaataactctttactttgatgtccgtttttgtggagtgatatatcttgacgctctaaattgtatgttgaacttctgagccaacacaaacgacaataactntttactctgatgtatgatagagtcccgaaatatatcgagacgctcgacatctaatgtngaacttcttgatccaatctaatgacaataatctgccactttgatgtccgatccattgacgcaacatatcgcga

SEQ ID NO: 140397 - DNA, 148 bp, Glycine max
  unsure (1)..(148): unsure at all n locations
gacaagcggcctgagatatcttaagaagggggggcgaattagatattacaactatttccccaattaaaattctatttcactntctattcaagttacaaaatccattaaccatgaacttcttaaatattgattcaaatagaacaatctg

SEQ ID NO: 140398 - DNA, 363 bp, Glycine max
  unsure (1)..(363): unsure at all n locations
tgattataatgctggaatctgaagaagatgcacatcttcccttatatttagtcgagaatgtccgcgctccattaagcaaaatgccttgtgagtatctctatcataataaaccctttaaagctcaaatacattaattctactatggtcgctgaaatttggcacacatttacgtttcatgatattgtatagtgtattataattataagcaacaccaactttacatggccacaccctataaagcttatagtatagttcgggtatcatggaaaagcactaganacataccatcttgcgtcacatagacttatctatattatatatctcttatatctcgatacaacccgttacagcattccagtctcg

SEQ ID NO: 140399 - DNA, 90 bp, Glycine max
  unsure (1)..(90): unsure at all n locations
gtgcctngctacttcggaggtttgtgaacgaatgaaatcataaagctagaaggtttcttgaatgctcattgcatgtggtaatttttaaaa

SEQ ID NO: 140400 - DNA, 275 bp, Glycine max
tttttttttcacacgcccgggggatttcaccatggaccattatacaagaaagaggagaaaggcccatcataggaataacatggaacgagcctacacccaatgacctgataaaacctgaggtcttcaggaggaaaaaaggaagaaaaaagggacccgaattgagataaaaggaaaagggacttgagtttttacagacttattctaaagtcaacaggtcaccgctaatatgacagaaccctgaaacttttaaaactctgaacttactactcccccct

SEQ ID NO: 140401 - DNA, 358 bp, Glycine max
  unsure (1)..(358): unsure at all n locations
tccaatcttttatgttgaacagctattgttgaagtttaattatttcgatgcgaaacatgctcttactccttatgactcatccatcaagttaaagaaaaatttgagtaaatgaatttctttacataaatactctcaaagtatcggctctttgttgcatacgacaaacttctctatgcctgtctgacattgcacatgcatntggtagattggtaagcaactgagggatttagcgatataaaatttaagctctgatttcgatgaaataaaaacgatatgtgtgtatgnctttgcatnatcttgncgtgcagcaccatgaaaatctactagacaagntatcatctcacatgaaagcaaaaat

SEQ ID NO: 140402 - DNA, 350 bp, Glycine max
  unsure (1)..(350): unsure at all n locations
attagcatattcatgatttggtggcacgctcaccacttttcgtttctttaggaaactcaccataactaaaaaagcaaaaatgcacccctattacacttcgaccaaaatcaagatggataacatagattgagtgcatgaacagattaatgccgtcatgtcggctctataagatcagatggcttctatcatggaatccatgctaaacatncaaaaatcaatagaagacaatgttacgtcagccgcttgcaatacagctatggaaacggaatcgatgctacaacccataatgaacttatgccgggacagaagcgcgtcatgtttaaatttgattgttaggccncaagcctacc

SEQ ID NO: 140403 - DNA, 252 bp, Glycine max
  unsure (1)..(252): unsure at all n locations
caaccaagaagcaggtactagttacggagtctgaacctggcaatcaacaccattatagntgtcaactcatacaactctgtgccagacttctttggaagccttctcacaactaacttcttgtcgtctcttagcgtgccttgaaagccaacctctgctataatgatggaagttcgtaggaaaatataagctatggattttagttttctctatcaccttatattcttgtccaaagccacctactccaatcttgtt

SEQ ID NO: 140404 - DNA, 285 bp, Glycine max
  unsure (1)..(285): unsure at all n locations
caaaaccaagctcgaccaatcccgacccaacccgggcatagtctgtcagcgagaacctgtgatgnacctaagcaggcgagctcctggcagacaacagataaaaggaaaacaagaccacaaagcactgaggcttgtggtggctggcctcccgtgaatatcgtgcaaaatgtggatcggggcctctgcgaatcgagcaccaaatgggatgaatcgatgacaaggcttaaaattgacgacaggaggctaatatggtttcttgttatcgacaacctttgttgtgaatcc

SEQ ID NO: 140405 - DNA, 347 bp, Glycine max
  unsure (1)..(347): unsure at all n locations
cgcttcctcaactttcatttaccgttggatcntctcgaaattttgccttcaacttcacaaaacacttttctatgatctgaccaatgtgatctttgagaaaatatctgtagtgngctagatactcncagccccgagagcatctcttattttagcatctcagcctttgctttcttgtagcttaggaaaaatgccatttcttcttctttctttcttccaaatccattcctaaagcttcaatgtactttctccatcacccacatccaccattagccaccacaaaccattattgttctccattgaaaacccacatctataggaacccttcaaccgtagcagaattntcaact

SEQ ID NO: 140406 - DNA, 407 bp, Glycine max
  unsure (1)..(407): unsure at all n locations
acttccttgagaagctagagctttctacacacacccctcncataactaagctcacctgctntgatagctncctttagaagatncctaaagaagctagagcttagctacacatacctctctaatatctaagntcacctcctcgagatgagaagctagagcttagctacacactccctataatagctaagctcacccccatgacaaaatacatgagaatacaaaataaaatccctactacataaactactcaaaaggcctcgaaatacaaggctaaaaccctatactactataatggccaaaatacaaggcccaaacgaagganaaacctattctaatatttacaaagattagcgggctcatacttagcccatgggctcaaaatctaccctaaggctcatgagaaccct

SEQ ID NO: 140407 - DNA, 204 bp, Glycine max
tacccgacaaacctaagctcacataaacattttgagctgcaaatataaccccttgcactcctctattgtaatagaaccataatttaccggcccatcgcggaaacttggcgatgaagaacatgacaacatggggtcagacattttggaacacaacaaggacccattggcgcctcccttaaattgccaactcccatctgtgaaagg

SEQ ID NO: 140408 - DNA, 439 bp, Glycine max
  unsure (1)..(439): unsure at all n locations
tcagcttngacggacataccaagcactatgtaccatgttctgttaaaganctatatatacgcacgcgtanggtatagagaggaagaccacaaattcggatcacgtatattgcgtcaaagacgaacaaggcacagncttatcgcatgaaaaacatatcaaggataggtggcatgcgcatccccacaactcattcaatgaaggacatggatatgactctagcaggctagacacaagagaagaggaccggaactataagtactatcgtcggaaccagaaacatgaagtaaaggtagcgcggaaaagaatgagttatgtgattgcggcggggcccgacaacatacccattgtagcgtggaaaaccctcggagatagaggtcttgagaggctcaccgaaccctccaaccaaactatgaggccaaaacgcatgccggaggaatgt

SEQ ID NO: 140409 - DNA, 403 bp, Glycine max
  unsure (1)..(403): unsure at all n locations
actatcctaaacatatattttctcttagatccaaanccagcacctgtagnggtcagaataaggtctcatgtttagatgaaaaataacacatttcgcatgaagaaatatagncttgatttgttgattggtggcggcaaccaccctctccatagaaatctccccatgtagagtctacttgaataaccatggaaaaacaaatctatagcctgaagtacctggcctaatcctctacatatatctctactatccttcaggattctagacatatcacttaatattctgtcgggttatagtttcagtaccttattatatatccctcattttcctttaacgctaataattgtatnnttgaaaaattatagataactttagagcaagagtctcgcgaaactttggataaaac

SEQ ID NO: 140410 - DNA, 157 bp, Glycine max
agctacctcatgcactcctctaatgactatggcatcatttcttgcactaaactgcttggagttggaggccatcctctcaattaaattactggctttagctagagtcatgtctccaagggctccaccactggcagcatctatcatacttctctccata

SEQ ID NO: 140411 - DNA, 241 bp, Glycine max
  unsure (1)..(241): unsure at all n locations
aaaatttctgggtgaacttgaatttctagtgcatatatatagcccatgcctcacttgggcctcactcacaccttnntncatgatncttgacattcttgaaatcactgacaactgctacctattgtggcncaatctgcctaaaaaccttgatgttgcagccaaaatcatggcctaagaacatntattatagcatccttgaaatgaccatttgtgagaattcactngatcaccctatcttgtg

SEQ ID NO: 140412 - DNA, 470 bp, Glycine max
  unsure (1)..(470): unsure at all n locations
aggccaaaaatcgctgcctaatttggcaacatatatacctntatctttctactgttaaaacggcaattaaagaactgaagtcaaaatgataacgtaccgctactactactacctaactctagaattggcatcctaagagaactctctagattcgtgtagctcttaactctgcacatattttntatgataataaataagataataaatgaaattcatctctgataatgttatggcaatgaattgattctaagagacaaaaaatataaatctaatcttttatcgtgtatgttgtatctntaggattaattcgacattaattcacaaaatctaatgattatttcgcgattaaactatcagttaatctaccatatttcttttatatagttaaagactgaatntacactttccattccttagaatgaagttttgagtgacttacagnttcacgaataaatttaacatgtattcta

SEQ ID NO: 140413 - DNA, 405 bp, Glycine max
  unsure (1)..(405): unsure at all n locations
gcgggaaatctttattgttataacgcacacccgagtggcagtgcctttctgaactatacagccgctatataaaacacctccaccgccagnatctgacagagatgatttttgtgtgctntaggaaccaatacaaaatcctcctggccttacggtcgccctcttgagtgctttngtctcattggccacctttctttctatcctcttctggatgcagaggtccatactttttcgtacaaaaagaaatactgtcattatgctctattttacatctagcaggacacaaacagaaagagctatggtgtnnttcaaagcntcgtggtngnctcacctactgatactatattcgtcgctggattgtngtnttgctgagagccacaactgaaagctcccaaccttcgatcatga

SEQ ID NO: 140414 - DNA, 220 bp, Glycine max
  unsure (1)..(220): unsure at all n locations
atgtatcaactcacatgtcctgggctaaatgccgncaagacgataccctagaagatccatcgactaaaatcgctaccgaagctagacttgactcgctatggggcaaatttctcgttcttgcccccgaaccatgaataatgttgggtttaagcccttcgagtnccgccttgcaatttntngtggctgaaacctacatgtcgcaacatgcccttttgtgggc

SEQ ID NO: 140415 - DNA, 195 bp, Glycine max
  unsure (1)..(195): unsure at all n locations
gataaatgttgatgtcccacattacttccacgacacacatgcaacaatgatgacatggaaattctatgctaatctgtgcatgcatgcacttatgtggacactcaaccattaagtttctatgttcatgcgacactatggaccangatcacattcttcctattcacatcaaccctaatgatcccaaatcattttctt

SEQ ID NO: 140416 - DNA, 402 bp, Glycine max
  unsure (1)..(402): unsure at all n locations
tcttaatcaaaagagtctaagcctaataacgnaggtcttttgtgtttaatgcccncaaaattaatttttcattcnctaaaatttttctgttctttgagcatattttaaagtatctattctctgagcacatttctgtcttgcaaacatttgtttcctgataacttgaacaaagcacttaatgagtacttcgaagaagataaaaacaacatccttttgttgtgttggctttttngtgtaaaaatcatcncttaaaaataattcgcacaaatatagtgtatatcgtgaatgagaaatccatggtngagcatcaccgaattattctaaaaaatatattctcaaaacaaaaaatgagaatggaattaaacatcctcttatntttctcacttctaacacatcaataaa

SEQ ID NO: 140417 - DNA, 448 bp, Glycine max
  unsure (1)..(448): unsure at all n locations
gagaagctagagctatgctacacacacccatctaaaaactaagctcacctcctggagaagcttcctggagaagctagagcttagctacacacacccatctaaaaactaagctcacctctttgacaaaatacatgaaaatacaaaaataaagtctcgactacaaagactactcaaaatgccctgaaatacaaggctaaaaccctatgctactagaatggcaaaaaatacaaggcccaaacgaaggaaaaacctattctaatatttacaaagataagcaggctcatatttagcccatgggctcgaaatctaccctaaggctcatgagaaccctagtggcttcccttggatctctgacccaatctacttggagtcttctatccaatgccctggtggtgtttgatngcatcaatgcatgaagaactaatccaagcccatgacactaccacca

SEQ ID NO: 140418 - DNA, 439 bp, Glycine max
  unsure (1)..(439): unsure at all n locations
tccacaatatccaagcaattcaactttcaatctctagaactaccctaaaccaagaaaatatggcagactcctatcaatttagttggacctcaaggctggagaagagaaaacgagaatagtgtaatnttggtggaaactctcatgtcaaacaagcctataacattaatntagactcgctcaaactgattctaggtcgaaactccaccgattcatgagttgacccctcaacacccaatttaccctataaatgactctggctttcacattntgcactcattttnttctcatccgctcttgcccaggctttcttacaagncctaattgacattntaaactaagatcaactcactntagcctccaatgaccactaaccccaaatgtatcttttcaaacccctcaaagctcacattttcccactcacatcactaccattctcaca

SEQ ID NO: 140419 - DNA, 312 bp, Glycine max
  unsure (1)..(312): unsure at all n locations
aaacatacccattctgtttatggttnnngcgatgaaattngtgacgcccatatgctgaaacggctcatggaaaactgctagagatgaaaggtagagctaacctacggctataaagcgataatgtggtgctatgagtggaaaaagagcgacgctttgagagttggaacgctaagnctgaatcctgtgtgaaatgtaggttaaagngagccaatactagcttgtaatgtcatnnatgacttgggagaaagcttgtactgtgctagcgagaagaacaaatgaacaaagtgaacaaagagccatctctagggcaaa

SEQ ID NO: 140420 - DNA, 363 bp, Glycine max
  unsure (1)..(363): unsure at all n locations
cttcttctctaagctctttctttgaatatctgatgnngtttagagcttgaaacatctttgaaatcctgagagaaaaagattgagtgatgatctngtatattccgctctaagatgattaatctagtttatgcgcaaacaaacctcaacatatgtgctggtatatttagagtttaaagtggcttgtngaagaaagaatacttattgctgaaagctctggtatttgtngtgttgcaagaacaataagtggcaagaaaaacaacttgtaattctggtgaaatctagctaaactcgtcttgtcgcntagaattggacataatctctgtggaaaaatgatccagcataaaactttttgcgtcttatatc

SEQ ID NO: 140421 - DNA, 188 bp, Glycine max
taaaggcacaccgacggactgtttcatgtcagaccatatccctctacctcgaacgcctcatgtttttgttgaaagacccaaactaaattcatacaccaagacattctaatggattcactatcatccaatctctcgccatcatgtatacgattatagcgcgagatatgtccgagagaaaatataagaac

SEQ ID NO: 140422 - DNA, 259 bp, Glycine max
  unsure (1)..(259): unsure at all n locations
accgctttaagatcgctgnacaccagcagcgcttcgaggccatcaatgtattgtcgnnnctccgggagcgatcgcgccagctcatggacgatgagtatactgatttccaggattgaaaanggcgccttcggtgggcatcattggntactcccatggtcaagtcngatccagaataagnccttgagttntatgccaatgcttggccaacagatgatggctngcgtgacatgagaacctgtgatatgtgtcattggatccc

SEQ ID NO: 140423 - DNA, 475 bp, Glycine max
  unsure (1)..(475): unsure at all n locations
ggacacaagaaactcagctncaaanagaagacataccggttcaagatctaataatgataaagaacggatgaagaatagatgacgaacgacgaagtaaagtcacagattcgatcacaataaagtnacggtagacgtacgaaagcgcctcgaccttgatttatcttcttcagttaccttcgtctcactaattgtagtgaaaacatcttataaacgatgctgaccccttcccttcagcccttcatgcctatttaaaggaaaatgagtggatgaggtcgcatgacagctcacctatgcgatctggttgcttcatccctaagctctctagtgagccttgtggttggaataatgccccagagcgaccattncgcctctcctttgagtactttgcacatttccttccaaaacatcacagaaccctacggatnatgcggaaattaacatgaagcagctcaagtcaactgacaagaatcctaat

SEQ ID NO: 140424 - DNA, 449 bp, Glycine max
  unsure (1)..(449): unsure at all n locations
gactagacttagatcaaatcaacatattggaacagcnnatgttaaaccaaaacttaatccatagatccctcatntaagactatagttcaatcctacttcaatcaagntctaaggctacagtacatttcccaatgctaaagtcacctaactatgcacacaaatgggtgataagaccaagagcatacaggatntaagcactgaaagaagcattgaacacaataaacacaaccaattagatattaaaggaatnacatctgntgtnctntaaaaatccctaactatggngtntagccagccatnacagaaaaaccctaacaataatgagagttagagtagagaatgactactccttacacaagagagtgggatccatcctcttctctcagcatctcataatcactctgcaactcactaatctctntctaatcacagaacctaagtctctctgc

SEQ ID NO: 140425 - DNA, 458 bp, Glycine max
  unsure (1)..(458): unsure at all n locations
agcttcatntactattaagttgggaatgtncttcttaaaggacaagaaaaaaatagaaaatcctcgatccaagattggaggaaagcgaaagaaaaagagaaaatacctaatcaaagattggaggaaagttaaagaaaaattctcaatcaaagatcagaagaaagccaaagagaaatattcagaaaggtcgttggaccaaacaatgtctgaataatgtacagaagtgtcttaagagaaatagataagaaaggaaaccatgatttgaaacacatgaagcctcctttcttggttaccaaccaaatctttgtgccccgtctttttcatgctgcgctaaacaaaacaaaaaactggataggaataggccgaaacacccaaagccgaatttncctaccaaaacagtttcccgaaagtcttgttgatccatgaatgcgcgtgttatctntgatttgataggaaat

SEQ ID NO: 140426 - DNA, 285 bp, Glycine max
agcttctgcttcaacggaattagggtttgcgctttgtcttagaattttattctttggattggcaagaggccgtgctctataggctctccccttgggtgaaccaccgtggttgggtccctcgccaatgaagatgacctggattgcttttgttgttccgtcatggccacgcctagggaataattattatacatttacagagagagagagagacagtttcctatctttgattctggaacaaatagacggagaatagagagatgctggtgccttctggtggagttcact

SEQ ID NO: 140427 - DNA, 391 bp, Glycine max
acgggggatattctcggactaattaaattgatgtgtacaagctctccattcgcagtgttgaagacgtagctaaattaattaaatcaccatctacaggcctgtggctaaatatttagagtaaatggaagagtattagtttcttgtccttgaactggaatacactctttgtttcaaggcaagtcctgaatttatgccattggagtctgagctcaatctctacttgtgactcatcttgttttttgcattctaaaatacaatgcagcatgattcaatcctcaagcaaccaatttgattgagaaaatttctgaatctctcctgctaaagtgacctgcaattacatctcatacctgagcggattttataaaagtaaatcagcttagttttgaccact

SEQ ID NO: 140428 - DNA, 427 bp, Glycine max
  unsure (1)..(427): unsure at all n locations
agcttatggggggaanagctctaaatgcgacttctgttaagggcttngatatgatttattgaggattttcttcttaaagtgttgaggagatatggctataatgctactttctatttatggaatgaaactattctaatcctcgctaggtcctcaatctttgttaatgggaagtcagttggttttttcccttgcacaagaggagttagacaggggaccaccatctttcctttttgctattctatattgcagaggatnttggaagcaaagctttatgatgaatcananatgattcacacgtgttttgatgataacaatgatgacaacaaaagatgatgacaaaggtgatgaacaataagctcataagatcaaagaacaactcaagtgaatcaagaacatctcagtgaatcaagaacagtcagagtcaaga

SEQ ID NO: 140429 - DNA, 349 bp, Glycine max
  unsure (1)..(349): unsure at all n locations
gaagaggagaggggaggcaccattcactatggaataagccatagaagaaggagcttcaccaccaagaattgccttggataagaagctcgaagaggatgctctaatggaggaaaagaaagagagaatgggggagcacgaaatngaaggaataaaagagggagagaagcggaactttgaagtatgtctcacaagactctcattcatcaaagncacaacaagntgtacacatgctactnattaaagactangtagctacctggagaagctntcttgagaaaactcccttgagaagctgctttgagaaaacttcctagagaagcaagagcttagctacacacacccctctcat

SEQ ID NO: 140430 - DNA, 422 bp, Glycine max
  unsure (1)..(422): unsure at all n locations
agcttatctctntatttcttagcattctatttttcactctagttncaatcaaaatagcaatggtaggcctaagctttatgagacgagagctaatctcctttagctttcctacattatttaacccccttaaattccaagatataatcatgttaccacccctaggctctctagagagtcattcaaaacctctagagccttgaaaccattagaacaattaacattagatgtaccaattacctctatagctntgcctgtatgtcttgcagctntgcccattgtaatccaaccttctggtgtgtcctcttcttcagtttcaatattctgcacaggtatctttggaaggggatctgcctttacctcatctgcttgcttattcctaggtatccatttcttgacaactttcttctttccacattgatgac

SEQ ID NO: 140431 - DNA, 420 bp, Glycine max
  unsure (1)..(420): unsure at all n locations
actcaagctttgagatcctgtcatgatccanacacaaacaaaacacatggtttgagnnatcacanncgnaaacaggttgagataaatgaagacacatatataattttagggtaacaagctcaacttagcacaattcacatcattttaccactcatgtaacatcactnggcccaagaatctaataaaaaaatcacatntcacactttcacataatctcgtgtncagaacaacacattcaagtacaatacaacatctcatgctcacacaattcattactcaccatcacgtaacaaatcacattgatcattacatagacattatgcaacaaatacactaagactcaatntnatatgctatggtggattaggggagtgaaaaancncaacatgcgcctatgaatacatgacaagacaagncata

SEQ ID NO: 140432 - DNA, 314 bp, Glycine max
  unsure (1)..(314): unsure at all n locations
agcttcttatccaaggctcatcttggtggtatttctccttcttncatggcttattccctagcggataggcgcctctctcacttcttcttctttgtcttccactacatctccatggtggaaaatcaccattaaaggacctcattgaagctcaaagatccagcctccataaaagccccacaagcaagcttccatcaagttccctccacctttggaaggatttgacctcaaatcccgaggttctttatactctgggctccttccctcaacacccagtaaaagaacaaaaacatatgtattagtggtgcttggtattg

SEQ ID NO: 140433 - DNA, 190 bp, Glycine max
  unsure (1)..(190): unsure at all n locations
atctctatctgaaatgatntcctctagccatccatgcaatctcactactgtgtcatgaataattatgctactttggctgcactaaatgtgatgtcctaaagctatgaaatgggcatatcatgaaatctatctaccactactaatatgacattcatcccatgagacttctgcaaacctgtgatgaaaccat

SEQ ID NO: 140434 - DNA, 196 bp, Glycine max
atgattcaggtcattactcaaaatgctctggtttattcatatagatgtggttaaaatgccaacttgtgaaatgtgttgatatttcaagttggactatttttgactaagtatgcaaatgtattcttcttccctcttttattgagtggcatacgttcgccatttattatttttgtccaattggcagatataataaaaa

SEQ ID NO: 140435 - DNA, 400 bp, Glycine max
  unsure (1)..(400): unsure at all n locations
atgcaagctgtggactataccttcgaccaaacacggttttgtttcgcctccgcccttatttaaagcgggttgcagcaccggctccgcttccctaactgtactggaggcggatgtcgtgactttatcctctatagttttctggagttttaacatgaccttcgagatggaagccatttgatcttttaaagccgatagatcggccttcatctgttcctgcacgccctcttcattatccatttttctggatcgagtgttataggggtgccttggtgttttcttacgtatgatgaaactcctaaagaaataaacaacagtgagtatgccaccaaaacatgaatatgcaaatggatgatcggagcacttggantcaccccaaggttnttagataatattatgagtc

SEQ ID NO: 140436 - DNA, 367 bp, Glycine max
  unsure (1)..(367): unsure at all n locations
ataagctatcccaaagaaaaactattataacggatattcttatgacacaaataccatacagaacctacatgtttacttagtgtgggaaataacttttaatacaattggtaatccatacctttatgaacaggaattttgaaaggtcccacagaggatatggatgaaagtttgttccacccaaatttatgcaagataaagcccgcacacgaacctttcagcataaaaacaagaaaaacacttattaataaatgtagaaacagatgctatgaaggatataataatntattgaaaatttggcttcttatagagccaaatgtcatcaacagatatatgcagtccacttcacaatgtaagataagttataaat

SEQ ID NO: 140437 - DNA, 364 bp, Glycine max
  unsure (1)..(364): unsure at all n locations
tcagcatcaagcacatcttgtttgacctcaagaagccactctctctcccgngaattgctggactgcttntgnnctgcatcatcaaccacagcatcgatggaccgtagcgttgccttcatcttggacagcaacttctcatcgagctttcgnccactaaatgtagccaaaacatgacaagaatccatctttgccaacagcacctgaaggacagcaccgaanagagcaccacctatggtttctagnactggtatggntggaaagaaatggcctgatcaagaagaagaaaggatngtgaaaatttaaagtgaagctaaatcatgtgaatgactggctcgacatcaatgcagatagagtagagnttaca

SEQ ID NO: 140438 - DNA, 346 bp, Glycine max
  unsure (1)..(346): unsure at all n locations
tggacttgatggggcctatgcaagttgaaagccttggaggaaagaggtatgcctatgttgttggggatgacttctccagatttacctgggtcaactttatcagagaaaaatcagacacctttgaagtattcaaggagttgagtctaagacttcaaagagaaaaagactgtgtgatcaagagaatcatgagtgaccatggcagagagtttgaaaacagcaagtttactgaatactgcacatctgaaggcatcactcatgagttctctgcagccattacaccacagcaaaatggcatagttgaaaggaaaaacaggactttgcaagaggctgctanggtcatgcttta

SEQ ID NO: 140439 - DNA, 97 bp, Glycine max
  unsure (1)..(97): unsure at all n locations
agcaaaaaaaaaaaaaggaaaantctcganctaggatctgaagaaaacagaagaacaatgctatattgtcttcgaaccagacaatatctgaacaata

SEQ ID NO: 140440 - DNA, 372 bp, Glycine max
  unsure (1)..(372): unsure at all n locations
gctttcttataagncctaaatgatattccaactatgattaactcactttaacctccaaataccaccaaattcagatttggccttacaactcttaaaacctcactctttttccactcataacaccatattctcactttctaaccctagggtaactctacccttcatctctaacaggtttccataagcaatttcagcacataaacatcacaagcatcatcataaaaaccctaaaactgaatgggtaagcttaattcatccaaacatggcaatttcaacatgctttcaacaaatttcttcacaaataactatcatgaagcagaaacctagcaaaactactcatcatatctcccaaaacccaatacccacgaaaat

SEQ ID NO: 140441 - DNA, 385 bp, Glycine max
attctttgacctagtcacataaactaaaccatacttatgtcatacaatttcaaggaaaagaacaaatttattactatgaccatgcattgtataacaaaaatgcggatataagtaatattgaaatatataaataaataaaatataattcacctaattatatagtaaccttcatatgtcgccatatttcatctacatcatcctgactaatttcagagtctaaccaataacttgtaaaggagctttgtggcgaatacacattgtgcctcaaataacttataaccattaaccagtcaaggaacctttgacatatttcacactccttcattgatacatggttgcctaacataaataacatgagttataacattaagaatgacaatctttg

SEQ ID NO: 140442 - DNA, 375 bp, Glycine max
agcttatgagcaattgaatgatgaaaaggagattgatacgccgttgctttgtgccaccatggacgaccttaacaaggtcttgataccataaaagagttctaacagatcataatagaagatatttggagagggaaaaactctagaaagaagtgaaaatgattattagccactgaactaactcctaactaactaacttaactgagagtgcagttgaatactacaactctgtacaatactctaataagttcagtgggtaataatattttcattgtctcttttctaaagcttttcttttctctcaaatattctctttagaattctgttagactacaatatgctttagtgtgtttccacccagcataatagtctacttat

SEQ ID NO: 140443 - DNA, 400 bp, Glycine max
  unsure (1)..(400): unsure at all n locations
gcttaatgggatattgcacagcacctctttattttccganngaccatcaacactgaccccgctgntctacacactactcttatcatcctgggactttgtgtaaaaagaataccgattgatagcatatcgctttcaagttggaacattcatatttggacccatagctaacaatcttaatgtgtatgaagcactgtcatcggtgaagaatgtttgtctaaacctggatatgaaagttctattgttctcttgcaacaacctcatcatgttcatttttgagttaatacgactaacatgtngtttgtgagcatctattgtagggattacctcagctgtgttgtgtaatacatatagatgagcttgtgccaacttgtggcgatccatggctacaacattgaacccc

SEQ ID NO: 140444 - DNA, 267 bp, Glycine max
cctttttctgagccccatgaatagctttttcgttcatgcgtccttcacccgcaagtttggagccatgcgtggtgattgcttataagcaattatcatccttaacccttggtcggagccccatgaactgcgtattggtggatgcgttgttcacccaagagacttgaaccatgcgtagtgattgcatagtgcaattgttcatcctaaaccctttttcggagccccatgagtggcgtcttcgttgatgcgtacatcacccatgatgtttga

SEQ ID NO: 140445 - DNA, 360 bp, Glycine max
atgatgaataaatgagtatataaaaagagatttaagagcttctcaccaaagatttgagaggagtctcaagacactactatggagcttggaagaagatgaaaatggtgtccttttcctccttgaaaggctcatgcaagaagaagaaaataaacgctcaaggtttggtttttggagaggaaatggtgagaaattatgctaagctatgccttatgctattgataagctcacttgatgagctagaatggccatttcatggccatgttggaaaaggcgccatatttagtattctgcttttgaattttaacaaaatggttatgtaacttaacgaaattggtaatctgttttgctaaacggaatatc

SEQ ID NO: 140446 - DNA, 196 bp, Glycine max
  unsure (1)..(196): unsure at all n locations
ccagcaaaagccggacnggattacagacagacccgcggggaccaaacccaagcaccaaaaagacggggcaaggaatgaagaccccacaggccagaacgccagcgcccgaaaccgccagaaaaagcaggaaaatagccaaacaacaagacaacagacaaactatggaccacaacaccgaacaaagcctgcgcaaaaa

SEQ ID NO: 140447 - DNA, 461 bp, Glycine max
  unsure (1)..(461): unsure at all n locations
ttaagccacgcggctgcagctgaagtgtgtaccaccattnccatttataatatggttatgtgtctactatcattgtcatcatttttttcgtcattgaggtgccacttgagctgccaggttctccacctttgggtgtattctttgaaagatccgtgccccctttttgcacatgttttgtagttgcatcctatcagaagccattataccgacactgtctaacgaaggcaaccattatgtcctccctggaatggactcgggaaggttccaagttagtgtaccagggaacaactaccccagttagactttcttggaaggaatgtatcaacacattctcatcttttgcgtatgcccccatcttccgacaatacatctttagatggttcttgtggcaagtagtccccttgtacttgtcaaaggtcaccaccttgaacttgggaggggtgatgatattggatactacg

SEQ ID NO: 140448 - DNA, 451 bp, Glycine max
  unsure (1)..(451): unsure at all n locations
gcagctaaccaaacgcttgttacaaaagaactagntggtctgttttctcatcacaattgacgaatacgtangagcaaagggaaacacccttgtcgaccacaaaaagacaaaaatattaaaaggcataaaaatacataagaacgttaaaagggaagataacataaattgaagtcatatttgcacatttgattaaaaggtgtcatcccttgtgacggacgtgtggggtgctaataccttccncgtgcgtaaatacaactcccgaacctttcatttaaagttcgtagaccacgtcttattctgtttttccgacattttcctcaaataaacgttggtggcgactccacacgtatttctttcttggaacacgcacccgcgagtcacgcgtttgcctcccgcaaagggtaggttgcgacacctctcaagcttcttctacacctaaaaaggaggatga

SEQ ID NO: 140449 - DNA, 133 bp, Glycine max
ccactgggacgatactctttatgcaaaaatggcatataacctgctcccaaaaatacaaacaccgatgaagatttagagcaagcttatgcgcataatatcttacatacgcactctggctcagacatttaaccga

SEQ ID NO: 140450 - DNA, 340 bp, Glycine max
  unsure (1)..(340): unsure at all n locations
aacttgatgcccacaaatgtacaaagaaaagaaaactgaattagacctctgaattgaatgtggcaagcatactaataatactaataactcatgtgaactacctcaaactctgaaggaatgggaagggaatctagtatggcagggcattttccacccaactctagagtaacaggagttaaattctttgcagcagcagacatcactacgcttgccacacgtggacttnctgagaatttatacaccatggagaaataattctagaaccagaattcagcttgtagtcactcttggaggattatatcttattcttaaatgagattataagccaaccaccaagtta

SEQ ID NO: 140451 - DNA, 297 bp, Glycine max
  unsure (1)..(297): unsure at all n locations
acctaatgggatgtgtatggttaatttatctaagaatgggaggggtggtctgaacatgaaaaactagtccttctaatcccaaaaatattaaataacttttcatttggtccattctcctcatttttaatggaaattctcaatgaatttatggtaattaaaacctcttttttttttaccggttatttgaaaccaatcagtttaatacttaatgaantgcataatactaatcattgtattggtagaattaggtagagaatggtttatgtccaattgcatgatcaaactctttggataatc

SEQ ID NO: 140452 - DNA, 293 bp, Glycine max
  unsure (1)..(293): unsure at all n locations
gggataaagataaagaataagtggagaataacattcttatacccactcaactacctcaagaagaagctgttgtagaagactctggtgaaccaccttcacctccaccacaacaactagatcaataactatcatcactagagtctactccaagtcgatttatatctctggtggacatatatgaatcctgtaactttgccatactntaacctggtagctttgaagtagcgtcaaagcttgaagattgtgtcatggcaatggtagaagagatacatatgatcgagaaaaacaacata

SEQ ID NO: 140453 - DNA, 464 bp, Glycine max
agcttgagtgagccaccatagagtgagtcgatctctttatagagctctttaagagagaagataaatagcttgggaagtttctatcctcaagcttgagtaagcctctctgagagagaagataaatagcttgggaagtctctatcctcaagcttgagtgagccaccataaagtgagtcaattttgtaaacacatccttgtaaccctactatcactttgtatagtggaagaatctccatattggagaattataatcgtgtgcccccattactacctttaattactaagtgcctatcttaaacttcacgaagcgggaaagtatgagttttcccaacagcttgacatctgcatcaaattattgtctatgttgtcctctggccttggctatgtagaattggtatctgaaattaataagcatgaaatctgtatcatatttaaatacataaataagatacaatatgtttatg

SEQ ID NO: 140454 - DNA, 268 bp, Glycine max
  unsure (1)..(268): unsure at all n locations
ggcctcttcctccttctgcaaatttacccactgatggcacagggaaactactattggnattaccaatattgctattagcaccacccattgattcattaacaataaaatgatatttttgtttntggntgaaaanncccaatactcgcataacccttccccttcgacttccccctctaagaatcatagaattttgtgnttntattnngctagaatnccctnccatcntttaatncactctctctctctctctctctagngagcacggacc

SEQ ID NO: 140455 - DNA, 415 bp, Glycine max
  unsure (1)..(415): unsure at all n locations
agcttgccacccagctcgcccaggcgagctaggtttgcttcccagaacgcaccgccttctggaggaacttcttggaaggctcaagtgggccgggttgctatttgcacccctatttactaaatacacccctgcactttttttgctgattctttttccgtaaccgtacggaactttaccaattttgcaacgatacttgttttcattccgtaatgtcacagaaccttatggattacgtaatcatcccttttttggctttcggaatgttacagaacttcacgaattgtgcaacaatgcttccttttgacttccgacatgttacggaacctcacggattgtgcaacaatgcttcctnttaactttcggcatgttacggaacttcacagattgcctaacaatgtgtgccaattacctcgaa

SEQ ID NO: 140456 - DNA, 287 bp, Glycine max
  unsure (1)..(287): unsure at all n locations
aagatagaatcaagaacacttcatgattcaagagttaagtcgaagaacacttcaagattcacgattaaagttgatttctagaatcaagaatctagattctattgatcttgcttcaagaatctagatcaagattcaagactttagattcaagaatcaagagaaggcttaatcaagtatagtatgatatggttttttcaaaaattgagtaacacatgtgattttctcatatcatgtgnaccatagaggatntactctcttgttatcgactaccagattattgtaatcga

SEQ ID NO: 140457 - DNA, 205 bp, Glycine max
aagaatagaatatattatttttggttttaagccctgatttggctatgtttttatgacatttgaacacttaatatttcttttaatatttgcttagtatgaatgaacatgaagataatatttacttgctcttggttgcttatgggtatgggtgttaaacttaattatttcgatgatatatatcgctaagggtatgaacttacaattg

SEQ ID NO: 140458 - DNA, 379 bp, Glycine max
  unsure (1)..(379): unsure at all n locations
aatggccattgaaagacaccttaattagcacattacatgacttatccatgttttttttcacaagtatgtaagctacaaacatttctctaacaataacaaaatgttcaatcttctcataaatctacaaagtgtgtggtcaacctcatcaaattggtacactgctacattctactaatataaggagtangccactattntgcttgtaatgacaatgtgttgaccataacaaagctgctggcgacaaggaacaaccttctcttagacatacctgctatataggcatatacacattcaaatgatcacanacacttttataataaaaaatttacaaacaagacaatcattattttacctgaaaaaatgattgggatacacatga

SEQ ID NO: 140459 - DNA, 338 bp, Glycine max
ggtgattttcatccatggagtggcagcggaagataaaggagaagaagagagaggaggcgccatctactagggaataagccatggaaggagaaacttctccaccaagagagtgccttggataaaaagcttagagaggaagcttcaatggaggaagagaatgatggagagagagagagagaaagtggcatggaaaatcgaaggaagagaaagagagaagttgaagcttgaagtgtgtctcacaaaactcttattcatcaaagatctgacgagtgttacacatgtgtctatctatagcctacgccactatctgtgaatttcatttccatttcatgtgaatc

SEQ ID NO: 140460 - DNA, 386 bp, Glycine max
  unsure (1)..(386): unsure at all n locations
acttgcttatcttgtgataagcgccttgcacaagcttanacattttcttaattaatgaatgatcatatctgtttggcccataacgttaacaatgggcctcttaaactctattgatggatctaccctccacaggagtactgcttcatgccatacaccaaaaaaaggagttgccctgttgggtacccatggaatgcgattccatgtaagcataggaacatctcatgccagtctttgatgtgatcccatcttctgactatcttttgatgtttttgttgcagctcaactgcgccattcatctgaagtctgaaagagaaaattgtgatgctcaatcttaatttttacacagatcttcatatttgttgtcaaattgctcattatctgtatga

SEQ ID NO: 140461 - DNA, 413 bp, Glycine max
  unsure (1)..(413): unsure at all n locations
agcttgnggtggaagngcattaacacatccctatcttaaatgggtacaaacgcaggtcatgatattgacacgagaggttgcttatcactcaagcaattggttattgcgtttcttggtcttactgtgacatttataaaagataaaactcccatcttcttttatagctatgtatatatacatagtccaccctgtcttgataaaagattgtgatacccaattttaaaatttaatcaatctttattctatccttattgatagatttggatattatagtcgttaaaaatgtaattcttttggtataaaaaataatgtaatcttgttcaagtctggtaanaaataatagttactcagacaactacaatggttgcccctgaataaaaanagatacaanaataaccaaatcaaattaaact

SEQ ID NO: 140462 - DNA, 274 bp, Glycine max
  unsure (1)..(274): unsure at all n locations
atcatatattagntgcaacatgactatttgagaaaccatgcatggaaagcaaattaaattgctgataatgtaaaatgaattaaattnctctcataagcataagtttaaatcaacttttagataatctaaatgacactctgttatggtgtagacaatttagtnnattctacccttaactcgcgngactattnnattctatttctcnttccattcaatcatgtaatcatgtagatcnatggagaaannnatctaaacaacacacaaaaacctctga

SEQ ID NO: 140463 - DNA, 312 bp, Glycine max
caatcaatcaatcaataattcattcaacttaaactgggtgcaagggataaaccattccaacacatggtcacccttgtgtgctaagggctatcacactcaaacatggcctcatcatccctaatttcatgccattcagccatacttcaaagattcatgaaaaattcagtactaaatgatagtcgtttctctcaaactttaaagatgacactctcagcggaatacggtcaatgcattccttcgcaatcaatctgacaaactgactaacattttcagtcaaattctaatcacatgttcttttctctctagcggatg

SEQ ID NO: 140464 - DNA, 111 bp, Glycine max
  unsure (1)..(111): unsure at all n locations
gaataacactnnaatcgattacttagataatctaatncatcatttcattgagataatcgattacagtatagatttaatcaatcatatgcagntataatctnttctctataa

SEQ ID NO: 140465 - DNA, 413 bp, Glycine max
  unsure (1)..(413): unsure at all n locations
agctgnntgtgtttgacctctcaatgatcattttttattttaatatttttcttcaatatctttcataattatcctgtcctctaaaattgatcaaccatgcaatntactctcctttaggtctaaagtagctctatttgcaaatgtttaaaccatcttaatcaatttttttttattctttcttcagtaaatgtcacaccaatatcttttctcatcccaatcatttatatcttattacttatatgactatacattcctcttaacattctaaattctacttctcttttttgggctattcatttaaagtcaaacattcactttgtaattactttgtagtcatcactaactctatataattttctatcttctccatccattttgtataccatgtgtgacttttgttaatttcttcatac

SEQ ID NO: 140466 - DNA, 384 bp, Glycine max
  unsure (1)..(384): unsure at all n locations
agcttcacagtaattagcttctaagttgaatttttgaactaatcaacatacaattgtactcaataaaaaggcaggtttattntatttgctttctttttcagccgggtgcatgtttcgacagaattatttttacgaaccgcacccacccaacattatccgacagaacagattttttttttttattaaccagatacccgaagttacccgcccattttgcctcttttaattcaaatttgtccgttttcaaggggtgtcatttcttgctcacccttacttaaatttgagnttgaacctaatttaatttcaaaaactatattataggataagaaatatcaccaacttataatattcaaataacatttttaatcaatttggaacttaagc

SEQ ID NO: 140467 - DNA, 249 bp, Glycine max
  unsure (1)..(249): unsure at all n locations
acaaatcacacataaatccaccatccctagttgcccaccttcaactgagctcacgtactcccatgtagcccttatcctcgttcctctcaacaccgggtccccatcaatccctccaagcttnncaaacatccaagaaattcaacatcccaacatcatgaactatcaaaaaccaagaaaacagggcagaggcagaanactctgcccaaaacacaaaccaataccataacttntcttactcaaataccccag

SEQ ID NO: 140468 - DNA, 291 bp, Glycine max
  unsure (1)..(291): unsure at all n locations
gcaacactcatgggctaagcgcgtggaagactctggaagaagatgatctgntcatgttngctaagcgcaccgcttcatctcactaaacgcaccgtttcagntcatctgctaagcgagaaagacacgcactaagccaaaattcactaatgtgcactattgcggccatatgtgtgctaagcgcacgagcacgaacaaggccacttatnnaancctgaaatcatattttagagatggagnntggattgngatnnagagcttnacatggctatggnntctagagagagaaaggtt

SEQ ID NO: 140469 - DNA, 369 bp, Glycine max
  unsure (1)..(369): unsure at all n locations
ccaatcatatctagcttctccttcattgcacttacccacttcgtatcagtagcagctttattgtagtctacaggctccattataacaacattacatctttgataaatatcagatttagattctagtnctctaactggttgggcattcacatcttcttcgctctcttcctgaattggatagctctcactttcctagctccatttntcttcttcaaagaatagcacatctctgatacaataactgcattactttgtggcaagaatatnctatatgctnttgatgntgagctatagcccacaaagaatcccgctctcgcctttntataattgttgctctcttattctgtggaatattagagaaacacaagca

SEQ ID NO: 140470 - DNA, 166 bp, Glycine max
  unsure (1)..(166): unsure at all n locations
tgcagctttgggagtatttctctcactctacttagacatatttgaaaaaaattgccttgactgtcaaaagcaaattagaaaccctcgacatatgattaaaanccatattcctcttcttcttcttcttcttcttcttcttcttcttcttctctctctctctctctct

SEQ ID NO: 140471 - DNA, 265 bp, Glycine max
  unsure (1)..(265): unsure at all n locations
gaaaacttccttgagaagcttcttggagaaaacttccttgagaagctagagcttagctatacacacccatctaaaaactaagctcacctcctngagaagcttcctcgagaagctagagcttaactacacacacccatctaaaaactaagctcatctccttgacaaaatacatgaaaatacaaaataaagnccctactacatagactactcanaattccctgaaatacaaagctaataccctatactactataatggtcaaaatac

SEQ ID NO: 140472 - DNA, 383 bp, Glycine max
  unsure (1)..(383): unsure at all n locations
acatttggaaagtagtttntaccaagaaatgctacccttaaaacaaaaatggcatacaaccccctccaataaatacaaacatcaatggaaatttagagcaagcttatgcgcatacttctttacaaacggtcacttgcacaagacattcttataactaagaaaaatgcacccatatacaatcaaggcaccttcgttacctaaattatttacatgtacttccaaggtgtatttgttacctacatcacacacatttcctttgctaaattcacatacatgcatactctaagcactttggctatcaaaaaatgcatancgtgcacatctggtatttctaatacctatacatacacaaacttcatgatgaatcttgactatctacacaa

SEQ ID NO: 140473 - DNA, 351 bp, Glycine max
  unsure (1)..(351): unsure at all n locations
catgcaagcttgtgaagngctgattttcatcctctcgcttaaccaatctnttttcttatcaagcaatccgccaagcgcaacactccacgactgagcgtgaggaagaatcttgaagaaggatgaattgtgcatgttcactgaatgaagggtcatcccgcttagcacaccgctttagtccatctgctgagtgagaaaagcgcatgcttagccaaaattcactaatgcgcgctaagcggttcagagttgtattaagcgcgcaagcacaaacaaagccacctatttaagcctgaaatcaaatattagaggggggtttggccttttcttgaagcttttgcatgcctagatatttct

SEQ ID NO: 140474 - DNA, 399 bp, Glycine max
  unsure (1)..(399): unsure at all n locations
gacatggcttccgaacggaaccagctttatgggatgactaaacgagagcatgagtccattaaggaatatgcccagagatggttagatctcgcagcccaattcgnaccgcccatgacgaagatggatatgatcacaactatgggagatacgnnactcacgntctactatgaaaagctgataggctacatgccagctaaccttgcagatactcgcntcgccggagaaaggatngaatccggactacgaanatgcaagntcgaatatgctgccaatatggcccccaacaacaacagaagagctctagtagtgggcgcgagaaaaaatgaaggagacaccctctgcggcaccaccgccccaacatggatgaaagcaccccaaaatatccaaagctcataccag

SEQ ID NO: 140475 - DNA, 424 bp, Glycine max
  unsure (1)..(424): unsure at all n locations
tactttcgtatgggttacttcagagacaagtcacaagtttccaatccaatctcttcaacattggtgataactctacaactcaaccacaaaggggaaacaaattaatttaatttgcaatatattgcaaagcatctcatcaacataaccaaagtttatttaaccttaaaatctctcacacttacataaataaacagaagtagtctgaaaatgaatttcctttgagaattgaattcaacttaaacttaaacaactgactntgattagtgactcctcaccagccatagaatcagatatcagatatgggataaaaaatgtagtactatcattgaaatcaataaaataagagacaaatgatgtcaaacctgatctccaaanaagtcaatcatagctgccattcttggctgaagcaattgttttgcagtgg

SEQ ID NO: 140476 - DNA, 460 bp, Glycine max
  unsure (1)..(460): unsure at all n locations
atccttgagtcaccgcngctgcagctatanattgaaagcttttcagacatttcgtatttctcctgaaagtgaattgtaactcaagtccaaaaagtattgtaaatcacgaaggtttccaatttggtagggaattgtgccattcaagtcattgttgctcaaatttaaattctgcaagtccgagatgtcccctatctgatttggaattggtcctaacagcttgttcatggacaagtctaaggagtgcaaattggaaaggtttccaatttctgctggtataattccagagagtttgttgtcgcttaaatttaattcatacaagttgaaggaatttcctatctgtgaaggaatgtctcctgatatttggttggacgataggtcaagcttatgcagttggtccaactgaaaaatctcacctggaatggtaccacttatttcattccctgccatgttgagaacttgc

SEQ ID NO: 140477 - DNA, 248 bp, Glycine max
  unsure (1)..(248): unsure at all n locations
atatcgaatacattgatctataccaattnnatgctccactatgctagaatgcaaatctcacatccctgccaaaaatgaattcaagtagattcaaatatttggctggcctaattgattttagaaaacttaacattgcatgtagcatgaactncactagaatcgatgtcatgtttatttgcgtgcatatcgcgtctgantcatgtcttgatgatcatgtgnatgcatatctnaatagaaatgatgttcaa

SEQ ID NO: 140478 - DNA, 433 bp, Glycine max
  unsure (1)..(433): unsure at all n locations
agctngagctgggntcacacctcgtaatcatgaatgtgaaatctgatcgccaatacttcaacaacatctcatagggatgaatgactcgggcatactttaagcttatgcacggaaaatgtaattatgaaattgagatgcccgaagaaacaccatttcctagttaaccatgcattaggtaccatgttcaattattttgtttttaagtgaaacgggtttatgatcccaacatggttggctcctaacacatgaaactaagaatgtagtgtgaagtttcacgcttcccccttctttggttttgttttgtagaggaaaacgcaaggatgagcaaacatgaaaacaaatggtatgcaattttgcagatcaaaaagttggttgaacgcatatgcatgatgatgccatgactcatgcaaaatgtgaggctggaatatgataa

SEQ ID NO: 140479 - DNA, 439 bp, Glycine max
  unsure (1)..(439): unsure at all n locations
agcttcatgatgaatcaagattgattcaagagttttgatgataacaaagataatgacaaaaagctcaaaagtcaagaacacttcatgataacaaagatgatgatctcaagaatcaaagaatgagttcaagattgagtcaagcacacttcaaggataaagaggaaatttgatttcaagaatcaggaatcaagtttcaagaatcaagatcaagattcaagactcaagattcaagaatcaagagaagactcactcaagataagtatcaaaaagttttttcaaaaactgagtagcacatgaattnttctcaaaaccattttaccaaagagttnttactctctggtaatcgattaccagaatattgtaatcgattaccagtagcaaaatggatttaaaaagctttcaactgaattataacgtccaattgattcaaatggtgaat

SEQ ID NO: 140480 - DNA, 224 bp, Glycine max
  unsure (1)..(224): unsure at all n locations
aacaacatatatcatctggtgaagcagcctctcaggcctccccctttcaaaggcaagcctgactagaggaccaacatcatctccattttgcatcaaattagccagaaccatatcctcccctccattactggtctccataacacctcttcttatttgctntatatcctngatgacatgaatccctggaatntcgacgacacaantctcattataaaccatatact

SEQ ID NO: 140481 - DNA, 379 bp, Glycine max
agatacagctagcaagctgtgttaccttttcacatctagtgcgacaaatggaataagacgctctgaaagaagttgggcaatgatctgaaccataacaacaaatatcacacctaaatcaattatgtatactgtgaactaatttatcaaacctaaaaaagagagagaacttacctggccaactcgtccaaatccacaataaattatatgatcttgcagatcatctgtctgtagcagatacccacccaaaagatgtatactactacaatttcatgtctataagaaaattgcaaacgggtaacccctatgggttagctggtacactatctacctctggcgtaagaagaactccaacgtaatctacttaaactactatatactt

SEQ ID NO: 140482 - DNA, 367 bp, Glycine max
  unsure (1)..(367): unsure at all n locations
ggcttttatttcttagactggcactccccctcatggggtatgaatgcatatgccttaaatttgccaaaatatctctcacatatttcttttgagaaagaaaaattctaacatctgattacactagttctatacccagaaagtaatgtatcatgcccagatcagtcattttgaacttattcatcatagacttcttgaattcatcaaacatgagggtacaatttccagtaaatataagatcatcagcatataagcatactatgagcatttttcttttttcatcagaattaataaacaatgaatgctcataggggccattntgtaaaccaacttttatgaaataagactcaatgcgactatatcaagctcg

SEQ ID NO: 140483 - DNA, 422 bp, Glycine max
ctgcagctgaatagaggtaaaggtgatttttatttttttcttgaccacagagtggtacctggagatatgtcgtggggggtaaaagactttggggacgtcaggtggggtgctattttccaaaaccaagcttgaccaatcccgacccaacccgggcatagtcagtcagtgagaacctgtgatgtacctaagcaggcgagctcctggcagtcaacagataaaaggaactaagaccacaaagcaaggaggcttgtgtggtggctggccagctgtgaactttgattgatatatgggatatggcctctggtaatcgattaccaagggtgggtaatcgattacaaggcttaaaaatgaagacaagaggctaagatggtctctggtaatcgattaccaaggggtgtaatcgattaccatgcttgtaaatg

SEQ ID NO: 140484 - DNA, 235 bp, Glycine max
  unsure (1)..(235): unsure at all n locations
ccagctcgagcaacaacagaatgtgtggatgagctcacccctcctgagccctcttatttggatgcagtgaaacacatggctctggatgaggangcttcaacagaccatatcctagagccatccgcagcacccatacctgangatgccacaccatttgcaccaacacctgagttatagcagcctatctcttagaaaaccatgaattgttggaagccaccccatacaagcctgaaag

SEQ ID NO: 140485 - DNA, 341 bp, Glycine max
aaaaaacaaaatatgcattctttcgcattgctctttaacttttaactgtacaatataaaaaatgcctgtccaggccgaccatataatttctatataagataacatgcatctaataatttctagcacaatatgaaagaagcaccacttaaaaccaaaaccaaggttcacgataactaaaatacagcatttaccttcctcaaataaacagataaaatggcacatccatataagagagcattggaagaaaatatctttctttttaaaaaaaaaataatctaagaccttcaccctctctaagaatattaggcagctaagatacctcagacatgagctttgctccg

SEQ ID NO: 140486 - DNA, 288 bp, Glycine max
  unsure (1)..(288): unsure at all n locations
ctttgaaaaaagctatanttattattccaaaagatgtgcggtacgtgaataaaatcaacacttagcttacaacaagttaatgggatcttttagtgaataatatatttacttgcacaaagtgattttcattgacaaatctaattgcaataagatgagtgagatgcaactggtgtgagactcctaagtggaaagaaccaacttggcagcctaaataagtggaccgattccacattatatcaaccagtaataacattacccattgtgggaatgatcatctacttcacagta

SEQ ID NO: 140487 - DNA, 460 bp, Glycine max
  unsure (1)..(460): unsure at all n locations
agccgcgctgcngcatgcaagcttcacgtcatgtctcctccgaggagaagttttctattggaacttcttacganccacaaggggttgttgaataccatcaaatcacttccggtcatacccatagcggtattagaaaccaaagacataatggaataaggatgtaccttgtagtgaggaagacgatctgaatatagaaggaaattgctagatccgcacagaagatgcaaagagattactagaaatgaactccaactcttaatgaacgtgaccgaaaccgaatgtacaccccatttaagtgaggatgcaaccctctagtaattttcgagagttgaaatgacgcccttatatattgcaccacgatgtgatctgaccaacccatttacacgctttaagatgtgcccctcatatataacatgtgtgcaaagcaaggagtgacaacacacaccattttgaaaaatga

SEQ ID NO: 140488 - DNA, 312 bp, Glycine max
  unsure (1)..(312): unsure at all n locations
ggcaatagacctaaatatttgtgaagccatagaaatatggccttatatacccacctcaggagatagagttacaatatatgtgagcncattaagngaaagcattacaatagaaaaacctatagatttatggcttttagaggatagaaatcgagtacaatacaatttaatagccaaaaacataataacaactgccctaggaatggatgaacattttattggcncatantgttagagtgctaatgtaatgngggacactcttccattaacacatgaatgaactactaattatgttagatctacgataaatgcact

SEQ ID NO: 140489 - DNA, 160 bp, Glycine max
aaaaacaggagaggaaaaagggaaaaacgaaacaagcaaagcggaaaacgcaagggaagagagagtagcagcggcaagcggaacaaagaaatataaaaaaaagcgagggaaacaacgagaaggtgaaaaaaacaggaaggaaagagaaagccggcgaaaa

SEQ ID NO: 140490 - DNA, 418 bp, Glycine max
  unsure (1)..(418): unsure at all n locations
gaccttaagtcacctgcggcatggcaagcttgactggagncatcttgagatttccttctgtgaccatgacanggagtctcagacaatccaaagacaattatcataataatcatcgttcatctatcatctatcatctatctttcaatctatctgtcgctatcgtggttcatccctggctacataaggtagtgaatccctgctctgcttccttccaaaggagttgtagggacacttcttctttcaagaaaagttctttgctcaaaaagctgtgggatgcgtgtttgtcattctcttatccctttgccaaaagagcaaaggactagccggctgaattctttgggtctgctctctcccttgaaaaagaatgaggactaaccggctgaattctttgtgtcctcttctcccttacaaagattca

SEQ ID NO: 140491 - DNA, 260 bp, Glycine max
  unsure (1)..(260): unsure at all n locations
cttgagaagctataccttaactacacacacgcctctaataactaagctcatctctttgagaagctcccttgagaaactccctcgagaagatncctgaagaagctagagcttagctacacacacccttctaatagctaagctcacctcctttagaagagaaactataaatcaactacacacacccgctataatagctaagctcacccttatgccaaagatacatgaaaanacaatatatgccctactacatagactacttc

SEQ ID NO: 140492 - DNA, 433 bp, Glycine max
  unsure (1)..(433): unsure at all n locations
agcttgcatatgnagcatggtttnaataactctatcgagatgacacaaaancannaaaacaatatcaagtagacttaaaatctcaaatctattgggtgattctttgaatcgaacatgatcttatatgacacaaaatgattatcccgattatagtaatcaacattaaatttagtattcaaaagaagataaatgctatcaacacactctctagcacattcttttaatcacactctaccgcattggttgaaatttattgaaaaagacaaaatttagaagggcctacatcatatttaaacaatntttaaaaggcactcaagatatctgaatgtgtattntatatttgacgctcaattattntggagtctccaaacaaaaaagggagattgaatataatacaaatgatataaagtcaatacgtatgattaaaaaggaa

SEQ ID NO: 140493 - DNA, 380 bp, Glycine max
  unsure (1)..(380): unsure at all n locations
tactgtggacgctacaaacctgttntttttagagatgacaacccacgtgaatgagcggattgaatattctcaacctatcctatgagtgggcattaattatctaaaactattggcttattttaaaataatcacacccacacacacgcctatttgtttctttaatgtgatacttccttcctttgggttcaaatataaaaaaaatctttcaaatattaaaagactacaactgaagcgatcttatttaatattattatctgtaaaacattcctcatttaaatgaggtattaattttactgatgtcttattcttaatactaaattctaatgaatgataagtcagaaccaaatatcttctaattaaaattaagttaaataaatatg

SEQ ID NO: 140494 - DNA, 239 bp, Glycine max
actaggaaattggcgagtggaggagcgcccaaacgtttacacgacgagcataatgtaaccctttgtagctctaaaactctacggttgggcctaagctttagagtttccttttgttaaggcattatgtcttttgttcttgagtttataatataaagactttcttcatctgttcctgtgcctccatccattctcattcatttgcatgtttatttctttacgcttaaaacaccagatctgac

SEQ ID NO: 140495 - DNA, 361 bp, Glycine max
  unsure (1)..(361): unsure at all n locations
ccgccaaacccagaaaactcctaagtntaaacacagacttaagactctcccactcaagtaccacttctatcttagaagggactatatctatactggcctaggatatcacatggccgtaaaaactaactttatctaaccagaactcacacttggacaacttagcataaagctggccggtcctaagggtgtgcaacacaatcctcaagagctcttcatgctccttcctaggccgcgagtataccaaaatatcatctatgaaaactaccacacaactatcgagagaggggtgagagatcctattcatgtaaactactaacacaccaggggcattagtcacaccaatgggcatgacatactcata

SEQ ID NO: 140496 - DNA, 239 bp, Glycine max
  unsure (1)..(239): unsure at all n locations
aacggatggcgccttctctcaccttctttcctttgtcttccgctgcatttccatggtggaaaattaccattaaaagaccccattgaagctcaaagatccagccttcatagaagccccacaagcaagctttcatcaagttccctccaccttggaaaggatttgacctcaaataccgaggtttttcatactctgggctccttccctcaacacctgtnaaaagaacaaaaacacatgtatta

SEQ ID NO: 140497 - DNA, 445 bp, Glycine max
  unsure (1)..(445): unsure at all n locations
agctggtggcctatcaagtggagggtaagttgttcttcttattatgtgattactccataactttgataaggatgaccacttcctttttcattggtcgttagattgtagatgagataggaaattttgataatggtaatcatatttcacttttccaaaagtctgtcaaaaccattagctagcctaacataaagtggaagataacctagtgtccattatgatatcatgttgtgttgatatggatgtttttgttcttacatcgaatactacagttatattatntaccaaaagactgcatggcacttaatattctatttctaatgattacctggttgaagtgggactcctagtgataatcccgtcgttactttactatgttttgcttgacgcaccactttctattttgcaatttgctttcaccttttaattctaaggcgatgtctacaac

SEQ ID NO: 140498 - DNA, 348 bp, Glycine max
ctgcatacggacggaaaagttttttttgcacttttttacgccgcaaccagtagctaagggtataccagacaccatgccacacaaatacggacccataattcgctgaacttctctggcgtgccatggtgcacagcctcgataatgtcagttgtgactgccaaatgacgccgaaatacttgcccaggagatgataatccccacttctttgacatatgatccttgatggcattggaagagaaacaaatgtggacctttatttgggggagtacccgcagcgaacatgaaactaaaaggtatcaaaattattatccaagctctatgtgaagatatacaaaaacattgatttgt

SEQ ID NO: 140499 - DNA, 391 bp, Glycine max
  unsure (1)..(391): unsure at all n locations
cactgggaaggggggctactatcattttatcatttccttctctgtcattgggggcgtcacttgagcttccagatccctccacctttgggcgtattctttgaaagattcgtgcccctttttgcacatattttgtagctgcattctatccagagccatatcagaattgtactgatattgcctaatgaaagcaatcattaggtccttccaagaatggactcgggaaggttctagattagtgtactaggtgacggctgccctagtaagactttcttggaagaaatgcatcaataatttgtcatctttcgcatatgctcccanttttctacagtatacctttaggtgattcttanggaaagtcgccccttattttatcgaagctggaccttgactt

SEQ ID NO: 140500 - DNA, 461 bp, Glycine max
  unsure (1)..(461): unsure at all n locations
atccttaagtcacctgcggcatgcaagcttcaaaccacagcaacacgaaatctagtatcncattaccccttcatttaatggattttcatgggttgagaagtgaaattgagaatgggataaatttggagcaaactctcacctcacacaagtctataacatcaatttaaacttgctcaaactggatttacacctaaaactccaccgaatcaaaatttgactcctcaacacccaattttaccctagaaatggctctttgttcactttggtcatttgtttttctttctagcacagcccaaactttctcataagtcctaaatgacatttcaagctaggattaactcactttaacctccaaatgccactaaatccagattttggccttcaactctcaaaactcactctttcttcactcataacaccatattctcactttctaaccctagggtactctacccttcatc

SEQ ID NO: 140501 - DNA, 348 bp, Glycine max
aatgctcaactatgtggagttcaggcttaaaattttttatttgagtaacaattggaaaagtaagggaaatcccattctgatcactgtatattcctcgtgtttctttcttggtccataaatactcttttatttttggcatttggtcatatttcatctagctattaacttactacgattgtcagtgacttgaaaataatgtgtctggaaatgtcagtgacttttttccttctacaaggtgctggattgctgttttaataatagatcacttttgatgttgctttatacccagcaatcttgaacagaaacaacgtgctttctggaagctctgtgattacttgcagcatgaaa

SEQ ID NO: 140502 - DNA, 319 bp, Glycine max
  unsure (1)..(319): unsure at all n locations
tcaatgggtagatgtcttcactttgntcttcactcttgatgaattatgaggtcggctgggggcatttgtaattctatgcatataaactgtatgagcttcttcttcattcatagagctcactctgattgaatttcgagttgagcactttagtataaaaacacttgcccattagtcacagcaagtctgcacaattgagcacacctcttgatggagctcgatactcttagatcttgaaggatttcgaaaaatacttggagaatagttctgcacactgattcttatacacatcgtattaaatgaagactttaattgcaactct

SEQ ID NO: 140503 - DNA, 264 bp, Glycine max
agtgactcaacagggtgaggtgtgtttcaccattggaagatacaatgatagggtggtgtgtgatgtggttccaatggaggcaactcatatactggtgggaagaccatggcagtatgacatcaaagtagtgcatgatggcttcaccaacaagaattctttccagcaccatgaccaaaatattattcttaaacctttatcctctagagaagtgtgtgatgatcaaattagaatgagaaaaaagagagaacaattgatagaaaagag

SEQ ID NO: 140504 - DNA, 149 bp, Glycine max
gggaaaataattctcctactcgaccatgacaccacccgtgctactgagttaggtatttttattctaacctagcgctgataaatttgacagtacagaaaccttgctaggtgggggataaaagtgatatacacctaatttatttatccatg

SEQ ID NO: 140505 - DNA, 416 bp, Glycine max
  unsure (1)..(416): unsure at all n locations
caccagaaaatgcctatcccatttcctcaaagcaccccaattatcaatacaccgctccaacagcaccggtttattaagctctgcaaaagacaacacaaactcctcgaacgagattcctctcttccgaaccacattatccctctgcaaccactcaggcttcatttttaggctagcacagagccaacnctggaagagataattcgagtataaagcgctaactttgaaacccccaagagcaacagttgaagtatcacatgtagggtaacaagcagaaactctagtggatgtccaagaccttctgtactgaaacccatctagaagattctccaacacgagaatcctccatatgctgttatgtgtggcgatcacatagaaagacttgctcacagacgctaaaacccctattgtagtagaat

SEQ ID NO: 140506 - DNA, 423 bp, Glycine max
  unsure (1)..(423): unsure at all n locations
gcaagcttgtacataagttctttagaggtgatttatttacttggttcatactttatgactaaatgtgttgttaggtactgtgtgcaatattgtattgaaaatgtaagagtttggtgttgctcgttgaattaaaatatcattgttctatgactaattaaaatcaactgacgttttaatgcaacaagatcattctaccatgaggtttcagttttacggtgaatgtatgtatacttcatgcaatgtttatacttagtgtcttaagcaagtgtggtgtaagtcaaagctagtgtgactttgtattaaatcctctctagtggntaaataggatgacattgtaatggtgcaacttttaattttgagtcatgataatcaactcttaaggctattatacacaaggcatcatcaattcgcaattgtgatatt

SEQ ID NO: 140507 - DNA, 280 bp, Glycine max
  unsure (1)..(280): unsure at all n locations
cacaaaaccacngtagatcatctatgctatctaagatcaacttgtacccgaaccgaaacacctaattcggatcaactattggcattgtagatcaacttcatctctactacctatcactacacaagcgaaatggtagcagaacgacacaacaaaatgtgacggtaggcttacctcgatgaagaacgaaatctcgtggaagaacggaagaagaagacacactcgcatgagggacaaagacgcacctcgcagaagaagaatagccacctcgcggatgaagcat

SEQ ID NO: 140508 - DNA, 297 bp, Glycine max
tttgggccaaattagatgagggccagtgtgatttcgaaaatctgcactttatgcagaattttgcttgtgaaatgtgcaacagaattttggctttgtgcagaaaatgatgtgtatttgctgggtgtggaaagagtagtacatattgggttctggcccgtttctagcagatcccaacggtcacaatgtagatttatgtactagggaactccagtaacattttcgagtcgatccaacggtgaacgaattggaacgaagggaatgttactggggtatttgagtaagaaaaactgtggtatt

SEQ ID NO: 140509 - DNA, 269 bp, Glycine max
  unsure (1)..(269): unsure at all n locations
tatgctgaaatggctcatggaaaactgttagagatgtaatgtagagntaacctacggctataaagngataatgtggtgccatgagtggaaatagagcgaggctcttagagctggaaggctaagnctgaattctgtggtaaatgtagggtaaagngagncaatactagcttgtaatgtcattnatgacttgggagaaagcttgtactgtgctagcgagaagaacaaatgaacaaagtgaacaaagagccatctctagggcaaatttgatg

SEQ ID NO: 140510 - DNA, 57 bp, Glycine max
aatcatggcatagctgttcctgtggaaattgtatccgctcaaattcccacaacatac

SEQ ID NO: 140511 - DNA, 370 bp, Glycine max
  unsure (1)..(370): unsure at all n locations
gctttgaccatattttcttgctcctncaggaatctctttctaagcctactncnnaaaggaatccctgcgaagatcataagtcattttcactaaccattagaattatatttctttattttgtgaatgccatgtacaaatgtgtcttttttgtgcaggattccattgaggagcacgcttcgcagggatccttcgtcctccatggacgtcaggatgttctcaccgcttctattggatgtccagagcaccctggacgtgttcgtgttgctggagctggtgtcaacatcaagaaatacttcggatcggcttcacagacaatccatagctcttcctcgctacctcctgaagaattgcagtagttgacccacaaatt

SEQ ID NO: 140512 - DNA, 250 bp, Glycine max
tttacccccttcaccgcggccttcacttgaaccacccatttgctgcttgctacttacaatgataccccttccaccactgtgcaaacccctccctgtggagctgccgccacgcacaaagtcacgaaaccctcctcccacattcacattgctgccttcactttgcagcatgtggagccccgaactcgaccccactgcactgagcatggcttgctgctgatgaagtgctgagtacggctgctgtgcgtacaaa

SEQ ID NO: 140513 - DNA, 289 bp, Glycine max
  unsure (1)..(289): unsure at all n locations
tcttatatattcagctngtctcgttcaatttcccaccaaatttagtcatccattatactgcaataaattntaacaaccatcaaagcctttccccatcaattggtgtattnatttagatcaaaccattgccnttgtgtncactcaatgactaaatgctcaacgattcatttagattacagcncctttgagataaatatcttcttaattaaagttcatttgatatctctcgttatagnatctaaaaatggccaaacttcacttataaaatcctggatgcaccactggcatc

SEQ ID NO: 140514 - DNA, 393 bp, Glycine max
  unsure (1)..(393): unsure at all n locations
agcttcaagaataagatggcctctctatacttcttgcttccacaacggaattctataaatagaccttcaatctttaatggagagggttaccactactggaaaacccgactgcaaatttctatcgaggcaatatatctaaatatctgggaagccattgaaatagggccttatatacccaccacagtacaaagagnttaatagatggtgttatcaagtgaaacataacctataaaaacctaagatagatggtctgagaggattaatacgcgacaatacatcctaatgccaaaacatataacatctgccctggaatggagaaatttatagttcaatgcaaagcgctaagaatggggacctcttcattacacatgaggaactcccagtcaagactag

SEQ ID NO: 140515 - DNA, 364 bp, Glycine max
  unsure (1)..(364): unsure at all n locations
ggtcaacttgggaatcaatgaatatgcatctattttcattcgcctcttcattcaatttcaaaataagacatttcttttatgtgtttctccttatgcctaattagcaacaaaatccagtgtgcccacattttcgattgaagaatagaccgtcttcttctataagcaatttccaatatgttctctattgaatctgttttgtgctaccaaanatagaatctatgttctataatattataaagtaacagtccatagctcagttcatttaaagatagcatttatggttagttcaaataataataataatataaattattttgaagttttatattttatgatattataaattacgcaagttatatgtagt

SEQ ID NO: 140516 - DNA, 420 bp, Glycine max
  unsure (1)..(420): unsure at all n locations
gatccttacatcacctgcggcatgcagcttggttatctattacccttttcgtatccanaccacgggtgttgtgaataaatcaaaagatgctactctctccatggtntttgactttttcaaattggttttaagttttttcaaaagttataactcttcaaaatggttctcttgaccaaacatgaagagtctataaaagcaaggctttgttttgtattttcgatcaatctctctaagcaatctttctatcaattcatctcaatcatttctttcaatcatctttcaatattttctttcatctctctcaataggtgttctgtctcatcttctcttcatctttctaaaagtttttattcaaaactctctcttccaagaaaagtccttgttcaaaacttggctatcatcttttcatcccttctcctt

SEQ ID NO: 140517 - DNA, 359 bp, Glycine max
  unsure (1)..(359): unsure at all n locations
aacgaacggatgaagaatagatgacgaacgatgaagataagtcacagaatcgatcacaataatgtnacggtagcgtnacgaaagcgcctcgacctcganttntcttcttctcttcccttcttctcactaattgtagtgaaaacctcctataaatgatgctgaccccttcccttcagcccttcatgcctatttaaaggaaaatgaggggttgattgngcatgacagctcacctatgcgatctggtngctgcatccctaagctttctagtgagccctgtggttggatgatgtccccagagcgaccatcttgcccctcttttgattactgngcacatttcctttcaaaacatcacaaaaccc

SEQ ID NO: 140518 - DNA, 464 bp, Glycine max
  unsure (1)..(464): unsure at all n locations
atcctctgagtcacctgctgcatgcaagcttctaagtttctgggntccanctcttgttaataaacttgcgctattcatctttgtcattctcttctccctttgccaaatagaattcgccaaagactaaccacctgaagtctttttgagtctctcttctcccttgtccaaaagaacaaagaactagctgcctgaattctttagtgtctcccttctcccttggcaaagaattcaatacgacacagtttgagaattcttttgattcttcccttttccatatacaaaagatgttagaggactaaccacctgagaataattttgtttcccccttcactaagtttcaaaggactaaccgtctgagaactttgtcttaacacattggatggtacatcctatgtggacaagtagagggtacatctactcgcgttgtgtgactgtaacaatagatggtcatttctgtggatcag

SEQ ID NO: 140519 - DNA, 395 bp, Glycine max
  unsure (1)..(395): unsure at all n locations
tgcagctttacnaaaggttcagtaagtaagttgattatggaagtaaccatcctgcataatgggggcaaaagatgaatccagtcacatcactgcttcgtctactgccaaacatatttaggagtattgatgtccttgttacttccagtttcaccttgacaaagatggcatggaccatgttgaaaatctaaattgattcaaccccatatcctgcgtataaattcgcaatacttcgactgtgcatcattcgcatgcatccatgcttttcaatggttgcaatgctcattgccatctttccttgaaaaatcaaatgatataatatgaacttctctagaagaaataggtacggcttacggcgtatttacagaactactgctatagctataataatggtgaag

SEQ ID NO: 140520 - DNA, 246 bp, Glycine max
  unsure (1)..(246): unsure at all n locations
gctcatcgcatatgaacgatcgaatctgtcatcgcgttattctttatgagaagccganctccttctgcggcgcgatatgtagcaaacgactttcgatacgttcaggcagttgtgactgcaatttgcggcgtcgaatcgacaagaatgaggcacaaatcatcgccaccgagtcggatggcgtaaacactttcacgaatcgactgttgaatcgcctgagctacaaacgaaatcgctaaaccccctcct

SEQ ID NO: 140521 - DNA, 345 bp, Glycine max
agcttaaagttattagttctaatcaaaattattatttgttttgatgactaaatcaatatataaaaaatcgttaaacgtgttgaaaatggccgctcattctatataatctctacataagtattataggtttcctattggaaaaaacaaatagttaatcctatgtagatatatgttctatcaaacaatataaattatattataattaaaatttataataaataaatatgatttaatatataaattatattctagatctacaatgaatgatttaactataatataaaaatattcctaactattaaaaatatatcttaataaaatacttcatcgatagaggatttaata

SEQ ID NO: 140522 - DNA, 354 bp, Glycine max
  unsure (1)..(354): unsure at all n locations
cgtagtcttgccttgattaatagcaaagaatgtttattattaccatttccagaagcactggctttcaacctctgaaggttattaatagtgttagagtntgtgggttctactttatgtgttgtgcttattgggccttaagcccacttctgcttttgtactgcatctattagcaaatcaatgagaaccaaatagaaatagaaatttgaccattaaccattaccaccaaagactgacagtagaatcattcaaattaatctgaaaagttggcgatattaccagtctggcaaaaacaattagcaatgagcttagcaagacagagttntgagcagattgcatgcggttgacaagaacagc

SEQ ID NO: 140523 - DNA, 407 bp, Glycine max
  unsure (1)..(407): unsure at all n locations
agcttncataagatgggccaatttccttcttctttcaagtggtcttgttggaacattgtctccatgaggtgatggtaagcacttttgaccaggtagagaccatgaggggttgcagttgtgacaaaagggctatttggaactctaagccaaggttgagtccatatgttgatttgttgaccatctcccaacctccacttcattccttccctaataagaacctattaagcatggatactatgctacacatagcttggattgtgcccaagttgagcattcaagaactcaccctttgtgaagcttttagcctttgaaattttaggtacaatagcatcatttttattggaaaagttccaccctagctttcttatcattgcaagaatcaatccatggagactaaggaaacccat

SEQ ID NO: 140524 - DNA, 471 bp, Glycine max
  unsure (1)..(471): unsure at all n locations
tctggtgggacatcttgacttgctttccaatctgacattcttcacagattctgccttcttctattttcagattgggaatgcctctaacaacacctttgtcaatgatattcttcatgcctcttaagtgcagatgtccaaatctttgatgccatattctgacttcatcttctttggaggatagacatgtggaggagtaactggtttcttgaagcgtccataggtaacagttgtcctttgatctgctgcccttcattagaacttcactcttctcatttgtcaccaagcattctgactttgtgaagtgtacattgaatccttcatcacacagctgactgatgctgatcaagtttgcagtcagtcccttcaccagcagtactttgtccagactaggaagtccatcatgaactagccttcccattccaatggtctttcctctatagccatctncaaatgtcacataggtagtggagc

SEQ ID NO: 140525 - DNA, 250 bp, Glycine max
gcatgcaagcttcaagggatgctgacatatcctcctaatgatatctaaaagttccaagtcgatcaaaaggaataagaactgaaccgcctcgttcgatatgttccatagcatgtgagcatatgaaaaccagcttttccttttcttctgaatactcaacagagtaatggttgaatccagccaaatcttgagaactttcagcaatagccaacatgataattcatatttacagacatagatattcattactaca

SEQ ID NO: 140526 - DNA, 176 bp, Glycine max
tgtgacccaccatcttgtgatagtacaacatcggtaattgtgttgctatcattggtatcattgcgcctctccatcattgagggcactacttgagctaccaaatacctctacctttgggcatattctatgaaagaattatgctcggttttacacatgttttctagcttgattctatt

SEQ ID NO: 140527 - DNA, 352 bp, Glycine max
  unsure (1)..(352): unsure at all n locations
agcttcctcanaaggcatagttatttccagtttcttgaaaatatcaaggaatctcatcagatggtggtccttgtccttcttggaaggtaccacaggatatggtactttcgtatcctcatttgaagctttttctttcttcttctctcttgctttctcacttctactcttttctttcccttctttatttttttcaactttttctttttcttcattttctttttctttttctacctctatttctttttcttggtcgattatttctttctcctcaaccattattgatttttcactctcttgacttgtcacatctggtacctcctctttctttttctaagtgccatcccttaccaca

SEQ ID NO: 140528 - DNA, 368 bp, Glycine max
  unsure (1)..(368): unsure at all n locations
ctcagcctgtagtatatatgggtataatttgcctgttccattatgttttttatgtctntagaggttacttcctcgttgacatcttatgttttgaatggaatcgccatgacaggtttattattactgtctttgatatttggtagttgatattgtgttgagggaggtaattccgactggattaactcaccatctctcacttgccagattgttatgacatttgttgttggatcacctatgatttcttgtttccaagggtaatctatatcctttctgatggcataaacatgaaaccaatcacagaaaatgacattaatcttgactctttcgacaaattcatataacttggcttgtatttgttttctgtttga

SEQ ID NO: 140529 - DNA, 296 bp, Glycine max
agcttccatctgcatagctgctttctctttcttaatcctatttatcactgccattgtttgatttgctgctattgcagatgcactcctctcttcttctagttctgcatatacaacatttaaggcctccctttcagctttcagtgctgatttcaacttctcaattgttaactcaccacattctatatcacacatgacacttccttctaatgattcttctgttcctgattctttccttccaagcaggtgtgacctcttgcgtagctgaagcagattctctgcataagtgggtgtatcaa

SEQ ID NO: 140530 - DNA, 427 bp, Glycine max
actcactatgctgaacttatatgacccctcacaacaaatctattcaacagaataattatgacctttcaagcaacaaatacaatccaggttggaggaatcatccaaatatgagatgggcaagtcctccacaacaacaacagtctgtccctcctttccagaatgctactggtccaagcaagccttatgttcttcctccaatgcagcaacaacaaagacaacaagcagctgaggcctcttctcaaccttccttagaggagttagtaaggcaaatgaccatccagaatatacaatttcagcaagagacaagagcctccattcaaagtctgacaaatcagatggggcagatggctactcaattgaaccaagctcagtcccaaaattctgacaaatggccttcacaaactgtgcaaaatatgaaaaaatgtga

SEQ ID NO: 140531 - DNA, 309 bp, Glycine max
  unsure (1)..(309): unsure at all n locations
ctgaatgaagctgaagaagttgctgctcatgtacatcaataccttgggagaacaancnatcacagccccatttgtcacaagatagtgacatggagccgatggcaaatattcttcacaacaaagcagctgtatctcaacctaatctgttgcagcactccatttctatatattacaattattcatgtctggcatttgcatgtaagtccctgcgactaatgatccaccaatagcaaggaataagctcaccataacacgatccaaacacacgaaggttgctgatcaagacgatgcactctacagaaaactgaa

SEQ ID NO: 140532 - DNA, 291 bp, Glycine max
agcttttattctaaccttgaaatctatattttccttgatttctgaggtctatgggataaagatggtcattgaccaatccctcttctatgatttgacccaattgtctagtgaccgtgtaccatttgaaggtgcactagatgttgattggaagtttgatttttctgtgcatgatgcctgccggttggtttgcccaaccaagcggatatgaccggaaggctgcttgccagtttattggctcttgaaagccgcatgcttcactatcttattatttattttgcacatacaaagatc

SEQ ID NO: 140533 - DNA, 271 bp, Glycine max
cgcgaggattgatggggacccgacgttgagaggatttatgttttggctacgtgggagtacgtgagctcagttgatgtgggcaacaggggatgcgtgggttatacgtgattgtggatgtggagaattgttttgcaccatcgcccgaacgccacctaataccgcatgtgatggataccccataatcctacaagcttgaaatgaggaagtgtggaatggtgagacatcctacttttattcgttgaccacagagtggtacctggagatatgtcgc

SEQ ID NO: 140534 - DNA, 431 bp, Glycine max
  unsure (1)..(431): unsure at all n locations
agcttgtagttattggtgtatatctacatttttntatgtcgaattgaggagcctactaagtcacatctaatgatcaataccttttcaagtacaattcgcttattaatctatgaaattgtaagaccatgttaattcttgacattttaaattcttttttagttcttgactaagtaaaaaacaataatttaatattctttcatatcattttccctgtacactaaaaattcaagtgaatgactttttatgaaattacatattaaacgaggaattttaaagagttaaggctgaagaatcgacttccaatttaaaaatatcgaatggtttactccatttttacaactaaaaatactgttcttgtggagtaacactggtgtcctttgttccaggtaaagcctgggtcattgcccaaaaatgggaaagtgttgaatttt

SEQ ID NO: 140535 - DNA, 302 bp, Glycine max
agagagagagaagcgttatctatgaataagtgagagagacaaaatacggcttactgatttggtgtttccgcgaatcccgatggggcgagtgcaccaagggctcgactcagttcttgacgatgatgactttgtcaccgtaatcgcggagctagctttatggtgtgtcgcggtagaaaatgacgaccattcggacgtgagggacatagtggaggagctcgaatgggtgttgaacatccaaacaatgtcgatttctattttataaaatcctacgtgttatctctctcaggtagcgagtacacatg

SEQ ID NO: 140536 - DNA, 295 bp, Glycine max
  unsure (1)..(295): unsure at all n locations
cattattntgctgcaacggagatatacaatgcaatacgtgttttcattgctgcatatgtttggatgactggatttggaaacttctcctatcattatggtagacaagatattagccttccacgttttgctcaagtaatagagttcttgatccttaataccataattgctttactttggggccactgtctatcctgttcctgttactttttttgcataaacatgatactctactcgttaaaattccttgcagatgatgtggcggcctaatttttttgtggccttcttgtcgtttgtg

SEQ ID NO: 140537 - DNA, 372 bp, Glycine max
  unsure (1)..(372): unsure at all n locations
acaatgtcactgagaggagccgactttcttgtttactccatcaccacaaccacagtcatgacagtccacatacgcatgtcttcctctatcgcctctgaacaatggctccatcagatacagcaaagaaactagtgtcaaagccatgccaactttcaaagcatggaccactcttcttggatcctctttgccaacacttcatgttgccctcctggccaaaccaggaaaacttttcaccttatcagcaaaactataaacatacctcaattgcctagagcttttgatactagtatnggtatcagccatctgaacctttaaagcctgaatcagctttagtttctgagcagaacaatcattaatgtttcagatatgatc

SEQ ID NO: 140538 - DNA, 267 bp, Glycine max
  unsure (1)..(267): unsure at all n locations
agcttataagaacacaagagacagaaacattttcaaatatgcatgtgaatcacgacgcatcaacaagaatcaagccaaggctattgtgcaagcaatcaatagggcaaaacacaccaatngagcaatacgatggaaggctcaaatcctcacaaaggtaaaaacatcactgtcaaatagagctctcaaaactatcatgacatgtacagaaaaaacaacgattccaactcacaaaatgtcaagaactgcaattgcaaaacaatgacccag

SEQ ID NO: 140539 - DNA, 380 bp, Glycine max
acagaagaagacagctttattcttgtacacacacaggaaagcatattcataactgcctaaacacaggaagacaaatacataactgcctatacacacaggcccgatgccggataagaagcataaaaaacttgtggaaacttatggtactcacgcacaaaggacaatacactaagtcactaacatatatctgcctgaatcttaagtggtgtgttcaaagccaacatcacaagagtggaaattacaaacaatactctttttggaaacttgttctagtccctaataaaaaacaatacaaatgtctcagcattcaaaacaaagttactaccagctcccaaccagtcttgaccaattgttcctggaactcacacgaccgaaacaca

SEQ ID NO: 140540 - DNA, 333 bp, Glycine max
agctgatgcgcatattgacgagacgagcgtttcttgtacaagacattctattaaccgacagaaacgcacccatatacaatcaaggcagctacgtctacctagattatgtacacggacttccaaggagcatcagttacttacataacacacctccatggctaaaatgacacgcatgcatactcaaagcatgtaggcggtccgaaaaatgcacatgagcacgtattggtatttcgaatgcctatacatacgcaaacgtgatgaggaatcttgacttctacacaatagcggctgcattcgatgcttcgttagagattgtgctacctaagggcgaat

SEQ ID NO: 140541 - DNA, 423 bp, Glycine max
  unsure (1)..(423): unsure at all n locations
caagtaactgaattgtttttggtcaaaatgatttttttactctctaactaactaacttccactaatatatacggttactactaataaggaagggatgggcctctattangccaactaatccacctaattaaactaattgcataaaacaaagcccaaactctcagtccaattttcaagtgtaaaggttatgacttgcaagcccaatttgaccctctaagtggtagaagtggccaatgcttatttgtgagaaaattgaagatcatcaatttcttagctttctagagactactcacatgctctatntggagttctgtagtgtcctctaggccctacacaacgaagatatgtcaactaagcacaaaaatccacaaataagcaacaattatcaactaagcccaattatgttgcttaaacctaaactga

SEQ ID NO: 140542 - DNA, 358 bp, Glycine max
ctgaattgacaatgagctccaaacattcaaagatctttcttttctttcaaccttacgattcacgagaaaaacatatctagaacctcgatattaaaaatgaaagcgcaaggcatattcaaacaaccataacttttgactgggatgtctgattcataccaataatatatcgatacgcatgatattgaataaaggaggctctcaagaaattcaaatatttcaaacgtttcagtcggatgtccaatttaggagcattatatatggagattctcgaaataaaacatggaagcgtcagccaagttcaaacgggcataatttttctcacagatgtctaatacacgccaataatattttcagacac

SEQ ID NO: 140543 - DNA, 301 bp, Glycine max
  unsure (1)..(301): unsure at all n locations
agctgggagatcgtgaaggcggcaatcnttaattactagcncatcaattcatgacgatgaaatgagtgattctttgatcacatctttagactaattgcagcgttattcttttcgaagactctcttgaaatgtccttctctacatgtgaacaagtcaagacgattgttaaaagaaatcacataggtggttttatcaattctgacagttgaaacagatcgaatcgattatcagacaagggagtcaattaattcaacaaaatccattttgtttgcattgctagaaactcggtaatcaatattag

SEQ ID NO: 140544 - DNA, 408 bp, Glycine max
tattttgagagcgaggagtagctaactctatctttcaagaagttctctaaagaagcttctcaggaagtctctcaagagagcttctcaagaaagcttctcaacgaagctacctagtctataaatagaagcatgtgtaacactcgttgttactttgatgaataagagtcttgtgagacatacttcaaagttccacttctctccctctattataccttcaatatcatgctccccctctctctttctctccctcttttctttccttcatatgaacatccttccaagcttttatccaaagctcatcttggtggtgaagcctcttcttccatggcttattctctaatggatggcgcctcctttcacctttctcccttgtgttcgctgactttcatgtgggaaataacctttata

SEQ ID NO: 140545 - DNA, 292 bp, Glycine max
  unsure (1)..(292): unsure at all n locations
agcttattgagaatactgggaaccatcttatttagagtnatganatacccccttagcattctcatgtcactttctacaataaggagagagaaaagtgtggtattaattgactgatgtggttgagatagagaaatacatgtagtgagaatgtgaagtgggaataacattactcggttgttagaaatatgttcatggtagcaattttagtacagaataagccctaaaattaaaatagacatctattctttgtgttgacttgagaataatcttaagcctccttgttaaataatta

SEQ ID NO: 140546 - DNA, 349 bp, Glycine max
tttgagccatctactcctttccttggattgaagctcactacaagccataagtgaaaaaccatgatattaccatatccttaatgaatattggagctttggaattgtatagggaataagtggggggggatgatgttcattggacaacatggattgtagactatgctacatgatggattatgggccatacttgatgtacattgcatattggaaaaatgtgggacatgctgacagaaatgttgttactcataagagaaaataatgtttcgagattacgtgaccgtacaatgagataccaaaaaggaaagcgctaagttgatgataagatctaatggtctgcaagaagaactct

SEQ ID NO: 140547 - DNA, 340 bp, Glycine max
agcttcaagaaaaggccgaacccccctctattatctgatttcaggcttaaataggtggctttgtttgtgcttgcgcgcttaatacaactctgaaccgcttagcgcgcattaatgaattttggcttagcatgcgcttttctcactcagcagatggactgaagcggcgtgcttagcgggatgacccttcactcagtgaacatgcacaattcatccttcttccagattcttcctcacgctcagacgtggagtgttgcgcttggcggattgctagctaatccataagattggttttgcgagaggatgaaaatcagcacttcacaagcttgtcgtattaacctga

SEQ ID NO: 140548 - DNA, 437 bp, Glycine max
  unsure (1)..(437): unsure at all n locations
cttcagaccaaatttgagacgatccaacggttaacaaatactgctcatcatttttaccgaggcagctccatgttgcttcctcaagaagcttcattaagaggctctctcaagaagctttcccgtggcttctttgagaagctatctcaagaggcttctttgagaagctatgatccttatttacccacacccttctattaactaaattaacctccttgaaaataattaccgataaaaataacacaataaataatcgaacatcaaacataattactaataatatatagagatatatatatcacggtgttacaccttgattgcatcatgcatctcttcatggcatcgtaatgggcatatcatncctgcatttatcatttatcatattcatgcattgcatttgcgtgagtcattgcataatcatacatcttcatttaacatgc

SEQ ID NO: 140549 - DNA, 265 bp, Glycine max
agccccggtctgtagcagacatcttattgcttattctctcaaaacgctctagaacatggacctttctgtctctagaaaccctaaacatgcgaagctctgaatcccagtccaaactctccctctaaaatctaattgcaggcttaaataggtgatcttgttcgtgctcgtgcgcttagcgcacttatggatcgcttaacgcacattaatgaatttcagcttaacgcgtgcctctctcgcttagcggatgaactgaagcggcgcactt

SEQ ID NO: 140550 - DNA, 328 bp, Glycine max
  unsure (1)..(328): unsure at all n locations
actcaagcttctagctttcatcggaagtggagagcaccttttttgtcttacatngcgggaatgtgctcagatatatggggcaatattggcttgccctcttgctcgattaggttgaattatgggtttgtatgggatggccctacgcctataatgcatcttggaacaatgggacatgccacattgtccccgttctcttgctattgacgcctaaacgcgcgcccaccaagttgttgttgaaatgcctcaatggcatatccgcgcgactcttgtaaggaaacaacccatggggcatttcggtttgtacatatttcctatctttggaatatgt

SEQ ID NO: 140551 - DNA, 320 bp, Glycine max
agctagaagaattctgtatccacttgcttcttgtttttacatcgagcataatcgcttctctgttcaattctttgtatgacactttgccttatctggagagtcaagtgagttccatttacttggagaagctcttgttgactaccttatctagctttggtataagtaaacaagcaacatttttgtggaaatataaagcttatgctacagtttggtgcatgtggctattaacgcatcttttaagtaaaacagctctttgaatgaagataagtcataagtaattgatatccacttgacgtaacactttattgctttgaatcatt

SEQ ID NO: 140552 - DNA, 408 bp, Glycine max
  unsure (1)..(408): unsure at all n locations
agctttaagaatcaagatcaagattcaagtctcttgattctagaatcaagagaagacttaatcaagataagtatgaaaaagttttttcaaaaactaagtagcacatgattnttctcaaaatctatttaccaaagagtttttactctctggtaatcgattaccagtagcaaaatggttttcaaaaatctttcaactgaatttacaacgttctaattgatttcaaaaagctgcaatcgattacaacattttggtaatcaattaccagtgtgcttgaacgttgaaattcaaattcaaatgtgaagagtcacattctttcacaaaaaagattcgtgtaatcgattacactggattggtatcgatacccgtgtatgttttgacaaacaaagatgatactttcaatagttttga

SEQ ID NO: 140553 - DNA, 326 bp, Glycine max
  unsure (1)..(326): unsure at all n locations
ctggactgtgctagagagaagaacaaatgaacaaagtgaactttatttntatttctagggcaaattgggtgttgaggagtgaaactttgattcggtggaattttaagtgtaaattcagtttgagcaagtttagattgatgatatggacttgtgtgaggtgagagtttgctttatatttacctcattctaaatttcacttttcaaacctagaaaacccattgaatgaaggggtgttggacacctatattctgtgttgctgtgctgtaaagcttgattttggtttatacatgtttgatacatgatttgggacttgtatgatttgattt

SEQ ID NO: 140554 - DNA, 251 bp, Glycine max
cgagacagagacctttatgcgagcaaccaacgccaagcaccaagaagagtgaggcccaaccgcggcccacaagcagaggatggcggacgaacatgcccaaggatacgcggaaaaagaggcgagaggaagggtgagcgactcgagacaccaagaggcaaccaagtggaaggaccagggggcgcctaccgagaacgggagacaagaacgagcccgctgaggagacagagccaaggcgacggcagacacccacg

SEQ ID NO: 140555 - DNA, 453 bp, Glycine max
actcagctggaaggctatttcatcctcgctagcaattatgttttttcggccatccactgagcgcggcactccttctgctgagtgcgacgaacaatctggaacaaggatgagttgtgcatattcactgagcaagggctaatcccgctaagcgcaccgcttgagtccatccgctgagtgaaaagacatgcgttatgccgaaatttactaatgcgcgctaagcgagccatagttgcgcttagcgcgcaagcaccaacaaggccacctatttaagctcgaaatcagaaatggagagggaggttgggagattctcatagctattgcatgtttagagatgtctatagagagataggctcacagtctatagagtcttgagagcttttgctgtgagaagactggcagcaaactgagcgagaagatgaagccctcctgacagcatgagatgattctgtgagt

SEQ ID NO: 140556 - DNA, 260 bp, Glycine max
gctgcagcttttcggacctgaacaggcacatacctttttcaaaccatgctatggctccgactggccctctcttccttccagctgagtcattgtgcaccctacaagctcccaaatatattccgggctactcttcttgcagccctctggactcttgttcaaggctcagcggaagttcattctattccataatccgggcactccctccggatgtgtgtagcggtaacttaacttatctgggcaacgttcgccttcctaacata

SEQ ID NO: 140557 - DNA, 450 bp, Glycine max
  unsure (1)..(450): unsure at all n locations
agcttctacctgttaatctagttgatcttaatatcaccacatttganattctttgttgggcggactacatgcccaaatgaacacacgctatctagcaattgaatgtcctcctgatttacacatattcaaggccacttacatctagatcattgcaaataaagtatgccctcttctacccattttggatgcatctaagataaaaggattccaactctatcactatgttgaaatgcctattaagtagatgaaggtaaaagtgctataaattcccaaaaattggagctttttcattattggcaagaagctgattcaagatctagatctgtatgatgccaagacaatttgaaatcagatagtatggaatgatactttataggcttcattgtctagatatgatagaacgaaaccttaagtgatgcgccctgtcaagacatatcacatttatgatgc

SEQ ID NO: 140558 - DNA, 429 bp, Glycine max
agcttcaccggatgacgccgatcgaactttttttatccgacgtcatgcaaatttcgttcagggattgaattgaaaactctttaggcgacatctgtcgtgaagtatcgaccgatatttttcagccgacattgcacaattctctttagaaaagctcgctggtcgataatggactgtttacggcaaagtaagttttcttgttatggtgttgcataaaaaagttacaatgtacttcggctaggttcttcgcgcgaattcaaccgacattttgtttcggccagtaaaacattagcccacctctgcagaaataatatttgctaaccgtcttcagcctattacattcacgataggatggaaactcagtgccggccaccgcgcaaaatagtccgattgatttttaagcgcgatggcattttttgtaaaaactcccgt

SEQ ID NO: 140559 - DNA, 425 bp, Glycine max
  unsure (1)..(425): unsure at all n locations
acctcgatcggacatgtgtgctgacctatgtctatctgtcattacttggatcaatatcggcgaataatatattttttgccgagatgggctaatgttatcctgggcgaataaatggaaacatgccagttgcggccgatacaaaaagtctgttgagctcntacagaacaacctagccgaactacattgtgaatcttttatgcaacaccaaaacaagagaacttcctctgtcgtaaaaagaacattatctgccagcgagcgtttttaaaaaaatgcgcaatgtcggctgaaaattatcagtcggggctatctcatgaccgatgtcggatattgagttttcatataatcccggacaaaattgcatgatgtctgaaggaaatgtcgatcgcatatctgtgagcttattataatcctgatcggatgtttct

SEQ ID NO: 140560 - DNA, 442 bp, Glycine max
  unsure (1)..(442): unsure at all n locations
agcttagctacatacacccctctaatagcgatgcttacccccatgccaaattacatgaaaacacaaaaaagtccctactacaaagactactcaaaatgccctgaaatacaaggctaaaaccctatactactaggatggccaaaatacaaggcctcaaagaaggaaaacatattctaatatttacaaagacaagtggacccaaccttgggccatgggcttagaactctaccttagggttcatgagaaccctagggccttcttcagcagctctggcccaatcttcatggaatcttctatccaatgcccttgggaggtaggattgcatcatcccctcccccttgaaaaggatttgacctcaaattaagatgttcttgaaactctaggcttatttcctcaacacctattaaaagaantaaaatatatatattcatgggtgtaagta

SEQ ID NO: 140561 - DNA, 459 bp, Glycine max
  unsure (1)..(459): unsure at all n locations
tagtagttgggctaaatgtatatccaccgctaagcgcagcttctgttcatttagcgcanaggagaatctggcagagcatcatcatcaaagtcacgcgctaagcgcgagatcagtgcgctaagcacagcaagtgccttcagccagactaaggcgctaagcccaatttcacttactcacgctaagcgcgagggtggcgctaagcgcagtgtcacgatttcagagcctatttaaagcctattttgtgtagaattatggtaagcagatgattggcacagagttctagagcagccacatgcctatttggggaaaagagccctagaagcaaaaaagggaagcagcttatgcattgaagcctaagtttttcatttgagagatattgagagagagtgagttgagatgctaaaagaggaagatgaatcccctctttttgtacagactatcattctctactttaatctc

SEQ ID NO: 140562 - DNA, 452 bp, Glycine max
tgtgaaatgaatggaatccaagattctgttggacacttgtttttctttttgttcttagaaatgtgacctaagcgcttgtgccataatgctccacagtatgtaatatcaattctacacttagtaccacgcaagtttgcattaaaggattcaccatatgaagctacagtatcaagtaaatatagcttatcattagccaacagtgaaccacttccaataatatttgaattgaaagacaacctgagcatattgtttccaaatgaacacaaataacccaatttgtccaaataagaaattgaaaccaaatttcgtctaaatgacggtacaacaaaagtgtcattcaaatccaaaataaaaagtagttcattataataatctatagtgccctattactatcacctccatctatttagcatctccaacatagatccattctttaaaatgaaatggctttc

SEQ ID NO: 140563 - DNA, 288 bp, Glycine max
  unsure (1)..(288): unsure at all n locations
agcttgcggattgatcttacattttatttgatcgangtgggtctaaaaagaggcaaatctgatcatcatgctttgataaatgcaaaaaaaaaaactggggcaaatgaatagggtgagaatgagggaaaaacccatgctgtgactgtcattcctatacagccaagtttcccaccaacccaataatgtcattactcagccaataacaaaccttcttcttacccaccacccaattatccacaaaggccatcccttaatcaaccacatagcttatctaccgcactttcaatg

SEQ ID NO: 140564 - DNA, 368 bp, Glycine max
  unsure (1)..(368): unsure at all n locations
tctcaaggaagtntctcaaggaagctacctaggctatttattgaagcatgtgtaacactttttgtaactttgatgaatgaaagtcttatgagacacacttcaaagttccacttctctccctcttttattccttcaatttcgtgctccccccttctctctttcttatcctccattaaagcatcctcttcaagattcttatccaaggcacattcttggtggtgaagctccttcttccatggcttattccctagtggatgatgtctcccctctcttcttctcctttgccttccgctgcatctccatggtggaaaatcaccattgaagaaccgcattgaagctcaaagatccagcctccatagaagctccac

SEQ ID NO: 140565 - DNA, 389 bp, Glycine max
  unsure (1)..(389): unsure at all n locations
agcttctnccccaattatctataaanatggtttagaagngaagngaaaaagggttcagccccttangcacttctctctctttcgaatttgcttggaaaaattgtttccgtgaagaaaatctaagccgaggcgcttccgaaacgtttccgtaaggaatttcgcgaaggtttcgaccgttcttcgacgttcttcattcattcttcatcgttcttcgatcttcaacgggtaagtacctcgaaccaagcttttcgaatcattctatgtaccccggggtgatccacatggtgcttcgtgtatttttattctcgattcatctactatttatacccccttgttgacgtgcttaagcaatttattaaagcattttcgcttaactaaaattaaataat

SEQ ID NO: 140566 - DNA, 429 bp, Glycine max
  unsure (1)..(429): unsure at all n locations
cttggcaatcacctcccttaaatcccaggacttcccattaatatttaattgattcatactgaaccatatcagccacataatattgaaaatatcagcagcaagttcatcatttgctcccataagaagaggtcacaaccattccttgagtgagacaagttggttactctgggttcatatcaagtacttagaggtaaaccacatctgctgcaaactggatccacatcaacattgcagtagcgtagtctagagcatatatgcagggagtctaagcatgcgtcctagaccagtgttttgcactttggtgttgccttaacaacccataattntgtcaagaagggatcctttgcatctattgtagactcaacttctgttccatacaatgttatagccaagtggtgacctgacaagtttacatactccatcgtcagt

SEQ ID NO: 140567 - DNA, 373 bp, Glycine max
agcttgtaattgcatcaagatctgagcctttatcttttggtatcaagggagtaaaggaaaaatgatttttcctacacaaagtgaaccatgctcaagaaataaggaagagacttctccttaatctgatgctttctcaagaaataaggaaaatgcatcacatctatatgtcattcacatattctattctgagatctctttattttctcctctaattcacttttaatctttctttttcttttaatattattcttcagcaagagccatttaaagttgttatacatcattatatttgcaattgtttcactgtgtttgtattaataactctgcagttgtcattttcttgctgaagcctacatgctaagaacattttcat

SEQ ID NO: 140568 - DNA, 455 bp, Glycine max
tgtcacaacaaccattactaactgttgtgttaccaaaatatatttctgagaatacctcatcaccacaatttggggacaaatgagacccacaattggctaaatacttgacatacgatgacattggccctggtgcatttgatggttccggagcatcttgtgaaagcccgattttgaccatcaaggaagaactaataatgaaacataggaccattagagaaatgttgctgaatgtagccatagtttgatcatcaaaggtcttattgttggtaatgactaataagctctgatggttttgaaatggttggtatgaagctatatttatagttcaaaagtacttttaacgtctaaatgtgaactggccggtcttaattatgttttatggagaaatcaagatgtaagctaattaacttatgtctataaactgaaaaacgaagaacactcaattaactcacata

SEQ ID NO: 140569 - DNA, 352 bp, Glycine max
  unsure (1)..(352): unsure at all n locations
cgcgatcctcanagtcacctgctgcatgcaagcttcagttntaaatggcgagcgtancgtatttatttttcgactcaatccgacattcgagtgagaagttattgttcttagaatctgctacgatctttgattatatatttctagcgtcacaacaagtaacgggactcaatctatcattcgagtgaaaagttattgccgttcgaatatgctacgaacttttgttattaaattcgagcgcttctatatgttactggacttcatctgacttccgaatgtaaagattttgtcgtactactatgctaccagcctaggttataaatattgagccgcttttatttatgacaggactcac

SEQ ID NO: 140570 - DNA, 423 bp, Glycine max
gggtgcagaattgaacgacaataacgtctgactcggacgttctattgtttctcgtaatatatcgaggcgctggaaacttaacaccgaagctcgtaacaaattcgaaagacaataacttttcactgggaagtccgactgagtcccgtcaaatatcgagacactcgaaatataaaaccgaagctcgcagcaaactctaacgacaataactgtacactccggagtccgattgagtcccgtccaacgctcgaaattgaaaaccgaaggtcggagcataatctaacgaccataacaattcactcggaagcgcgagagacgcccgtaacaaatcgagacgcgcaaaatcgaatacaaaagctctgagataattctaaccacgataacgattcactcgaaagcacgagagagtctcgaatatatctgaca

SEQ ID NO: 140571 - DNA, 342 bp, Glycine max
  unsure (1)..(342): unsure at all n locations
acctgaggcatgcatactnttaagcanttatagcgataggatgattattcatgttcgatgcaaaacacgttagaaagaacaatgcaattcgagtactcaattcgacctatgaaatcacgcaaagctgttgagcgtattagttgcatcagaacgtttagagtaattgattgaacaacaactaaaaaaaaataatagtgtgatcaattttaataaacgctcagagagaaaaaataagatagttcgaaatgacgttggacaaagagtctgctatacaccatttattgcaaagtagacttctgtaaaactgattatgagcgatgaacataaggacggatcatgtga

SEQ ID NO: 140572 - DNA, 419 bp, Glycine max
  unsure (1)..(419): unsure at all n locations
ntaaatagtatactaactttaccaacctaaagtttattactttgtaactaaaagcaagttaaaaggcttacttggattgctgaagatgaaagcaaanagggagcaaggatacaggcaacgaggaagttgagagcacagcgcagagaatatggcaatgaatgggagaagaaatgcacttaaaggcataaaatgtaacttcctagggcagttacgccttattgctttttggcagattggactgcctcgcttagcatgtcaactcgctaagcgagcatgcaatgacatttgagtttccaaactcatgcactaagcgggcatgctcacttagcccaattcaaaaatttcaaaactttaaattccagagaaagttttgggcttagcacgaaactacgcgcttaacgagttctgcagctctgatt

SEQ ID NO: 140573 - DNA, 230 bp, Glycine max
taaatacgttggtctataacaggtaacaacaaatgagaatgatgatgatgacggaacatgtggcataatgccgacaaagagatgctataaacagagcaggatctatgactatacccactgaacagacatagactattggacaaaaggagatgatgcgggggcagaaccaagtcccccataagtttgggcgtggtctagaaacactacagacataaccgcatcgctctctg

SEQ ID NO: 140574 - DNA, 285 bp, Glycine max
taaaaggtaattgaactacaaattatatagactaaaaatatcacttacaaactatagggactaaaagagaattaatatacaaactataaggactaaaaagaacacttttaaactacactaaaagagaatgataatgtaaactatagggactaaaaaaaccacttttaaactaaaaggactaaaaaagtatgaatcatgagactatagagaccaagtgagttatttaacctttctaaataaatgcatatataaaaaccttgtacactgtccttgaggcgggccaac

SEQ ID NO: 140575 - DNA, 469 bp, Glycine max
  unsure (1)..(469): unsure at all n locations
tatctntgatgatgagggcatgatcctggtgcggatgtttatattcttaagggtntcgagcaaatgggtcctgaatgccgaaacctcagcttcagaaagaatgtcatctctgtgaagagccaccaaattcagcatctgatagagagaatctcgctgccatttgaggttgtcggattgaagctgccacagcttctgctctgcggaaacgagacaccgatgtttcttgaggccgaatggttaaatggtcttgcacagagaagatattgagtcgtgcagggtctagtagtacgctgtgggtgccttcgaatacaccattntcctaacaaggaactcatattttgcctacaaatatatatataaatggtgtttttgtgaagattctggatgacacacatcacaatggagccatgatttgtgtttaatattgggaccaactaaacgagatgctcagagcaatgcctgctagctc

SEQ ID NO: 140576 - DNA, 314 bp, Glycine max
cattattcaacggagtcgacaagaacatcttctttctgttcatcactcgcacagcggccaaagatgcatgggagatcccgaaaatcactcatgaaggaacctcctaagagaacatttccagagtgcaactctcggctacaaaattctaaaatctgaagatgaaggaggaagagtgtattcatgacttccacatgaacattcttgaaatagccaatgcttgctctgcctcgggagagaggataacagatgaaaagctggtgagaaagattctcaaatccttgccaaacagattcgacatgaaagacactgcaaag

SEQ ID NO: 140577 - DNA, 387 bp, Glycine max
  unsure (1)..(387): unsure at all n locations
nagcttctaaaggtacataaatgctattctttgtttctttacactgcatatttactcaactcaaatttttatgtgcttctttcatctaatggcttgactataaacatgtaacatactttggaataaccatgaatgactaaagtggaaccactcctactatggtgtcatcaacttcaccacgtatctcatgtgcattcactaagcccaaccaagaggataacaacaactacaacaacaacggctacgactacgacaatgacaacattgacctcatcaacatcgtctttaacaacatcaacaataacaacaactctgaaggtctttccttggtgctagtagggtgccatcactgccttatcatctgatgatctttaggataacctctag

SEQ ID NO: 140578 - DNA, 437 bp, Glycine max
ctgaacaatatacttgtccttcatttaagtgtctttgtgttattcggccacgctcaacaaagtactttcgacacctattgtacattgatttcaccaatgttgttatgggaatgttgcgagaatcctttaaaaccttattgatacattctgagaggttggttgtcatgtggccttatcgacgtccttctctatcataagtcatcgtccatatttcctctgaaatgcgatcaatctatgttgctatggttggactcagttgacgaaattttctaaattttgataaaaaatgtgcttgcaggagtgtcgctgcataaattagtatgaattcaattttagttttatgaaagttaataacgtgccatcaatatgaattttcccaattcttcacatttcttttgttggcctattgaatttcaatgaaatgcttcttttgtcca

SEQ ID NO: 140579 - DNA, 448 bp, Glycine max
  unsure (1)..(448): unsure at all n locations
agcttaacaagaatgtattaaagtatttaaatantataagtatcttttgaactctaattgtgcctagattattagctcatctcacctaagcatgcactcttttactatctataacattaactattactgtgtacacgcacatatataaataaaatatatataacagatagtcacaccttcaacatgtgccatgatgtggtaggaacacacactatgacgagattgtggagaaaagcttgtggcaatgatgtcaaaatatctataaaaaagtgttgttaagtttagcttttgttattgtctctgcaatacatagatgtttcatgtttcacatggaaattgtcgataaattaaaattcaagtgatacatagattatgtattttccaaacttagtgacagatatgagattaatctatggaacctacctatgcgtgagaactataaacacgt

SEQ ID NO: 140580 - DNA, 445 bp, Glycine max
  unsure (1)..(445): unsure at all n locations
tcttacagatactagaacaacataacaattgctgacatcttgttaagcttctctaaatatttggatttggttcttctcggacaaagaaattcagagagggagagagagaacatggagaggaatgagatggaaaggattgatgatgtgatgccaggatttcgttttcaccccactgatgaagagcttgttgatttttatctcaagagaaaaattcagcagaagtctcttcctattgaactcattaagcaagtggatatttacaaatatgatccatgggatcttccaagtaagaactcttattactcacactcattgtttcttagctttctcttcttttgttgttgtgctttatgccacatagacaaatggttcttacaggatcagactaatttgcaaccaagtcttcctatttcactntagttttggtactcatcttttaaatgtg

SEQ ID NO: 140581 - DNA, 424 bp, Glycine max
  unsure (1)..(424): unsure at all n locations
agctacaagggtgcaagactttgcggtttcttttatatatttacaagtgcttgtaaggcgctatgctgtccccataagttgaaatctcggcggagcaaaacatggaaaagtggttctacaatttctgcagcatctgaacttctcgcaattgcactgctattagttaaaatgcgaaacagctcatctattgtggagcatagagagctaggtgctaattgtagtagattgagacaattattaataatgccagctttcaccatgtctaggttaattggagtcctgtctttgcccaattngataaaagtagatatggcggcctctataagctgatagtttgtaccagaaaaccagctcacaaggagatccacaacactgtaggcttgtgcaagctctacttgttggtcatcttccaataatctttcaa

SEQ ID NO: 140582 - DNA, 394 bp, Glycine max
  unsure (1)..(394): unsure at all n locations
ntgatgggcttgacatggttggtatgaagctatatttattgttcataagtagatctaacgtctaaatgtgaaccgcccggtcttaattgagtttaatgaagaaataaagacgtaagttaattaattaatgtctacaaactaaaaaacgaagaactttcggttaactcacatatttacgtctcctccataattttttaagtttaccctaagaagataatatttagttgcagttattggagaaacataaagcacttggcacgtagttgttaacgacattgtttttttgtgtactgttacctacatatattgttttttttaagagacagatgtgtattcgttgaaaggaaacagaaacggaatcaagctntacatcatcttcaacaatgttcaaaat

SEQ ID NO: 140583 - DNA, 454 bp, Glycine max
  unsure (1)..(454): unsure at all n locations
agcttaagataaaattgagtgagcgtaattatcatattttctcaatanatcgtaaaaagtttaattttattttcaaatttttaaaagatttaatttgatccttaaatataaaaaaaacttttatttgatctaagtaaaaaaggaccaaatctaattttttttttaagtttaaggattaaatttctcttaaaataatacctttccttttaaaatggagatcaaattcaaccttttaaaataatttgagaattgataattcacccgtaaagataaccagactagggtatataatgccttacctttccctccacagccactgcagaggtgtattttctcactgctcagcactcagcatggatatcagttgatgatacataaacaaacagatgaggcagaagatgttgtgtgtggacaaatatctgtccaaaactcttgacatgttatggccacaccg

SEQ ID NO: 140584 - DNA, 497 bp, Glycine max
gtgacacttgatactaagctagtcatagtcttgtgactagttttatgatgtttcattttattctttctttgcttatatctttcttgtataaatgaaaaatgcatattgagaagaagacattaaagccttaaaaaataaggtcaaaatctaacttaaataaccagataacatatgaacctagggcaatgatgattataggcttcaaaacacgcacctagaaaacaaatcacagaacaatttgcaaagaagaatgaaaactataaacttccaaccacaagagagcgcaccagtcactggaattacccatcaacaggggagaatagaattgcaaaattcttcttcttctttctcttcctcaatctacataagtacataaccattgtttctctattcagtttagcgagaaccagattctgatcaaacccgaattaaatcatcacttaatttacaataaaaactttctctgctactgaatagtgttattgtgtggttagttg

SEQ ID NO: 140585 - DNA, 380 bp, Glycine max
  unsure (1)..(380): unsure at all n locations
agctttaaataatgtacggtattggaaccttctgtatgatatcacttctcttgctccagccttgattataagggagaggaattcaaggcccttgttatgcaattcatgcccaaaggtaactntgacgtgagtttatacccagaagatgttgagtcgggatcctctctaaccttgttgcaaagattgaacattcccattgatgttgcttcatcaatgaactacttgcaccatgactgtgatccatcagtagtgcattgtgatctgaaacctgccaatgtccttctagatgaaattatgattgcaaatgttgcatattttggattggcaagagatgcaatcctactccgcacgggcatcggatnaaanactccaagtagatt

SEQ ID NO: 140586 - DNA, 454 bp, Glycine max
  unsure (1)..(454): unsure at all n locations
acattcccctgcctctaacatgcttcttgacttcatatttattgctaatcctatcatcaagcctgtacccacaaaatgcaggaaaaagcagcaactcctcaatgtgccgccccatctcctctatcaagtactccatcttcttctccaaagaggtgtgattatactgcagtatctgtggctgcttcttgctcatagcaacaatgtcttcacacgaaaacccataattcaagaacaaactaatgaccttctgcatgttcccacagtttgtcctagtagcagacctaatcgccattgccaagtcctntgacctatacctatagccaatcttcaccagcaacaccagcttataagcgatgttctcattgaatgaaatgctcagaaacgtgggccctttaatcaagaactngaagatctcatcagaatccaacccacattccttgagagactgtattct

SEQ ID NO: 140587 - DNA, 441 bp, Glycine max
agcttgtcccccaatattgtataaatagggtttgtatttaagtggaaaagggttcagccccttaggcacttctctctctttcgaattcgcttagaaaaattgtttccgtgaagaaaatccaagccaaggctcttccgtaacgtttccgtaacgtttccgtgagtgatatcgtgaagggtttcgaccgctcttcgacgttcttcattcgatcttcatcgttcttcagtcttcaatgggtaagtacctcgaaccaagcttatcgattcattctatgtacccgtggtggtccacattgggcttcgtgtaatttccttctcgtttcatttactttttataccccgctgttgacgtgcttaatgcctctatatttaagttcattctctcttaaccttaaattaatatatgtttcaccgatcgtttgaattggttatccgtaccttt

SEQ ID NO: 140588 - DNA, 339 bp, Glycine max
  unsure (1)..(339): unsure at all n locations
taagctgatgccgaatcagatactggaaccagatataactttctctgtatctgacctgtcatgacctatccagatcatctggaactcatcctttgattgacctttgcagctatgagcactaccgtgtgctatactaggcacaacaattgactcaactcgagatgcatcatgatactatgcttctacaggctctaccatcctctacttgaagatgctttctgcttctactcatcacaactatgcacacgtttcntatgaacattcccagcgtaaaccgtgaaacggcatgaaggtcgttaatctatctgacatgcgagaagggacacctgcacttgcaga

SEQ ID NO: 140589 - DNA, 229 bp, Glycine max
gaagctctcgagaggagtcaaattgcttttcttgtcacaccgatgtccgattcacgctcatactatatcgagactcttgaaattaaacaacgaaagctctcgagatattcaaatggacataacttgtcacaccgaggaccgattctcgcgcgttatatatcgtgacgctcataatagaatcactgaagctctcgattattcaaatggtcataacttgtctcacgaaaga

SEQ ID NO: 140590 - DNA, 321 bp, Glycine max
aatgcaatcacactatatctagcactaatattattatgatatctttcccttttagtttattagaagtaatcctatatcgagagtgtaacccctaaaagtgatgcatgcgtaccctcattatattcttataatgagttaccctttggcaaccatataaccaccagaaacatgtaaagacgagcaatgcctgcaattaaattgggaaaatacatttagatagaaaacacctgtcgcattgatatatatagatgacaacatacatctcttggctatataggccagtctagccctaactaggagcttagacactcatggccatga

SEQ ID NO: 140591 - DNA, 469 bp, Glycine max
  unsure (1)..(469): unsure at all n locations
tctccttcttgatgaatgagagataatatgcagagatgagttatcttaagacgggtgagaaaaantaatatgcattttttctttattacatatgcatttgtttgtgcgtgtttatattaagattgggccagacaattaccttggtggcatcaatgataaattgtacagttagttgggtagggtagaataattaaagagtggggatgggaaaccacttaaccactcattgtacaattttagattatagttgggagaagttaaaaatattattattttctttcttttattcatagtttcaaaaatctaattgttgatcatcccgaccagttaaaatattgagttaccataggttaatgatcaaactagtaggttattaatgaaccacatggtctgatctttattttannattttttatacactatcttnaaaaatccaaaaaatcagttaatatattcccacaagctcact

SEQ ID NO: 140592 - DNA, 287 bp, Glycine max
agaaaaaagaaaagaaaagaagatttttgaaaaaagaaaaagaaagggggaaggaaaagaagaaaaagaaggaaaggaaagaaaaaaagagagaggagaaaggagaggaagaggaaaaggaaagaaggaaaggaaagagggagagaaaggagaaggaaagaaagggaagaaaggaagaaaggaggaaggaagagagagaagagagagagaaagaaagaagggagaaaggaagggaagagaagaagaaaggaagggaaagaaggagggaaaggagagaggagaaggaa

SEQ ID NO: 140593 - DNA, 236 bp, Glycine max
ctgtaagtatttattgggataattcgcctgtaccattatgtttatattgtctttagacgatacttcctcgttgacatcttttgatttgaatggaattgccatgacaggtttattattactgtctttgatatttggtagtcgatattgtgtcgtgggaagtaatacctatcgtattaactcaccatgtatcacttgacacgttgttatgacatctgtcgttggatcacctaatatta

SEQ ID NO: 140594 - DNA, 450 bp, Glycine max
agcttctagccaaatagacttaccttgaattatttcctttgatagcccttttgagccttgtttccctttccgtgttttgaagctcactacaagccttaagtgaaaaaccatgatatcaccatatccttaaggaattttggagctttggaattgttttgggaataagtatggggggtttttgtttcattggacaacttgttttgttggctatgcttcatgatgtattttgggccatacttgatgtacattgtatattggttaaattttggacatgctgaatgaaatgttgtttctcaaaggccatagagtaaaaaaaaaaaaatattcgaataaaaaaaaatcgaacaaagaaaaagaaaagcaataaagtggagtgaataagatcttaaatggcacaagaatgatgaaactcttggttctactcttcatgtttaaattttatcgttactt

SEQ ID NO: 140595 - DNA, 485 bp, Glycine max
ctcagctaaggatggaatacttacttgttggtgacgaaataaagcgtttatctgaatcaaaaatgtgaagaatgatgccacctagcgattcatcccgtgagggccggtttctcaaagatgtatttcacgggatccattttggaaataagccacgtggtatggctgagcatgtactgcctaagccgatgtgatgcccataccagagcacaacacgtcctttccagcattgagtaattcatctcacatgcggtaaacttcttgcttagatagtaaatggcttgctccttttttccagaatcatcgtgctgacccaacacgcaccccatagactcgtccaacacggtcatgtacaggaaaataggtcttcctgttacaagtggcatgagcaccgcggggtttgcgagactctgtttgatcttctcgaaggcctcttggcagtcactgttccacatgaccggctggttcttacgtataacttgaaaatg

SEQ ID NO: 140596 - DNA, 446 bp, Glycine max
  unsure (1)..(446): unsure at all n locations
agcttctagccaaatggacttaccttgaatttattcctttgatagcccttttgagccttgtttccctttccttgttttgaagctcactacaagccttaagtgaaaaaccatgatattaccatatccttaaggaattttggagctttggaattgttttgggaataagtgtggggggttttttgtttcattggacaacttgttttgttggctatgcttcatgatgtattttgggccatacttgatgtacattgtatattggttaaatgttggacatgctgaatgaaatgttgtttctcaaaggctaaagagtcaaaanaaaaaattcgaaaaaagaaaaagaaaagcaataaagttgagtgaataagatcttaaatggcacaagaatgatgaaactcttcggtctactcttcatggttaaattttatctttacttcttttattctcta

SEQ ID NO: 140597 - DNA, 397 bp, Glycine max
  unsure (1)..(397): unsure at all n locations
tgccacccagctcgcccaggcaagctctgctcgcctatgttatcaaggtggcttcctccagaagcaaccgtcttctggagggcccaagtgggcctggttgctatttgcatccccatttttactaaatacacccccaacttttttttgtgcttctnttttcgtaaagttacggaaacttatgaatttcgtaacgatacttgttttctttccgtaatgttacaaaaccttgcggatntcataatcatccattttttgacttacggaacattagggaatctcacgaattgtgcaacgatgccttccttttgatttctggtatgtcacggaaccttacggattgtacatcaatactttcttttgatttccggcatgttccagacttcacaaattgcctaat

SEQ ID NO: 140598 - DNA, 359 bp, Glycine max
agcttctcgattccccatcgggattcctgcttcttgcttgcatgaaatcgcaaccgacatcttacccacttcagtaccaggggctggagctatgcttaaatgtggccatgaaccgattgcctatgagcatttcttccatggagccactaatctccaattccttgaaggctgccttcaagcgaatccgtgcccagcagcatggcaggcagcctccatccacggacaaagtcgaactcgaacagttaatcttatccattgtggacgaccccagcgtgagcaaggtcatgaaggcaaccggttactcaagccccgacattagcgccaccttccagcgtgggcgcaagtatgaaatgtttatt

SEQ ID NO: 140599 - DNA, 461 bp, Glycine max
ctaagctctaacttatacagaatgaagtttgatacccttgttttttttggcctcagatatcttaagaagggggggttgaattaagatatcacaacttatttccccaattaaaaattctagttatctttctattccagttataaattcccttaataatgaatttcttaaatattgattcaaatagaacaatttgaatataaatataaaacaataataaataaaggagtttaagggaagagaaaatgaaaactcagatttatactggttcggccacacccttgtgcctacgtccagtccccaagcaacccgcttgagagttccactatctcgtaaattccttttacaagttctaaacacacaaggacaacctttcctttctgtttagaatttcttcacaacaagagaccctctgtctcttaatcccttttcagaatgaagaagaagaagagaagaaatctatc

SEQ ID NO: 140600 - DNA, 384 bp, Glycine max
  unsure (1)..(384): unsure at all n locations
tcctctgagtcacctgctgcatgcaagctgcattataaatatgttgcanccattattttgcgaatccaagaatccaaagagcttaacaagctcataggccaatgatagattcaaaaactataagaaagcatgccatgattaaccaaagacactagttgaatgcggtccataatcgaaaggagagaacccttctacttaaccaatttctctttaagtctatcaataatggtgagaaggtgagcacactttgtctttccactgaaaatgaaagcaccaagatacgtgaagggaagagtgcccatcgagaaacccatcatctcatggaaagcattaacatgacttgatgagatatcaccttgggaaaacgtacatttctgaggactg

SEQ ID NO: 140601 - DNA, 416 bp, Glycine max
aaatctaagctgccgatatggggacccgtatatgtggactaggtgtgttattgtcgatggtgcaaatcaactctcccacatccacaaatcatacatgaacccaccatccccagttgcccaccatcaactgagctcacgtacccccatgtatcccttatcctcgttcctctcagtaccgggtccccatcaacccctccaagcttccacaatatccaagcaattcaatattcaaacatcatgaactaccctaaaccaagaaaacagggcagaggcagaaaactctgcccaaaacacattccaataccacaactttccctactcatataccccagaaacattctcttcgttcgatatgctaaccggtggatcgactcgaaaatattactggagggttctagtacataagttacattttg

SEQ ID NO: 140602 - DNA, 447 bp, Glycine max
  unsure (1)..(447): unsure at all n locations
taagcnttccgcgagaccttggtngagtgtgttcaatacccgagtattttgttgttattggtggcgccagcagagatgctagaacatctaaacacatcccactccatcagcttagctggtgcacaacgtcatcaactccgaaactagaacatcacgcgacgacaactacaacgacaacgacgtcgtaccatgacgctatgggactttctctaccgcgacgcatctttgcgcgatacggcgaaactaaagacaatgatggattccacagatgctctcattcgataccttgtagaaaagggtaggtgcatgaacagaatgatgttaccacagtgccaagtgagtgtgttggggcagatcgttcggcgagtcccattatgtgacggatgataaacttggagcggaagattggacttctcgctgaggctgtgattgactaacaatgcgttc

SEQ ID NO: 140603 - DNA, 403 bp, Glycine max
  unsure (1)..(403): unsure at all n locations
agctntaggaaggatcaagaagtgccttattatttctcccgngcttatgccaccagtaccagcaaggcctctcatctcgtacatgacaatcttagacgagacaatggggtgtatgctggggcaacatgacgaatccggaaagaaagagcgcgttgtttactacctacataagaagttcacgacctgtgaaatgaactactccttgctcgaaagaacgagttgtgctttagtatgggcatcccatcgcctaaggcagtacatgctgagccatactacctggatgatatacaagatggacccggattagtacatctttgataagccagctctcaccggacgagatcgccgagggcgagtgctgctatccgaagttgacatagtctacggtacccaaaaggcgata

SEQ ID NO: 140604 - DNA, 471 bp, Glycine max
  unsure (1)..(471): unsure at all n locations
tcctgactcaccatataccttgacccagtgtgattatgtcaatccttaccctcggaagcaaaaaagataagaagganaatctccaatcaaagagaaagcaaaaagaaaagaaggaaaatttccaatcaaagagaaagctaatagaaaagaatgataattcccaatcaaagaatggaagatagtaaataaaggaagaagaagaaggaaagatagctcctaatcaaggatcgaaagataacagaagatatatgccgaaaggtctttggaccggataatatctgaacaatacagaattgccaccaaatgaacaaaaagaatgaaaggaaaccatgacctaaagtggttctctccccttaattgccaaccaagatattgtgtgctagcgactttttcgccccgcacttaacctaaacagaaaatgaaaaatgccataatataggtgccaaataaacacacaaaagtcataaaacc

SEQ ID NO: 140605 - DNA, 279 bp, Glycine max
  unsure (1)..(279): unsure at all n locations
agcccggcacgacataaaggacgcactacaattcttgatttnagaagacacgagagcgaaacaaacacgctcgacaggagaagaaatttagagacggaaatatcagtgtacactctagacaacacagcataaaacagggtctgggctttcagctcagagccaacataaaccatattatgaataacaacaccggcagcagccacagcaacaacatcaacaagcaacaacaacagcgatgataataataacaacaagaataaattggatgtgatttacatc

SEQ ID NO: 140606 - DNA, 428 bp, Glycine max
acaacaacaaccacccaattcttttatatacaataatacaatcatgcaacaacatcacaatagctaaaaatcattgaacgcttcaacataaacagcttcaaagggaagggaccacttacctgtaagaagattacccaaccaccgaaagataatgggaacaaccaccaacggaagaagtgcatggcggaagaacaccataacacgaacaaccaccaacggaggactgaaagatgaacaagcaacaactgtcaaacaccggaagaggaagatgaacactcacataggcaatagaacatgaagaaatggatgagaggaagatgaatacgaaacagcactgtatgaacaaaatgcagcatatgcactatacaaatggctaactttgggatcttatagtaatatggtgaaaggaatattggactattctccat

SEQ ID NO: 140607 - DNA, 427 bp, Glycine max
agcttaagctccttcaactgcacaaggttttttatatatttgaagagtatccttacggtaccttcacccgatgaagacactgacaaaaatctatcttctcctcttcagacaaataatgacaagctgagggcaagtaaatttccttcccatcagaccatggatgcaactgtgatctgatccccatatcatcattatcttgacgggtattcaagtcatacttcgtcttgccctgaatgttaatgagcgtcccaatcacattgtcacaaatatttgtctccacatgcataacatcaatacaatgtctaacgactatatcagaccagtacggaagatcaaagaaagtggaccctctgttccatatgcactcttattttaatcatcttttggacttccaaatacaacatcagggttgacccactggatacct

SEQ ID NO: 140608 - DNA, 366 bp, Glycine max
  unsure (1)..(366): unsure at all n locations
tgttctatatcagaaggctagttgctacaaaggcaatgagtatcttattgaagacggtgacaatgctccactaaccatatatgccanagcttgtcctggtcaacttttcaaacatgagcttgaagatttaaagcaaaaggttgagctcactaatatggaccggtatgccatgaagaggttctaaagactgaaggaatgtttctctagtatagaacctgatgaaaagttacctgcagatgcagttcattatgaaattgggtgatgctatcaaaccctgaagcacacttgcttctctcaagaaactcttttcaacatggttgtgtctgatcataccttacatttatggtgttccttcccttcttcata

SEQ ID NO: 140609 - DNA, 332 bp, Glycine max
  unsure (1)..(332): unsure at all n locations
agcttgncaaagatgaaaactacgtttgtctttttattataacgataactatacgaataacaagtctcaaaattatatagcaatacccaaatgctgctaatcccttccatccaattatgagacaagaaaacactattaaatcgttggggtcaggcttactaaatgcagagtaacctatcatactatattttcaccaatcttgaatttaatttcttaagcctatttgcattatcagtcatcacttttctatactgtgcagggtcatctatcatactttacctgattaccatcctcgactaacataatttttctagatggttttgaagcattct

SEQ ID NO: 140610 - DNA, 340 bp, Glycine max
  unsure (1)..(340): unsure at all n locations
ctctaganagaacactaccatagggaaaagattngaatgatgttctatatctcttcatcctctcagaaccagattccaatccattttgaaacttctcagaaactgaacttaatgtatntctaaatctctccgagtgtgttattttaattgcaggataattactctcagaacccttctctgaattccaatcctgaaacctgaaacatcatacaaatatcaaatgattaataatggtaatacatacttagtttgtgtttccgatattcctcctaaaacatgttctccttagtaatgctgattaaggaataaaacttctataacttgaagggttaacaatttg

SEQ ID NO: 140611 - DNA, 436 bp, Glycine max
  unsure (1)..(436): unsure at all n locations
agtcatacctcacaaaatatatatatgtatgtttatgtagaaagataccttggatatgcatgtatgtagcaaaaagatacctcacaaaatatatatatgtatgtttaggtagcaagataccttggatatgcatgtatgtagcaaaaagatacctcacaaaatatatacacatgtttaggtagcaaaatacctcatgaaaaaaaaagaaaaataaaataaaaaaccctccttgaaaaagaaataaacaaatgataatgataaaaaaaaaagggagaaaaaagaaaaataagttgtcaagctgaaaaaccaacatgctcttgaaaagagatgacttccaactgatcataactagtttttgaaaaaaaatgtgtatacccctgaagggtgaatgctgtgaagattntcccagacgcccgaaatggactcggatgaatgc

SEQ ID NO: 140612 - DNA, 274 bp, Glycine max
tagctgctagagaagcaacatgaagctgttttgttatatacgctgcccaaccttcttcaaccgatggatcttctcgaaatttgatctgcaacatcacaagacactcgtacatgatcctgaccagttgggatctgtgagaagatgtatggagagtgctataagcctctaaatgaagcttctggaggaagcctcttatgaagcgtacagagataactacatgcagctgcctcgtgtaaaacgctgcccagccatcgttaactcgtggatattctcg

SEQ ID NO: 140613 - DNA, 444 bp, Glycine max
tcaatggctcaatgagcaaggtgaaatgatagtcaatcatctttttatagataccttttctataagagactattgcgatgaagttttatgttatatactccctagggaagcaaggcacattttgttgggtagagtatggcaatatgacaagaaagcaatccacaatggtctcaccaatgaaataaccttcacccatggaagcaaaaagttaaaacttgttcccttgacaccttcaaaagtggttggggatcaagtacaaataaaactcaaatgggatgaggaaaataatagaaaaagaaaaaagaacaacctttaatggttaaggaggagtgtaaggaggtaagtgtctcctccaagaggttagctaaaatggaaagtcattctgcaacaaagacaaacattatagatacttcccttgttagacaacctccacatcttctcatt

SEQ ID NO: 140614 - DNA, 289 bp, Glycine max
atgcgcccgaatcggacgtacgtgtgaaaagttatggtcttttgtatttctcgagagatggcgatgtctaatttcgagcgtatcgatatatggtgcatctgaatcggacatccgtgtgaaaagttatgaccatctgaattacacgagagctggcgttgctcaattacgagcgtctctgattatgatgcgcctcaatcgaacatccgtgtgaaaagtaatgaccattcgaatttctcaagagcatccgttgtttaattctgagcggatcgatatatgatcatcctgaatc

SEQ ID NO: 140615 - DNA, 280 bp, Glycine max
  unsure (1)..(280): unsure at all n locations
agcttacccattctgtttagggtttttattattatgctngtgacgtttatgtgctgaaattgctgatggaaaactgctagggatgaagggtagagttaacccatggttataaagcgagaatgttatgttatgagtggaaaaagtgtgatgctttgatggttagaaatgctaaatctgcattcagtatatactggatgttaaagtgagttagtcctagtttgaagtgtcattaatgacttatgagaaagcttgcgctgtgcataagataatatcatatgac

SEQ ID NO: 140616 - DNA, 398 bp, Glycine max
agaagaagaagaaggcagagatatttttgtttgtaaggattgcccgaatgaattggaaaagtgttctagattggaaaatgattgattcaaaatgcaaaacaaagccttgcttttatagactcttcatgtctggtcaagaagactattcagaagagttataacttttagaaaaacttaatacccatttgataaagtcaaaacctctttgaagagttacatctttatattttcagaaacaaacactggtaatcgattaccaaatatgtgttatcgattacaccaagaatttgagtgaaacaatgtgactcttcacatttaaatttgaatttcaacgttccaggacactggtgatccatttctacaacattgttatcgattacaggcttttgaaaatattt

SEQ ID NO: 140617 - DNA, 367 bp, Glycine max
gacctctaagcgaccgcggcagcaagcaaggctaaataacagagatgtttgtttttacgggaggaggtcgtacgccaatctggtcttaagagaagtgtcccactgtttagactaactttcccaaatgtttgccttcacaagaaatggcccccacgaagcttgcctcaaagaggtccaggaaggacaaggctgcccagggaactagcaccgctccggagtatgacactcaccgctttatgagtgctgtacaccaacttcgctccgaggccatcaagggacggtcgtttctccgcgagcgacgcgtactacccagggacgacgattctactgatctccattaggaaatacggcgcccgcggtgggcacc

SEQ ID NO: 140618 - DNA, 423 bp, Glycine max
agcatcaggagaggggccatcaaccgacctaattccttgatgtctggggcatctaagcctccaaccttgacttggtaaaacctcacgccggcatgagccgtccccatgcttactaaagtgagacaaaaagatggcgcaaatcacaactccgatatctcatgggtgggatggatgaatgcatgaaggaatgcatatgacacagctgcattttaagaatgcgtgcgccccggacatagtctcctttgtagacacaacgtctaaggtagcaaagagccccaacgtatgtatttaaaacggcgacccggaccttccattgatttgtctatagacgggatcaagacagaacccctatgcatatgcaaaacgcgcaatagcatgacaatatccactgaacataagcacaagggtatatgatatctatgc

SEQ ID NO: 140619 - DNA, 365 bp, Glycine max
agctgtgtgtggagcttcaatggtgaatgattattaatatatgctcgtgagagatggagagaaaaggctcttgaatttctttcttttggctgagtgatgagagagaacaactttttggttgttaaatagaaaggtttttctctttttctattattatattcaagctctgccacatgtccctatttgagtggagcaaaagggcccactctccctttttactgtgacccacactcatccagaaaagtgagaataacctgaccttttaaacgcttatatcctgcctcggtttgcgtgcaacgtctctgataccatacctcgcattctatgtgacgcgtggccattttcagagttccgattttttttaa

SEQ ID NO: 140620 - DNA, 373 bp, Glycine max
agccttcatggccctatgtagtgtatagggcaaaactatcattattagttgttttatacattctagtgagcttgtaaaaaatcttctacacttgaagtgatcacatgcaatcctcttgaacccttaccacccactctgtcatcatgccgagacttaagaaggccaacaggtttagccttctcaatttattctgaacaaaattcaatggcttcttcagcaatgtacctctcaacaatagatgcttctggatgataaagattctctgtataccctctcaagaacatcatgtatctctcaaccgggtacatccaccattgataaacaggaccacaacatttgatttctctgactagatgcacaattcagtgaatca

SEQ ID NO: 140621 - DNA, 146 bp, Glycine max
  unsure (1)..(146): unsure at all n locations
tctataacaaccgccgcatgcaagcttanagaggatgctacaatggaggaagatattgacagagagagagagagacagagcccgcgggggggggagcgaaaagatggacaccaaggagagaagtcgaacattgaacggtgtctcac

SEQ ID NO: 140622 - DNA, 374 bp, Glycine max
agctaataatatatggatgcgcgcggagagttatctttatatactcacgagaaacccaaaggagcataacatttcacacggatgtgcgattcgggcgcataatatcgagaggggcttgaaattgaacaacggaagctctcgagaaatccaaatggttatagcgaggcacacggatgaccgaaacggcaaagcacagatcgagacgctcaaaatcgaacaaggggaggtcgtgagaaatgcaaaggagcttagcacggaacatcgaatgtgcgatgcgggagcatcacatatagtgactctgcgaatagaacaacagaagctattgagaaatggaaacggccatagacttgcacatggaggtccgatacaggcac

SEQ ID NO: 140623 - DNA, 215 bp, Glycine max
gcgtctcgatatatcatgcgcccgaagcggacatacgtgcgaaaagtgttgtccattggaatatctcgcgagcttctgttgggcaatttcgagcgtctctacttgttatgcgcctgaatctgacctccgtgtgaaaagttgtgaccagtctaatatctcgagagcgtccgtggtacatgtcccagcgtctctatatgtgaggcgccgaaatctag

SEQ ID NO: 140624 - DNA, 426 bp, Glycine max
  unsure (1)..(426): unsure at all n locations
agcttatgctgcanacatttataataaaccttctattcagcaaaaccaacaacagaaaaataattatgaccttatacaagctatcaaccaaaataaaaactataaaatgaaatttaaagactgaaacataaacataaatctaaattataaaatgtactaaagacgagataatattaaaactgttcaaaaagcagggaaataaaaatcctgtcagtgatcctagtcctgtggtgatggtgggtcctgatccatggcctcctcgttcaaatccagtgcaggagtgtctgctatagatgcctgttgagtaccctttgcggtcactagatcaatcctaaaaataaatggctcacgtggagtgcgagtggcttaagaagagtcatcctcctggtctggctgaggttcctgggctgcggaggcctcacccct

SEQ ID NO: 140625 - DNA, 481 bp, Glycine max
  unsure (1)..(481): unsure at all n locations
tgcgacattcttgcaaatacctatgctagttctgataagttgattatagtcaagatgcaaactttgaagcagcaattcgagctattacagacgaatgagaaggaaggtatagccgaatacctaaatcgtgtgcaaaatctgtcgaatcatgtgatggcttgtggtgaaaccttgaacgatcaagatcttgtagaataggttttaagaaccttaagttcaagatatgattatgtggttgctgcaatagaagaatctaaggattttgcataaatgaaattggatgagcttcaatgctctcttgaagcacacaagccaagaataaaagagagggaaacagataggtcatctgaacaggctttacttgctcagagtggaanaatattcaacaatggctcacgcagtagttaagggaatgctaaaccaacaaaccataaattgaataaaacaagagatgatggtactgatgattcaagtgctaatg

SEQ ID NO: 140626 - DNA, 358 bp, Glycine max
cttaagtcaccgcagctgcaacttaagctcaaagtagtgggtttttaatcaagagaggaaataaatgagaagttagagatgtagaacatacctaaccacaaacatggtttaagtatctatggttcatcattcaggactcagagaaatagagggagatataaatcataggactctatgctgatggatgaaacaggggagcacatcttgtgttatctgttatcaatataaaaataatttttttcaagtcatggcacggcatgtattctgggtttaacccatctgtgggttcaatccaaacatgaaaacccaccccaaccaaattttattattccacaagcttctgatgtgaattcaatat

SEQ ID NO: 140627 - DNA, 444 bp, Glycine max
  unsure (1)..(444): unsure at all n locations
tctaaggaagctacctagtctataaatagaagcatgtatttcatcttgttgtaactttgatgaatgagagtcttgtgagacacaactcanagttcaacttctctccctttttcttccttcaattccgtgctcccccttctctctttctctccctctttcttttcctccattgaagcatcctctccaagcttcttatccaaggctcatcttggtggtgaagctccttcttccatggcttattccctagtggatggcgcctcctctcacctcttctcctttgtcttccgctgcatctccatggtggataatcaccattaaaggacctcattgaagctcaaagatccagcctccatagaagccccacaagcaagcttccatcagatacctctatggcaaggagaatagtgtgcatgatttggaaaaagctcatgatatgatcttgat

SEQ ID NO: 140628 - DNA, 417 bp, Glycine max
agcttcctctaaagttacattgatgtctgtatttattggaggaggttgtatgtcatttatgctttaagaatattatcccactggtataactaacttctcaaatgtttgccttcgcaggaaatggcccctaggaagcttgcctcaaagaggtccaggaaggacattgcaacataaagaactacttccgctccggagtatgattatcaccgctttaggagcgcggtacaccaccatctcttccataccatcaatgggtggttcgttcttctggagctacgcgtacttctcatgtacgacgagtatactgattttcatcaggaaatatgggcccagctgtgggcactactggtcttttctatgtcagttatgattcaataataaatcttgatttatattccaatgattgtccaatatatg

SEQ ID NO: 140629 - DNA, 414 bp, Glycine max
  unsure (1)..(414): unsure at all n locations
tgtagccattagaaaagaatgagcacgtgattggatgcccgtcntataatgttagtcaatctggcagattgattttgaaggaatgcattgatcgtatcccggtgagagtgtgatccttaaattttgagagaaacgactatcatttagtactgatttttgcatgaatatctaaagtatggactgaatgcatgaaatagaggatgatgaaagccttgtttgattgtgatagccacttagccaaaaagctgaccatgtgcttgaatgaaatatcccttgtagccagcttaagctgaatgaattattgattgattgaaccctaagcctattcagtggtattctcctgctaccttgacttatggtgtaggagagcatcttctacaagaagcgtgggtcataagcaaattgtcccaaatt

SEQ ID NO: 140630 - DNA, 465 bp, Glycine max
  unsure (1)..(465): unsure at all n locations
gatcctcttagncacctgcggcatgcaagcttccacaacatgcaagcaagacatctttatatagcacaagctatcacagccaagcgaaacagagccaaggcagaaatctctgctcaacacatcaaccaaaatcacagcgtttctcacgtaaagaccacagtaacaattccttcgatccaattcgttaaccggtggatcgactccaaaattttactggaagtctatagtgtataagcctgcatttagaccgtagggatatactaacaaacatgcagaactcattctgcactagactttccacagccaaccacacacaagcatgtttctgcacttgtgcaaaattctgctgcacaatatcacagcacaaatactgcataagtgcagagttagaaaattacccttgctcttattcaatcttgcccagatcaaatctacagtgcaaatcatgtgtatacatgtctaacc

SEQ ID NO: 140631 - DNA, 343 bp, Glycine max
  unsure (1)..(343): unsure at all n locations
tgtcacagttctgccatcattggtggtgacttgaaattattttattgtccattgaggtatgagtttttatgatttactggtgtgtttataaattactgcattttgttgtttttatgattnttcacttcctactacttttgggtttgatgttgtgataactatcttaaggattacattacagctaagagtggatttgattgctgatcaaacacaaaaggtatttgataggatcctaacaaagttaggttgtactgtcccaccagttcctatattttgcatgcaaaaaggaggtaagaagctgcattntttataccatgcactttcataccttatgtgtgtatgg

SEQ ID NO: 140632 - DNA, 379 bp, Glycine max
  unsure (1)..(379): unsure at all n locations
acctatgaatctcagcttntaagaaactcgcaaaagttattcaaaataagaaaaatctctttatttatctattagaagtgatcatgggagtgaatntgaaaataaagaatttgagttattttgtgaaaaacatggcattgaacataacttttctgcacctagaacccctccacaaaatggagttgttgaaaggaaaaatacgtctttggaagaaattgctagaaccttattaaatgatactcctcttccaaaatatatttgggatgaagtcgttaatactatatgctatatcatggatagggatctaataagactcattttatagaaaactccatatgaatcgtttatggtatgaaaccacatatctcgcatcttcatg

SEQ ID NO: 140633 - DNA, 318 bp, Glycine max
  unsure (1)..(318): unsure at all n locations
cacggacacaaaaactcacttaggtggatctgattgcatgaagacatttttcntgtttttgctaaaatatgtcataacaagcatagtaaaatcaatagtgtttaaagaaaacttacttgatcacataaaaattattcttcaagaaaatgaaaatttgaagatatcacaatgtggtagaataatgtccactacggaaatgagaagaaagtagcaacaaagtattaaagattgctaacgcgctaaagatgcatagaatattcaagcctttatataaagacaataaattgaagggggggggggggtgtaaaacttctactt

SEQ ID NO: 140634 - DNA, 109 bp, Glycine max
gctaagaaaccccgaacaaggaaacacaagacagcgagaaaaaagagcccggcaaagacagaacacacagagccagacaagggcgcaagaggaacaaacaccgcaaaca

SEQ ID NO: 140635 - DNA, 175 bp, Glycine max
aagaacgaacgaagaacggcgaagatttgttgatatatttgcgacccacctcacggaaaacgttgtagaaacgtttcggaagcgcctcggctaagatttgcttgaggggaacagtgtttcgctgctaagttggatgagagaaaagggtcttagggggtgaaccgctagcttcgtg

SEQ ID NO: 140636 - DNA, 361 bp, Glycine max
tagcgatgaagagatctgggcccatatggtttttctaatacaagctcattcttgcctgaatgtcgggagtggaagccatctccaatcagaaactagcctaacacgagtcatatcaccagagctccccactacagcccaatcatactcctacaagggctaagccctctacaaatattgcaatagagtgctaaaaatctagggtaggacagttgccaccattctgatcttgcagactcatacagctctctcactagttgctgatccggaatgcttttctgaggcagggtcctgtgccggaaaattctcagacacccactaggtaccccctggaatgactggacaaggatcaaccactttccta

SEQ ID NO: 140637 - DNA, 336 bp, Glycine max
ctcgcccaggcgagctagggtgccttctggttattctttttgtaaggcccaagtgggcctggttgctatttgcaccccctgtttactaaatacacccctacctttttttgctgattctttattcgtaacgttatggaactttatgaattccgtaacgatacttgttttccttccgtaatgttatggaaccttacggattacgtaatcatcccttttttggctttcggaatgttatggaacctcaccgattgtgtaacaatgcttacctttgatttccggcattgtacggaacttcacggatcgtgcaacaaagctctcttttgacttctggcacgt

SEQ ID NO: 140638 - DNA, 375 bp, Glycine max
  unsure (1)..(375): unsure at all n locations
gcagcatgcaagctgagaacaagaggagagcatgaatgcttggtctataagnngtcatcctatgactaacaaagaataccttatgatatactttctttctgcacaagaataagttaacctttgacgaacgtctaaccccaaaaactgaagcgtacgtatattctttatatgtatattaagatataccctctaccaaacgtctaactccaatcctgacgtagagataagtcatgcatgaaatataaataacaagagaacataggattgaaaacacctcggtggtttgacaaatatagggggcatcatacatctatgtgagcttgtaggcatgtccggccctcaaatggggtatagcctccgacaacaattgagggt

SEQ ID NO: 140639 - DNA, 467 bp, Glycine max
  unsure (1)..(467): unsure at all n locations
ttaaatactaagctgacgcacaaagacaaactgcttgaaccactttgttggtttangggtcgacgaatgttcttgtcatatgtttcatggaggtagcataatgcttggcatcaattaacatcatttcttattggtttcattgctaactaccttatgttccttgagcattaatgctaccgctttcataagttataaaagaaagtcgtctcataaaattatccatcaaacgctatattttctggtccataaagtctaatttaagatttaaagatcatactgtgttgtgggtatattgaattttaggtaggcatggcaattaacaacttcncgcgggtacccactctaccttgtccctagttaacgggaaaactcgcattgatgaattcaaaattttccactttgaaaaatcatgttcaaggtgggtcacgtttgtattctataatgaccaaatcttgagagcctaaata

SEQ ID NO: 140640 - DNA, 208 bp, Glycine max
  unsure (1)..(208): unsure at all n locations
gcggataaggggncanggagcagaaaaacatgccagaatgtggcagtaaaatggagatgccgctttattatcttgtgaatagattataacagtacgctggtcagtaaattctgtttactaatactatatctgaggactgaaactcattcatgtctgacggattactctacgtagcttaaatctccatcatccattacatcatactatt

SEQ ID NO: 140641 - DNA, 58 bp, Glycine max
ttctcccgccctgcactattggagaatggtggaagtaataagcattttccaactggac

SEQ ID NO: 140642 - DNA, 272 bp, Glycine max
gggggggaagtgaggaagagaggaattatttcgcgggacagaaaaaggggggtagaaaaagaaccccccaccgcggcgaaagagaggcaacgagagggaaaagcaagtaaaaaaagagaggaagaccagaggaagaccgcgaaagagaggggaacaacgaagaggaagaggacggggggacaggagaagggaagggaaagaggggggaaaaggggggaaaagagaggaaagaaagagcgggggaaagggagaggtacagaaggaggggggga

SEQ ID NO: 140643 - DNA, 342 bp, Glycine max
  unsure (1)..(342): unsure at all n locations
ncttagtntcagatgatgcagatggggatgaagctacctcttgctctcctctaacgactatggcatcatttctggcactaaactgctgagagtcggaagccatctcctcaataaaatatctggcttcagcaagagtcatgtctccaagggctccaccactggcagcatctatcatacttctctccatattactgagtacttcataaaagtattggagaagaagctgttctgatatctgatggagggggcaactggcacatagtttcttaattcatttccagtactcatacaggctctctccaatgagtagtctaatacccgagatattctccctgaaggctg

SEQ ID NO: 140644 - DNA, 388 bp, Glycine max
  unsure (1)..(388): unsure at all n locations
tgacatacgttcataaaaaccatttcatacactctgcaaaaccatttcatacagtatttgtagtgtactctcaatggaaatacacttatgagataacctctaatattttattatcagtgaaaaactctataaaaaaaggtaaaaccaaaagacagaaactccaaggacctttatagtccaatcagctgagcccactgagcatcaacagtactccattgatccccctcaataaccaaaaaaatatgaaatactgcttgagagaatacggtcagagaagattacattatcacagaccattatatcaaagaatgttgacagacacgaaatcttgttnnnnaacagtaaaaagatcactacataattaaaacatacttgtatattaccttaa

SEQ ID NO: 140645 - DNA, 216 bp, Glycine max
gcaaaagtctgtgtggcggtcagcatacgagcacaaaccacatacccttgtgacaggtacagattgctgatacaaggccagttgagtcaccaagtcaaaccacgcatccaagttgcctgcaagcatcatagtatccgatgacgcagatgggatcggatctaccaacagcactcctataatgactatggcatcatatctggcgctaaactgctggga

SEQ ID NO: 140646 - DNA, 385 bp, Glycine max
ttgtcctaggttgatattttttattgtggcctaacttttaactcgacataatccgcttcttccactattcttgtcggtgtgttttcaacaataatctcgattcttctgacttatgtctggattattaaccagcatgttattactcttcaacgatggatccatgataccaaagtattacattaatcttctttatctatacaaccttcattctataattggttggataccctttcttgcttgcatgagtgggaatctaatatctcgggtgtgtcaatagtaactaagagactatttgttagaatgcattatttatatatatgatgtcatttacattatcatagattgaccacaatgctctttttaatttcaatattacccatggttg

SEQ ID NO: 140647 - DNA, 395 bp, Glycine max
gatcctctgagtcacctgcggcatcaagctccttatccaggcacatcttgttggttaatctccttcttccatggcttattccctagtggatggcgcctcctctcacctcttctcctttgtcttccgctgcatctccatggtggaaaatcaccattaaaggacctcattgaagctcaaagatccagcctccatagaagccccacaagcaagcttccatcatatgggatggtcgtaggcctattgtgaattctgagatgaatgagcatgtcacattgcccctattcctttttcttcatgtctaaacatgtgcccaccgagtgtgcgggcaaatgcctcaatggcattttcgtgtgatttgtgaaattatacttgaggaacaaattgatgcatgtatg

SEQ ID NO: 140648 - DNA, 472 bp, Glycine max
acacatagaaactcaagcttgttcttttataaatgggaaattctgaactcatcatgttatctaaaaaaccttggggtggatccaagtgctctgatcattcatttgcatgttcatgttttggtggcatactcaccattgtttatctctttaggaatttcatcataactaagaaaacaccaaggcaccctgtcataccctaatttcgtccggggacctttgcttgatgacatgcgacctttctttggtccttgtgaggtgcttggcacccatcattaggctatttgtgaaattccaggacatgccggaaaaccaaaaaatattgatgcacaatccgtaagtttccgtgacacaccggaaatcaaatggaagcatcgttgcataattaagtgagattccgtaacattccgtaagtcaaaaaggggatgattatgtaatccgcagggtccataacattacggaaagaaaacaagta

SEQ ID NO: 140649 - DNA, 383 bp, Glycine max
  unsure (1)..(383): unsure at all n locations
agcnttttcttagtgtataaaaatatttaattcttttttacantttgaataatcataaaataacataataattaaaaacgctcccactaactagtgctaataaggtattagttaaaggattaaaaaaatattttaaaagaaattacataaaagaacataaaagattatacttacaaatctgaataaaaagatcttttttcccgtattcgatgaaagttggatgtcaatttgcagggaaatctttcaatactttgaaatcacctacaatatggacaaaagtcaaataatgatttaacttataaaggataaaaatgatattttttaacttatgtggacaaaatacttaaatccaaccattttggatcaataataccttgttttat

SEQ ID NO: 140650 - DNA, 396 bp, Glycine max
  unsure (1)..(396): unsure at all n locations
ggttagtgagaattggtagacttaatacaccctatatctaattgttttgaggtcacttgtccaacattaactatgaaaaataattcctacttacttttaaccaattccaaattaataaagtatacataagtctcaataaaatatagtaatatagaccatcagtataaaccaaagtgggttataacttataagtctcttgtaaaccaaattgacacaacaataaaataaaataaaagcattttcttctaaccagatttcttaccatantacttctaaaaactcatcatagttcttctaccgggtttgatctgaagagatctttagtggatcgagtggccctagaataattaaaagggtgggtgaataattattcctaacctttacctattaaatttc

SEQ ID NO: 140651 - DNA, 397 bp, Glycine max
agcttcccatatagagttgcatgagacatgtttttgagatctcttgattctgcaattacagttacctttggttgtcattccctgcttaaacatcttaggactttgttaatgagatcctcgttaggaaatatctttcctaatgatgcaggacgattaactatatgtgttaatctcttttgcatatcttgtatgttctcattttgattcatgctaaaaagttcatattcatgagttagggtgcttattctagatctctttacatcagttgttcctatatgggttacttgtaatgtatcccacatatgtgttgcattcttacaatttgatgctctaacgtgcgattcgtgcttaatggtgagggtattattattttggcctttaaggtatattgaccctt

SEQ ID NO: 140652 - DNA, 371 bp, Glycine max
  unsure (1)..(371): unsure at all n locations
ngaaggcgtgtaacccaccatctgctatagtatatttcttgttacgtgtccactatcattgtgtacatctccttctccgtcattgagggtgctacttgagctaccagatccctccacttttgggcatattctttgaacaactcatgctctatattacacatgttctgtagatgcatcctatccggagccatatcagaattgtattgatactgcctaatgaaggtgaccattatgttcttctcaaaatggactcgacaagggtccagattattgtaccaagtgacagttgccccagtaagacttttctaaaagaaatgcatcatatattntcatctttcgcatatgcccccatcttctgatagtacatcttt

SEQ ID NO: 140653 - DNA, 459 bp, Glycine max
  unsure (1)..(459): unsure at all n locations
agcttctatagaaggtttgttcctaatttctctactattgcctcacctctcaatgagttggtaaagaagcatgtggcatttacctcagggtgaaaacaagagcaagcctttgctttgttcaaaggaaagcttactaaggcacctgttctagctcttcctgactanttctaaaactttgagctagaatgtgatgcctccggagtgggagttggagctgttttgttacaaggtgggcaccctattgcttattttagtgaaaaacttcatggtggcacccttaactaccccacctatgataaagagctttatgccttaataagaccacttcgaactggggaacattaccttgtttccaaggaatttgtcattcatagtgatcatcaatcacttaagttcattagagggcaaagcaagttaaataaaaggcatgcaaaatgggtagagtacctagagcaattt

SEQ ID NO: 140654 - DNA, 170 bp, Glycine max
tctctaacagggggtgagtgggagaacacatcaacgacttgtgtctttgccaacatgtattgctgagtttgcgattttagatctggactcatctttgtgtgtttttttcttcgaatctgaaaatcgccgcgaggacatccacgttgcggaggccgacgtgaacatggatt

SEQ ID NO: 140655 - DNA, 398 bp, Glycine max
aactttagcattgacaaatgtactgtttccttggaacctgatagaacagggctagataactatagtgctaaacatagtgtgcagggttctagtttttattatgatgttcttataatgttgtttaaattaggctaagttcaacaagagacatctgcgaacgaagcttagtttaaattagtccaaactcacgagacatcggtgttggtattttttgtcctcagcatagaacacatgaataatttcaaatagagaaaaaccctaattgcatcaagtatctcggtgggaggacccaacgcttttccttatttgttttcacattcaattgttcatgtttactgtttctttgatacaatagaatatacctttgttttcaattcatgatacttaattctttttac

SEQ ID NO: 140656 - DNA, 354 bp, Glycine max
  unsure (1)..(354): unsure at all n locations
cattgatgcaatcctacctccaagggcattggatagaagacttcaaaaagattgggccataagatgcaagaaaagaccctagggttctcatgagccttatggtagatttcaaacccatgggctaaatatgagcccacttatctttgtacatattagattaagggtttattatttttgggccttgtatttagggcttcatagtgtagggagggtaccctattaatgtaggattttctaacccttgtattttagttcacttagactacgttttgtataaggtagatttataatttcacatacatcaaataatattatatctgcatatttataantaagaatatgagtggtaacgtg

SEQ ID NO: 140657 - DNA, 433 bp, Glycine max
  unsure (1)..(433): unsure at all n locations
agctntgactngagtcgtcaagagattataaatatgtgaccatgacatgagtttcaatcaataattatcaatcatccatcatctttgaatcatctatttttcaatcttttttcacatcatctctcaatcatctttcaatcaatctttcaatatctgtctacaagaatttctgattcatttctcttcacctttcaaaaattttttgatcagcactttctcttccaagaaaagttctttgttcaaaaacttgtgctattcatatttttcattctcttctcccattgccaaaagaacgaaggactaaccgcctgaattcttttgtgtctctcttctcccttacaaaagagtcaaaggattaaccgcctgagaattattttcattcttcccttcccgttaagcaaaagatttcaaaggactaactggttgagatatc

SEQ ID NO: 140658 - DNA, 450 bp, Glycine max
acctgcggcatgcagctttatattatggccacttttatctgtatctattggctctaaatgaacatatttcctctcttaaggttacgtctgaagaatatggccattgagggattaaatgtgtgtattaaatgaatgtacttcttcatgtcgagaaaccgctttgtcgctggagtggtgaacactacagcaggaaaccacttccttttgcatcaaagcaggtctatgcagcagagcgctccttttaatggcgattgaggaatttcagagcttggattcatctattcttcataggatttgatagatcctaagataatgtctctggaaaatagattgtagacatagagtattagactaagtcttaaatgccatctttaatgtcttattatatcatgattctatcttgctatcatcttacacatcagacacagacttcgcgaaacatgttctgat

SEQ ID NO: 140659 - DNA, 449 bp, Glycine max
  unsure (1)..(449): unsure at all n locations
agcttctgtccctgagagactggttcctagattacaacagggagtgaagattgctgaaaaccctagccttgcaacaagttctagggaagtagacacggagatggacaagacaatccgcagtattgtgagtagcattctgaaagatgcttctgtgcctgatgctgagaaagatgttccaacatcgtccaccccaagtgtttctgtgcctgatgctgagaaagatgttccaacatcctccgctccaaatgctgaagccttcccttcacccagtgaagaggaatcaacagaagaagaggatcaagccgcagaggagacccctgcaccacgggcaccagaatctggtccaggtgacctcatcgacctggaagaagtcgaatctgatgaagaacccattgccaacaggttggcacctggcattgcgganagacttcanaacagaaagggaaaaa

SEQ ID NO: 140660 - DNA, 424 bp, Glycine max
  unsure (1)..(424): unsure at all n locations
ttaagtcacctgcngcatgcagctaaccaaaataaagacaatgtttgtattattcacgaatcaataactaaaactcataatgtattcaacaaatagaacgtcggatcttcatttgggggtgcgcacaagtagtcattttactccttttttttgctcccgaactcaaattctacaaatctccttgatttgataaatggggtctgaatgtttgttaaatgatttttaaaaccatataatctctcttggaaaaaaataaaacaaatgctatttggtaattataagttcttacaggcatgtatgttccttttgaaatctaccttcactctactcctcttcaaacacctaatcttctttgtttcccgctcacactttgccagaggtgcgaaatcaggtaaagtctctttcaaacctgattggtgaaata

SEQ ID NO: 140661 - DNA, 431 bp, Glycine max
gcaagctttatgttccctctgcctttgcctccttttcttccatcctttctttgctttgaattggtattgatctattggtcttaatcttctggcttcatccttatctctcttcagatgattctgttctttgtcagcacacctccttatctatttggatcagtttttaagctcatttttatatgaaaactctatggtgctgttactcatcttcctattgtagttatatcatggttgtctccaataatagttacaaaacttattgctaatgtcgcaacgtgcccttcacgggcgagcgaagacaaggctcacgggtgcgctttccaaaggaggaaagatgcgcggagtcgccaccaacgtttatttgtggaaaacgtcggaaaaaccgaagaataccggtcaaaatgataactctaagctcgggagttgtatta

SEQ ID NO: 140662 - DNA, 482 bp, Glycine max
  unsure (1)..(482): unsure at all n locations
cgatccttaagtcacctgcggcatgcaagcttcctcgggccattatctgcgaatgcttatatttggaaagttagttntaccagtgggacactactcttaaaacaaaaatggcatacaacctcctcccataaatacaaacatcaatgtaaatttagagcaagcttatgcgcatatttccttacgaacgttcacttgcacaagacattctattaactaagaaaaatgcacccatatacaatcaaggcagcttcgttacctagattatttacatgtacttccaaggtgtatttgttacttacatcacacacatctccttggctaaatttacatacatgcatactcaaagcattttggggtaccaaaaattgcacatgtgcacatcttggtatttctaatacctatacatacacaaacttcatgatgaatcttgactatctacacaataaggtgctacatttcatgttcttttcaagtttttgcta

SEQ ID NO: 140663 - DNA, 455 bp, Glycine max
  unsure (1)..(455): unsure at all n locations
caagcttgatgaggagaatccacactntttttatcaacatattagttcttttttatcgacaaatgttagttgtttaatttttgatagcgggggattcgaactcacaacatatctctccctcccttcactccatccggttaatcttatatctccaacaaatattagttgttagtttgtagttnttgttagtgggagatttgaacttatgacctgtcccctcatccttcttctttcactaccaaatcaaccctataatccttggagaatccacacttaaaccatgaagcaacaaatataaaagttacacacacaattttaaaggttagtttcgtatgatttgttcctccattcataacctagcatgcctttgcaacaagtagcaaatacagtagcataaaggcaatgaagtagataacttgtntactcanaatggagagaggacaacttataatatc

SEQ ID NO: 140664 - DNA, 396 bp, Glycine max
atccttagagtcacctgctggctgcaagcttgaactcggacgtatgggggcatatcttttatttgcactcaaagctaagtgaagctggcccacttgaccgagaagatcgatcaaacaggtacaatgttctactgtaggagctatttcaaaatccttttgcatacatttgaagtactttagttggtcttctaccaatccagaaaggctacatgccatctaaacactatgagaaacaatggtatctggcaatggcattaacccttctgacatatcattatgagaaagaggctgatctccttattcccactccatggattgataactatttatcatggaagtgcaaacagtttaatcttatttgcaacctttacacactgttctactctcatgatgctc

SEQ ID NO: 140665 - DNA, 468 bp, Glycine max
  unsure (1)..(468): unsure at all n locations
ataagtcacctgccgctgcagctagccgattagatcgaatgagtttcttttcttaccttggccagcttagcggaccaaatcagcctcagatgcagggttgggcgcttagcacttgagactcacggcttatcgcatgaacagagatgcgcttagcgtgaggcttgcgcttagcgaaaggaatgttttttcagaaaaaatgttttcttagttattttcagtcctttttccaagaaattgaaacccttatgttaaacattcaaagatatggtgatatactcctatgtacagattatacaacaagttccaaatgattaaatgcatgaaaaaaagataacaaaaattaaaactgggttgcctcccaggaaacgcttctttaatgtcattagcttgacgcttttacctcacttggtgatcttatgttgtggttcttactntcagaacctcttgacctccttcgattatatgtaa

SEQ ID NO: 140666 - DNA, 427 bp, Glycine max
  unsure (1)..(427): unsure at all n locations
tgagctgcagctttctggctttgtctgaagatttttttctatcttgncnnaacngactacatgacgtggctatatgactctcttttggctttcgcgttcctcgcttaatcagattacaaaggcccttatgggatagtttttccttgcttatttaaatacatacacctgcgtttaatcgattacttatatcaacttctggttttgagtgataacatgggccaatttaatatattaccaccgcgtctgatgtgtgtaatccattacatctcgttgtcttcaccttatcaaccatcttttaacttatatgaggatgaagcttagtggtgttttaagtgcttacttcatctgcttggttgtcctttctaattatgctcaattctatctctatgtctctgcttgattaagaagatatggtttcttatcatgg

SEQ ID NO: 140667 - DNA, 391 bp, Glycine max
  unsure (1)..(391): unsure at all n locations
tgaaaaatctaaagatgttactcttcaaaaaggttctgactttatcaaatgggttctaaagttatctaaaaagttataactcctttaaatggcctttttgaccacacatgaagagtctttaaagcaagctttgttcttcattttcaatcaatctttctaacaacaatcttgaatacttttccaatcatttcattacaatcctttacaagccttgaatctctttgaacttcttcttcttctttgtaccaaaagttttctaaagttttctggtttttcaaaccttgaanacttgtgctattcatccttttcattctcttctccctttgccaaaaagaattcgccaaggactaaccgcctgaattctttttgggtctctcttctccttttccaa

SEQ ID NO: 140668 - DNA, 464 bp, Glycine max
  unsure (1)..(464): unsure at all n locations
agctttgacttgagtcatcaagagatgataaatatgtgattcttgttctngagttcaacaattatcaatcatctttgaatcatctatctttcaatctatctttcatatcttctttcatctctttaaactctctctataaaattttctgattcatttctcctcatcttgtctataaggttttttgtggtcaaaatactnttctctttcgacagaaaagtgctttgatcaaaaacttgtgctattcatctttttcattctcttttctctttgccaaaagaatgaaggactaaccgcctgaattcttttctatctcccttctccctttccaagagaattcaaaggactccgtctgagaattcttttgattcttccctttccctcatacaaaatatttcacaggactaaccgcctcagatatcttttgttcccctttacagagattcaaggactaaccgcctgagaat

SEQ ID NO: 140669 - DNA, 408 bp, Glycine max
  unsure (1)..(408): unsure at all n locations
agcttgtngatgatgcaggtattatagtgttttcttggctctcaaatatggataagggatttaagctcccttntaatctttggtcatctcacattagagaaggttttttgggctaggcctcagtggctcccagtaggagttgcagcagatcttttagtttaatttttggagccattctgtggttccttttcaaactggtgtagtttttattggaaccatgagcatggaactctatctgtattttttcagtacctctggtacttatataaatatattatttttgctgatcaaaaaaaaaaaataaactaaactccaaacatggaaggattaacggcactcatatgaaccattactcaaagcgaaatcacatcagacgcctgaacgcccaaatgcaagtccatgctgggc

SEQ ID NO: 140670 - DNA, 462 bp, Glycine max
  unsure (1)..(462): unsure at all n locations
gcttgaggacactctaactcagttcatgcaattctatatttccaatcataagagcactgagtcaaccattaagaatctggaggtgcaggtgggccaacttgctaagcagttagctgagaaatcaaatgggaaatttgtggctaacacaaagaaaaacccaaaggataagtgcaaggcagtcctcactagaagtatgaggaaaaaaaagggtctagaaaaggaagatagagttgaggaagtaggaaaaaatgtgagaaaagagaaagtagaggatgagagaaaaaagaaagaggttgagaataacgagagagctttagaagaagagaaaaataaagaagtagaanaagaaaaaaaattctaaggagattgatggtgaggtcttaatctctaagaccaagagccagatggctagagaggcgaggaaggaagcaccatctgtgcctgtgaaggatatcccatact

SEQ ID NO: 140671 - DNA, 403 bp, Glycine max
atactctaactggtttcaaatataagcaacaaaagcccttttatttttggtctaaaatataaacaaatctctattaattttgccttatttaatactatcttcaaaatatccttcatttagtaaggtcaaagacttttatatacttgatatcaagttccaataaaagataatttagaagaaaaaactcattttttaattgaaactcgcatactttaatgagataattatttttcttaataaatgtgaagtatgttttttttgcttataatcaaaactagatgagtattaaagattgataagtctttaacaaattacaatatatttgtaatttgaattattaaacttatgtaggaattgttttgttaatgctataatcaattatgagttaataattgttttctta

SEQ ID NO: 140672 - DNA, 383 bp, Glycine max
  unsure (1)..(383): unsure at all n locations
atcaggggggctccttaggatttaagaaacgtctagatgaatactctattctactgtggcccaaatggagtntcgtgtctcccatattttctgagatagtaatgtatgcgctgatcatttggctaactatggtgtagaattactctattatgtgggaagataaactctgaatttggatgaggtgtacaaggggagatacttggtgttgcaaggacagaaaaataaaggtaaccttctctatttggatggacaagccttgaagagaaaccatgatagcaaagcgaagaagaaaatgaagttctctaatagtgtagatatgttgcgagatactttcgttggaggagaagttctgtcactctcaaattgatcgaatgatatttatc

SEQ ID NO: 140673 - DNA, 382 bp, Glycine max
acactctgcactaaaatataagtaaaaaccaaaatatttacagttattaagaaaaagagataacatcatttaattgtgataagttcaataacaaaaataatttattttctaaagtactctatatatttaattgcatacgaaaaaaatgagagaaaattgttggagataaatctttagttaaataaaaatattctggatatagtatcaggaaaaatttagttaaaatttgcttatttagttcatcacgcatatcttgtttatctaattatttcactgggcaatttttatcttagaattagcatagatgattttaaattataattgaagattatatgtctatacgagtcattatatttatatatttaactacaacagtacaaat

SEQ ID NO: 140674 - DNA, 437 bp, Glycine max
  unsure (1)..(437): unsure at all n locations
agcttgtacttggtttagacatgtttgttctttgatttgngacttgtangattcaatttgggcaaaattggatgagggagagtgtgatttcgaaaatctgcacttatgcagaattttgctgtcaactaggtgcagcagaatttgactttgtgcagaaaatgtaatgaaattactggttgtggaaagagtagcaccgattgggttctggacgttttctagcagatcccaacggtcaaaatgtatacttatgtactagagacttccagtaaaattttcgagtcgatccaacggttaacgaattggaacgaagagaatgttactagggtatttgtatgtgaaaagctgtgatattggtttgtgttgtgggcagagttntctgcctttgcctattttgcttggtttcgtagtcatgatgattggatgtggaatacttgatg

SEQ ID NO: 140675 - DNA, 455 bp, Glycine max
  unsure (1)..(455): unsure at all n locations
agcttgtccaagcagttaagcaagaccgaatattttatgttggccatcatcgaccagnacaaggaatagctaagcctatcagcgactcatgagcaaaggctagaggacgagtatgctaaggtatcagtcctgcaagcggaaagggaagcaagggaaagggtgatctattctttgcacagagaagcaatgatgtggatggacaggtttgcctttaatttgaatgggagtcaagagctttcccgactgttagccaaggccaaggcaatggcgaatgtgtactcgactcccgaggaggttcacgggctcctcaattattgctaacacatgattgatctaatggcccacataattaggagccgctaatgcaatagaattgacgctatgattctgaatatataaaacctcttcgttccctaataaaatgacgttatttaatcctgtgtgttaaaacttgt

SEQ ID NO: 140676 - DNA, 383 bp, Glycine max
ataagcaccattcataaggatggaatattccagtagtacaagtaaataacaggatcaacggtcatccataacaattgtattaatggtgctaatagttacacacactatgattagaggaagctaataaatagcagcactatgattctagctaataaagttgagttgccagtacttttggttagattctccattgaacaaaataaagatgaaacataaatagcaggtttaccacaggaatgcaatcaatctcaacaaacactcttagactgagcttctgaaagaaatgcatcctttaacataattgattcaaaagaattgctggctaatgatgggcatcatcctataccaatgagatatagaagcatcatgtcaatgtgataaat

SEQ ID NO: 140677 - DNA, 458 bp, Glycine max
  unsure (1)..(458): unsure at all n locations
agcttgtgttnttctcacagataggacatgcttgtatgccctttcacactgtatccacttaaatttccatatgctggaaaatcattaatagtacaaaacaccattgtgcgtaacctgaacgtctgctgcacatttgcatcccacacatctaccccttcttcccacaattgtttcaagtcttcgattaatggcgtaagatacacatcaatatcattccctgacccacaatcatcatacacaggataatgtatttacgcaaaatgcacaaccatgggggaaggttgtaaatcatctgtaaaacaggccacgaactgtggttgctgcttaagctaccataaggattcattccatcagaagcaagagcaagccttaggttccttggctcatccccaaactctggatacaaacaatcaatngtcttccactgcggcgaatcggcaggatgtcacagtaatcca

SEQ ID NO: 140678 - DNA, 351 bp, Glycine max
cgagttactatggctatctacacccatatgacaagcgtgttggagaattgctacagccccgctcaaggggcaaagttgccgatctaaataggtaaaaatatacaggttctctggccatcacattagactgtagattatgaacggtccccaagcacgctataactctaccggctctgtgtatcatctttgactttctcagataatcttgttctttccaaatgacgtttactctcacgataaagtttcgattacttacattcaaacactgcactttaatgaaaaagacttatctatcataaaattcaattacaccatatggatatatatacgcggtgctattactcacactta

SEQ ID NO: 140679 - DNA, 469 bp, Glycine max
  unsure (1)..(469): unsure at all n locations
accttaagtcacctgcggcatgcaagctnctccgaagggcatggttatttccagtttcttgaaaatatctaagaatctcgccaaatggcggttcttcttcttcttggaaggcaccatacgatatggtacttccgcaccttcattcacaactttatctcttttcttctctctagcctgtacacttctactccttccttcattcttatttttttcatcatttctcaattttttcatatactttttctttatctccttctttttctttgtcttgagcattaaattattttttcttgaccattatgtgtttttctttttcctgattactttcacctatcatatcatctttcttatctcaatacctatcttttcagtcgctttcttcttggacactacactatcctcatcctccgacttcaaaaacctttacatcttgacatcacacttatgcattcctacttatgattgtttt

SEQ ID NO: 140680 - DNA, 463 bp, Glycine max
  unsure (1)..(463): unsure at all n locations
atcttaagtcacctgcngcatgcaagcttcttcggagccatctctagntgttattattcacaatgcaaatcgggcttggaaacgcacaagaatggtgacctatgagtgaaggatggccaatcccgtgggtgatggcattcttgagtgaaagggaggaattttgggtgaagaaactcaccccctctcctctttttaactaattcgtgcaaggggtgctcgcccaggcgagctaaccctgtgctcctcccttttttttaagaagaaattacgtgttctctacgggtcagttcgcctttgctcggaatccataggataagttaggcatattcgatcatcactttagagaaataaaagatagaagctttaaaggatactatgttgtctcccagtagggcctccttaatgtgtggagccggttgcgggatgatgatcagttgatcactagcctagtgcctgctcgtac

SEQ ID NO: 140681 - DNA, 455 bp, Glycine max
  unsure (1)..(455): unsure at all n locations
acgcttngagctagagagagatgtctctggtgtatgaggggagctgtgttgttgcaaggtggacacctattgtctactatagcgagaaacttcatggtgccactctcaactaccccaaatatgataacggagctcttatgccttatttagagccctccaaacttggaaacattaccttgctttcaaggagtttgttattcatagtgatcatgaatcacttaagtacattaaaaggcaatgcacgttaaacaagaggcatgcaaaatggatagagtttctagagcaatttccatatgttatcaaatacaaaaagggaaataccaatgtggttgcagatgctctttctaggacacacacattactttcttctcttggagcacatattctacgattcgacaacataagggaattgtatggttctgatgagtacttctctctcatctattctagctatc

SEQ ID NO: 140682 - DNA, 448 bp, Glycine max
  unsure (1)..(448): unsure at all n locations
agcttgaacgaatataagaaagatcttctttttccttggtgattcttgactccatctcattgaagcgcatgtccacttgtaactccaaagtatcaaacctttcaccaaaaaagggttgaagaccatcgaacctttccaaaatcttttgaagaagagatgaatcttctccaccatgtccttcttcatcaacatgtcgagcaccctttttcgcccaagagccatcatgctctttntgataaccaaaggatgcaatgactgaagcgcctattagaaaggatctcttgattggaacataaggttcagaatcaagagggatgttaaagtgttgaaggaagagggtgactaggtgtggatatggcaataaagcatttaatcgcaatgccttatgcatgcgatatctaacaagatgtgcccaatcaatttgtagacctttatgaaaagcccacat

SEQ ID NO: 140683 - DNA, 371 bp, Glycine max
gattttggattggactgaattctgtttttggtcattgttgggttactcctgttacctgccacggttgctagtgctgctttaaaggaagcaaatacaatagaaactcatcccatttagtgaataaaatggctcccacggtttcgtttttgtcggatgaaaaatttgcgagtcctattattgatcttgtcttccgatattttcaatgagaaacgctacagatgctgaaggtgagtgttgcacaaaaaaaaagtgtggccaactatggtattctgatattctgacaaggaaataggggttgatataatttggttccccaacctttcctctcaaacgactcaaattctaaaggaaaaataaagtgtaatgtgatt

SEQ ID NO: 140684 - DNA, 379 bp, Glycine max
aggaaactttcttgggagatctatgagaatcagggcaattatagatgttactaaactgttacgaatgagcacggtgatttagaatgggaataaggatcccattatggttgctttcaaatattaaagactatgtaacttatgttatgattgtgggagccttaaccaccaactaaagcctgcaactttagagatgaaatgagatctgaactttgaagtataattctcaaatgatcaaagttgaaaaaatgcatacacttggcctctatttatagcctacgtgtcacacgaaactggagggaaatttgaatttctattcaaatttcacttgaatttgaaattaaatttcgggagccaatatttggatccaaaattcactaat

SEQ ID NO: 140685 - DNA, 406 bp, Glycine max
  unsure (1)..(406): unsure at all n locations
atactcctaactttttcacataaactataaaaaatcttattaatcagtgtcttgagaggttatttaaagaattaataataaataaagattattaggtaagtttgaaatttattaaaaatcataataaaatatattaatatacgggaaattccacttttaatcaattagaaatggaatttaagaaaataaaaaaagtgggatgttaaaacttgtaagtgtcatctagtggttaggatcatgaaattatgaataagaataacttaatttacgaaaaaaaatatttatttaccatagatacttacttagagttgtgttttttacttaattgctcatccaaattacagaatttgaactctntcatttgttcttttaattgtgattgattatcattgggtaggtctcctaa

SEQ ID NO: 140686 - DNA, 435 bp, Glycine max
  unsure (1)..(435): unsure at all n locations
gcttctntgagaaaacttgcttgagaagcttcttatttgattctacttgagaagctagagcttagctactcatcccctataatagctaagctcacctccttgagaatattccgtaagaagattcctaatgggctagagcttacctacacatacctttctgatagctaagctcacctccttaagatgagaagctagagcttagctacacaccccctataataactaagctcacccccatggcaaaatacaaaaaaaatgcctactacaaagactactcataatacctcgaaatacaaggctaaaaccctatactactagaatgaccaaattacaaggtccaaaggaaggataaacctattctaatatttacaaagataagcgggctcatacttagcccatgggctcaaaatctaccctaaagctcatgagaaccct

SEQ ID NO: 140687 - DNA, 449 bp, Glycine max
  unsure (1)..(449): unsure at all n locations
agcttntgacacgtgtatgtagaattttctttttctactatctacctatnttatttaaacttaaatagaaggagacattatccataaaacaatattaggtgatattagactattaattatctatgtataatcttgaccaatatcaatatattaattcatatttaaaattttaatttataaaaaataataacatgtaattacatattatataaaaattgattgaaattatatacccagtgatgatctaataccacttaataattttcattattcatatggcaggtggtcaggagtggattattcgctgtataagttagttaaatatatagcagattgcgctttggtaattggtgatgtgaggagttaaagttcaaacaccacatacagcaacagcatgatgccattatttgttagaagagtccttacagataagttaattaattattttt

SEQ ID NO: 140688 - DNA, 455 bp, Glycine max
  unsure (1)..(455): unsure at all n locations
agcttaatanaacatgagcagatctcttctcttatcctactctttatagaccagnagttagagctcttcaatactccactataaccagacctgaactatagtttgttgtaaacaaagtctgtcagttcatggccaaccctcttgaatctcactggacaaaagggaaaagaattcttaagtatctcaaaggatctttacaccacgacctacttctcaaagctgctactccaagaattcacgttcccattaaggccttttgtaatgcagaatgggcttctaaccctgacgattgcagatctacttcaagagatgctatttattttggccttaatcttatatcttgatggactaagaaacaacaatattttgtgagatcaagtattgaggctaagtatcgaagcctagcacaagccacaactgaagtagtgtggattcaaactctgctgactgaacta

SEQ ID NO: 140689 - DNA, 471 bp, Glycine max
  unsure (1)..(471): unsure at all n locations
gatccttgagtcacctgcggcatgcaagcttctggcgtgttgaattgagagttctaatanatttctggtctagccttggaaaaactggaatcagcaataggctttgcattgttaggctgagttaatccagccactgccttcattcatgtgattatgaatgtttactcctgctgcactcacttcctgaccttctggtttgtgattcttgacatcaagaaaaattaaatgcttgactttaatcagcatccctatcttccatttatttccataaattatcaagaaattcatctctctctattccttttaatacatgttaaaatcaaaagataaagactaaactagcccataagatttaaaagctaaattcactagaaattacccttacctttcgataagttatcatgtattagtcatgagagtgaacactatagaataacgatggcaatataaatctatacatgaagagctggg

SEQ ID NO: 140690 - DNA, 420 bp, Glycine max
  unsure (1)..(420): unsure at all n locations
agcttgtatagtagactggtaaaatacctttttatttggacctctcttcttccccttttgattcctctgataaactgtaagtatgagttttactatgtctggctaatcttttcaaatgaaccctcaaggggccttagttatctntatttaaaaaatgcgaatatgatttataatccaattgttttattataaacaattttttttctcttactttctgctcgtttctcaaaaacctgagattggtaagcctgcaaagatgtgcccttgatagttgtttttgaaaaacgatgaaagtcctctttggttatgctgatgctggaaggaaaataagatcaacgtaagacccaaagaagtgtaggctgataacgatctttagtactcgacttaatatccataaaatccataaggatcttgtatatt

SEQ ID NO: 140691 - DNA, 272 bp, Glycine max
gacgcatagatggcaatcgccaaagcaggctaccgtgctctagactagacatcaatgtatagtcaggggagagaacgatgatcatgggcgcccttgttaatatggaagccgcgggtatacgaaacaatggtataatgggcgagttgccttcttctttgaagaattgcagcagtttatttatgctggacctgagtgaaaatatgtaagccggtccaataccatcatggatgggaaacaggctgcatcaattgattatctagaacatgagaaga

SEQ ID NO: 140692 - DNA, 451 bp, Glycine max
  unsure (1)..(451): unsure at all n locations
agcttctgcctcccttgagtctggacattcttgagaaagntgtgttcgtgctttaacaaatgctcccttgtcatctcatacaaattcctactcaaatattctatttaaaattctcctcaaatttatttgttgtcattttttttaatgagttgtgcttattttgccccaacctttttggttatttatggctatgcgtgacatatatttattctttgaattgagttattcatatgcgagaagcaaagacatgtaaagttacaattgtgtccccgttgtacgtacttaagcattggtcattgtgcctatgctataacttataacaaaaaaaaaaaaaaaaaagaatgatagattgatgattagtatctctcatcttacatggtcatgtgtataacattgctatagagaaaanaaagctagttgtgggatccatactttntaaacttattcacac

SEQ ID NO: 140693 - DNA, 54 bp, Glycine max
agcttgtagactcaattatgatcgtttatgatttattacccgatcaatcgaacg

SEQ ID NO: 140694 - DNA, 458 bp, Glycine max
  unsure (1)..(458): unsure at all n locations
agcttctatataagctgaaccattntatcaattatcacaagttgagttttattcagaaaattagagtttatctcttttatcttagtgagagtgattctcctaaattcttgagtgattcaagaacacccttgctgtatcaaaggactttcacaacctttatgtgttgccctcgctggaaagagtgattctttccttcctatcatctccacccttgttctttcaaaccacaattccagaaaatccacctctgcccaaaattatctcgtgaccataactcccattttacacactcaaattaagtgattcttaagcctaaattgaatttcaaaacgagacctttcacctcgttttggaatcacctcatttggagccctgtagcttccgttattgccatttctatatttctgtccagccaccacttaacctacgtgttaccatcccattcatccattttatgc

SEQ ID NO: 140695 - DNA, 216 bp, Glycine max
gggaaatcataaactaatgactgttgatgcgaaaggattgggaattttgttggacatgcatgatccatggatgtgtgttttgcaagttgctttggctttgttaattctatatagaagtgtaggggttgtttcaatagctgctcttgctgccactgcaattgcgatcgtgctaaactctccccgtcccatcatttctactaaaaccttcatagcaac

SEQ ID NO: 140696 - DNA, 441 bp, Glycine max
atacacttctttaagatagcttttcttgttcgcgcgtagttggtacactaatttggaagcttctcgtatccgtacttggaaggatctgattactgccttcctaaggcaatatcagtacaattccgatatggctcccgatcgcactcagctgcagaatattgtcaagaaagagggcgaaacctttaaagaatactcacagtggtggagggacctggcggcacaagtggctcctcccatggttaagagagagatgatcaccatgatggtagacactctgccagtgttctactatgagaagctagtagtgtacatgtcgtccagctttgcggacctagtattcaccggggaaagaatcgaggtacgattgaacagaggaaagtttgattacgattcctccacgagtgcgaatgccaaaagaatcggcgcatcaggggctaaaag

SEQ ID NO: 140697 - DNA, 451 bp, Glycine max
  unsure (1)..(451): unsure at all n locations
agcnttgcgaaaggcttgtcgctggagctgatccatctactatcctaactctttcagagtggcgattcttatgctcttgatcttgacttgatagaacctctttttaagccaaggcgtctgactcgatcccatgttttactaaagtgaaataaaacccagtgcgaatcaagactccgacatctatcacaggtgaaatggatgaatgcatgaagaaatgtgtatggtacagatgcattntacggatatgagagcccgagagattatctccttcttacctacaacattcgggcagcccgatgcatgctttaagaaggtgatatggacctccagtcttctcgtgacaaagtgaggggatcaagacgcaacccgtgcatgatgacatgatgcagatgcgaaaaaagaaaggggaacaaggagatgtacacaacatggcaatatccacaaataatca

SEQ ID NO: 140698 - DNA, 452 bp, Glycine max
  unsure (1)..(452): unsure at all n locations
gctttatctagccaagatcatacaaaagtgtttttacttaacctaacggnttctaattatatgggccatcaaatctatcatgtgttgacagtaattgattagcccgtgaatttcctcaggggctgaacacacttcagcgatggcctttgctttggctagtagtcgcggggggtcttgacttccatttaaggtcaaggcgaacctatccatccacatggtcgcttcttgatgcagtgcatcaatcaccctccctcttgcttccttttcggcgtacgcttgtgcgaaatcctctactagcttttgttcatgggtcaaagactggtttaactcttccttgtactgccctatgatggctagcatgcttcgctccgtggcttccaagtgttgagccaaactcctcttggatcttgagcaagcagctaattcctcctttaagatcatgccatgtaccc

SEQ ID NO: 140699 - DNA, 405 bp, Glycine max
  unsure (1)..(405): unsure at all n locations
tcatgatnacctccgatgatgccattactaatgcccctaagttctttatctatccgtaacgggcttccccatgccttatggaccctgtgtataaccttgacatgttgaacgccataatctctcacaatgaaaggagacaggctttcttccgttggggctcccctcatggggtaccctaactgtcttatagcaggcgcgggattgaagttaatgcaacccctcgtacctatcaacgggatggttgggtaacttccacatgagaagagaacaccctcctgtccttcttttcataatggaaaccaatagactattccgactgttataggaggcacgtgctggtctcaatctactctgcattactacacacatgagcgatggctncagagcggacatggatgccttatg

SEQ ID NO: 140700 - DNA, 466 bp, Glycine max
  unsure (1)..(466): unsure at all n locations
gtcacctgccgcatgcaagcttccattcttctacaccactttgtagtttattaggtaatccatcaacacgtcacttattttctaattagtgaacatagtgaataattatttaaatgtcatcatgcccaaattttttacctttccttatgacataggagcaaaggaaaaatcataacagcggagatgaaaatntctgtcactctgcggaccaaatggctttgcatgaacctttttctttactttaacattttcactcatgattttctcttttgaatttaaacttgatagctgaaaattatatattccacatataaatatcctggtgggtcaatggcataaatgtctctttcttgcatatggacaaaggaggaatcaaagttgtaaagnttaagggaccagaaagctttacatgctacatcagaattcagaaaagaagagccacttgatcctaatctttggtgtatag

SEQ ID NO: 140701 - DNA, 391 bp, Glycine max
atgggtctaaaaagacgcagatctgatcatcatgctttgataaatacaaaaaaactagggcaaatgaagatggtgagaataacggagaaacccatgttgtgactgccattcctatacagccaagtttcccaccaacccaacaatgtcattactcagccaataacaaaccttctccttacccaccacccagttatccataaaggccatccctaaatcaaccacaaagcctgtctaccgcacttccaatgacgaacaccacctttagcacaaaccaaaacaccaaccaagaaatgaactttgcagcgaacaagcctgtagaattcaccgcaattccggagtcctatgctgacttgctcccatatctacttgataattcaatggtagccataac

SEQ ID NO: 140702 - DNA, 396 bp, Glycine max
gatccttaagtcacctgcggcatgcaagcttgtaggaatgagcatcgaagttgctttatggggcgacgtaattgtccatatctgcatataaagtaatgttaccctaaatctcactctcacaagttctgccatctcctgaatggccccatcgaatcttgcctctcacaagtccagcaaagacaatgggggcgacagatctatttcccacctcgaagcctactgtctcccctgtaagagcgttgttcacgcgcaacgcttctaatcctctcatggatggttcttaattcgtagcaacacgttcatgtggaggacaacaagtgtacttattctcaccatagactggtcaccgacggggggcccactgatactcctctagcaactctgttcctaattccc

SEQ ID NO: 140703 - DNA, 408 bp, Glycine max
  unsure (1)..(408): unsure at all n locations
agctttntattntcagtagatgaacatgaatctgtggccacctcatggactcctttaagaacaatagcatcatttcttgcactgaattgttgggagttggaagccatcttctcaatcaaattcctagcctcagtaggggtcatatcaccaagagctccaccactggcagcatcaatcatactcctatccatgttgctaagtccctcatagaaatattgaagaaggagttgctcaaaaatctggtggtgaggacagcttgcacacaatttcttgaatctttcccagtactcatacaagctttcttcgctaagttgcctgatgcctgaaatgtcttttctgatggcagtgatcctagatgcagggaagaatttctccaagaacaccttcttaatgtcatcccagctgaaa

SEQ ID NO: 140704 - DNA, 455 bp, Glycine max
  unsure (1)..(455): unsure at all n locations
caagctgtgcattcaatatcctgaggagtgtatgttttcatatgntctcaagactggactaatacatttgctacccaagtttcatggtcttccacgtgaagatcctcataagcatcttaaggagttcaatattgtctgttccaccatgaagccccctgatgtccaggaagatcatatccttctaaagacttttcctcattctctagagggagtggcaaaagattggttgtactaccttgctcccaggtccatttccagttgggatgaccttaagagggtgttctttgagaaattctttcctgcatctaggaccactgccattagaaaagacatttcaggcatcatgcaacttagtggagagagcttgtatgagtactgggaaagattcaagaaattgtgttgcaagctgacctcaccaccagatttctgagcaactccttctgtcatatttctat

SEQ ID NO: 140705 - DNA, 447 bp, Glycine max
  unsure (1)..(447): unsure at all n locations
gcaagcttccaggattatttgatgattctcaagtctcaagtcaagaatcaagagtcaagcaagtttcaagaatcaaaaagtcatttaatcaagaatcaagattcaagtaaagaatcaagagaagactcaagatatgcaagaaccattaagataagtataaaaagagtttttcaaaaatattgaatagcacaatttttccaatagaattttttcaaagaaaaatccttttaccagagnttttactctctggtaatcgattaccagaagcctaaacagttttataactgttttacaaaggagtaatcaattaccatgggcatgtaatcgattaccaatggtttgaacattggacttcaaatntcaagagtcacaacttgtgataaaactttttcaaacttgtgtaatcgattacacaacatttgtaatcgattaccagtgtttctaaac

SEQ ID NO: 140706 - DNA, 452 bp, Glycine max
  unsure (1)..(452): unsure at all n locations
cagcatgcaacttcanctttcagtgaggagaggatcttcttttgtgctctaacatgcgggagagcgcccaaaaatatggggcaaattgacttgtttcttgcttgattaagccgaattgagggtttgtatgagatggccctacgccaataatgcattgtgaagtaatgggacatgccacattgtccccgcatctcttgctattaatgcctaaacgcgcgcccaccaagtgttcggcgaaaagcctcaacggcattagcgcgtgattctcgtagggaaacaacccatggggcaattcggctcgacatattattgggacatgcattcattttcgaaagagctagagaaattgccccgcatatgacctaggcctaggaaccaaagtttttatgccaaagaacacaaaaggaggtgcttattgagtaatagtaccctcttatgggccagctatcagc

SEQ ID NO: 140707 - DNA, 406 bp, Glycine max
tgttcacattcttggtctttctttgtctaacatacatacttgctcaaacttatgaaaagaaacacaaactccatcacaatcatgcattcaatccaaaatcaaatcataacaccccaattttcacaaaaagataaaagtgtttcactgcaatatcatcaaagtcaagtttaattgttccatatgcttcaaaacaagcatactagctaaccacaaaaaagaacaaagtgtatataaacattaaccaaaataactgagacaatgtactgaaactataatcattataataataatctaaaaagcatcatcaagaatttaaaattcctgtgattggtcttgagtatcttgagtctgatcaccctcctcatttgtcagatgaagtactggagtagctggaggagaagtgttc

SEQ ID NO: 140708 - DNA, 411 bp, Glycine max
ttaaaacccctctatccagaggatcgtcaaggcctgagaagcgaacatgagaatagagtaaatttggagcaaactctcacctcacacaagtctataacatcaatcgaaactagctcaaactggtttcgcacctaaaattccaacgaatcaaaagtggaccccccaacacccaatcttaccctagaaagggctctggccttcactatggacatttgattttctctcttgcacaacccaggctttctcataagtcctaaatgacatttcaaactaggatgaactccctttaacctccaaataccactaaatccagatttggccctcccactctcaaagcctcacttgtttccactcgaaacaccataatctcactttctaaccctaagataactctacccttcatctctaaca

SEQ ID NO: 140709 - DNA, 381 bp, Glycine max
tggagcccaccctatccttgtgttcggactctcagccacttatgatagccgccgatgatcccattactgcttctcctaagctatctgaccattcttcacgccgcatcccttgcctagcgaactccttggaggaccctcgcgttgtggtcactgaaaccccatgcgatgaaaggcgcgatgctctcgtttgaaggcacatctctcatggggtagccaagctgtcttatggcgaggacgggattataatcaatacaactccttgttccatcaaggaacatttggaatccttcgcatgaagaagaatcagatcttgcttgctttacgaggaaccaatacagaccgcatcatgctagcaagagaggccaattacattcttttcac

SEQ ID NO: 140710 - DNA, 444 bp, Glycine max
  unsure (1)..(444): unsure at all n locations
gcatgcaagctnnngagcaaatcaaacgagaaaactttattctcggatgtccgaatgagtctcgtgagatatcgatacgctccaaactgaaaacataagcccgcagacaattcacaggacactaactgtgtactcggatgtccgatagagcctcgtaatataaagggaccctcaaaatgaataaggaagcccccaacaaattcaaacgacaataacattttgctcggaaggacgaaagagccccgtaacatatcgagacgctcgaaattgaggacacaagctcagaacaatcttgaacgacaataaattattcccggatgctctattgagcaccgcaatatatcaggaccccaaattgaaacggcagctccgatgaaatcaanccacaataaccttaacatggagtcgcaatgagcccgtaaccagcaagacacttcaacataa

SEQ ID NO: 140711 - DNA, 114 bp, Glycine max
  unsure (1)..(114): unsure at all n locations
agcttanaaggagccataccaatacttgtttgtagctattgntgtaagtaaactcaatcaatggcaaacaatccatccagctaccttgttgctctataatacacgcccgaagta

SEQ ID NO: 140712 - DNA, 391 bp, Glycine max
actcagttactctcgagagccgacgactcaagacattaacacccactctccatcatatgcatttactgaacgcttgccataacattccattgccctacacaagatatacagcggccaggctgataattcgcgactcgacatcgaaactcatgggatagcagacaccagaaaaacaaagtcaatataactacaacaatcaaatctctatagctcgtaggaacataactagtgagtaagtgctaatagcaaacaacgaacatcaaacatgagcaaacaaccgacaccaagcattcaacaaaacaaccagagaatgccaaaaaaacatagcagactcacaactcactgcccgaaaggagcgacctgctctacaaccactaaaggtaacgacccc

SEQ ID NO: 140713 - DNA, 446 bp, Glycine max
  unsure (1)..(446): unsure at all n locations
agctngtgatcataaagtggctcanattcttatgacacaagatgtatcacatatgccaaataatggaactccttagataaacagcaggagggtgtataaacaaatatccaactacttagcaacccacattgggaaagaaccatatgcagccttctaacctggaaatattttgtcttaattctattaagagacacagcccaaggttatattttcagttagactgtaactgtactgacggcagagtcagtagtctttaaatggcctctcaatagtatttctagttctaagttcatttgtaatcaataaacaagaatctatttctctctttactgctctcttcctactacatttgtaatatggcatcaagaatgtaaaatgagacaagctgagggatatttggactgaaaatcatgtgtcatagaaaccctatggagcttgtttatatt

SEQ ID NO: 140714 - DNA, 453 bp, Glycine max
agctcgacggattatagagaacgcatcacatgttgtactacgaggaggtcgagcgatagcgcacaacaagttttacacattcagaaagctcgcataaacccaccatcccctgttgcccacctacaactgagctcacgtactcccacgtagcccatattctcgtttctatcaacaccgggtccccatcaatccttccaagcttccacaacatccaagcaaaacaacattcaaacagcacaagctattacagccaagcaaaacataacaaaggcagaaaactctgtcaaaacaccaaccatatcacagcttttctcactaaaagaccccagtaacaattgcttcgatccaattagttaaccggtggatggactccaaatatttactggaagactaaagacataagcctacatggcgaccgttgggatctactagctagacatgcagaactcattc

SEQ ID NO: 140715 - DNA, 446 bp, Glycine max
  unsure (1)..(446): unsure at all n locations
gcttgaaggtgcgtaccccacgcattttcttatataacactgataatgngtctactattattgtgatcatctctttctccgtcattgaaggtgccacttgagctgccaggtctctccacctttgggcttattctttgaaagatttgtgcccctttttgcacatgttctgtagttgcatcctatccggagccatatcataattgtattgatactgcctaatgaaggcaaccattagatctttccaagaatggactcgggaaggttccaagatagtgcaccacgtaacagctaccccagtaagactttcttggaagaaatgtatcagcagattctcatcttttgtgtatgcccccatctttctacaatacatctttagatgggttttggcgcaagtagtccctttgtaatcgtcaaagttcgacacattgaacttgngaatgaccatg

SEQ ID NO: 140716 - DNA, 448 bp, Glycine max
agcttagtgaaacactaaatatacacctctcttctaatggaaattcaaacatcaatttgccacataatgtaatagggtggtaaaacaggttgaattcatcaaaccaacccacataatccaccaaaaaatggcagagcatattacatgattaaattcatcatcccaccttgtttaagttgtcaacttaaggagttggaggctaaagaactaacttgctcagtgttatcaagactataccgatcatgattcggtcagggcaccacgttgatgggtcagtggttgaactgaacgtgggtcactagccgaactggtatatattaaatatttaaattttatactaaatatatcatatataaattacttttgtcgtatctatagcataaaattttgtttgtaccaagagcggttggcacaattggtagcggcttaggtccctaaaccaagtggt

SEQ ID NO: 140717 - DNA, 429 bp, Glycine max
  unsure (1)..(429): unsure at all n locations
agcttggacagtcggatctgataatgagtttattgctgngttntattcagtaagtataaacattattaagacttgagagaaccttttatattgacatgtncaattataagttggtagctatgtttagttttgcggtggtatatctgtggtatcaatcctggactaccctgtttaacgttgggtttaatttttggtgcagtgtgattggagccactacaataggtattggattttatactatgacgtgggcacactcagaaaagaatgatatggtaaatgagaattatgagaactgtgattntgtcccatcttcttcagctcctctgttgtctaccaaaaacatggatgtgtagctttacccgtggtaacggggaagggaatacttaacaatggtgcatatgtagctcggttgtattggtaacagttttc

SEQ ID NO: 140718 - DNA, 364 bp, Glycine max
tcaaggctgcttcgcctgagggactgacagcgttacaacactgatacgttacgtctcaaaataatgctctttgtattaacaatctcaacacacacatcttcaggctttatataaactcaaagcctcaaaccattggggaatcccaactagccgaagaacaatagccttggcgcttgacacgaggctgcgattgggtaaagagagagtggggaccacaaatgccttctgcaccatatcctcatagaagtataggtcggcggcgtggcctactactccaagccgacttccacatatagattggaagaacattaccaacataagacagagggaattaaaaatgtcagacaagacatttaaaatcttc

SEQ ID NO: 140719 - DNA, 330 bp, Glycine max
  unsure (1)..(330): unsure at all n locations
ttcttgcactttctaggcaaaagttgacccaacttccaggaacttctattgagggagttgaaaagggtggctacattatttcagacaactcgtcaggtaacaagcctgatgttattttgattggaactggttctgagttggaaattgctgctgctgctgctgaggatctaaggaaggaaggaaaagctgttagagttgtttcttttgttagctgggaactttntgatgagcagtcagatgaatacaaagagagtgttctccctgcttcggtaacagttagagttagcattgaggcaggatcaacatttggttggcaaaagattgttggaa

SEQ ID NO: 140720 - DNA, 239 bp, Glycine max
gctctcagagagctctgaaatctggagtgttatattcaaaagaacaaagttgaagaaaatgccacacatgaccgctatctatggcctaagggtgagacaacactataggaagactcgaagtccaattgacatttcacttgaatttgacactgaattggtggagccaaactttggagcgcaaatgtcactaattatgagtagtgaatcttacgtatggttcaacccactaatccaagatc

SEQ ID NO: 140721 - DNA, 410 bp, Glycine max
  unsure (1)..(410): unsure at all n locations
gggggagcacagaattgcaggaatcaatgaggagagaagcggaactttggatgaatgtctcacaagactgtcattcatcaaagtaccacaagtgtcacacatgcttctattatagaatatgtagcttcgcttgaggacagctttcttgagaaaacttccttgagaagcttctttgaaaaaacttccttgagaagctagagtttagctacacacactcctctaataactaagctcacctccttgagaagctttcttgagaagattcctaacgaatctagagcttagctacacacaccccctataatagctaagctcacccccatgcaaaaatacatganaatataatataaaagtccctattacgaagactactcaanatgccctggaatacactgcttaaaacctatact

SEQ ID NO: 140722 - DNA, 298 bp, Glycine max
ttttggtttccaatcgtggatacatgtatgaccagaacgatgctaatttctattttaactagaaattgaacgggatgttacaatttcaaatgatccggtggaaatttatgtcattttttgattacgcgatagaatgacttaagctcgttaaacacggaagaaaagataactgaaagtaaacgaaattaaagtgatagtacacaaaacaagacttgaattgaaagtcgccgatttgaagacttacgcgttgaaaaacgatgaacggatgaagaacggtgataaacgacgaagatcgatg

SEQ ID NO: 140723 - DNA, 400 bp, Glycine max
atttctgttaggatgactcaagatctatcaccacagtctgattagcatggcattatgtttttttggctgcgcatttattctaggactagccaagctgctcttttttggtattctcccaaattattcatgtgttataattatttattgaatggcaggaactagaacatggcgagtttgttcgtgtaaggacaattcacctcaatgggaagccacgagtcctaacattgaagcaagatttgcattactggccaacgtgggaattgagatttaatcctaatagtgcgatgtggcatcgcaatataatcaagggattgaactgcagttctgtatgaaatatgaatgatcagaccatgtaattctttctaattcctatgtacgcagctacacgggagtatataaa

SEQ ID NO: 140724 - DNA, 439 bp, Glycine max
  unsure (1)..(439): unsure at all n locations
agcttgagggtgcgtagcccaccatcttttcttattatagtatcgataatggggctaccatcacgatcatcgtctccctttccatcattgggggtaccacctgggccgccagatccctccaccttttgggcgtgttttttgaaagatccatccccctttttgcaaatgttctgtagttgcatcctatccggaaccatatcaaaattgtactgatactgcctaacaaaggcaaccattaggtccttccaagaatggactcgagaagattccaagttagtgtaccaggtaacagctaccccagtaagactttcttggaaggaatgtattagcaattcctcatcttttgcgtattcccccatcttctgacaatacatctttagatggttcttaggacaagtagtccccttgtacttgntaggtccagcaccttgaacttggg

SEQ ID NO: 140725 - DNA, 376 bp, Glycine max
  unsure (1)..(376): unsure at all n locations
agcttacccncatgataaaatacatgataanattaaaaaagtccctactacaaagactactcaaaatgccctgaaatacaaggctaaaaccctatactactagaatggccaaaatacaaggcccaaaagaagaaaaaacctattctaatatttacaaggatgagtggacccaaccttggaccatgggctcaaaaatctaccccgaggttcatgagaaccctagggcttgctttagtagctctagcccaatcctctgggagtcttttatccaataccctcggggggtaggatggcttcaactaccttcatcccaaatgccttgctttgctaataataggcattggaaggctgaagaatacgattctataattcactg

SEQ ID NO: 140726 - DNA, 439 bp, Glycine max
  unsure (1)..(439): unsure at all n locations
agcttctatggaggctgaatctttgatcttttttttgtccttcaatggcgatnctcaaccatggatatgtagcgaaagataaaggagaagaagtgagaggaggtgccatccactagagaataagccacggaaggagaagtttctccaccaagagagtgtcttggataataagcttagagagaaagcttcactggaggaagagaatgagagagacaaagggggggtgtgggagttgaaggagattaaggagagaagttgaactttgaagtgagtctcacaagtttctcacaaattttccttcttaacaatcttcttggaggaatcctatttctctttttccttccccttggcctatgaagacaaggccttactatccttcttattcttgtgtttgtttagtctttcttcctcatccttcttatcttacatagatagttga

SEQ ID NO: 140727 - DNA, 356 bp, Glycine max
  unsure (1)..(356): unsure at all n locations
gaattgtccgggtagaacctgggactagtgggtgctattgccaaaccacttaccatcccacccgccgggcgtgggggcggganaacctgtgatgtacctaagcaggcgagctcctggcagtcaacagataaaaggaaaacaagaccacaaagcaaggaggcttgtggtggctggccagctatgaattttgtgtaatatgtggatggtggcctctggtaatcgattaccaagggtgggtaatcgattacaaggcttaaaattgaggacaggaggctaagatggtctctggtaatcgattaccaaggggtgtaatcgattaccaggcttgaaaacgaagtcaggaaacttatggagcc

SEQ ID NO: 140728 - DNA, 390 bp, Glycine max
agcttgcctcaaagaggtgcaggattgtctttgtcttccgaaggaactacttccactccggagtatgacagtcaccgctttatgagcgctgtacaccagcagcgcttcgaggccatcaagggatggtcgtttctccgggagcgacgcgttcagctcatggacgacgagtatactgatttccaggaggaaatatggcgccggcggtgggcatcactggttactcccatggccaagtttgatccagaaatagtccttgagttctatgtcaatgcttggtcaacagaggagggcatgcgtgacatgagatcctgggtaaggggtcagtggatcccgtttgatgccgacgctatcggccaactcctatgatatcctgtggtgtaggaagagggc

SEQ ID NO: 140729 - DNA, 420 bp, Glycine max
agcttgcttccacatgttgaactcactaagcttgtttatcatattctaggagttcaatattcacttgagatcaatatttcagctaccaattcaattcaccaaactcaaatttacaatagacacaatcataacgaaacctaaaagttcaagaaatggttcacaatcaaagactctctaacaattatgcatgaacattttaaggactaattaacatgcaagatttgtatcaaatcaaataataggaaaaaaaatttataactcatgaacaaatgagttagacaaagaaacaagacaaattaaattccgccaaacataaggaatcttatgtgacaagtatcatgactaaacatgaattttatgacaaaactacaataggtgaatatgtcactctagattgttgaggttctcttctactatgat

SEQ ID NO: 140730 - DNA, 411 bp, Glycine max
  unsure (1)..(411): unsure at all n locations
tagcccttttgagccttgtttccctttccttgttttgaagctcactacaagccttaagtgaaaaaccatgatattaccatatccttaaggaattttggatctttggaattgttttgggaataagtgtggtgggtttttgtttcattggacaacttgttttggtggctatgcttcatgatgtattttgggccatacttgatgtacattgtatattggttaaatgttggacatgctgaatgaaatgttgtttctcaaaggccaaagagtaaaaaaaaaaaaaaatcgaaaaaagaaaaagaaaagcaataaagttgagtgaataagatcttaaatggcacaagaatgatgaaactcttggctctactcttcatgtttaattnttatctttacttctatctattttatcttaat

SEQ ID NO: 140731 - DNA, 455 bp, Glycine max
  unsure (1)..(455): unsure at all n locations
agcttatgcgcatatttccttacagacgatctctatcatattacattctatnaaccgaaaaaaatgcacccatatacaatcaaggcagcttcgttacctagattatttacacgtactttcaaggcgtatttgttacttacatcacacacatctccttggctaaattcacatacatgcatacttcaagccatttggggcaccaaaaattgcacatgtgcacattttggtatttctaatacctatacatacacaaacttcatgatgaatcttgactatctacacaataaggtgctacatttcatgctcttttcaagtttttgctacctaaagccgcatgcaaatacaagtatattttcctttgctgactaaaattgtattcaaattaaaaggtatacatcttgtgggtatgtatcttctttacataacatgcaacatatttatgtatctctctttgt

SEQ ID NO: 140732 - DNA, 454 bp, Glycine max
  unsure (1)..(454): unsure at all n locations
agcttcttgcaagcctgtaaaatgaattctttgcttgaatcattttttgacactgcataaagtttataacatctataaaaaaataatgcacacatgagtcatacagcgagatttaagttttatttggaagttaagagcccataaagtctcagctagcctttataaaacctagatagaatgatacattgatactagatgtcaaattatctaataattaacctgttgttcaaaaagtgaggcaactaatctggtggcaaatatattattttaaagttcttcacaatactgcagcattgtcaactgagaccaacatgatctgcatattagaatttaaacgggcaacagtacccttaagcatgcatagcctcacaagtcataccatatgtataaattataatcttatcaaatctttcagcagcatatccaanaaattcaacaacaaatattaacaggg

SEQ ID NO: 140733 - DNA, 448 bp, Glycine max
  unsure (1)..(448): unsure at all n locations
agctaattgggttcggcccagcgtgctaagtatccattcgtgcccgtcccatgaactcgcatgtattcgcatatgttaattacttgcggatttttgtaagtccatgaatacctatagatgttcatgaatattaaaaaaattacttttttaaacaaaaaaataatataatactcaataattttatgagaattagactttttaaaacatgttcaccgtaattaagcactatctgtacccgttatcattcctagttaaaatgaactcatgttgacattctgtcttataacaacccaaaacttttttgagttgggctttattgttcataaatgtaaactctgacttagttaattataaaacgctagaatgcattttattaggaatagggacagatctagaactctnttataggggatggttagaatttctttctttttaattatntaaatat

SEQ ID NO: 140734 - DNA, 273 bp, Glycine max
tacttgagctgccaagtcacaacaccacagagcgtatcccatgaaagaaccgagccctcactaagcacatgttctagaatggcaacctatccgaaaacagtatactgacactgcctaacgaaggcaaccactaggtcctaccaagaaaggactcgggaaggatccacagaagtgtaccatgtgacaagcaacccaaaaagacttattggaaggaaagcatcggtaactccacatatattgcgcatgcccgcatattcagaaaatacaacttta

SEQ ID NO: 140735 - DNA, 414 bp, Glycine max
  unsure (1)..(414): unsure at all n locations
agctttcctgctcgttataaacgggaataactatctatactntcttaacagggtggatttcaaacatggcttattgtcctgcgagttgctgaagggctgtgatgacatggtcggcatcggcggtagtcatatccgggaacagcggcaaagaacagatgcgttcgctattccattcggtattcggtaacgacagcgtgggaaaacgctcgcgataatatttttgtgtgtgagcggcgcggaaatgtaacccggtaccaatgcctctttcttttaacgcttccatcaacgcatcgcgactgataccacaacgttgttcatcgacacgaataataaacagatgccaggcgtgaacgtgcggccaggcgggaaggcttaatggctganaggggagagctgccagtgcttgctgatatt

SEQ ID NO: 140736 - DNA, 477 bp, Glycine max
  unsure (1)..(477): unsure at all n locations
atcttaagtcacctgcggcatgcaagcttcttcggagccatctcttgttggggattatcaacaatgcacatcgggcttggaaacgcataagaatggtgacctangagtgaaggatggccaatctcgtgggtgatggcattcttgagtgaaagggaggaattttgggtgaagaaactcaccccctctcctttttttaactaattcgtgcaaggggtgctcgcccaggcgagctaaccctgtgctcctcccttttttttaagaagaaattacgtgttctctacgggtcagttcgcctttgctcggaatccataggataagttaggcatattcgatcatcactttagagaaataaaagatagaagctttaaaggatactaggttgtctcccagtagggcctccttaatgtgtggagccggttgcgggatgatgatcagatgatcactagcctagtgcctgctcgtacccagtcctgagca

SEQ ID NO: 140737 - DNA, 448 bp, Glycine max
  unsure (1)..(448): unsure at all n locations
agctactaaccacagcaacacatatttttacgtatccaacaccccacaattnaatggattttctaggtatgagaagagaaaccgacaatgggacaaatttgaaacaaactctcacctcacacaaggttataacataaatttaaacttgttcaaactggatttacgcctaaaatatcactgaatcaaaatttgactcctcaacacccaacttaccctaaaaaaggctctttgttcactatggtcatatagaagtctctctagctcagcctaacctttctcacatgtactaaaaggcattccaagctaggattaactcattttaacctccattcaccacaggatccagatttaaccttccaactctcagagccttactctatattcactcataacaccacattctcactttctaaccctaggataactctacccttcatctataacagca

SEQ ID NO: 140738 - DNA, 443 bp, Glycine max
  unsure (1)..(443): unsure at all n locations
agcttntcctctagattctctattatggtttctaagtgnnagagcgaaagagaagggattggagcctctattttattgtctccgtgcgagagctgcctctctctctctctctctctctctctctttatggacattatttcacaaatcccaatgtgtggaggtatactaaagtgaattacaaacttgatgcttaaatttcttgacgatccaacggttaacgagcccaggattataattctactaacacagatttgggtgtatgcaagaaaaagaaagctactctcaccctgaaaactgacataacatgtttctatttatagctagggtactcccaacctattatttaccctgtactctttctttattattattactttataaacaaaaactttattttatttcctatcacatgaataaataaaatatcttttttatcttttatt

SEQ ID NO: 140739 - DNA, 404 bp, Glycine max
agcttgctctaaattacattgatgtttgtatatatgggaggagggtgtatgccatttatgttttaagagtactgtcccactggtaaaactaactttccaaatttttgccttcgcaggaaatggcccctatgaagctcgcctctaagaggtccaagaaggacatggcaacctaatgagctagttccgctctggagtatgactgtcaccgctttatgagcgctgtacaccagcaacgcttcaaggccatcaagggatggtcgttactccgggagtggtgcgtccagctcatggacgacgagtatactgatttctatgaagaaataaggcgccggcggtgggcattactggttactcccatggccaaatctgatccacaaatagtccttgagttttatgccattgct

SEQ ID NO: 140740 - DNA, 365 bp, Glycine max
aaacactcggcacatggatggcgtatcattcgtgaacaaactcatctatgtgacgaatgaattcacatgttcatccgagtccaagtgttcattcgaacgatcaatgttcagcgatttccattcaagggggagttaggccttcataattccatcgacgaaaggatgccaaataacgagtgtcaatgtttgctgctctctagactggttgcatgacaaaaaaggttcattctctccacgttgtatcactcgcatatgttctagtcggatgggtctggtgggtgccactgtccaacatgagttgtgtctggcctcttgaatctcaatattgtttctggagtgacattctctttcgaaatttaccactc

SEQ ID NO: 140741 - DNA, 456 bp, Glycine max
  unsure (1)..(456): unsure at all n locations
gcaagctntttctntttcactttacacactctctatctttttagtcatatccatcacgnngcagtaaaggaaatagtgtactaatggcaataacctgatacatgaaatgattctacaacgcataagatgggaccatgagaccattagtgctcttcgaaaattccttggatagttgatggagggatctacatatgattcttgaattgaaattcctcgggaatatatagaaataaaaactttgatcacattaactcatcaattacccttcaaactactcgcagggcacataatcaaattctggattcctggatgattatttagcactacattatataagcatctggatgaagagaaacatatatagaactgtagaaattataggaggtctgcttcaaccttgtgttgcataagtttaagagcaacatccatcttcacacaaactttcccacatttgat

SEQ ID NO: 140742 - DNA, 293 bp, Glycine max
  unsure (1)..(293): unsure at all n locations
gcttgacatataaaaactctcaatcaaaagcattagattctgcgccacatattttgtttctcgcgaaaanatcaattcattcatcagaaactaatctcttctaagaactttatttggcatcaaatcccttctcttaattaaccttgaacatgaaatattgctcttggaatctaaactcaatgctactgagatgaatgacatatctggaaccattagactaaaattaacggncaaatcatggattcaagtataattatattgtaaaaatcgcatcgtaagatctttaatctaaa

SEQ ID NO: 140743 - DNA, 437 bp, Glycine max
  unsure (1)..(437): unsure at all n locations
agctntaaaaaagttgggtttctaagctggggattgcattngggcacctatgttgactttcctatgctgtctctacatacataaaacagccccaccatcccaattgtgcaaaatcatattcatatatcattggggcatttcaccgagcacttggtgagcgcatgtttggacataaattgcaagagaatgggagcaatgtggcatgccccattgcttcaaaatacaacctaggcctaaggccttttcattcaaatacttaattcaagaaaacaagcaccaaagctaaccaaaactgcctcacaaatataagcatgttctcacaatttaaggcaccaaaagatgaagaaaacacatcaatgggaagcaaaaacatcaaggacggaatacttacttgttggagtgaatngaaacaccaaanatgaaagcataacacgatc

SEQ ID NO: 140744 - DNA, 371 bp, Glycine max
  unsure (1)..(371): unsure at all n locations
aacgtnctctngcacaagacattctattaactaagaaaatgcacccatatacaatcaaggcagtttcgttacctagataaatttcacgtacttctattgtgttttngttacttacatcacacacatctccttggctaaatttacatacatgcatactcaaagcattttgggatatcaaaaattgctcatgtgcacattttgtgatttctaatacctatacatacacaagcttcatgatgaatctngactatctacacaataaggggctacattccatgctcttttcaagtnttngctacctaaagccgcatgccaattcaagtatattttcctttgctgactaaaatatgattcaaaataatatggataca

SEQ ID NO: 140745 - DNA, 436 bp, Glycine max
  unsure (1)..(436): unsure at all n locations
agctntgttgaaacatgttgatgacatattttctgtttcacttntattncgtcatatgctacttaatttaattgcagctttacattgctttgcttatccaagatcactgagaatatattctttcatctttgacatatttaaagctgcatattcattttgttcttgaggatttggattttggctatactgttaaagtcaaccatagcaaatgctggaaatcaaaattatgaatttataatgtttcagggattatgacatataatggccttgagaattgcattccggataatcaatcttacggagatgaaagcagaactagcagaggagatggatgtataactgattcattcaatgatgatgactccagctcttcatccaacaaagatgcttttggatcattctcttcaaaatgtntgacaatgaaaagagatgatca

SEQ ID NO: 140746 - DNA, 427 bp, Glycine max
  unsure (1)..(427): unsure at all n locations
atggaagcccnccatcataccactttgacaactgatttgaagaatggattaagaactgtatngntcacattgatttatgtcttttactaacacgaaaaaantcntattcttgttttatgtatttctatcgtttntgttatgtgnattagnacaanacaactacttcattctgtgatgaatncttaaatgtcaaaatggtctattttttgttctctttgttcggacataccgtttaaagttctcttcttttggttttgatcttcattggaatttattttatggatgagtatggcgcaacaatgtatagagttgcctctaccgcaagtatagtcgcttagggtcatctaagcaaatgtaggatctttacttctcttgctatttaagcaacgaactagagtataattcatgtattatcntctaatctata

SEQ ID NO: 140747 - DNA, 269 bp, Glycine max
accttcttgagatgagaagctagaacctagctacacaccccccataatagctaagctcacccccatgacaaaaaaacattgaaaataccaaaaaaaaggccttactaccaagactactccaaatgccccgaaatacaaggcgtaaatcctatactactagaatggccaaaatacaagggccaaacgaaggaaaaacctattctaatatttacaaagaatagcaggcttatacttagcccatgggctcaaaatctaccctaaggctcatg

SEQ ID NO: 140748 - DNA, 380 bp, Glycine max
  unsure (1)..(380): unsure at all n locations
ctatatgaggcgaccattgagtcttctatataaagaaggctcatgaatatcatcaccatcaattagagtcaactttagggtaagctccattgtgagattgtttgtcttacaaatcaaaaaaccactgtcatccaacaaagctaatgtgnacttcctctgatgaatctgctttagtgtcgcctaagttaggatcatcatcaatatttgaaataaaaccttagcatatcccaacaaattctcatcacgagatgcctctataattcttatccattcatactccttataaagnttagctcaatcactaaatcactatggtaatggaaaaattcttatcccttcacctccttctacttaaatcactatattacaattggaatgga

SEQ ID NO: 140749 - DNA, 405 bp, Glycine max
  unsure (1)..(405): unsure at all n locations
ctatgggctctaaatgaacatatttcctctcttaagtttacgtctgaagaatatggccattgagggattaaatgtgtgtattaaatgaatgtacttcttcatgtcgagaaaccgctttgtcgttggagtgttgaacactacagcaggaaaccacttccttttgcatcaaagcaggtctatgcagcagagcgctccttttaatggcgattgaggaatttcagagcttggattcatttattcttcataggagttgatagatcctaagataatgtctctggaaaatagattgtngacatagagtattagactaagtcttaaatgccatctttaatgtcttattatatcatgattctatcttgctatcatcttaaacatcagacacagacttcgcgaaacatgttctga

SEQ ID NO: 140750 - DNA, 431 bp, Glycine max
  unsure (1)..(431): unsure at all n locations
agctngattagttaaagaaatataaacatgacttttgatatctgggtgggctaagtgaataccataaatacatattttatatgattaataataaataataatatgatgacctaaaaaagcaacaaggaaatatgttagactttggcaaacgtaccaattatcgttacaggtagttactgattataaaaagagatcatccccgtagaaatttgagtttacctaattcattctgataaaaataaaccgtttcaaatagttatgtataaatttaatcgaattatcatgggtgtgtttaactaacgaaagataacttaaataacaaaattacgaaaataacataaataatgaaatttagtgtgtcagaaatacgtaaaatttacggaaacaataataacaaattcaattaatttaagaaaatataagattggatt

SEQ ID NO: 140751 - DNA, 321 bp, Glycine max
  unsure (1)..(321): unsure at all n locations
ntcaacaaatgccttcacaaataatcatcacacagcatataactaacaaaactacccctcatatctcccaaaaccccatacccacganaatcaagatggattgaagtccacccaaacctggattttctaagnccctctcgtagccacgcacttcacgaccccgaaaatgctctcctttcacgatttgtggcagaaatgagcacctaaggtngaagctttgtgtggagcttctatggtgaatgaggaagaagaaagttacgtgagaaatggagagaaaaggcttctgaatntctgctttggcttagtgaggagagagaaaag

SEQ ID NO: 140752 - DNA, 244 bp, Glycine max
caagctttatgagggaaccggcattacctactattttctcctattcaggcggatgactagaattgtgatgtaacctatttgtcacatatagtcatgatctatcctcctacctaatagaatgaatcttattttagtcaataaagatctcgatctactatcgaactctaactaccttgattaaaggaaaactttatattgggctgataaaatactctctatgtcgatgttactggtaatataaaca

SEQ ID NO: 140753 - DNA, 320 bp, Glycine max
ggtacaaaccgtactcaaactggatgaataacggttattactacattatccttgaccgggaactctttaacagaggtttgaccacacccttactcatttgtttggacagctagtaagccaactttgtcatgcgacgagtgcatgaggggatctatgaccttaacatattgtggcactcactaacaaccgaagtattacctgctggctactatttggctacacttcatgctcacaccctcaatctcatgaataagtgccgaaagttgtagccatttgcttacattttctcgtcccctattacacctacacaacttaatctc

SEQ ID NO: 140754 - DNA, 253 bp, Glycine max
  unsure (1)..(253): unsure at all n locations
tcacatctatgatgcctagccttcctttctccaccagaatgcatatagtataccacttaacaacacaaatcttttgttggtctagatcagcaacacaaatgaagtntntaatccatctatcaactagctcgagcaaactattatgtcaagcataaatgcgaaatgaataaaagaacataccatcaatgatggaggtacccattggaccctccccataatagatcactaggatcctntctaagatagaatttta

SEQ ID NO: 140755 - DNA, 324 bp, Glycine max
aattagccacccttctaaactgctcaaacagtgacttgggcaagaaagtggcaacagtatactttgtggacctaacagaattatcagcataattgaaaatccctccctcaaatctatctggttcattgcagaaaaccaccctggaatgaccatgtcccccaatctttgaatgttccctcttgaagattgttttaccacaagcaaatgagtagatcttgctaaactgaagctttatcttacccctcctcccacccctcatcttcttctatccaaatagtataagtgatcgatccaagttccaaagtaatagcaataataataaag

SEQ ID NO: 140756 - DNA, 374 bp, Glycine max
  unsure (1)..(374): unsure at all n locations
agaccttcgagagaaaacttaagaaatctatttttatcgatnccgtaaagtgaagttactgtgacagagagatgactcatatttagagnactaactagactatggtttagtgccatctgnacctaactacctactgagttacagctatacaaatagataagaaatcatacagtacactctagtgtatgttgggtttcaggaaaaccaagtataatctaataaagaaaactattagagtatcctaagatcataggattctattgaggatcgctatatcatcacaaatgatatgatatatactgcttaatttcatgtatatcgaagacactaaacaacaatgaatttatagcataagagagggataaaataactta

SEQ ID NO: 140757 - DNA, 363 bp, Glycine max
  unsure (1)..(363): unsure at all n locations
aaaccaaggaaaggccaaattagccaaattggaaaacttgaagtgctcgcttcatgccacacaatcacttaacacgacaagcacgcttagcacccaggaagtatgggagaagtctataacgtgaagcctcactaagcgcaagaatatngtcatactcgctaagcacgacaatcgcacatagtgcgaaggttgtatgaaaaccaagctgatctacacctataaaaggagagagaaaaaggaaaaaatacgagaattcaattccttacaaaaggcaaaggccagaagttagagaagcaatcattaggagtcaaattccccctttttctaaatattatccctttggaaatgtaaagtctctatgac

SEQ ID NO: 140758 - DNA, 415 bp, Glycine max
  unsure (1)..(415): unsure at all n locations
gcaagcttattctttaaatttgaagctgtagggaatgatttattctttctttgngaatgccaggtggccatggtttatcaaaagattacaacactcaaaaaaggtttaaatttgaacctctatcctttcttggtaaaccctccatgaagtttaaatttatctttttgttttaatacataagtagaaactcctagatttatgtttttgtaagctttctgggtgcttcctccaagtttaaagaaaagcattctgcttcttcggattccttttttcgcttggtcaagttctaaggataatttcacgagcttccattcccatttgttaaggaccgagatgattttcctttgctggtgtaaaatctttaacgcttcaatctacaatggtcaatattcttgcgctttgctaatattatttg

SEQ ID NO: 140759 - DNA, 288 bp, Glycine max
  unsure (1)..(288): unsure at all n locations
atgcaaagcttaaattntaggagagcattcacataattccggttntcttactatcatgattacccggctacatccctcttttctttgattaccctactaacatcacacaataatctattagacacaattgctttatgggtctatntctcatttaatgttnnnntacaatggcataacaatgacattgngccactctttacaggttacattgattgtgtgatgctattacaattcctgtacatagatagctccaagcactcccccaaaantgaaccaaatatcttttct

SEQ ID NO: 140760 - DNA, 353 bp, Glycine max
atacttcggattgatattcatagggatagaacaaagggtgaactattcttgtcccaaagcaattacctcaaaaaagtggtggaaaaggttaagatgcatcaaaacaaacctgttagcacaccacttggtcatcatacaaagctatctgttatttcagcaccagaaacaactgaagaaaggtctaaaatgaatcaaacaccctatgccagtggtgttggaagcataatgtatggaatggtttgcagtaaacctgacttagctcatgctgtaagtattataagcatattcatgggagatcttggtagcgcacattatgaagctgtgaagtggacactaaggtatctaaatgggtc

SEQ ID NO: 140761 - DNA, 364 bp, Glycine max
  unsure (1)..(364): unsure at all n locations
catcctgctgatcttaatctaacctatgaagaatacttatctcttggaaatcttcatgcactaatggatgaaatagatcaagccaccgcctacccttttggactacacatctctatgggcatcaatgccaagattataactgactatgtgcattcatgcctctctgcttgggatgccaccaaaaagaaaggcttcaatttgcactacaatgatgagatgcctccaacgaaaataagntggatatagtcaatcacccgcataattggagcttccttgctagcatgaaaagtctttctcgcgctcctaacgcttatgatgccatgaccttctagaatcctatcctgtggacagaccactaaaaagc

SEQ ID NO: 140762 - DNA, 397 bp, Glycine max
  unsure (1)..(397): unsure at all n locations
aaagatctttcaacattcatctgtgttgctttctcagacacagntcatttcgtagtagacaatcatgtcattagttaaactttagacatggttcacctaaaattttcatccttcctaacaagctaaagtacctagatgctttaattttattactttttttccttcctttttccctacaacttttcccatatttggttgttggtgttgagatggagtctgaaatcggtcgtacattaatttgatctagacttgcgtcaatagttaaagaccccaccttcaccattaacatcacgcaaagccggatcgtgcggctntgggtggatcaatgttcttttgtcgtccttcttttttccaagtgttccaagatctggttgactgaatggttactatcgcgtga

SEQ ID NO: 140763 - DNA, 412 bp, Glycine max
  unsure (1)..(412): unsure at all n locations
ccttgaaactcagcttgaattattttgaacttgtaatgataaagatgaatgttgtactgtcgtntaatancatttatgttgagnncatgaatgatttatgtcgcccgctacaacgaagagataatatagcatatgagataatctcttatagtataatgatatatgtcttttgnacaacgaagagataatgtagtctatgaattgaattctcatagtataatgatatatgtcttttgntacaacgaagagataatgtagnctatgagataatntctcatagtataatgatatatgtcttttgcacaacgaagagataatgtaacatattagttgaattctcataatataatgatattnttgtncgctacaacgacaagataatgtagccttggagttgaattctcatagtata

SEQ ID NO: 140764 - DNA, 426 bp, Glycine max
  unsure (1)..(426): unsure at all n locations
agcttctagcacaatggacttaccttgtatttatttctttgatagccctttagagcgcctgtttcctctccttgttttgaagctcactacacgccttaagtgaaaaaccatgatattaccatatccttaaggaattttggagctttggaattgttttgggaataagtgtggggggtttttgtttcattggacaacttgttttgttggctatgcttcatgatgaatggtgggccatacttgatgtacattgtatattggttaaatgttggacatgctgaatgaaatgttgtttctcaaaggctatagagtaaaaaaaacaaatcgagaaaaaaaatatctaaatgaagacaaagacaagccataaagttgagtgaataagatcttaaatggcgcaagaatgatgaaactctanggtctactcttcat

SEQ ID NO: 140765 - DNA, 355 bp, Glycine max
gcttttttggaccttgaacaagcaattttcttctcttttataaccacgctatgtgtgcgcgactggtctctttcttcccttcgcaacttgagttcactattgctaccccatagagctccacgaaatttgttccggccatactcttccttgcgagccctcttggtctcttgttcaagggctcttgcgggaattgcattctcttcccgaacccggcacactccttccgaacgtgtgtagcgaccaacttgaacttctccttggcaagttttgcctttcctaactcgcttttgagagcttggacttcttcgtcctctttcggtgcttcaaaactctcttcgctgacgacttttaactt

SEQ ID NO: 140766 - DNA, 372 bp, Glycine max
  unsure (1)..(372): unsure at all n locations
agaaatgaaanngagaatgangttaattnggagcaaactctcacctcacacaagtctataacatcaatttaaacttgctcaaactggatttacacctaaaattccaccgaatcaaaattggactcctcaacatccaattntaccctataaatgactttgtgttcacttttgtcatttgntnttctctctggcacagcccaagctntctcataatgcctaaatgacatttcaaactaggattaactcactttaacctccaaataccactaaatctagatntggccttccaactctcataaactcactcttttnttttcactcataacaccatattctcactntctaaccttaggttaactctacccttcatcc

SEQ ID NO: 140767 - DNA, 432 bp, Glycine max
  unsure (1)..(432): unsure at all n locations
agctngtaagaagtatatcaatataggtgattgtttttggttgatggacaagaacttagatgttaatcatgggttaaggagttgcacaagtgatggagatatattacatttagtttgggatgcttttgaaaatgagaatgagataaatgtttattttcatcatgaagtagatccaattttagaaaatatcccacgctattgagaatgaggatgatttaaatgatgtacctattgctggccacgaggaagggtaagtttaattcatctgtacttggtccaacatggttaccataattaattaatatgattaatttttacttgatcaccactgatacatatgttggtgctggagagcagagagatgctggtgagcagagggatgctaatgctagtgagcagagagatggtggtgacaaagggatgctgatgctg

SEQ ID NO: 140768 - DNA, 340 bp, Glycine max
  unsure (1)..(340): unsure at all n locations
ctactgcctcatcatagcctaagaattcaataaattatctctctctactataacaaattgagcggaattntagattctatggacattcaatgatggtttagtggatatgtatggtgggctttttatatcgtgaactcgaaggattcccatcaaagcatcattcagacttttctgcctgataataaaataagaaaatcaaatctatgtttgtgactatgtgaggacaactatntattctttgcaattgtccattcacagacacatttagtagcttgaatattaaggttcataatgatcacctttacttgctaaatatcagnacccacaatcttatgaaaat

SEQ ID NO: 140769 - DNA, 417 bp, Glycine max
agcttgtcaaattagggtatggatcgaaacatatctcttgtattttggtatgaaagaccaagttcatttttagttcaaaatttattctccaaaggaatagcggatatttcaccattcataaagacttaaaaaatggatctggtgatagtatagatctatgtagatgacagcatctttggtatttcctcaaaaaggatgtgcaaacaattttttgagctaatgaaaggaaaatttaaaataagcatgatgggagaactaaagttctttctaagggctttaaatcattcaaaagaggtttagaatggatgaaacccgaccagtggctacccttatgcatgcatccactgttagtgataaagcagaaaagaaaagcacccatagtgcataccaatttcatgggaaatcactagtgtcata

SEQ ID NO: 140770 - DNA, 327 bp, Glycine max
  unsure (1)..(327): unsure at all n locations
tatcaaacataanaagggataaggtaatattgtaaccgatgctctttcttggctgcatgcattactttctatgctcgaaacaaaattgattggnctttaatgttngaaaagcatgtatgacaatgatgaaacttttggagaaatacncaaatattgcgaaaaattttcagaatatggtttctttagacatgaaggctttcttttcaaagaaaacatatcttgtgtgccttaatgttctactataaattatcttggtcgcgaagcacatgaatgatgtgtaatggtgcatntttggtgccaaaagactctanaaacattacaagaaca

SEQ ID NO: 140771 - DNA, 394 bp, Glycine max
gcttacaaggctctctatggcttaaaacattctccaatgcagtggtttcacaggttaaaatctactatacttcagtatgggtttgtgggaaacaaatgtgattcttctctgttcatctacacacatcaagagcatactgtctatcttttagtctatgtggatgatatcatcatcacagacagttttgtctctcttattcggcagctaactttcaaactaaacattgccttctctcgtaagtaactgggtcatttggattattttttgggactagagatcaaatatcttgctaataattctatactaatgactcaaagcaattatattcatgatttacttcacaaaactcatatggctgaagcacattctatttcctctcccatgggttctaact

SEQ ID NO: 140772 - DNA, 428 bp, Glycine max
  unsure (1)..(428): unsure at all n locations
agcttgtacttggtttagacatgattgacacatgtatttgggacttgtaggattcaattcgggcaaaattggatgagggagagtgtgatttcnaaaatctgcacttatgcagaattttgctgtcaactaggtgcagcagaatttgactttgtgcagaaaatgtaatgaaattactggttgtggaaagagtaacaccgattgggttctggacgttttctagcaaatcccaacggtcaaaatgtagacttatgtactagagacttccagtaaaattttcgagtcgatccaacggttaacgaattggaacgaagagaatgttactagggtatttgtatgtgaaaagctgtgatattggtttgtgttgtgggcagaagtttctgcctttgcctattttgcttggggttttgtagtcatgatgatnggatgtg

SEQ ID NO: 140773 - DNA, 279 bp, Glycine max
  unsure (1)..(279): unsure at all n locations
ttctgctcctgagnatgacaatcaccgctttatgaacgctgtacaccaacaaccgcttcgaggccatcaaaggatggtcgtttctccgggagcgacgcgtccaactcaaagacgacgaatatactgatttccacgaggagataaggcgccggcgatggacatcactggttactcccatggccaagttcgatccaaaaatagtcctcgatttttatgccaatgcttggccaacagaggagggcgtgcgtgacatgaggtcctgggtaagaggtcagtgga

SEQ ID NO: 140774 - DNA, 289 bp, Glycine max
  unsure (1)..(289): unsure at all n locations
catctcgtgttaatcacaccaaaatgagatggatccatatgnttacaagnatgggactgtacagttgaagatagaactaattggtaagatacatctatttttggatagcctatcacttaagaactccatagtatagtgtgnntggctngaagcaattatgggattggtgaccttcttgaagnnncncaaaaatcatgtgagtgaggacaaaatacgttgtaagtctcgtgttagattatgagaacaatcattgatcctggaagcaacctgtaacatctcaattntctag

SEQ ID NO: 140775 - DNA, 318 bp, Glycine max
  unsure (1)..(318): unsure at all n locations
aaaaaccacctatctttttgtttccgaaaggatcattattaatttttgtattacaccaattcagccaaccaattatctgggaaatgggataaatacgcctcaacatctaacaaaacaatttctacattcaatctgaaatcttggagggtaagtgtatagattgaatctgcaaggtatggattgatcattatagtcgttacaaaacatttaggcttggatatgatcagcaaataatttaggacatgtaaatcctcaacgggagtagcctattgatcttatataaatngtcactacagaatttcttttctaaataaacat

SEQ ID NO: 140776 - DNA, 348 bp, Glycine max
  unsure (1)..(348): unsure at all n locations
aatctatacatngaaagcaaaaggcccacaacttatgtgcttgatatgtagctgctaactcagtttttgtggntcagatngaagctcatgcttgtagtgncaacganctcgctttttcttatccaaacaaacagctttgtgtngngatctgtggagaggatatggncatctatggtatnngtcacatattttgncatagatatcaatatcaatataaataaaaaaaccaatttctagtgtncaagaaatttcatgtatgggatgccgcntctggngcaaatgcagatactttttagtggcatgaagcacctgtatatttctgatgccctcatcacaaagtaaagattc

SEQ ID NO: 140777 - DNA, 427 bp, Glycine max
  unsure (1)..(427): unsure at all n locations
tgcagctattatggtagggtttcttctggatggctggctaaacactctctattggggatttataatgaacaactaatgtaaatacctaatatctaattgattatgttttctatggtcaatgcttaatgtttgtatgcttttggtctgatcatccatttgtgttcatagttaggtggctttagcattgggaaatgtattgttgccttaaaacttgattgaattaggatcaaaacttagtcttacgagagggatttgcggactaagttttggttttaattatgttgttacaagagggatctgcggacgaagcttangctaaattaggctaaacttttgtaagctgcttgagctgagtctagtcttacaagagggatatgaggacgaagcttggattgattcggtctgatgagggatcgaggtttagtaa

SEQ ID NO: 140778 - DNA, 356 bp, Glycine max
  unsure (1)..(356): unsure at all n locations
aatctgggacctagccatggttgaagtctccacagattccatngcctccctcgtccagtataatgactagccgatgaggggcttcacctttgtggacgtccagctatcacctatggtggaagaatttgaagagaccctatgatgccctctatgtggaaggaatccataccccttctcaggattctatccctctttagctagaatntctaatatagnccaaatctcggtgcatgaattagaccactgaaagcaagtcaaaaatgttttggttggagnaccgagataatgtttggaggcaaaagcaagaatcttggtcatgtaaggcgaatgggtcccgtncatagacatcctcacac

SEQ ID NO: 140779 - DNA, 298 bp, Glycine max
gaccgctcagtgataaatgaggtaagggtgcagagacacccacgaggttttcctaaaagccgccacccttgagagaatgcatgataggtcactgatcgagcgctcttgtgccgcaaatgaacggcgctaaacgatctgtcatagctgtggggcgtcaaaatgaattggtgagggagtgtaccatcttaaaaggaacgacccatgcggagttggctggacaaagcacagacgggaatgctggcttgactaactcacacattggtaagaatccaatgcctccaaaatcccagggtttctt

SEQ ID NO: 140780 - DNA, 256 bp, Glycine max
gggcatctgaagcttatagtctaaccctgtcatctataagaactgactctcccagaaacatgttgaaccaaagctcatctggaccacaatatgattacatacttcagtctgtcatccattcaattgtactctcttgtgttgattaacatgtctaatttactttcattctaagagacaaaagatcatatagctacactatgtatagctctacactctaagcacatgaccaataaactcttattccagacaaacatca

SEQ ID NO: 140781 - DNA, 360 bp, Glycine max
  unsure (1)..(360): unsure at all n locations
aagatactcagcttcacacagcgcgacctcggaaccagccacgaccctctgaaccagcctcggaaccagcctcgcgtgatccgctgcacacagcaaccagcatcgacgacccatggcgtgaatggcggcgacgcgaacggagaagacgacccagaaccgcgacctcgacttattctgtttggtgggccaaagccttttttttgtntntgctgcttgacaccccttttttatgtctgcagcttttttttttccggttttctattggacacccnccttttactttcgacagtcccatntttaattttgttttccatncgacaccacaatttttttnttttctgttcaagcctcttttaaatg

SEQ ID NO: 140782 - DNA, 288 bp, Glycine max
  unsure (1)..(288): unsure at all n locations
acctgcggctgcagctntagccctaaaaaaatttttttttttttttacccatctttctatgaattgctgccacatataatcttggccaacattaaaggtcgatggcatctccaaaccgcaaatgttcttcttattacgataacttcagatgatattgctttatgtgaggcatcatcccaaatgtaattcaatttgttggccctcacagtcacattcaattaaaatcaattatctttttgcataaatacattgtcatcaaatataaatgttgttcatttttcatacaca

SEQ ID NO: 140783 - DNA, 351 bp, Glycine max
agcttgaagtcttaactggaaccctcaatttttgcttacccactcatctactaagcaaccttcatcttcttttgttttccacgatgcaagatgtgctatttggggtggagctcatgaattctgtcattagatttccactataaaacacaatcatgaagttaactatatgggacatcattaaaggtaaggttacagcccttgtgcattatctggtgttccgcatggtcctaattataatcaacaatgacaatggagatcttatcctggcaaccattacaacaaagaccatggtggaccttcaaacatgccatctctacagaggcctaatctttatgagaggactactatgct

SEQ ID NO: 140784 - DNA, 427 bp, Glycine max
  unsure (1)..(427): unsure at all n locations
agcttggcttgtctcattntcacccctaattttatgtgacctgttgataaccatagctaatgggtccacttcatattcactcatttataattattaatgaagtttcatatagccttacttaatttattcacatatattcaacaacgaacctcttgattcatgaataaaatgagaaaagaaagagttagactttttaatttataaaaataacataaaaaagtgtatttaaatttttggagagggtttaaattggtatgagccccccacacaactacttctaatgaaggaacatgtgagttatatacataaaacaaaaagtgtcacgaaaaaattaaatgtagatatgatcgaatgtgacacaaccgtatatcaaccacaaatcataatttggagaacaataattttacatctttactagtccttctac

SEQ ID NO: 140785 - DNA, 242 bp, Glycine max
aaaattgactcatttggtcctaaaacctatgaatccatatataaatcatttcttttggtcgttacttcatctgtgaatgctactttaagtcccacggactaacataatgagacaggatgcaaaaactattaatccgttattgttgtatgtgaagactcaatgagtatgaccactccgccttaaatatcgcatgagttttatcgtgaacttcattgcgaatatattatcgtctattgacatta

SEQ ID NO: 140786 - DNA, 284 bp, Glycine max
ggaaccgagttggtgcacggtggacacctattggttactttaatgaaaaacttcatggtgccgctcttcactaccccatatattattaggagctttatgccttaattaaaagccttccaacctgggaacaataccctggtttcaaaggatttggttttcatagtgaacatgaatcacttaaattcaattaaaagcaatgcaagtttaatcaaaggcatgccaaatggatagagttcctaaagcaattccatatgttttcaatacaaaaaggaaatcccatgtgg

SEQ ID NO: 140787 - DNA, 395 bp, Glycine max
agcttcttagtctcaactgatgaagatttattttttgctgcttcatgcactcctctaatgacaataacatcacttctggcactaaattgctgggagtttgaagccatcttctcaattaaatttctggcttcagcaggagtcatgtcttcaagggctccaccactagcagcatctatcatacgtcttttcatgttactaagtccttcataaaaatattggagaagaagctctcaaaaatctggtggtgagggcaattggaacatagacttctaaatctctcccaatattcatataagctctctccactgagatgcctaattccttaaatatctatactgatggtcgtggccctggaagcaaggaaaatgttctcttagaacaaggtaatatagcca

SEQ ID NO: 140788 - DNA, 398 bp, Glycine max
  unsure (1)..(398): unsure at all n locations
ntgagccaaaatcctgactcaccataaaccttgactcagtgtgataatgtcaatcctcaccctcggaagccaaaaaagaatagaaggaaaatntccaatcaaaggaaaaaagagaggaaaggaaattcccaatcatagagtgggagaaagcgaaaagaaaataaagtcgaaaaaaaaagaagaagaatgaaagaaagcttcttgtctatgatcgaaagaaaacagaagttatgtgcagtaatgtctntggactggacaatatctgagcaatacaggattgncaccaaatgaacaaaaaagaatgaaagtgcaccacgacctaatatggtcttctccctttaattgacaaccaatatcttgtgcgctatcgacatctcgccccgcactaaacacaaaca

SEQ ID NO: 140789 - DNA, 173 bp, Glycine max
taagcatcggcgaatgccccttgaacaacgccacgtgtcccaaacagctgttcttcctcgaaaaacatatgccgcatgagcaccttcacgtgggctcttcccgacactgcttgacgtggctccttaagtccgacagcaccgcgaagctcttttcccacaccgctggcacgaca

SEQ ID NO: 140790 - DNA, 307 bp, Glycine max
atactcaattaccatacatacaaatatgtgtaagttcaagtatgcaagaaaaccaatgatgctatccttttactatatcatttcctttcttgacgaataatctaatgtcattctcgtttaacttagaacaaagacttccagcatcgactaataaacttttttttttctttaatggaatatagcctcctcacttcttcaattctcttggtttcggttcttgacctctctttagtggcttggattctaacatataaatagacaacacttttcgtattgttgtttaattatctttacgctaaacacatat

SEQ ID NO: 140791 - DNA, 472 bp, Glycine max
gcgtccggatccttaatcacctgcggcatgcaagcttctcaaggaagctacctagtctataatttatacatgtgtaacacttgttggaactttgatgaatgagagtcttgtgagacatacttcaaagttccacttctctccctcttttattccttcaatttcatgctccccccttctctctttcttttcctccattaaagcatcctcttcaagcttcttatccaaggcaattcttggtggtgaagctctttcttccttggcttattccctagtggatggtgcctcccctctcctcttctcctttgccttccgctgcatctctatggtgaaaaatcaccattgaaggacctcattgatgctcaaagatccagcctccatagaagctccacaagcaagcttccatcagacccttcctttggtgatggcataaaaaaaattggacccattccaaaatatttctctcccttttaaa

SEQ ID NO: 140792 - DNA, 464 bp, Glycine max
  unsure (1)..(464): unsure at all n locations
tcttatccaatgcactttttttgtggngaagcttctccttccatgtcttatnctctagtggatggcgccttctctcacctcttctcctttatcttctgctataattctatggttgaaaatcaccattgaagaacctcattgaaactcttagatccagcctccatagaagcttcttaagcaagcttccattcagatgcttatttgtctagtggctaaaagaaaaaaggcctaaatcatctcaataaattcatgtgcaacatggaatgacaagagaagcaatgaaaaacctatattaatctagcactatggtgaaatcacacataaaagaacatgaatggaataatgcaatccatccacaanatcccaaaaaactcacaatgaattatntcatcacacattgatccacctcataatttctagcttatttatcacttctacaanntgcatcaatgtttcacatctag

SEQ ID NO: 140793 - DNA, 384 bp, Glycine max
  unsure (1)..(384): unsure at all n locations
gtggggtggggccaatcaaaaggaaactttttggggagatctatgaaaatcanggccattattgatgttacaaaactggtacgaaagaacaccgtgaataaaaatgggaataaggatcccattangggtgctttcaaatatgaaagactatgttacttatgttatgatngtgggagccttaaccaccaactaaagcctgcaactttagagatgaaatgagatctgaactttgaagtataattctcaaatgatcaaagttgaaaaaatgcatacacttggcctctatttatagcctangtgtcacacgaaactggagggaaatatgaatttctattcaaatttcacttgaatttgaaattaaatttgtggagcccaatttttgat

SEQ ID NO: 140794 - DNA, 357 bp, Glycine max
  unsure (1)..(357): unsure at all n locations
cccttatgcacttctctcgctgtcgaattagcctggaaaaattgtttccgcgaagaaaatccaaaccgaggtgctttcgtaacgtttccgtgaggaatatcgcgaatgtngctaccgngctttgacgancttcattcgcgcttcatcgnctctcgaccatcatcggttaaggacctcgaaccaagcttttcgatccattctatgtacccgtgtgtggnccacatagagtntcgtgtacaanaaatctcgtnncattcacttantaaacccccccttgacgcgcgtaagccattccatataagtcatagctcgcctaacctataaatacaataaatgncctcctatcgcttgaattat

SEQ ID NO: 140795 - DNA, 428 bp, Glycine max
  unsure (1)..(428): unsure at all n locations
tgcagctgtgcttacctaaaactaaaaaatattttttttgtttattatggttagtgcagcaagctgggcttatcctaaacctacaaatttaaagacagtaaaggatttgagcttagcgcagcaaggcgcgcttatctcaacccctctgaactcaactgaggcttaacgcgacaaggcatgcttaaccttatttcaaaaggaaagaaatagaacctaattggtgcttaactcaacatgctgggcttaatgcctgaacgacactgggtatctcagtatactggtgacgcttaacgcacagacgcgcttagcatatgcatcgttctagttcatcagccatgatgaacgcgcttaacgcgacatggtccgcttattgcaatcatcagaaatcctaanaaaaatttaacagtggtaatgaacacgctaagcac

SEQ ID NO: 140796 - DNA, 427 bp, Glycine max
  unsure (1)..(427): unsure at all n locations
atctcacctaataaatgattaatttgatattcaaccaatcatttgtatttggatctcgtanaattactgttaaagcaaaatctaatctattgttcacactacaaccacggttaaaccaaataaaggcaaaataataataaaataatcaaaatatctttgaataaaataatcaaaaaaatcaatctgacgtttttctttgtaagttaccttgaatgaatngactaataactaatgtgaaactaaggctaaaatcaactcacaaatctagctttgtccgcaaaaatcacttatatatcgctttaagtgccaacgccttatacggtcctcttttgctttatcggntaacatgtaccgtgcaaaagcataaaatcatcatgttactttgtcgctnttgcaagaattatttatgtctgaatttctcatctca

SEQ ID NO: 140797 - DNA, 327 bp, Glycine max
tcaagaattacatgtactctcaatgattaagacgaaccaaaataaatcttcgtgtcttatatgcttccattatattagctttgactaaccgcagagttgaatttatttttgttttggaaactctatttgttttgtgaaatgtgttaccattgtgtaaaagtgtttcagtaaaaatttgttattcatcttccaaagtttctatttagatgataactttgttttctttaaaaaggctgtaaatttataaatcaaattcaacctctcttgttgaatatttaccttgatctagtttctatgggttttatattcttcactctgacaaccaaa

SEQ ID NO: 140798 - DNA, 297 bp, Glycine max
  unsure (1)..(297): unsure at all n locations
gcatgctatcattactgtctaggagatgccacatatgctctagttcatcctctcatcttacaacaaaggacctatggacttcaccataaagctacatttaacaagcaaactaatataagcagatgtttcatatcatgtcatgtttattcgagaataggcttgaaatagttaacctgatccataatatgaactgtgttgaacatctcctctagtctattaatgtaaacctcatcattggcttagccatttcctttcagatcttttgagctgcatacatcatnnctaaactccatgtac

SEQ ID NO: 140799 - DNA, 170 bp, Glycine max
  unsure (1)..(170): unsure at all n locations
agcttcttacgtagcctctcttggtgctcatattatcccaaaaacaaatccctcttattactagctattntgaattctttagttcctgaatgtacaaccttaaaattgttgctcgttcccctctttgagaataaggaggatctacataggacttcatctagctgatgttt

SEQ ID NO: 140800 - DNA, 329 bp, Glycine max
  unsure (1)..(329): unsure at all n locations
gataactcagatgatgacgaanagctctaaagtctagatcacttcatgataacatagatgatgacattcaagattgagtgcaagattgagtcaagaacacttcttggatcaagatgaaatttgatttcaagaatcaagaatctagattctagactcatagattcaagaatctagattcaagactcatagattcaagaatcaatagaagacttaatcaagataagcattttatagtttttcataacattgagtagcacttgatgttntttacaaaatcattaccatagagntntactctctggttatcgantactatattattggaatcg

SEQ ID NO: 140801 - DNA, 435 bp, Glycine max
agcttgtactggatttgaccaacaagtttgtgttgattacgacattcaggaagaagaacaatagcatcatggagaagcttaaagaggtcgaaaccaccgttaagtcagatcaagagcaacagagaagaattacaaagagcaaagaagagatgctattggagaaaatgatcaaggaagccaagcaggagctgatgaagctggaggaggagaacaggacgaaggagttgctcattcacatgtttcgtgttcgtgctgagacaggaaattttcctgttcttgagggtgtaaccaagaaggagcttaaagggttgcaggatctgattaacgcacatgtgaaaaaaattacgcaagaaatggaggaactaaagaaggatgaagccacagcggtgcgaaaataatggtatattttcttataattggttatgcgggcatgat

SEQ ID NO: 140802 - DNA, 384 bp, Glycine max
  unsure (1)..(384): unsure at all n locations
atcaatcctcacacacacacatatataagcaccccttaaagtacgctagctatctgtcttttagagcaatgcaaaagaaaatatattaaatatatatagcctcattaaaccttaaataatgaaatatatatttacatttgagtntcgaaatatatcttgcgaaaaacatatagttaattaattgccaaaataagtgacaaacttagatatagntaccatgttgtgtttgttngatnccatatccaaagaattcaaaactataaaaactcgaaaatcagacgctattgagtaacttcttggtttaactttatatccatacacacacacacataatacatgctagaacccaaaatataacttnttgtcttgaaacatgctattata

SEQ ID NO: 140803 - DNA, 428 bp, Glycine max
acttaagcaccgcgctgcactgaaaagattggctgataacaattttttaacggaaaaccggggctcttttcaatggcagaacttaccaatgaacgtctgtaggagtcaccttgatttgcacaaaaagcggagacttatcagccttcatgtgttaagtgggagaatatggcctgcacaggatcagatccataaacaaaatactgctataaggattaaactctcatggaacgcatttgtcaaggacaataacttgaaagttggagatgtgtgcatctttgaactcggtcatggaactaaactaacctttctggatcacatcttcagagagacagatagttcaaattgttcaactcctccacggaggaatggatgttgcttatttattccaacaattccttatatgtctgggagatatattcatctatctt

SEQ ID NO: 140804 - DNA, 432 bp, Glycine max
agcttatactgagcaaatataaaactaaacatgtattttttacaatcctaccaaaaagaaccataaattgggagaaatatatacatttttgaaaaattttctatacaaaagttagtcataaaagacgactaacaaactcccccaaatttatagttttgcttgtcctcaagcaaagaaagaacaattcacttgtcctcaagtgacaaactcacagtggttattcatagggtgtttgttccaaagaattcaatcacatgacatgaatggcatacaatgtttcaatcaacagcttctcacaagacatgccgcttttcaaagatatgaacatgattattaagcatcacagttgaaataagctagcaagaatgacaggtatcaaggaaagatcatcaaccaaagcctcacggtcactgtttcactcaagcacaagtg

SEQ ID NO: 140805 - DNA, 394 bp, Glycine max
  unsure (1)..(394): unsure at all n locations
cacagtttcatgtttaatgttactgacatcctgctgctaatagacagttgacgtagctctacttttagntagaatattagaacaacacagcaaacaaaacactttctatgcattgagctaatgtattcaaaaaataattatggattataatttagttttcacaaatcttaagctagcatcagtaacatctttacctgcagcacttgaaagaaccctattgncatcataaggaactcgccacacagcatagtcaagtaacttattttcccttgcataagaaaccttcattttgacaacctcaacatcatcataacctattcatttcgatccattgtataatgaataactacttaagtagtattgtacttgacatggcctccatattgtngaatat

SEQ ID NO: 140806 - DNA, 287 bp, Glycine max
tatatatgggtatatatatatatatataattctccatctaacatatcgtactcatacatttgaactgcttttgtttatgaatttggaactaaattccaaggcctgactcctttggcacttgctagctaaaaaacactttttcgcgttgcgaagattccaccaacttcccatgttttcgccaacgaaaaaaagaacccctttttttattctactcatataaaaaacctcgtatttttaaattatcacaaatgtttgtttatataatggccttgttatatcattggacc

SEQ ID NO: 140807 - DNA, 318 bp, Glycine max
  unsure (1)..(318): unsure at all n locations
atgcatctgtgtntgtagctacctcatgcactcctttaatgactatagcatcatatctggcgctaaactgcttggagttggaagccatcctctcaattaaattactggcttcagcatgagtcatgtctccataggttccaccactggcagcatctatcatacttctctccatattactgagcctttcgttaaagtattggagaagaagctgctctgaaatcttatggtgagggcaactggcacatagttntttaaatctcttccatgacttatacatgctctctccactcgtgtngtctaatacctgagatatccttc

SEQ ID NO: 140808 - DNA, 415 bp, Glycine max
  unsure (1)..(415): unsure at all n locations
agctngttattactacttggaccatgctctgttctggcattggcatccgttcacctttttctttgggttctaaaaatgaaaattcgattaattccattccctacgttgacgagagtgggagaagcacgtctatttaattatgacttatgaaggtccttgtcatttttctatttgaaaaatgttttttccacgataacaatgtttcgttaggtttttttgttttactcttgattcttcatttgaccatggaaacttaatagtagttgttcagtgctttgggtcccccggggtctgaaggtatatgtatgatatttcgtattctacgccttcatatatagctggcattatttntatattagtaaaaaataaaatgtatcatcgttcaaacgaaatttatatcgacaattcgagacat

SEQ ID NO: 140809 - DNA, 300 bp, Glycine max
  unsure (1)..(300): unsure at all n locations
atattgaaaaaaatgaataggatccattttcgaactccacagactatcatgttagagatgcaccactatcacaatngancttaaatatatattgtaaagggnataatggtctctaattatgtctatatcgttccataatatatatatatatatatatatatatatatatatatatatataatatcttaataaaactcttgttgtatttntaatcaatacatttttatcttatagtnaantaaaatacaggtaacatatataagtctatggatgntatcgcactcagcagataagcacaca

SEQ ID NO: 140810 - DNA, 74 bp, Glycine max
  unsure (1)..(74): unsure at all n locations
agctngtatcttctatcaatatatcataggtttattaaggagaaaaattgcaggggccatgcaacgtttaccct

SEQ ID NO: 140811 - DNA, 328 bp, Glycine max
  unsure (1)..(328): unsure at all n locations
tactatgtcatcaacatagactaataatggcaccatataagactcagtcccaaaaatttaagaacaaagaatgatcagaatgagattgagtgtatccatgagaaataaaaaagaagacaaacttgcataccattggtgacttgcctgcttaaggccataaatagaatgttgtaatcgacaaacttatcctagttttgaaggagacctggtgaaagcatcatgtaaaattcttcattaaggtaccatctaggaatgcattgttgacatctaattgcttgaggtaccaattnttcatagccacaagtgcaagtaacaagcgaacaaaagt

SEQ ID NO: 140812 - DNA, 265 bp, Glycine max
ggatcttatacgcgcttcactttcacttgggagtagaacattatatcctcttaaggggtccatgaaattaatctttgaaaaaagagaaaaggatatgtgtcttacaaccattgtgtttaactacttctctttagaaaatatcgagctactgatggaataaataaaatttttctcacacttagagaccaagtgactgccccgatttcgcttcttggtgtgacagctcaagaaacagaatgaacatgtgtctgcgaataaaatatag

SEQ ID NO: 140813 - DNA, 404 bp, Glycine max
  unsure (1)..(404): unsure at all n locations
cacaacaagnnntccacatccacaatgcgcgcataaacccaccatcccctgtggcccaccttcaactgagctcacgtactctcacgtagcccatattctcgtttctctcaacactcgggccccatcaatcctcccaagcttccccaacatctaatgaatacaacattcacacagcacaagctatcacagccaagcaaaacatggcaaaggcagaaaactctgctcaaaacaccaaccaaaatcacagcttttctcacttaaagaccccacgaacaattccttcgatccaattcngttatcgttggatcgaatccaaaaatnnactgtgaagctctagggcataagcctacattnggatcgttgggatctactagcaaacatccagaactcattcttcactactc

SEQ ID NO: 140814 - DNA, 274 bp, Glycine max
  unsure (1)..(274): unsure at all n locations
ttggtacactaatttggaagcttctcgtatccgtacttggaaggatctgattactgccttcctaaggcaatatcagtacaatttcgatatggcttccgatcgcactcaactgcagaatatgttcaaaaaaagaggcgaaacctttaaagaatacgcacagtggtggagggaccttgcggcacaagtggctccttccatggttaagagagagatgatcaccatgatggtagacactctgccagtgttctactatgagaagctagtanggtacatg

SEQ ID NO: 140815 - DNA, 367 bp, Glycine max
  unsure (1)..(367): unsure at all n locations
ttggagaaccaagccaatcagaatgctagacgaaatatatatgggaattgaggtaacaattgcggnaatgacggaccgaggcagaatctggttgatggatgaaagcttaatgggcctcccttctaatgtatatgtgatccagatgcctacctgcaatgactacactgatgcgcataaagtcaagctagcagcagctgaattctccgactatgctcttgtttggtggcataaataccaaagagaaatgttgagagaggaacagtgataggtagatacatggactgagatgaatatggtgatgagaataatgtatgtgcccactagctataacagaaccatgcgacagaaactccaatgtgctgcccaa

SEQ ID NO: 140816 - DNA, 365 bp, Glycine max
tttaccttctcttccattggtggttcttcatttttctccatgtatctcctctcatgtcatgggcctaaatttgttaacatgattctttaaagtgttcaccgattaaacctgctgtaaaaacctgatttgaatttctatggttcaaatttcttgttcttgttcttgaaccatgaattgtgttgagtttacgttcctttgagttttgtcttgttattttttgtggctgaaacctaaaccataaaattcttacaaaaatattaaagtagaagaaaaacctcaaaatctaaagtgacttgttcacctattgtagtttggtcatagaagtcatgtctagtcatgaaacttgtcacataagaattcttatg

SEQ ID NO: 140817 - DNA, 439 bp, Glycine max
  unsure (1)..(439): unsure at all n locations
cacctaanacactcagcttcctattagtgaccaaatgaccgctgctccagcctatctattcttggttaaattgcattaacaacttttcatccctagaatgcacccccatctngcgacaatacatcttgatatgggtcttaagaaatttcgcccttttgtttttgncaaaatcaggtaccttgaattttgtgtggatgatgacatccggnaccaagcaaagatttgtcatgttcgcgaacggatagtcaccaaagccttcaacagctctcaatctctcctcgttgagatcgagtnnccttctttcttccgctgcctgtgtgtgtgccttctatggacaagaatttttgatgtgccgtgttgatgngccgaggtattgtgtttggtgtccgcccctcaacgtggatattgttgttaaactgactccgcttaggatactctc

SEQ ID NO: 140818 - DNA, 462 bp, Glycine max
  unsure (1)..(462): unsure at all n locations
ctgaggcatgcaagctnggagaggatgcttcatggagganaagattgatggagataatgagagaggggggagcacgaaatcgaaggaagaaaaagggagtgaagttgaactttgagttgtgtctcacaagactctcattcattaaagctacaacaagtgttacacatgcttctatttatagactagggagcttccttgagaagcttcttgagaaaacttccttgagaagcttcttgagaaaaccttcttgagaagctagaggttagctacacacacccctctcataactaagctcacctccttgagaaacttccttaagaatattcctaatgaagctatagcttagttacacatacctctctaatagctaaactcacctccttgagatgagaagcaagagcgtatctatagacaccctataatagctaagctcacccccattgacaaaatacatgaaaatac

SEQ ID NO: 140819 - DNA, 442 bp, Glycine max
  unsure (1)..(442): unsure at all n locations
tattaagatgctncctctagaagcatcctcgntgcttctctgataagctacatccttatctatccacccctctattaactaaattaacttccttaaaaataattacggatgaaaataacgcaacaaataatcaaacatcaaacataattactaataatatatagatatatatatattttggngttacaacaatcacttagatcttgtctaggtaaactttctgaataatattagcttatctctcgtgtctactcctaagatcagtgcgaatcagatcactctcacattttatctctagcatgcattcatatcatgcatcgcataagcatcttttcatggcatcataatgaacatatnatncctgcttgtttctgctatcatataccaacatcacatattgcttgagtcattgcatcatcatgcattagcgngcaacatactt

SEQ ID NO: 140820 - DNA, 413 bp, Glycine max
  unsure (1)..(413): unsure at all n locations
caagctttctctctcttcactcagcctttcactttttttacagctcgctctctccctgacgtngccattttcttctacttcattctccattgaagctccaagcaaagcttcaacctttggccatcatttctgccccaaattgcgaaaggagggcattttcggggtcgtgaaaggcgtggctacgaattgggaccttccaaaattcaggtttgggtggactactttctctcttaaatctcgtgggtatggggttatgggagatatgatgggtagtcttgctatttttctgcttcatgatacttatttgtgaagaaacttcgtgaaagcttgtcgaaattgccatgtttggatgagttaaacatacccattctgattcaaggttcttatgaagatgcttgtgatggtcatgttct

SEQ ID NO: 140821 - DNA, 376 bp, Glycine max
agctgccaaaatgaggaagcttatttttttttgtttctaacggaaatggggggtgcctttcataacaagaatactgattgttagtttttcacgtgtgtattcaagagcaaaacacagaaacacacagaaatatactttccttctttcggcttagtactgtgctgaacaacactacaatctattatgtatgagcatttcgtgggtacaactaaaaggagattttcaagatggcactttgttttcttctgcttaataacttcctccacaaacttccacttcctggtttcttagctggtacaatggccaaagaattatcaatggttctgtcttcgtgatccttaacaccattcaaaactagaaatcttttcagaggctc

SEQ ID NO: 140822 - DNA, 421 bp, Glycine max
  unsure (1)..(421): unsure at all n locations
gcaagcttgctgatntagttntcgccgatgaatagttcttattgggtctaaaaagacgcaaatctgatcatcatgctttgataaatacaaaaaaactatggcaaatgaagatggtgagaataagggagaaacccatgttgtgactgccattcctatacagccaagtttcccaccaacccaacaattgtattactcagccaataacaaaccttcttcttacccaccacccagttatccataaaggccatccctaaatcaaccacaaagcctgtctaccgcacttccaatgacgaacaccacctttagcacaaaccaaaacaccaaccaagaaatgaattttgcagcgaaaaagcctgtagaattcaccgcaattccggtgtcctatgctgacttgctcccatatctacttgataattcaatg

SEQ ID NO: 140823 - DNA, 385 bp, Glycine max
  unsure (1)..(385): unsure at all n locations
ctacacgaaggagactttggaaaaatcttcggtttttgntttcaatggtcaagncaataatatcaagaaaggagactttatctcttcaagaatttaaatcccatttttatgtacattggctccgcttaaggtatgatagaaaatgactgcatcaatatagtggacttagcacctccaacatgaattatgattccatacatacaaaaattaccaccatatgcatcttgagtatatgttgccatgcgaatttgaggtttaactntataatgttatattcttcgccaaatattgtatattgatatggngataattgcatcgcgcatccacgacataaggaataatatattattttcaaattgaacatcanattcacttggccacatat

SEQ ID NO: 140824 - DNA, 398 bp, Glycine max
  unsure (1)..(398): unsure at all n locations
agcttgcttaattacatcgtgtttgttttttgttggacgatgaacgccatanatgctttgggagtagtgtaccacttaaactaactttccaaatgtttgcctttgtacgaatggccctccacgaagctttgtctcactagatgtccaagaaggacaatgtgggaccaacgaactaaattctctcctgagtaccactgccaccgctttaagagcgttgtgcaccgatctcgcttaaaagccacttaaggatggttgtatatccgtgagcaacaccttcaactcaaagacgacgagtgtactgactcccaagaatacatagggctccggcggcgggcaccactgtttactcccatggtcaagaatgatccatagactaccctctgaatttatgccaatgc

SEQ ID NO: 140825 - DNA, 227 bp, Glycine max
taaccgaaacctcacagaatatacttatgacactacaaaatataccgtgaaattggtatattgagatacaacttacacatggtctacacactaaatgatgtcggatgcaccgactatcagcacactgaatctggaatgagtgttgtagtacaaacatgatggcatgcgaactcaaatgaaatggcattgtgggcgatatgtcgttgatttctacgagaccaaataac

SEQ ID NO: 140826 - DNA, 353 bp, Glycine max
  unsure (1)..(353): unsure at all n locations
agcttttattntcagtagatgaacattaatcttgttgttttctcatggactcctgtaagaacaatagcatcatttcttgcactgaattgttgggagttggaagccatcttctcaatcaaattcctagcctcagtaggggtcatatcaccaagagctccaccactggcagcatcaatcatactcctatccatgttgctacagtcctcatagaaatattgaagaaagagttgctcanaaatctggtggtgaggacagcttgctcacaatttcttgaatctttcccaatactcatacaagctttcttcgctaagttgcctgatgcctgaaatgtcttttctgatggcagtgatcct

SEQ ID NO: 140827 - DNA, 440 bp, Glycine max
  unsure (1)..(440): unsure at all n locations
agcttagaattatacaataacactttttgcccgaccatgaagtccttcttaattatcatgctatcatggaacttcttggtcttttctttgtagaactaggcattctcgtaggcttctaggcggatctcatctaactcactcagttgcaactttctttcctcaccagcttgatccatagagaagttgcaggtcttcactgcctagtatgctntgtgctcaatctccattggaagatgacatgcctttccaaagacaatccgataaggagacattcctatgggtgctttgtaggcagtcctatgtgcccaaagagcatcatcaagcctggtactccaatctttcctgcttcgctgcacaatcttctctaaaattctcttgatctccctgttagagaattatgcctgtccattagttngggggtggtatggtgtggataccct

SEQ ID NO: 140828 - DNA, 314 bp, Glycine max
  unsure (1)..(314): unsure at all n locations
tcatcaatctcgntccacctaattacagtttttggacacatattcactctatcaatnttctctttattcatcctgtcatttacaatcgagtcttgagcttcagcaagatcttcccgagctttggccagctggagtttcgnatgagcaaatggtntngactaagnacctaataattntcttaatcttttcaatntcttccacatcgctaccataggactaccatcaacagtggctatccaactctatgcgatagcgncatcaaaacctggcatgcttggcacacaatngagaaacttaaaattcctcttcctgca

SEQ ID NO: 140829 - DNA, 437 bp, Glycine max
  unsure (1)..(437): unsure at all n locations
gcaagcttccaggattatttgatgattccaaagactcaagtcaagaatcaagagtcaagcaagtttcaagaatcaaaaagtcatttaatcaagaatcaagattcaagtaaagaatcaagagaagactcaagatatgcaagaaccattaagataagtataaaaagagtttttcaaaaatattgaatagcacaatttttccaatagaattttttcaaagaaaaatccttttaccagagtttttactctctggtaatcgattaccagaagcctaaacagttttataactgttttacaaaggagtaatcaattaccatgggcatgtaatcgattaccaatgttttgaacattggacttcaaatttcaagagtcacaacttgtgataaaactttntcaaacttgtgtaatcgattacacaacatttgtaatcgattaccagt

SEQ ID NO: 140830 - DNA, 406 bp, Glycine max
  unsure (1)..(406): unsure at all n locations
caactttcctaaccaattgtccttcagaatttactgtttctttttgctaatatgtaaatataaatagtataaaggtattgcttatggacatggtcttttttacccctaaggacaaaatcaaattttacttgtaaaacaaaagttgaaaagaaagatattgagctggtagacgaggaaaaagcacagattggtgctgatcattctagtgcaacctctaataaagctgagatttataacgaggaagcacgaaatgcaacacagaagcataagccaaagagggtggagagtgtcaatgctgatgcacaagcctttggtgatcactgganaattctgattgctttatgcattctgaagctgaagcactataacatacgaagaaaagagatacaggccatcanagtgtgtc

SEQ ID NO: 140831 - DNA, 343 bp, Glycine max
  unsure (1)..(343): unsure at all n locations
aatcttatattactaaggatgaagctgaaccatctatgtctttggtgctcgagaataatgatgtcatcgacaatataagttattttggcgtnactcatcaaatataaatcacatatgtttgatgactaatcgaatacaaatcatattttggggcagcaatgcttntcaactaatgctgagtctaatccatatntattgggatccaatacaccaacttagtgcaatttggccctgactattactcaattggatgacataccattngaagatntatcattaatacaactatcctctattacggggaccaaacatatcaagactgattgatgatgaagaagcacta

SEQ ID NO: 140832 - DNA, 348 bp, Glycine max
  unsure (1)..(348): unsure at all n locations
actgcttggaagtggaaaccatcttctcaattaaatttcttgcttcaacaggactcatgtcttcaagggcttcaccactggcagcatctaatcatacttctctccatattactgagtccttcataaaaatattggagaagaagctgttctgaaatctgatggtgggggcaactggcacatagtttcttaaatctctcccagtactcatgcaggctctctccactgagttgtctaatacctgagatatccttcctgatggctgtggtcctggaagcagggaaaaatntctctaagaatactctcttaaggtcatcccanctcgtgatggaccttggagcaaggtaatac

SEQ ID NO: 140833 - DNA, 443 bp, Glycine max
  unsure (1)..(443): unsure at all n locations
gctntgatttgcttctgcggtatatactacctggattttatgcttgtcaggaaaccaatgattattgtattatagtttgtgtgagataggtatgttttggtatatgtattggggttggggcaatataaacttgattctaaaagtttgtgtgatggactcttggttgcggttacagctttttgatgaacttgtttttttatttttaatgtgttgggtatcttgatgcttataattaatgtaataattggtcaaatgtcttgtatggttttgcttctcatgctagttattaaaccacatattttgtggtgtgattagcattatttccaaatatatatttccttctcatttgttctgttgtgtgtaattggacatattaatctaaaagatttgtcgatattttcaaagatgctccatacctaacacttgagtgtcanaactttgta

SEQ ID NO: 140834 - DNA, 399 bp, Glycine max
  unsure (1)..(399): unsure at all n locations
aacacatatttctgattataactatccactgacaggacacccttcattctgtataggtcatctcctttttcttcaatcactctctcaagcctatcgtcaacctagaccatcatttaacgtacagtgagaataaaaccattaacaaaagcaccaatgatgtaaccattaaagcaattcatgaattaagactatcttgcgtaggcttaaaaagatagagtagcaattacctcatctagatctagagttccctctgctactatactgacactggagacagctgaatcatgcacatgtgcatgatgatgatgatgatgccctttgtgttctgntgatatatncggaaagaacaaggcatgcacaacatattgagtaaaaaattctggaacatattcgatcatc

SEQ ID NO: 140835 - DNA, 419 bp, Glycine max
  unsure (1)..(419): unsure at all n locations
ttaagtcacctgcggcatgcaagctntcataagtgaagtcaggtgcatccatctttcttttatttctctcatgagggggagggtgtgccatgttctcantatgagaattancaactgaatgctcaaaatcaaaatgttcagaatcactatccacagaatgttcagaatgcacaaaatgcttcaaatgcctcaaatacacagaatgatcaggatgcacactatgcctaaataatctatgaaaggttctatctatttcaggatgaaagggttgtaaatcacctggattgcccctagtcatgcattatatgcagcaaatcatgtatttctcaaacaagcaccaggggtaaaaagggggtaaaactatggctaaaactacaactatactcacaagatatccaaattagcttaaaatttgtgaa

SEQ ID NO: 140836 - DNA, 173 bp, Glycine max
  unsure (1)..(173): unsure at all n locations
gcaaaaataaataaataaaaaatcaacatgtatgatgcatgaaatagatacacattaaaccatacgnatatttttggttgaatacaatataaacaaattagactagtttagttcaaaaagaagaaaaaaagaaatttggacttttttgcactttggaatattttgaaactagc

SEQ ID NO: 140837 - DNA, 406 bp, Glycine max
  unsure (1)..(406): unsure at all n locations
agctgtagagttatgtctcatatcagtttatttctattatagtatgcncctaatcgaatatactgttgttttttaattaaagactgaattaatcaagaatctctgcttcaatcgattaccatgtgatataattgattacttctctctctttaagtgtttcaaaagggaacaagaacactttaatcaattactttgagtatctaatcgattacaatgttcttgggctgtttttaagttttgggaagaacaatttaatcgattaaaaagataatctaatcgattacttcattgaattaatcgattacaagcgattatagctatttttctctataaatagccaccttgtgttctcttcagcaagatagcaaaataagcttttgttgagttaaatcacatgttgtattat

SEQ ID NO: 140838 - DNA, 347 bp, Glycine max
  unsure (1)..(347): unsure at all n locations
agatgtgaagattattctattctacacccgagttcctacatatactaagaggggaaggagctgcatcaacttcttgggattttggcagatcttgtagccttaatctcnctgagttcattaaagaatgtggcggatttatctacaccttngtgtcatccagaacattctttttagagtttttttttcattttacatcacttttgttattattttattgatacgaaagtagtggttaatttttattattaactgtgagaacacaccataaaaatntttcctcccatacgaattattttatttctaaaatcaacattcaaatattaaattacttggatcactcaaaaaca

SEQ ID NO: 140839 - DNA, 76 bp, Glycine max
  unsure (1)..(76): unsure at all n locations
agcttttgtgagtaaatgcaacatcacgttgtttgatgtgcnttgagaactcattgagcataccatgactttccaa

SEQ ID NO: 140840 - DNA, 88 bp, Glycine max
  unsure (1)..(88): unsure at all n locations
acacaagaaactcagctttanagtatggatgctattgagnnctaaatcacatccaataacgtgatgttgcatnnactcacaaaagctn

SEQ ID NO: 140841 - DNA, 443 bp, Glycine max
  unsure (1)..(443): unsure at all n locations
agctnttcgcttaaccacctttcctatctaccttgcttaaaccaaaggtacccacaaaatcagaagggaagtatggtagaagtaatacaactcaaaagtggggtatgacattcaaggcaaaatcagcaagagtttattgtttttactctgaattaactaatactaaattttcagtcttcaacggtacaattttcagatttcagaaacaggatgtacactcttttctcaccaatttaaaactactataaatttataatggaataaaactatgtacgtcattgcaaaagagaaactatacatgtgatgtgtcattaacttaaaagacaatgaattaacacaaaccagctgcctaataggtggagaataattggaccactagatntaattaatttgcttcacactcaccaatgacgagagttcaccatcaagccaattgacaaaat

SEQ ID NO: 140842 - DNA, 416 bp, Glycine max
  unsure (1)..(416): unsure at all n locations
atgtgaattatgacgcatcaacaagaatcaagccaaggctanttgtgcaagcaatcaatggggcaaaacacaccaaangattataatgatggatggctcaaattctcacataatgtaactcatcactttcaaattgagctntcataactatgatgtcatgtatagaagaatcaatgatttcaagtcacataatgtcaataacttttattttcaaaacaattacccatttcttgaacatatcctataattcaaagaataacatgtatattcttacgtgcacacaaaattgacccaaatatagtaactgaaaatccgactaaactaacaacattaacaaattaacacaactaacaaattaacataaccaactaaactagcanaaccaaagaacatctccctcccatacttaaacaaca

SEQ ID NO: 140843 - DNA, 372 bp, Glycine max
  unsure (1)..(372): unsure at all n locations
ctgcaagcttgtaaaagtaaataacaatatatgtttatctcattaacttaggggaaaaaaatgtcaatttatgtaatctaacaagcgggcctaaagtccagtaggaaacttaatgctactttagccgtagtccaagcatgatgacactttagtcgtagtcgatacataatcgatcagtatgactcatatgaattacgtcatttatataatttntgtgaattacataattcatatgagataatccgtatgactcatatggatcacatatgccgtataagtatacgggttatgggatccgtaaaataaaaaatacttaaagatatttttgaaattttattttaatgatgggtgcacaaacaatatgacttgatg

SEQ ID NO: 140844 - DNA, 437 bp, Glycine max
  unsure (1)..(437): unsure at all n locations
agcttgtcatacacatcgagtggtttttcaacttatatatacgagtaacatccaagggagtttggatccgttccccatcgagacacaagatactgaacctaaaagtccaacaaataaagatgttagggtcctcaagtaggatgcagacactaaagaaagcgaacttttagtagatgatgagcaatctatgaggacaacattagaggtggacttactggcttagaagaatttggaaacatcttcttgagctgttgcattacaaaatttgcggctgcttcatcagatagcttctcaatgtcataagcgaaccttccagctaccatgtagacaaaaacaggatggcctgttgctttgtgaagaatgagaaaatagccacaggtataagaggtcggagcaacagtgcccaagagttctacattanggccaaatactttgtc

SEQ ID NO: 140845 - DNA, 294 bp, Glycine max
  unsure (1)..(294): unsure at all n locations
aattcacatctattataaaactcatacagaataatacataatgtatcaaaatccaatgcagaataatagatttcagtttaggtgacaactctcccacttttaatgaattaatagatggatatgttcgatcagcattgaattgacaattcataatactttggccattagctactaatctgaggcaacaatntaaaatgaatgatatngtctcctccaccccttttcattggtctgatcattattgtgnngaacaanactaacttcctttggatccactgccacataaagcaaaag

SEQ ID NO: 140846 - DNA, 439 bp, Glycine max
  unsure (1)..(439): unsure at all n locations
agctntcataagggaagttaggtgcaaccatcttccttagagtcctctcacgaggtggagattgagccatgttctcagtatgaaaattaacagccgaatgctcaaaatcagaatgttcagaatcaccagcaacagaatgctcggaatgctcaaaatgcacagaatgcacagaatgattaggatgcacactatgcctaactaatctatgaaaggttctatctatttcagtatcaaagggttgtaaatcacctagattgcccctagtcatgcactagatgcagcaaatcatgtatttctcaaacaagcaccaggggtaaaaagggggtaaaactangggtaaaactacaactatacttaaacgatatccaaatgagctaaaaatttgtgagcaacaccctcaaataatgaaaagatagcacgaaaattttcagacaaaaat

SEQ ID NO: 140847 - DNA, 336 bp, Glycine max
  unsure (1)..(336): unsure at all n locations
actctcatccacttatgatagccgtctatgatcccatnactgcttnccctaagctcttttgcctttcttcacgccgcatcccatgcctggcgaactccttggagtaccctcttgtttgtggncactgaaaccccatgcgatgaatggcgngatgctntcgtctgatggcactcctctcatgggacatccttcgcatgaagatagaatcctgagtcttccttccttctagcgagggaaccatntaacagacgcccctccatgctagcctagatttggtgcacaacaaacaatnctggcgccgctcttttcacatttcctggctatcgtngcatacat

SEQ ID NO: 140848 - DNA, 345 bp, Glycine max
tatatcgaaacgctcgaaattgaacatcggaagctctcgagaaattcaaatggtcatatctattcactcgggtgtgcgatttaagcggcaaatatatcgagacgctcgaaattgaacaaccgaagatctccagatattcaaatggtcataacttttcactcggcggtccgattcaggcgcataatatattgagacgctcgaaattgaacatcggaagctctcgagaaattcaaatggtcaatacttttcacacggaggtcagattcaggcgcatgatatatcgaaacgctcgaaattgaacatcggaagctttcgagaaattcaaatgggcataactttttacac

SEQ ID NO: 140849 - DNA, 137 bp, Glycine max
  unsure (1)..(137): unsure at all n locations
tctttagcccaaaactcactgatcttagtggatatcctcttatgactatccgccccctaaaacagcttttctctcatgcttatgaaacaccttgtgattcattggnctaacctccagctctctacaatctgactaat

SEQ ID NO: 140850 - DNA, 199 bp, Glycine max
  unsure (1)..(199): unsure at all n locations
tgatgttattttgattggaactggttctgagttggaaattgctgctgctgctgctgaggatctaaggaaggaaggaaaagctgttaaagttgtttcttttgttagctgggaactttctgatgagcagtcagatgaatacaaagagagtgttctccctgcttcggtaacagttagagttagcattgaggcangatcaaca

SEQ ID NO: 140851 - DNA, 459 bp, Glycine max
  unsure (1)..(459): unsure at all n locations
cgacctatgaaactcagcttaatatatttgctgtacaaacacgctaaaatcttttatactattctctcattggaacagcaaaagctatatagacaatagatttgaagtgctttggatagctctatccatgactatttggaagcatagaaatttatgtgntttcaataaccagattntcaaccccgaataagncatggatgaagctnnattccacatttggntatggntttaatgnatggacatagatntccatattcatttcaacctatggtctactagcttgaaggagtagctgncctttggggntctttcctttttggtntcagctatcgggttnatgcatcctatagttgggatcggcaattatctgtcttgatctntntaatcctctcttcagacatctagactgaaaatatatatatactgattttgctggcaaaaaaaaacacgctacacctt

SEQ ID NO: 140852 - DNA, 389 bp, Glycine max
  unsure (1)..(389): unsure at all n locations
gtatccctaagctcttgacctttacttgatagaacctttttttaaaccaagggtgttgacttgatcccatgttttactaaagggaaacaaaatcagtgcgaatcaaaacttcgacatctatcatgggtggaatggatgaatgcataatgaaatgcatatgatacaaatgcaatttatgaagacgggagcccgggaaattttctccttcttagatacaacgtttggggtagcaaagtgtccgacgtatgtatttaagaaagtgacacggaccttccgttggtttgctaaagaaaggggatcaagacaaaacccgtgcatgatgcatatgcgagaggcataacatagggatgtacataaacaaatataagcganagggtacatgacactta

SEQ ID NO: 140853 - DNA, 370 bp, Glycine max
  unsure (1)..(370): unsure at all n locations
tcgtaagctgcttgatctgaatctagccntacaagaaggatctacacgcgaaactcggtttaatntagnctaaacctaagagggctatcttaacngggcctagnccaacaagatggatctgangatgaagcttggattgattcggnctgacgatggatctaggtntagnaannnacgctacaacatagaacacaagagcatgattgattatcgaaatatatttatatgcatcatctagtntatgataaagacccaacatttctacctactactgtcacttttactttgcatttcatagatntagcatataagtctagtttagattctgcttgaaantatcaatcatacatgtnctctcaacaatgcttca

SEQ ID NO: 140854 - DNA, 337 bp, Glycine max
  unsure (1)..(337): unsure at all n locations
gctacatactttctctatcacagctaagctcactcccatgccgaaatacatgaaaatataaaaaaagaccctatatcatagactactcaaaatgccctgaaatacaaggctaaaaccctatactactacaatggccaaaatacaatgcccacaagattgataaaccacttataacatctacaacgaagattggatccaacctcgacccatgggctcaaaaatctaccctaagggncataagaaccctatggccttctttaatagctctagcccacgcctcttgtattctacnatccaacacctttttggtttggatcgcaacagcccctccaccttg

SEQ ID NO: 140855 - DNA, 389 bp, Glycine max
  unsure (1)..(389): unsure at all n locations
agcttcttctccatcacccacaaccactagtagctcccccaaactgccatagttctctggtgaaaccctacaccgagaggaacccttcaatcggggcgaaatcttccaaacttgcctcgtggtttcggttgaaaaccaagcccaatctgaccttcatggttttcttcgaggaaccgtgattctaagctttttccttggtattttaagcttatccttgcatcattttctgactttggaaccaccattgtaatttttacgcttcctttggaaaaccctagagaaagagactttgtaaaagttatccttttctgaaatgggtgctattttcgtgaccttcactgaaccccggtcgcattggcgtgatcggaatntcaaaatgatgcttcttt

SEQ ID NO: 140856 - DNA, 345 bp, Glycine max
  unsure (1)..(345): unsure at all n locations
aaaaactcagctctataaagctgaccatttatcaaaaacacatttgagtttattcagaaaatagagnnatctctcttatcttagggagagtgaatcncctaaatncttgagtgattcaagaacacccttgctgtatcaaaggactttcacaacctttttgtgttgccctcgctggatagagngattctttcctctctttcatcatcacccttgttctttcaaaccacaattccagaaaatccacctctgcccaaaattatctcgtggccataactcccattttacgcactcaaattaagggattcttgagcctaaattgaatttcaaaacgagacctttcatctc

SEQ ID NO: 140857 - DNA, 370 bp, Glycine max
  unsure (1)..(370): unsure at all n locations
agcttgaaatgaggaagtgtggaagggtgagacttttcttcttttatntgtgaccacagagtggtacctggagatatgtcgcgggggtcaagagaccttggggacgtcaggtggggtgctattgcccaaaaccaagcttgaccaatcccgacccaacccgggcatagtcactcagtgagaacctgtgatgtacctaaacaggcgagctcctggcagtcaacagataaaagaacaaagaccacaaagcaagggggcttgtatggtggctggccagctgtgaatcttgtgtgatatatgggatatggcctctggtaatcgattaccaagggtgggtaatcgattacaaggcttaaaagtgaagacaggaagc

SEQ ID NO: 140858 - DNA, 62 bp, Glycine max
tatatatatatatatatatatatatatatatatatatttatgtattatttaatgtatatgcc

SEQ ID NO: 140859 - DNA, 410 bp, Glycine max
  unsure (1)..(410): unsure at all n locations
gcaagcttactaactaattagaccaacccttttattttttaacttaattgacccaaaagaaaaattaatgaaatatacaaataaaaagtaaaaatatcacaaaataaaaaaattcccaatatttagcgggataaaatttcctaaagcattaacacgtgtcttaataaaactcagaaatattaagttaaataatttagtaatgaaatatgtttttttttcacaaaaaatagttttaattcttaaaattagtaaaaataaattattttaattcttatttttcacttccctgagaatttaaacgaaattttcgtaattttgagtattaaatgaattgactttcgtatttttagaatntgatataatataatgcgctgctactcatttaataatggtatgggtttactttattt

SEQ ID NO: 140860 - DNA, 139 bp, Glycine max
tctctttttctattatgttatttaagcaatgccacatgtctccatttgagtggagccagaatggcccactttctcttttttactgtgacccatactcagccactaaagtgatgaaaagctgaccttctaaacgctaaaa

SEQ ID NO: 140861 - DNA, 373 bp, Glycine max
  unsure (1)..(373): unsure at all n locations
agctnnttgaaaagacacatctcttcaaaccattttttaaaaggcagcgagggcctatatatgtgtgtgtctgacttcaaaaagcaaaaaaacgagagatattctaagagaacttaattgtcaaatgctctctcaacaactcttgggcaaacacttgcaaatctattgataattcatctaggaacttcaaattgaattatcatctctaaaagagagaaattcctctaggattttaaatttgtatcatccactataaaggagaaaaatctttctgttaatcttagaaagttagttataaccaagagactggctgtctcttggattgtgagaattataattaagagaagggttgtctcttggagaatattgaaca

SEQ ID NO: 140862 - DNA, 271 bp, Glycine max
  unsure (1)..(271): unsure at all n locations
atgtatggggctcccgttgcggtggattggtgtcgtggatggagnnntaccagaaccatgtccccttcggtgaagtggagctcgctgcggngcttatctgcaaagtccttcttgtgtngnngggccccgagcatatngnnttgcaagattttgaacatcgagtcgcgatcagncaacctggtgtcgactagcgctatatttgaatnncccgtcacgcatngaggaatgttttgtggnnncttccctaagggaactcttgaaggagacatgc

SEQ ID NO: 140863 - DNA, 303 bp, Glycine max
gacctaagcaccgagctgcactgcggggggctcttagtaattttttttcggacaaatggatataccatatgactttaaaaatatcatatggttttttttaaattcaaataataacatatttgttaccattacaagaaaaatgattcaaaacatttacttgattgtaaatcattttttaaaaaattaaagatgcaaaacattcattttttctaataaatggtaatttttctacaaattgtcaatactgttttaaaattaaaattgaattattctattatgagttcatttttaagaatcttttaa

SEQ ID NO: 140864 - DNA, 301 bp, Glycine max
  unsure (1)..(301): unsure at all n locations
tgagattattaagngnntaatggtgaaacctcctgctatattgttgacacagtagggacctggagatatgtcgttgggggcaggagaccttgttgacgtcaggtggggtgcnaangcccaaaaccaagctngaccaatcccgacccaaccctggcatattctgtcagngagaacctgtgatgtacctaagcaggcgagctcctgtgcagcaacagataaaaggaaaacaagaccacaaagcaatgaggcttgtggtggctggccatccgtgaatctcgatgaatatgtgtatcgcggcctc

SEQ ID NO: 140865 - DNA, 403 bp, Glycine max
  unsure (1)..(403): unsure at all n locations
agcttatcatgcactacttgaagcagcgaactatttacttttgtcactccactcatatctggccttcacattaaccagacttaacaccgccgacaacaacgtcaaggaaatcttgcaccccaaatacaaaggtttctttgaattagtttgcaatgtatcatacataagggcatgtgcttgctgaaaagactcttgtccaaggtcacgaatcatatcctccaagagatctcccatttctacattaaacggttcagattgggacccactctgcatgtctgtcaattcactatgtcatatccacgtcgtataattcttcttaatttcatcacacaacatagctctatcaaaatgctcattctcaactagagcaagtgtttttgtttattttctccatagntcattc

SEQ ID NO: 140866 - DNA, 300 bp, Glycine max
  unsure (1)..(300): unsure at all n locations
ttnntggtcaatggacacaataaatatcctgccatgagtaatggcccaatgttgatagccaagcccaatgccataagctctttctcatatgccgacctggacagatttctgactcccaacgccctactaaaagaagctatctatcgttttgcttgcaataaaaaggcccctataccactcccagaggcatcacactcaatnacaaatggctcactaaagtcatgtagagccaggacatgtgcttgagtgcgcttctctttcaattcttcaaaagctctttgagtttcattcccccactta

SEQ ID NO: 140867 - DNA, 359 bp, Glycine max
  unsure (1)..(359): unsure at all n locations
agcttgaaaagagaaaatgtagaagggtgaaactttctgcttttattcgntgaccacagagtggtacctggagatatgtcgcgggggtcaagaaaccttggggacgtcaggtggggtgctattgcccaaaaccaaacttgaccaatcttgacccaacccgggcataatcagtcagtgagaacctgtgatgtacctaaacaggcgagctcctatcagtcaacagataaaaggaacaaagaccacaaagcaaggaggcttgtgtggtggctggccagctgtgaatcttgtgttatatatgggttatggcctctggtaatcaattaccaaggatgggtaatcgattacaaggcttaaaaatg

SEQ ID NO: 140868 - DNA, 348 bp, Glycine max
  unsure (1)..(348): unsure at all n locations
agcttggtctctgcttgtcatctggcccgccgtctctggatgacaaaagggtgcgaataaccataaggtatctccgcgtatcatgggtgcagaatgaccaaacttggtctctgcttgttatcaggcccgccgtctctggatgacaaaagggtgcgaataaccgtaaggtatctccgcgtatcatgggtgcagaatgaccaaacttggtctctgcttgtcatcgggcccgccgcctctggatgacaaaagggtgcgaataaccgtaaggtatttccgcgtatcatgggtgcagaatgaccaatcttggtctcttgttgtcatcnggcccgcccgctctggatgacaaaa

SEQ ID NO: 140869 - DNA, 286 bp, Glycine max
  unsure (1)..(286): unsure at all n locations
tgcacagntccacctggcaaaatatagaacactgtaattcaatatcacgaatgatatataagnatacaccatggtaatcgaatccatattcaaaacatgaatcagaatgcctaaaatcgcatagaaagagaaacacacactaaagtgatggagaggcctagaagagaaccaaaaatatgccaaagagatgcatatgaagaatgggccacccttgtgtctgaacggtgggatagaataagctgatnccctctcttttctactaatttttcggaacaaatatagtttt

SEQ ID NO: 140870 - DNA, 263 bp, Glycine max
tcaatttatcaccataattaccaaaaatgaaaaagcctcagagaatgtgggaaaggctatacaagcaccaaggtatgataaatctcaaactcgatgttataaatgtcaaaagattggcactatgcttcaaaatgtatattcgccaagaataaagttgaggaggagactaactatgtggagcaaaaggatgagaagttcaaatagtgctcctagagtgtggaagtaatgaaggtagccaagataacacatggttccttgacact

SEQ ID NO: 140871 - DNA, 190 bp, Glycine max
  unsure (1)..(190): unsure at all n locations
gatgtcgtagtagaatctaacgaagctgcttcaaaatattagcatatgcgtcaagaataatcctagaccgctacggcaaacaatgacttgattcgagattcactaaagaccgagcccctgccttaaatatattgcttncataacatgcaaagctctggaaatcgagtatcttgtagtggcctccttgacc

SEQ ID NO: 140872 - DNA, 451 bp, Glycine max
  unsure (1)..(451): unsure at all n locations
agcttagacgatagtcgataagagacagaaagaattgttcttttataaagagtttaatatttatatattactatttaatcataaattactatttaaattaccttaagataattaattattttaaaaatccatcattaaaattatcatacatgatggatatgattgaataagtgtgtaaaacattttacactttcaatgcatatataaactttttttctcaaaaaagaaatagaatatatatatatatatatatatatatatatatatatatatatatatatatttaaattctaagtgtaattgaattcaacaccggatgattacngtggttaattaataaacagaaaaatagcccggcctaagtaaatgctccagcctgtctagttccattctcacnccgtaccaccaaaacactaaaacctcactctttttatattcatatactcctact

SEQ ID NO: 140873 - DNA, 312 bp, Glycine max
agctctcttattaaacaagccacttaacctatgcttacctaacgtgccgcaaatgaatataattttggagtccaaaacataagtagggagtatttagtcaatacacctgatatgatgtaaatcccctccttttccctccaaatccccccaatattagaggcaagcaaaaattgtatgtgaatggattttgctcccctcccctctcaaaaaatgaaataaacgtatattgttgataaaaagcttgttcttatcctcccctcctataaaaagaactaaacaattaaaatggataaaaatctcatctcatcccct

SEQ ID NO: 140874 - DNA, 444 bp, Glycine max
  unsure (1)..(444): unsure at all n locations
gcttatgcgcatatttncttacaaacgntctcttgttttatatattctattgaccgaaaaaaatgcacccatatacaatcaaggcagcttcgttacctagattatgtacacgtacttccgaggagtatttgttacttacatcacacacatcttcttggctaaattcacatacatgcatactcaaagcattttggggttccaaaaattgcacatgtgcacatcttggtatttctaatacctatacatacacaaacttcatgatgaatcttgactatctacacaataaggtgctacatttcatgctcttttcaagatgttgctacctaaagccgcatgcaaattcaagtatattttcctttgctgactaaaattgtattcaaattaagaggtatacatttntttgtaatgtatcttctntacataacatgccacatatttatgtat

SEQ ID NO: 140875 - DNA, 413 bp, Glycine max
  unsure (1)..(413): unsure at all n locations
ctcctgacccccgcgacatatcttcaggtaccactctgtggtcaacaataaaagcatgaagantcacccttcaacacttcctcatctcaatctagtagaaatatgggggacccatcacatgtgtgactaagtggcgggcgggcgatggagcacaacaagctntccacatccacaatgcgcgcataaacccaccatctcctggtgcccacctccatctgagctcacggactctcacgtagcccatattctcggttctctcaacactcgggtgcccatcaatcctctcaagcttccacaacatccaagcaaaacaacattctaacagcacaagctatcacagccaagcataacagagcacatgcagataactctgctcaacacatcaaccanaatcacagctnttctcacttaaa

SEQ ID NO: 140876 - DNA, 387 bp, Glycine max
  unsure (1)..(387): unsure at all n locations
actacttaattggcatggcgggcttncttcactttcctgtctccaacgcgagctctgaccactggccttccttcttccggagcttcttttcatgtccgcctgagtgggctcatagcctaaaccatacttcccacgatttccttttgtttntatcaggctagctatgccgcctttgtctttgcctaaacccatcctcggttcattaccgnnccccaacataactcgggccatcattaccgtcgcatcggacagataagggtgcccaaagattggagccacggaggaaatgctgaccacctcaaaagactggatatcggntnctaacgaatcttctgcggcttccacataaggcatggtcgatgggcagcttaccaagatatcttcctc

SEQ ID NO: 140877 - DNA, 411 bp, Glycine max
  unsure (1)..(411): unsure at all n locations
nnagcttggtgcccttaatttgaagcaatattttacatccccataatgtgatccctgacatttcctttgactccatacttcatggaaattaagttatgaagaagagtacttatttccgccttatcgctttttgcaaagtgcttttcaatttcagcaaggaattctttggcactagttatataatttgaaatagtgcccctaaagacctcatgaatgccatgcttaatgatcataagactcatgcaatttgagtgatcccactttttataaagtttcctctgttcagaggtacttgaatccttaggagaagggggtttctcaatccttaatgcaaggtctagatccatgcagccaagaacaatntgcatgttctctttccagtacttaaaaattgtaccattaagaatcgga

SEQ ID NO: 140878 - DNA, 418 bp, Glycine max
gcttctgtctttttatatgcctaacttatcctatgttactccgagctaacgagcatggacccatatgtgaacgcgtgattttcttgtttgaaaaaaaaaaggatgcacaaggttagcttgcctgggcgaagttagctcgcctgggtgagcaccccctgcacgaaaaaggttaaaaggaaagggaaggggtgagtttttcacccaaaacttcttcctctcatccaaaaaatgtatgctcactggatcccttggatttccagccttaggtcaccatttctcaacgttttttgattccattttgcactgttattcatccccaacaagagatggctccgaagaagcattccacaaagaggtccaggagggatgcccagggggaaagctccagcgtctccgtggagttcgacagtcaccggtt

SEQ ID NO: 140879 - DNA, 443 bp, Glycine max
  unsure (1)..(443): unsure at all n locations
agcttcttatccaaggcaattcttggtggtgaatctccttcttccttggcttattccctagtggatggtgcctcccctcttctcttctcctttgccttccgctgcatctccatggtgaaaaaccaccattgaaggacctcattgaagctcaaagatccagcctccatagaagctccataagcaagctttcatcaagtggtaatcagagcacaagagcttcaagtaggtgctctttaaacctccattaattttttgctttaccttctcctccattgttgtttcttactttttttctccatgtatctcctcacatgtcttgtgctaaatgttgttaacatgattctttagattttccaccaattaaacttgctatagaagctagatttgattttctatggttcaaatttcttggtcttggtcttgaaccatgaatntgtgtgagt

SEQ ID NO: 140880 - DNA, 412 bp, Glycine max
  unsure (1)..(412): unsure at all n locations
ntgatttgagncatcaagagattatttatatgtgaccatggcttgagnnncaacaataattatcatcatcaatcatctatctttcaatcttctctcaacatcattcaatatctttcaatnctttctacagaattttctgattctttttctcttcatctttcttatagtnttntatcgacactttntcttcaaattaaagntttttgncaaaatcttgtgnnattcatcttttncattctcttctttctttgccaaaagatctatggactaaccgcctgaattcttttgtatctctcttctcccttttccaaaagatctatggactaaccgcctgaatttttttgtgtctctctntcccctttcaaaagattcaaatgactaaccgccttagatatttttngattcttccctt

SEQ ID NO: 140881 - DNA, 445 bp, Glycine max
agcttcaaaccacagcaacacaaaatctatgtatccttaacccctcaatttaatggattttctaggtttgagaagtgaaattgagaatgggacaaatttgaagccaactctcacctcacacaagtttataacatcaatttaaacttgttcaaactggatttacgcctaaaatttcactgaatcaaaaattgactcctcaacacccaatttaccctagaaatggctctttgttcactttggtcatttgtttttctctctagctcagcctaacctttctcacatgttctaaatggcatttcaagctaggattaactcattttaacctccatttaccacaggatccagatttaaccttccaactctcaaagcctcactctttttccactcataacaccacattctcactttctaaccctaggttaactctacccttcatctctaacag

SEQ ID NO: 140882 - DNA, 432 bp, Glycine max
tgcagcttaaaattgaataaaacgttctttttcttctggtaatcgattacctaatcgattacacattgtaaaatttgaattcaaatttctaatggctgttataaatagtttcaaatcattttggtcactggtaatcgattacatcctctggtaatcgattaccaaaaagtaaatatcttgaaaaaaacattttaactcatatggccaaacctcttgctgtttcaacttggaattccattcctatgtctctagagattttcttgatgttgtatcttgaatttcttggattcttgtcttgaattaaacttgagaagcgcatgatcctcttaaattaaacttgagaagcacatgatcacatggcatcatcaaaacatcaaagtctttgcttctacaattacaacatcccatactctttctttatatatatatata

SEQ ID NO: 140883 - DNA, 217 bp, Glycine max
  unsure (1)..(217): unsure at all n locations
aaattctcttcacactcacttatggngatgcacatattgtttgatgtggactaagaagcaacatccaatataaaaaccaatacaaatgccactcattttagtcgagtcatgtaaagacaaaacatcttcatgctctcctcctagcttcaagctattgactttatggnncttccactatctataacatatctttcttgttatagatcttctggacact

SEQ ID NO: 140884 - DNA, 431 bp, Glycine max
agcttcaccttctggtcctcctcatatttgttttatgagaaaacatgctctattatcatctcccactccaagaaggcctccggatcattctttcctttaaatggaggaatgttgagtttaataccatcaattcggttttgtctaggaacaccatcattccctcttgtcctcctttcttcttcattatgatctctattctacatttgatccaacctgtcatggagcgcatcatctcgttgtttcattaacctctccaaatgttgcatcaaagcatgcatttggaattgcgaaagccccactccatcattatgattagtacctgacatctcaaacaaacaaatcaaacgtgacaagaccattatagttgttggttgaatacctcacccactctagtgtatcacacaattatggcttttcttgatgaaacactc

SEQ ID NO: 140885 - DNA, 240 bp, Glycine max
ccatatatcgagacgctccagatctgttgttgaagctctgatccacatccagcgacaataactatggacgctgatgtctgatagagtaccctaacataacgagacggccgaaattgattgtcgatcctcggagctaattcatgcgagcagtaacttatactttgatgatcgtgtgagtctgtccatctcgagacgctcgcaattgaatgtggaatctctgagccaattcaaacgacaata

SEQ ID NO: 140886 - DNA, 341 bp, Glycine max
agcttgaccatataaccatgtacagattgtctagattattaataaagcaaggttttttatattgttgacaaatttaattgaaaataaaattaatattaatcatttcaaaaagtgatttaactctgtcttcgcgcatgataattaatattgtagacaatttttttatatggtagaaataaacatgtgaatcaactctgccttcacgcatggaaagataaacatatcattttaaaacatttcattaaactctgtcacctcacacctagagttagggagagaaccacaatccttaaagctatgattgcatgtgagctatagaatgttaagctgacatggataag

SEQ ID NO: 140887 - DNA, 480 bp, Glycine max
  unsure (1)..(480): unsure at all n locations
tgttgataagctggaacctgatgatgatcccatataccatatgactntgatgatctcgtaacgtttcctcaagactatgcaggtgtcgtgggatgcaactatgtttggagtgtgcaatcataatattcccttctacataaagcatgaagatcttggggaaatagcacactgtagccaatgtctgaacattgttgttatacaattgtggattatataagtacatttaaattatagtattacctatgattgtattaaattgatcaatattttacattattacaacaaaaatatgcatacaaattacttaagtatgcaatcgaggaatccttctatgtatggactccttgaaccacaatccatacagaaatcaagacaatcatcatttgaatgtgaggaatatgttaaaaggtggatgcagaattcacagagagatgtctacttatgagccttattgaatgagtaagaaaagcttaaaagata

SEQ ID NO: 140888 - DNA, 451 bp, Glycine max
  unsure (1)..(451): unsure at all n locations
agcttatgcgcatatttccctacgaacgttcacttgttcaagacatcctattaactaagaaaaatgcacccatatacaatcaaggtagcttcattacctagagtatttacatgtacttccaaagcgtattngttatttacatcatacacgccatcttgtcaaaatttacacacatgcatactcaaagcatttcggggtaccaaaaattgcacatgcgctcatcttggtatttctaatatctatacatatacaaacttcatgatgaatcttgactacctacgcaataaggggctacatttcatgctctcttttttttttcaagtttttgctacctaaagccatatgcaaattcaagcatatcttcctttgctgactaaaatcgnattcaaattagaaggtatatatttttttaatatgtttccttacataacatgcacacatctattatata

SEQ ID NO: 140889 - DNA, 431 bp, Glycine max
  unsure (1)..(431): unsure at all n locations
ccacatggtaaagtagtatggtctcactgtttattctttttatttctcaactttataatagaaatatataattgagaattttattgaaggattaggatcccatgcagtgataaagtcataagaaccattcccaagcaacaagagacataagagggtcatgttttttcgccttataggtaaggtacacatatagtcaaagtatttcaattttcaaataaaaaaaaggatgaaattgaagccctaaccttgtgtccccagttttagttttatcaattaaagtacttggcatactgatgaaaactgcacttgagtttgactcacaaaattgaaaccaaagagtgaactgccgaatttgaagggagaaatnggcatttcaaccaaaaattaaaagtcaacgtgctagaatattcaaagaatatatccnctcaaga

SEQ ID NO: 140890 - DNA, 454 bp, Glycine max
  unsure (1)..(454): unsure at all n locations
agcttctcaaggaggtgagcttagttatgagaggggtgtgtgtagctaagctctagcttctcaaggaagttctctcaaagaagcttctcaaggaagttttctcaagaaagcttctcaaggaagctacctagtctataaatagaagcatgtgtaacactcgttgtaactttgatgaatgagagtcttgtgagacacaactcanagttcaaattctctccctttntcttccttcaatttcgagctcccccctctctctttctctccctctttcttttcctccattgaagcatcctctccaagcttcttatccaagggtcatcttggtggtgaagctccttcttccatggcttattccttaatggatggcgcctcctctcacctcttctcctttgtcttccgctgcatctccatggtggaaaatcaccattaaaggacctcattgaagctcaaagat

SEQ ID NO: 140891 - DNA, 453 bp, Glycine max
  unsure (1)..(453): unsure at all n locations
ntntgaagttntctggttntctaaaccttgaaaacttgtgctattcatcttttcattctcttctccctttgccaaaaagaattcgccaaggactaaccgcttgaattctttttgtatctctcttctcccttttccaaaagaacgaaggactaaccgcctgaattcttttgtgtctcccttttcccttgtcaaagaattcaaaacgacacagtctgagaattcttttgattctttcctttccctaatacaaaagtgttcaaaggactaaccgcctgagaattcttttgtatccccattcacaaagtatcgaaggtttaacagcctgngatctttgtcttaacacattggagggtacatcctttgtggtacaagtagagggtacatctacttgggttgttgaatgagaacaagagagggtacatcacttgtggatcagttctagtggagggtaca

SEQ ID NO: 140892 - DNA, 458 bp, Glycine max
  unsure (1)..(458): unsure at all n locations
agcttggggggatatgagagagatgaggtcttcgaatatgttgatgatacaaaacgtactaccagatttgtattctttatgggcgatggtgctcttacatggagttctaagaagcatggcattgagacactttctactataaaggaccttcatatctcttcagatgagaagacgagaaactatatgtgacggctggtatattggatatcatagtcttcttatagggtgttaacctaataggattctcattactctctaataggccaacactgacatctgctcgnttaagtccatatcatttgatttgggttttgattgcctaacggagggatcatttattagatcacatatgataaaactcattaatgataaatagctaatataattgtcatatcatattagtccacatttattattggaatggagacatccaacaattctctacttgngctacatat

SEQ ID NO: 140893 - DNA, 478 bp, Glycine max
  unsure (1)..(478): unsure at all n locations
tcttanggaactggtagagatgtgactatcacttgttttactacacacgtgagcccgcttagaggtaagggatgagtttatcgcattggggttagagtgaacatgtgtagggatccttataggattaaattggtgtttattttgggatgtttattgaattataattttcctttacaattataaatacaatattgttngtgttgacagaccaattgatgttctgatgtgaattggttgataaacttgagtgcccttggtattttcgggtttttgacctatgattctgattcattgattttaatatgattgtgtggaattatttgaagggttttactccccatgttgtgagatgtactttgtataaattgttatattgagattatgaaatggtgattcaaattgtgagtaagtgacaagttgaacctaatatgaatggtgagatacatgtgtattgagatgttgtatgtattgagttgtg

SEQ ID NO: 140894 - DNA, 449 bp, Glycine max
  unsure (1)..(449): unsure at all n locations
agctnttgcgatcattaaataatgtgaatattgcccgaaagagataatgcatccatatctttaaccataaaccattgttgccagctctaagtcatgggtaggatagtgcacttcttgtggtctcagttatcttgaagcatatgtagtcactctggcatcaaaacataaccaagtccttgccttgatgcatcgtagtacactttgaacctctttttgggaccaggaaaaaatcaagattggtgcagacgccaacttcttcttcaattcttggaaactcgcatcacaagcctcattccacacaaattcttggccttttcgagttaacttagttagtggtagtgctaaatgagagaatccttcaataaatttcctatagtatcccgccagacccaagaaacttctaatctctgtaggaattgtaggtcatgcccaatgcgtcacagcttcaa

SEQ ID NO: 140895 - DNA, 483 bp, Glycine max
  unsure (1)..(483): unsure at all n locations
gctttgtactcacccaatctgccttcagttaccaatgtttcatccttgataaccgtgtgaaggttgttgtcagaccctaatttcgttcgggtataatgtttttatcattcggatatgatgttttgttcattgctaatcgaattacggtgtttggcaccggttgcagcgcaaggttgaagggtctcttanggttgatgtttgattgttagatctgaaaacaaaagccataaggaaaggggcaaaatggtcattttatggaacttctaggcctaaacttgcccaggccagcatctggctcacctgtgccatgggaaagcttcagcctgaagcaaccaactcgcctgggcgagctgaaaccttcaagttgaattaaccaacttgcctgggtgagcttcccctccaccaaaatgggcctttcctataaatagtcatacangggaaagggttcaagggttgggggaaaattatgaaagaaagaaaaac

SEQ ID NO: 140896 - DNA, 102 bp, Glycine max
tcataatattcccctatccaaaggcatgtagatggtggcgagaacacccacttgagaccaggtaggaacattggggtatacaatcgtggagtatataaggac

SEQ ID NO: 140897 - DNA, 424 bp, Glycine max
  unsure (1)..(424): unsure at all n locations
tagcttgaggatcaaaatggggtgaatcttctatganagtngatggngtctgttcggatgggaactcaagcagatgaagcctttcctgaggcttggcattcaaatgcatcagaaactagtggtgaaaacatngctcacactcgttccaaggtatatatatctcccaggctttggtaccttagagttaatgtgattcaagcccaggatttgttgctaaaaaatagtaatgatttgttgctaanaaatagtaatattggtaatgactcgggaattgtaactcgttggcaagtgtaccaaatcgtcacaagtagtaaagtcttcggaagtccgaatgtcgaatccacaaggactttgtttgacttagattaatgcacatccacattaaaagcatgagataagaattaaaataaatataatgaaagat

SEQ ID NO: 140898 - DNA, 472 bp, Glycine max
  unsure (1)..(472): unsure at all n locations
gaagactatngtagtggactcctcacagctgtcttatttttataacaagtgaattctctnttctgatgtcaatttgacaacagacataaccattcttaggttctattatgaggaacctttctgataggtgtttgaaaaaccattaaaataatcattttaaagtttactaaaaatgaatcacatcacttaagttcatcatccttttaatttatattggtagtgatttgttataattaaaacaagtacgttttttcaacaaaaccaactcaaaacaaatcaaccaaactaaaagtttgtactaggaaatcggttcaggaaaatattttagccaataaagtagcaagatgagtaatatgagatataattgtaaataaaaggcattcttttatttgaaaaaaaggggtgataaaaaccaattgtattgcatttatataccagtcatatttagttaaatataaaaaattaaatgaat

SEQ ID NO: 140899 - DNA, 431 bp, Glycine max
agctgttgttggaccttggcagacctttatctcatccttcaagatcaaactgtctactcgagatcggttcctttcctctctccggagcttaagctcgctgttactgccccacagagcccttcaaaatttgtttcggccgtgttcttccctacgagccctcttggtctcttgctacaatgccttgagggtagctgtatttacatctctcagtctggcattctcctttcgaatcttaagagctgttgatttgaacctttctttgactgatcgagcttgctcgagttctgccctaatggcctgcacctgttcatcttcctgcggagcctcaacttccacccctttagtggttctcagactcgggagccaatccaaaccttgcatgcgtgctctcaaccacttatggtagccgcagatgggcccgatgctactgt

SEQ ID NO: 140900 - DNA, 485 bp, Glycine max
  unsure (1)..(485): unsure at all n locations
ngaccaggaattatntgtatgggttggatgttgaattctgtttgttcctggtgcggagatgatggtacagagggtgaaccangagctgaagtttcttttggtgaggtagccatggaaaaacagagcgtttggaatgatttcgtaaatttctgagagctgttggggaatgcagaaaacgagattaacacgaaaatataagtttgaatgaggaatgtagagggacgtgtaaagcaacggttgaatttgctttggttcagtagtgaacgtgctattaatgttaagtgattcatttgggcacgttcagatatcagtagttgctacaattcctctagcagacaaatgcccagcttgcccctcagtttttcaaactgttttgcatccaatgcctttgtgaaaatatctgctattngttcctcagtgtcaacatgctccagtgtgataactttatcatcaacaagctctctgatatagtgatgtctgatgtc

SEQ ID NO: 140901 - DNA, 190 bp, Glycine max
cggggggggtttttttttaagggaacgcggggaggggaagaagacggcccccacgccccagagacctttgggagggggaaagatgatacataaaggtctcaggaacctactagggggaagtcttataaaagaggaggggcataaaccagacgcttttagggggctcctagaaaacaataagtgctagaac

SEQ ID NO: 140902 - DNA, 430 bp, Glycine max
  unsure (1)..(430): unsure at all n locations
agcttcaccanatgcgaaatcactcctgccttccctatcatcaccttctcttcctccctattttgcgataactgaatcaatgtgcacaccgcattctcctttgtcgtcattgtctctctctccaacgttgccaccagcgctttcaccgctccataagaatgcaaggtagccgccggtgaaggaggtggaaggcatgaaaggagtcgtcgaagaggatgggaaatgagacactgtcgaggagagcaatgactctagggtttgaggaaatgaaacgaccgggtgatatgttggttctgaaggagtggagaaggggttctgttttagggagtggatcacaacatcgattctatataaccggtgttgcatgagtattgacgatgcttagattgtgatattaacatcgatttnttaaaaactgatgtaaatgata

SEQ ID NO: 140903 - DNA, 470 bp, Glycine max
tcatgctcgataaacaacaccatctgctcctcgttggtcgacatggtacgtttctattatgatgtgatgttgtgatttatgtatagctgtaatgcatagattgcgttgaggttaacattatacttcaggtagattcatgcaagactactagcatgaagttgttctgtgcaaagaaagtcgcgtcgcttcattcacggagaagcgtccgagtctaacatgcatgctatggttgaatggaatgagcgtggaatgtttatgatgacacatcttacatctgggcgatggtagtccccgtcaccctgcacataggtagccaatactttgttgaggctatgtattgaacatctccatacgtggtatggaacatggtaagcgctgatcaatctacatttgaagataatctgagaagagactgtggacatacttcttgctgcatgaacacgacttgaacttgaatacgctcgagccga

SEQ ID NO: 140904 - DNA, 458 bp, Glycine max
  unsure (1)..(458): unsure at all n locations
agctngcttaatcacctcattaaggactagaacaccttgtgngatgtgtctgtttttgatgaaagttgtctgcctctcatcaataagaccagatatcacttgtctcaatctatttgctaataacttagctatcaccttgtacatacatccaatcaaggagatgggtctgtagtcatcaaatgactggggatgtttaatattgggaatgagagctatggcctctagggaaactgccatgtacatggaattcatcaacaaatcttctgaactcagcttttagcatatcccaaaattctttaatgaatttgaagttgaaaccatcaggtccaagacatttgtccccatcacaactccatactgctgtcttgatctccaaatctgaaaaaggaacaaccaaagacttcctctgctcctagtttagtgaagagaaatgcactccatcaagagtgggtctacaa

SEQ ID NO: 140905 - DNA, 487 bp, Glycine max
  unsure (1)..(487): unsure at all n locations
tgcttgtggagcttctatagaggatggatctttgagcttcaatgaggtcattcaatggtgattntacaccatggagatgtagcggaaggaaaaggagaagaggagagtggagacaccatccactatggaataagccaaggaagaaggagcttcaccaccaagaaatgccttggataagaagcttgaagaggatgctttaatggaggaaaagaaagagagaaggggggagcatgaaattgaaggaataaaagagggagagaagtggaactttgaagtgtgtctcatatttatagactaggtagcttccttgagaagctntcttgagaaaacttccttgagaagcttctttgagaaaacttccttgagaagctagagcttagctacacacaccctctcataactaagctcacctctttgagaagcttgcttaagaagattcctaaagaagctagagcttagctacacacacctctctaatagctaagct

SEQ ID NO: 140906 - DNA, 382 bp, Glycine max
agctagtagtcatcctcgaaggtgtgtgatcgtcatggcttctacatctttggtttcctcgattgccataacaatgtgctcaaatttaggatctaacgagcatatgatcttccccatgattcttacatcttctaaattctcaccatttctttttagttgatttgaaacaacgagaattcttgaaaaataatgggaaatggactcgaactctttcatatgtaaggattcaaactctcctattagagattggagagaaaccttctttactttatcttctctgtcgcaacctaccctatgacgggggtgcgaaaaggccaagatgatgaggccaaagcgtttgtctccaagggagaaaacgagcagagtcaccaccaacgtttat

SEQ ID NO: 140907 - DNA, 462 bp, Glycine max
  unsure (1)..(462): unsure at all n locations
tgttcttgattntntctaagttctntaacaagctcagaactatatacttttccttcattcaactgtctttgggtttggcggccacgatcaacaaagtactttcaacacctactatatgttgatttgaccaacactattatcggtatgttgcgacaatccttcaaaaccttatttatacaatctgagaggttggttgtcatgtggccatatcgacatccttctctatcataagccatcgtccatttttcctttgaaatgcgatcaatccatgttgctatggctggactcagttgacggaatttttctaaattatgataaaaaaaaatgtgcttgcaagcagtgtagcctgcatgaaattagttagcaacaacaattntatgtatatatgaaacttaaattaacgtgaccatcataaatgaaatcttacccaatctcttcaacatttcttttttgttggcatta

SEQ ID NO: 140908 - DNA, 443 bp, Glycine max
  unsure (1)..(443): unsure at all n locations
agcttctcaaggagatgagcttagttattataggggtgtgtgtanctaagctctagcttctcaaggaagttttctcaaagaagtttctcacggatgttatctcaagaaagctcctcaaggaagctacctattctataaacagaagcatgtgtaacacttgttgtaactttgatgaatgagagtcttgtgagacacatctcaaagttcaactactctccctttttcttccttcaatttcgtgctccaccctctatctttctctccctctttcttttcctccattgaagcattctcttcaagcttcttatccaaggcttatcttgatggtgaagctccttctttcatggcttattccctagtggatggcgcctcctctcacctcttctcctctgacttccgctgcatctccatgttggaaaatcaccattaaaggacctcattga

SEQ ID NO: 140909 - DNA, 425 bp, Glycine max
  unsure (1)..(425): unsure at all n locations
ctcagctttccatggagatntcaagaagtggaaagaagagaatttatattgtatggngtgtattttgagaccgtatcacatgaggaaagtgagattggcagggatatttaaggaagaggaagtaaaagttatatgacatcatgagagtgacaagagtcgagggctagataagtttaacttcaaattcatcaagtccttttgagaatttcttagaggggatatcatgaagttcatgagggagtttcacacaaatggtgtcttacctagaggagctaattctatctctcatcactataatcccaaaggtgaaaaccctcaggccttgggaagtnaggccaatctcattgtgggggcatgtacaaattgtgccaggtctaaaaatagataaaaaggtgctcctaggtattgcaaaagcaaacacttat

SEQ ID NO: 140910 - DNA, 289 bp, Glycine max
tctcccaaaatacaatgaccttgactggtcttcctaatacattacctaacgagaatgatctgacttactagcgagtagtctgtttactcatgtactcacgggctcccgacacgaatctcactgaccatggtccacattgtatataacacacgaccctagtatacctattacacatcatttgcgtatagacagatagtcactggcagagtgaaattgtgttagatcatcgagtacgcgaactatgtgaaaatgaacgacacctgctgtgtagtgatgtgacgttcaccac

SEQ ID NO: 140911 - DNA, 472 bp, Glycine max
  unsure (1)..(472): unsure at all n locations
aaatctcagctaaacatgaacgaagtgtctgcagtcttacttcttttgtatcttgnatgcttgcactagttcttttgctttacacactaactcagacaaaatgttgacccaatatgcttctcagttcaagaaaaccatggttacattcatcattgactcttggacaaggaattcagggaagtaacaactagttgcaagtaaaacttacatattattatgaaagaaatgagcttatacccttggaatagatctatcttctaccaaattgagttttttgagggcagctctagtgcatttggatgtacatgtgtcaatattagacatgacacataaccaacaccgtatgaaataacatcaagcataaatacaggagggagttgatgctcttatttctttcataacccaagaagaagataacgatcctctatattatatgaaacatagagaaaggcccaaccaaaccataatgaaa

SEQ ID NO: 140912 - DNA, 405 bp, Glycine max
agcttgaacctcgagtcgtgattcttgattcatgatgctcgatccttgacatcaaattacctcttgaaccttgaagtgttcttgattcaatcttgaacatcttgaactcattctttgattctatgagatcatcatctgtgttactatgaagttgtcttgaccttagagctttatgcatcacctctgttatcattcaaaacttctcttgatcaatcttgattcatcatgaagctggcttctaccatctccccctttttgatgatgacagcttctgaaatcaagatacactcacacacactgtttcctagtcgatcactctcataaatatccattcttccactttgtttttgaatacatgcttctcttcaaattatgtcgattactcatgcgagatcttgatttatt

SEQ ID NO: 140913 - DNA, 464 bp, Glycine max
  unsure (1)..(464): unsure at all n locations
ctaagcttgacacatacttggctcatgggccctcacgtgctcatatttcttctatcctcaatngccacccacaaacttggtctcgacggatagagaagcaattcgcgaacgtggcttgaacattgcaagagtcccacgacaccaaacatgtatatatagagcctgagggtagacccctatgtacatttttcattgatcccacacatagacacataaacaccttaaagcaccactgacttgctcgtcagagtcccttttgcaagtacctccctcgcgttcaacaccggagattggagattctagtgagaaggaaaggaccaaatagttaagttggacccctcagaaactaaacatgaacattgggcgcccactgaaaatatatatctaccgccactaaatggtagcaaccaacagaagcgatcccagttcatctgcatgctcctcacaagtctagacatcaacaa

SEQ ID NO: 140914 - DNA, 439 bp, Glycine max
agcttactgttattcttcaatgttcttatttcacaggaaatgaaaaaggtctccaaccacggataaatctccaggttcgcaatagatctctctgtctatgcttgtactacagacaattttgtttttctctagaaagtgggttttgacaatagattcaaccaagctttttgccttctcagagttgtaatgttatcaattcctcttatggactctgaagcctaaattgatcttaagatattttcagggatatctgctagggaaccccataacaacaagaaatgaaggaaatgatcaaatcccattcgctcatggaatgggacttatttctgatgaactatatgcggaaatagaagtattcttttttctcgttatttttaagaagtgttaaaagaaatgccaatatttcttagacatctaccatttatgaacagccacttca

SEQ ID NO: 140915 - DNA, 466 bp, Glycine max
  unsure (1)..(466): unsure at all n locations
tcgatcttccaccactgccgccaccatcatcttagaattatattttaatattattactactttgattttcagccttgtattttggctatattattatggtatttgaacaatttactattttccctatttgcatggtatgtttgaacaaatattaagtaagttatttgactatatgggttttatagattgttgctacatgattcttgcttcattgtttgattgttagtttctcaatgaatgttgtatggatgtttagttatgtttgattatttcaaatttgatacgcactttgtatttttgttgatgccaaagggggagagaaatgggattaaatcaagaattcacatgagtaatcaacttatttntaaaataagcataaattcaaaaacaaagggggagaatntatgtgagtgatcgactangaaaaaagtgtgtatgtgttcttgatttcagaagttgtcatcat

SEQ ID NO: 140916 - DNA, 428 bp, Glycine max
gcgatccttatagtcacctgcggcatgcagcttattaataatacactattatagtctcctactccttccatgagggattattttttctcagttccctaattttttgtgttgccttatcactaaccttataaggcttgtataagggtttttctatagggatatatgacgaagattcttcatgacttttctgtttaggagatcgccttgttttaatggattcccctcacacttgtagatatttattggtgtaattagcttgttccattaggcatttaatgtctttggaagctatttctttgttaacatctttttgtttgaacggtctggccatgacaggttcatcattactgtcttcgactcttactagttggtattgcgttgtgggaggtaagtccgattggattaactctccatccttgattgccaat

SEQ ID NO: 140917 - DNA, 459 bp, Glycine max
  unsure (1)..(459): unsure at all n locations
gacacataaatctcagcttgctgtagaattaccagaacttcattgaaaaaacactatattctgactaagcaagaatgtctcagaagaggttcgacatgctacaatgtacaaaccaaaagtgttcacctccaaacaaataaattcatacttgctcaatttcaatttcattgtctgcagcttcagagcatgttgtgagtgaaaaactttgacaccatgagctgagcgttttttggaatttgatttcagctgctgagaagttttacagtttgaatagtgtctgtcattagcaacatgtcgccatccatattgacttccatgccctcggtgctcataagaattcccgttgattgattgttaagaacgagttgaaatcatagccctcacatgaatgcgaagatgtgtaccatccttgctttctataactttcaagtgcatntgatcattctgaatatcacaaat

SEQ ID NO: 140918 - DNA, 206 bp, Glycine max
  unsure (1)..(206): unsure at all n locations
ctcagctccactccagtgnccattcgagtgcctaacgggtgttatttattaacgatgacaaccagtattcacttcaagctgaccgacgagcaattcttggatgaaatatactaccggcagcctctcacgaatgcctgttattaatttcagcttccatgcacgcaactgaaagatgatgctgatgttaacacaactttcatgtgtaa

SEQ ID NO: 140919 - DNA, 441 bp, Glycine max
  unsure (1)..(441): unsure at all n locations
agcttattaatactgtggtgtaatnatgctttgaaagaaaaagatgggacaaaatattcacttactatttgcatgtttaataaatgaagatcattgatgaagatagagtgagagcagtctctatcatttaccaagtcatactttcaagatcgagaatatggacatcactgaatagcttcctgctcatatcttctccaccaaacaatataactcttgaaccaaccactgaggcacactgtcccataaattgaaacatatacaaatatttacaaagaaatttctctagtttcatttcttaggttcacaatctaaatggcatataaaaacatactctcttccacagcttgaagctgcttgaaagccttctcaaggtctaattcttcttgctagaagcaaaaattgatgtaacttgatttaacaccaaagatgcttaaagaactg

SEQ ID NO: 140920 - DNA, 452 bp, Glycine max
  unsure (1)..(452): unsure at all n locations
ntaggccctctnntgttgccgaagaggtgaaaagtgtgtctcgccaaaactagtagatgttgaatttgtttgaatttagatcattcagtcctaatcctagagaaacattagcttatgtcaattggtggtcatcgactgtcaaggaagaactcttcccttgtgggactttgcattatatacttattgccaatgatcaactccgagctaatcttgatgttgtctaaatgcatgttccactaccatctcccccacaagtgacttgtgtttcatccaaacagaaaacaaagtttgttgggatcaccattggaacacctcggctagatacaatcaactcagtcctttattttttgtttgcctttgtatatttcaaataattgttgataactcctaagtatgaactatnnttgataatgaaaatatcctcaaaagtgattatctagcagttattcatg

SEQ ID NO: 140921 - DNA, 404 bp, Glycine max
agcttctaaaaatagtctgcaactgctattttggttgcaaagtcaagaatcacacataaaaaaacaaaagagtggcctacaaaaaaatctctattttcgttgaataatacatacctgaattttggcttcccaccattcatcactagttgcaatggttttcttctccccatcccagccaagacctgtgtccttcccaacaagcttagcccataatttttgttcctttttcaaagaatcccacctatttctgaattgtttatattcatatctcaaatttgtcgccttatttaactcttctgcaatatttgtccaaccaagcttagtgaagaggttgtgaggtctatttccagcattcacctcttctatgcacactttcaacataatctcaatattttatcacacca

SEQ ID NO: 140922 - DNA, 442 bp, Glycine max
  unsure (1)..(442): unsure at all n locations
tctcaggaagttntctcaagaaagcttctcaaggaagctacctagtctataaatagaagcatgtgtaacacttgttgtaactttgatgaatgaaagtcttatgagacacacttcaaagttctacttctccccctcttttattccttcaatttcgtgctcccccctctctctttctctccctctttcttttccttcattgaagcatccttccaagcttcttatccaaggctcatcttggtggtgaagctccttcttccatggcttattccctagtggatggcgcctcccttctcctcttctcctttgccttccgctgcatctccatggtgaaaaatcaccattgaaggacctcattgaagctcaaagatccagcctccatagaagctccacaagcaagcttccattggagctngcatcatgtggtatcaagagcatcttcatc

SEQ ID NO: 140923 - DNA, 461 bp, Glycine max
  unsure (1)..(461): unsure at all n locations
agctcgganaatggctagacatgatacatgtcanggtttggttnggttcaaagataaaagggatgccccacattatttccatgacacaaatgcaaaaatgatgatttggaaactttatgcaaaactggtcatgcatgcacctatgtggacactcaagtgtcaaatttctatggtcatgtgatgctagggctcangattcatttcctctatttttagtcaacccaatgtttccaaaatatgctcttttatcaatttgtgcattcatccgagtccattatgggcgtccgggaaaaattcacagcattcacctttcaggtgtacacacatttttgtcaaaaactagttatgatcagtgaattttttcaaagaaaagttggaagtcatctatattcaaaagcatggtggtttttcagctcgacaaactatttttcctttttctcttttgtttttcatttgtcaat

SEQ ID NO: 140924 - DNA, 462 bp, Glycine max
cgctctaaatatacattgatgtctgtatttataggagggttgttgtattccatttatgttttaagggtagcatttcttggtaaaaactaactttccaaatgtttgccttcgcaggaatggccccgaggaagcttgcctcaaagaggtccaggaaggacaatgcggccgaaggaactagttccgctccggagtacgacagttaccactttaggagcgctgtacaccagcagcgcttcgaggccatcaagggatggtcgtttctccgggagcgacgcgtccagctcagggacgacgagtatactgatttccatgaggaaatatggcgccagccgtgggcatcactggttactcccatggctaagttcgatccataaatagtccttgagttatatgccaatgcttggccaacagatgatgcaagctccattggagcttgtaggcctaggatcttcttcatcaatg

SEQ ID NO: 140925 - DNA, 461 bp, Glycine max
  unsure (1)..(461): unsure at all n locations
agctngaagaaagtttgtcttttacatgcccaactttcttgagtggcatttgtatcgattgttgtattgtgtgttgcatcttantctctatcatttcatacgcgcatcatgcatcatcatgtaggagtaagaagaaaagtttctaaagttagaaaatttcttttgagtttaaaactctctgttttaatcgattacaggcttatagtaatcgattacatagttctgtttgagacaatgattgattttttcaggagtctttgctttaatcgatgactaggtgatataattgattacttctcttttaaaagtgttttagaagtgatcaagatattgattacattgagaatctaattgattacattgttcttgaaagtttntccagttttgggaagaacactntaatcgattgaaatgataatgtgatcaattacttcttcgaaataatcaattggatcgtatat

SEQ ID NO: 140926 - DNA, 475 bp, Glycine max
  unsure (1)..(475): unsure at all n locations
tgtcatttcatctccgctctntgtcgagtggtatctgagccttatatccaacttggacctgttctgactatcctcgtggatacccaacttcaaattcttcgaaaaagcatcatagaacttgttgtaatcttccttgttctccgcaatttcattgaacatctcaatgcacttcttcacgagattcttcctgatcaccttcaggatcttgttttgttgcagcatctcacgagagatgttgagcggcaagtcatcggagtcaacaacacctttcacaaatccaaggtactcangaatgagctcctcacaattgtccattataaacaccctcctgacataaagcttgatgttgttcatcttcttcctggtgtcaaacaaatcaaanggtgccctcttctggacaaagaggatggccttgaactcaagctggccctccacagagaaatgcttcacagccaaatgctcttctcagtcattg

SEQ ID NO: 140927 - DNA, 484 bp, Glycine max
  unsure (1)..(484): unsure at all n locations
tcgatggagaacaaccttaggatgcacagggtacacacactgtgttataatatagcgtgagcaaaataggttgcgtctaataaaatttaaattgtcaattcaacatcgattntcaataaaaaaaaaactgatgttaacaaattgatgttaactttaacatcnggtttattcaagaaatcgatgttaactgatcatacgttaacatcagttttcagaaaactgatgttaacgaactaaggttagcatcagttntctgaaaacccgatgttaactaattaatgttaacatcnagttttccataaccgatgttaaagtcacttcattaacattggttttcttcaaacctgatgttaacgtatacacattattcacaattatgccaccacgtttatcttaacatcgatnttttaaaaaaccgatgttaataaagttttgttatttaccatcttgccattgcgtttttgtaacatcggtttatcaaaac

SEQ ID NO: 140928 - DNA, 458 bp, Glycine max
agcttatcaaaccactgaagggggcggatttcataattctaaacaacctgccatttaagtggcaaggcagaataactcattttccagaagaaaatcctatcctcaaaaaaatataaactctgaattcaattatgtagaatcttattatgtgatttttatcctccccttcctatctcaatctcaacaaccttgtatcctgcctatttgtaggcacaatgtaggtttaaaatagacctaagcttcaatggtttctgcaacaaccaaagccactaatctccaacgacaccaacaaaaacatcaaggataaacatacaaagcaaaacacagccataccagcacattacactttcttgacacacacatgccaagtccattaagcatattagtgaagcccagtatacatatttgtggatttcggataagatacttaaccaaaaagaaaaactgagatgaatgac

SEQ ID NO: 140929 - DNA, 464 bp, Glycine max
  unsure (1)..(464): unsure at all n locations
tgcctggttaggactaggatagaaccttatctgctgaatttgtcatctngtctgctgacataaaccacacaggaaatttatttttaaaaaagtaggcaattgaataaataacatggaattctgttgtctgcattaatgtgaattggttcttacatgctaactagtaactaggaggcatggaaacttcaaaatcgtagctgtgttgggccatacctgtattaaacaaaaacttatcaatactttcagaaataggacaaaacttagataagttttttgggcacttttagactttagcactgtnttcgaatcaataatttaaaattttatgcccatactagaaatatgacaaaatctntgcagttcattgatgacttttagtactattctcaatttagaattagagtttcacctcgctaacctatatcgattttaatgcgagccttactaagcaattactatagtga

SEQ ID NO: 140930 - DNA, 397 bp, Glycine max
  unsure (1)..(397): unsure at all n locations
cgactgcagcatgcagcaaacgagacagagcggtctcttctatagtgactggaagcacaactcccactcggtaggaagacgctgaccatagatcatatctacggactctcatacctagacaaacattgagaacacatctggcacatatatgaacctgatcacagatcacgaagcgatcatgtgttgagtgttcccaacaacattgaacgcgcaatgcccatcgcttactcggtcgccaaaagactcatatcggatgctaagctcgggctntggagctcaatacgcgatgagcaaaccacaccatatgacagttgtcatgactctcaccaacatcaagcataatgaagatgacccattccatgatctcatggagaggttctagtcagcctgagttcta

SEQ ID NO: 140931 - DNA, 298 bp, Glycine max
cagctgcaagctataggcgagacaagctttaatgtttgatgcacacttaacaaacaagaaatcactattgtatgcaggccttcacttctttagactcgccgacttaacatggatgcctgcgaaataagaagacataagagatattgtttcatcatgaggtactgctcccatgggatgtagtttatccacataagacagacacagagtaagtcaatcttctttgattgactccaggtgttcaatataatactatatataatactatgctacattgtcattctgttcccctattcttctg

SEQ ID NO: 140932 - DNA, 484 bp, Glycine max
  unsure (1)..(484): unsure at all n locations
tcaacatccactagcatagcgcactaattgaacttgttattttacttctactgcatccactttctcagctctgggtgcaaaatataacttcaattccatgtaattaaatttcattacacagagggatattaagttggtcattgatctcatacaagattcaagttataagcttctctccatgcaggagatacatatagcagtctaaatcaataagtgttgggcttttgccatgaccgtggacaagccatcaacaatcaagaggagagacagttgaggtttgtgaggctttcaatatggacggnggcttgaagattcacaacaggcaacagctacaatactcattatagggaccaccattgttgcctacttgctgaaatcaagttatccaatgcaatgcagacggaagatgacacagatcgtggagagagataagaggattttaaattaactnttatttttagaaaagagtagtaaatcacaaaaa

SEQ ID NO: 140933 - DNA, 366 bp, Glycine max
cgggatccttaatcgactgcagcatgcaagctcgccagaaagattcgttgggtgttatatgaattctggaattcctgttgcggagacgatagctcacacggtgaaccatgagctgatatttcttttggagaggtagccatggaacagctcagctcttggaatgattcttcacatttctgagagccattgtgacatgctgaacacgggataccacgacactatagtttgaatgatgaatatagggggggtgagaatcatcggacgaattttcttgtcttatcaatgaacgtgccttttatgtcaagtgatttgttcgggcacgatcagattgcagttgctgctataatttctctatcaaacaaagcc

SEQ ID NO: 140934 - DNA, 487 bp, Glycine max
  unsure (1)..(487): unsure at all n locations
ntcatctagccaagattntaccaaagtgttacaacttattctatcggtttctaattatatgggccattaaatctatcatgtgttgacagtaattgattagcccgtgaatttcctctggggctgaacatacttcggccatgacccttgctttggctagtagtcgcgggaggtcttgacttccatttaaggtcaaggcgaacctatccatccacatggtcgcttcttgatgcaatgcatcaatcaacctccctcttgcttccttctcggcgtatgcttgtgcgaagtcctctactagctnttgttcatgggtcaaagactggtttaactcttctttgtactgccctattatagttagcatgctntgcttcgtggtttctaagtgtttggccaaacttttcttggatcttgagcaagcagctaactcctcctttaagaccatgccatgtactcgtgattggtctcttntctttctacngagcttaagctc

SEQ ID NO: 140935 - DNA, 458 bp, Glycine max
  unsure (1)..(458): unsure at all n locations
agcttggntcgaggtacttacccattgatgatctattatcgatgaagaacgaatgaagaacgtcaaagaacggtcgacacctttgcgaaattcctcacagaaacgttacggaaatgtttcggaagcgcctcgacttagattttcttcacggaaacaatttttccaagcaaattctaaagagagagaagtgcctaagaggctgaacccttttccacttcacttctccccctatttatagaaaattgggggagaagcttgccacccagctcgcccaggcgagcatggttgcttcctccagaagcaacaaccttctggaggaatcttttagagggcccaagtgggcctggttgctttttgcacccccatttatactaagtacaccccctgccttttatttggtgagtctttttttcgtaaagttacggaaacttacgaatttcgtaacgatactctgtttc

SEQ ID NO: 140936 - DNA, 483 bp, Glycine max
  unsure (1)..(483): unsure at all n locations
ctttacgcaagaaccaatccatctgctggaacgaggactgtctttatgcgtttggaaggatcaaacagtgcctcatgaaccctcccgtgcttatgccgctggtgcccagaagacctctcatcttgtatatgacgagtccgggaagaacgtgttggaaagaacgtgttgcgctttagtctgggtgtcccaccgtctaagatagtacatgctgagccataccacctggctgatatacaaaatggacccggtcaagtacatctttgagaagcctgctctgacagggcggatcgcccagtggcaggttttgctatccgagttcgatatagtctatgtcacccaaaaggcgataaagggaagtgccttggcggattatttggctcancagcctctcaacgactatcaacccatgcatcctgagttcccggatgatgacatcatggccttgtttgaggaaaaactagacgaggataggggcaagtggat

SEQ ID NO: 140937 - DNA, 456 bp, Glycine max
  unsure (1)..(456): unsure at all n locations
agctntangntgctattgactccagattgttgcatttaaggacagagatctgtatggtgatctgcagaagaacatataccacatactcttgcaacaggtgtagatatctgaatcatggcaagctgagttactaggttgaccaaggcatcaagttttccttcaagctttctattttcagtagatgaagataaatttgtggccacctcatggactcctctaagaaaaatagcattatttcttgcactaaattgttgggagttggaagccatcttcttaatcaaattcctagcctcagcagaggtcatatcaccaagagctccaccactggcagcatcaatcatactcctctccatgttgctaagtccctcatagaaatattgaagaaggagttgctcaaaaatctggtggtaatgacagctngcacacaatttcttaaatctctcccaatactcatac

SEQ ID NO: 140938 - DNA, 463 bp, Glycine max
  unsure (1)..(463): unsure at all n locations
tatgatatttgttaatgttgtcttactaagtgtggttatttgttttttgtattaatttcttttataataaactcacccctctcaatttttttaccttgaggttggtacctgtgatgatcgtgaacctttgtttgtgggagcagaatgacaacagtagagtatgtgaagtgagattcttttgtggagccgccaagccgacgtgatgacattgagattattntgggagagagttgtgttttgttaatcaactcctccgtagctggttccataattattttttttgaattgaggatgtaaatcactgatttaattgtatgtatgaacaaacttactttccattatgtgaatgatgtgtattgagtcaccatacctatatatatgtgtattcatttaagtaatggtgcattgtttggtgaatatatatcgagaagaaatactttcattatttcataagcaaattaac

SEQ ID NO: 140939 - DNA, 438 bp, Glycine max
gcttctagacaccaattagctggagctttttcttattgttctcgtctagatggcaatgtggttattttagaaaatttggtatcttctccctcaagcttaagcagatagtaagttattgtcgcctttccatgaaagtggttattttattatatttaagaaatacgttttattctattgttatgtccatatcaatataacataatatgaaagtgtttcattccattactttagcaagtttaccagttacaggtcaatgtgtagcttcagtaatacttttatattgtaatcgagtctaaacttcacatattaattcagcttatccttaatgactttatacgtataatattaattcattaatattaatattatatattttcttgtaggctcttggctggggggagcaatgacccctcccacctcataaagatccgccctatt

SEQ ID NO: 140940 - DNA, 471 bp, Glycine max
  unsure (1)..(471): unsure at all n locations
tagactgataccatatagagaatgaataaggtggttattttttttcactatttgagtacaaggcagcaacatttatgaagttgtctgttacaattagataagatagaagctctccaatcttaattattaagcagtacagttgcacaatcaatttacaaaattctgattatataatacagcatacctaaaatgtttggtgtaaaatattcctacttcctacaaagccattgcatcttccaaaaccatgcatgacataatataaatcccctaatacaggtgcttatttgtttgaagacaatccaaacgaataccgagaacccattcccagacatagtgcatgacgatccacacgtcctttagagaatagatgtgtgtggtaaaacttgtgcttntctgggaatcatgatatctctgtgacatttgtgatatagtgagacatttgggcatgctntgagttcaacatctctgatg

SEQ ID NO: 140941 - DNA, 460 bp, Glycine max
  unsure (1)..(460): unsure at all n locations
agcttntcctctggtgtctctactagggttttcaatcgttagacagaaggagaagggattgaagcctctatttcattgtttccatgcgagggacatttctatcaccacagacattattatacaaatcccaatagtggggatgtgaataaatgagttctgaacctgtggtttgtagaagcaagactacaagagattttgatgatgccaacagtcaagtgttcttcatggataattcaagtgaccttcaagcaatccaagaaatacaagttacatctacaagttagatttgaaagcacaaatgtttgaccaagaggacttttctttcaaaactttttattataaagatatctctctgctaatcgattaccagaagatgtaattgattaccagtggccaatgtgccttttgaaaagcttttatatggttttaaatattttagaaagcatgtcatcaattacac

SEQ ID NO: 140942 - DNA, 455 bp, Glycine max
  unsure (1)..(455): unsure at all n locations
ctcagctttatccataaaatcacttgaatccgttcaaggtccaatgtcttttggtctctntggctnttatcggntaaaatgaacctttcanaagtttaaaatcaaccctacgcataacttccttgctcttaagaactacataggtctgaattcctcttccctctcaaggatacgtaggagcaagagccacgctcttgtcgacctcaaaagataaaaaaacataaaaaagggaaaataaataaatattgaattcatgattttgcacacttgattaaaggctgttgtcccttgtgatggatgcgtggggtgctaataccatccccgcacgtaaacaactcccaaacctttattcttaaaattcatagaatccctttggttttctaatgttntcctcaaataaacgttggtggcgactcctgcgcattntcctttagtggaagacgcaccctcaagtc

SEQ ID NO: 140943 - DNA, 446 bp, Glycine max
cgcttagatagaccgtgtggggattaatattacaatagtgtgattatccatcatatgattcctcaggattagagataacattagcaatgtattaatagcattcaagatagaaaattttatgtactacatataatgaaatgacagacgttatttctgaattcagctagcactacaattcatccgtacgttaactaatatcttagataatatcacacaggcaaggcacaataatcttgtatatcttaattaatatttatttattctgaaagattcttttagttggatataaaaaaatgatttttttagtacaatgaaacaaacaagcacaaattgaaaaaataaaacctcccatatataagtataataatattatttaaattagagcgtttaggagctactatttatttacaatacatctgaatatttttaaaaaattccgaaatttc

SEQ ID NO: 140944 - DNA, 424 bp, Glycine max
  unsure (1)..(424): unsure at all n locations
tgacagcaaaagatgatgacaaaggtgatgaacaaaaagctcaagtgaatcaaagaacatccatctcaagagaatcaagaacaagtcaagagttcaagaatcaagaagaattcaagactcaagaagaaagcctacaatcaagaatcaagataagtattaaaaagttttttcaaaactttgaatagcacatgagtttttgacaaaacctttaccaaagaagttttactctctggtaatcgattaccatattggtggaatcaattaccagtagcaaaataagtttgaaaatgttntcaaactgaatntacaacgttccaaatattttcaaaaggttggtaatcgatacaatcttttggtaatcgattaccagtgtccttgaacgttgaaattcaacattaaatgtgaagagcacattggttcactc

SEQ ID NO: 140945 - DNA, 364 bp, Glycine max
  unsure (1)..(364): unsure at all n locations
agctttataagtgcggagtcggtttacatatgtcnngcgtccgcgatatgcgaagaagatatacctagtactttggacttggtacgaccatgctctcctgattttcaactgggaaattggcgattggatgaactccccggttttaacgcaacatgcagaatgtaaaccttcacggaattaaaagctttataggtcggcctatgctttatagttctattctgtcaagctatgagtcttttgctcttgaatcaatacacaatgtatcttttacatatgatcctggcatctacccattcacagtcatttgctcggtaacttacttatctaaacggcagtaatgatgacgagtcctccatggtactaa

SEQ ID NO: 140946 - DNA, 462 bp, Glycine max
  unsure (1)..(462): unsure at all n locations
ttcatctagccaagattatacaaaggtgttacaaaagattctaacgattcctaattatatgggccatcaaatctatcatgtgctgacagtaattgattagcccatgaatctcctcgggggcagtacacacttcggccatggcttttgctttggctaatagacgcgggaggtcttgactcccattcaaagtcaaggcgaatctatccatccacatagtcgcttcttgatgcaacgcatcaatcaccctccctcttgcttctttntcggcatacacttgtgcaaaatcctccactagctcttgttcatgggccgtggactggttcaattcttccttgtattgccctatgatggctagcatgctttgctcggtggcttccaagtgttgagctaaattccttttggaccttgcgcaagcaactaactcttcttttaagatcatgccatgcacccgtgaccgatctc

SEQ ID NO: 140947 - DNA, 396 bp, Glycine max
  unsure (1)..(396): unsure at all n locations
agctccaatcccttggacgtggctctcanatctattggtnaagtaataaagtaaatttcccttatgtatataattataaaacctcatcattatttcgaaaactctattggttgatacataacaactcttaaggtgcatatgatcttcctcaacaacttataaaggattcttctcaattgcaccaccatgtgttgagctatgctatatatgggggtgatcatactatggaaaagtgttcgtatttctagttccatgaagaagagttgaagtacatgtggagttaggacaattatttacaagttagaaaattattaacggatagactaatagggccctacataagcctaacctttatgaccatatgacaaagctggaagagactcttgagacgttatg

SEQ ID NO: 140948 - DNA, 480 bp, Glycine max
  unsure (1)..(480): unsure at all n locations
tccanatctggtttaagtccaagcccataaataaaatattatctggacaagataagataagattggatgaaataaaatatggacaagataagataagattggatgaaataaaatctagatgaaataaaatctggataagataagatttgataaaataaaattgtctgctctcttcaagtccaagcccaattctggattcaagcccaattgcttataattctcctggaattaaattaaaaacacaaaattagtcaagtaggcccaaatgataaaactgcataattaatttgacaattaaggcaaatcagtaattaaaatggtgacaaaagggttaagaaatacgagaaaataatgacacatcaatgtggtaaggggtttgatccttggtctctgcatataaaanaaatcgctgattaaggtcagtccctgtcgagtcaaaagaccgttatgcttgaaagactgatcaatatccttaattat

SEQ ID NO: 140949 - DNA, 395 bp, Glycine max
  unsure (1)..(395): unsure at all n locations
tactcagcttcttgtttagagatgcgatgggttgagcttcttattcactcctctaatgactatggcatcatttctggcgctaaactgctgggagttggaggccatcttctcaattaaatctttggcttcagcaagagtcatgtctctaagggctccaccactggcagcatctatcatacttctctccatattactgagtccttcataaaaatattggagaagaagttgttctgaaatctgatggtggggcaactggcacatagtttcttaaatctctcccactactcatacaggctctctccactgagttgtctaatacctgagatatccttcttgacggctgtggtcctggaaacaaggaaaattttttctaagaatactctcntatgtcatcc

SEQ ID NO: 140950 - DNA, 392 bp, Glycine max
tagctgggctcagcgtggatgcgagacagtttctttcatgcagctatcatcgccaagaaccacaaagagtttggtctagccacggcccacgagcataaaagcgtggatgagtatgctcaagtttactcggacatagatgctataggaagggtgatctactctttacaccatcaggcaaccatgtggatggatcggtttgctcttaccttgaacgggagtcaagaactttcccgattgtagccaaggccaaggcgaaggtagacacctactccgcctctgaagagaatcatgggcttttcggctattggcagcatatgatagacttaatggtccacataaatagaaatcgtatgaaacttgttaggcctctcagaccttgactagatatgact

SEQ ID NO: 140951 - DNA, 399 bp, Glycine max
  unsure (1)..(399): unsure at all n locations
tcattctacacctganaaagaggatgagatgagcgctctattattatattgtntcctaacaaaaattttcatgtaggtggaccttcttccagtaattctgacttaccgcagcctcctatccctcttccattcccacctagagcaattccaaaaaaaaagatggaagaagtggaaaaggagatcttagagaccttcaggaaagtagaggtgaacatacctctgctagatgccattaagcagattccaagatatgccaagtttctaaaggatttgtgcacccacaaaaggaagctcaaaggcaattaacggattagcatgggcagaaatttgtcagcattgataggtgaagctgttcctcacattcctaagaaatgtaaggacccaggtactttctgtata

SEQ ID NO: 140952 - DNA, 343 bp, Glycine max
  unsure (1)..(343): unsure at all n locations
agctcattctcgaaggctagcttattgctctatgtgataatgttatncncaattcgatggtggagtctatattattaatgaagaccattcacaacatactcagtttcatgagttacaataagagatctgcaaattgaaggataaattttatcaatgcctcttttctgcatgtttgagaagagtgtaaccaacttgtctaacttgactccttcagacatttgccaagcacagtttgtctcttaatagagattgntattatttttccttctattcctatttgtatggttcactccttttcggaatgctggtgaagccttttaattaagtaaagattatggatggt

SEQ ID NO: 140953 - DNA, 400 bp, Glycine max
tcatccgctaatagatgagttcattccaactctcgaatgttattatggaatctgctatactcatccagagaagttgccaggtcaaatactatatatatatatatatatatatatatatatatatatattcaactctcaaatcctctatgcgtgaagtgtgtaacacctctttaatatactctctttgatattttgttattataggttaatttatattttcaatcatttaataaaaagtagtgtctcaaaagaatatatctcttcccgttcattcaatgcaatttttttcttaatttttgttgaatcttaactttcaaatgttagtattttttatgagcaaaagcattataatatatgtttaataagttacatataatcctggtgataactaatctctatg

SEQ ID NO: 140954 - DNA, 207 bp, Glycine max
  unsure (1)..(207): unsure at all n locations
gagctacatcatgacttttctgggccgacacatattgttgaggagtaggttgattgtgaacacgatggatcatgtgacgtgactatccctcatatatgaaatcataagtggatgaaagtctagattccaactcttgtaatgggaattgatcttcatcctattatatcgtcacgactatatgacgagttttctntgagtgatatatca

SEQ ID NO: 140955 - DNA, 474 bp, Glycine max
  unsure (1)..(474): unsure at all n locations
ttgagttnttgtacatgcaagagattctatgaacttagttacaatactaagggttcagacgcaagtaaagggcctccatgcactgggtaactgttactttccttggatctggttgtgctgtgtattttttcaagatgttgttcagtctggatcttattcacatggtgtcataaaatatgctaaagtaagaattttcgattttcttgtcataaaatatgattttccaatgcttataatttgatattctcctcttaattttctgtttgtcatatccatgcatgaatgggttatatgtagaattntagccccatagaattcctttttaaaacattntggaaagtggaaatgaatttgaaattttagaatgaattgttaagctctagctgattgatattgatgttatcttgtgctagtgagtaaaataaaattggattgctntgttatttgtaactaacatatatggtgtatgatagg

SEQ ID NO: 140956 - DNA, 416 bp, Glycine max
agcttacaacacaaggatattacctttgttgtctgcaatgatatgtcacacagaaacaaatgttaagcactgaaacaaaaaatatggcattcttattatttactttcatgtacaactctctcagattatcattattcatccacatatttgcatttctttccaattgcagagtcaaaaatcatatggtaacttaataagataatatatatgctacacaactagaggtgcttttacttgatttatgcatgtttccttatagatataactacttaaccattcatatattacgaattgctgcttttttattcgttggaacctatgaaacattgacaaattgattcagctcaaagttgagtgcacctttagtgcaagtaaaatgtctgtctcatttcaacccatgtggcctttacagcaag

SEQ ID NO: 140957 - DNA, 441 bp, Glycine max
  unsure (1)..(441): unsure at all n locations
tctgccttcttgttttagtcacaatcttgttnttgatgttttttntaatcatgttattgtacaaagtatcattggctctgctgaggactaatctccgtcatagaacctgcctatccacctttattggagttttcccctctcaaccatattttttccatctacaagacttgaatctgatatcttgtttaaggggatccaattcagtacgactcggaccaacgacttgttgattgtctctgaggttaaaagaatataacctataaagcatgggcacctttcttgttcgaagtgttatcatgtcggtcggacacattttcaacaccaacaccttgtttcacactttctgacccttcttattaggtgcctaattcaaaagttacttcttgttgggttgagcaattaagctatcacccttacacaactaatacacttganaaacat

SEQ ID NO: 140958 - DNA, 463 bp, Glycine max
agcttgtggttgcgccacaacaaagttctgaaactacctgagggagcgacagaaacttgagacttacaatccctctggttatacagaattgtttggtattcatcatcagcatttctagtgaatttcagcatgaagaagtctccattgttagacatgcacaatggtaaaatcattgatttttcttcataaggacaaatattaagatgtaaataactaaaatttattaattgaatccaagacttgtcatctccaaacttcctcatctgccacaagcaaagatgagtgttgctatcttgccaaacacacagcgagtctctaaaaactccaatatttgtatcaaaaaagcaaaaatcgtccggaagaaacagtgatctgcaagtctccttctccaggtcaacagaaataattacgatttcagaatgaatggtttcttttcccttaataacaacccaattaatggttc

SEQ ID NO: 140959 - DNA, 311 bp, Glycine max
  unsure (1)..(311): unsure at all n locations
agcttgtgcgaatacatctaggacgcgtgtgtacgttatttggcctaatacagtgaatatcaaaaatattttatatttttgatgtataaactatcatatgactccttgtgagagactattacatgctgcactatatgttcgctgtattattaggaactttaatgctatactgatatgacgtatacatctattcccatccaactagttcttctatgacngatattcatgtgtcatcttgagtagataaaagaatgcagtattttatgatgtaaccctatgtatcttgaaaatgtatgagtttcgcatctact

SEQ ID NO: 140960 - DNA, 370 bp, Glycine max
cgcgctttatcatcctacaaatgctgacactatgaggcacattttatgatgaaaaggatttatgcttagctacgccctaccggcaaggaccactgatggatagggcccctattggtgacacatacgagagcgctgaccgcgcaggatgcatgcatgattatcgagatgacgtgttgcacgaaaagacctaccgtgactggccaatttggatgcaaccatgtgaaccatgcttggcattatagaatgctcaggtcatggtacgccctgatagctctgtgtcggatgcattcgtcatctacaaatgggaccctatcgctgggcctaagctgtaagcgcagctactctagttgggcattcttatctataatgt

SEQ ID NO: 140961 - DNA, 457 bp, Glycine max
  unsure (1)..(457): unsure at all n locations
agctntataagcgcgggtctgggagacaattgtcaagtgttcgcgatatgcgaagatgatgttccgagtactttggatttagtacgaccatgccctcctgatttccagctgggaaattggcgagtggaggaacgccccggcatttacgcaacgagcataatgtaaacctttacggttttaaaagctctatagttgggcctaggctttagagtttttccttttgttaaggctttgtgtcttttgtttttgaatttataatacaaggatctttcttcatctgttcctggtctctacccattctcattcatttgtatgtttacttctttttctgaaacggcagatccgatgacgagtcccccgaaggtactaatacctgngacccgcctatcgacttcgagcaagaaatgaatcaaacgggagatgaaggaaatgaggatgtgggacttcccccagaact

SEQ ID NO: 140962 - DNA, 429 bp, Glycine max
  unsure (1)..(429): unsure at all n locations
nntacagcagatttagtaatgacccactaacctagaattattataacttaatgccattaacctanggaattaaaaaaacttaatggctgagtgtaactgaaattgtggcaaccaaaagtcacccccaacagccaacaagtcagccaccatttggtctcccaaaaggctgatgcctangttgccaattgggcccttattacaacttgaactaaacctaactaaagcccttttagttgattaacccaaaacgtatttttggtcagccaactntacaaggattgggccattatttagacaaactaaacactctaaaattgagacaaagtggtgccatttagtcctcctccatttgggccatgatacaactcacaaccttggacttttctcttgaaacttggcttgtattcaatagtatggacagcactgttg

SEQ ID NO: 140963 - DNA, 458 bp, Glycine max
  unsure (1)..(458): unsure at all n locations
agcttcaaccaaggggagatggaccatttcttgtgcttgaaagaatcaatgacaatgcttacaaagttgagttgcccggtgagtataatgttagttccaccttcaatgtctctgacttatctctttttgatgcacatggagaatcccatctgaggacaaatctttctcatgagggagagaatgatgaggacatgaccaatagcaagggcaaggatccagttgaaggacttggaggacctatgacatgggctagagcaaggaaagtcaaggaagctcttcaacaagtgttgtccatactatntgaatacaagcccaagtttcaaggagaaaagtccaaggttatgagttgtatcatggcccatatggaggaggactatatggcaaaatggcaccactttgtctcatatttagagtgtttagtgtttctaaataatggcccactccttgtaagctgctga

SEQ ID NO: 140964 - DNA, 435 bp, Glycine max
  unsure (1)..(435): unsure at all n locations
tctcagcttctacctatgantgctntgtcatcaaagcccaaggtagccatttttatcttcttcacttcactatactcatgacatgcaaagatttggtaaactctcatctcccaatccagatatgcctccgggtaatgcttcatttgaaaattagggaatattctcttaggaaggccatgtcaatttgataggaagatcatttacaatgacctaactaatgagattaccctcaactatcttggaactaaatntgtgttgcatcctcaaacaccttctcaggtagctaaggatcaagtacaaataaaactaaaataggattagganaagaatagaataagaaaatcagaacaacctttaatggttaaggacgagtgtaatgaggtaagtgtctcctccaagaggttagctaagaaggaaagtcatcttacaataaag

SEQ ID NO: 140965 - DNA, 449 bp, Glycine max
agcttagacgaaatgatgctcagatggtgtacttagagcttcaagggagatggagaacaaagagcttcaaggtagatagagaacagagaccttagatggagaaaaagagagcgcgagcaagatacggctcacaatatttttcaaaatctaagttcaacatcatttttttaaaaaaaaaaaaaccgatgttaacaaactgatgttaacattaacattgattttccgaaaaaaaccgatgttaacaaacttatgttaacatcggttcttggaaaaccgatgttaactaattaatgttaacattgggtttccaataaccgatggtaatgtcacttcgttaacatcagattttcacaaaaccgatgttaacggatacacagtatttacaattatgccaccatgtttacgttaacatcgggtttggtaacaaccaatgtttagccgccgatgtt

SEQ ID NO: 140966 - DNA, 467 bp, Glycine max
  unsure (1)..(467): unsure at all n locations
tctagccaaatggacttaccttgaattaattccttctgtcctatttgcccttcgcgggcgagcgaaggcgaggctcatgggtgcgctttccaaaggaggaaagatgcatggagtcgccaccaacgtttatttgtggaaaacttcgggaaaaccgaaggaaaccggtcaaaatgaaaattctaagttcgggagttgtatttacgcttgaggaaggtattagcacctctcacgtttgtctcanaggacaacaacctattttttagaattgtggaaattgtattaccttaacttttatttctttttattttttgaggtcgacaaaagcggngcttttgctcctacgtaccctccatcaaagaggaaatcagacctacgtagttctttcttatgcgtgaatcaagtgattctttttacttgaaaggtgatcattttaaggcgttggaccttaaaaatgatccattttactt

SEQ ID NO: 140967 - DNA, 450 bp, Glycine max
  unsure (1)..(450): unsure at all n locations
agctagcatgattacattctcctcctttctatgtcaattcttaattcttcttgatatcatcaaaatcttcatgagttacattctccccctttttgatgatgacaaccacctgtaggttatgagcaacaacaaagataaaatatctatttgcatatagcttactcccccttggttttgcaatgattgcttgtatgaaacagatgaagatttcatanttttcatatgtaaacctattgtctcataaacaatagataatatttcttactattgtatcttttatctttctctccccctttgtcaacatcaaaaacaaattatgattagagaggagaatgatgttgccacttgttgcaatgtatgagaatcaagtgataccaataggctttaaaacaatcattcaatatcaatcaagcaaatacaagttcaatatctcatctgtcaaacacaatc

SEQ ID NO: 140968 - DNA, 478 bp, Glycine max
  unsure (1)..(478): unsure at all n locations
acctatgatactcagcttaacatcagaccacttccagggtgctggaactacttcttatggacttgatggggcctatgcaagttgaaagccttggaggaaagaggtatgcctatgttgttgtggatgatttctccagatttacctgngtcaactttatcagagaaaaatcagacacctttgaagtattcaaggagttgagtctaagacttcaaagagaaaaagactgtgtcatcaagagaatcaggagtgaccatggcagagagtttgaaaacagcaagtttactgaattctgcacatctgaaggcatcactcatgagttctctgcagccattacaccacaacaaaatggcatagttgaaaggaaaaacaggaccttgcaagaagctgctanggtcatgctccatgccaaagaacttccctataatctctgggctgaagccatgaacacagcatgctacatgcacaacagagtcacact

SEQ ID NO: 140969 - DNA, 435 bp, Glycine max
  unsure (1)..(435): unsure at all n locations
agcttagaatctagggcagttgatgatatttctgcatgtcctctcattcccgcgcatcctcctcggcttcccccagggattcctatctattgcatatttntcgtcacagtcttctaaaaataagagaacatgagtttgaggcttcagtcctcactttatgctttaaaccatgtgcagtctatgatagcctgagacttttcgctctgtccacgggatgccccaaagcgcttaattaaaactgaacctaaccggcttattgcattcgaaaacattcatacatacgcatacgcatgcataacaggggcagaatcggcttatgtcgtggtcagataccgggactaagatgaaggcagaaaccaatcaagggaatacggtaacacggtcacagttggccgcgcaatgtcgtttcctactattaggtacttagggacggac

SEQ ID NO: 140970 - DNA, 446 bp, Glycine max
tacgtgacactatgaaactaagcttaggctgctcaatcgctccaggttgctacatggaatggtttatgtctgtatggtggtcagcagaggagcacaaaccacaaacccttgcaacaggtacagatttctgattcaaggacagctgggttaccaagttaaccaatgcatccagtttgccttcaagcttcttagtctcagatgatgtagctgagtttgtagctacctcatgcactcctctaatgactatggcatcatttctggcgctaaactgctgagagttggaagccatcttctcaattaaatttctagcttcagcaggagtcatgtctccaagggctccaccactagcagcatctatcatacttctcttcatattactgagtccttcataaaaatattggagaagaagctgctctgaaatctgatggtgagggcaactggcacat

SEQ ID NO: 140971 - DNA, 380 bp, Glycine max
agcttagaattatacaataacactttttgtccgaccatgaagaccttcttagatatcatgctatcatggaactttctggcttattctttgagaacaagcttttccatgcttctaggcggatctcatctaactcactcagttgcgactatctttcctcaccagcttgatcctaaagaaatgctggtctcactgcctatatgctttggctcaatccccattggaagatgacatgcctttccaaaacaatccgataatgagacattcctatgggtgcttctgaggcagtgctatgtgcccacaaagcatcatcaagcctgatactccaatctatcctgcttagctgcacacacttttctataattctcttgatctccctgtta

SEQ ID NO: 140972 - DNA, 421 bp, Glycine max
  unsure (1)..(421): unsure at all n locations
tgtcaatactgtttaccttatgttgggctctaattgagtcttggaagtacgcattagtntcgtcccccaatttgagccagtcaagttttgatctctgttgtagaatttcctcatcaatctcgttccacctaatcacaggttttgtacacatattcactgtatcaattttctctttattcatcctgtcatttacaagcgagtcttgagcttcagcaagatcttcccgagctttggccagctggagtttcgtatgagcaaattgttttgacaaagtacctaaaaattttcttaatcttttcaatttcttccacatcgctaccataggactaccatcaacagggctattccaactctatgcgacagcgtcatcaaaacctggcagcttggtcacacaattgagaaacttanaattcctcttcct

SEQ ID NO: 140973 - DNA, 402 bp, Glycine max
agcttatcttctccttcttgacatagtatgtcaggctgggggcaagtaaattctcttcccatcagaccttggatgcaactgtgatcgtatacccatatcagctagatcttgacgggtattcaagccatcctttgtcttgccttgaatgttaaggagtgtcccattcacactgtcacaaacatttttctccacatgcataacatcaatacaatgtttaacgtcaagatcacaccaatacggaagatcaaagaaaatggacctcttcttccatatgcaactctgactttcatccttcttttgggtcttcccacatacagtattcaggtgttgaacccgctgatatacctgttcaccagtcaatggtatcggcgcaatatcatgctcttgacttccattaaaagc

SEQ ID NO: 140974 - DNA, 369 bp, Glycine max
  unsure (1)..(369): unsure at all n locations
ntcctcgtacctcgatcaggtcaccatgaaatgtatctattgttaaccaaaacaacacaaaccttgtaggttagacaaaatgaagcttagacatgaaatagtttacctcactcaaaatgacaccttgcgagcaaaaacctaatcctttcagcgagcacgacttccacaaaccaactccttgcaacatacacaaacaaacatccttgcactgagcacaagttccccaaacaaagaaacaaagaagaagaagacaacaaagactaaggtcattgcggttacaaagaagaagaagaagaagttgtacctaggtaacgtagctacgtgtcacggtcgcgaagaagctatacaaagaagctgaagaagatgtac

SEQ ID NO: 140975 - DNA, 439 bp, Glycine max
agcttcaagattaagtcttcatgttgctctctctatctctaacagtaggtctactgttgaataaatttttcaaaggtatactatttggagataatataacaatacctattccataaccatctacatgtgttgatccatcgaaataatacccaaggttttactcctacataacattctagaatttcgacacaagtatgattaactaaaaaattgccacaatttgacccttaatagcttttaatggtacaaagtttaaagaaaattccgtcaatgcaagagcccattttcctattctaatatccaatataaatttagatagcataaattttataacattattatgagataaaacttgaacattgaaaggcctaatgtaatacttatgtttagtacaagggagagacatacacgaacataacttttcgataggaatatatct

SEQ ID NO: 140976 - DNA, 478 bp, Glycine max
  unsure (1)..(478): unsure at all n locations
gggaggaaattgactacctctactgaggaggttccaggcttatattttggatgctcgagggaggcttaccataagttacttcatatggagtcatctgggtggtagagtggcacgttgtattataacaccactcagtcaagcttagaaatttgccccattgagatagttggttataaatgaatgctcttaaatactgctggagcacttggttcagaactttagttctgccattgctctgaggatgataagttgtgctcatgcgcaacttggtcccattgagcttgaagagctcttgccataagcgactcatgaagattggatctctgntggaaagtatacttttaggatagccatgaagcttgcataccatgttgatgaaaagttaattaacacggtgggttgtgaaattggtgggtagcatgccgaaatgagcttcctttgataagttgtataccacggtgaggatcacatgagtccc

SEQ ID NO: 140977 - DNA, 462 bp, Glycine max
  unsure (1)..(462): unsure at all n locations
agcttggcaatgtactcaacgaagtacttgtgtgcctctaaaataaaaggaataaaaatatatcagttagcagttacataggcaattgtaggaatccaacattcctgcaaacatcaaagtttgcattgcaacaataaaaaaaaataaacaactgaaacaccttcaacctggatctgggtttttatctggatggtattgaatagaaagtcgcctatactttttctttatttcagactctgccgctccaggctctaatcctagaatattaaacggatcaaaaatttcaatctgcataaaatttaaaagaaaaatntcagaacgtgcaccagtggaagtctcagccaattagtaaaatgttaaacacaaatacaagatccctcaatactaatttcaaatctcaagaagtggaatagctgaattcattttaactttctaattgtttacctcacgactcatggtctt

SEQ ID NO: 140978 - DNA, 458 bp, Glycine max
  unsure (1)..(458): unsure at all n locations
nngagacatctagattgagttctntgttcatctgagtatttttgtgtagcttcatcaaggtaaagggggtctttccactttttgaaccctgatcttattatctttggaagctagacttcattgcatgttgtgttgatgttccaaattcgtagctactgccttggttggatctaagtgatatgaggttttttattgaaattttaaggttaaaaatgtgttcattgagtgtcaaaacttagggttagccttaaatttcacctggatcaaagttttctagcaaaagttatgaacaaaacaagtttaaggatatttttataagattaaatctgtcacaaaattaactggtttaatggttgtatcattatttttcttaaagatttgactntaaatatgagtttgataggtgtgaaaatataaggtagcatgtaaaatttatgaaaaagcgatttccagaacgc

SEQ ID NO: 140979 - DNA, 457 bp, Glycine max
  unsure (1)..(457): unsure at all n locations
agctntaggatcaaactctnttctctctttttctctcaactgttcttcattcttcttcctcttttcacttctgttttttcctttctcttgcacaaatttcatggcttttccattggtgttgatcatgaaaggctaaacacttaatcaatccaaggatccactccaagcaagactaaattagagttttagtttagtatttctaatctttgtgaatgttcatctttttattcaatcctattttcaattttcatgattatgattatgtttaggattgaaaacggattaagttatggattcatttcctaatttcgaaatttaataacaaattgtttggatgatcttccaacctaatttacgatctcaaccaatttaaggattggattcgatgaactatctctaatgcanttgactgaacctcctcactctaaacatcattcgtagtaactgtgataattcg

SEQ ID NO: 140980 - DNA, 491 bp, Glycine max
  unsure (1)..(491): unsure at all n locations
tattgagatgttattctntntatatgtttatttatgcttcaccatttaataatagtaactcttatattgtaaatagagtttagaaacgatgaatgaagatcaaaagaattagaatgaaatggctaagacaatgataaagattaacagaaaacaagaggaaatgttcaacacagttcatattaagaatcaggttaggaatttcaagattattctcaaattaacatgacatgatataacacatcaatattgcttatattagtttactttaaatatagtcttatagtgaagtgagtaggtcctttgctctaagatggagcgatcaactagagcatacttgacgtctgctagacagtaatgacaacatatactctgttacatacaaccaagatctagtgaacctaactagactagctggatcgataaaactcatagatttctatggactcatatgaaatcatcaagtgaccatgnacccatttggacagagtatt

SEQ ID NO: 140981 - DNA, 461 bp, Glycine max
  unsure (1)..(461): unsure at all n locations
agctngaaggggatgttttaatggaggatattattgtttgaacaggggatcacaaaattgaaggaatataagagggagagaagtggaactttgaattctatttatagactaggtagcttccttgagaagctttcttgagaaaacttccttgaggagtctctttgagaaaacttccttgagaagctagagcttagctacacacacccctctaataactaagttcacctccttgagaagcttccttgagaagctagagcttagctacacacacctctctaatagctaagctcacctccttgagatgagaagctagagcttagctacacaccccctataatagcttagctcacccccatgacaaaatacatcgaaatacaaaaaagtctctactacaaagactactcanaacaccatgaaatacaatgctaanactctatactactagaatggccaaaatacac

SEQ ID NO: 140982 - DNA, 403 bp, Glycine max
cccggcgttgagaggaacgatgtttatgtgctcgtgggagtacgtgagctcaatgaatgtgggcaactggggatggtgggcttatgtgtgatttgtggatgtggagaattgatttgcaccatcgcccgaccgccacctagtaccacatgtgatgggtaccccataatcctacaagcttgaactgaagaagtgtggaaaggtgagacttcctacttttattcgttgaccacagagtggtacctggagatatgtcgcgggggtcaagagaccttggggacgtcatgtggggtgctattgcccaaaaccaagcttgaccaatcccgacccaacccgggcatagtcagtcagtgagaacctgtgatgtacctaaacaggcgagctcctggcagtcaaccgagtaaag

SEQ ID NO: 140983 - DNA, 447 bp, Glycine max
agcttgtatatctgtctggttcataggatgtaactgtctttatttgcgttgtctggaaccatccctaatgctagatgcattctttcttttgttatttgtcatttgtcattttgaaatcaatgctaaacatatggagtttgatgctttatatcctcagtttaagtttatgtgacttcttaccagctaataaatactacctcttctcaaagtgtttaggtaattctataacaggttatatgcacgaatactcaaagaacatgtattgtgcactgtcacattgtgcaattattcttccaatcaaagagcagcatttcaaatttcatagaatcatccggagtgtggggaaacactcttccctagcttagaatgtggcaccctacataacaagcaagtgttgattgtgtcgtggatgatattaccctctgtccttcatgctcatatgactat

SEQ ID NO: 140984 - DNA, 329 bp, Glycine max
  unsure (1)..(329): unsure at all n locations
ntagatgctatgagtagttcaccattggttctgtttagatgctgttattacttcactaatgctaatatgaaaattctaatattgaaatcataatggagcggctgttcagtaatggtgatatgaaaatcttgtccaatacttcctacttataagcagattttcttaaaagtacaaaggggattcttggtcctttacttttgagattntattttaattaaatggtctgtatctaatgtattttagaaggcatcaaagcatgacaactactatcgcggatttgtgatgtcagctttatagagattttatagctcgcctaatctggatttggt

SEQ ID NO: 140985 - DNA, 453 bp, Glycine max
  unsure (1)..(453): unsure at all n locations
agcttcagaccaataaaccccattatttttttttcaagaatccctgagatcagagacactaatcactcaattttgaaccataaagattcctcaataacagagaaaccaaattaaattaaaagaaagaaaaaaaaaacaataatcttggcatgcgatcaataaggcctttgagctttgacnttcaccaagatatataaaagaacaaatttcaagaaatctgtgaaatcaaagaaaccagaattgaattacgatgctagatttaaaaggtatttctcttttagtaaaatcgaagccggataaagtgtaatttcggaacttagtgagaagattacgacaaaacaaagcatcaatgtaatctcacaataaatgtgacagacatgcaccatgcaagataagcagaacaacttactaagtccagataaaaacgccgtatttccaattcgctccaacatg

SEQ ID NO: 140986 - DNA, 482 bp, Glycine max
  unsure (1)..(482): unsure at all n locations
ntctttctattcctgaatggtgggatcttaaactttttattgtaattgcttttgaaaaccagcctgttcgttggaccactcctcttggccttccagttgtacaaccatactgtaaaactgaacggcatctggtaagtttttatatacaaataatgttcccccttttgttttattttatagatattaatattaatttactgaacagtgacaagttaaaaccaacatactaaatgtacaatgtatgatatccacctaaatggttaaaagaatgacttctgtaacaatcccagttgcataggtaacttatgtgacatgatgcaacggatngatgtattaacagattagtgtggagctgtggacccttctttaacgtgttgctaccatatggctgtaattgttggtgtttcaccattttcttgagctggtgtgatactaagaatcggaaccattattctctataaacaacatgttgtgtattactt

SEQ ID NO: 140987 - DNA, 416 bp, Glycine max
agctacacaaggaggcgagaccagttatgttagtggtgcgagtaactaaactctagcttctcaaggaagttgcctcaaacaagcctctcaccgaagttctctcaagaaatcttctcaaagaagctacctcacctataaatagaagcatgtgtaacactcgttgtaactctgatgaatgacagtctaaagaaatacacatcacagacccacttctttccctgtattataccttcaatatcgtgctccccccttctctattactcttcctacattagagcatcctcttcaagctccttatccaagacattccttaggggtgaaactccgtcttccttggctaataccctaacggatggagcactccctctcctctactaacttgcctatcgcagcatcgccatggagacaaatcacca

SEQ ID NO: 140988 - DNA, 483 bp, Glycine max
  unsure (1)..(483): unsure at all n locations
tgttactttaccttcaccattgtgttaatttaagagatattatttcttaatatatgggttcgaagaagccaactagttgggggaaaaaagtagttgaactagtgctcggactcggagaaatacttgtgcattttttgaatttatagccattttaagtaaaccgtggctttgcagaacctgcctcgaatagaagaagtttaagtgtttaatcgttatgttttgctttggtcaaccaagtgtttttttctttctttttggatgcaggaaattccttagctcaatcactcagtcattttgttcaaaccgcgtgcgtaatcatggcgatcatgacttaagatgttggtggtcacgtgcgtaatcatggctaanatttaccctctatatcccttgcgagctntgtttaattgtttntcatttcttctttggtgcgggtcacgtgcataattgattatgctatatattagtataatcaattatgtgcca

SEQ ID NO: 140989 - DNA, 423 bp, Glycine max
  unsure (1)..(423): unsure at all n locations
agcttgtcaagctccccacgcaatttctgttgtcccattaccatgacattgttaggctcatgcatggcttanaacaggattaggctcttctaaagtgaggggagtgcactttagagtttgatttcgtcacgtttaacaattgtgagtgcactctctcgctttgaaggagccacatcctttaaaacaagttataaagacaaagcatatgtttgctgggaaaggacagagggaacattacccttattaactcaatgacactttttgaagcagagaaatgaaggtaacctccaagcatgtcaatgccctcaccacttttgctagggacaagattaccaccaaacagaagtagggcataatctgaaatgttggtagagtctctaatatagatgctggttgttttcaccttttcactatacaccatgt

SEQ ID NO: 140990 - DNA, 476 bp, Glycine max
  unsure (1)..(476): unsure at all n locations
ctttaactgagtaattgaagataatcttcctccttctattctcccaccccatacattcttttaatatcattatttcttttaattctttctatctctcccttgcttgaacatcaagtttgttttacggaatctttatacatttccatattatttttaagaatataacataaaaatatcattaccgagtattttttaaaaatatgtttgattacattttaatattcttaaaaataactataaactcttatttattttcattaaatacaaaacacaaatatatataaactcactgataggaaattatcagtttttttttttgtgatctaagatatttatcagtgagtttatacataatcgacttttgaaatttaaaatattaattnttttacactntacttattttgtcaatcacattctgtcgtaacccacataataaaatatattgtaccgtttaatataaaagtaataattatttg

SEQ ID NO: 140991 - DNA, 390 bp, Glycine max
agcttgccgcccagctcgttatgctatctatgtgcttcctccagaagcaacaaccttctggaggaatcttctggagggcccaagtgggcctggctgctatttgcacccctctttttactaaatgcacccccttctattttttggtaatactttttccgtaacgctacaaaacttcacgaatttcgtaatgatgcttatttttcttccgcaaggttacgaatccttacggattatgtatttacttttttttagctttcgaagaaggtacgaaaacttacggattgcgcaaaaacacctcttttcgactttcgccacattacggaattttacggatcgcgcaagcctgcttcactttgatatctgagacgtctcgggactccatttattgtg

SEQ ID NO: 140992 - DNA, 405 bp, Glycine max
  unsure (1)..(405): unsure at all n locations
ctataaaactcaagctttaagagattcttgagaagctatgctttaattcttcacctttctaataacaaaactcacctccgtgaaaataattacggataaaatacacaacaaataatcaaacatcaaacataattactaataatatatagatatatatatcagggtgttacattgatcacaaatctatgcaaggccagaggagtccaatcagattctagatccctggagagcctgagcccttccattaacttggcatatattaagaaaaactattggaatctagatgatccaatagtgacatttagagggccaaggaaggtcacgggtaaaagatcagaggtccccactactttagcaccactgagacaccaactccttcttctttcacagctncagcaccttcta

SEQ ID NO: 140993 - DNA, 444 bp, Glycine max
  unsure (1)..(444): unsure at all n locations
agcttaatgaaacacattagcggaagtgatattatgctgtttcaattacagggggtcaaatatattttgtcataataaataaacccactatgttgcaacaaaccctacatgtgcctatgttgttaccgaagacactgaaccgttaccataataaatcgccatgactctttactatcaacctatagcatacactctgcatgctctcgcccatataaaccgttggtagcaaaaccttctcctttcttcagaaacttccagagatatgtagccttggcgaagaaatagaacccaacacatgccattctagctggactcgagttcgagaaccatccaccatctggttcattcaacgaaggtgaggctntctgagtgccagacctggaccagcgccatcattgttgtggaaattcattgaagacgaagagccccatgtgacactgaaca

SEQ ID NO: 140994 - DNA, 456 bp, Glycine max
  unsure (1)..(456): unsure at all n locations
tgacagctngagcatatgggtgaccacaccgttgatgctcattctcttttatcgtgcgataatggttgctctcgggcaatgctcgtgaaggactctactcaaagctaactggaaaacgtctattgcctttctacatctcaactcaggcgatcgataggctttagacacctttatcatacatagcgcaactatctccttcagagcgaatagaatagcgcttctccatcaatttgacaatgctctgacaaatcgtttgaatccggaactgacacagacatctctgtgaatctagtgcctttctgttctccaccgtgactgtgcttttgcctttggatgttaccaaggtgccatttgccaatacaactgtgactttgacaaggtgaccaatttactgaacacgcttatatactggcccgtgattgcgaggcccgctatcaagaccactactactatcta

SEQ ID NO: 140995 - DNA, 319 bp, Glycine max
caagctagggatggaatacttacttgttgattatgaactaaaacgcacaatggaatcaaaaaatgctataaaagatgaccctatggctgcaaactcgtcaatcccgtgggtatggcttttgaaaggggggaagggaagtttttgaatgcaaaaacgccccccctttcgtcattcttatattttggtgcagaggtggctcgcccagacgagctcatctcttccattcgcagctacctgctccccccacgtaatgtattaattcttttctatcttcagggggaacatttaccatgtccctacctttttgggataacatttc

SEQ ID NO: 140996 - DNA, 462 bp, Glycine max
  unsure (1)..(462): unsure at all n locations
ctcagctatggatcagcccatcctgatgtcgtatgctgacttgtctttcttctgattaccaaccaaatggcatgggtgaaccctgtgaagatctaccaatctccctttcctcgatggtacaaccccaacacaacctgtgcttatcatggaggtgtcccaaggcattcaatagaacaatgcgtggctttcaaacacaaggtccgaagtttgattgatgcaaggtggttgacattccaagaggacaacctaaatgtgatgatgaatcctcttgccttcatgggggatcggcggttaatgcagtggacgaatgtggacctcatgggctgaagcggatggaagatgcgtacacctctatgaagatcatattggaggcgttgtgcgaaacatgcatgattctccttgatggtggcaatggagatgcttgttnatacatcttggagcgttacacgatgtacaggttgc

SEQ ID NO: 140997 - DNA, 403 bp, Glycine max
agcttgtggccgacccctttaatgaagtttatgtttgttcactctcctctatatgaatcaaaggaagacaacctatctaagatgctttaaagacaacatagattgattgagaaatgttcaaagaactgcgtcgcctcctcgtaagcgctcttttaacgtgactagctcgacgcatgttacctttaggggttctgtaaatgcaatgaggcgtgcaatcgctcattgttaccaccagggtacaacggcggtgattgcccgttcataaacgatcttctctcaggagatggtgcctgatgatcacatatctctactagtcctgactagctcacttttgtgatagataacggtccagagcatttatacgttactttggctgcgaacaactttagccctgagtaactag

SEQ ID NO: 140998 - DNA, 451 bp, Glycine max
agcagcctgcaagctttaatcaataaatgacctgtaacgaattcagtgttagagaatccaccgaagaatgtgattgtagaatgaagagagtggccactagagtctagcgaaagttgataggaagcttgagagacacaagcattgggtttggatagtgtgggctgctgaatgccctaaagcagcatggtctccttcgcagtaaattcctctcaaccaaccatggaccgaacctcaccatcgtaaggacccaacttcaccattggtgccactcgttgttgatggccatggagtccacgctctttctgtctctcggattcaattgggtttataatccgggtttaataatcaatttcctatccaaattatgttataattttcaatttcatccttaaaatatcaacaagtctaattctattgtgttaaaaatgaactaattcgatctcttccatta

SEQ ID NO: 140999 - DNA, 426 bp, Glycine max
  unsure (1)..(426): unsure at all n locations
tacatactaggaagaacatagtgtaagtgaaggacaatggctttttgttgttgacaatgtctccttcaacctttacaaccctgatcttacttctctaacctgaactctcttggtggctcagtatctgttgctctagcttttctctttactttgtgtttcgactcatctccttagtttccgccaactttagtgttttaaaggctacttgaacgtttcagctactgaaggctcgcttaacaagattggctcattaagtgagagtaaatgaattctgacttaatgagctgggcgcgctgagcgcgagaagagacaaacaactcgctgggcaagcttgcgacgcgctgggcaagcacatctctgactgatcctcttctacggggtccagcatgctaagcgagtngcatgcctcgcttatcggatgccact

SEQ ID NO: 141000 - DNA, 407 bp, Glycine max
  unsure (1)..(407): unsure at all n locations
agctagnatctcatcacagagggagagatattctaattttccgcagtaatgcgcgaagaatgcaatcctactaaatatatcaacagaatctctggtgcaaactgaatcataatatctgcggaagtgaaagtctctgtcaatttaattgtatccccaccataatccaatatctttcttcaatatctctggtttaccccacaactgtatatgagcctttactatatatgtaaattgcgttcctccaggtgacactcttctctgactggggctaatcttgctgcaaggtcagaacctgacgctacactattataatacgaaaaaccgttcatggacgtcaatgaaaacctcttgaaaagacctttaatagttccttacttaccattccaccacctaaatttgctaattcc

SEQ ID NO: 141001 - DNA, 389 bp, Glycine max
atagaggctccacatagaccataaatggcacacattgtacttatttaactataagaaaaatacacactggtcatcttatatggtgaaagacctctgccacctgccttgttcaactacacaagaatgtgggatttttcaaaggttaaaatgattcattcatataaagctaaagaaaagcaaaggaaataacttctaaacggggcaaattattccaagtacactatttccgttatgtgctaagtcatgagcaattataaatgttgataagctaacccatttttacttacttttatgacttttcataccaccaaccttttatttggctactcttaattatctgtgtaatcttccatttactatgggtaacgtcttaactcatgagacatgaa

SEQ ID NO: 141002 - DNA, 411 bp, Glycine max
agcttatggtgtggatggtgaggattctctgcatactattacaaacatgaggcatacatccagaatcagtccaccatgtattatggagaacttcacttaatattaatttgaaacatacataagaattaagttcatctttctcttttcgaaccaatactgttaggcaatccttctggaagtgtccagatattaacagagaatggctattattgctcttagatgcctccttctggatgtgcaaagagttgacatagatctttaatgtccctttgcctatatcatgcttctgaacatatttctttacagctgtttgattcccttggagattacataatacactgactgactttcttaattcttaagcctcgtttcttcttgaactaacatattgagcatatcatggacatatca

SEQ ID NO: 141003 - DNA, 486 bp, Glycine max
  unsure (1)..(486): unsure at all n locations
ntattcacgacagagatattaaagatattcacgatggttgttcatgacagtctctagagtcttagacagggtatattaaataagaatggaattccaattgaagtagcaaaaggtttggccaataaatttaagttaaaaagtctttatcaacaaatatactctctggtaatcgattaccagaggatgtaatcgattactagtggccaaaactgatttacaacagctattaaaatatgaattcaaaattggcactgtgtaatcgagtacacatatatggtaatcgattaccagaagatgctgaacgtaataattcaaattttaaagcttgtaatcgattacacacatacatgaatcgatgaccagaggagttnttcaaaaaacattctcaacaggcacatctttttatctgattcttangtgtccatcagaggcttatatatatgtgactagagacacgagattaacaagagtttctaagaacaaaac

SEQ ID NO: 141004 - DNA, 358 bp, Glycine max
  unsure (1)..(358): unsure at all n locations
cagctctggcagatactaacactatatagtttctcccaagcacatggcancacattaagcctatggttaatggtattaattatcagcaagacagatcatcgtgatgactaactgtaatctgtgcagcttagatttgataatctcgtacatgactttcattctccaagtcgtgaaacataatatgagttcgaagagctgtgttttatttttggtactaattgtgacaatctgtaaatttccactcggatatttttggaaacactgctattctgaatgactatatatatatatatgtatctatatatatatatatatatataagaattattcacgtgatatgcatacttgttctagatat

SEQ ID NO: 141005 - DNA, 475 bp, Glycine max
tatctcacacacctctctaatagctcagttcacctgcgtgatatgagaagctagagcttagctacacaccccctataataactaagctcacccatatgccaaaaaacatgaaaatacaaaaaaagtccctactacaaagactactcaaaatgccccgaaatacaaggctaaaaccctatactactagaatggccaaaatacaaggcccaaacaaaggaaaaacctattctaatatttacaaagataagcgggcttatactttgcccatgggctcgaaatctaccctaagacttatgagaaccctatggccttcccttggatctctagcccaatgtacttggagtcttctatccaatgcccttgcggagtaagattgcatcacctgagacctggcttcttctttcagcgtattcacaacgttgtccttcttctaagatcaacggatgcaccaggaataggttgatagtatcttcat

SEQ ID NO: 141006 - DNA, 444 bp, Glycine max
agctcaatagatactcatcgcaattctttatcttgatagcaacaatttaacattcatcaacactaaatagagctatacacatgcgcaactgaaagacaatattttggcataaaagtatccttatttgcttatattcttctccataattaagaaagtcttcaataaaaggaacataatggatcttaccaattgaaattaaaatatgcaatgcaatgatctagctcataaggacattatcacacgattaacactcatgattttatgaaacgagttggtcaaacaatgttttccaacactaactatctccgtattaacaatggttttatggagtactatatagtaaactgcaacgaagaaaagtgaagcataaacttaactaaccgtgcttacatttgttgcttgtacagcgatagtctacgagttctctgaaggcctccagtattc

SEQ ID NO: 141007 - DNA, 379 bp, Glycine max
  unsure (1)..(379): unsure at all n locations
cttgaaagtganatagtacataggttgattattctacatttatcttcttcatatccaaatattaataaaaaanaaatgataccctgttatttctgttaacttgtaggttagttgcatatgctctcaaatctctgggtctggagaaaggatctgcaattgcgattgatatgccaatgaatgtcaagtctgtggttatctacctagctattgttcttgcaagttatgttgttgtatcaattgctgatagttttgcagctagtgaaatatcaaccaggcttaaaatatcaaaagcaaaagtaatatttactcaggttgactccctaatgtcctttgatgatttatcactctcttcatgttnttaatgatntttcttgatttc

SEQ ID NO: 141008 - DNA, 438 bp, Glycine max
  unsure (1)..(438): unsure at all n locations
agcnttgacgcaacatttggagaggttattttagcaacgagatgatgcccttcatgagaggttggatcacatggagaatacagatcatattgaagaacaaaagatgagaagagggaataccgaattgatggtattaaactcaacattcctccttttaaaggaaagaatgatctggatgcctacttggagtgggagatgaatatagagcatgttttctcatgtagcaaatatgaggaggaccaaaaggtgaagcttgccgccacggagtttaccagctatgctcttgtgtggtggaacaagctacataaggaaagagcatgaaatgaagagccaatggttgatacatgggcggagatgaaaagattcgtgaagaagcattatgtgccggctagttactcaagggactcgatattcatctctcaaactaactcaggcaca

SEQ ID NO: 141009 - DNA, 421 bp, Glycine max
  unsure (1)..(421): unsure at all n locations
tcacgaccaatcggntgtcgattccttcaccatctgctcttctgtcgttgttaactacaacgagttccccaccattaccagcatttcccaagttttctgtcaaatgcctagctgttgaagaattgacaaaccgtatggacagaggcatgtgttaccactgcgacgagaaatgggtcactggccaccaatgtaagccccgattacacttgtttatcgcatatgacaagtcagagctatcattgtctgcctcaacaacagactcctcgatcaacttgccggaacctttggtcgttgactcccctcacccgagcctcaacgtaatgtcgggcatgcctccccaactactctttgcatttatgggattctaagtcattagccagctacaatactggaggatggtgggagtacccacaatttcata

SEQ ID NO: 141010 - DNA, 406 bp, Glycine max
gcttgatggaatgtaagctaacacttttattcaacactcttctggtcccacaaaagagtaccaatgtcgatgtacatgtgtaatagacactgtatcacgctgcagggtcactaactatagttatctcatcaccaacgtgatatacttcgttaataatgatatctaagctcttctttttttgttgttagcctgagagacaatcactatgaacacaccttgctggcaaaagaaagtgggactatagttggacacaatatttctcaccttcaactactactttttgttactatcctcaatattatcaccccttactctttataattatcagacacccttcttacttttaatgtaacatcatttccacttgctattctaatagtctagaattttaatataacgattgatc

SEQ ID NO: 141011 - DNA, 320 bp, Glycine max
  unsure (1)..(320): unsure at all n locations
ctattctggagtttttctaagttctgtaacaagcttttattttatacttgnccttcatttaattgtcttgggcttgacgaccacgatcaacaaagtactttcgacacctactgtatgttgatttcaccaacgctgctatcggtatgttgcgacaatccttcaaaaccttatttatacattcagagaggttggttgtcatgtgaccatattgacgtccttctctatcataagccatggtctatttttactttgaaatgcgatcaatcaatgtggctatcgtggctcaaatggcgaaatatttcaaaatttgataaaaaaaa

SEQ ID NO: 141012 - DNA, 455 bp, Glycine max
agcactgagctcagctggctgggttgtattgcctgtgagggtttataggaatccgctactaacattctttgcgcctttgtagtaagaaagagtgaaagatgaataagaattgacagatactgtgcatgtcctctaaagagaattttctaggactataaatattttaaagacttccaattgacaatattaagccacattaccctcacttttcacaaataatatatgataagatgtggtcgcatgcatgtttgtatttagcatttattaatttgagacaaagtcaataaaattttattcattgcttatgacacccccactaaacgtatagaacgtgaaatttctgagtgggcagactcggagatcatctgtggatcacaggtcacataagctatcagaccatcgcctgacatttatattctagtgaatgtacatatatatgaacagatatgatcgtg

SEQ ID NO: 141013 - DNA, 477 bp, Glycine max
  unsure (1)..(477): unsure at all n locations
ntgaaagcgngagctaaaaatgagagtgctcaaatttattctaaagatggtagtcactanggtctctggggctgaagcagatagggaatgtgtcaacctccaaacggttcatattggaagcattgcgcgcggctggtatgattaaccttgatgatgactaaggagattcttgttaaatgcatccaaggacatcgcatgatgtggagacatgtcaaatagcgaaggagctactacaagaaatgatgaacagggggcagattgaagtctacagtgcgaagaaagaggaaagagatgtatgcattcagtcagatgacagaaacccgagtaaaagtgataaggcagtgccatggaaatatgccgcaccanggtccgatggaaggaaggacgcgtccatcatacgtgttaaggtggatccgccgtcctctaaagttacaaatatttccagtacgagtggcatgactcgtagtggatgaatct

SEQ ID NO: 141014 - DNA, 416 bp, Glycine max
gatcttaagcgcctgcagcagcacttctcataagagcttagcctttagcttaccgatggtagtgtcctagatgccggaacaatatctccaacaacactctcttaaggtcatcccagctgacaatggacctgtgagcaaggtactctaaccaatctttggccactccctcaagagaatgaggatcagcctcttgaataatatgatcttcttggacatcgaggggcttcatggtggaacaaacaatatggaactccttaagatgcttatgaggatcttcacctgctagaccatgaaacttgggcagcaaatgtattagtccagtcttgagaacatatggaacaccctcatcacgatattgaatgcacaagctttcataagagaaatcatgtgcaaccatcttcctaagagtcctctca

SEQ ID NO: 141015 - DNA, 404 bp, Glycine max
  unsure (1)..(404): unsure at all n locations
atactcagcttgtaacaactgggccaattcactattctactngattctgtccacggaaacatcgagatagcttggaatctcattgggaacgaacagaggactgatgatagtgttggagtttcaaccatgcccattcacctacgtcgaaagaaatggcagtgcgacgggtatctgcttgagcctttcatgtattgcctgctgtgattcaagttttccctcaccggttttataataaacttgcgttgctgctgggaacagtggacatttggcagagtggtgttgtgaacatcataatccgcaatggagggagggctgtgtccatacaaagcctggtatggtgacatttgcaacactgagtgtttggcagagttgtaccattgctcgggcaagtgaagaacaaaaac

SEQ ID NO: 141016 - DNA, 416 bp, Glycine max
gcttgtaaccaaggatgcactaatctttcccacttttcgaggcgggtcatccttgcatggcctagatgttatcttagggtccacttggaccccatttttgccgactaagaaccctaagaggactatgttatctacacgaaaggtgcacttctctatatctgcgtagagggtgtttcttctatagactgaaaaaacttgcctgatatgtactatgtgaccatcgatgatcctactcatagctagattatcatcaaactaaacaactacaagtctacctatgagatcctataatacatgatgcataagcctcataaaggcgcttggtgcagtaacgtgcccataagcatcactagcccttcatacaaaccaaacttggtcttgaaggcggtttaacactcgtcaccctctatcatcct

SEQ ID NO: 141017 - DNA, 458 bp, Glycine max
  unsure (1)..(458): unsure at all n locations
agctnnttggagtagaaacatgggaccaactcattntatttcaaaaaggaagtcgtatctagtcaaggtcttagagaccatacaagtttcctaacgatttctaattatgtgggccattaagtctatcatatgctgacaatagccgagaagcccatgaatctcttcgggggcggagtaggtgtctgccatcgccttggccttggctaataatcggggaagttcttgactcccgttcaaggtaagagcaaaccgatccatccacatggttgcctcttggtgtaaagagtcgatcacccttcctctagcctctttttccgcgtatacttgggcatattcgtccgcaatcctatgctcgtgggccgcggctagacctaactcttcttggtacttggcgatgatagctagcatgttggtctccgtctcgcataaacgctgagacaagcttcttttggaccttg

SEQ ID NO: 141018 - DNA, 474 bp, Glycine max
  unsure (1)..(474): unsure at all n locations
agagatttctagagagagaaaggtccaagtnctagatatgtttgagagcttttattgtgcaaagactggcagagaactgagcttgaagaggaagctatcctaagagcatgagatgagtctgtgagtgattgtgaggttctagaggttgaggagacatcctcactacttgcatttcttcaatccttcatttttctcttctctttgttgtaaaggaagcttcccagatatggagagctaaatcctctgttggttcttccttgtaggtacttgatgtaaatacatgtatatctatttaatgatatnttgtgtgttctttgtgctatcaataagccatttcagtgtgcttttgccttgatcacgtagatgcttgctttgttaggatcattcaacagtggaaactggtctgattcttagaacttgataggacagggctagtttatcgtattatcatgagggatcggggtacggtaacct

SEQ ID NO: 141019 - DNA, 410 bp, Glycine max
  unsure (1)..(410): unsure at all n locations
agctggtatatataaggagaagaatgacatattattgtcatcttcaaacacacacgaaccagccaatttactattctataagaaacactttgtgtagatcctatagatgacatgataatgtccatgatggcagcaatagatcataccttgaatcgccgcagcctttaatagaaacagccgactacggatagctactggataattaatcgcttcgctgcaaacacacatggatcgagaaaaatatgtatatgtcgtgccatacttaaactaatcttaaagagaaaataaantgaacacaagatggatgtgctaaaaaaaaaacagcgcgcaaatataatcataaaggatactcactctatgagatcttcacataagcctcgcttacttcctcatacatgaaatcatccccc

SEQ ID NO: 141020 - DNA, 354 bp, Glycine max
  unsure (1)..(354): unsure at all n locations
tcaccctgtccatgaaacttcgagctaatgatgtttgtatatgtgtttctncaagccaaatctgcatcataagagaaaacagtgaacattatagtcttttgagctattctatccactgtcagcgagtgcaactgcacatcaacaaacctaatagctattcgggccatcaccaactaagccaagctcagtcatgcatggtctagcacaaccattatggcacccagttatccttacaaccacagactcactatacttgaggccaacctgaatagcagacagaagagtattaattatcctgattagtgatgtccatcaaatcaatactgccctatatatgtgcaccattaccttatc

SEQ ID NO: 141021 - DNA, 146 bp, Glycine max
agcttgttgggtgcagctgctgaatattatattctggcaacttcatgcactcctcttgtgactataacatcatatctggacctaaactgcacggaaatttaagctttcttataaataaattcacggcatcagcacgggctatagcc

SEQ ID NO: 141022 - DNA, 280 bp, Glycine max
tgtggccatagaatgaggagaacaagtcacaattttttatgtttgcaaccattaaacccggaatcctgctgtcttctcgagagtagttatcttatgcaccaaccccaaggctgaaaagacctacataatggaacaacaacttttagaatgatgtttaacaatcttactaactgaacatgaaatgaacaatgtctggtgttatctaacgtataatgttgagaactgggagcatctaccaataagttagataattcaccatacacaaaattggaagcccgcc

SEQ ID NO: 141023 - DNA, 347 bp, Glycine max
  unsure (1)..(347): unsure at all n locations
tgaagggctggcgagggctcactccgacatggaagatccttantctgtctacaggcgctacacctttgtgtgaccaccattagaatgatatcctcctaatactgacgttatgctaatgtcataccttacattcgtgcggagactaccattcaatgatctttggatacttgctactcaagttacggtgtttaatgccatgtatggtgcaaaagagatgaccattctgagttgtgaacacgaatgcctaccataccctaatggaggggctgaagggtctgatattgagattcttggaccctaactcgtccagcctaggctccggctttccaagtccaccataagacttc

SEQ ID NO: 141024 - DNA, 460 bp, Glycine max
cggagatgcctgccctacagacctgtgatgggaatcattgttatttagtctaacataatatctaactatctattcatatcttctgagttttcaaatgggaggagggagtcaactcagtcaagtttaaaaattgtaggctcattttaagagagaaaaagaaacacaactcacatggagccagtcaatacagcaaatattacagtcaaaaccttgcctccagtatatactttctctattatcatttttgcaccaaaccatacagccagaccataactgcagataaaaacaaagtagagcaaaccaaatcccaaaccagaggctagtgcctcttgcactccagtcttatatgccttcgttaaggactgattgtatttggctataactagcctctccccagtaaatgatgcaacctgcattggagagactaagggcatctatatactgattatactctgcaata

SEQ ID NO: 141025 - DNA, 318 bp, Glycine max
agcttctagccaaatgggcttaccttgattttattccttagacagcccttttgagccttgtttccctttccttgttgtgatgctcactacaagccttaattgaaaacccatgtaattaccatatcctttacgaattttggagctttggaactgttttgggaataagcgcggggggcttctcgttcattggacaacttgttatgctggctctgcttcatgatgtatttcgggccatacttgatgtacattgaatattggttaaacgttggacatgctgaaagaagagttgcttctcttaggctaattgaaaaaataatt

SEQ ID NO: 141026 - DNA, 393 bp, Glycine max
  unsure (1)..(393): unsure at all n locations
ctcagcttaagtatgcccgagncattcatccctatgagaagttgtttattattggcgatcagaattgccattccttggattatagggttgaaccaagctcatgcttttacaaaaaggttcatcaagtcaagttgaaatatggaagtaaccgtcttgaaaattggggcaaaagatgaatcgagtcacatcactgcttcgtctactgccaaacatatttaggattattgatgtccttgttacttccagtttcaccttgacaaagatgtcatggaccatgttgaaaatctaaatggattcaaccccatatcctgcgtaaaaattcgcaatacttcgactgtacatcattcgcatgcatccatgcttttcattggttgcattgctcattgcattctt

SEQ ID NO: 141027 - DNA, 442 bp, Glycine max
agcttgtctcagcgtgtatgctatactgataccaacatgctagctatcatcgtcaagtaccaagataagtgaggtctagccgcggcccactagcataggattgcggacgaatatgcccaagtatacgcggaaaaatatgatagaggaagggtgatcgactctttacaccaagaggcaaccatgtggatggatcggtttgctcttaccttgaacgggagtcaagaacttccccgagtgttagccaacgccaaggcgatggcatacacctactccgcccacgaagagatacatgggcttctcggctattgtcagcatatgacagacttaatggcccacataaatagaaatccgtaggaaactcgtatggtctctaagaccttgactagatacgacttactttctgtaaaaaatgagatgatcccatgtttcttactccaaaagc

SEQ ID NO: 141028 - DNA, 441 bp, Glycine max
gcttccataaaagcccattcactctcttaggacccttctatttgctaatcctcttaaaaagatcacaattctggttctgcaaagctccatgcaccttatacacagacttcatattgaaaacaccatcactcgacttcggccaagctataatttcatcttgatttggagtcagccttatggtcatgttattaaccattgacaacactgttgttggaagataatcctttattaagtcaatccgccaccttccattgtcattaacatatgttgaaattgctacaaatttctagaatattcttaaatataatatgtatgaaaatagtagaatattctagaactatagtgtgtatgaatatggtagaacaatctagaactataatgtgtatgaatatggtagaacaatctagaactataagtgtatgtataagatagaagaatcta

SEQ ID NO: 141029 - DNA, 343 bp, Glycine max
acatatctcaacgacaataactttttactcggaagtcagagtgagtcccgtaatatatcgagacgcttgaaatggaataccgaagctctgagcagattcaaacgaccataaatttatactgggatgtctgattgagtccccgaatatatcgagacgctcgaaattgaataccgaatccctgacctaattcaaaccacaatagctttgtactcggatgtctgattgagtcccggagtatatcgaaacgctcgaaattgaataccgaagcgctgagcaaattaaacgacaataactctttactcggatgtctgatagagctcccgaatatatctgaacgctcgaa

SEQ ID NO: 141030 - DNA, 431 bp, Glycine max
  unsure (1)..(431): unsure at all n locations
agcttgtagaatggctagacataatacatgtctgtgttttgttnggctcaaggataaaagggatgccccacattatttccatgacacaaatgcaaaaatgatgatttggaaattttacgcaaaactggtcatgcatgcacctatgcggacactcaagtgtcaaatttttatggtcatgtgatgctagggctcaagattcatttcctctatttttagtcaacccaatgtttccaaaatatgttcttttatccatttgtgcattcatccgagtccattttgggcgtccgggaaaattttcacagcattcacccttcaggtgtatacacattttttcaaaaactagttatgatcagtgaatttttctttaaagaaaagttggaagtcatctcttttcgaaagcatgttgtgttttcagctagaacaacttattt

SEQ ID NO: 141031 - DNA, 468 bp, Glycine max
  unsure (1)..(468): unsure at all n locations
accttagagtcacctgcngcatgcaagcttgtgcaataactatgaaggcgtgcaatccttgtatgcttatttgaaacaaatacttccactatataattaattcgctaattcattttggctttgcagaacattgtgcaatcatgggaactgagggtatctgcaatttcgtatcatgcgaattcatctaatttaattaaaggatgctggtgggtcctcattggaattacaatgtcctacttctgtttactatggaggaatcaaaagcagaagctagttcaggggcatccagctgcacaacaaaagtgtttgaaacattttccaaggggtccttcaaggggagctgggaggtggaggaaaaagttattagatatattagtgtcacttggaataatcgggtccttttggttattttggcacctgaataccggaattatgcggagaagagaagaaactctagcaaatatgtgt

SEQ ID NO: 141032 - DNA, 373 bp, Glycine max
  unsure (1)..(373): unsure at all n locations
ccggataaacatggctttgcagcagccaacaaaggctcgcaatgacgatggagaccagtgtgatgctcgttggagatgcgtcacgcgatgtgtgcgtgaacctcacacgccaaggccctgcatggggttgcgtgcggcggtgttttgagttggctgcgcacatggagtcgtggacgatgtggtggcctttggcgatgatgatgggcattgttcacctgtgaaaaaaaaaagcggaaaggtccaccagggacgccttgaggtagagggagagaagaccaatgtgacgttggccagagatgcgtcatgagtcgtgtgtgtgaacttcatgcactanggccttgcacggggtcgcgtacgacaatgttntgagttg

SEQ ID NO: 141033 - DNA, 383 bp, Glycine max
ctgcagcttgatattacataaagaagagtttatttttttattttaaattatacaccatttagtctattttgaactggtaatatgattataaattgatgatcatatttacattgatgttttttcccaaccagtgaaatgaagacattaaacagtacttctgttggtaaatttcaacaacctacacctcactcgattgaagtaaaggttagtcatttaaacaatgctactttaggacttctgacattttgtaactttgtaattgtctattgttaaatatatttcatattcaatttaaagtcatgttcataccataggctatgagtgtggctattatgtcatgccttggatattgaacatagtcagcggcggtttaaaaaatgaat

SEQ ID NO: 141034 - DNA, 456 bp, Glycine max
  unsure (1)..(456): unsure at all n locations
accttaagcacctgcagctgcagcttaagcatgaagatgaaaatgtttaaataattatacctattncttcatgacatcactgatgacatctaaggtaaaaatatattccaaaactgtaaatgtaattgagacaacataaatatgcaataaagaataaacaaatggataaaaaaaaatagtattataagaaccatttatcattccatcatcttggaattgaacacgatttcttcaaaaatatgtcattttttaactattcaaacattttatactagataattggtctatgtgaggcttttcttccttgattttatgcttagaaatgaaaaatgatccctcttaactttcctttcgcataaatgaacaaatatatcccttcaaccatatctaaatcaaataaaaaatgagcaatcacttccgcataaatttaacctgaagctcagattgaaaattcta

SEQ ID NO: 141035 - DNA, 452 bp, Glycine max
ggatcttaagcaccgcggctgcagctatactaatatacctcatttttttattgctaatcccaccaagaccaacacacaggtgcaatattatgtattaacataacagtcaaataaagttagaaaacccaagatacaatacaattaaagagattgatctcttattcacgtttcaaatgaaaaatcactattaatgagacgaatctgtcaatacatctttttttgtgggcatggctagctgtgatatgtgagtggacaataatataacattgacaagaatcaatagccaacaaactcccttttatgtaatgatgcacaatagcacccattgctcgtacaaacactaaaaagtcaaaatgaatgcgtctagacttgcatgcatcgacccaagactatcaactataatgaaagcaacaatataagaactttaacaatcacccgctgcttacaacagt

SEQ ID NO: 141036 - DNA, 401 bp, Glycine max
  unsure (1)..(401): unsure at all n locations
gatcctctgagtcacctgccgcagcaagcttaagctattaattgcttagattgtttttttaaggcaaaggtctgngtggnggtcggcagaagagcataaaccacagagtctggcgacaggtgcaaatttttgattcatggccagttgggttaccaagttaaccaaagcatctagtttaccttcaagctttttaagctcacctgatgaagatgaattcgtggctacttcatgcacttttctaatgacaatagcatcacttttggcactaaattgttgggagttggaagccatattctcaattaaatttctagcttcagtaggggtcatgtctcctagggctccaccactggcagcatctatcatacttctcttcatgttgctgagtccctcataaaaaattg

SEQ ID NO: 141037 - DNA, 425 bp, Glycine max
  unsure (1)..(425): unsure at all n locations
agctctaaccttagattgatcaatgttgctcttgttgttgctcctcctatcnctaacaatccgtgcacaaatttataatttgtgaagagattataaatttaaatgcaattcgtatgaattcataccttgtcatctttcccaaacctgggaaagatagtccatttacatatctctttacttccgatataattaattcttgttgtttatttcgaggatcaagccatctttcagctctgagttattataaccctatatgaaccaagccatttttcagctcccaactattaaaattgtttataaatctcaacaatcgagccatctttctgctctggctattaaactctatgtacatctcaacagtcgagcaatctatcaatcctgtgctatcacaggtctaatatatttcaataacgagacatctttca

SEQ ID NO: 141038 - DNA, 444 bp, Glycine max
agcttatatatgcagaaatgtcactaacaaacttatgtattctattcactcaaaataaataattaggggtgaaatacaataagtggatattaatatccaaaatgtgcattaatatataaatcacacaaatacacaatcccacaatttatatttttttttcattttcaattttctttcaccaaattttatcaaagaaattgaaaagtcaaagctaacattgttaaataaataaaaaaatgaaagagtgctaatgaatgtgcccttttttgcttttatcataccctaatttcgttcggggaccttcacttcctaacattttgattcttactagcggaattgagttgcttgacactaattgtcacacaatccgaaaggtttatcaacattttggaaaagaatgcggaaaatactcaaaaaggaggtggaaaagggtctttttacact

SEQ ID NO: 141039 - DNA, 361 bp, Glycine max
ctgcagctttcaaattttttacttaataccggacattatatctatactaaaaacattaactgaaaattaaatggtttttaagtagaaaaataaatgaaagtcctggcaacaatcaacctaaaaaagtaatgggctccgtccttgagctggtgcaggctcaccataagggtgaagaaagagtatcctgggctggctgaggtgtctccagtgctgctgtaggccaaggatcccaggtactctgcgccgcctatagatctgctgcatagttggtgcccctcgcgccttcttcaccctaagagacctccacaacaggtgaagtagcatgtgaaacctataaagtcacctctagagtggcctcatg

SEQ ID NO: 141040 - DNA, 438 bp, Glycine max
  unsure (1)..(438): unsure at all n locations
agctttgtgagtgatgatctctgtggtgcaattttatattcatctttccctcgcatgctcaagagagagaaaattctgcatgagactgccatttctttaggggcattaaagttgtggagtgacgattttgagggcaagggaactttcagccagtatcgttctaaactggtatgtctcacatgcatatgtgaagtcagataatattttccatcatatacaatttctttcccttctgtttacaggaaaaatttctattatggaatgtattgtaagaaagttattaacttattatgttactgaatatcttcatattgaagntctaagatagtacttggaagtagtggtttattgcttgcaatgtttccattgactttatgtaaacctcaagtacagcatgggtttgaggagtctcctattgcatgagttattgaaacactt

SEQ ID NO: 141041 - DNA, 435 bp, Glycine max
  unsure (1)..(435): unsure at all n locations
agcttgatctgatntttaaggggtcaaactggatctactttttctccgtcctgcacttggattttgtgtctagcattttttgggcttattttgtgcttagtggcccattagtgtctagcattttttcgggatgatttaccgaagcattggatcattgggttattgttttgaatatgtttacgagtcaaattaaattatgtttgttattttgcaatttaaaatgaaaatcccccgtttttgaatttgcacacaaggtgtttggtgaaatgtgtctttggaaaacaacctagatcatttcctgtactgcataattttggagattctagttgtttttgatagtagtacgacggtgttcgtcatcctcattgtcttcctgttgttcattctgttcttgctgaatgaattgaactcatgctgtatccatttctttctggt

SEQ ID NO: 141042 - DNA, 388 bp, Glycine max
  unsure (1)..(388): unsure at all n locations
ttctcgataggtgatcctttgtgataaaggaagctgacaaaattcatcatcatttaattgaacactcttcactccacaattttttttcctatgagacacatcacctatcttgattctttgcctccaaatgcattcaatcacactaatggaaactgaatatgttgaagcaactaattctttggtattttctttcaatttcctattagaattgtgctaatataggaaattagctatggccatacggtcttcattgcttaaaaacttatgttgaccatttattctcttgtatctggatgcacctgcacatgtatcaataaataagaagaactgccgntctatgacaacaaaaattatagtgacttcaatgtattgaaacttatacaaataa

SEQ ID NO: 141043 - DNA, 121 bp, Glycine max
  unsure (1)..(121): unsure at all n locations
tacatgtcatgatgagntgcaacatacatatatatgaccctgctgctggcacctattaatgtcatccttgtctaatacataacagaacagctaaatgcatggcttgggattacttggcaga

SEQ ID NO: 141044 - DNA, 429 bp, Glycine max
  unsure (1)..(429): unsure at all n locations
gcttggtatgtcagggtcaatgttattgttgtttattacttggtaccaagagacaaaacccggtatcctgaaatctttgtgaaggctaatctgggggttcagtttttaagaactagagtatctcaaagtaaaaccataaatccaatgtggaatgaggacttgatgtttgttgctgctgagccatttgaggagcccttggttctgactgcaaaggacagggttggaccaagcaaggatgagatcctgngaaggtgtgtgattcctttacacaatgtgcaaaggaggttggaccacaagcctgtgaacacaaagtggtttaatctggaaaagcatgtggttgttgaaggggaacacaagaagaaggagatcaagttctcaagtacgatacatctganggtttgcttggaaggtggctaccatgtgttggat

SEQ ID NO: 141045 - DNA, 437 bp, Glycine max
  unsure (1)..(437): unsure at all n locations
agcttgtgaagcccnctagcctagactagtgtttttcgtgttgctcctgctaagntgatcggagagaacagtggacatacttttggctttgcaggtgacgtctgacgtgttaagtgaggaaagcctctgtatttgataactctgtcatattctaaccattagagaatgcattaatgaaaaatattatgttttacccgctgattcaggtgtgtgcggggcattcacgacactcatgcatacgtgtcacttgtggagtgggcaagtattggagatgtgatgtgtgggtgagtagggattcatcgtggtgcgaaaaattagggctccacttcagctctcgccaattaccgaagagaccatctcctctttaaatggagtggacatttgacttgtagccaccgttacttcgaacattttgtcttctctctcctgaaatctct

SEQ ID NO: 141046 - DNA, 302 bp, Glycine max
  unsure (1)..(302): unsure at all n locations
gttatgtactcataccaaatatttaagtcacaaattaactgagatttaatgaagaataagaaaataattcacatgcagacattatatatataattaaaataattccatttcagttccattttcgatccttcagacattatcttgatctacttcagatgcaggctcttcttcttcttcaaatacatcaatccctgaagctgcatggccacttccataggctttgatgngatccttaagggacctcttgtgcttgaaatcagatccacagatgcaataccatagcttgttacatntcttctctt

SEQ ID NO: 141047 - DNA, 431 bp, Glycine max
  unsure (1)..(431): unsure at all n locations
agcttagcaaattgttggcactaccttntgacttttattaatagagggctttgtagatggaggaatgcatcattgagcagaagtaaagtttatgagcagttgtgacaaaatagtgagaagaaaactagagtgttgagtaaattctaagagtgtgagaaaaatatattagggtaggtataaactttataactctntggtactgtaaaagcagtacttgaataggagtgggtatcacggaaaacattatactatatctcttgtgtgtgaaggagagtgagagattattgtaatattctttaatatattggaatacttttgggagtttgtctcatggttttttcctcggtattggagggtttttcacattaaatattggtgttcattttgatagttaccggtgtttgttttattgctttcattgtgccaccatt

SEQ ID NO: 141048 - DNA, 421 bp, Glycine max
  unsure (1)..(421): unsure at all n locations
tgctaagaaatcaacanacataaacttgttcatgacctcaatcaatatcatcaatgtatgtcatgttctaagatgagccacaactaaagtgccattaaattcagcataacaaacaccgattgtgttagatgttaaactacgaattggtgccatatatgtctaagcacaaacaatctagtacaaatctggctaaattgcatcaagttttctaaaaggctattagacaattcatatgatcattatttggctatgcttataattatacaataaatatgaactctagagccagctttaaaaaatgacacttttcttaaagttgcagactacaattgaaatcaacattcatgtataatgaagattatgctgaacctcactagaaaataatgaatcatgaatcacatcgcaaatgaactgctatgac

SEQ ID NO: 141049 - DNA, 416 bp, Glycine max
agcttctagccaaatggacttaccttgaattattttctttgatagcccttttgagccttgtgtccctttccttgttttgaagctcactacaagccttaagtgaaaaaccatgatatcaccatatccttaaggaattttggagctttggaattgttttgggaataagtgtggggggtttttgtttcattggacaacttgttttgctggctatgcttcatgatgtattttgggccatacttgatgtacattgtatattggttaaatgttggacatgctgaatgaaaagttgtttctcaaggctattgagtaaaaaaaaaataatcgacaaaaaaatcgcaatagaaaaaaaaagcctatagttgagtgaatatatcttaatggacagaatgagaactctgtctactcttagttaaatt

SEQ ID NO: 141050 - DNA, 444 bp, Glycine max
  unsure (1)..(444): unsure at all n locations
ggatcttaagcgacgccgctgcagcttanttgaagacttaccttttattttttataatactagaaacgatcgatgaatcttgaagaacggttgacgatctctccgtcatttctcacggaaacgttacagaagaacctcagcttggatttgttttcaccgaacaattttcctaagcaccattgaaagagaaagaagggcctatggggctgaacccttttcttcttcacttctccccctatttatagcaaaataggggagaagcttccgcccagctcgcccaggcgagccaagttgcttcctccagaagcaacacgcttctggaggaatcttcttgaaaggccacgtgggcctgatcgctatttacaccgccctttttactaaatgcaccccttttctattatttagaattctgtttccgtaacgtacgaagctttacaaatttcg

SEQ ID NO: 141051 - DNA, 352 bp, Glycine max
  unsure (1)..(352): unsure at all n locations
tgggctttccttctgtgtccagcatnttgggatggtnccagnntttgatgaaagntnttcaggttctgctatccagtgatttgaggaaggccaccatccttgctttccagtattcataggtggttccatccaaaataagtgggctgttcactggtcctccttctttctccatgttcatcagaatttatctccctagatctcactcagtgatttcgagtgcctgctctgataccaattgaaattctgataccaatgccagatgtcgtaccggatgtcacgacatcacgcttcagaacatgcaagatatatttgagtgttgaacagattaaacaagtaattacacaagagaatt

SEQ ID NO: 141052 - DNA, 147 bp, Glycine max
tctttgagaaaacttccttgagaagctagagcttagctacacacacccctctcataactaagctcacctactggtagagctccctctagaagatgcctatagaagctagagcttagctacacatacctctctaatagctaagctcac

SEQ ID NO: 141053 - DNA, 434 bp, Glycine max
  unsure (1)..(434): unsure at all n locations
agctntacagcagattttagtaatgacccactatcctataatttatataacttaatgccattaacctagggaattgaaaaaaacttaatggctgagtgtaactgaaattgtggcaaccaaaagtcacccccaacagccaacaagtcagccaccatttggtctcccaaaaggctgatgcctaagttgccaattgggcccttatttcaacttggactaaactaactaaagcccttttagatgattaacccaaaacatatttttggtcagccaactttacaaagattgggccattatttaaacaaactaaacactctaaaattgagacaaagtggtgtcatttagtcctcctccatttgggccatgatacaactcacaaccttggacttttctccttgaaacttgggcttgtattcaaatagtatggacaacacttg

SEQ ID NO: 141054 - DNA, 464 bp, Glycine max
  unsure (1)..(464): unsure at all n locations
acccctgagtganctgaggcatgaagcttgtaaccctggaagctctaatatctctactcctttgtggtgggccattcttggatggccctgattttctcagggtccacttggaccccatttctaccaactacaaaccctaagaaaactatattatctacacaaaaagtatacttctctatatatgcatagagggtggttttcctaaagactgaaagaacttgcctgagatgtcctaagtgatcatctaggctcctattgtacactaaaatatcatcaatataaacaactacaaatctacatatgaaatcccttaagacaagatgcataagcctcataaaagtgcttggtgcattactgagcccaaaaggcatcactagccattcatacaaaccaaacttggtcttgaaagcggttatccactcatcaccctttttcatgctgatttggtgatacccacttttaag

SEQ ID NO: 141055 - DNA, 435 bp, Glycine max
  unsure (1)..(435): unsure at all n locations
gcttttattgtaaccttgaaatttctgattgttctttgatttctgaggttgttgggataaaaatgattattgaccaatcctttttccataatntaacccaattggctagtgacggtgtaccatttgaaagtacactgaatgacgattggaaatttgatttctctgcatatgatgcccgccagttggtttgcaccaaccatgcggatatgactggacgccttcttgccggttcattggcttttgaaagccgcatccttcattatctcattgtgcgtattttgcttccacgatcttccaaccttgcctaggtttctgaggaagatcttgtatcatgtgggcctttcataccgggcgtcaacttgactgggctcacttagccaaatatcgcatgcataaggcattgcgattaaatgctccattgccatatccacacct

SEQ ID NO: 141056 - DNA, 439 bp, Glycine max
  unsure (1)..(439): unsure at all n locations
agcttttcgattcattctatggacccggagtggttcttttgtggttcgngcacttttattctcggtttggttactttttataccccctgttgacgtgcttaagccattttacttaagtcatttcttgcttaacttaaaaataaaataaatttccaccgaacgtttgaattggattatccattaacttcggttaaaataaattccgaccgttcagtcgtgccgtaaccacgttggaaatcaaaaagaggtaaaaaataatataataatcaaaaagacatcttttagtaaaataaagcggaaaatcaatcggacgctttctctttgggatttctcattcttaatcgaattgattaataactaaagtgaaactaaaggctaaaatcaattcgcctagtcaagctcgtccataaaaataggcttntgaagtttgtcatttcat

SEQ ID NO: 141057 - DNA, 434 bp, Glycine max
  unsure (1)..(434): unsure at all n locations
agcttgtctcagcgtctatgcgagacagagactttcatgttagctatcatcgccaagtaccaagaagagctgggtctagccaccgcccacgagcatagaatcgcggatgagtatgcccaagtatatgcggaaaaagaggctagaggaagggtgatcgactctttacaccaagaggcaaccatgtggatggatcggtttgctcttaccttgaacgggagtcaagaacttccccgattgttagccaaggccaaggcgatggcagacacctactccgcccccgaagagattcatgggcttctcggctattgtcagcatatgatagacttaatggcccacataattagaaatcgttaggaaacttgtatggtctctcagaccttgactagatatgacttccttnttgaaataaaatgagttggtcccaggtttctact

SEQ ID NO: 141058 - DNA, 454 bp, Glycine max
ccttaagtcacccgccgctgcagcttaggctgctcaattgctcaggttgcttatgtaagggcaaaggtctgtatggtggtcagcagaggagcacaaaccacaaacccttgcgacaggcacagatttctgattcaaggccagctgggttaccaagttaaccaatgcatccagtttgccttcaagcttcttggtttcagatgatgcagatgggtttgtagctacctcatgcactcctctaatgactatggcatcatttctagcgctaaactgctgagagttggaggccatcttctcaattaaatttctggcttcagcaggagtcatgtctccaagggctccaccactggcagcatctatcatacttctctccatattactgagtccttcataaaaatattggagaagaagctgttctgaaatctgatggtgggggcaactggcacatagtttctta

SEQ ID NO: 141059 - DNA, 432 bp, Glycine max
  unsure (1)..(432): unsure at all n locations
agcttggctctcggccgacttagctaaaataatgcatcttgattacagaggggtagttgcttagcgaattatggagcgcttagcgatgacattgctgcaaggaattgagcttaactggcatgagtggtgcttagctcgattaaacccagtttaggccgcaaagaattgagcttaattgccatgagtggcgcttagccataaaatgcaatgcgcttagcgggatggtcatcgcttagcccaattcaaaccgaattgagatgggcttagctcagccttgggtagcttagtggaccaagtcagcctgagatgcaagggttgagtgctaagcgccagagactctcngcttagtgcatgaccaaagatgcacttagcgcgagtcttgcgcttagcgaaaggactatntttcagaaaaaaatttctgagttatttttt

SEQ ID NO: 141060 - DNA, 443 bp, Glycine max
  unsure (1)..(443): unsure at all n locations
tgcagcttagctctatgagtgtctcatcttcagtgatatatcttgcatctgctttcctaatttaantatggaatcatctttctgcacctaagtgacacctcttttcgtaatccgtctatcccttaagttattgtagggggtagaacacatgtcttcaatggatttgatgatatatgtaagggctttaacatgaaattgccataacaagcaacatctaaacttgtcctattatgtgaagacattccaccatagaaaatatcaaccaaccttttgtgagaaaagccatggtgaagacaacttttgatcatctcttgcaatttttcctaagctttaggtagacttttttgctccatctgcaaaaaagttccaatgtccctaatgtattgattngtcttcatggaagagaaatacctctntaagaagacacttattccatgtagtga

SEQ ID NO: 141061 - DNA, 432 bp, Glycine max
  unsure (1)..(432): unsure at all n locations
ctgcagcttgatgttatggttgagatggtatttttttttatggccctgnggtgnggcttctactcggtggtcaagttttttatgattgatttggacttttagttccattggagcgagtgtcatggagatgccgaaagaaattctaaggccttgtagttggttgaagacatctaggaattatgcacctcagtcgcaccatttttcaccttggtcgcaccatttctctccattggtttcttgcttatcaaccttgtatattctggtttcattatcatttgatattttgatgtaactttgtattgtcctctccaagctgcaagtgttgtgaatatacttcacttccagcttacgggaatattagagatgtagatagtctggccatataaatcacaccacatactattgtaactcgatntactcattttgagtaat

SEQ ID NO: 141062 - DNA, 440 bp, Glycine max
agctttgtgtaatcgattacatggttttggtattctatttctagtgacaagatttgaataaaaatcaagacatgtaactcttccaatggttttcgggtttttctaaaggttataactcttccaatggttttcttgaccagacatgaagagtctataaaagccagacattgatttatatttcaataactttttacaacttttacacacaactttttgataaccttttgatatctttcttcttcttcctttgccaaaagctttctgagttttctggtttccaaactttgttctttcacaaaaaatagaagtgtgctatatcttttcattctcttctccctttgccaaaaagaattcgccaaggactaaccgcctgaattctttttgtctctcttctcccttttccaaaagaacaaaggactaaccgcctgaattcttttatg

SEQ ID NO: 141063 - DNA, 391 bp, Glycine max
  unsure (1)..(391): unsure at all n locations
gatccttaagtcacctgcggcatgcaagcttgcaatatattgagtaatatccccctnttctatgtctttttctcaataaannagaacaatcttgattggaacaggaaattctttttaacatttttttacactcgccttcccttctcttaaaagattaaactagttatcaatgtcttaacttaaatattggataaaacacttaggtgaagctggatgtgattaagttcattaatatatgttgatgttttgatggggttttttctccacttctccctcattttcattcaagggagataaggcttcccttatttccttctcggcttcacattgtattatgtgttttaaagagcttttgatttgagaatcttggnttcaaggataatgggtcatg

SEQ ID NO: 141064 - DNA, 445 bp, Glycine max
agcttagtgagtaaaataaagcccatatatgttttattaattaaggaaagcaagctaattgagaaaagaatggctaattaaggaaagaaaactaattgaagaaagaatgactaattaaggaaagaagactaattaaggaaagcaaaataattaagcaaatgaggctaattaagaaaagaatgactaattaaggaaatcagattaatttagaagcccgttaatctgcacctataaaagaagaagagagaagaaggagaagacacacataaattccatgagaatacaattccttatagaaggcaaagactagaagaaggagaagcaagcaatgagagtcattcattccctcctttccctttcttatctttgcccccttgactaaatattcccctcttgtaattgtaaagtttccatgacaatgagagggtaaacctccttttgtggg

SEQ ID NO: 141065 - DNA, 387 bp, Glycine max
  unsure (1)..(387): unsure at all n locations
gcgatggtgcacaacaaagttttcacatccacaaagcgcgcataaacccatcatcccctgttgcccacctccaactgagctcacgtactcccacataacccatattctcgtttctctcaacaccgggtccgcatcaatcctcccaagctttcccaacatcaaagtaatacaacattcaaacagcacaaactaccacagccaagaaaacagggcaaaggcagaaaactctgctcaaaacaccaaccaaaatcacagcttntctcacttaaagatcccagtaacaattccttcgatccaaatcgttaaccggtggatcgactccaaaatttactggaagtctatagtacataagcctacatnttgaccggtgggatctactagcaaaca

SEQ ID NO: 141066 - DNA, 459 bp, Glycine max
  unsure (1)..(459): unsure at all n locations
gatccttaagcaccgcggctgcagcttatagaacaaaatgcctaatttttttttcgtgcatgtgaattaggaagcatcaacaagaatcaagccaaggctattgtgcaagcaatcaatggggcaaaacacaccaaaagattatgatgatgtgtcgcaacctccccttcggcgggagggcgaagcgtgactcgcgggatgcgtgttccacgaaaggaatacgcgcggagtcgccaccaacgtttatttgaggaaaacgtcggaaaaaccggaaaagacgcgatctacgaacttttaagtgaaaggttcgggagttgtatttacgcatggggaaggtattagcaccccacacgtccgccccaagggacggcagcctttaatcgaatgtgcaaacatgactntgattttacgttcctttttatgtccttatatccttttatatcccttttatatttttctctt

SEQ ID NO: 141067 - DNA, 437 bp, Glycine max
  unsure (1)..(437): unsure at all n locations
agcttgtaggattatggggtacccatcatatggtgattatgtgacggncgggcgatggngcaaaacaagttctccacattcacaaatcacgtacaaacccaccatcccctgttgtccacctccaactgagctcacgcactcccacgtagcccttattctcattcctctcaacgccgagtccccatcaatcctcccaagcttccacaacatccaagtaattccacatccaatcatcatggactaacaaaaccaagcaaaacagggcaaaggcagaaaactctgcccaaaacacaactcaaaatcacagcttttcacatacaaataccccagtaacattttcttcgttccaattcgttaacgggtggatcgactcgaanatttactggaagtctctagtacataagtctacctttntaaccgtgggatctgctagcaaa

SEQ ID NO: 141068 - DNA, 398 bp, Glycine max
  unsure (1)..(398): unsure at all n locations
cactatatattactctagcgtatgctgcaaacattaacaatagacctcctctacctcaacatcataatcatccacaatatgaacatttacgacactcgcatcaaccgatacaaccctggatggtggaatcaccctaatctcatatggtctagccctcagcaacaatagcaacatcctactccttccttccttattgtngttggccctagcagaccatacattcctccaacaatccaacaacagctacagtcccagaaacagcctacagtngaggctcctccacaaccttccctcgaagatcttgtgaggcaaatgactatgcataacatgcagnttcaacaagagaccagagcctgcattcatagcttaaccaatcatataagacacttggctacaca

SEQ ID NO: 141069 - DNA, 422 bp, Glycine max
  unsure (1)..(422): unsure at all n locations
agcttgcagctnttagaattggagtcataacctatgaagatgtacttctcacttttgtcatccaacttgcttcttttttcatctaatacgttcacatgaacacgacttccaaaggatcataaatgtgaaatggtgggcttcattccactccatgcttcttggtgtgttttcccccatgcactttttgttggagattggttggaaagataaactgtgtaacactccattttttgtaaaataaattaaaaacaattttatttaaaaataaatagaattttaggaaaatagtgagatttttgtaattaaataaataaggatatatactttcattaattaaaataatggttttaaggtaaataaaataaatatatgttcttataaaataaaaaagatgtttatttattcatttgatagggagtaaa

SEQ ID NO: 141070 - DNA, 433 bp, Glycine max
  unsure (1)..(433): unsure at all n locations
agcttngctctcagattcctcgtggtggactaaacttatttttattagcccacgaaaggttagactagtttaatctatactttatcctcagatccctcttgttgaactaaacttagaacaaacatcattattgtgacaacatatttaaaaccaaaacttaatccacagatccctcttgtaagactaaggttcaattctacttcattcaagttctaaggcaacaatacatttcccaatgctaaagtcacctaaccaggcacactaatggttgatcagaccaagagcatacaaaatttaagcactgaaagaagcattgaacacaataaacacaatcgattagatatttaaataattatatctgctgttcttttgaaacctcaacaagagtgtgtagccgaccattacagaagaaaacctaacaataatgagatta

SEQ ID NO: 141071 - DNA, 410 bp, Glycine max
gctgtccaaagtagccttgggcatgacattgaaggttttattcattatcaaagagcactctggccactatgtggtccaaacatttgacagatacgtgcaaagacttgttatattccctgcctttgatgggtatttccttatccgtgaatgtgaggtaattgttgaccgtgatgttgttgatcctagttggagttttatatagttgttcaatcaccttgaactcactctgttggaagattctcaggaattcggttgctttttcagcggatattccctctttgctgaagtcatcctcttccttggcaaaccttccagtcgggatctcatcattcgccttatcgctctctactagatctgccttcgctttcctttttaagtctctggatcgcaccgatggctcgggtgcttgc

SEQ ID NO: 141072 - DNA, 388 bp, Glycine max
  unsure (1)..(388): unsure at all n locations
ttcggcactttttttatatcctcaagccggncctatacatataaaacaagcccacaacccaaagctcacaaaaccatgcctatatcttgtgagggatttcaccgaacacttggtgggggcatgcttaagcccgaataataaaaaaatggggaccatgtggcatgcgccattactttagaatacaccctagggcaaaggcatcccttacaacccctcaattcaacaaaaacaagcaacaatctgaggataaatccttcacgttttttaaccaacacatgcaatntagagcaccaaaatacatctacggaaaactataaagcccaagaatgaggtacttactttgtggagaccaataatagagcnaaacggaatcaaaaacgcaaaaaat

SEQ ID NO: 141073 - DNA, 444 bp, Glycine max
  unsure (1)..(444): unsure at all n locations
agcttgttcacacatcgaaatagaatggaagattttatttatttatggacctaaanntttttccattgaataaaatttaaattaaataacatatattataaaactaaattaaaatagatgcaaaacttaaattactaactaaaatactctacaaataacaaaattaaaaattaaaatacatacataagatttaataaatgacctacatttttttccatttaataaaatttaaattaaataacatatattatacaactaaattaaaatagatgcaaaacttaaattactaactaaaatactctacaaataacaaaattaaaaattaagatacatacataaatgtaaataaatgaccaaatttttttccaattaataaaattaaaattaaataacatatattattcaaataaattaaaataaataaaagaagtactatagaaacaa

SEQ ID NO: 141074 - DNA, 453 bp, Glycine max
  unsure (1)..(453): unsure at all n locations
ttaagcacctgcagctgcagctgtagatatggggacccatcacatgttgttcttgtggcggtcgggcgatggtgcaaaacgattctccacatccacaaatcacgtataacccaccatcccctgttgcccacctccaactgagctcacgtactcccacgtagcccttatcctcgttcctctcaacgtcgggtccccatcaatcctcccaagcttccacaacatccaggtaattccacatccaatcatcatggactaacaaaaccaagcaaaacagggcaaaggcagaaaactctgcccaaaactcaaaccaaaaatcacagctttttctcacttaaggaccccagtaacatttccttcgttccaattcgttaaccgttagatcgactcgaaaantttactggaagtctctagtccataagtctacattntgaccgttgggatctgctactaaat

SEQ ID NO: 141075 - DNA, 430 bp, Glycine max
  unsure (1)..(430): unsure at all n locations
agctagngactcttggcaattgctttaaaactattttcttaaaaagnngcgacttttgaaaaaatctttagaaacaagtcacttgaagaattgtgacttttggaaatgtatttttcgaaatcagtcactggtaatcaattaccattaagtgtaatcgattacacatcaaaagatgtgactcttcattttgaattttgaaaattaaaacgtttagaagctctggtaatcgattactatcttctggtaatcgattaccagagagtaaaactctctagtaatgattttgtgaaaacttcttgtgctactcaatattttggaaaactttttttagtacttatcttgatagagtactctcttgaatcttgaatcttgatcttgattctcgaaaacttgattcttgaagctttggaatctgctaactctcattctt

SEQ ID NO: 141076 - DNA, 435 bp, Glycine max
agcttgacaaagagatataaaacatctaatctgtattgttatcgaagcacagattgtactgaacattgagtcgcaacgtaatttgtctttgtgtaagtgaactctaagtacaagtctccctaatgttgcaacctgagtcgcgacgagacgaaccatactcaaaacgataaagtgttgaattgttaacaagtcgtcaccaatattttttactaggaaaacattgagaaaccttcttatatgaagaatactcttcgaaaaccacatttgggttcgggaatccattacgcgcaagacaggtgtgagcaccctatgacgtccatatttttttaaaaatggtgacctttaattaattaaacaaataacttttaaaatatttatttgttaaccgattaacaaatgtaccaattttatcacaagtagtcaagattaaaacgg

SEQ ID NO: 141077 - DNA, 432 bp, Glycine max
  unsure (1)..(432): unsure at all n locations
agcttgtccttggtttagacatgattgatactttatttangacttgtaggattcaatttgggaaaaattggatgagggcaagtgtgatttcgaaaatctgcactttatgcagaattttgctgtcaaatatgtgcagcagaattttggctttgtgcagaaaatgttgtgtatttgttggttctggaaagagtagtacagattgggttctggacgttttcttgcagatcccaacggtcacaatgtagacttatgtgctagagactttcagaaaaattttcaagtcgatccaacggttaacgaattggaacgaggagaatgttactagggtttttaagtgagaaaagctgtgatattggtttgtgttgggcagagttttctgcctctgccctgttttccttggttttgatagttcatgatgtttgggatgttgaa

SEQ ID NO: 141078 - DNA, 303 bp, Glycine max
  unsure (1)..(303): unsure at all n locations
agctttgttctttttataaaaagagaagttcttttctcatcatgttatctaanaaaccttggggtggatccaagtgctccgatcattcatttgcatattcatgttntggtggcatactcacccgctgttatttctttaggaatttcatcataactaagaaaacaccaaggcacccctataacactcaatccacaaaaatggataatgaagagggcgtgcaggaataaatgaaggccgatctatcggctttaaaagatcaaatggcttccatctcggaggtcatgttaaaactccagaaaacta

SEQ ID NO: 141079 - DNA, 424 bp, Glycine max
aaaacatgagcctaacctttttatttaataggtcagttcaagtcagactttatgtaggttaagtcgtaggcccctgtaagccggcctgacctattcccacccctaacaattacacgcactcaaaacttaaatcctaaaacattgcctcaaatcctttaatttgaaaacaaccctcgtatttttttatgagacatatcggaataccacttcatcaaccacgccaataacgtataaagcaaccacaagataaacgcatgttatttgaaaagccataagtacctcaatcaaaatcaatgcacaaattgcaaatgatcttaccaaccaagagtccagtttcaaaatgaccagcaatgacagcggaaaaatcaacaaatttgaatttcctaaaaggtaagtgttccgtatcatattgcctaacaacagt

SEQ ID NO: 141080 - DNA, 295 bp, Glycine max
  unsure (1)..(295): unsure at all n locations
cacatatcaaatctaaaaggaatcaaccctgcttactgtatgcacaagaaaatcatggtagaagactatagaccagnnagacaaccccagagtaggatcaacccatcaatgattgttatgngcggattgagngctcaagcttctagaggctgggcttatctaccccatttactacatgtgttggtgaagcctagatcattgtggaccaaagaaaggtggcattggcagcattcggatngaatagaatgacctaatcccaacatggattttcattggctgaataatgtacatcgac

SEQ ID NO: 141081 - DNA, 366 bp, Glycine max
  unsure (1)..(366): unsure at all n locations
agcttggttcgagggacttaccctttgtttatctaataacgangaagaacgaatgaagaacgtctaagaacggttgaaatctttgcgaaaatcctcacggaaaacgatacggaaacgttacggaagcgcctcggcttagattatcttaacggaaacaattttttcaagcaaattcgaaagagagataagtgcctaaggggctgaccccttgcttcttgccttcctcccctatttatagcaaaagaggggaggtggatgccgcccagctcgcccaggcgagcatggttgcttcctccaaaagcaaccgccttctggaggaatattcccgagggcccaagagggcctgggtgctatntgcacccccat

SEQ ID NO: 141082 - DNA, 462 bp, Glycine max
  unsure (1)..(462): unsure at all n locations
accctaagtcacctgcggcatgcaagcttctggaaatgcagaacattggatattntgatgaatttatcgattaccttattttataattgattagatctgttttaactatcaaaaattataaataccgctatgtgttttctttgaaaatgactcttgataagattagtcttgaagaaaagcattttgagtcttctataaggattgcactacatttagtttgaagattcaagataatcaaagaatcgttcattctaccatcatgaattgatcatcttatgaagaaaatttgaagatagtgaacatctacacattttaggtgtattcaatccttaactttcattcgtttagattgtgtttcttggttagggttactaagagggttagagaattgatagagcatcaattctttgtcttgtcttctctatatagnggaaggtccaagagctattagaacaactagat

SEQ ID NO: 141083 - DNA, 433 bp, Glycine max
  unsure (1)..(433): unsure at all n locations
agctngcaattcagtgtcttaaggatcaggtttttcttttttctatttggccttacctgatttttcaaagacttttatagtggaggttgatgcctcaagaatggggtaagaattgttctcatgcaaaaacaccatcccataacctttataagcagaagcttgaatgttcaacaacaatccctgtcaacctatgaaaaggagttactaactgaggtgtttgctgtacaaaaatggaggcattacatattacctaagcagtttgtaatcaaaactgatcacagaagtctcaagtatattcttgaccagagactttccacagctttccaacaaaaatggttggtaaaacttatggaatttgatttcattattgaatataagcagggaaatgagaaccaagctgctgatgcattntcaagagttgaatgtgctacta

SEQ ID NO: 141084 - DNA, 440 bp, Glycine max
agcttgaaggtgcgtagtccaccatcttttcatagtttaatacctagaatgggtctactatcattaacattttttctccggcattgaggggccacttgagcttgcaagttcttcacctttgggcgtattctttgaaaagaccgggcccccttttttgcacatattttgtagttgcatcctatccgaaaccattataccgacactgcctaacgaaggcaaccattaggtcctcccaagaatggactcgggaaggttccaagttagtgtaccaggtaacaactaccccagtaagactttcttgaaaggaatgtatcaacaattcctcatcttttgcgtatgcccccatcttccgacaatacatctttagatggttcttggggcaagtaatccccttgtacttgtcaaagtccagcaccttgaacttgagaggggtgatgata

SEQ ID NO: 141085 - DNA, 425 bp, Glycine max
  unsure (1)..(425): unsure at all n locations
agcttaaatattcaatttcgagcctctccatatattactgttctcaatcaaacatccgagaaaaacgttattgtcgtatgaatttgctcacaggttcaacattcaatttcgagcgtctctatatattacgggactcaatcatacatcccagtaaaacgttattgtcgtttgaattggctcagaggttcaacatttcaattcgagcgtttcgatatattacgggactcaatcagacatccgagtaaaaagttattgtcggttgaattggctctgagcgttaacattcaatttcgagcgtctcgatatatgacgggactcaatcaaacatccgagtaaaaagctattgtcggtntaattggctcaaaggttcaacattcaatatccagcgtctcgttatattacgggactcaatcacacattccgat

SEQ ID NO: 141086 - DNA, 355 bp, Glycine max
ctaagaccaaaccttctagttggatctttacaattcacctcacggttggaaagaattcaaggggctgttcaaggatgattatataatgctcaatgttgagaactttgatgtatgactatgctaatcctaattgtttgagaatatgctcatgattgtgatgatcttaatagaatctatctgtattaactctgagtgtgtgtattaatacttattgcattttaattatatattgcatctggatctcttgattatcgtgatcacttatatatacgatacatggttgtgtcatacatgtctggaagagctataatagaaatcttgatcaagtgagtggatgacctcgtatatatatcta

SEQ ID NO: 141087 - DNA, 186 bp, Glycine max
agcctttgtgatgaatagatgaagacttttgttttatattctctatactgtcgaaaaagtgtatgtgttgatgcgatcactgttgctgatctgcaatcaataactgcacgctggtggactgctctcccatgtgtgcgtgatggttgcgatctttcaacatcggtgaatcgatatgtcttcttaaac

SEQ ID NO: 141088 - DNA, 427 bp, Glycine max
  unsure (1)..(427): unsure at all n locations
agctngcatgtcatgtactacacatgttgtttttctctatggctaaattattggagttccttttttaaatgttatgaaaaagaaattgcagtgattgaaggagccgatagcaaagccaataaaaaatgactgattaagcaataggcatgaagctcaagtccacatcaaagggtttatggggagtgtgactactcccaaaacgcttgcaatgaatgaaatagttaggggggaaatattcttgttcacgtgtaacaaaagtggttgctgcaagctcataattttgtatgcataagtataacttgttggccctctcgcttgtggtaaatcacaccctgctttgattggtaatcttgttaattntactaattnttgctatacctcttcttggtttcactgtacaagataactccaatgatagtgagtgcat

SEQ ID NO: 141089 - DNA, 430 bp, Glycine max
  unsure (1)..(430): unsure at all n locations
agcttccagattagaacctgaagcttaattatgtgatttggagaacctaccttctcatagaactttatctgatactgaagttataaccaagagaatttcgcaacaacagttgtgggatatttcaactgcttatgaatcattgttgaggcagaaatctagggctaagtggatcaaggagggtgaccgaaatacagcttactttcacaaagtgataaatttcagaagaagctcaagtgttgttcatggtatcctcattgatggtgtttgggtccagcagcctgaccttgttaagaaggcagtggttaacttctttgttgagaggttcattgagcagaatcatcatagacctactttggatggggtttactntccctccatagatcaatatcaaagagaggggttgattgctccctcttctgacatagagctc

SEQ ID NO: 141090 - DNA, 309 bp, Glycine max
  unsure (1)..(309): unsure at all n locations
aaatgatttcaattctaatatttggttattaaagaaaaaatatgaactaatttgaagttgaactcaaataataattcaaatgatgtaatnttaaatttagnatatatatatatatatatatatatatatatatatattgggagttattgggaggccacgtaacttttgccaccttttgctaacagctagtttgatagttagacagggatcgattatttttccgttctccatcaactctcgaacgttgaataaaaataaatcaactcttgcaggtgcttaagttatagagcaatagtctttgtttggata

SEQ ID NO: 141091 - DNA, 435 bp, Glycine max
  unsure (1)..(435): unsure at all n locations
agcttgtanaatggctagacaagatacatgtcttggcttggtttgggtcaaagataaaaggggtgccccacattattttcatgacacaaatgcaaaaaatgatgatttggaaattttatgcaaaactggtcatgcatgcgcctatgccgacgctcaagtgtcaaatttttatggtcatgtgatgctagggctcaagattcattttctctattttaaatcaacccaatgtttccaaaatatgttcttttatcaatttgtgcattcctccaaatccacttcgggcgtctggggaaattttcacagcattcacccttcaggtgtagacacgttttttttcttcaaaaatcggttatgatcaatgaatttttttcaaagaaaaagtggaaatcatctcttttcaaaagcatgtctgtttttagctagacaacttatttt

SEQ ID NO: 141092 - DNA, 282 bp, Glycine max
ctatgcgtctggcacaacaggcactacatcatatattatgaacttgatcgaattctgcttggccttatcaaaaacctgatgcctaattcggtttttgcacgctcgttagcatggctgcttgcaagaaactgtcagaaatgggtgcactcactgacatgctattgcctgataaacgaaatgggggagaaagagaaaaggatgaacaaactgatgaaagagatccacttccacggactgctagacataaggagtctcaccccgaaagagtggctgacatactga

SEQ ID NO: 141093 - DNA, 434 bp, Glycine max
  unsure (1)..(434): unsure at all n locations
agctntaggagaaaccataaaaactaagggagtttctattcaaataataattgaggaagcttcgccaagtatccccattgaaaaacctttattcaaacctttcaaagttagtgagaaggctaaacgaaaaattagggaacttagaaaaactaaatccttaattgaaggcgtaggtgataaccatagtgaattacttaacaagattggtagtttacttaaagtcattccagatactccccaagcctcggaaaatacttccaaaatggtaacaagaagtacctacaaattaattaatgttataattgaagatagtgaccaaagctcagataacacaactgagataggatcagtgtcagaaatgaatataaatccaattaattccaaacactggaaaacacccttcaaattatattatcaacgtccaactgcccctg

SEQ ID NO: 141094 - DNA, 462 bp, Glycine max
gaccttaagcaccgcggctgcagctattcaaatttgaggacgactgaaatgtatattatgagagaagaaatgatgattctacaccctaacattcaactttattgtcttttcctgggagcagcttgcatcatcttttctcccttctgctcactttttcttcatttcccccaaatttgctcttcctagccaacggatttgatggcccttctatatcctcttcatatagccagcgatatccgtatttcttcacctccgcatatgactctttccactcatcatcacattccaaaaccaatctgccaagatatttgtgcttgagatgaaaatgataaatgaaatccattcgtttaacaaggaataggcacatgtgatctgatttgtctaaaacaagttctagatctacatctccataaaaatccactagaatatcaccaaaatcagggtagatcctttctgtctctg

SEQ ID NO: 141095 - DNA, 452 bp, Glycine max
  unsure (1)..(452): unsure at all n locations
taagcaccgcagctgcagctacaggaanttttcctagaaaagtaggactaacattttcatgagataattcaaagntgtagaaacaagacttgctcattttctaactcctttacacttccgagcaaacaacactaaccttgtgtgtatttgataagctaccaaaatgttgcttaaacatgtcttcttcaaatggtagactgctcaaattgccatcagtagttatttctgacacacttccagattcacttaaatataactgctctgctttactctcagaaacttcttcagaacaccaagaagcatcattattgttgcaaccaacatattggtctggagcaacaccactcttttcgttcttgctaaggttattaagcccaaaggaattcttgtcctcactaatcacagccttatgtcgtcctgcaataagccattatttacaaggttagagcata

SEQ ID NO: 141096 - DNA, 426 bp, Glycine max
  unsure (1)..(426): unsure at all n locations
agctngagttgaggaagtgtagaagggtgaaactttcttctcttattcgntgaccacagagtggtacctggagatatgtcgcgggggtcaagagaccttggggacgtcagggggggtgctattgcccaaaaccaagcttgaccaatcccgacccaacccgggcatattcggtcaatgagaacctgtgatgtacctaaacaagcgagctcctggcagtcaacagataaaaggaacaaagaccacaaagcatggaggcttgtggtggctggccagctgtgaactttcattgatatgtgggttatggcctcttggaatcgattaccaagggtgggtaatcgattacaaggcttaaaaatgaagacaagaggctaagatggtctctggttatcgattaccacggggtggtatccattaccaggcttgaaa

SEQ ID NO: 141097 - DNA, 413 bp, Glycine max
  unsure (1)..(413): unsure at all n locations
agcttattgaanaaatggatatcgtaatgcagttttgttttttgtatctgaagcggaatatggggtagtaatccaattccaagcaggcatcactaactaggtgcccttttttatctactaattgatcaattcaaatgtaatgcatgaagttgtgatcaccgacaaatttgtacgtcaagaaaactacagcctccagcagcagnatattatgttttctttttttcaaaaagacaaggctcaagtgacctcatttacaaaactaaaatgtatgcatgaccatggctgtctttggttataatattaatgtgctaaaacattgaaaataaaaatttaggcatcaacctaatatcaatacgagcccacttgttcccattcttgtcatgatcaagttcattgggtcatccatgtacatt

SEQ ID NO: 141098 - DNA, 427 bp, Glycine max
agcttgaacggacaaccacattcactgttctttatattttttacaacgaattgttggggcctacacctatactaagtactgcgtgaacaaggaattaacacagacgaggggcttactctactacaagtgcctgtgtcagaccttataaagaccgacacaaatccgttgtcgtgagcaatgggtcgagcccactacaaaacataatatcagatggcggacaccaactaggcaatccagacaattctgaatttctgccacacattcgctttattaaagaactcatagtaatgaacattatcacccgagatggattgaatgcgaccgaacactcgacatgtggagcggtcgcaccgcatactccttatgctaataaccatatataatcttcggacgtatactgaatacatacgtgatctcgacatataac

SEQ ID NO: 141099 - DNA, 454 bp, Glycine max
  unsure (1)..(454): unsure at all n locations
ttaagcaccgcggctgcagctccttttcccttaggagacaagcttattttaatcgtcgacgatttggcctgtataatcattgacgacaaccacgacagtactggtgtgcttcacgacggcaaccaacttagagagacaagcttaagggtacaaaatgagtgaggtaatgcgggctagggtacagtgcgagtatgcaagagaaaaagataaaaatctacttcagattcaaagacggtgttcataaaacccgtctttggataatgtagttcaacaacggtgcagtaaacccgtttttgtaacgcgcagataacgtcatttttaataaaaacgtcattgaaataaatctcttatttactaaaatgccaccgcctctaaaacaacatcatatttggaaccaccgatgttggcaacgcgtcttagaatactattattntagtagtgtacggaccatgtt

SEQ ID NO: 141100 - DNA, 419 bp, Glycine max
agctatccttatggcttgcctccggacttcttctttttgtccccccggaagatttaagccaagcccctactttcgaggggcaactcccaccttatgacgactatcccaggcaagacgatgaggaatgagatacccctcttggccccctgctccacctcatatatccgacctcccatgaactacctccaccgaacatagtccgccatatcccagcttcacccacacccgtaaaagaatctcgtcccttcgcgggagataagggaaagatcgagacgcttgaagagaggttgagggcattctacggcccttacaataacccatactcggatatggcggtattatgtctcgtgccctacatccgtcataccttccatattcaaatgaccagactttgatatagtacaagggacgacatgtcc

SEQ ID NO: 141101 - DNA, 343 bp, Glycine max
  unsure (1)..(343): unsure at all n locations
agcttgagttgaggaagnggagaagggtgttattctctgctcttattcgccgaccacagagnggtaccaagagatatgtcacgggggtcaagagaccttggggacgtcaggtggggtgccattgcccaaaaccaagcttgaccaatcccgacccaacccgggcatagtcagtcagtgagaacctgtgatgtacctaaacaggcgagctcctggcagtcaacagataaaaggaacaaagaccacaaagcaaggaggcttgtggtggctggccagctgtgaactctgattgatatgtgggctatggcctctggtaatcgaataccaagggtgggtaatcgattac

SEQ ID NO: 141102 - DNA, 435 bp, Glycine max
agcttcggaagaaagtgatgaggtacaagccctatatgcagagcttgaaagagctcgggtagtcgaagagaagttcaagtccatagccatcaaagtctgaaaagagtatgatgaactaagggacgtcaatatggccacagctgaagccttggaacgagaaaccaagaaggcccgaaaggaagaacacgaccaaagcaaagttttgaggggctttatagggcagcaatagtgagctcaagctcggaagaggtgaaaggaatcatcacgggtcaaaggcatgatcttgaaagacgagctaaaggcttgccttatgtcgaaaagaaatttgtcccaacagttaagcgagactgaagggaatatgtgggccatcatcgatgagtgcaaagagaagctaaatctagcggcgactcacgagaaaaggctagaggatgagta

SEQ ID NO: 141103 - DNA, 434 bp, Glycine max
  unsure (1)..(434): unsure at all n locations
agctntatagtatgcttttttcaaattttatcttatattggaagtctttttaaatttattggcaatcaaatntattttgtgataatatggtcaacccgtgacagatcatgcattcatgattagtataaattatatgcaggatatatgccttctgatctttacaacttgaattcatcctatggttctgtggaagagcttaaatactgtatagaggaaatgcattctcaagatctgctggtaagttgtgctgctaattttgaacagttgactacctgaagatgtataggagccaacttatctaagtggtaggaagatgttaagtcattactcatttcatttgagatctcagttgccttcttacgataaattgtgtgggaatgataatacatcatgattatttntaaatgaaataaccttggtttataagacttaat

SEQ ID NO: 141104 - DNA, 282 bp, Glycine max
  unsure (1)..(282): unsure at all n locations
gagaaacttttgtngtgactgccattcttatacgatctagtttcccaccaacccaacaatgtcattactcagccaataacaaaccttctacttacccaccgtccagntatccattaaggtcatccctaaaatcaaccacaaagcctacctaccgcacttgcaatgacaaacaccacatgtagtcgaaaccaaaacaccaaccatgaattgaatttngcagcgagaaagccttataatacaccctgattttagtgtactttgctgacttgctcccatatctac

SEQ ID NO: 141105 - DNA, 231 bp, Glycine max
cccgggaagcccgcacgaaaaagcaaggcacgaggggaaagggaacgagcgtaggctggggccggagacggcagcaggcgaaacgacacgaagagggagcgaaaccccggcaaaggggggggaggaaacaaagagggcgaaccatccaagggcccacagagaggaagacaggaaaaaaaagagtgcgccaagaaggggggcggtacaccaacaagaggggaccaaaagaga

SEQ ID NO: 141106 - DNA, 397 bp, Glycine max
  unsure (1)..(397): unsure at all n locations
gtcagaatgtcancactttgattctctgtttcgcagtacaataacttcacttctccttccctttgaacttctcttaaaagaaaaagctttatcttggaaagcttaggtttgccatgaaacactggatcattagcaattaagattgcagcctggttggccacaaaaaactgtgtgctttcttcttgtttcatatgcaaatctgtcataatttttctgatccaaagagcttgattcactggagcaacagcagctacatactctgcttctgcaggtgattgagctacaacttcttgctttttagaacaccaagaacagactcccgaactaaaggaaaaacaataaccagaggtgcttctcatatcatcaatacaacctgcccagtcactatcagaatatc

SEQ ID NO: 141107 - DNA, 363 bp, Glycine max
  unsure (1)..(363): unsure at all n locations
aaatcaatatgacacatcttgtgagcaccggagaagacctaaatcaccccgtgttaaccggcttggtcgccgcgattgaccaatggcgcacaaaaccacgttagtctcttcgtgctattatgcttttcgtcttacccacagcaaaaaggttattccgattaccactcgggtattttcgcccgtcagcgggactcaaaagtcaatatgacagatcttgtgagcgcggaagataacgtaaatctccacgtgtcaacgggctttgcggctgcgattggcgaatggcgcataaaacgacgttagtctctgggngctatcaggctttttggcttacagacagcgaaaagtttatatgaataacccctc

SEQ ID NO: 141108 - DNA, 471 bp, Glycine max
  unsure (1)..(471): unsure at all n locations
gacccttaagtgacctgcggcatgcaagctttctctntatgaataatgtggtatccactttatctctggagaattctttttcaagaagaaaattacttaatcgttcataccatgccctaggggcttgtttcaaaccataaagagccttttgtaatttataaacatgatttggtttgtcagaaatttcaaaaccagggggttgttcaacatatacctcttcttgaattaagccatttagaaaggcactcttaacatccatttgataaagtttaaagttcattatggatgcatatgccaaaagcattctaatggcttctaatcttgcaacaggagcatatngttcttcatagtctatcccctcttcttgattataccctcttgctactaacctggctttatttctaataattataccatgttcatctaatttatttctaanaacccattttgttccaatgacagggataattt

SEQ ID NO: 141109 - DNA, 261 bp, Glycine max
  unsure (1)..(261): unsure at all n locations
taatgaataaatgagacaatantatacaaaaatactatgacttaatttattagaaaaacatgttaaattttttttgttaaccaatctgaggtattagaatttgacatctggataactncattagcatatataagaataaatatatcttaattggtatattgcatacactcgcattaagnactttaatgattaaagttgacagaaatatgatattaaaacataacttaattgataaaaataacattattttgtgtataaaaa

SEQ ID NO: 141110 - DNA, 417 bp, Glycine max
  unsure (1)..(417): unsure at all n locations
agcttcatgatgatgaacaacaattttgatgttgttctttatcccaaatgattgattcaagattgattcaagatttcaagatcaagcatcaagaatccaatccaagattcaagattcaagagaagaaatcaagaagccacaagtcaagaattcatataggataagtattaaaagatttttttcaaaaaaccaaatagcacagttttgttttacaaaagaattttctcaaattttctaagttaccagagtgattactctctggtaatcaattatcagttggcgcaacctacccttcggcgggagggcgatgcggggctcacgggtgcgtcttccaagaaaggaaaatgcacggagttgccaccaacgtttatttcaggaaaacatcgaanaaattggaaaggtgtcgtctacgaactt

SEQ ID NO: 141111 - DNA, 434 bp, Glycine max
  unsure (1)..(434): unsure at all n locations
agctngaccaagcagtgaacatgtgaacaccatttataatagtggcacattccacactttgagcttgttgaagctcatgacaacaacaaacaatgaataataattattaataattagtcgaggtgtcaaaattgattaagttgatggagcaacccaaataatttattatatccatttcatggtaaatatattatttttgagatgtccatttgaggaggtgattataaagtgcagtgatcatgataaaggaattggattaaaatgtaagtgattgccattgttttgaaatgtatatacttctagttctaacaaataccttaagcctagattaagtggctcatcaagctgatagaaaacacgtgtgttatcatgttgagtctatgttngtaaaaacaatttaagtctgtcttaacaaaaaaaatgcaagttcaatt

SEQ ID NO: 141112 - DNA, 462 bp, Glycine max
  unsure (1)..(462): unsure at all n locations
tctcgccggatcttaagcgacgccgctgcagctaacaaaggcatgcgaagagggtggtatttctatagcaattcccttatgttatcaaacataaaaagggaaaagggtatattgtagccgatgctctttctcggcgtcatgcattactttctatgcttgaaacaaaattgattggtcttgaatgtttgaaaagcatgtatgaaaatgatgaaacttttggagaaattttaaaaattgtgaaaaattttcagaaaatggtttctttagacatgaaggctttcttttcaaagaaaacaaattgtgtgtgcctaaatgttctactagaaatttgcttgtttgtgaagcacttgaaggaggtttaatggggcattntggggtccacaagactctacaaacattacaagaacattcttattggcctcgtatgaaaaaggatgtgcagaaattttgtgaacatagcat

SEQ ID NO: 141113 - DNA, 440 bp, Glycine max
  unsure (1)..(440): unsure at all n locations
agcttgtgtcgcactttcaactatcgatgttgttatatagttgcaagaagttggtgtgatcaactcatccaaatcaatcaaataacacaagaattaccttaaacatcaattttgagttatcgaaattccagggcattacaaatgtagcgatgttaaaaccattctttctagtagtgattattactactgcatagggtacatttgtccttgtgcgaacactattttacgcatcacatgtaatgtacttcaactaaaaaataagtttgtgtatgttaaatgtttgtagagtttgctaatatacacacacttgatttttagttcaagtgcattaacaacttataactaaagattgtcttanagtacatcgacattatagcttgttaatgtactccaactaaaaaacanattggtgtatgttaacaatataagactcatgtatg

SEQ ID NO: 141114 - DNA, 215 bp, Glycine max
  unsure (1)..(215): unsure at all n locations
tacagtctagtttcccaccaacccaacaatgtcattactcagccaataacaaaccttctgcttacccaccgtccatttatccacaaaggccatccctaaaatcaaccacaatgtctgtctaccgcacttccaatgacgaacatcacctttagcacaatccataaacgccaaccaagaattgaatnttgcagcgagaaatcctgtagaattcaccc

SEQ ID NO: 141115 - DNA, 427 bp, Glycine max
agcttttggcacaaagaagaagaagatgttcttttatattcaaggcttgtaaaggattgtatgaataagtgttagaaagattggttgaaaatgcaaaacaaagccttgcttttatagactcttcatgtctggtcaagacaaccattagaagagttatgacttttagaaaaacttaaaaaccaatttgaaaaagtcaaaaactatttgaagagctacatcttttgatttaattcagaaacaataactggtaatcgattaccaaattagtgtaatcgattacacaaagcttttatgtgaaaggatgtgactcttcacttttgaatttgaatttcaacgttcaaaggcactggtaatcgattaccaaaatattgtaatcgattacagaattttgaaattaattagaacattgtaaattcaatttgagaac

SEQ ID NO: 141116 - DNA, 430 bp, Glycine max
  unsure (1)..(430): unsure at all n locations
ggatcttaagtcaccgcggctgcagcttggtggagggatctctttattttttggcttttagnggnataaatgtggctccttatgatttaagaaatgtctggatgaatactttattctattgtggcccaaatggagtttcgtgtctcccatattttctgagatagtaatgtatgtgctaactatggtgtagaattactctattatgttggaagataaactttgaatttggatgaggagtacaaggggagatacttggtattgtaaggacagaaaaataaaggatacctttgttatttggatggacaagccttgaagagaaaccatgattgcaaatgaaaatacaatgaagttntgtaacttgacaagggttgggagatcttccgttgaggaggagttgtcactttcaaatgatcgaaggatattctctttt

SEQ ID NO: 141117 - DNA, 414 bp, Glycine max
  unsure (1)..(414): unsure at all n locations
agctttgactagtcatatatatgttttntttctttgaaaacaaaaattgaatcggtcattgcagatacagaaatacttaaaccaacccgccaattacgagttttgcggctttttgcaaattccggccatgattctaaatcaaggccatacttgactataggatcagatatttgctgactttcattgtcagcaaagacatattttgaagtcaatgaagacttaaattgcctccatcttgctgcaactgtcgacatcacctttattttttgcattttcaccttcagggatatcaaatttgcgctgctcaacaaaatgagttatgtaacagtatgtaaatgaattctgtaaagtaacttacaacaaatctgaatcaagtgttttagattactaccaaatatttccatataagctctt

SEQ ID NO: 141118 - DNA, 438 bp, Glycine max
  unsure (1)..(438): unsure at all n locations
agcttttcgattcattctatgtacccactgtttgttacattgnngtttgngtattattattcccgcttcatttactttttatacccccctgtgatgtgcttaagccattttacttaagtcatttctcgcttaacttaaaaataaaatcaatttccacccgaacgtttgaattggattatccgttaacttcggttaaaatgaattccgaccgttcggtcgtgccgtaaccacgttggaaatcaaaaaagagggggaaaaaaataatataataatcaaaaaaacatccttaggtaaaataaagcggaaaatcaatcggacgctttttcttagggatttctcattcttaatcgaattgactaataactaaagtgaaactaaggctaaaatcaactcgcctagtcaagctcgtccataaaaataggcttttgaagtttgcat

SEQ ID NO: 141119 - DNA, 239 bp, Glycine max
cacataaagaacgaatagatgagacaggccgcgttcgcttgacatatatatatagaacgtgcaaaacaggaagagcagccactacacattattttccggcaccatctttgattgaaccacaaacgtgaatgaatgaatgatcacacatttgaaaataagaaaactagcactatatcaacaccccaattaaaaaatacacactatgatcataatagcttatgaaacattgactataaaac

SEQ ID NO: 141120 - DNA, 433 bp, Glycine max
  unsure (1)..(433): unsure at all n locations
ctcctacgttttatctctagcatgcatttttctttacccactcctcacgttaggtttgtttagggaaaaacaccataactaaacgcgccacaaggcatccctatcgcaccagatccaaatctagaacgatgggtgatcaagaggagacacaggaacagatgaaagccgacatgtcggctctgaaagaacaaatggcctccatgatggaggccatgttaagtatgaagcagctcatagagaagaacgcggccaccactgccgctgtcagttcggctgtcgaagcagacccgactctcttggcaactgcgcaccatcctccctcaaacatagtaggactgggaagggacacactggggcacgatggcagccctcacctgngatacaactgagcggcttacccttatggattgccgccaactactcaccacccgtc

SEQ ID NO: 141121 - DNA, 90 bp, Glycine max
agagtccgggtacaatagatataaggatttaaagtgttattaacggacaatatagaattcaattggtgttcgataaatttttaactatag

SEQ ID NO: 141122 - DNA, 246 bp, Glycine max
ggcactatagttgacccaatgctacttatagataagaatgtgagctacaatgagtataacaagatggaagcaagttatcactggctagtaaaggtgatgttgtagatcatgtaatacaaggggtggactggtgttgtgacctaatattgctcattgcagtacacaaaggattgttctttgtgggggtatgacggcctcataaacccgattgcggatatgttgtagaagcttgctttataattgaaa

SEQ ID NO: 141123 - DNA, 361 bp, Glycine max
  unsure (1)..(361): unsure at all n locations
aaaggggagatgtgatgttgtatacatgactttgatgatgtccaaagaagaatcaaacaagggctcattttgttaaagattaatacaaagattgtttcaacaaacaaagccttgattcaagatttcttcaagatcaagccttgcctcacaatgaaagggttcaagtcattcaaggcacatgtaatcgattaccaatacatgtaatcgattactaatggtttgaaagtgtgtaatcaattacacatcatatgtaatcgattaccagagacaatgaacgttgggaattcaaatnttaaatgaaggttcacaattgttcaagaaanacaactgtgtaatcgattacactaattctgtaatcgat

SEQ ID NO: 141124 - DNA, 372 bp, Glycine max
  unsure (1)..(372): unsure at all n locations
gaaagagagaggggggagcacnaaattgaaggaataaaagagcgagagaagtggaactttgaagtatgtctcacaagactctcattcatcaaagttacaacaagtgttacacatgcttctatttatagactaggtagcttccttgagaagcttctttgagaaaacttccttgagaagctagagcttagctacacacacccctctcataactaagctcacctccttgagatgagaagctagaacttagctacancccccctataatagctaagctcacccccttgacaaaaaaacatganaataccaaaaaaagtccttactacanagactactcaanatgccccgaaatacaacggctaaaccctatactac

SEQ ID NO: 141125 - DNA, 436 bp, Glycine max
  unsure (1)..(436): unsure at all n locations
catgcaagcttatncaaaagatgccacgcagctntgcttttctcaagctgcagattaaagtacctcggtagaaatagtttattgaagccacgacaaaagaagttgatcctgttgctcccaaagcagaaaatcagacaaaacaacactgacatcatgatcggcaacgatgagatatcgaggcggaatatgtagttcaatgaggagatgaaaaagacgatgtcctttgagaacaagtttaacctgctgacaccgaaggagataattggaattggtaagcttctgtgaaatgaaatgcgaaaactcctttgcagtgataacaattaaagaacctagcggagaaccattattcctatgcagaagagggggaggaggaggaacagaagcggaagccatggaagtcgaaataaagctctatgataccatatagaaatctcaa

SEQ ID NO: 141126 - DNA, 356 bp, Glycine max
  unsure (1)..(356): unsure at all n locations
catgcaagcttaatcaaccncatatcaagatgcaaaactattctgatnactcactcaagcaatcacaaacaagttaatcctaactatgtgcaatgattaagaaaataaaaagagagagttgggttgcctcccagtaagcgctcgtttaacgtcattagcttgatgcatattacctcatggatctggagcaagcttggctctggccatcagaaccatctcattattaagttcctctacctttgaatagacattatggtctagtaagtgcttctcttcatcaaataggtcaaagctgatcttctgatcatctatgcccatttccaacttaccctttcccatatccaccatgcaactgg

SEQ ID NO: 141127 - DNA, 364 bp, Glycine max
attcttgggcagacaatgcacctagaccattgctaacttgaaattatcatttatttatccaaaaggatcaatataccacatccaacttggagtttaatttcaatgccctactccaataccaaagcgagttctctatgagtgttcttttgagacacttaagagtagaatgcacaccacccttcgactaactaatgaccacgttgtacatgacatctattaccaatagtcatctatagatgcaggtcaacaatcttcttttcattctctgcaattgataaatgatgaagatgactgctcactagctaagttcaatgagcaataaccgcgcgcctgccctatagaatattatgttcatcaataaata

SEQ ID NO: 141128 - DNA, 435 bp, Glycine max
  unsure (1)..(435): unsure at all n locations
ttaattaaatctatttttctaaacaaactaattatatttagtgaaatagttaaattaaaaattttaaaattcagattattatacaaaataaatatttaataaaataaatatattattatacaaaatttaaattttaaaacatatattcaccaaaaaaatatcttaaataatttaaataatataacaaaaacacttaaatttaataatatcattttcttaataacaaaattaaattataaaataatattacataaattaatttaataaataactaattttcaaattatttaaaaataattgtatataatataatatttaagtttaataatataaaaactttnttataaaaaaaaaaatagaagaacggaagtcggggtggtgagaacccgacttcctgaagttggccaaacaggtgtactttgggaataaatactc

SEQ ID NO: 141129 - DNA, 410 bp, Glycine max
  unsure (1)..(410): unsure at all n locations
tgatcattctgctttgatgaatgagaaaactggggcaaatgaagaggatgagaatgaggaaggaacccatgttgtggctgcaattcctacatggcaaaacttcccaccagtccaacaatgtcatcgctcagcctgtaacgacccgcctcgtcgctacggtatccacactctaatattagataatttcatttttcttataaaaagaactccctctaattttgcttatgaaaatagaagtgatnttgtcacaacataaattcatccaacaacacgcaattacttaagtgaatatgcataattacatagaaacattaattcggtacatgtcatacacataacgaanatataatatgttcatatatataattaagattccaattgtacatctttaactcaacataatataactt

SEQ ID NO: 141130 - DNA, 373 bp, Glycine max
  unsure (1)..(373): unsure at all n locations
gcttcttatccagggctatcttggtggtgaagcttcttcttccatgacttattccctagtggatggcgcctnctctcacctcttctcctttntcttccgctgcatctccatgatggaaaatcaccattaaaggacctcattgaagctcaaagatccagccttcatagaagccccacaagcaagcttctatcataatgacacatcaatgcgcgtatcacggggaaccctgaggcatttggtcgagtagtgcatggccctcaagcacaaagtgcaaagcttgattgacgcgggatggctaactttccaagaagatggcccgaatatgaacacgaacctactcgccaatcatggaggatcaaccgtgaatgcaata

SEQ ID NO: 141131 - DNA, 414 bp, Glycine max
actagtgaggtcgtgccttattttaatctttcagctaaatctttataggtgatcctttgtgataaaggaagctgacaaaattcatcatcatttaattgaacactcttcactccacaattttttttcctatgagacacatcacctatcttgattctttgcctccaaatgcattcaatcacactaatggaaactgaatatgttgaagcaactaattctttggtagtttctttcaatttcctattagaattgtgctaatataggaaattagctatggccatacggtcttcattgcttaaaaacttatgttgaccatatattctctttgatctggatgcacctgcacatgtatcaataaataagaagaactgcagttctatgacaagtataatatagtgacttcaagtattgaactta

SEQ ID NO: 141132 - DNA, 436 bp, Glycine max
  unsure (1)..(436): unsure at all n locations
tccgacgttttcctcaaataaacgttggtggtgactctgcgcgtattcctttcttggaacacacacccgcgagtcacgcgtcgcccaccctccgaagggtatgttgcgacaaggtccaacgccttaaatgacccccttccaagtaaaaagaatcacttgattcgccccttntcaaagaactacgtaggtctgatttccttatcacaattgaggaatacgtaggagcaagggaaacacccttgtccaccacaaaaagataaaatatacaaaaagcgtaaaatgacataaaaagataagaaaagggaaaataaaacaaattgaagtcatatttgcacacttgattaaaggctgtcgtcccttgtgacagacgcgtggagtgctaataccttccccgtgcgtaaaaacaactcccgaacctttcacgaataaagttcgt

SEQ ID NO: 141133 - DNA, 233 bp, Glycine max
  unsure (1)..(233): unsure at all n locations
tttgcaacgtgaccgtactgaccgtgttatggtgtaggaacagccctctgtattatgataacatctgtcatattnctaaccatgtagagaatgcattatagaacaatattatgttttacccgttgattcaggtgtgtgcggggcattcacgacactcatgcatacgtgtcacttgtggagtgggcaactattggacatgtgatgtgtgtgtgactacggattcatcgcggtgc

SEQ ID NO: 141134 - DNA, 409 bp, Glycine max
  unsure (1)..(409): unsure at all n locations
agcttagcaaatnnggtggcactacctttgacttttataaatagagggctctgtagatggaggaatgcatcattgagcagaagtaaagtttatgagcagttgtgacaaaatagtgagaagaaaactagagtgttgagtaaattctaagagtgtgagaaaaatatattagggtaggtataaactttataactctttggtactgtaaaagcagtacttgaataggagtgggtatcacggaaaacattatactatatctcttgtgtgtgaaggagagtgagagattattgtaatattctttaatatattggaatacttttgggaagttgtctcatgggtttttcctcggtattggaggggttttcacattaaatattggtggtcattttgatagttaccggtggttggttta

SEQ ID NO: 141135 - DNA, 328 bp, Glycine max
  unsure (1)..(328): unsure at all n locations
agctagtangttacatttacaacaattgngttttatatgaagatgattggaaaagtaccagtgaatttgtgttnttcatggggaatacaaccttcacttggatgtcaaaaaagtagccaataataactctttcaacttctaaggcagaatacatagctactacttcatgtgtttgccatgcagtcttgctcaagaaattgttaaaatagttaggcatgtcacaagaaaagccaaccaagatctttgtggataataagccagccattattctagcaaagaatccagtgttccatgatcaaagcanacatattaatactcgttaccacta

SEQ ID NO: 141136 - DNA, 357 bp, Glycine max
  unsure (1)..(357): unsure at all n locations
cacatgagccttggttcctcttccagctggaaaacaatgcattggctgcagatgggtgtataaagtgaaattcaaacttgatgacattgtggatcgccacaaagccagattggtagctaagggctacacacaacaggctggcataaacttttctgatactttctccccagttgctaaacttacatcagttagagttcttttggctattgtagttgctaaaaattggtccatcttacaacttgatgtggataatgctttccttaatggcaatctatttgaggaagcatatatggaacttccaaaagggtacaattcagttgataaaactcttgttngcagactcaacanatcccttta

SEQ ID NO: 141137 - DNA, 408 bp, Glycine max
  unsure (1)..(408): unsure at all n locations
agagctactgtcactggtactcttactatctgagtcactaccggattccctaacaacatccagcagattcagtaccaacaatgaaagatgagtatgaccatgtgtgaaataagtcacaacaataatattnttttaaaagaataccacataacgagatgattcttaccgacaagaaaaaaaaaaatcattcacaatgaaaccaggaaaagagtctactcctgattgttaaagcacacaaatccatgtcaagagcaatgagaacagctaaatgcgtatagtaactacaacattcatgtacgtgagaaataacctacctcgntcatagtgtattcacatgaaacaatattacacaataaacacaatccagccttcttgacctaataatggctattttaagttcatcacaaa

SEQ ID NO: 141138 - DNA, 254 bp, Glycine max
  unsure (1)..(254): unsure at all n locations
tcgtaatcctttgttttatggaaatttgaaataactatcatgtgtaacaaaaaatgaccaagcttaattgagtattttcatattgcatgtagaagtatgtacaagccggagcctatgagtgtggatattatgtgatgcataggatgtggtgcatcgtcaccggcggtttgaagaatgaatggaacaaggtatgcatactattttacactactatgaatntgtggagtatgaaatcatacctcaatgtttcatgt

SEQ ID NO: 141139 - DNA, 335 bp, Glycine max
  unsure (1)..(335): unsure at all n locations
tcctgtgggtctcgttcgtcttcaaccaatcctccactcatggctccttccactcttcttctattctgacacacattggccattgccatcagaaagtttcctctactctatcctcatctattaaatttctaaggatcatcgttgctcctcatatatttcttcgtttctcattggcctcctttactatttcttccattgtccgggaggcacttgatcatcttggctggagacaggctattgttgatgagatgcccgctcttgaagataatggtacctgggagctngtttctcttcctcctgataagaccactgtgtggtgtagatgggtctacact

SEQ ID NO: 141140 - DNA, 349 bp, Glycine max
  unsure (1)..(349): unsure at all n locations
aacaagagggatctgagaacgaagcttattttaatgtagtctaaacataggagggttgtctaaattaagcctagtccaacaagagggatctgaagacaaagcttggattgattcagtctaagtgggattgaggtttattaatttatgctacaacatataacaccatagcatgattaattagagaaacatctctatatacatcaactggtttgttagaaagacccaacatctttacctactgatgncaatcttacttacttgcattcttactggttttagcctacacttagttttattttgttctaaatcatcaaattatcaatgtttctttcacaatgccttatttctg

SEQ ID NO: 141141 - DNA, 388 bp, Glycine max
  unsure (1)..(388): unsure at all n locations
gtcacctgcggcatgcaagcttcctccagtattcagcactgaaacctcttattatgtaaatctttgttctttgacgctcttcgattaagaaaggatgggcctaaggtggtatgaagtggctgaaaattactaaagtatttcttttcattttctctcttacaatctnttctacaataccattatataagctagtctatttgtcgtgctgatgttgaagtttcagtgtagggaccttttctcttataagcataacaatgaaataaattacccaatgcataaaaagcccgaggttgaactcaagtatgctctcaatctgtctctctctacttcattgcacatttgctccattttattggttcctttctatatttttgatctaaagctaatt

SEQ ID NO: 141142 - DNA, 350 bp, Glycine max
  unsure (1)..(350): unsure at all n locations
agctgtttattgtaaccttgaaattcangaaagcactttgatttctgaggtttttgggataaaaatgattattgaccaatcctttttccataatttaacccaattgtctaatgacggtgtaccatttgaaggtacactgaatgacgattggaaatttgatttctctgcatatgatgcccgccagttggtttgcaccaaccatgcggatatgactggacgccttcttgccggttcattggctnttgaaagccgcatccttcattatctcattgtgcgtattntgcttccacgatcttccaaccttgcctaggtttctgaggaagaactttgtatcatgtgggcctttcata

SEQ ID NO: 141143 - DNA, 381 bp, Glycine max
  unsure (1)..(381): unsure at all n locations
agctataggctgctctattgctccaggttgctgtatggaanggcaaatgtctgtatggtggtcatcagaggagcacaaaccacaaacccttgcgacaggcacagatttctgattcacagccagctgggttaccaagttaaccaatgcatccaatttgcccttcagcttcttggtttcaaatgatgcagatgggtttgtagctacctcatgcactcctctaatgactatggcatcatttctagcgctaaactgctgagagttggaggccatcttctcaattaaatntctggcttcaacaggagatatgtctccaagggctccaccactggcagcatctatcatactcctcttcatattactgagtccttcataaaaatattg

SEQ ID NO: 141144 - DNA, 346 bp, Glycine max
  unsure (1)..(346): unsure at all n locations
agcttanaggaagtgaactaattatcatgggcataaatgtctccgcattgattggtaaatctgttcctcaaattcctgaaaaatgcaaagatccaggtacattcagcataccttgtattataggggatagtaagtttgacaatgccatgctagatttaggagcttctgttagtgctatgcctctgtctatntttaattctctatctctaggtcccttgcagacaactgatgtggtaattcatttagctaatagaagtgttgcctatcctgttggtttcatagaagatagtcttaatagagttggtgaactgattctccctgttggattttatattttgaatatgga

SEQ ID NO: 141145 - DNA, 308 bp, Glycine max
cagagtgttttcgaagagattgctctggggaagtacccagtctcctagcaagctaaacgcaacctcctccccttttcctataaaagcaaaagggggtgtatagggtccggattccctggtatatgtttcaattgtttgggtgaaaaaattgtttccggaagaaattcaagccgggtgcttcgtaacgctttcgagaggttccgtaagcaatccgtgaaggtttatccattctcgccgtcttcattcgtctcgtctttaacggtagttccaaatccagactttaatcattcttgttttgccttctctta

SEQ ID NO: 141146 - DNA, 299 bp, Glycine max
  unsure (1)..(299): unsure at all n locations
tcatacctcacaaaatatatgtatgcgtgtttaggtagtgaaaaataccttagatatgcatgtatgtaatttagggagcaaacaactacctcacaaaatatatatatgtatgtttaggtagcaagataccttggatatgcatgtatatagcaaaagtacctcacaaaaatatacacatgtttaggtagcaaaatacctcatgaaaaaaaaaggaaaaaaaaaccacaaccaacgagaaaaagaaatgaaccaatgaaaaaaaaaagagaaaaaagaanaattagttatctagcctaaaa

SEQ ID NO: 141147 - DNA, 451 bp, Glycine max
  unsure (1)..(451): unsure at all n locations
gcttctagatgggataccatgccactcctgctccggccaagctgtcttgatagaaatgcaccaacagattttcgtccgcaaaatacgcccccatctttcggcaatacatccgaagatgcccttttggacatgtcgtccctttgtacttatcaaaatctggtactttgaacttgggagggatgacgatgtcaggtaccagacataggtccgctaaatccgagaacgggtagttgccgaggccctctaccgctcttagcctctcttcaagtgaatcaatctttcccttatcttttgcaaaaggaacagattcttttacgggtgcggatggagtcgggacatggcgaactatgnttggttggggcaattcatagggggtcggatctttgaggggaagtagagggcctaaatgggcatctccttcatcatcttcttgcaggggatagtccgcata

SEQ ID NO: 141148 - DNA, 401 bp, Glycine max
  unsure (1)..(401): unsure at all n locations
ctattttttacaaattaactaacttacttacttacactaatatattgagtgactacctggaagggaagatgaatcctgattacgcccatcttatatacctaattaaactaattatacaaaaacaagcccatactcccaacccaattattcaattgcaacggntctgaactcncaagcttatatttgacccctcgataatggcaaaaatagacaaaaagcttattttttgacaaaattgaagttattttntgtagctttccatggattactcacactatttggagttttgtagtgtcttctaagccctacacaatgcaaatnggtcaaataagcataaaatctgaaaattagctaaaattctcaattaagctcaatcatttgccaaagaccataactgagtt

SEQ ID NO: 141149 - DNA, 318 bp, Glycine max
gaccggatcctctaagcgttctgccgctgcagcttaacattcaatatcgagcgtttcgattatgtctggactaatcttacatccgaatattatgttcttgtcgtttgagttggctcagaggttcaacattcaatttcagagcgtcccgatatattaccacactcaatcggacatccgagttataagatatggtcatttgaatcggctgagagctatacattcaatttcgagcgtctccatatattgcgggactcaatcagacatctcgagtaaacgttattgtcgtttgaattggctcacacgttcaacattcaattc

SEQ ID NO: 141150 - DNA, 308 bp, Glycine max
atgttgcgttttgtttaatctctattatataataaacttgaataaattggaaataggcctgactgagatcacattgcatgtgattatcatattgcttatccatattgacccatgtcattgagtgtattgatgtgatggtcattggggttttgttcattttgtgtagtgactaaagacgccttgattctatttatgatacatgagatggactaaatcggtaaagtggaagtcttaaggtaaataacatacaaatgcccgctttatgaatctttatataattgttacaaatataccccacatgggagaat

SEQ ID NO: 141151 - DNA, 448 bp, Glycine max
  unsure (1)..(448): unsure at all n locations
caatatattgagtatatcccttttctactatgtcaataaccaaataaattagatttatcttgattggaacaggaaattctctttaacaattttttacactcgcctccccttctctaaaagataaactagttatcaatgtcttaacttaaatattggataaaacacttacgtgaagctggatgtgaatagtttcattaatatatgttgattgtttgatggggttttttctccacttctccctcattttcattcaagggagataaggcttcccttatntccttctcggcttcacatttgattatgtgttttaaagagcttttgatttgagaatcttgttttcaggataatgggtcatggtgattgttgttccatagagattattatccataatattgggttgacattcaggtgatacaatattagtatttatggtatatgttatgctgat

SEQ ID NO: 141152 - DNA, 59 bp, Glycine max
tttttatgagactcaaggagataccctacaagccaatggtacaaaatacctcactcaat

SEQ ID NO: 141153 - DNA, 299 bp, Glycine max
  unsure (1)..(299): unsure at all n locations
attaacagaggccaaaatgaagatggtgactgctttcaacggctacatgaagggtaattaaatttcaagaacctgtgtagtaggtatttatggtatatggatatgcatataggttgtgaaaagggacccgcctcccccaatggttagataagcctgagtaatatatgctatattgctatatgctaaaactgcataattttttgtattcaattttcacattntattttactgtcttctcagaaagctgctgctggacttacacgcattaatcttgatggtcttcgatggagggtttttga

SEQ ID NO: 141154 - DNA, 410 bp, Glycine max
caattaaatcctttaatggggaatttccaacatggagattgcccggtagacatatgagaagaggtgaaaggaggcgccatccactaaggaataagccctggaagaaggagtttcaccacatatatgagccttggataacaaacttagagaggatgctttcttggaggaaaataaagagggaaagatatagagaggggggagcacgatattgaaggaagaaaaagaaagagaagtcgaactttgagttgtgtctcacaagactcttattcattaaagtgactacaaagtgtacacatgcttctattatagactacgaacttccttgagaactctcttgagaaaactctctgagaagctctcttagatacttccttgaaagcttagctatctcaccccccctctcatactag

SEQ ID NO: 141155 - DNA, 303 bp, Glycine max
  unsure (1)..(303): unsure at all n locations
cacttactcgccgaattacctgaatacacgttttaatattcataagactagagttctacagactgctgcttcaatacgtgtattgcacaacttctactccttcctttacttagagagacatgtcgtgtacctcatctctagaataaagaaggctgtagtcatcctctaggacttttttaacatccaatcgataaagccactgaaaccaacaatcacatgattataattgcgaaagccacatactgtgcacatatatcaattacgcttgctggtangatacaacctttagtctacaaatactat

SEQ ID NO: 141156 - DNA, 362 bp, Glycine max
agctatcacaaaatccaggtaattccacattctttcatcatggactaacaaaaccaagccaaacagggcaaaggcagaaaactctgcccaaaacacaactcacaatcacagctgttcacatacaaataccccagtaacatttccttcgttccaattcgttaaccgttggatcaactcgaatattttactggaagtctctagtacataagtctacattctgaccgttgggatctgctagaaaatgtccagaaacccatatgtactacccttttcacaaccagccatacacaagtatttttctgcacttatacaaaattctgctgcacatgtcaacagcaaaaatctgcataaagtgcagattt

SEQ ID NO: 141157 - DNA, 469 bp, Glycine max
  unsure (1)..(469): unsure at all n locations
gctttagcggatataaatgttcctttaatgtgaattgctatacataaatttaaatagtagaattctacgcattgtttttaaaaactatagcgcgtcttgtagaanaacattaaggtggtgattaaccttgttaagatattgggtcacttgctcaatggttgaatgagtgagtcacttattcaaccgcatgacctgatctttgacaaaaaaaattaaaattttcatatcatatcttagaaaaaagcacaccacaaattactactactataatttcacaaattaatataacattatattatttgtaataatatctttatatataaaagcatacgaaagggtaattaggtctttttccactcattntaagtctaanataggtaatttaactcttccactctattntatgataaaattgtattgtaaaattatctatattataattcaataattaagttatatttatatttaa

SEQ ID NO: 141158 - DNA, 402 bp, Glycine max
  unsure (1)..(402): unsure at all n locations
tttatttagtgactgaagactttcatcattgcctctaaaggcacatgcttgaaatgtgagccatcaaactgcatcatagaaatcttagctgtagcagttgtttgctataatttcaacactttgtttgtcaaatactttctcaatatgtngagattgatctagtaaatcatcacaaaattttagacatcttttatgcattaagttagggccaactccttcttgaaatagaaatgcacaattctttccatcattgactttcttccaatttctaaatctcatttcagcaaaagtatgtcttccatcatttcgatcaccatgattcttattgaacaagtagcaaggtaagcaaaagacaacatccttgtgaggtgaatactccaaccaacttcgaaacttattata

SEQ ID NO: 141159 - DNA, 356 bp, Glycine max
taaaaaatattaacatgccccttatggagcaaaatacatatattggatcattgtaaataatgcaaatttttagtatgatccaaaaatctatttcatttttggtatttaaataattaacaagtttacaaaggctggataccaactataaacaacctcattttttgcgaacgcttcatgaatggcatatttaaactattcagtacgtgtaatgagaccccactcactcctttttcttataaagacaacgaccctgtttcttactttaattgatactccacacatcttgttcattcttggaattgaaagataaattatattcatagtttttgcactactaaaaaagccctctacatact

SEQ ID NO: 141160 - DNA, 227 bp, Glycine max
cttgaataatatggacgtgcgaagtttgggctttcgtttcgcgttattatattaactagtctaattgggctgcgagttttgtgcaacttggtgtccaaagttcatcccctattctgagtgaaaagaacctctttggggttaggtttgaattaaaattgacaaatctgcctctatgagtttttcgggagggcaatgtggtcatttcacaggataatatctcataatgg

SEQ ID NO: 141161 - DNA, 178 bp, Glycine max
  unsure (1)..(178): unsure at all n locations
cacgtagcccttatcctcgttcctctcaacggcnggtccccatcaatcctccaaagcttcacaacatccaggtaattccacatccaatcatcatggaactaacaaaccaagcaaaacagggcaaaggcagaaaactctgcccaaaactcaaaccaaaaatcacagctttttctcactt

SEQ ID NO: 141162 - DNA, 275 bp, Glycine max
gtgctacttttcttgtgcacacttataaatgccataccaactctcacaatcaccagcttctttcttgaaacatccaatagctcggcagcgacccttcacatcccgaaaccaaacccccagaaaccgagccctaatcaccataacttcccccattccctacctttaaaggcaactctcacttatttctttctgccacttttcctcctctttgctctaacacactccccgaacacaccacactccatccaaacgacactcctggacgtcgtttcctc

SEQ ID NO: 141163 - DNA, 378 bp, Glycine max
  unsure (1)..(378): unsure at all n locations
tttgcattgctgggagccagagattaaatatacaaaaggccaacctctcttcaacgtattcaaaagaccctgacctctcccagtctgcctagtaaatcccatgaatattctcatcttgttagaacgttatttgtttaacagagtaaagcgtttcttgtcctttaatgaaggttgatccaagtatatctgtctacaaattgtgcattctgtaattgatgacattattacacgtaanacttataagtgttatggaagaactcaatttgattctgtatgtcaaaaagtcaaaactccgnggacctctaatatggttatctgatcttaaatgaagagacctaatagttctagaattctacagtcttgtgtagttatgcagat

SEQ ID NO: 141164 - DNA, 209 bp, Glycine max
caccaatcatacttccactggtggcacaggtttgggtaaatttctggttgctggtggaacccaattccaatttaattttggaaactatatctttgatcaaactgttaagcattcaaaatcttttgctatcaaaatacccattgccttccctactgtattgtgtggcattatgttgagtcagcatcccaatatgttaaactacactgact

SEQ ID NO: 141165 - DNA, 352 bp, Glycine max
  unsure (1)..(352): unsure at all n locations
gctgtaagtcttggaagccccaattttttcttacacttggtggagcgggccacttaagaatgacctttattctcttagggttcatgggaaccccttgatcacaatttaaaaaattaagaaaagtaaagcaataaaacatacctttttctgtattttcatgttgattattcctaccaaaaagtatgacaaacctaaggtgtcccatatgagtgcctaagtttgtattgaaactaaaaataagaacaaacctacctaatgagtccctatgtacacaaatcatgaagatgttgggtgcacgagtgattntataaaagagtgttgcaccacccaaaacattcatcacaccacctat

SEQ ID NO: 141166 - DNA, 408 bp, Glycine max
  unsure (1)..(408): unsure at all n locations
agcaccgcngctgcaacttgaagtgcgtnatcaccatcttttatagtagaatactagtaatgtgtctactatcattaacattttntctccgtcattgaggtgccacttgagctgccaagttcttcacctttgggcgtattctttgaaagatccgtgcccgcttntttgcacantatttgtagttgcatcctatccgaagccattataccgacactgcctaacgaaggcaaccattatgtccttccaggaatggactcgggataggtccaagtttgtgtaccaggtaacaactaccccagtaagactttcttgaaaggaatgtatcaacaattcctcatctattgcgtatgcccccatcttccgacaatacatctntagatggttcttgggcaagaatccccttgactt

SEQ ID NO: 141167 - DNA, 362 bp, Glycine max
  unsure (1)..(362): unsure at all n locations
atatgtcttttctacttacccatgcttctttgntatttacttcatctccaccccacaagaatctttgttgaatgctcactaaagtcttccaaaccttctttggtattttaaagaaggatatgaaaaataatggtattgatgtgaggactgagttgataaagcagattctaccaccacagagatgtgtttatacttccacaaagataacttctgtgagaatttatccaccacgggttaccaagtaggcgtgtgcttatgatttgccccaatcggtagaccaagataagtgaatgacaaggtgttgattgcttatgagcagtgtaccgattcgcacaagtagtataaaacgataagaccgagta

SEQ ID NO: 141168 - DNA, 350 bp, Glycine max
  unsure (1)..(350): unsure at all n locations
agcttactttgaaatttgtgattcaatatgatgtatgctagnttatatatatagaagcagtcatttatattaataatttatgtaaataatattgtagagtggtatagtatgattccaaaaattattaagtgttggagtttgagaatattatggttaaatttgatgaacatgtgtatgttgtaccttatgaatatcattangaatgttatgagatggttgatgtgatgttttgagatgttaaagtgtggggatgatattcgattgtgaataagtggatgtgtttaacacttgatgttacattaattatattgtgagctatgaattatacaataacccgaccagtgtttatg

SEQ ID NO: 141169 - DNA, 297 bp, Glycine max
  unsure (1)..(297): unsure at all n locations
caactaataagatgaccttgcaatacttcttacacccatgcttggcttatttagttgatggttctacacggctctttacatagattgtttattgcatattcaccaataaacacacacacataagatgctcgctccaaaagttcatcatcttcattggtatttgattcaaaatgttcaagcaagacattcaatttttacttgtataaaaacaatattacaaaatacataatatatcaagatactcatgataaaatataagttcactaccaaacataatatgatnctttacaagcccaa

SEQ ID NO: 141170 - DNA, 403 bp, Glycine max
  unsure (1)..(403): unsure at all n locations
agcttaaaggtaaactatatgtctcggttaacctggtnactcaactggccatgaatcaaaaatctgcacctgtcgccagactctgtggtttatgctcctctgtcgaccaccacacagacctttgcccttctgtgcaacaatctgaagcaattaaacagcctatagcttatgctgcaaacatctacaacagacctcctcaacctcagcagcaaaatcagccacaacagaacaattatgacctctcctgcaacaggtacaatcccgggtggaggaatcatcccaaccttagatggtcgaatccttcacaacagcagcaacaacaacaacaaccttattttcaaaatggtgttggcccaagtagaccatacattcctccaccaatccagcagcaacaacagaatag

SEQ ID NO: 141171 - DNA, 102 bp, Glycine max
ccgaaatcatttttttgttgaaaattataatcaatctctgctttatccgttatatcataattatggatacaacatgctttaggcactaaactgcttcaaaat

SEQ ID NO: 141172 - DNA, 308 bp, Glycine max
  unsure (1)..(308): unsure at all n locations
agctctnggtattgcattattattattattagtctctgaatctcggttagtaatactccaggntcactcaagagacggtatccagcctcttcatgaattattattatttgcactgaaaatgatgttcatttctaatctttcggtttattgagagaaaaagatatgaactaatttgaagttgaaactcatataatattcaaatgatttgattttgattaagcatacatatacctatatctatgtctatatatatataatgggaagtattgggaggccacgtaacttttgccacctcttgctaacagcta

SEQ ID NO: 141173 - DNA, 309 bp, Glycine max
agcttctgagagtgccttattgtgtgctgtttttttttaagcaaattcccttagcaatcttccaaattaaggacttatcataacttgaaacccttatgctctcttagaaccctaaaacaaggtcaaggatatcaaaattaagatcaggggtttattcaaacaaatcattattacttttggctcaacaggggtgcaagggataaattcattacaggttggttctttggctgagtggctaatataaaaagaaacatggccttgatcatatccaccttatgcaaataatctaacagtctaagaatgatgcaa

SEQ ID NO: 141174 - DNA, 379 bp, Glycine max
caattaacaacttcttacacccctcaaccaaatggggttagtgaaagaaaaaattgaaagataatggaaatggtcctatgtatgcttcatgaaaaagggttacctaaggaatattatgcagaagctgcgaacactgcagtattctttgctaatcgacttcccaccaaagcagtaaatatgaagactccttttaagacttggtatggttataaaccttccttgaaaaattctaaaagatttggatgcttgtgtttacttatgtgcacagataagagaacaagcttacaagaaagctgacatggttctttgtggaatagtcagatctaagcttataagttccacctccacaaggagatctgatagtaggatgttcttatga

SEQ ID NO: 141175 - DNA, 363 bp, Glycine max
cgcgacttcagtgagcacgataattagaatttttttgattcacctactcaattttgttttctggacaactgcatacttttctcctttgctacttttcttaatcccccaaatagctcttcctcaccaacagatgagacggcgcttctatatcctctttatattaccagcgatatacgtatttcttcacctccgcatatgactctttgcactcatcatcacattccagaaccaatctggcaagatattcgtgcttgagatgacaatgataaatgaagtccattcgtttacaaggaataagccacgtgatctgatttgtctaaacaagttcagatctcatctgctaaaatcactagaatgcccaaa

SEQ ID NO: 141176 - DNA, 366 bp, Glycine max
  unsure (1)..(366): unsure at all n locations
gcttcttgagatgtgaacctagaccgatcatagctgacttgggaatgtgtataangacccttcattttcttagatgccatctgctaaatataagataaaacacaagagattaacacaggtgagtttcaacaaaacagaataataaaactgaaattttgattgggtgcttagtacagcaggctaagcttagcgtaccttataaaaccctcatccaacaactcctttacttgaggaataaactcaagcctaagaagtctggcaatgctaacaagtgtcttttcacaaaggagaaaatgtggaggttgtctaagaggggaaataactttaatatttgtctttatttcaaaatgtatttccttcttagct

SEQ ID NO: 141177 - DNA, 317 bp, Glycine max
  unsure (1)..(317): unsure at all n locations
cttattggcaaatatttgcatgagctattccagtgaggggatgtggtctactccgtgcatattgcactctgaatcacttgatgagtgtcacaaaagaatctatcgagttcttccatcggagagtataccagtggagcgttgccactttcaacgtgggaggaaacactcggcacatcaaagcatgctcattggtgaacaaattcatctgtgttacgagtgcatatacatgctcacccgggtttgagagtctgtcataacagtttgtgttcagcgtctttcccccggatagcaatnatactttcatgatttcatctata

SEQ ID NO: 141178 - DNA, 351 bp, Glycine max
  unsure (1)..(351): unsure at all n locations
agcttgattcctaacattggtagctgaaatataataatggacagatcattgcaactataaagcataggataactaaccaaacaatgcattttgactagaatgatgatgttaaagatcattaaaataattcaaaagaataactctcaaacacaaactataatctgagtaactagaagaaccttttaacccaactacaactnttagcagcatccatagaaatgtatattgaaaaacaaaacataaacactataccttgccaaacttggtatgaatgggaagcccaacctctttaattntagagacctgacaggggtcacagtcacattagatcatgaagaaattaattactcg

SEQ ID NO: 141179 - DNA, 374 bp, Glycine max
  unsure (1)..(374): unsure at all n locations
attttcgatttcttttcttctgtctttaacgcgcttttaccgtttatttaagccgttttctcacctaataaatgataaaatgaatttcaaccgatcatttgtgttgtaatctcatttaatcacttttaaaacgaaatctaaccgatcgttcacgctataacctcggttaaaccaaaaaaagtaaaataatcaaaatatcttgaaaaataataataaaataatcaaaatatgtntgaataaaataaccaanaaaatcaaatcggacgtttttctttggaagtttccttgaatgaattgattaataaccaaagtgaaactaacactaatatagactcacaaatcaagttttgtccgaaaaatcactataaaccgtt

SEQ ID NO: 141180 - DNA, 333 bp, Glycine max
  unsure (1)..(333): unsure at all n locations
agcttctatagaggctggatcttgagcttctttgtgtccttcaatggtgatttctcgccatggagatcagcggaagataaacgagaagaggtgaggggaggcgccatctactatggaataagccatggaagaaggagcttcgccaccaagagagtgccttggataaaaagcttggagtgggtgcttcaatggaggaaaagaaagagagagagagaaagagagaggggggagcacgaaattgaaggaagaaaagagggagagaagttgaactttgaagtttggctcacaatacgctcattcatgacaagtacaacangtgttacacatgcttct

SEQ ID NO: 141181 - DNA, 290 bp, Glycine max
  unsure (1)..(290): unsure at all n locations
agcttcaggccngcatcttcttcataatgggtccttgcttcttgaagacaatgtcatagaatggagacggaagaaagatgattggagacgccacttcaaggagaagatgagtcaagaagaagctcaccgccataggaagccatagataagagctcgaaggtangagaaaatgagtggagggagagggagagtgatggaaacttgcttgtggagcttctatggaggctggatctttgagcttcaatgaggtcctttaatggtgattttccaccatggagatgcagcggaag

SEQ ID NO: 141182 - DNA, 187 bp, Glycine max
gggatcttaagcatctgcagctgcatctttgaagaattatttgttacgctctagccgactcgaagagctggtcgtcaatagaaataagtcttaccattaagttgaaagagtttatgactagaggcctcatatggcacggcgaccttgaacgaaaaccaatatgccctaaggaaaacaccaccaagca

SEQ ID NO: 141183 - DNA, 400 bp, Glycine max
  unsure (1)..(400): unsure at all n locations
agtctatatagatgctttttttcaaatttatcttataagggaagtctttntaaatttattggcaatcaaatatattttgtgataatatggtcaacccgtgacagatcatgcattcatgattagtataaattatatgcaggatatatgcctcctgatctttacaacttgaattcatcctatggttctgtggaagagctaaaatactgtatagaggaaatgcattctcaagatctgctggtaagttgtgctgctaattntgaacagttgactacctgaggatgtatacgagccaacttatctaagtggtaggaagatgttaagtcattactcatttcaattgagatctcagccgcctcttttaccatagattgtgtgggaatgaaaatacctcatgattatt

SEQ ID NO: 141184 - DNA, 346 bp, Glycine max
tcctcacagtctttaaaattgggagccaaaccaatccttgtgttcggactcttagccactttatgatagccgccgatgaacccattaactgcgttccactaaacttctcttgtccttttctatcacgcccgcatatccatgcctttgagaaactccttggagtaccactcgcgtttgggtcactaaaaaccttgtgcgaagaaagacctgatgctttcgtctaatggcgctcctcttatgggggtaccaaactgtcttatggcgagaacgggattataattaatacaacccctttgttccatcaagggaacatttggacatccttcgcatgaagaaagaatcttga

SEQ ID NO: 141185 - DNA, 302 bp, Glycine max
  unsure (1)..(302): unsure at all n locations
ctctgggtcatacacccactttactacatganatagttgttatcatnntccggtttacaaaggaatattatttggaaattctgaccatgccaatgtgatcggtgttcagtgtatgttatgaaaataatatgcatctcatgaaaggataaccgttactaagtctctttctctaaggttcttcaaaggaagcataatacatgcaatggcggttccaaagtcaaaaaaagatgctaagacatatgaaactaactagacacaagcgttaaaccatggttacctcgaaagaaatgaaaggtcagatt

SEQ ID NO: 141186 - DNA, 392 bp, Glycine max
  unsure (1)..(392): unsure at all n locations
ggttttgactggtgataaaatgtttactgccatcaatattgggtataatatngtgattatgcattttttatattggcctctgcgtgataattacttatcaagtngtttgaatatgcagtttctcttgtcgcttgcttagacaaggaatgaaacagattataattcattnggagattccagatattcaagcattataaaaggttggagacaagatggctattgccaaggtaaaataaaattcagcctttaatctaggttttctttagaaagatgtagtttgcatatcgaggattctatataattacagtggacatattaacaaattggttttcttaanatatttcaaaatcctcataagatcttcatacattanaacttagagaaagaatgaa

SEQ ID NO: 141187 - DNA, 351 bp, Glycine max
tgttttcatgtagacctactataaagcttcggtacattgaatgcaactataaaacattccataatatccaacccaatctagtacaaatgtacaaagtcacctgcctcaatatttattattctgaaatctctatgcaaactgagtcccaaaaaaataatgccttctaattgcaaaaatgataactattgattttgcggctttgaaacaatacttaatggcccatcacttgtatttggaacattagtaaacgagaagaaattaccgatgaaaatatggaaagaccatttttcgaacctatacaatattttgcaccacatattattatgggtcatactccaacttcataaataa

SEQ ID NO: 141188 - DNA, 325 bp, Glycine max
  unsure (1)..(325): unsure at all n locations
caagcttatgatgatgaacaacaatttgatgatgcctaaatcccaatgattgattcaagattgattcaagatttcaagatcaagcatcaagaatccaatccaagattcaagattcaagagaagaaatcaagaagcaacaagtcaagaattcatataggataagtattaaaagatttttttcaaaaaaccaaatagcacagttttgttttacaaaagaattttctcaaattttctaagttaccagagtgattactctctggtaatcaattatcagttggcgcaacctacccttcngcgggagggcgatgcggggcttaccggtgcg

SEQ ID NO: 141189 - DNA, 363 bp, Glycine max
  unsure (1)..(363): unsure at all n locations
gaacatgtgaacaccatctataatagtggcacattccacactttgagcttggttgagctcatgacaacaaccaacaatgaataataattattaataattagtcgaggtgtcaaaattgattaagttgatggagcaacccaaataatttattatatccatttcatggtaaatatatntattttgagatgtccatttgaggaggtgattataaagtgcagtgatcatgataaaggaattggattaaaatgtaagtgattgccattgttttgaaatgtatatacttctagttctaacaaataccttaagcctagattaagtggctcatcaagctgatagaaaacacgtgtgttatcatgttgagtc

SEQ ID NO: 141190 - DNA, 303 bp, Glycine max
  unsure (1)..(303): unsure at all n locations
agctanacanaggcatgcgaagagggggtatttctatagccaattccttatgttatcaaacataaatagggaaaatggtatattcgaaccgatgctctttcttggcgtcatgcattactttctatgcttgaaacaaaattgattggtcttgaattgttgaaaagcatgtttgaaaatgatgaaacttttggagaaattgttaaaattgtgaaaaatttcagaaatggtttctttaacatgaaggctttttttcaagaaaacaaatgtgtgtgcctaatgttctactagaaattgcttgttgtg

SEQ ID NO: 141191 - DNA, 463 bp, Glycine max
  unsure (1)..(463): unsure at all n locations
agctagcgagacagcagctttgcaccttcttattttctccgttttacctgaaattgaagtgaaatttacattaaattcatatggaaagcttctattgagcaaatataagaactaaacaagaaatatttacaatcctaccaaaaagaaccataaattgggagaaatatatacattttttaaaactnttctatacaaaagttagtcgtaaaagatgactaacacctgccatgatgaaagggtcattctggtaagcgagtttcttaagatctaccaacataaatcctaaatcatcggttcatacattgatattgttgttaacccacttacatttgaaaacacaaactgtgaatntgacataattaagctcctagatttcttcaacgaaatcaaactaagcgatgaaagctacacggggattgtcaacatttacatttgcgaagtgttgagacttagcccttagagt

SEQ ID NO: 141192 - DNA, 430 bp, Glycine max
  unsure (1)..(430): unsure at all n locations
agctcctggcacanagaagaagaagaaagtctttgagattcaaggctttgtaaggattgcatgaataagtgttggaaagattggttgataatgcaaaacaaatccttgcttttatagactcttcatgtctggtcaagacaaccattagaagagttatgacttttagaaaaacttaaaaaccaatttgaaaaagtcaaaaactatttgaagagttacatcttttgatttaattcagaaacaataactggtaatcgattaccacattaatgtaatcgattacacaagctcttatgtgaaaggatgtgactcttcacttttgaatttgaatttcaacgttcacaggcactggtaatcgattaccaaaatattggtatcgattacagaatcttgaaattaattagaacattgtgaattcgattttgaacacttt

SEQ ID NO: 141193 - DNA, 347 bp, Glycine max
gtgtttgtgatacacgatgataccaattgatgaccaagtgatgaccaagctcaagatcatctagaacactcagtgaataaaaatattcagagttctgatagaatcagaagaattacgactcagaagaagtcagagtcagaatcagattcagatctcagaatcagacaagatttaaactcagatacagaatcagagaagcttattcagatagtatgaaagatttctcaaaattgagagacatgatttttcaaacatgttaccaagagtttactcttgtatcgatacagattgtgaatcgatccatagcaaatgtttgagaagttcaattgatttcaacgtcaataatt

SEQ ID NO: 141194 - DNA, 444 bp, Glycine max
agcttggaaggatgcttcaatggaggttttattgagggagagaaagagagaggggggagcacgaaattgaaggaataaaagagggagagaagtggaaatttgaagtacgtctcacaagactctcattcatcaaagttacaactagtgttacacatgcttctatttatagactaggtagcttccttgagaagctttcttgagaaaacttccttgagaagcttctttgagaaaacttccttgagaagctagagcttagctacacacacccctctcataactaagctcacctccttgagaagcttccttaagaagattcctaaagaaactagagattagctacacatacctctctaatagctaagctcacctccttgagatgaaaagctagagcttatctacacaccccctataatagctaagctcacccccatgacaaaaaaacac

SEQ ID NO: 141195 - DNA, 366 bp, Glycine max
tactttctctagctggccaaggaagctaccttccttgtttctcaaggaagcttcccatgtgctacgctataaatagaaacatgtgtgacacttgtcataactttgattgataggaaacttgtgaaacacacttcaaagaacaacttctctccttcttctacttcaatttccacgcctccccactgtctatctcattcttttcctccatcgaagcttcctctctaagattcttatgcaaggcactctattggaggtgaaacggctgtatctatggcttattctctagtggatggcgcctcctctcacctcttctcatttatcttacgctgcaactgcatggctagaaatcaccattgaaggaccgta

SEQ ID NO: 141196 - DNA, 449 bp, Glycine max
  unsure (1)..(449): unsure at all n locations
agcttagtagaggaagcatagtcgttactcgatgtaagaatgaaggctccttgtacatcatgtagggaactatatgcaaaggggagacaaatgttgctcaagatgcagccaaagaattatggcacaagagattgggtcacatgagtgagaaaggtttggagtttctagcaaaggatcactttccaaacataaagtgatgtaagctccatgtggagcttgaaggcctaggatcttcttcatcaatggattcctttgcttcttggaagatgaatggcagcggagtaaagaaggaagagagagaggagacgccacttcaaggagaagatgagtctagaagaagctcaccaccataggaggccatggataagagcttggaggaagaagaagatgaatgaagggacaggaagagaagagcacaaaattttgtgctctanaagagctctgaaata

SEQ ID NO: 141197 - DNA, 423 bp, Glycine max
cgagatgaggaagtgttgaagggtgaaacttcctgcttttattgttgaccacaaagtggtacctggagatatgtcgcgggggtcaggagaccttggggacgtcaggtggggtgctattgcccaaaaccaagcttgaccaatcccgacccaacccgggcatagtcggtcagtgagaacctgtgatgtacctaaacaggcgagctcctggcagtcaacagataaaaggaacaaagaccacaaagcaagggggcttgtggtggctggccagctgtgaaacttgattgatatgtgagatatggtctctggtaatcgattaccaagggtgggtaatcgattacaaggcttaaaaatgaagacagggggctaagatggtctctggtaatcgattaccaggggatgtaatcgattaccaggcttggaaac

SEQ ID NO: 141198 - DNA, 425 bp, Glycine max
  unsure (1)..(425): unsure at all n locations
agcttgtagggttaaagtctcacgatagtcacgtgctcatgcaacaattgttagtcgcggctatacgagacatcttgccaaacaaagtcaggttaacgataactcgcctgtgctttttcttccatgctatatgtagcaaagtcattgatccagtaatgtttgatgagttggaaaatgaggccgcaattatactgtgccaattggagatgtattttccccctgctttctttgacatcatgattcacttgattgtgcatctggtcagagaaatcaaatgttgtggtcctgtttatctacggtggatgtacccggttgagcgatacatgaagatcttaaaagggtatacaaagaatctatatcatccaaaagcatctattgttgagaggtacattgcagaaaaagccattgaanttttgtcacaatac

SEQ ID NO: 141199 - DNA, 427 bp, Glycine max
tataagaacaaaattgcctaaatcatgtgcaaatatgcatgtgtaatacgaagcatcaacaagaatcaagccaaggctattgtgcaagcaatcaatggggcaaaacacaccaaaagattatgatgatggatggctcaaattctcacaaaggtaaacttatcactttcaaattgagctttcaaaattatcatgacatgtagaggaaaaacaaggatttcaaatcacaaaatgtcaagagacttttattttcagaacaattacccatttcttgaacatatcctataattcaaagaaaaatatgaaagttgtacatgcaaacataattgacctaaaatattaaactagaaacccaacaaaactaacaaatttaacacatacataactaacaaaactagcataaccaaaaccaataacactccccccatac

SEQ ID NO: 141200 - DNA, 437 bp, Glycine max
  unsure (1)..(437): unsure at all n locations
caagcttgactngagtcatcaagagattataaatatgtgactcatgacatgagtttcaatcaataattatcaatcatcaatcatctttgaatcatctatttttcaatcttttttcaacatcatctctcaatcatctttcaatcaatctttcaatatctttctacagaattttctgattcatttctcttcacctttcaaaaattttttgatcagcactttctcttccaagaaaagttctttgttcaaaaacttgtgctattcatatttttcattctcttctcccattgccaaaagaacgaaggactaaccgcctgaattcttttgtgtctctcttctcccttacaaaagaatcaaaggattaaccgcctgagaattattttcattcttcccttcccgttaagcaaaagatttcaaaggactaactgggtgagatatct

SEQ ID NO: 141201 - DNA, 396 bp, Glycine max
  unsure (1)..(396): unsure at all n locations
ntgatctaccaccaccgccgccaccatcatcttagttgtctattattattagtactttgatttctagctgtgtatttggctatattattatgaaatttgaacaatttagtatttcttttatttgcatggtgtgattgaaaaattatgaattatgtcatatgactatgtggtttttatatattcgatctattcatgtttcttgcttcatgattggtttatactctttaatgaatgtcttgtgtatgattagtagtgtatgtatgttattttcttgttacgcactttggctctttgttgatgccaaaggggggggggggggagagaaatatggattaaatcaagaaccttcataagtaattaactcaatttcaagttacgcataaactcacaatcata

SEQ ID NO: 141202 - DNA, 427 bp, Glycine max
  unsure (1)..(427): unsure at all n locations
agccttgcggatttggtcttcaccggcgatttgatcaatatgggtctggaaagaggcaaatctgatcatcctgctttgatgaatgcgaaaactggggcaaaagggagaaacccatgatgcgaatgtcgttcctacatggaaaatcccccaccagctcaacatcatcattactcaaccaatattagcacttgtcattacccaccacccactcatccacaaaggccatccctaaatcaaccacaaaggctgtctaccgcacgcccaatgcccaaacaccacttttagtgaaaaccaaaaaggaattttgcagcaaaaagcctgtaggattcaccctnaattccggtgtcatatgctaacttgcttccatatctacttgataatgcaatggtaacagtaacccctgccaaggttcctcaaccttcatatt

SEQ ID NO: 141203 - DNA, 465 bp, Glycine max
  unsure (1)..(465): unsure at all n locations
gagtctaggtaaggccctcagaatagcttaatctttggggatccattgataccccatccttagagataatatgcccaaggtatcctatcttnagttttccaaaagtacacttcttctgattgacaaagaataagtcttctgataatctagctagcacttgcctcaagtgctttaaatgatcctcccatgttttgctataaacaaaaatatcatcaaagaaacccaaggcataccttcgaagaanaggcttaagggtggcattcataacanattggatagttgctagagcatttcttaatccaaatggcattactagagattcataatgcctttgatgagatctggaaatcgttattgaatgtctggctcgtgcattcttatatggtgatatccagcccttaaatctattttagagaaatacacagctttacttaagtcatccaacaatatctctatcactggaag

SEQ ID NO: 141204 - DNA, 442 bp, Glycine max
agcttgcagaccatatgctgaccactgctttatgataaatcttcacgttgatacatataaaccttcttctctacatctccattaagaaatgatattttcacatccatttgttgaaccacaaggtcaaaatgagcaactaatactaagataatacaaaaaagaatctttcttatatacaggaaaaaagtctatgtgtaatcaatccattctattctgagtgaaatccttagcaacaagttcttccttgtatctcttaatgttgcctaatgaatcccgtttgctcttaatgacccattcacaaccaatggccttagtcccattaagcaactctacaaggttccaaatctcattactctacatggaattcatctcatcatttatgatatcataccatagatttgactctataccactcatgactcgatcaaaagttatgggatca

SEQ ID NO: 141205 - DNA, 283 bp, Glycine max
gatgcatcatgcaatagtactagataattaacgacatgatatactgtaccaacatgtatcacattgactaacttctattggatgacagaaaacacctttgatgaggttaaatgtgaaatgaaccctggaatctatccttacatacgtgtgataaatgctataacattgcttgagaagacattactagtgttcaatgttatgtttggtacagaagtgatcatgcatagagaactctaatcatgaatgataataatgaaccacatttgaacactatattggtcga

SEQ ID NO: 141206 - DNA, 380 bp, Glycine max
gaccttagatcgaccgcggcatgcaagcttatagaacgacagagaagcagctatgtttctattgttaactaacggatctcaaccgaagatgcttcacccactatgattgcatgaatgtcacgcgtctcctcaccgacacaatgcaatgcaaatcgcggcttaaaaatatatagtaactaatactgactataaatcctacaacaatccaattctttattagaaaccagtaccaaaacgacctacccgtaatgcatgtcagttatggtattcatgaaccttgattaaaaactctgttcatctcaaagacattccttaattaccaaaaaactatatgacatccctagctgcactgccaaatcgcagcactagaaccttattct

SEQ ID NO: 141207 - DNA, 281 bp, Glycine max
tgagggtcttcaagttaatatcacgcggtgagcgatcaattctttctctgtgaacaatgcctagtaagaagaaagaaatgaattgagtttctccataaatgaaaataagttctccattaaataattattgactaatttgtagatgtcttcttattcttaagaaaggtatataaaaaagtttctacataaaactcattttatcttaaagagaagttcatgtcattattgttttatactcttaacagtgggactgaataagcttacccagaccataagtgtaa

SEQ ID NO: 141208 - DNA, 352 bp, Glycine max
agcttgtcgcactcatagcatattatgtgtcttttattttcgacttttttctccttgaacaccttttgaaacaataagaaacacactataggggggggggggtgaatattgtgtatatcaaagatattaactctttgtgatatataggatcatattaataataatgtattaaacacatttgctttacaaaagataagtataatatatcaataacattaccatggatcggtaatgacaaattaaattcttgaaatatattttctatataacacttacttgtaaagaggtgatacaaagtgttttataattgattaataattcgttaagtaataagtataatcacttgatattg

SEQ ID NO: 141209 - DNA, 397 bp, Glycine max
  unsure (1)..(397): unsure at all n locations
ntctccctattntgctataaatagggggagaagtgattattataagggttcagcctcttaggcacttctctctctctcgaaatttctgaggaaaattagttccgtgaagagaatccaagccgaggcgcttccataacgtttccgtgagtaattacgcatagattctcgaccgttcttcaagattcatcgttcgttcttcgttttcttcagtcttcaacgggtaagtacctcaaaccaagcttttcaattcattctatgtacccgtggtggtccacattatgtatcatgcatttttattctcgttttcatttgctttggatatcccctcttgacgtgcttaagccatttatttaagtcatttctcgctttatctaaaataaaataaatttcaccgatc

SEQ ID NO: 141210 - DNA, 56 bp, Glycine max
  unsure (1)..(56): unsure at all n locations
ccccaccaccctcattaaaaatataacgcgaaaaaacaccancccccccccaaggc

SEQ ID NO: 141211 - DNA, 268 bp, Glycine max
aatatgcacagttgcagtatgagaatgaaaatacataaacgaatactgtatgcgaattcttcattaatccccaaaaatgaaaaaaggtgacaagtgatggatcagtaaaggctattactagtgagaatgtcgatgtagaacattgtctagaagactcggtctctttcaggagttcattgtgagtgacagcacatataatctatgccatcgtttttgcatgacaatttactactccaaccttatctctgatccagcacccagcgccgta

SEQ ID NO: 141212 - DNA, 433 bp, Glycine max
agcttggataatgggcgtctgtgtaggtgtcttttctctttcttctaaaacctaatgcatgtttctgttcaattggtaagacttgattcacttgagtgatatcagactgaagatttatcattctacattttgcggattttaaaactggatgaaacatttgagtgccatgcatgggtttaaattgcagatgtgatgtggtagccatgactcaatactattatgttacggctgcaatcgtggttgcatactgcattttataaccatggtgatgtgctcttaatttttttaagaggtgcagtattatctattctatgtaatttgtcttcatagtgtaagtgtcttaatttttatcttagtattaattaacaataagggcatattagggatataataaatatgcaagctacagtccacgttattttatctacaacag

SEQ ID NO: 141213 - DNA, 372 bp, Glycine max
ctgagattatgaaagggagtaagtccatcagcacctatatcttctttaagaaggatcttattggtctcttgagattttacaagacacgcatgaggataaaattcaaagaaaatagagttatctttggcaaattgacttacacttaacaaatttctcgaaattgaaggaacatgtagtaacttgtgaagtttaaaggttatgccaacatcattaggagatataaatgatgaagaaccagtgttagaaatacttaaacctttaccattgcctatgaatatctaatctggtccatcaaagtgggtgaattgtttaatactttgtgagtcttcagttacatgaaagctggccccagaatctggaatccaagtggta

SEQ ID NO: 141214 - DNA, 443 bp, Glycine max
  unsure (1)..(443): unsure at all n locations
agcttgttcgaagatcctcgagacgttataagaggggcctatctttcagaaaagacttttaagaagtttttgaagatttctcttgatgaaaactataacctgcatccttttgagttcaaccattcccacttctgcaccatggggtttgttacctggtgggagaaatattattcgacccgttcagttggagatactacgatcatgatctccagacttgaaagtggttttacacaaccaacggtcgagaatatccgctcaaaccttcaagctcgaggtatntaaattactttgactttctaaattgatatgtattcttgccttttctaatattcttactttcaggcaaaacaatcatgacgaagaanagcgctgaaacgtctcgagctgatgtgagacccaaaaaacccactggagtgaagatccaagataggaaacaagaagag

SEQ ID NO: 141215 - DNA, 455 bp, Glycine max
  unsure (1)..(455): unsure at all n locations
cgattatgtgttgattatagctttggtttcacttggttactttcaaactcattaaaagaggacttgcaaagtaaatgaccggttgaaactttatttttcaatgattaatcgaggttacaacacaaacgattggttgaatttttattttacaatgattaagtgagattacgaaacaattaatcggtggaaactcgctttacaatgataaaaatgagattacaacacaattaatcggtcgaaactcgctttacacaaggaaatgagatcactgacgatagaagaatgaagatgaagatgcgaaaagcaagagtggacccctatgggtgcatagaatgaattcacaacttcaaaaataaaaactaattggttgatgaacgaagaaagatgaagaacggagaaagaacgatcacagaatcgatcatggaaacgttacnngagcattattgaagtgtttt

SEQ ID NO: 141216 - DNA, 448 bp, Glycine max
  unsure (1)..(448): unsure at all n locations
agctntgcatagtgtcagggggtgcatctttattacttctatcagctactctttgcccttgaagcaatctaccttaggatttagtactagcttgtctgtaatgccctccattaaaataacaacccgtactaaaagaatataaaatctcacaattataataataggaaaatacctcatgtataataaataaagtcaaataaataagtttttacataagtaaaaatattatcctcaaaatatgggcatctaaactaaatgaatactaaaaatataatgaaagtgatcgcattcaacgtcttattttgaagtactaactaagctaaaattaatgtaactaagtaaactatatcttgaagtctcctcaaactcaacaacttcttcttggtgttctgaaaacaacacttataatgagatgataatcccatagaataaaataattgacaaaagt

SEQ ID NO: 141217 - DNA, 429 bp, Glycine max
  unsure (1)..(429): unsure at all n locations
ctgaacaatatacatgtccttcatttaactatctttgggcttggcggccacgctcaacaaagtactttcgacacctactgtacgttgatttgaccaatgctgttatgggaatgttgcgacaatcctttaaaaccttattgatacattctgagaggttggttatcatgtggccatatcgacgtccttctctatcataagccatcgtccatttttcctttgaaatgcgatcaatccatgttgctatggctagactcagttgacgaaatttttctaaattttgatcaaaaatgtgtttgcaaggagtgtaggctgcataaaattagttatgaataacaattttaagtatatatgagagttaaataaacgtgaccatcaatttattatatcttacccaatntcttcaacatttcttnttgtttggcattattg

SEQ ID NO: 141218 - DNA, 446 bp, Glycine max
  unsure (1)..(446): unsure at all n locations
agctnggagaggatgcttcaatggatgtatttaaagagggagagaaagagggagggggagcacgaaattgaaggaagaaaaagggagagaagttgaactttgagttgtgtctcacaagactctcattcatcaaagttacaacaagtgttacacatgcttctatttatagactaggtagcttccttgagaagcattcttgagaaaacttccttgagaagcttctttgagaaaacttccttgagaagctagagcttagctacacacacccctctcataactaagctcacctccttgagaagcttccttaagaagattcctaaagaagctagagcttagctacacatacctctctaatagctaagctcacctccttgagatgagaagctagagcttagctaaacaccccctattatagctaagctcaccctcatgacnaaaaacatgaa

SEQ ID NO: 141219 - DNA, 431 bp, Glycine max
  unsure (1)..(431): unsure at all n locations
ctatatantactcacgcttgaatatctctatatgagtaatgcagaccgaggccaagcttttctatggctacacactctccaatcgcttgcttatttgacccacctaactatgtcaggatgcacactccctcactataatgaaccatcctcgctcaacttctcatctctgcatactctcgatcaatccgatactgccatatcttttgtccccaagtggatattcaaaatgaagaaacttgtttctcttcaatcacagggaaatgaaattcaaggaccgattcctgggggaatacgaaacctctcacttactctaaatcttgacttgcctttcatacattctcatcctctatacccgaaagcttatacggacttcatcgactcaagtatatggaccaaatcccaacaactagcacgggacaatttctgatgcc

SEQ ID NO: 141220 - DNA, 223 bp, Glycine max
ccaacaacaaatgtgggcctcagagaaagagcgcagcccatcggaccatcaatgctcaccgcatcaaaaaggccgctgtccacacagaccaaagaagacgcgagaatccgatccgacacaattgtgtgtcgcgccaatagtataaaataccgtaggagccggaggcacacggaccatcacttgatcacagggcggagaagcgtcacgatcgcgtcttcgatag

SEQ ID NO: 141221 - DNA, 420 bp, Glycine max
agcttagaaatcaagagagggtaaatgtcttttcatatggggagattgggatgaatcaacacttttatctcagaatatatccatctgtgatcatgacatcaggaatcaaatagacatcatcaacaacgcggagatcgcagacacatatacatttgtgaggtgctaaagatgccaaaggatactgcactcctcaagttttattcaagacaccaatccgatacacccaatttctatgatcaagagaatcactaagacttatgacgggaattccaaggcgaaacagcatgagacttggcccaagaaaccaagcttaaatgtctcaacaaaagatttactctctggtaaccgactaccagaggatgtatcccttcaccagcggccataatacttcctgactgcttttaaaacgatattgaacac

SEQ ID NO: 141222 - DNA, 306 bp, Glycine max
agcttctaaacttgatagcaagaatgaagctctgttttatcttgtaggacaagtggcctcatatatcttatggagggggggggggggtttctatgtgctgttgtgacatgatggtgagagcaaaactattgtgttgattaaagtctactagtgagagataaaaacattagggtatgcataaactcgatgactcttcgtgtctgtgaaaccagtccttgaattagagtgcgaatgactgaaaacttatgctatatctcctgcgagagaaggaaagtgagagtctattgcatactcctttaatatatc

SEQ ID NO: 141223 - DNA, 301 bp, Glycine max
atcacacgcaatggaggaggtaacccctcgaggaatctaccagtctcttttcctgatatggtacaacctgaactcaaacagcacatatcattgaggtacttttaagcctctaaacaaacaacgtgaggttcataagcctacatttctaatctagattgccgtaggacggctaacatgacaagaatatggccctgatgtgaagacaaaactgatcttcaatcatggggcgacccacgtgaaaatgcaattcatgtgtgcagacttgaaagaccctagcaaaacgaaagacgcggttacctta

SEQ ID NO: 141224 - DNA, 69 bp, Glycine max
  unsure (1)..(69): unsure at all n locations
ccccccccccanaaacctacaccccccccccccccaacaatataccaaccacacaaaccccaacacaac

SEQ ID NO: 141225 - DNA, 323 bp, Glycine max
  unsure (1)..(323): unsure at all n locations
tctaagcaccgcagcagcaactcaagaaagagaggttatttatttatcacatacaacatttaaagtgccataaatgcacactctgccctcaaaantaactaaaacccaaaaactttacacgcatcaagaaaaaaagataacatcctttaattctgataatctccaaaacaaaaacaatcgattccctacagcactgtatatatttaactgcatacgaaacaaatgagacaaaatcgctggagataaacctctagtttaatacaaatattttggaaatactatcaggaaaaacttagctaaaatttgcttatcaaactcaacac

SEQ ID NO: 141226 - DNA, 443 bp, Glycine max
gatcttagagtcacctgcggctgcagctgtcctaaaattcacagccgctacattttgtgaataacaacagagatgtcatcaggatgaaagatttgattcagaatatccatattaattccaagatttactttgttggatcacaatatcagctacgcacggtcaaactttcaaaactatacacttccttcttctaacaaatgcgagtattttcctgtagaaaaatgagtatatttctgtaagaaaaaaaagtgatatatgataattttattccacttttaagattctcactaaagtattagtagttttcgttaaaaaaattattaccaaaatatcatttacactattatcccttaagaaatgcatatattaagtcacttcctcctcttgtgtcaagatagacatctaccttatattacccaattttaaattgttcatcaaaacta

SEQ ID NO: 141227 - DNA, 413 bp, Glycine max
  unsure (1)..(413): unsure at all n locations
tacatatgnaccggaacgacccgacatgagattgttaactttttaagcttacatgcaggcaatactataatataatgaaagctcaatatcctagttctaactaatatactatattcttctggtaatataaacaatatgaactcttaaaatattaaaatcctcgtcaaaaatctcctttcaaatttaagccgaactatattattctagcccctaaagcgaacttaattctcattataatatccgaataattcgccgatagtcacttttttccaagggagtcaatccaaataaaaaaaattcatgggtctcaaatcataaaccatttttaaaataaatccgatatacgaaaaaaaaggaaaataattttaaataaatttaaaaaacatttttacgataaaatcatttataaaaac

SEQ ID NO: 141228 - DNA, 167 bp, Glycine max
cttgcgcgacataagggacttctgtgtggcttgaaaacgaagctctgagaaatgagcaaccctaccattggcttgagtatggggcactgaagagggtgtgcaaactaaacatggcttaagtgggggtaatgaaagtacggaatactataacacaaaaacgaaaacaa

SEQ ID NO: 141229 - DNA, 413 bp, Glycine max
  unsure (1)..(413): unsure at all n locations
agcttcatggggaaagaatggagagattgttgggggggaattaaaggagattacggagagaagttgaactttgaagtgtgtctcacaagttcctcattcatcaaagttatgacaagtgttacacatgtttatatttatactctagcacatgggaagcttccttgagaagtgtcagaccctaatttcatccggggactatcattcactattgctgtgattctcactaaccgaactgcattgtttaacaccagttacggcacaaaacaagaaatcgttcaatgttttgatcaagaatgcaaaagataccaaaaaggaggggcaacatggtctttttattaagtttactggccctggctcgcccaggatatcctttgactcacctgngccctcaaaaaactttaacctgtaggaac

SEQ ID NO: 141230 - DNA, 434 bp, Glycine max
tgaggggaaacttgatgccttggtcaacctagtaactcatcttgccataaatcagaaatctgcatctgcacctgttactgttgcaagagtctgcggtctatgttcttctactgatcaccgtacagatctatgtccttcattgtagcaatttggagtcaatgagaaacctgaagcctatgctgcaaacatatataatagacccccttagcagcaaaaccaacaacagtagaataataatgatctttcagcaatagatgtgtcataccctaatttcgtccgaggactattgcttgatggcatgcaacctttgattggccgcttcgagatacttggcaccctttggtgcacaatatgtgaagtcccgagacgcgccggaaatcacaagaagcggggttacgcaattgtgaaattctgaatgtgacaaaaccaaaggg

SEQ ID NO: 141231 - DNA, 475 bp, Glycine max
  unsure (1)..(475): unsure at all n locations
atccttaagtcacctgcggcatgcaagcttgttgacatgttgagatttacgtcatcttccgcgctctcaagatctgtcatactgacttttgagtctcgccgacggccgaaaatacccgagtggttatccgtataaactttttgctgtctataagacgaaaagcctgatagcacgcagagactaacgtcgtcttctgcgcccttcgtcaatcgcggccgacaagcccgttgacacgtggagatttacgttatcttccgcgctcacaagatctgtcatactgacttttgagtcacgctgacgggcgaaaatacccgagtggttatccgtataaactttttgctgtctgtaagacgaanagcctgatagaacgcagagactaacgtcgtcttttgcggccttcgtcaatcgcggccgacaagccctgtgacacgcagagatttacgtcatcttccgcgctcacaagatctgtcatact

SEQ ID NO: 141232 - DNA, 438 bp, Glycine max
  unsure (1)..(438): unsure at all n locations
ctttcgtcttacagaatgcaaaaagtttatatggataaccactcgggtatttccgcccgtcagcgtgactcaaaagtcagtatgacagatcttttgagcaccgaagatgacgtaaatcaccgcgtgtaaatgggcatgttggccgcgattgacgaatggcgcagaagacgacgttagtctctacgtgctatcaggcttttcgtcttacagacagcaaaaagtttatacggataaccactcgggtattttcgcccgtctgcgtgactcaaaagtcagtatgacagatcttgtgagcgcggaagataacgtaaatctccacgtgtcaacgggcttgtcggctgcgattgacgaatggcgcagaagacgacgttagtctctgcgtgctatcaggcttnttcgcttacagacagtcaaacgttatactgttaaccacttcgg

SEQ ID NO: 141233 - DNA, 436 bp, Glycine max
agcttgtccttctattgttacatgctcccccactttaagttctgacttgaaaaacaaaaattatatcatgcaaatgctccaaatgaatgtggcacgtttctttttcaattctcacaaagttatgttggatcatatctcccacaaagaaaaagaaagaaaggaaaaagttaagttggatcatggtatgcataattgaatcaattgggcaaaaattgacaacacaacatgtgatcaataatgttttgttaaactatgaaaaagaaaggttttgttaaacggagcataaggagttctgctttcaaaatctactactatcttttctgattgcagaatcaaaaccataaaaggctacaaacaattacagctagttaaccaaacagcttgcttcaattcctcatctcatacggacccatcatctgccatcgcacataatgct

SEQ ID NO: 141234 - DNA, 419 bp, Glycine max
  unsure (1)..(419): unsure at all n locations
tccanattagtgtaccaaactaccgcggctgcggccaagctattttgaatgaagtgtattaatagcttctcatccttagagtgtgcgcccatcttgtgacagtacatcttgagatggattttgggacaagtcgtccctttatacttgtcgaagtccgacactttgaacttcgggggaataacaacatcgggtactaagcaaagatccgtcatgtctgcgaatggatagtccccaaatccttccacggccctcaatctttcctcgaggagatcgagcttcctcctttcttcagttgccgggggcggtccttccgtggacaaaactattggttgtgttgcgatgttgggttgaggcaacgtgctgggtgccggcccttcagggatcggnggatagaactcgacatcccttctagcatagtc

SEQ ID NO: 141235 - DNA, 429 bp, Glycine max
  unsure (1)..(429): unsure at all n locations
agcttatgcgcatacttcttcacgaacgtttattttctcttgacattcttataactaagaaaaatgcacccatatacaatcaaggcaccttcgttacctagattatttacatgtacttccaaggtgtatttgttacctacatcacacacatttcctttgctaaattcacatacatgcatactctaagcactttggctatcaaaaattgcatacgtgcacatcttggtatttctaatacctatacatacacaaacttcatgatgaatcttgactatctacacaataaggtgctacatttcatgcccttttctttttcaagtgtttttttttttttttttntttntttactacctaaagccgcatgcaaattcaagtatattttcttttgctcactaaaattgtattcaaattaaaaggtatttttgtaat

SEQ ID NO: 141236 - DNA, 463 bp, Glycine max
cgtcattggagctgacccatcaactgccctaactctatttgtttggtgattcctaggttcttgaccttgactcgatagaacctctttttaagcgaaggcgcctgactcgaccccatgttttactaaagtgaaacaaaacccagtgcaaatcaaaactccgacatctatcatgggtggaatggatgaatgcatgaagaaatgcatatgacacagatgcaatttatgaatatgggagctcggaaaattatccccttcttagatacaacgtctgggcagcatggcgcccgacgcatgtatttaaaaaggtgacacggaccctccatcggtatgacaaagtgaggggatcaagacggaactcgtgcatgatgcatatgcgaagggcacaacacggggatgtacataattcggcaatatccacatacaaatataatcatatgggcacatgacatttaggactacatgc

SEQ ID NO: 141237 - DNA, 400 bp, Glycine max
agcttgtaaagactaagcactattggatcattataaaaaataggtgaccatcttggtatagttttgcctttcttttaccaagttcaaatttggatcgagtatttttctagctttttatactatgtcggttcgtcggatccattactttcatttttctttcttacttttgtgatagttcactgccaaatgaacaaatgcttcacgctaataaaagtaattttaggcgccgttatttaattattttttgaaaataattctataagcacataaaaaagtaatttaattgtttagagattctattaaaagtgaatatatataatttctattttattaaaattataaaaattactctttattttaaaaaaaaaatccatcttgagttccggttttttataacctt

SEQ ID NO: 141238 - DNA, 459 bp, Glycine max
gcgaaccaaattaagaggcaataatgattgtaacttctcttgaatgcattagcctatatgtacatagcatgttcaagttgaggacgtctgtgcatactttttctgaggtatgccactgcaaatagagattcttaatatagactacaacatgttggggatacctccccaattactgtggccggaagcttaccagataggggaggtctgttgattgaagtatcttaatgccatttgctgtcaccttacaggactccaatgatagagacctcaaattcttgagtgttttcaaatgctgcagcccagcatttgtgataccataatttgaaacgttcaaagaaatcaaatcactaagccctgaaactgcatggatcaacttgtgagctcaaagtggcatattgcattcaaagaaccttgagtagcgagtatcacatatacacacttatttaagttaaatctata

SEQ ID NO: 141239 - DNA, 444 bp, Glycine max
  unsure (1)..(444): unsure at all n locations
agctntacccatgtattctgggtcaaatattgtttatgatatatagctagcattctctaagtctttgtaggctctacccaagtattctttcaaaaagcctttacagtctttacatcctcagtaacaactactaccgaactaacacaataccttatgtgttccctttgaactttagaagcaacaatcccactaactactctttagagctctttccttctatcctatgggatggacactacaccttttgggatgccttctactaaggctcctcatctgaatgcgtttatagacactcatacggatttggcttttttgtatccacctagagtgttaggaagttctttctaatagaggggtcactcattggccatacctttgttgcacttcatttatgcagttgctcttcaaatttgaacaatacacacacacacacactcacacata

SEQ ID NO: 141240 - DNA, 438 bp, Glycine max
  unsure (1)..(438): unsure at all n locations
atgttgcaagccagtggttggaggagaaggctggatggtgaagttgattagnggagtgcataattatgaattggtcaagtcattacttggacatttatatgcggcgcgattgacttaagctgaaaaaacacttattgctgatatgactaagtccatggtgaatccaataaactgatggaagcttgcttgtggggcttctatggaggctggatctttgagcttcaatgaggtcctttaatggtgattatccaccatggagatgcagcggaagacaaagtgatggaagcttgcttgtggagcttctatggaggctggatcattgagcttcaatgaggtccttcaatggtgatatttcaccatggagatgcatcggatggcaaagaaataggattgtgatgcccatcactaggaataaccaatgagaagacttcacaccat

SEQ ID NO: 141241 - DNA, 445 bp, Glycine max
  unsure (1)..(445): unsure at all n locations
agcttgggatgagatatgttgatcatgaatgtanttggcaagagagccaccagcaatagcaaacatcaattagatggaagaagaagctcaacaagagcctggacaccaatggaacccttttgaatctcttatgattcaaaagatggatgccattcttcatctccatcaagagaaccaagttgaagttctagctccttagaaaatattaccactaggattgagaacatagaaactaggctatcccttggtagccttctgaacccggatgaggatgaagcgtagttatgttcttgtgcttgattctcttgtttgataatctgtgttatgtcttgttcagtttgtctctatgttaagataattgtttagtttgtttgtcttttgattaatggttgctcctagattgaacaatgtctttcccgatagaaagatgtacaattatgcatgg

SEQ ID NO: 141242 - DNA, 421 bp, Glycine max
tgatcaaacacaatctaaacatgccagtccactcaatttatacttatttctcattcaagtcaatcacaaacaccttattcattagaaatcacaccaactgaacatgattcaatcatttcactgttcaaacaagccttttgttcatgcaatcaacactaaaataacttgaatttaaatgattgaaatttaaatcaactaaataactaataactaaattgatcaaattttgcagaaattataacaaaacagaacttaaacatcttgctcatcctgtggctgatcttcatttaaatccagcactggagcagctggtacatcctgaagaataggctgctatggcttcatggctagtgctaatggcttgcgaatctcaagaataggtgctggagagatatgaactggagaagtatgctcctaaact

SEQ ID NO: 141243 - DNA, 178 bp, Glycine max
aagtatatggtccgtatctggatgcgtaaaactcaaagagtcactagagaggtgcccactctctatctctctcccgcccttgagagtaagaagctatgtatcggtccggaatgagaaacaacgcattctgcgactccgcctctgccccaatatattctgcgtatcccaatccacatgt

SEQ ID NO: 141244 - DNA, 349 bp, Glycine max
  unsure (1)..(349): unsure at all n locations
agctnatccatgaacgacaccagtgctagttatttaccactgcggctagtaaaatgtacaatttaaaaataaaaaatgcttaaagaatggagctcttgtagacaaacagtcactagaggacaagcaatcgcgaatgttcattaaatatgcacattaccttctattggaggtatatagaccctttcctttagcaataagaactcgaacacgacgtcccaaatatactttattattcaattcaagaacctgtgataacaactcaatataactaagacctttctagaacttattactatgctattgtatgacatggaagaaaggatgcgatttctcatcacaaaataaaaga

SEQ ID NO: 141245 - DNA, 242 bp, Glycine max
cgtcccgtgcttcataaaaatacattctgcgtaattatattcgagcacactccagcttaacattgtcatggcaaaaaccaagggaaagtggaacatagtgttgcccctgcatcacagtaacctccaaccaacttacattcacaatcacagcgtcgtatccataataaaccctgagttccatctccatggaatgccattgctctcggcaaatcacctagctcaccatcacattaatcgacact

SEQ ID NO: 141246 - DNA, 428 bp, Glycine max
agctaggatatttagcctgacgagggatcgatgttttattattttaggctacagcatagaacacaagaccatgattgattggagaaatatatttctatgcatcagcttgtttgttagaaagacccaacatatccacctgctgttgtcattttatttaccttgcatttgatagtttttagcatacaagtttagtttaaattctgtttgaatttatcacttatacatgttctctcaacaatgcttcgattctaaacttaattcaggctaacattagttccctgtgttcgatactcgaattcatccggtttaattttaaatacttgatgacccgatgcgctttccggtgagaaaactccccattgaaaatctccttgagacataaatgcacaacaagtaactacagtggggaggcatcaaatatcatggtg

SEQ ID NO: 141247 - DNA, 342 bp, Glycine max
ttgagccaatatcctgactcaccataaaccttgaccctttgttataatgtcaatccttaccctcggaagcggaatgaatagaagggaaatttccaatcataagaaaaggaatgaaggaagatatccaatcaaagagaaagcaaaaaaagataagaaggaaaattccccaatcaaagagtgggagaaaaagaaaagaaagaaaattcccaatctaagaatgggagaaagtaaaaaaggtagaagaataatgaaagaaagcttctgatcatggatcgaatgaaaacagaagaaatgtgcttaatggtctttggaccggacaatttctgaacaatacagaattgt

SEQ ID NO: 141248 - DNA, 447 bp, Glycine max
  unsure (1)..(447): unsure at all n locations
gtcacctgcggcatgcaagctntgcctanatagggtgagcatgggttttatctctactaccgcatgcaagttgaagaaacggttgcattgtttttaaacgaggatggcgtaacgccctgaaattttgctaactataaatcaatgtttaattgtattcatcgtgttatttaattatatgattaacttgaatgagtttagatatggtgtgaattagtcatgtgtgatctgattgatgtggatgttgagttatgtggagttttattgacctaagttgaaattatgagatttcaaaatttatctaaacctattatggtaaaaccgtgatcctggatttgttaaccattggattatgttcaaactttgactggtagttcccaacacatgtccccatggattgacttgtgagattctctaataacaatgtttaaaataaaatgtttgatctct

SEQ ID NO: 141249 - DNA, 438 bp, Glycine max
  unsure (1)..(438): unsure at all n locations
caagcttggcgtatngaatgtagggttgttnttttttttgttgcagaggaatgcgtgatggattctgtggagagtcagggtttcagaggtgtggatgagagttttggagagtgcttctccggttgaatctctcactcatctgtaagttttttgtttttgaattttaattactctgctttttggattttcattttggtggacggtgtctggaatttgagtttgttcatgggaggattgttttgaaaatctgagtgtgggttgaatgtttgtttttcattttattagtgcatcttatgtgtcatgctgcaggtatttcgttatcctttgcttttgttagaacagtgttgtagtgtgaacgcagggaggatggacattttggcgcttaattgttgtgtgtgtgtgctgatcctttctcatgttctattgttaaatcttggt

SEQ ID NO: 141250 - DNA, 458 bp, Glycine max
  unsure (1)..(458): unsure at all n locations
tacatttgtggcggtggaaaagcaaaattcacctgcttgtttgttaaccacaagtttttgtcttcggattcataattttgcaatttacttctaaaacaatgaatcggtgttttaatctatggaattaatgtcatttactatttactatattctcaaagaaagctgaacgatatctaactcagttagttaagttacgtgcttaagttattgtaaatctttgatacttgtctttctatagataaaaaaaaattcttgaagaaaacttctagcgtgaaaaatgaatgcatgtaataagtaatgtgtctttgaagttaaagtttaaaactaaccattttgcttatgatgtgtttggttgagaagatgaaaatagagaaaatgaaaatgaaataaaaatacttaaattagagtaaagtatagaaggtaccagatccacttaaatctacactantttttcttta

SEQ ID NO: 141251 - DNA, 398 bp, Glycine max
taagtcacctgccgcatgcaacttaaccttggccatattgtgctcttattgctattggagggcattctcggcgtcgagaagtgcgtggctactagtgggacttctaaaattcaggtttgggtggacttctttctctcttaaatttcgcgggtatggggttttgggacatatgatgggtggttatgttagttttctgctgcgtgatgattatttgtgaaggcatttgctgaatacttgttgacattgcatgtctggatgacttatacatccccattctgttatagggtttctgagatgatggtcgcgatgtttatatgctgaactcgctgatgcgaaactgtttcatttgaaaggtagaacttacctacggctcgaaagcgagaatgtgatgttattac

SEQ ID NO: 141252 - DNA, 449 bp, Glycine max
tgtcacttttttgagtcactcaagacagccctaagtttactttatttggtgtctttatagaacttgtcttttcttaatacacttaagcaaactcataaataggcattaattgaaaaggcttatgatttgtgtttataaggtttgtaataattaaagcatcaacggttttggactcaacaaatttcccatatcataagatgtataaacaattatcaaagagacattggagaacatccaccatacaacgatagagagcaaatatgaactaatcaaattgaatggtacacatactgaaataataatggactaaacaatatatatctaaacttcatataaccggttaaaattacctgctacaacatgtcaattttggtgattcatcgtgcactgaccatttcaaaacatatctaaaacttatgatggtgtgaacggtgtacattgttgaattc

SEQ ID NO: 141253 - DNA, 440 bp, Glycine max
  unsure (1)..(440): unsure at all n locations
acccaaatccaaatatctaatgacttacattgtataattctagtgcagatcctgtggcaacaacaaaacgagagtaattgaagtttgtttaacttttgaatggaagaatttggaaaaggaaggaagagtttttcataattgcttggagcaaagtttgcttaaagggaagaattgattgaaacctaagtgttgagcataataataaagctccaaaaagagctattctgaggtggaaattgtagttcagaaggagagggacaaaaatagccacctagggacaccaaaataggagatttgacaaatggaactggttcatgntcctcaaatcttctttttttttggcattcatgttcaataaccaattctttattttgaagtgccaaattcttagtgtacataatctacacacttcataactatacatgcctaatcaatcacac

SEQ ID NO: 141254 - DNA, 462 bp, Glycine max
  unsure (1)..(462): unsure at all n locations
gatcttaagcgactgcggctgcagcttatgagagaatcaagatgattcttgagttttgatgataacaaagatgatgacaaaaagcccaagagaatgagatcaagattgagtcaagaacacttcaagaatcaagagaaatttgatttcaagattcaagaatcaagtttcaagattcaagaatcaagaataatcaagttcaagattcaagaatcaagaaaagactcaatcaagataagtactaaaaagtttttttcaaaacattgagtagcacatgaatttttcacaaaaccttttaccaaagagtttttactctttggtaaggtaatcgattaccagtagcaaagattgttttcaaaaaagctttcaactgaatttacaacgttccaattgatttcaaaatggtgtaatcgattacaattanttggtaatcgactaccagtatgtttgaacgttaaaattcaa

SEQ ID NO: 141255 - DNA, 460 bp, Glycine max
cgccttaacacatttttgcttctgccaattattgatggtttctcttgtacttgcgtcttcccaattgattagtgacctccaaagatgagatgtcttgcttgagagcttgagaggtgttggtgctatagaatatttctgatatacaaaggttaatcgtttgccctaatgctttctcataagtgttaaaaatatctctcagataatcatcaacaaataaaaggtgtgagaggcttggaatccctctatacaccttgacaccatgaatctatccctcactttttgctctccttaagcgtgtggaaagcctctctttacaaataatgaacaaatagagtgatacttggtgaccttatctaagacctctcccatgaaaaatatctctcataggattcccatctattaggatagaatagtgaactgtatctaaacaaggtttcatccaactaattcatttctagtg

SEQ ID NO: 141256 - DNA, 403 bp, Glycine max
  unsure (1)..(403): unsure at all n locations
agcttagaatacctgctgcgcgatgcagttccttattctaacaacaactncatttccataaaatctgtattgtctttgaataaagaactcattgatatttggcattatcgtttgggtcatccttcatatgatatgatgcaagtgttgaaacaaacttatcctatgttgacttgtgataaaaccttcgtttgtgatacttgccataaagcaaaacagagaacacttccatttcccaatagtgactcctatgcttctagtcctttctctttgaacatgtagatatttggggtccttggaccacaactactttgaatggacataagtattttcttacaattatggatgatcatactcagattgtctggatttttataatgacttcaaaacttatactcaaactcat

SEQ ID NO: 141257 - DNA, 320 bp, Glycine max
gagcaagctcgctaagcccaactcctaaatcatactaactagagaagagattgtgctgagctagacaactcacttaggcatgaacagagcctaaactcaaaattctttaggctcagctagacagactcgcttagcccaggcttattcaacctacagaggctgtgtggcctagctagactaactcgtttatctaccaacagaaaacaaaaagcactttagactgtgactcatgcaacacaactcactaagcacggcatgccagctcagccagctcctacgacacttaaactgaacacgaaatttacatactctctaacccg

SEQ ID NO: 141258 - DNA, 341 bp, Glycine max
agcttgcctcatagatgtccaggagggactttgtattttaaggaactagttccgctccggagtatgatagtcaccgctttaggagtgctgtacaccagcatcgcttctaggccatcatgggatggtcgtttctccgggagcgtcgcgtccagctcagggacgacgagtatactgatttccaggaggaaataaggcgccggcggtgggcatcactggttactcccatggccaagtttgatccagaaatagtccttgagatttatgccaatgcttggccaacagaggagggcgtgcgtgacatgagatcctgtgttaggggtcaatggatcccgtttgatgcc

SEQ ID NO: 141259 - DNA, 447 bp, Glycine max
ctttcgattcattctatgtacccgtagtggtccacattgtgtttcgtgcatatttactctcgttatgtttacttcttataccccctcttgacgtgcttaagccgtattacttaagtcatttctcgcttaacttataaataaaataaatttccaccgaacgtttgaattgtattatccattaacttcggttaaaatcaattccgaccgttcggtcatgccgtaaccacgttggaaatcaaaaagaggttaacaaataatataataatcaaaaaatatctttttagtataataaagcggaaaatcaatcggacgttttctctttgggatttctcatccttaatcgaattgattaaaaactaaagagaaattaaggcttaaatcaactcgcctagtcaagctcttccacaaaaatatgcttttgaagtatggcatttcaatttctcacta

SEQ ID NO: 141260 - DNA, 357 bp, Glycine max
taagtgaccgcagcatgcactttatcgagctgaaaggctttttcatagatgccgcaggctgatgtcgggattcgaatgtaaatgtgttggagctattactgggcattgaatgctggtgttggtgttatcttcacgcttaaatgcagatgccagtgctggctccatgcttgatgcaggatgtcaacgttgatattgagctctgaatgtagatgtgatggcgttgtctttgagcttcaaatgcaggtattggagttgctctccaagatctaatgcaagttcaggtgcgggctctgggctttgtgtatgtgtcagtgaggggggttttgggcttaaacatactgcactaacggtccagac

SEQ ID NO: 141261 - DNA, 105 bp, Glycine max
actacatcgcgtcgtatattattattgaaatgagtgccactatgagctgacaagtctctacttgggccaagaaacatgtgtgaggtttcatgggacgtgtgaact

SEQ ID NO: 141262 - DNA, 305 bp, Glycine max
  unsure (1)..(305): unsure at all n locations
agctntgaggatggggacgctgttcttgatttgatcgacgtgggtctgataaaaggcataattggtcatcctactatgacgactgagaaaacttgggcanataaatacggtgaggatgaaggaaaaacccatgctgcgactgccattcctgaacggccaagtttcccaccaacccaacaatatcttttctcagccaataacaaactctttccttacccaccatccagttatccacaaaggccatccctaaatctaccacaaagtctgtctaccgcactttctatgactaacaccacctttagcac

SEQ ID NO: 141263 - DNA, 387 bp, Glycine max
  unsure (1)..(387): unsure at all n locations
cgcttggagtttccaagcgccaattggagagtgtattttgtttattctnatacnggcatcaattcattagtgggctttacttatgttgtccagcataattgagatgtatccatgctatgatgacagctttccaagttctgctatccaatgattttaggaaggccaccattcttgctttccagtatatatagttggttccatccagaatgggtggtctgattactggtcctacttatatctccatgttcatcagaatttatctacctagatctcactcactgatttagagtgcccgctctgataccaatttgaaatctctgatacttgaggccagatgtcgtaccggatgtaacgacatcacgcttataacatgcagattattgtgac

SEQ ID NO: 141264 - DNA, 440 bp, Glycine max
  unsure (1)..(440): unsure at all n locations
agctngtgtcacaattcattgtgacagtcattgtttcattcacttagcaaatcaccaaatgtaccatgagaggacaaaacacatagatgtgaaactatacttcatcagagatgtgattgaatctgagaaggtgaaggtggaaaaggtttcaacagaagaaaacccggctgatatgttcataaagtccatctctagtgtcaagttcaagcactgcttggacttgataaattttgaagatgcctaaagcagattggtagaattgcaaccctgaatcacaaggtaggcacttgctgatttagattcaaggtggagatttgtggtgtgtgactcaaaatcacaaatggcacaagtgagaagactttaaagtagtgttgtcataactggtttcagttattataactgaattggtttggtaccaaagcatagcttgagtgtacata

SEQ ID NO: 141265 - DNA, 436 bp, Glycine max
  unsure (1)..(436): unsure at all n locations
agcttgtggcagataatgctaggttgaattcttgttatgtcaaacggatgccaagcgaacaagtttgtgtttctatataggacataggcaaagcgtcggtgctcatggctggtgaggtccctattgagctgcgtacattgtccgggtttgggtccgagctgcaacttgacaacctcttcgatgggctttgggcctctatgataactgcaaaatttgagttaatttgatagtcaattttggctaagaatgattgtaatttctttactttattgttctttttagtgaaataataaagaaattaatatcttttcagttctttatcaacataagtcaaaagaagaagatntcaagtgctttggaggaaaattgatgcaaaaactggaagaaaaagccttgaagaaaagttgaagattgtgacagcttgcttagtgcacaa

SEQ ID NO: 141266 - DNA, 455 bp, Glycine max
tgaatgacatgcacaaagtgtgactatatgatgtgtctatgtgtgtgtagcacgcaaatgctcaccaccccccctaaaatttaattggattgggcttctccccatccaattaaatttatttcccaacacacacatcaaatattcacttaatgcatgtgaaattacaaaactacccctaatacaaaaactagtctaggtgtcctaaaatacaagggctgaaaaatcctatatttctatgataccctatctacattatggagccctaaacacacggacaatatatcatgaaatcctaatatgtcaaagataggtgggttcatacttagctcaatggcccgaaatctatcctaaggctcatgagaaccttaaggccatattttgcatattaggtcaaactacttgaatcatttaccaattcacatgcgaggttgattgcatattacgtctccttgaat

SEQ ID NO: 141267 - DNA, 453 bp, Glycine max
  unsure (1)..(453): unsure at all n locations
agctntaggattggtttccggaatgtctgctgcaggtactcactgatatttttgttgtgtttggtaaaattagcttataagctatctgaaaagctggaaagttataagctagaagctagttaaaggagcttataagcttcccgaatgccttaccaaacacaccgcactgttttaatttttaatagagtttaattttcatgtaccgagtgtaaatatttcgagcataaatcatgttagatgtgacttttaaaataatgactataaaactcgacaagtttactactatacatgactattttgtgtgtatagatgacagtgtaaaaatcttttagagaaaattaaattctttntaaaatgcaacatttgtttctttttaagtgattaanagcaattaatagtgtgtattaaatgttaagtgtccttagagcactccttgataagaacccaattttt

SEQ ID NO: 141268 - DNA, 465 bp, Glycine max
tagcctatcatattatggttataactaagcctaacaaacttttatttagttagttaaaacagaaaattgaacagagagcaactaggtagaacccagtgcgtacactgtcattcccccgtcaaactcatggtggattcagctaaaaggggatgctaattcaaagtttttctcaggatggcgttagggaaaagaaggaagaattcaattgagatggatctggaagatggagtctatataaggattctggggttattgcttttgaaatttccagaatttatatggagatttttcataagagggatcctctatgccatttttagaggggctggattgaaatcccattttgtcagaaaaggctacatcgttagaaagaccttcgtatgtctggttttctttttggataaagaataagattaagctcctggtccggatgtcatttcattaaccattttatatttcctgctt

SEQ ID NO: 141269 - DNA, 414 bp, Glycine max
agcttgtaatcgattacacacatactgtaatcttattctagaggagattttcaaaaaatattctcaacagtcacatcttttcatttggttcttgaatggccatcaaaggcttatatatatgtgacttgagacacgaatttgcgaagagtttttcacaacaacaagtgtttattctctcaaaaagcacaatcgttttatcctcttaagaattccttggccaattcaattgcaattcattaacgaatcatttgagtgctaagaattgaaaatctatctctttcaagagagatacattcttcttctctttctaattcactaaggaattaagagaccaagggtctcttgttgaaaagaattctaaaccaaaggaacgattgccttgtggtttaaacttgtaaaggaattacaaattgt

SEQ ID NO: 141270 - DNA, 461 bp, Glycine max
  unsure (1)..(461): unsure at all n locations
cgcatgtgaactaatggcatcatcagagacatctgatgtattctttgtcaacaatctcccncttgttgatgatgacaatccctgaaatcaagacaaactatatacaagatgatagcacgtctacacaacccttactccccctatcttttggcatgtatgcctaattttacttaatgaaaaatttctaattctaattgatttctaacccaagctctctcaagttctctccccctttggcaacatcaaaaagaactaagctattcaaacaaaatccaaacatagccaaacatgaaatcgaaataaatccacacattgttataaccaaccaaagcaaagtcctgaaatataataatagtgcaagagtacgataactagatcaacataaagcctaatacactgcgataaaacaaagtactaagaatacttaattactaataagactctcgcataataacaataac

SEQ ID NO: 141271 - DNA, 449 bp, Glycine max
  unsure (1)..(449): unsure at all n locations
agctttatctagccaagatcatacaaaagtgttttacagaacctaacggtttctaattatatgggccatcaaatctatcatgtgttgacagtaattgattagcccgtgaatttcctcaggggctgaacacacttcagcgatggcctttgctttggctagtagtcgcggggggtcttgacttccatttaaggtcaaggcgaacctatccatccacatggtcgcttcttgatgcagtgcatcaatcaccctccctcttgcttccttttcggcgtacgcttgtgcgaaatcctctactangctttgttcatgggtcaaagactggtttaactcttccttgtactgccctatgatggctagcatgcttcgctccgtggcttccaagtgttgagccaaactcctcttggatcttgagcaagcagctaattcctcctttaagatcatgccatgta

SEQ ID NO: 141272 - DNA, 441 bp, Glycine max
  unsure (1)..(441): unsure at all n locations
cctttaaactaagcttgtatcgatacacatatactgtaatcgagtaccacattatattttcaganaatattctcaacagtcacatctttttatgtggttcttgaatggctatcaaaggcctatatatatgtgtgacttgcgacacgaatttgctaagagttttaaagtaacaaaaggtcttatcctcttaacaagaaaaattgttttatcctcttacaaattccttggccaaaacacttgtgattcaataaggaattatttgagtgctcaaattgttcaatttatctctttcaagagagatttcttcttttcttcttcttcattctgaaaagggattaagagaccaagggtctcttgttgtgaaagaattctaaacacaaaggaaggatcgtccttgtgtgtttagaacttgtaaaagggaattacaagatagtggaactc

SEQ ID NO: 141273 - DNA, 443 bp, Glycine max
agcttggcaagccaatctaaatctcgtgttttatctttcagccattcatgataacctccaatgatgccattacgaatgcccctaagttctttatctttccttaacgggcttccccatgccttatggaccctttgtataaccttgaaattttgaacgccaaaatctctcacaaggaaaggagacaggctttcttccgttggtgctcccctcatggggtaccctaactgtcttatagcaagcgcgggattgtagttaatgcaacccctcgtacctatcaacgggatgtttgggtagcttccacatgagaagagaacaccctcctttccttctttccatcatggaaaccaattgactattccgcctcttatcgcagccaagtgttggtcccaatctactcttcttttctcgacacatgagcgatggcttcggagcggacatggatg

SEQ ID NO: 141274 - DNA, 444 bp, Glycine max
  unsure (1)..(444): unsure at all n locations
tcctcggtgccattcctgcgaaggcagacatttggtatgttagtttcagtgggacattactcttaaagcaaaaatggcatgtaacctcctcccatanatacaaacatcaatgtaaatttagagcaagcttatgcgcatatttccttacaaacgttctcttgcacaagacatttaaccgaaaaaatgcacccatatacaatcaaggcagcttcgttacctagattatttacacgtacctccaaggtgtatttgttacttacatcacacacatctctttggctaaatttacatacatgcatactcaaagcattttggggcaccaaatattgcacatgtgcacatcttggtgtttctaatacctatacatacgcaaacttcatgatgaatcttgactatccacacaataaggtgctacatttcatgctctctctttttattcaagtt

SEQ ID NO: 141275 - DNA, 409 bp, Glycine max
agctgggagaggatgcggcgagggagataattaacgagggagagaaagagagaggggggagcaccaaattgaatgaataaaatagcgagagaagtggaactttgaagtatgtctcacaagactctcattcatcaaagtcacaacaagtgttacacatgcttctatttatagaccaggtagcttccttgagaagcttcgttgagataacttccttgagaagctagagcttagctacacacacccctctcataactaagctcacctccttgagatgagaagctagaacttagctacaccccccctataatagctaagctcacccccttgacaaaataacatgaaaataccataaatagtccttactacaaagactactcacaatgcctcgaaatacacggctgaaacccta

SEQ ID NO: 141276 - DNA, 446 bp, Glycine max
agctttctagcctttcataggagtatgaagatctcttttttgtgctctaaatggagggagtgtgctcaaatatatggggcaattatgatatgttttcttgcttgattaagttgaattgggggtttgtatgagatggccctacgcctataatgcattttgaagtaatgggacatgccacattgtccccgttctcttgctattaatgcctaaacgcgcgcccaccaagtgttcggtgaaatgcctcaatggcattagcgcgtgattcttgtaaggaaacaacccatggggcaatttggcttgcacatatttttgggacatgcattcattttcgaaagagctagagtaattgccccgcatatgtcctatgcctaagaaccatagtctctatgcaaaagtacacaaaaagaggtgcatattgtgtaaagttacccttctttgggccatca

SEQ ID NO: 141277 - DNA, 453 bp, Glycine max
ctttaactatctatcggatcattggtcgagacatgtgtgtatatatctatattctgtgaaataatcatatatgttcatagagtcaataatcctcttccttgtgtccctgaaaaaggttggagattttagggacacaaggaataatgatcatacatgtccaacctccttgtgtaatctttttatgttacttcaagttgttgtgccaatatttatatgtttcttgtaaatattatattactcgaaggaggttggagatttcatgtgttgtgtgtaatgtcatgggtggacatactcggtttgatgatgcccacagaattattgatctttttccttcttttggaatctggctatgtaaaatatgatagttattctctctgagttaatcttgattatcgtgtaaagaaagtacgtcaaaagaatgtccaaatatcgtgttctagcattattccttct

SEQ ID NO: 141278 - DNA, 452 bp, Glycine max
agcttgtgagatgtctctcaatcaagttcttgtgtattgaaagaaagcataatggtgagaaaaaaataccgagattatgttgaaagtgtgcatagaagaggtgaatgctggaaacaaacctcacaaccacttcactaagcttggttgggaaaatattgcagaaaagttcaataaggcaacaaatttgagatatgaatataaacaatttagaaataggtgggattctttgaaaaaggaatgaaaattatgggttaagcttatcgggaaagacacaggtcttggctggaattggaagaagaaaaccattgttgctagtgatgaatggtggaaagccaaaattcaggtatgtattattcaacgaaaatagagtttttgtggaggccagtcttttgttcttttattttttatgtgtgattctatttcaaagaaagaaggattaatagtttatcttg

SEQ ID NO: 141279 - DNA, 469 bp, Glycine max
  unsure (1)..(469): unsure at all n locations
actcaagctcttatctagccaagatcatacaaaagtgttgcgacagatccttttctttctaactatatgggccatcaaatctatcatgtattgacagtaattgattagcccgcgaatttcctctggggctgtacacacttcagcgatggcctttgctttggctagtagtcgcgggaggtcttgacttacatttaaggtcaaggtgaacctatccatccacatggtcgcttcttgatgcaatgcatcaatcaccctccctcttgcttccttcttggcgtacgcttgtgcaaagtcctctactagttattgttcatgggtcaaagactggtataactcttctttgtactgccctattatagctagcatgctttgctcatggcttctaagtgttgggccaaactcctcttggatcttgagcangcagcttaactctcctttaagaacatgccatgtactcgtgactggtctc

SEQ ID NO: 141280 - DNA, 446 bp, Glycine max
  unsure (1)..(446): unsure at all n locations
agctntataagtgtgggtctgggagacaaaggtcttgtggtcgcgatatacgaagatgatgttccgagtacattagatntggtacgaccatgccctcctgatttccagctgggaaattggcgagtggaggaacgccccggcatttacgcaacgagcataatgtaaacctttacggttttaaaagctctatagttgggcctaggctttagagtttttccttttgttaaggctttgtgtcttttgtttttgaatttataatacaaggatctttcttcatctgttcctacgtctctacccattctcattcatttgcatgtttacttctttttctgaaatggcagatccgatgacgagtcccccgaaggtactaatacctgggacccgcctatcgacttcgagcaagaaatgaatcaaacggaagatgaaggaaacgaggatgtgggact

SEQ ID NO: 141281 - DNA, 451 bp, Glycine max
  unsure (1)..(451): unsure at all n locations
aagaacactntaatcgattgaaatgagaatctaattgattacttcttcaagataatcaattacattggcaatttaatcgattataggtggttataaccgttttatctataaatagacaccttgtgttcctaacttcaatgaatgtcatagaatgagcttttacgactcatattctagtcttcgtttttgaacctttcaaaggttaaagtgagttgttaacatcttgtgagataaagaagagatccattcaatcaagttttggttcttgcatttgaataacaagtgttgcaacctacccttctgcgggagggcaacgcgagactcgcgggtgcgttcttcaagaaaggaatacgcgcggagtctgcaccaacgtttatttgatgaaaacgtctatataacccacaaagacgtgatcttagaactttaagtgaaagggttgagagttgattta

SEQ ID NO: 141282 - DNA, 442 bp, Glycine max
agctttaacctcatcgtctctcacagtctttatattgtgagccaatccaatccttgtgttcggactctcagccacttatgatagccgccgatgatcccattactgcttctcctaagctctctgtcctttcttcacgccgcatcccttgccttgcgaactccttggagtaccctcgcgttgtggtcactgaaaccccatgcgatgaaaggcgtgatgctttcgtttgatggcacttctctcatggggtagccaagctgtcttatggcgaggacgggattataattaatacaaccccttgttcccatcaagagaacatttggacatccttcgcatgaagatagaatcctgattcttcctttcttctagcgagggaaccaattaacagacgcccctccatgctagccaagagttggtcccaattcgcctttcctatttcgacgcc

SEQ ID NO: 141283 - DNA, 413 bp, Glycine max
ctttatctagccaagatcatacaatagtgtgacgacaacattattctatcggtttctaattatatgggccatcatatctatcatgtgttgacagtaattgattagcccgtgaatattctcaggggctgaacacacttcagcgatggcttttactatggctagtaatcactggaggtcttcacttccatttaaggtcaatgcgaacctatccatccacatagtcgattcttgatgcaatgcatcaatcaccctccttcttgctttcttttcggagtacacttgggcaaaatcttctactagctgatgttcatgggtcatagactggtataactcttacttgtactgccctatgatggctaacatgctttgcttcgtggctatcaagtgttgagccatactcctcttacatcttg

SEQ ID NO: 141284 - DNA, 456 bp, Glycine max
agcttcatgatgaatcaagattgattcaatgttgttatgatgataacaaagatgatgacaaaaagctcaaaggtcaatcaaagaatgagttcaagatgttcaagatagaatcaagaacacttcaagattcaagaggaaagttgaagaacactttaagattcaagaggaaagttgatttcaagaatcaagaatcaagattcaaggatcaagcttccaagaatcaagatcaagattcaagactcaagattcaagaatcaagagaagacttaatcaagataagtatgaaaaggttttttcaaaaactgagtagcacatggatttttctcaaaacatgtttaccaaagagtttttactctctggtaatcaattaccagattattgtaatcgattaccagtagcaaaatggatttgaaaaagttttcaaatgaatttacaacgttccaattgatttcaaag

SEQ ID NO: 141285 - DNA, 445 bp, Glycine max
cctatggaggctggatctttgagctacaatgaggtgctttattggtgattttacaccatgaagatgcaatggaagatacaggagaagaggtgagaggaggcgccatccactatggaataagccatggaagaaggagcttcgtcaccaagaatgtgccttggataagaagcttggagaggatgcttcaatggaggaaaagaaagagagaggggggagcacgaaattgaaggaggaaaagggggagagaagttgaactttgagtggtgtctcataagactctcattcatcaaagttacagcaagtgttacacatgcttctatttatagactaggtagcttccttgagaaactttcttgagaaaacattcttgagaagcttctttgagaaaacttccttgagaagctagagcttagctacacacactcctctaataactaagctcacc

SEQ ID NO: 141286 - DNA, 435 bp, Glycine max
agcttctcaaagaagccacgaggaagcttcttatgaagcctcttaatgaagcttctagagaaagctagatgcagctgcctcggtaaaaatgctgcccagccttctttaaccgttgaatcttctcgaaatttggtttgcaacttcacaagacacttgtccatgatatgaccgttgggatctgtgagaagatgtctggagtgtgctagaagcttccgttcccgagagcatctcttatttaagcatttcagcctttgctttcgtgtagcttaggaaaaacgtcatttcttcttctttctttcttccaaagccatttctaaagttccaagaactttctccatcacccacatccaccattagccaccacaaactatcattgttctccattgaaaacccacaccgagaggaacccttcaaccgaagcggaatcttccaact

SEQ ID NO: 141287 - DNA, 442 bp, Glycine max
  unsure (1)..(442): unsure at all n locations
ntaatgcacanattctaaataattatatgaacactttgttcagtttcaattatgatattaatttctttaaattatatataaaaacctaaacagcaagaaaaagagaaaatacaaaatcaatatctctctctaaatttttccttactttatttcatcaattcatattaattagaaaaagtactcgatttatagggttcacgctcaacataatagcatatcaattttacaaagattggtttgtcaaacatatataattcactgtaataattataaggataaaatgaaaattgcaaaaacaccccaaaacccattccaattgatatctctaaggatccctacacatgttctcactaattcccaattgtgaataactcatcccttacctctgagcggactcacgtgtcttcagccagcgatagcagcatctttagcgggtccctaa

SEQ ID NO: 141288 - DNA, 444 bp, Glycine max
  unsure (1)..(444): unsure at all n locations
agctcgnccttaaatgcagttaagatcttcttttatctacattctctgctncaactcctaaacaatccaaaatttttggcttctggttttatgtcaatacatcaaaatcttatgtttcacttgtgtcatcatgtaatgcttcctctactactgattcgatcaaacacaaaaaaatacactaaaaaatgaaacctaatatcatcaacaacataaaccaaaatttctattattagtatcaccaatatttttggctgctggttttgtgcccattccccacatttgatcttcgatgatccaatctacaaatctccccctcgtcccccataaaattgatataaagatagaaaattaaagaaaattccgaaaccagttcataaagaaaaaagcgctaaacttaaaattcaattgacaaatctaatatgaagaaaaatgagcataatctgt

SEQ ID NO: 141289 - DNA, 253 bp, Glycine max
ccacagagggacacctggagatatgtcgcgggggacaagatacctagccgacgacaggtggggtgctattgcccaaatccaagcttgaccaatcccgacccaacccgggcataggaagtcagtgagaacctgtgatgtacctgagaaggcgagctctcggcaggcaaccgattgatgaacagagaccacaaagcaacgaggtttatgcggtggctggccagctgtgaaacatgagtgatatatgggatgtggc

SEQ ID NO: 141290 - DNA, 453 bp, Glycine max
agcttaaaggttgactagatgcctcggttatctgttaactcaactggccatgaatcaaatatctgcacctgtcgccagactctgtggattatgctcctctgtcgaccaccacacgaacctttgccctactgtgcaacaatctgaagcaatgcaacagactaaagcttatgctgcagacatcaacaacagacctcctcaacctcagcagcataatcagccacaccagaacacttttgacctctcctgcgacaggcaccatcccgcggggaggaatcatcccaaccttagagggccgaatccttcacaacagaaacagcaacaacgacaaccttattatcaaaatgtcgatggcccaagaagaccatacattcctccaccgatgcagcagcaacaacagcaatagccgcagaaacagcaaacagtggaggctactacgtaaccttacctttgaag

SEQ ID NO: 141291 - DNA, 395 bp, Glycine max
tgccacccagctcgaccaggcgagcaatgttgctttctctataagcgacagcctattggagaaatcttatggacggcccaagtgtgcctggctgctatctgcacctctctttttactaactacacccccggcctttttttggtgaatcttttctcgtaaagcatcagaaacttacgaatttcctaacgatacttgttctctttacgcaatgctaccgaaccttgcggattacatagtcatccactttatgacttacggaatgtcatggaacctaactaattgtgcaacgatgctgccatttgacttgcggtgtgtcacgataccttactgattgagcatcaatattatctttagatgatcggcgtgtgccagaatttcacaaattgactaatgat

SEQ ID NO: 141292 - DNA, 451 bp, Glycine max
agcttgtaggattatggggtacccatcacatgtggtactaggtggtggtcgggcgatagtgcacaacaagttttccacatccagaaagcgcgcataaacccaccatcccctgttgcccacctccaactgagctcacgtactcccacgtagcccatatcctcgtttctctcaacaccgggtccccatcaatcctcccaagcttccacaacatccaagcaaaacaacattcaaacagcacaagctatcacagccaagcaaaacaaagcataggcagataactctgccaaaacaccaaccaaatcacagcttttctcacttaaagaccccagtaacaattccttcgatccaatttgttaaccgttggatggactccaaaattttactggaagtctatagtacataagcctacattgtgaccgttgggatctactagcaaacatccagaactcat

SEQ ID NO: 141293 - DNA, 381 bp, Glycine max
ctccggagtatgacagtcaccgctttaagagcgctgtacaccagcagcgcttcgaggccatcaagggatggtcatttctccgggagcgacgcgtctagcttagggacgacaagtatactgatttccaggaggaaatagggcgccggcggtgggcatcactggttactcccatggccaaatttgatccagaaatagtccttgagttttatgccaatgcttggccaacagaggagggcgtgcgtgacatgagatcctgggtaaggggtcagtggatcccgtttgatgccgacgctatcggtcaactcctaagaaatccgttggtgtcggaagacggccatgaatgtgagtatggccataggatgaaccggtctgatgggttct

SEQ ID NO: 141294 - DNA, 419 bp, Glycine max
acaccaacaaagaaactcaagattctaaccaaagaactctaacccatcataaagcataaaaaggtaagctttccttaattaccaagaagcatctcctagctaggatttgataataagaaaggaagaacttgagctcaaccaaggattttcttcaatctgcaacaccaccacatcccattcttgaaatacaacaaaccacattgtgtacacctttaaagccctttctctgcaccttcaaatgtgattcattacaaaccatattataaaactcaactattatcaaagtgtttagctttactatgattacctaatctagaacataaaacattcatttatttatgaatacttatgacttctatgattaaaatattatatgttttcttatatacaatgggtgcgttattcataaaaaattaaat

SEQ ID NO: 141295 - DNA, 443 bp, Glycine max
  unsure (1)..(443): unsure at all n locations
agcttagtgaaacactaaatatacacctctcttctaatggaaattcaaacatcaatttgccacataatgtaatagggtggtaaaacaggttgaattcatcaaaccaacccacataatccaccaaaaaatggcagagcatattacatgattaaattcatcatcccaccttgtttaagttgtcaacttaaggagttggaggctaaagaactaacttgctcagtgttatcaagactataccgatcatgattcggtcagggcaccaggttgatgggtcagtggttgaactgaacgtgggtcactagccgaactggtatatattaaatatttaaattttatactaaatatatcatatataaattacttttttcgtatctatagcantaaaattttgttgtaccaagagcggttggcacaattggtagcggcttatgtccctaaaccaa

SEQ ID NO: 141296 - DNA, 379 bp, Glycine max
  unsure (1)..(379): unsure at all n locations
accaatcccgactcaacccgggcatagactgttagngtgatcctgnganggacctaaacaggcgagctcctggcagtcaacagatacacgcgccccagaccacaaagcaaggaggcttgtggtggctggccagttgtgaaacttgattgatatgtgagatatggtctctggtaatcgattaccaagggtgggtaatcgattacaaggcttaaaattgaagacaagaggctaagatggtctctggtaatcgattaccacggggtgtaatcgattaccaggcttgaaaacgaagtcaggaagctaaggaagcctcttgtaatcgattaccaaggggtgtaattgaataccatgccttaaaaagggaactgggagatggtat

SEQ ID NO: 141297 - DNA, 373 bp, Glycine max
  unsure (1)..(373): unsure at all n locations
agctngatgtgagaaagcgtggaatagtctttcttcctacttctattnggtgaccacagagtggtacctggagatattttgcggcggtcaggagacactgtggacgtcaggtggggtgctattgcccaaaaccaagcttggctaatcccaacccaacccgggcatagtcagcctatgagaacctgtgacgtacctaaacaggcgagcttctggcagtcaaccaataaaagatcaaaagtccaccaagcaaggaggcttgtgtggcggctggccacctatttatcttgcgtgttatatgaaaataaccctctggtaatcgattaccattccggtggaatcgattacagggtctacaaattgagacacgatgtta

SEQ ID NO: 141298 - DNA, 460 bp, Glycine max
  unsure (1)..(460): unsure at all n locations
taagcacctgagctgcaagctgctgactacatatgcctcttgctctagcatattcttctngagatcatcaaaatcttcatgatttacaaaatttatagtaatcatctaacaacaagatataatatcggcgccctaaagaactcaaaactggtgatgtccaaagatcaatgtgaacaatatcaaatggcttaagagtatgagaatgtgacaaaacaaaaggtaacataatatgttttccaagagaacatgaatgacaaatacgagaatctctaatttgaatacattcaataaatttattcttcctaagagaatgcaagatagatactcccgggtgtcccaaccgctcatgccaaagagaacgagctaaggcagcaaaattagaggaagaagtggctggagtggtggactccgtgataggaaatagtacaccccgactctcacacctcaatataggcatccc

SEQ ID NO: 141299 - DNA, 403 bp, Glycine max
  unsure (1)..(403): unsure at all n locations
actctntcccatgtatggacactggctgtccatgattgtttagatcatatatcatatatgcatgtgcatatgttagtgtggtagtgatagcacagcccttctggcactagtaccctcggccttatcatacaaaaaaagttcggactgcacaaaaggcactttgtcctgacactcttatattcgctacttatctttctatctataattatataagcttaaatgtatttttatctaagttaaccatttatcatttttgttcgtcactaagtttaattttcttattttaattgctataaatacattgtttgtgatatggtgactgagaattgtctttatcaacttggattaaattgctcacttctcgaagaggttgatcttactgattgttttgtatcgatgacat

SEQ ID NO: 141300 - DNA, 446 bp, Glycine max
  unsure (1)..(446): unsure at all n locations
agctttggaccaaacacaagagcaagaaaggttttgttntgtgaagtctaagcattataattcctggagttgttgttactcttatacctatttgaggtgtttgaggccttgtcttggaagacgccttattggatttcatcctctattctttacccgatcactatgaaagctttgaagttaggtaggtattgggcatacatatgttattgaagctctggcaagaggtttttcactagataagggactgcccacctcagaatttggccacgagtttacgactttggatcataagggactcccatcttttattaaagcaatggtctacgactccgctgcttgcttatgataagataagagagctcctttgttatttttgttctagcattaagagaaggatcacaagccctagtcccaagctaaacaacatatttattcatctgcaccaa

SEQ ID NO: 141301 - DNA, 443 bp, Glycine max
  unsure (1)..(443): unsure at all n locations
ccagctctttcaactacacanggctcttaatatttgaagagtatcattgtggaaccttcacccgacgaaaacactgacaaaaacttatcttctccttcttggacaaagtatggcagactgggggcaagtaaattttcttcccatcagaccttggatgcaactgtgatcgtatacccatatcagctagatcttgatgggtattcaagccatccttcgtcttgccttgaatgttaaggagcgtcccaatcacactgtcacaaacatttttctccacatgcataacatcaatacaatgtctaacgtcaagatcacaccagtacgaaagatcaaagaaaatggacctcttcttccatatgcaactctgacttttatccttcttttgggtcttcccaaatacaatattcatgtgttgaacccgctgatatacctgctcaccattcaac

SEQ ID NO: 141302 - DNA, 484 bp, Glycine max
  unsure (1)..(484): unsure at all n locations
cgcatccttaagtcacctgcggctgcagcttccataaatggtttcctttgctcnttggaagatgaatggcagtggaatggagaaggaagagaaagaagagacgccacttcaaggagaagatgagtctagaagaagctcaccaccatagcaggccatggataagagcttggaggaagaagaaaatgaatgaagggagagggagagaagagcacgaaattttgtgctctaagagagctctgaaatctgaagtttaatattcaaaagatcaaagttgaaaaaaatgcacacacatgacctctatttatagcctaagtgtgagacaaaattaaaggaaaatttgaatttcaattgaaatttcacttgaatttgaaactgaatttgtggagccaaactttggagccaaaatttcactaattatgattagtgaatcttagttatggttcagcccactaatccaagatcaattccaagattctccactaag

SEQ ID NO: 141303 - DNA, 414 bp, Glycine max
  unsure (1)..(414): unsure at all n locations
nggtcgcacaggaatggcagtcacagcatgggtttctcccttatccttaccctctatatttgccccagttgtctcagtcgtcctagtaagatgatcaaatttgcctcttttcggacccacattgatcctttcactggcgaagaccaaatctgcaaagctttgagggtgcgcagcccaccatcttttcatcgtagagtaccgataatgtgtctaccatcacgattatcgtctccctctccattattggaggtaccacctgtgccgccagatccctacaccttttgggcgtgttctttgaaagatccgtccccctttatgcacatgttctgtagttgcatcctattcagaaccatatcaaaattgtactgatactgcctaacacaggcaaccattatgtccttccaagaatggact

SEQ ID NO: 141304 - DNA, 469 bp, Glycine max
ttaagtcacgcagctgcaagctcatggagggatagagagagggagagtatatgatatgcgggagcacacaattgaaggaataaaatagggagagaagcggaactttgacatatgtctcacaagactctcattcatcaaagttacaacaagtgttacacatgcttctatatatagactatgtagcttccttgagaagctttcttgagaaaacttccttgagaagcttctttgagaaaacttccttgagaagctagagtttatctacacacacccctctaataactaagctcacctccttgagaagcctccttgagaagatacctaaagaagctagagcttatctacacacaccctctattatagctaagctcacccccatgcaaaaatacatgaaaatataaaaagaaaggtcctaatacaaagactactcaaaacgccctggaatacaaggctataaccctatactact

SEQ ID NO: 141305 - DNA, 397 bp, Glycine max
  unsure (1)..(397): unsure at all n locations
tctaatctntatacaagaatgaatctctgataccactagttttcttttggcctcatatatcttaagaacgcggggttgaattaagatattccaacctattctccctaatcaaaaatctattcacttttaacacagatatgaactccctcaacgacgatcttcttaatattacatcacatgagactaattcgaatctgactataacgcactaatatataaatgagattaacggatgagaaaatgcatacccaatacatactggatcggccacacccttctgcctacgcccaatcaccatgcaacccgcttaacagttccactatcttcggaattctctttccacttctaaacccacaaagacaatccttcctttgcgtcataattcctgtacacaaga

SEQ ID NO: 141306 - DNA, 268 bp, Glycine max
  unsure (1)..(268): unsure at all n locations
agcttggaaattgcttcgtgcgggcggctagctaagttctttcatanccctccaccacctctacagacattaagtatctatcgataccatcctcctcatctctctgactcattctacctcaaaatatcgatgaccatttctttctcatactccgacgaccaggagattaaccggtctggaccggacccacctaccgaatgattatccaaccgacaagctctggattgtgaactgcatcgatgcgaagatcactgactacgtgtccgat

SEQ ID NO: 141307 - DNA, 434 bp, Glycine max
  unsure (1)..(434): unsure at all n locations
agctntgagccaaaatcctgactcaccatattccttgacccagggtgagaatgtcaatccttaccctcggaagcaaaaaagaatagaagggaaatttccaatcaaagaaaagagaaggaaaatttccaatgaaagaggaaaaaagaaaagaaaggaaattcccaatcaaagagtgggagaaagaaaaagaaaagaaagaaaattcccaaccaaagaatgggagaaagtaaaaagggaaggaagctcctggtcaaagaaaccagagaggtctttggaccagataatatctgaacagtacagaattgtcaccaaatgaacaaaaaggaaggaaaggaaaccacgacctaaaatggtcttctccctttaattaccaaccaaaatcccgtgcgctagcgacccttttttctcgccccgcactaataaaaaaaaaacag

SEQ ID NO: 141308 - DNA, 419 bp, Glycine max
  unsure (1)..(419): unsure at all n locations
tgagatgangaagtgtcgaagggtgaaacttcctgcttttattgttgaccacagagtggcacctgtagatatgtctctggggtcaggagacctaggtgacgtcacgtggngtgctattgcccaataccatgcttgaccaatcccgacccaacccgggcatagtcggtcagtgagaacctgtgatgtacctaagcaggcgagctcctggcagtcaacatattaaaggaaaacaagaccactaagcaaggaggcttgtggtggctggccagctgtgaaacttgattgatatgtggattgtggcctctggtaatcgattaccaagggtgagttatcgattacaaggcttaaaattgacgacaggaggcctagatggtctctggtaatacgataccaaggggtgttatctataccatgcttga

SEQ ID NO: 141309 - DNA, 367 bp, Glycine max
ttaagcactgcagctgcacttgagggcgagccaccattttttttttagttgatatgtgctacctacgatcatctctccctttccatcttgggggacccctggccgccaatcctccactttggcgtgctttgaagaccatcccttttgcaaatgtctgtattgcatcttcctgacctatcaaattgtctgatctgcctaacaagcaccatatgccttcagatggactcaaagattccaagtgtgtccaggtaacactacccataaacttttggacgaagatagcattctctctttgcgattcccatctttgcaacattttaatggtctagacagtatccccttgactgtaagtcacacctgactggag

SEQ ID NO: 141310 - DNA, 148 bp, Glycine max
caatctaatatattacccccagacataaattaatatatcaccttttgaatcattaaattgatctttaagtgttatataataacataaatttagatattgttataagataaacactcttggtgtgacccgagttaatactaagcagtat

SEQ ID NO: 141311 - DNA, 396 bp, Glycine max
agcttcatatcattttgtgaggtaggctactttgttattatgtcctgatttctcatgttttattttataatatgaacttgaagctattccaatgaaaaatctatctgttctagaaaaaaaatctgaaactatatataactgtttatatattatattaacgtatccaagatgtatcgtatctctaattttaaaaatttatcatatctccgtatttgtgtcgtatcgtatccgtattgtatctcgtatctaggcttcatatttgaactgtctttgtattatctgtccgtacctcacacaacttttgttgggtctgtttatatgcataataatattatatttgctttttcttataaaaaagagcacctatcagggaaagttcattgtttaatgaaacta

SEQ ID NO: 141312 - DNA, 440 bp, Glycine max
  unsure (1)..(440): unsure at all n locations
ggccaatctcctctggacactccaccataaccagttgattaattatgccaaatatgagctttattttagcttaggaaaatctagcctgacaatagtagaataataccatacaaaaacacaaactaacaaaatataattaaaccctttctccattgtctgatctaagcatttcaccttgtgcaacaaaggtgctacaaggtactaaaatcagacaacagataagcataccttgatccttgtcacatttgcttaaacatatcaaaatgttgatgccattctttntctgacatcaagatttcagcccttggagttgttctcccacttgcttttaatttctcattaacaagtaacgtggagaattcacaccaaaaagctttcactttaatgcagaaggaaaaccaatcaactctcaagcatcacatgaaaaaaaaaaatcaatc

SEQ ID NO: 141313 - DNA, 452 bp, Glycine max
  unsure (1)..(452): unsure at all n locations
agcttctatggaggctgaatctttgagcttttatttgtccttcaatggtgattttcaaccatggagttgtagcgaaagataaaggagaagaagtgagaggaggtgccatccactagagaataagccacggaaggagaagtttcaccaccaagagagtgtcttggataataagcttagagagaaagcttcaatggaggaagagaatgagagagagaaagggggggtgtgggagttgaaggagattaaggagagaagttgaactttgaagtgagtctcacaagtttctcacaaattttccttcttaacaatcttcttggaggaatccttttcctctttttccttccccttggcctttgaagacaaggccttactatccttctttntcttttgtttttttagttcttcttcctcatccctcttattttcatagntagttgatctttgaccacctc

SEQ ID NO: 141314 - DNA, 447 bp, Glycine max
cttattcagataagaaattaaagatattcaagacggattatcattacagtctatagagtcttagaaagggtatattaaataggaagggaattccaattgaagtagcaaaaagtctggccaagaattattaagttaaaatgtctttttcaacaaatttactctctggtaatagattaccagtggccaaaactaatttacaacagctattaaaatttgaattcaaaatttgcactgtgtaatcgattacacatatacggtaatcgattaccagcagtttctgaacgttttaattcaaaatttagagattgtaatcaattacatatatactgtaatcgataccagagcagattttttgaaatattctcaaaggcacatcttttgggtggttctgatgacttcaaggccttattatgtgactgaacatgatttgcaaagatttctaacaaa

SEQ ID NO: 141315 - DNA, 442 bp, Glycine max
  unsure (1)..(442): unsure at all n locations
agcttgtaggattatggagtacccatcacatttggtactaggcggcggtcgggcgatggtgcacaacaagctttccacatccacaatgcgcgcataaacccaccatcccctgttgcccacctccaactgagctcacgtactcccacgtagcccatatcctcgtttctctcaacaccgggtccccatcaatcctctcaagcttccacaacatccaagcaaaacaacattcaaacagcacaagctatcacagccaagcaaaacagagcaaaggcagaaaactctgctcaacacatcaaccaaaatcacagcttttctcacgtaaagaccacagtaacaattccttcgatccaattcgttaaccgatggatcgactccaaaantttactggaagtctatagtgtataagcctgcattctgaccgctgggatatactagcaaacat

SEQ ID NO: 141316 - DNA, 245 bp, Glycine max
  unsure (1)..(245): unsure at all n locations
gctttttttttantccacagccataaattgcggacatatactatataactcgctctgggttggatattaagcactggttcattgtgctgctttgaaatataaacatctcaaatctaatgagctatatttaagtacttgatccttctcatctcacatctttatattttttctgaactcaaatgatcttaatttagaataactcattatagattgaaatatcattttaccatctttacttgctataa

SEQ ID NO: 141317 - DNA, 442 bp, Glycine max
ttaagcacctgggctgcagctcgaaatctgtataggtctttacattcttcaaggcgtggattgacaggctaacaatatttgtcaatcaagatgcgttttctcaatgccaaacaaaccatactatgtttgttaagcattctctggatggaaagatagctttgtttattgttgatgtagatgatatcataattctaggagacgattatgatcaaataaatcatctgaagaatcttctatccgaggaatttgaagtcatggatctaggccagctcaagtattttctatggatggaaattgctcggataaagaatggtatttttgattctcaaagagagtacactctatatttacttcaagaaacggagatgcttggatgcacacagtccatgctaccatataaccagtcaataggagtgaataggagagtgtaccatctgacaaa

SEQ ID NO: 141318 - DNA, 450 bp, Glycine max
  unsure (1)..(450): unsure at all n locations
acacttatatactcagctgctttacatcccccttgtgagatgttttctttgtattcagaaacacacacacacacacactngttcctattcgatcactcacataaatttccattctccccctttgttgttgaatttatgcttcacttgaaattaagttaattattcatgtgagttcttgatttaatccctatttctctccccctttggcatcaacaaaaagccaaagtgcgtaacaagtatgaaacatacaaatacaactaatcattcacacaacaatcatggaaaaagttaaactaaacatgaagcacgaaacatgactagatcaaatatatagaaaaatcacatcgtcatataacataattcataatcgttcaaacataccatgcaatataaagagatgctaaattgtntcaatggcataataatacagatttattggataagtcactg

SEQ ID NO: 141319 - DNA, 456 bp, Glycine max
aagacacctgccgcatgcaagctaagctataagctaagacatataattgttgtttgtttattccaacatgtctgcttgcgtaagagccctttggactagaacgacagcattgcatagcaccacttatcttggggagttgctacgtgcacccagcattattgctggggcacccagcaaacagtgaagtggcgaaactgcccttcaacaattattcttccggaaactttccggagaaattatttccggaacttttccggaagaaccttcttccggatgaataatttgtgtcttgcggaagtactcacagacaacttccggaagaacgtcctccggaatgttcccggaagaagcttcttccggaagctagtttatttcttaacagatatcttattttgcaaaatttacttttaattgcataaactaatttatcaaataatcaatactatcatgcataaa

SEQ ID NO: 141320 - DNA, 433 bp, Glycine max
ggagtcgtaaatatgaaacgagatattttcttatgaactaaataacaaaatatgatgaactaaataatagtaaatagtcctaaaaataaataaaaaaatatataaaatggagtaatattttctgttatttaaatttgaagataataatataattatagcttataagattttaaagaaaatcaaaccaaaatcaattatcttaaagatattttatatttagttgcaattgattcaaattcaaacacatagatttaagtgagttgtttataataattttctgagacttataatatcatatagaattaagttctctaaatacaaattcacttaaatgctaacattttaacatgagtgttaacacaattgggctctcaattgacctacatataatacttttacttattttatctccaacaaacttgatttattgatt

SEQ ID NO: 141321 - DNA, 442 bp, Glycine max
  unsure (1)..(442): unsure at all n locations
agctntgcttctacagcaagttcccaatgatcttttttatgaaaaaccaaaaataacacaaattgaaactgggttgcctcccagggagtgcttctttaacatcattagcttgacgcttttaccttattgggcgatcaaatgaacagtgtcttgtgtcctgataaactccttcccatgatacaattttaacctttggccatttacaacccatgtcctttccagattctgagattgtgggtcatatagctctattgcaccataagatcgaactttcttgataacaaagggtctagaccatttggatttcagcttaccagaaaacaacttcaatcttgaattaaacagtagtacttcttgtcccagtttgaattctctcttcaacaacttcttatcgtgatacgtcttcaccttttctttgtaaagtcatgaagattcataagct

SEQ ID NO: 141322 - DNA, 439 bp, Glycine max
  unsure (1)..(439): unsure at all n locations
ctgaagaagtttgtctttntacatgtccaactccttattgtgtgtacatttgtattgattgttgctttatagttctaatctgtttatgtgtacatcatgcatcatcctgtagaagtaggaagattgtttctaaggtaagaaacatcttcagtgcataaatctatgttttaattcattaccttctatctgtaattgattacacaagtctttttcgaagcttgctgagagattttcgttctggtttaatcgattacccaatatccgtaatcgactactctgttcttttgagaccatgtctgtcttcttgggtctttactttaatcgagtataaggttatagtaatctattacatcattcttgaaagtgtctctagacgtgattaagaacacttagattgaataaatcaagaatctaattgattacatttttcttgaaagct

SEQ ID NO: 141323 - DNA, 455 bp, Glycine max
  unsure (1)..(455): unsure at all n locations
agcttgaacagtgctggcttgatgagtcattggtggttcttgcatangtatatgcatatcccgaagcaactgtcattctcagctctgtagtctgcatgatccgtaacaattcttatctgaacaccatttataaataaaatgtggaaataattacgtgtcagatatcaacgcagcatgattcctaagttcaattatgaatgcgtatcatacctaataatgttgacaatcgattagcaaaaacagctgctcaaaggaaaactatctcatccctgtctgcatgcttaatgaaaaagagaaacagtaatgacagtcatagaagatgatcatttgatatctcgaagctggtgcagatgaagattgccttcattcattattgatatacaacagattacttcaagaattgaatattaaactcctagcacgaaccacaatgaaatgtgtatttcaacatacac

SEQ ID NO: 141324 - DNA, 431 bp, Glycine max
  unsure (1)..(431): unsure at all n locations
ntagttgtgtatatgtcaatgcatattttatgcttgaattattaactacagaatgtctttgaaatataatctatcattgtgttcccgattaagggagatttgaagatgaaaactccaaaaatgaggtataacttgtatcttcgtttcaaatgtcaatcaataatcatgataatttacaatgctacaaaaatacaaaatccccgagaggcaaaatgagtgacttacataaacacatgaagctaaaacagacaaccctatactgtgtaggaaaaaaaaacacaagcaacaatccaagtactaacgtgtggtctcgcacaatgccgcacttatatagcggccagagaatatacatagcaataaagagtatctagtccaattgcacatgctacaaaatcaaagttatgtgcatgaagagagcatggaacagcgta

SEQ ID NO: 141325 - DNA, 395 bp, Glycine max
  unsure (1)..(395): unsure at all n locations
gcaagcttacgccncactgttagccgacgccatacatctttttctatcaangttaagaanaatgacatgcggacgacatgccgttgtacaagggataggggcctaatctttacttgtgatgacgagttttcccctagtcatctattgtcctaataagcaacattttgttctacagtgggaagaagacgatgatcctgcattacagccaaattcaccaaacgacgtttagacagttggtgaccccacttgtcaaatccatcatttgtcttataatgctgtaaaaggctcatcaagtctcggaataatgaagcgcagatcgggagtgcaaatcctactttatagagggagttcagataacttgctccatccttgactatctcaatgccagaaggtac

SEQ ID NO: 141326 - DNA, 442 bp, Glycine max
  unsure (1)..(442): unsure at all n locations
agctntataagtgcgggttcgggagtcaattgtttatcgttcgcggtatgcgaagatgatattccgagtactttggatttggtacgaccatgctctcctgatttccagctgggaaattggcgagtggaggaacgccccggcatttacgcaacaagcataatgtaaacctttacggttttaaaagctctatagttgggcctaggcattagagttttcattttgttaaggctttgtgtcttttgttgttgaatttataatacaaggatctttcttcatctgttcctggtctctacccattctcattcatttgcatgtttacttctttttctgaaacggcagattcgatgacgagtcccccgaaggtactaatacctgngacccgtctatcaacttcgagcaagaaatgaatcaaacggaagatgaaggagatgaggatgtggga

SEQ ID NO: 141327 - DNA, 385 bp, Glycine max
  unsure (1)..(385): unsure at all n locations
tctacttaaattatgtttccgaatcggacatccgtatnatttgtattgaccattngactatctcgagaggctccgttgatcaatattaagcatctcgatatattatgtgaacgaatcggatatccaaggtttaagttatgaccatatgaattatttcgagaggatccattgtccagttcttgagcgtcccgatatgttatgcgcctgattctgacatcgccgagagtaggactgaccacatgaatctctcgggagacttcgtgatgcgattcacaacattctccatattttatgcgcctgatacgcacattctagtgaaatgtatgaccatttgcatatcttgagagcatctgttgccaacttctaacttctgcaattatcatgt

SEQ ID NO: 141328 - DNA, 445 bp, Glycine max
agcttgaccaagcagtgaacatgtgaacactttttataatagtggcacattccacactttgagcttgttgaagctcatgacaacaacaaacaatgaataataattattaataattagtcgaggtgtcaaaattgattaagttgatggagcaacccaaataatttattatatccatttcatggtaaatatattatttttgagatgtccatttgaggaggtgattataaagtgcagtgatcatgataaaggaattggattaaaatgtaagtgattgccattgttttgaaatgtatatacttctagttctaacaaataccttaagcctagattaagtggctcatcaagctgatagaaaacacgtgtgttatcatgttgagtctatgtttgtaaaaacaatataagtctgtcttaacaaacaaaatgcaagttcaattgtttagttatt

SEQ ID NO: 141329 - DNA, 466 bp, Glycine max
  unsure (1)..(466): unsure at all n locations
tgacgagagttacacgccgagcaaagtttccatccttgtttgtgatggttntcacaacttgaaggtaagattttattttattggtttgggtttgattgggatgattatgcttaattatttggtgttgactttgggaacatttttaggagattaagaccgtggaactcgtgaagccaactgggtgggtatatctatccttgtatggagctgatcctaggtaagtacagtgttctttctgtatccagtttttgttggtttaagtatgtatccagtttttgttgattggaggcgtggatttttgttgctttgatatgaggtgaaggacaataattgtgagattgttgtccgtattcgtgttaacatgtttgataatgaatatacatcacggattagattcttattgagcttaataaagaaccatgattactggttcttaacacttgttatgcttgttattttctaatag

SEQ ID NO: 141330 - DNA, 435 bp, Glycine max
  unsure (1)..(435): unsure at all n locations
agctntcctgctcgttataaacgggaatatctcccgagactntcttaacagggtggatttcaaacatggcttattgtcctgcgagttgctgaagggctgtgatgacatggtcggcatcggcggtagtcatatccgggaacagcggcaaagaacagatgcgttcgctattccattcggtattcggtaacgacagcgtgggaaaacgctcgcgataatatttttgtgtgtgagcggcgcggaaatgtaacccggtaccaatgcctctttcttttaacgcttccatcaacgcatcgcgactgataccacaacgttgttcatcgacacgaataataaacagatgccaggcgtgaacgtgcggccaggcgggaaggcttaatggctgaaaggggagagctgccagtgcttgctgatattgctgggcaatttcgcgccgac

SEQ ID NO: 141331 - DNA, 463 bp, Glycine max
  unsure (1)..(463): unsure at all n locations
ntntgccagttgacgggaaatcagcatgccatcgttgtcttttcagccaccgccggaatgcatatcacgctaatggcgttgaaaattggcaagggcgatgaagtgattacgccttccctgacctgngtttcaaccctcaatatgatttccttgttgggtgcaacgccggtaatggtggatgtcgaccgcgatacgctgatggtcacgcctgaagctatcgagtcagccattacgccacgcactaaagccatcattccggtgcattatgccggtgcgccagcagatattgacgccattcgcgccattggcgaacgttacggcatcgcagttatcgaagatgctgcccatgccgncggtacgtattacaaagggcgacatattggcgcaaaaggtaccgctatttttcatttcatgccattaaaaatattacctgtgctgaatgtggctgattgaactgataatg

SEQ ID NO: 141332 - DNA, 344 bp, Glycine max
agctataaccagagggagcgatgatatttttattgtaatgacataaaaggttcaagacctcagttctgaaaggcttgaatgcattcaaaggtttcatcagagaagaattccatatcaaaaaacttagggtcgatatatggaacgagatgagaaaagattggagtaccgtttctgctgttcattggaagaaaacactggggaagaggacaatgatggtggaattggtgtttcggatgcgctataggctccggaacgatgagctcttgaagccgaagcggaggcggaagaaccctttcgtttctttgactattctgccatttaaaggagtttttgccattttaatc

SEQ ID NO: 141333 - DNA, 280 bp, Glycine max
  unsure (1)..(280): unsure at all n locations
ggaactttaaactaagctgtgcaataaanactcgtgatggatctctttcctgtcatttttctgtacccactcctcacgtgtggttatctacggaaaaacaccataactgaacgcgccacaaggcattcctattgctccacatccatatctagaacgattggtgatcaataggagacacaggaacacatgaaagccgacatgttggctcttaaagaacaaattgcctccatgattgatgccatgctaactatgaacaactcatatagaaaacgccgtcacc

SEQ ID NO: 141334 - DNA, 147 bp, Glycine max
  unsure (1)..(147): unsure at all n locations
actcattagcttatggagaagctttttctttttaactntcttctcctattagagcttatagaaaagcttatccaaacaagggccactatatattctgcaatctggtactgtgccatatatatggatggtggntttggacatttggat

SEQ ID NO: 141335 - DNA, 378 bp, Glycine max
ctttataaaatggaagaagacaaactgatcagcaccactctcaacacacaagcaaccaccagctacctctctctcaacagcaaccaccttctttctcaccttcaacacacaaattttacaagcaaccgtgaactgctccctctgcacttgggtttttaaatcccactgaaactgacaacgccaacctcactggcgcctccctctcacccaaatcgccacctcgagtggcgccttccagctaggaccctgcaactgcaggtgctgcaacctatggttgcagaagtgcaggtgctgaagtcgctggtcaaaccagcgctttcatgcacctttggacgcgccaataagagctgcgatatgcagtcctttgtcgccagtcac

SEQ ID NO: 141336 - DNA, 423 bp, Glycine max
  unsure (1)..(423): unsure at all n locations
agcttgtgagttgtgagtggtactactgaaaatacccccaccataccccctttccccttatcacaaactntgtggaatactattgctactccagaacaatgatctttagttaatctacactctagggtaattccatcatctaattaccttgcagaccctaaaatcagagaagattgagtttgttgtagctccatatgaagcagatgctcagttagcgtacatgtctcagcttggagtacaaaatggcggagttgcagcggtgatcacagaagatagtgatctaatagcatatggctgtccagctgtaagaactcctccaatactgtgatattgcgcatggaggtttactgcnnttttgatatctcgatttatttacttgttcactattcagcttcatagaaagcatgcattttgggatataat

SEQ ID NO: 141337 - DNA, 462 bp, Glycine max
  unsure (1)..(462): unsure at all n locations
tcccatctgttctttagctgtacaaaaacacaatccctatcatggattaacacatcgagagcattttcagccaacccaaggcaccacttcttgcaacacactactggcctacacggatcgaaacagtacagcagatgaaaatggtgggtcgcattaaccttcacaatttggcagcacagaaatcggactattttctcaaacgaaccatttaatggaagcagaatgaatgaggatgcagtgttactggtctggtcatggttcacagagctggagaaaagatttacagagcattacaactactggtccagcaacctatcagtagctntctgtaactagcatagatgggaagctattgaccaaatgtaacaatgtatctagtctggattctaacagagggaccttcatcccacacagtcatactcctgtattcttagtaccccggtacttttctataatataaat

SEQ ID NO: 141338 - DNA, 394 bp, Glycine max
  unsure (1)..(394): unsure at all n locations
agctttccctctttgaacaaatacccctcagccaaatagaatccatcttgggcctttttcccacaactctcataaatgggagagaaatgttcatctaaagcatacaagtccctaatattatcaaatcctaaaatttgagctcctagggagcaaaacaatgtgtgtctcctagagagggcatcagctaccacatttgtttttccctttttgtatttgataacatatggaaattgctctaggtactctacccattttgcatgcctcttggttaacttgctttgccctctaatgtacttaagtgattgatgatcactatgaatgacaaattccttggaaacaaggtgtcgcaacctacccttcngcgggagggcgacgcgtgactcgcgggatgcgt

SEQ ID NO: 141339 - DNA, 464 bp, Glycine max
  unsure (1)..(464): unsure at all n locations
ntaagaggatgctntaatggagganaataaagagagaaggngggagcacaaaattgaaggaataaaatagggagagaagtggaacattgaagtgtgtctcataagactttcattcatcaaagttacaacaagtgttacacatgcttctatttatagactaggtagcttccttgagaagctttcttgaggaaacttccttgagaaacttctttgaaaaaacttccttgagaaggtagagcttagctacacacacccatctcataactaagctcacctccttgagaagtttccataagaagattcctaaagaagctagagcttagctacacatacctctctaatagctaagctcacctccttgagatgggaagctagagctntgctacacacccnctatgatagctaagctcacccccatgacaaaatacatganaatacaaaaaagatccctactacaaagacta

SEQ ID NO: 141340 - DNA, 373 bp, Glycine max
  unsure (1)..(373): unsure at all n locations
agctntgaaaagtgttgttnttcaccttctcgctaagccaatccgctggcttagcgagcgtccgctaagcgcaacactcattggctaagcgcaaggaagaatctggaagaaaatgagctgtacaagttcgcttagcacactgtttcgtctcactaagcgcaccgcttcagtccatcagctaagcgagaaaggcacgcgctaagccgaaattcactaatgtgcgctaagcggtccagaattgcgctaagtgcacgagcacgaacaaggccacctatttaagcttgaaatcagattttgtgaagggagtttgggctaggattcagagctttgcatgtctagagattctagagagagaaaggtccaatttcagaga

SEQ ID NO: 141341 - DNA, 462 bp, Glycine max
tgaaggcaaactggacgttggtcaacttggtaacccagctggccttgaatcagaaatctgtacctgtcgcaagggtttgtggtttgtgctcctctgctgaccaccatacagacctttgcccttccatgcagcaacctggagcaattgagcagcctgaagcttatgctgcaaatatttacaatagacctcctcaacctcagcagcaaaatcaaccacagtagagcaattatgacctttccagcaacagatacaaccctggatggaggaatcaccctaacctcagatggtccagccctcagcaacaacaacagcagcctgctccttccttccaaaatgctgctggcccaagcagaccatacattcctccaccaatccaacaacagcaacaaccccagaaacagccaacagctgaggcccctccacaaccttccctcgaagaacttgtgaggcaaatgactatgc

SEQ ID NO: 141342 - DNA, 421 bp, Glycine max
  unsure (1)..(421): unsure at all n locations
agctttgactttagtcatcaagagattataaatatgtgacaatggcatgagtttcaataataatcaataatctatcttttacataatcttctttcaacacccttcaatcaatctttcaatatcttctttaatctctttcaacattttcaacagatctttctgatttatttcccttcatctttctaaaagtttttgttcaatagtttctcttccaagaaaagttctttgttcaaaaacttcagctattcatctttttcattctcttctccctttgccaaaagaaggaaggactaaccgcctgaatttttttgtgtctctcttctcccttacaaaagattcanaggactaaccgcctgatatatcttttgtttccccatacaaagatttaaaggactaactgcctgagaattctttgtcccaa

SEQ ID NO: 141343 - DNA, 404 bp, Glycine max
  unsure (1)..(404): unsure at all n locations
tatctggcctcccattaacagtaccttcatagcaggggcaggaccatcaacagccagccgcagatgcaccaccaccgcctctacatcagcctccgtccttagagtccatctcagctcacatgcagaggattgagctccatatgcatgcatatatgcaacatgtggccgaccaataggcggccaatcataggggataggtgcagctgaatcagagcttttaccagtacaccctacgtcagcagagctaggatcccagcccttactcgtggcttactcccgagtagtttggggccacagttgcatggcctggagataggcccaattttcaagtagggacaagaccctcaaaggccccaggagttgaagatggagctcaagaagacgacgacatangcgatgtgatg

SEQ ID NO: 141344 - DNA, 284 bp, Glycine max
agctttccaagatattaagttcttcctcagaactgtcgtaagcgaagatgccaatgtgctattaacaactttcgtttgcccatctgcttgtgggagacatgtggctgaaaataacaatttagtgcccaacttgacccacacaggactacgcaaatggcttatgaacttacagtccttatcactaacaatgctgcttggtaaaccatggatgctcacaatctccttgaggaacaaattagccacatgggaagcatcatctacttctttacatggaataaaatgag

SEQ ID NO: 141345 - DNA, 373 bp, Glycine max
tcgatgaagatgaaccatctaacaatgaacaaggttgtattcaccatttggtgtgtagctactaatattttaagtcctatatataaatcttctctttgagcacttctttatagctaatgggaagtacattataaccaccaatttgataagatattgcgacataggcaaaccactaatccaatgtacatactgcagtgcatacatgttgtatccggaaaggattcacatgcatagagacattgtgaacccaagattcctactatgttgtgtgcaatggaaagagttaacaaacagtgttgaaaccaccccttgttaatgcctatgaagacaaacttactgtcacacctatactaaaacacccctaacatatact

SEQ ID NO: 141346 - DNA, 339 bp, Glycine max
  unsure (1)..(339): unsure at all n locations
agcttgcatcacttttaccttttcatttccatcgtactcttgcttcaaaaactgcccaatcttgttggtgtttttagtgtcattattctaatcaacatagtggatgatattgctccaaacaagattgctcttgcctttgactttctctatctcctctcgngattttttttatttgagcaaccgttgattatccggtaggggtggaacttcgtatatgtctttaatatcttcccatagatcacaagcatcaagatagggttccgttctaatagcctagaggtggtaatgttntccattgaatagtgaaagcctatgaagcacggacaccctagtccctta

SEQ ID NO: 141347 - DNA, 397 bp, Glycine max
ttctccctattttcctataaatagggggagaagtgatagggaaaaatgttcagccctcctgataattcgagatcacttgaaattagtgaaaaaaattgtttccgtgaagaaaattcaagccaaggcgtttccgtgggtgatttcgcgaagattttcaaccgttcttcgacgttcttcgttcgttcttcgtcgttcttcagtcttcaaccggtaagttcccgaaatcgaacttttcaattcattctatgtacccttagtggtcctcatttgttttcacgcgcttttattttcgtttcatttactttccgtacccccttttgacgtgctctagtcatttacttaagtcatgttctcgccttatcaaaaaataaaataaatatccactgatcatttgagt

SEQ ID NO: 141348 - DNA, 384 bp, Glycine max
  unsure (1)..(384): unsure at all n locations
agcttgcataactntgaatggngtattggtagagtttatccgttaatgatatgggctattgagttggggaggattgattntggaacttgtcgtggtgcagaagttagttcaagtgcgaacactactagaaaaagagctttttgcgatgcacttacgacatcggtccaacaaaactgtcgaagtatattaaatggtgcatttgtgtaattacaacgaaagtgtgcaccttgccaattttatggttgacattggcacaactcccttgaaggttgttggaagggactcgagagtgaggaaactagacagcttggggtattctcgatttccgtaacatacttaatgctctcacaacatagtggagttagggtagtaaatttcaccatt

SEQ ID NO: 141349 - DNA, 243 bp, Glycine max
cgaaccgcaccctactttatacggcgacaaacatgtggatatagacaaacatgcgctgacccgtctcagtgtcatgcctaaggctagctcagcatgagtccaactttagctagcgcgattcataatgagttgtgccacattttgcctataagtaggtgaggcgatttttttcaaccaattagactctaatccatggtggatcaagttgactcacaataataataataatctttttacttacct

SEQ ID NO: 141350 - DNA, 331 bp, Glycine max
agctatatatcttttcttcttggttctgcttgctctgtagtgctttggttctatgctatccttttatatttcatactatctttgacacatgggactaaacattgaacaggtgggaaggtggtccagccaaaattccatggtcctttaaagaagaagagactatgtatctgctggagggaaaagtgagggttactgttgaagggtctgttgggtcttttgaaattgggggtggtgatttagttgtcttcccaaaaggaatgaacattacttgggaagtgattgaaactgtgaagaagcactacagcttgaaaaaataatgatgtgtacttat

SEQ ID NO: 141351 - DNA, 443 bp, Glycine max
  unsure (1)..(443): unsure at all n locations
ctnggtgttgttcctattgtgcgagttactgaggtgcaatttcaattttaattggataatgagaaatgttagcaatatactaccgtatgacactgcatcacacactttattatttgccacaatttattggaaatcacaaaattttgtgggttctgttacttatttaatgaacttcactcgtgattttggaatttctaataaattttaaccaataataataataatagagtgtgttacttagaagggcattgtattgctagcactcctcttgaagtatagcatacaaacatgaaaggaattccattttaagtattatcctgtaccanaacctcactttagtccccaattttggaaatcacagttcttttcactgacaaatgacttacagttntagttaaaaatagggattaacaagagtggagcatacaagaccaggagggact

SEQ ID NO: 141352 - DNA, 396 bp, Glycine max
  unsure (1)..(396): unsure at all n locations
agctttagctggactaaaaaacattataatcccttcaatagtaggatgagagtatgcctctcttagtatttctttcaagtattgtgcctactctagaaacaagaataagagaaaattaaagggaatgcagttagtcacatgatatattgagatttgttttttttttctttttttgtaattgataaaaaagacaaaattggtgtcttttgcattaaggggcctttcagaagaacttgtgaaaataaattgatcagtttaatttccttatacttcaagtgaaaagatttttatactatgaactaaccaaaaatcatcctatgattnttaatataattattataaaattaccatacatcataatttgagaatgtagaanacataaacaacgtttacact

SEQ ID NO: 141353 - DNA, 459 bp, Glycine max
  unsure (1)..(459): unsure at all n locations
gtcctcgggccattcctgcgaaggaaaacatttggatagttagttntaccaagaaatgctacccttaaaacaaaaatggcatacaacctcctccaataaatacaaacatcaatgtaaatttagagcaagcttatgcgcatattttcttacgaacattcactcgcacaagatattcttctaactaagaaaaatgcacccatgcacaatcaaggcactttcgttacctacattatttgtatgtacttccaaggtgtactacctacaccacatgcatttccttggctaaatttacatacatgcatgctcaaagcctcttggctaccaaaagttgcacacatgcaaactttatgatgaatcttggctatctacacaataaggtgctacacttcatgctttatatcaagtgttttactaccagaagccgcatgcgaatgtcagtatattttcttttgccgacta

SEQ ID NO: 141354 - DNA, 328 bp, Glycine max
  unsure (1)..(328): unsure at all n locations
agcttctcccccaattttctataaatagggggagaagtgtagtagaaaagggttcagtcccttaggcacttctctctctttcgaatttgcttaggaaaattgtttccgtgaagaaaatccaagccgaggcgcttccgtaacgtttccgtgagtgattttgcgaaggttttcgaccgttcttcgacgntcttcattcgttcttcatcgntcttcagtcttcaacgggtaagtacctcataccaagcttttcaattcattctatatacccgnnnggggccacattatggttcatgtattattattctcgnttcatttactctttataccc

SEQ ID NO: 141355 - DNA, 391 bp, Glycine max
  unsure (1)..(391): unsure at all n locations
ggctctanatntacattgatgtttgtatttatgggaggaggttatatgccatttttgctttaagagtaacgtcccactggtaaaactaactttccaaatgtttgccttcgcaggaatggccccgaggaagcttgcctcaaagaggtccaggaaggacaaggcggccgaaggaactagttccgccccggagtacgacagtcaccgctttaggagcgttgtacaccagcagcgcttcgaagccatcaagggatggtcgtttctccgggagcgacgcgtccagctcatggacgacgagtatactgatttccaggaggaaatagggcgccggcggtgggcaccattggttactcccatggccaagtttgatccagaaatagtccttgagttttat

SEQ ID NO: 141356 - DNA, 352 bp, Glycine max
agcttgtggtataatgtggaaacctctgaaatattctagagatgtgtggaaccttctggaaccttatgaaaaagtatggaagatagtagaagagtgtagagactcctagaatgtgtggagtattctagagaattagtctccatcctaggatacaagtaatctccactatttattgtggaggtggagtagtataaataaaggtaggatccttcattcctaaaaaatctaagtagagagtctctctgagagagaagataaatagctttggaagtctctatcctcaaacataagtaagcctctctgagagagaagataaatagcttgggaagtctctatcctcaagcttgagtga

SEQ ID NO: 141357 - DNA, 438 bp, Glycine max
  unsure (1)..(438): unsure at all n locations
ggcacactctntgattatcttggtctaccaagtgtttattacacaatagtgaaatgcacttattcccattctccccgctcaaccactgaatcgaattatctccagccacccaactacacccaaaatagaggttcagaaaggaagcaaactaacactgccaataaccccaagttccaggttttaggtgggaattatactattatcaaaacgggttctacaacctcttatagaagcataactcttgcaaacacttttaatagtaaaaaagaaaaaaaaaactttacgtcacagaactcactaccaagtgaaaaaccaccaacattgtcggtttgtactctgcagtctgcacgtgtttccataaacagaaacacattgattttaaattaattaatcgattaatactaccatcaagtagtaccacccctatattctttctta

SEQ ID NO: 141358 - DNA, 104 bp, Glycine max
ccacattatttccatgacacaaattgcaaaatgatgatttggaaacttcatgcaaaactggtcatgcatgcacctatgcagacactcaagtgtcaaatttttat

SEQ ID NO: 141359 - DNA, 386 bp, Glycine max
tgtctcagcgtttatgcgagacagagaccaacatgttagctatcatcgccaagtaccaagaagagttaggtctagccacggcccacgagcatagaatcacggatgagtatgctcaagtgtatgcggaaaaagaggctagaggaagggtgatcgactctttacaccaagaggcaaccatgtggatggatcggtttgctcttaccttgaacgggagtcaagaacttccccgattgttagccaaggccaaggcgatggcagacacctactccgcccccgaagagattcatgggcttctcggctattgtcagcatatgatagacttaatggcccacataattagaaatcgttaggaaaattgtatggtctctcagaccttgactggatac

SEQ ID NO: 141360 - DNA, 379 bp, Glycine max
  unsure (1)..(379): unsure at all n locations
agcttctcccccaattntctataaataggtggagaagtgaagtgaanaagggttcagccccttaagcacttctctctctttcgaatttgcttggaaaaattgtttccgtgaagaaaatccaagccgaggcgcttccgaaacgtttccgtaacgtttccgtgaggaatttcgcgaaggtttcgaccgttcttcgacgttcttcattcgttcttcatcgttcttcgatcttcaacgggtaagtacctcgaaccaagcttttcgattcattctatgtacctgtggtggtccacattgtggttcgtggatttttattctcgnttcatttactttctatacccccttttgacgtggcttaagccatttatttaagtcatttctc

SEQ ID NO: 141361 - DNA, 395 bp, Glycine max
ttggatgcctataagattattaaggctgaagtcgagaaactatgtggatagcaaattaagatcgtgagatctgattgaggtggagagtactatggtagatacacggagaatggacaagcacctagtctgtttgcgaagtttgttcaggaacatgggattattgcccagtacactatgcttggttctccggatcagaatgatgtggcagaaagaagaaaccgaactttaatggacatgataaaaagtatgagaagtaataaaaaacttcctcaattcttgtggattgaagcattaaagacggttgtatatatattaaaccgggttccaaccaaggctgtcttaaagacacctttctagttattcaaaggttggaaaccgagtttgcgacatatatg

SEQ ID NO: 141362 - DNA, 408 bp, Glycine max
  unsure (1)..(408): unsure at all n locations
agcttanaggagcactcanatcgggtgtatttaaccccatggcctagactccgaagagtccgtcagggcctctccctcctgattcaggtccaacccanaaaacattntagcacacagactntatctatgaactgtacaaaatacacgactcctcaattgttctcaaaataattttatctaatcgcgcttgtgattaaactcgtcaggtcccaacagtggttcccatcataatactcgccacgcattaactcgtcgcccttagattcatagttcacaaatcagggcacacaacatctcaatgcacatatatattacaagtcaatacatactcaatttatcacatacatttggtctcaatcacagtggtataatctcaatttaacatgttatcacacctcatgaatcata

SEQ ID NO: 141363 - DNA, 443 bp, Glycine max
  unsure (1)..(443): unsure at all n locations
ntaactnttcaatctctctgcanataaataacaagattacttatatatcatattgagatgagtctgatatctcaagattacatttgaataaaatcatgaggttgaattaattgaaatactttaaggttatagcaaaaaaggtttcagctaaaacaaatgcaaggcagcgtaagaaataaattactacattagcaataacgcttaaatatctacataaacagaatattccataaagattatatttaagccccatgctgagatgcaagtaatatgctgtttcatatttatcaaaatataggaatggaaatgatgcaggaggcccacagaattaagtcataaacctgaactcaactacatctgtgcatacacataaaccanatcctaccattntaattntacaccctccccanacccacaatgaatatggcctaaggaatacatcg

SEQ ID NO: 141364 - DNA, 398 bp, Glycine max
  unsure (1)..(398): unsure at all n locations
agctttcgtacatcgttcttctgaaactagtccaacttttcctacattgctttaacccagtattcattagacatagcgtcatctatgtactttggcttgatctcgaaaagcaaagttctatgcttgaaagagttccttgtcaggactttgtccttaggatcaccaatgatctgggactctagatgatctttttgtagcaatcatccagttggttctctgacttatagaggttgatcatccactggtgagttggacgcatattggtcttgactggacctagcaacatatttcacgatattntctactttcatctcagtagaagactcatctagctccaacattgtagtgttaggcttattgtcattaagtcttacgtgaatggcctcttccacagtcat

SEQ ID NO: 141365 - DNA, 458 bp, Glycine max
tcaccttgtgcgcctcctcatagttgttgcatgagacaacatgctctattttcatctcccactccaagtaggcctccggatcattctttcctttaaagggaggaatgttgagtttaataccatcaattcggctttgactaggaacaccatcattccctcttctcctcctttcttcttcattatgatctctattctccatttgatccaacctctcatggagcacatcatctcattgtttcattaacctctccaaatgatgcatcacagcttgcatttggaattgcgaaagccccactccatcattaggatttggtcctgccatctcatacaaacacatcagacgtatcaagacaattatagttgctgtttgaatacctcactcactcaagtgtatcacacaattatggtttttctctaatgaaacactcttgccttctaccactctaattccacttgag

SEQ ID NO: 141366 - DNA, 382 bp, Glycine max
  unsure (1)..(382): unsure at all n locations
agctttgatataatgctttctttgtatttataggtatagaggatctagccacttgagagtgtcttgccccgactcagtacaatgcattatattagcgcgacatagctttggtctacattgaattagtatatatagctacaccttattcaatccaagaatggaaaaagggaagcagtggttaagaatgatcatgggtcaagcttgagtcaagtaatctgataccaaaccgaatgaaaatggttaggttgagtgtgttaaatgtgactgtctcaaccacaactaatcacaagtgggatgtgcctaagtcacgtcattatattaaagattctgtgaatgaaggaagaaaaaacacacanaaataggggtagagtagggaaaaggt

SEQ ID NO: 141367 - DNA, 460 bp, Glycine max
cctgagtgaaacaatgagactcttcacagttaaatttgaatttcgacgttcatggacactggtaatcgattaccaaaacattggaatcgattatagccttttgaatatattgggaacgttgtaaattcagtttgaaaactttttcaaactcttttagctactgagaatcgattacaacaatatgaggatcgattaccagagagtaaaagctctttggtaaagattttgtcaaaaactcacgagctatacaacgttgagaaaaaacctttttaatacttatattgatagagtgtttgatacattctcaaatgttgaatgttgaatcttgatcttgattcttgagaactcgagtattgagtcttgattattaaccttgatgcttgatgattgacatcatgaatcgtgaatcttgatacttatctgaaggctttcttcttgagtcttgaattcttgattcttg

SEQ ID NO: 141368 - DNA, 320 bp, Glycine max
  unsure (1)..(320): unsure at all n locations
agcttgtagagcttgagttctaagaatgagctgagttattttgaacccattntgctgtttatttttcctaaaatggattatgaatatagcttggatactatggaaacaaaaaatgagtattctgatgaaggtgaagtagtaccgggtttatccattaatccggttagtttttgcgcaaacattgttccaatgattaatggtaaatatggtttgcattaccaaagtgaatgcaattctacaaagaattgcagtcctattggggggatgccaaccaattgccttatattgtgtctttgaaagaactggtttgttagatgtaa

SEQ ID NO: 141369 - DNA, 368 bp, Glycine max
tcacattcactatcctctacatcatattcaaacttgaccaaataaatagtacagtcatctcgactcaaagaaggacatctaagtctcatacaattaatatagaacctatatcctaatgtcacatcctatcaaagcgtggcgctaccgcgtcctctagcttgaggctcttcatagtcatccacctattcatctgctaccccgaacacagagcttgagatcatcacaggatgcgaacacaaacagcacaccgggagtgagatatcacacttttaactactatagagaaacaacacaacatatatgagccgaagacgatttacttaccatatctcacattatttcatgactttgtccttcatcgatcacac

SEQ ID NO: 141370 - DNA, 414 bp, Glycine max
  unsure (1)..(414): unsure at all n locations
agcttatcatctatttatactacacatagcaatgaatacttattctggatcactgcttaatgaaattaaggatctgtttattttacattgtaaacaggcaaatgtattaatttaagatttgtatctaaattgttctcaactatatataattatatacattngtattaacatgtataattctagcatacaggcagtttttagaaatataccatgtgactcgatcatgtgtatgtttgagttgataatcttcttggaggagtgttaagattcaacacatttgtattaatatgatgtgagagtcacaaattnttatcattttcaatatatttcaatcaataacaaagaatatatttaaagagactcaacaaatatgtctctactgtttctcacattattaatataatcaattgcttg

SEQ ID NO: 141371 - DNA, 288 bp, Glycine max
gttccaaagaggtcttcggcattacattcaaactcgatccattgtcgataagtacatttgcgaccacgtgtgccgtacatatcaccgacgcatgtacagccttgatgtgccctctcctctcaacgggaataacttcttgcacgaacgcgatataattgccgatggctatatgattggctatgccgatcagaacgatgcgtgagatataatgagctacactgtcatggacatgatccataatctgagacgcactgatacactccctcaattcttgtggattgaagcatt

SEQ ID NO: 141372 - DNA, 317 bp, Glycine max
  unsure (1)..(317): unsure at all n locations
agcttgtcactgtggaattaaccaagtctctgagggacgcgttcaaggataattcgaaatcatatgccatagcgatctcttcactctgaccatcaataattactaccatggtttctatctccaagatgtcaaccagaactgctaccttttgcctgagcttgaaggacgtatatgacactgaatacaccaataagtaattaatactacaatctaatagcttaatacttaacagttgacacaaatattaattntcattaccttaatgttctgaagtgcacgtctaaagttttgtgcataacagtatcgccactaaaacc

SEQ ID NO: 141373 - DNA, 435 bp, Glycine max
  unsure (1)..(435): unsure at all n locations
cactatctatacttagcttgcaatctatgtgcaccagatagctaatagacttttgtattcttncgttatgagtatgatatctcaagattacatttgattcacctcgtgatgctgcataaattgagtatacttcatcgacgttgcaaatataggtttagcttaaactgatgcgctgcaccgcaggaaatagagtactacattagcagtaacgcttaaatatctacattatcagaatattccataaagattatatttaatccccatgctgatatgccagtaatatgcctgctcatattgatcacaatatatgaagggatatgatgcacgatgcccacagaattaaatcatagacctgaactcaactacatctgtgcatacacataaaccaaatcctaccattgtaattttacaccctccccaaacccacaatgaata

SEQ ID NO: 141374 - DNA, 285 bp, Glycine max
agctatatataagctcttctttcatcagatgctccgaaaatttaacttcttgttgtgataattaggggggagcagtttataactggatttgtatctgacagagagaaatcttaacacaagtcactctgacactcttattgtataacaaattaaggccactgagttgagtccagctatccaaaagctgtaggaataaaaaatctattaagagcaaacacacacctcgacctgtgttatgcaagtaaatggtaatgtaagcgactacgcagtagtacgggttggtag

SEQ ID NO: 141375 - DNA, 452 bp, Glycine max
  unsure (1)..(452): unsure at all n locations
ttgatgataganattaattgaatgatttattattaattcttcttaatgtttggacaatatttccaatattagaaattacaaactcaaaagaaaccaataaataaattcctagtaacaaaacttgttttttataatttcatatttatcaatatttattatataaataataataaattataattaaaaaatgaataagtattatgttagatatttttataataatataagataatatctaatattaaaaaatatctatcaatgagatcggtcacttgtgttagctaacttacatgaaaagtcaatgagatctgttacttgtgttgcattggtgtagacgaaacttgaacatcattagcaattatcaagggtctcctatcatcacataaagtatgggtttgatacttaacaataagcagaccatcacagaaaggatatgatagcactctgactat

SEQ ID NO: 141376 - DNA, 335 bp, Glycine max
agcttctacttatgtggcagggcgggcttccttcaccttcttgtctccaacgcgaactttgaccattattcttccttcccgcgatgcttcttttcatgtccgcctgagtgggcttatagcctaaaccatacttcccacgatttccttgggtatttatcaggctagttatgccgcccgtgttttttcctaaacccatcccgggttcataaccgttccccaacataactcgggccatcattatcgctgcatcggacagacaaggcttgccaaagagggagtccacggaggaaatgctgaccacctcaaaagactggaaagcagtttctaacgattct

SEQ ID NO: 141377 - DNA, 434 bp, Glycine max
  unsure (1)..(434): unsure at all n locations
tgcctcanagagatccaagaaggataaagcagctgaaggaactagttccgctcctgaatatgacagccatcgttttaggagtgctgagcaccagcagcgcttcgaggccattaagggatggtcatttctccgggagcgacgcgtccagatcagggacgacgagtataccgacttccaggaggagatagttcgccggcggtgggcatcgctggttacccccatggccaagttcgacccagacatagtccttgagttttatgccaatgcttggcctacagtggagggtgtatgagatatgcgatcctgggtgagggggttagtggatcccattcgatgcggatgctctcagccagttcttgggatatcctttagtgctggaggagggccaggagtgcaagtatggccaaaggaggaacccggccgatgggtttgat

SEQ ID NO: 141378 - DNA, 408 bp, Glycine max
  unsure (1)..(408): unsure at all n locations
agctntntggagtagaaacatgggaccaactcattttatttcaaaaaggaagtcatatctagtcaaggtctgagagaccatacaagtttcctaacgatttctaattatgtgggccattaagtctatcatatgctgacaatagccgagaagcccatgaatctcttcggtggcggagtaagtgtctgccatcgctttggccttggctaacaatcggtgaagttcttgactcccattcaaggtaagagcaaaccgatccatccacatgggtgcctcttggtgtacagagtcgatcaccctctctctagcctctttttccgcgtatacttgagcatagtcgcccgcaatcctatgctcgtgggccgaggctagacctaactctttcttgcgatgatagctagcatggtggct

SEQ ID NO: 141379 - DNA, 74 bp, Glycine max
tctcaaggaagttttctcaagagagcttctcaaggaagctacctagtctataaatagaagcatgtgtaacactt

SEQ ID NO: 141380 - DNA, 358 bp, Glycine max
  unsure (1)..(358): unsure at all n locations
agcttgaagcatctcatcataggagatgatgatcacaaagaagcanagaagggtagtagtaataataatagtaataataataatagtgatcatgagagaggtggcaaaggaggatcaaggaactcacttggtgaacacttcacagaggaagagaagcagcataatcttcagctggttaggatgcaacagaataaggacaacctccaaggcttgaagttgaagaagttggtgcgtcgttacgccaaagttttggngcatttgatgaangctaagcgtgatcctcatctangtggtgatgctgggaaaaaacctgtnttcaagttatcagcctagccagggaaaattttggagttttact

SEQ ID NO: 141381 - DNA, 407 bp, Glycine max
  unsure (1)..(407): unsure at all n locations
tgcatttcacgagcatcactctttntccttccctcttgtgttgtgacattntcctattgagaatggaaaattatttccataccttcaaatttgcaaagaaatgtatcccaaaaatgctactctaaaataggaagagagtttgctctttggtttttcgctggtccattaatatactaaattagaagtcattaaacaagctttttcaactctcataattgtggcatttactattgaaggtaggggaatgatcttaaacggattgaaaatattaagcaaggaaaattactgcagaaattcttaacaaatgaaatcagaagtcaccttctctagacgctgaagaagagcggttntgaattggcgaacaccacgcccacttgattgcggatctagtctgtgagctagttcaa

SEQ ID NO: 141382 - DNA, 420 bp, Glycine max
  unsure (1)..(420): unsure at all n locations
agctntaagacactagtcttcggccaactntgttttaacaccaaggcaattaccatggttgctcataaatccatatttacagaacaaaattgnggcatggngctcaatacaaatcanaaagaggttctaaatatgtattagactaacaacggcatccaattagacaaagagagacttagttctctaagaatcaaattcgcatgcaaattgaaaattataggatttggaaaatcatcaccttttcccacctatctttactcttcaaaaccgaanatgattccaactcttctcttttccttagagagaaatacatgaagaaaggatggatgaagattattcctgcacccaaacggagattctaggagcttannaattcactctttatnatatcanaatacaaggaatcttanaaattactac

SEQ ID NO: 141383 - DNA, 423 bp, Glycine max
  unsure (1)..(423): unsure at all n locations
tcatgtttaatcatacattcaatcttattatagcaganaactcaaataaaaattctattaaaaggtagcactcgtggcatgagtccttataaatatctactacaaaagttttaaatactctgtccatgaggaaagcagtccagtatcttccaatactctatccattgatccatatttgaccttttcccataccctccatatccaatgccaatggttcatctccttcgggagcatcaaaataagtctgcgcagtttacggattgacttcatcagttntcaacctagtggtatttttttcagtctaagttaggacattactatgcaagatgaccttgtgccatgtcaatggttgagttctttgaacaactattgctgactgcaccacgcaacactatagatatcatttggagaggcaacattcat

SEQ ID NO: 141384 - DNA, 401 bp, Glycine max
  unsure (1)..(401): unsure at all n locations
agcttgcttctacaatagtttctctttacctcatctgaagagttacgaaggttccatagaagaagaaagtggctccaattgcagaagaaccataaggtcgtcggttacattattcattagtcttgttcgtgattgattgatgtaaagatcttgcaataatcgtcgaanaacaagtagattaggagccatatacggattaaggtatttcatctaatctttaataatgaggcatgttgtaaatcctagggcttttggtagattgttctaggttacgcacatgttgaattntagcttccgcataaagaataaagaatacggatcanaagttaaaattctaacaactataagatgaacatcagttgccaaattctttgcacatgcattggatntaaagaacaaat

SEQ ID NO: 141385 - DNA, 464 bp, Glycine max
  unsure (1)..(464): unsure at all n locations
tagactaagttcagcctaccatcctcagactgatggccaaactgaacggaccatttagtcattggaggaccttttgaaggcgtgtgtcttagagcaaaaaggaagttgggagagttttcttccattaatagagttcacttataacaacaattttcactctacgattcatatggctccttatgaagctttgtatggtagaaggtgtaggacacccctatgttggttaaagcccggagaaggccttaccttaggaccggaagtggtacaacaaaccaccgagaaagtcaagttaatccaggaaaggatgaggactgctcagagtangcaaaaaagttatcatgataagaggaggaaagatctgaaatttgaggttggtgatcatgtattcttgagaatcactccgtggactggggttggtcgagcattgaaatcccgaaagctcacacctcactttatcgatcctt

SEQ ID NO: 141386 - DNA, 342 bp, Glycine max
  unsure (1)..(342): unsure at all n locations
agctttaggataactttatatttgnggaatgacagtagacccacaattgtatttcatccacagaactctaacccacaattgtatttcatccacagaactctaacccacaacatactaggatcttcaatcatatatcatcccaacatgaataaataagactgattaagagtcctcaagctcttaaatccaagccccccttgatctttggatttacaaatcatctaagaaataagatgaggtgttctgttatttgcatcacttcctgagataaagtctctgcagaagctttcaatctcattacgaatagcaatcgtaataaaggttgcttcaagaacataagta

SEQ ID NO: 141387 - DNA, 460 bp, Glycine max
  unsure (1)..(460): unsure at all n locations
ntntattgattnnttttatgtcttgaccaagaattagagactaattctttgaaatattgagatttatttaaaagataatatctcccaaaaaaatgttattatattcaaactgattaatatgaacatgaaaaataaacaaaacgccttataaaatttagatttaggaaattatttttaattactttaggaaatgttattgatgtcacattcaaaaagtatgtgaaaggatgagtgataaatcataaaatttggctgctataagttatatcgataagattaaatttaatttttaactcaagaattaaggaaagctttcataaaaagagaaaaatcaaattttcatttgacatgataatggttagagcctaaaaataaaatataaattaaaaatatacatatcaaaatacatctaaattaattaaataaaaagtactaaattcattggaaactagaaaatgga

SEQ ID NO: 141388 - DNA, 371 bp, Glycine max
agcttgtacactacaacaccaacaaagtccaagaatccctccataacaatgatgctcaataccaacacgctctttcccaccttctctctgtctctcaggtatatttgcaattcatgcatattgatatgctcatatgcaaaaactagtttcaaattttattcttgcgtatggtgtttgtttattatatgcatagtttgtcaatcttccttaaaactttattttaatattaatggtatgtattgaatgtttttaatggttgagataggtagcactgacacagaagtgctgaatttattggcagttgaaaggagaagagatacttgagcaattcgaagcttctagttcttctgagccggtcgcttctataactc

SEQ ID NO: 141389 - DNA, 459 bp, Glycine max
  unsure (1)..(459): unsure at all n locations
ntgaaccatccgtcccataggagcccaactntgcaggatgaaggggtcaaacaaaattttgatgaagctacaaaggagaactttggtataggaatgggcttaattgtagaaaccatcacggggagatcctaggggttgccatgagcatggtgaaccattgttatcgaacacacatggcataagctgtagctttcaaatgggccttaaagatagctaaggacctcttttttttttttttttttgacattgtcatggaaacagattgcttgaagattgtttagacttggcacaacacaaggaagttttcaacttcctattttgaaggcatccttgatgattgtagagagctgcagagtagaggttttcatacgttcaaaatgtcttttgtaaagcatacaggaaacaaagtatatggttcgttagtgaatttagctcttggttttagggaacgttattgga

SEQ ID NO: 141390 - DNA, 423 bp, Glycine max
  unsure (1)..(423): unsure at all n locations
agcttctacaggtggtcagtaagaggaatagtgtaaggaattatggaagattaaaattcctagcaaaataacagtttttgcttggtggctaataaaggacagactaccaacaaggatgcatctgcataggagacaagtgcaactgcaggatctacgctgtcctttnttcagagaagctgaagaggagtcatctcatttgttcttccattgcgtcttcatccaaccaatttggtgggaatcgatgtcttggttgaatttacaaagtgcctttcctcttgggcctaaacaaaattttctacagcatattttcatccaagcagaaggtttaaggattaagagatggagatactggtggatggcagtaacttgggccatttggaaattcagaaacataattctgttttcaaatgcagaatttgatgc

SEQ ID NO: 141391 - DNA, 467 bp, Glycine max
  unsure (1)..(467): unsure at all n locations
ttntgtgtagtagtgataacaagttcgttattggtgacaaagagagggaaatcaaggaaagcactaacatggaaaatgaagtttgccaacgtgatgaataaatgatctagagcaaaaaggcactgaaggtaaacgacatggcccattcaaagaaggaacataagtaggtgctatcactagtgcaaaaaatgcatattagatcaactttttggatcagctgtatgagcactgattttttttaagaaatgcaataacaattttgtaaatgaaaagaatgaaatcggtctaaaaaatactaccttttggactcatggtttggattgtaagaaatttttgcatcgtattagaaacatgagtcatattaaaacaaatgttgaatcgttntanaacaaatttactatggaattntgtagcacatgattaacctangtcacactcagaaatatgattcaatatgacccctacat

SEQ ID NO: 141392 - DNA, 361 bp, Glycine max
  unsure (1)..(361): unsure at all n locations
agcttccttgataagctagagcttagctacacacacccatctaanaactaagctcacctccttgacaaaatacatgagaatacaaaaaaaaagtccctactacaaagactactcaaaatgccctgaaatacaaggctaaaaccccatactaatagaatggccaaaatacaaggcccaaaagaaggaaaaacctattctaatatttacaaagaagagtggatccaaccttgacccatgggctcaaaaatctaccctaaggttcatgagaaccctagggccttctttagtagctctagcccaagcctcttgaagtcttctatccaatacccttgnggggtaggattgcatcattctgcatatg

SEQ ID NO: 141393 - DNA, 450 bp, Glycine max
tggatttccttttagtagggaatctatccttcctaagatagagccaaacctagtcaccctcattaagaactagctcttttcttcctctattgcctttagttgaatacacctttgtttgattctctatttggttcttaaccctctcatgcatcttctttacaaattctgacctagattccccttctttatgtataaaagaagtgtccagtgggaggggaatgaggtctaacggtgttaggggattgaacccatagacaacctcaaaaggggactgcttggtggttctatgaacccccctgttgtaggcaaattctacatgaggaagatactcatcccaagacttatggttgcctttcagaagagcccttaagagggtggataaagacctattcactacctctgtttgcccatcagtttgtggatgacatgtggtagagaacagaagtttag

SEQ ID NO: 141394 - DNA, 247 bp, Glycine max
  unsure (1)..(247): unsure at all n locations
agctttgtgaatctcctgatctagcgccacccgatgatactcaaccattcgaagntgaatgtgatgctagtggaattggcattggagctgtcttgatacacaacataatgcctatagcttatttctcggagaaagtgggaagagccttgctgaattattgcacctatgacatagagatctatgccattgcgagagctcttgatcattggaatcattattttgcggctaatcactttatattggattc

SEQ ID NO: 141395 - DNA, 442 bp, Glycine max
  unsure (1)..(442): unsure at all n locations
taccatcctcagactgagggccgagatgacatgaccatttagccactgcacgacctttagaacgcgcgtgtcttatagcctataggaggctgagagaggattcttccattaatagagttgacttataacaacaattctcactctacgattcatatggctccttatgaagctttgtatggtagaaggtgtaggacacccctatgttggataaagcccggagaaggccttaccttacgaccggaagtggtacaacaaaccaccgagaaagtcaagttaatccaggacaggatgatgactgctcatagtaggcaaaaaagttatcatgataagaggaggaaagatctgaaatttgagggtggtgatcatgtattcttgagaatcactccgtggactggggttggtcgagcatngaaatcccgaaagctacaccttactttatcga

SEQ ID NO: 141396 - DNA, 371 bp, Glycine max
  unsure (1)..(371): unsure at all n locations
agcttatcgagaaaagaaattgtagaatgtttgtaaacaacattgttaagttcaactaaaaccctttgtagagcattattcccaagtgctgtaagaccaactgtaaaagaaaaaaaattaaacacttgacaatggatgcatgcactactatcactataccagctagcttcattcgtctctttcaagcatctatagcaattctttgcaatanaatcttgaaactaacacttggacagctagatctaaccgttgttgtcggagtgtgaccaaattaatggttatatttattatgaataattgaatattanaatactcttggcagtgcatacctacanagctcacttgtgggacaaaacattacgggtcttaat

SEQ ID NO: 141397 - DNA, 442 bp, Glycine max
gtgcttccacaaaatagtctcggccgaaagacgctgacatcttccggaaaggtgcagatgaccacattggtctctgcgtgtcatcggacttggggtctccgaataacgaggtgcggataaccgtaaagtgctctgcatgccatcgaactcttgggtcgctggatagcaagaaggtgacactaaatagtctcagtcggaagacgctcacagctccaggaagagtgcagattaccacattggtctctacgtgtcattggacttggggtgtccgaatgatgaggtgctaataaccgtaaggtgtctccgcattccaccggactcttgggccgctggatagcaaaattgtgagacaaaaattgtctcgaccggaagatgctgacatctctgtcaagggtgcagatgaccacattggtctccatgtttcatcagacttgggatctcc

SEQ ID NO: 141398 - DNA, 376 bp, Glycine max
aaaattactacatatcatcgtatgcttatacctacacgcatttttgcaacctccaattggctctatagcggaggtacaaaaactgcatcacgatcagctcactatacgaaaactataattcaactcaatcctcgccaatgtgtatggatgatctacgcaggagcatgaaacagacctcaacacacttgcatgatacttagagaacagtgtgttgcgcaaaaagtctgcgctatacttgcgccttaaccacaaggcgctatatccactgaacctgtactggttagaccaccacctacggctcgtagctcacacaactttagagcacctatgttgagtcctatccacccataacgcacgcttaagaatatcttaagcc

SEQ ID NO: 141399 - DNA, 370 bp, Glycine max
tgcaggatgattgggttttactttatgctgatgacgctacacaggatagctttggtataagactgggcttacttgtacaaaccatcgcggcgagatcctatgggttgccatgagcatggtgaaccattgatatcgaacacacatggcataagctgtagctgtcacatgggccttatagatagctagcgacctcttttttttttttttttttgacacttgcttggaaacgtatcgcttgaacattgtttagacttggcacaacactaggaagctttgaccttcctattgtgaaagcctccttgacgattgttgacagctgcacagtataagaattcatacgctcaataagtgttttgctcagcatacagga

SEQ ID NO: 141400 - DNA, 378 bp, Glycine max
agcttgggcatagcaaatgagaaaaatgagtgacaaatgtgaaagcaagagtcatttctagggtaaattgggtgttgaggggtcaaatcttgaatcggtagagttttcgccttacaatcactttgagcaagtctaaattaatgttatatactcgtttgagatgagaatttactccaaaattaccccattctcattttcacttctcaaaccttgaaaattcactcaattaatgggttttggatacctagatttggatttaccttgatctgaagctggtttttgcgttaaatacaatttatacatgatttacgacttgtaggatccaatttgagcaaaaatggatgtgggcaagaatggattcgaaatctgccctattat

SEQ ID NO: 141401 - DNA, 296 bp, Glycine max
ttatgttggggcccacatggatggtgcatgaatgtataatcattatcgctatatgcatgacctggaaatgatttggggcattcccttattcctgaaccacctgtgaaacagacagcccgacatacatcatgtctcgccacttggaggccttttgagccaaacattaacttttggccataaccttggcctaagatggaaatttccaaccttaccctccgaagagagaacaaacgaatcttcccaaacgaagcttcttttaccttgagttataagtgtcgagccagacaaccgattag

SEQ ID NO: 141402 - DNA, 365 bp, Glycine max
  unsure (1)..(365): unsure at all n locations
atctntatgttgngcaacactgaaatacagactaaaaaagcaaataaaaaaatatgctaaaggcgactgaagcaaaaagagacaaaagtcctccaaattttacaaggaaggcatagaagtgtaatgaggattaatgtataagacaaatggagtagagcccagcccaaatagttgaaatgaataaagtacaactaaggctctcaaggntcttactcaatataacccttaaacactctntgagcctttctgatcctttctttcatagccttcgtacccctgaccacgttacaagcccaacaaagcccatgtggatcaaggaaggactaattatgcttttgagtttggattctggaatagaacccaca

SEQ ID NO: 141403 - DNA, 321 bp, Glycine max
  unsure (1)..(321): unsure at all n locations
nttcatatgcaccaagaatagctcaatacacttatagaactctcagatacaatgataagaatgaactcatacttttgatgaaattccatattgagtgtattgtggaaacgacgcacttcatgtgatgtgcattgagcagatcttcattctacaacagatcttcttatactttagctattgattacttctcatggcttaaagttttactcttcatcagtgagcaatttgacttcttcattgcataacataaccagagacactttcgagccctcttttaagcattctcgccaatgatcctttctgaatgactcatgacaacac

SEQ ID NO: 141404 - DNA, 311 bp, Glycine max
  unsure (1)..(311): unsure at all n locations
agcttgtagaattcaccccaatttcgatgacctatgctaacttgctcccaaatctactcgataattcgatggtagccataaccccagccaaggttcctcaacctccatttttccgaggatactacttgaacacaacatgtgcttatcgtggatgagttctagggcattccattgagcattgtangaccctgaagcataaggtgcaaggtctaattgatgcgaggagaatcgcttgtgatttctgaaattgcaagcgacaccatacatggtgcaatttgaagggtgttgttagatgtctctaatgactcatt

SEQ ID NO: 141405 - DNA, 423 bp, Glycine max
  unsure (1)..(423): unsure at all n locations
nttcacanaatcattaccaaagagttntactctctgataatctattaccagaaggtactaatcgattactagtgttttaaaacattaagatttcaaatttcaagagttacaacttgtgtttaaacatttttaacttgtgtaatcgattacacaatacttgtaatcaagtattgtgttatcgattaccagtgtttctaaatgttttaattttcaaaattcaaaatgaagagttacatctgttgatgtgtggtaatcgattaccagtgactgatttcgaaaaatacatttccaaaagtcacaattactcaagtgacttgtttctgaagattctttcaaaagtcacaactttttaagtgactagttntaaagaaattgccaagagtcataaactntgacttgagttatcaagagattataagtatg

SEQ ID NO: 141406 - DNA, 397 bp, Glycine max
  unsure (1)..(397): unsure at all n locations
agcttgccacccagcttgcccaggcgagcaaggttgcttcctccagaagcaacaaccttctggaggaatcttctggagggcccaagtgggccttggtgctatttgcacccccatttttactaaatacacccctgcccttttttggtgattcttttttcgtaaagttacggaaacttacgaatttcgtaacgatacttattttctttccgtaatgttacagaaccttgcggattacataatcatcccctttttgacttacggaatgttacggaacctcactatttgtgcaacgatgcttccttttgatttccggtgtgtcacggaaccttacggattgcgcatcaatattttcttttgatttccgcacgtcacgaaatttcacaaatngcctaatgat

SEQ ID NO: 141407 - DNA, 465 bp, Glycine max
  unsure (1)..(465): unsure at all n locations
tgttagaactatcatcacatgacgctntattggcacagaacatgttgctttctaagcaacttgagattntaacagaaacactcggtaagctgccaactaaattgtctattggtcaacctacacactcttctgttttgcaggttataggttgtaccatctgtggtgaggctcatgaaatgggccaatgtattcccactaaagaaaacactcaagaaattcattatatgggaaatcaacaacgacaaaggtatactcaaggaggattttcaggcttccagcagggtccctataatcaacaaggacagtggaggacacaccctgncaaccagttcaacaaagactagaatgggccttcaaacagtccaatccaacaagggcctaacatattcaagaggactactaagctggaggagaccttgactcagttnttgcaggtaacaatgtcaaatcatanaagcactgagt

SEQ ID NO: 141408 - DNA, 418 bp, Glycine max
  unsure (1)..(418): unsure at all n locations
agcttatactcaataagaggatcccgctgcgcatatccccgtaaccccacggcttgctgaacaaattttagtgcctgcagatgttctttccacaggcgatcgatattgcttaagattaggaaccgctctgcttctttcatcaagcctgctgcttgttgctccacaatatcctatggggcagcattggttgtaataaaaaggtaaatttaaaaagaaataaatggtaaagaaaattatgtgaaaagacaaggccactgaaccaattcaagacgactcaatttttagacatgacacatgatggtaaaagtccaaccttatatagcacaaagttattacaagttgcactgaggtttgataaatccctctccccctttcccganaatgtataatcaattacttgatttaaatcacttatctc

SEQ ID NO: 141409 - DNA, 399 bp, Glycine max
  unsure (1)..(399): unsure at all n locations
tgcctanagaggtccaggaaggacaaggcagccgaaggaactagttccgctccggagtatgacagtcaccgctttaggagcgttgtacaccagcagcgcttcgaggccatcaagggatggtcgtttctccgggagcgacgcgtccagctcagggacgacgaatatactgacttccaggaggaaatagggcgccggcggtgggcatcactggttactcccatggccaagtttgacccagaaatagtccttgagttttatgccaatgcttggccaacagaggagggcgtgcgtgacatgagatcctgngtaaggggtcagtggatcccgtttgatgccgacgctatcggccaactcctaggatatccgttggtgttggaagagggccaggaatgtgagtat

SEQ ID NO: 141410 - DNA, 397 bp, Glycine max
agcttgctgctattcttgtatatgtgtactgagatattttccttgagctctgatgccaaaaatgatttatttgcatgttaaaacatagatttaaccttaaatttcacccaaatcatagttttctagcaaaagttacaaataaaataagtttaaggacctttagtaaaatgaaaatatgccccatatttggactgagagtgacaacagtatggactatttttattaacgttttgacctcaaaaatgagttttctatgtttgaaaatgtatggtagcgtataatatttgtgagaatccgactaacagagcaccaagagcactaaacataaggtatgagcgaaactgtgaagaactgagtcacaaagagattctattaccgtagatgacttaactttgga

SEQ ID NO: 141411 - DNA, 461 bp, Glycine max
  unsure (1)..(461): unsure at all n locations
tgataaagagattntgatagaagactntgaggccaaactattccaatataaaatgagattcttttaacaatttaactaagtccttatttgtgattttcttgatcttatttgttgacttggaacaatgtgtgctttcatcaagtaaattcttttggcatcatcaaaacctgcacgattcacatttatgtcactcaacctctaggttttgagatcaaaaggaaggaattaatggtgtacaagttgaataaggccttgtatggtcttaaacaagcacctagagcctggaatagaaggattgactcatttttcatttagaatgaattcaccaagtacacaatggaatatgatgtatatgtgaaaaggaaaactaagggaatacttttgatttgcctatatgctgatgatttgcttgtgactggcagcaatagtgaagaaatagagaaattcaaagttgagatgat

SEQ ID NO: 141412 - DNA, 347 bp, Glycine max
  unsure (1)..(347): unsure at all n locations
agcttctcctattctgtgactcttccgttggaaaatcctgcttgcttctcagattcgctgtgagttatcactttatttgcttctcctaatctctccttctgttcacttcctttgtttctttgtttcgtttcaggatgactcctatgtcgacagctacgtaagtactattggagttgatttcgtaattatcactcttcttctcttttggtatttctatttatggcccaacactcattcttatttattttcgnaaatcaaaccatgggcttggaagggaaaccgccagctgcagattgtagtattctaagtagtggcgttgccacgatcatatagcagtgtaggacttt

SEQ ID NO: 141413 - DNA, 445 bp, Glycine max
  unsure (1)..(445): unsure at all n locations
tcagggtataaagaaacttcatgagcctttgtttttaagctataattcgtattgctcgcttagcgcacagccgcccttatcgagtcaatataacgattggttttaacaaagccttgtgcttagcccaacctcgcgctaagcccaattccaaattttcaaatcccagagagttttggggcttagtgcagtaggcctgcgcttagcactgtctgcaactcaaaattgttctgcaatttgcgcttagcatgagatgtcaggcttagcgctaaatcaagctctaacttacagggatagtccangcttagcgcatggaatgcgctaagcataattctatgagtttcaaaaatagtgaaggattggcgcttagcgcatcttgtcgctaagcccaattcatgaaagttcaattccagggaggaaattgagcttagcgcangacagcgcgctt

SEQ ID NO: 141414 - DNA, 387 bp, Glycine max
  unsure (1)..(387): unsure at all n locations
tttctttatgattcattctatgcacccatagaggtccacattgtgtgtagagcatttttattctcgttgtgtgtactttttatacgccctgtcgacgtgcttaagccattttacttaagtcggttctcgcttaacttaaaaataaaatagacttccaccgaacgtgtgaattgattcatatctgacatcatattgagtttataagcatcttcttgaaaagttgaacaagcataagacatcatattgtaaatcaaacaagtactaaaactatgcaaccatccgtgtttcatactttcagtatcgtgtttaaattatgatgcatatcanatcatcatgaaattcctccacttttgaaagcaccaatgaaatgttcgtctcatggtcagt

SEQ ID NO: 141415 - DNA, 294 bp, Glycine max
cccgcctcatgcctacgatagcaacactctaatacttccataacgttagtagttatccataaacctcgcttagtttgcctatgagcataaactagagtgtgatgctacatagatttaccctgcaccacgccattagttagatgagtatgcgtaaccacatagaaccactgattcggaacatgatatacatatgacgatgagttattctgatcctagatataattaggatccccgttgtacatcggtggctcatgcactttcgacttagacaccaactatggatgagtcgattac

SEQ ID NO: 141416 - DNA, 315 bp, Glycine max
agcttctattattagctgaaccattgtatctatacacacaagctgagtgttattcagaccattagagtttatctcttttatcttagtgagagtgattctcctaaattcttgagtgattcaagaacaccctggctgtatcaaaggactttcacaacctttgtgtgttgccctcgctggaaagagtgattctttccttcctatcatctccacccttgttctttcaaaccacaattccagaaaatccacctctgcccaaaattatcttgtgaccataactcccatgttacacactcagattaagtgattcttgagcct

SEQ ID NO: 141417 - DNA, 449 bp, Glycine max
  unsure (1)..(449): unsure at all n locations
ctaacatgccgccttactgccgcaagcctctttagtctctacataacgttgcgaatgtcacaagatgcacttgggaaactatcgactgacctggctattgtgcaacctgcacactctaatgatttgatgctatacggcgcaccatatgaggagaggctcatgacttgagcctgtggattatcactaacgataacactcaagagattcattatatgggaggtctgctgcgactcctgtattctgccggatgattgttaggcgtccagcagggtacctataatcaacacagacagtggaggacacaccctctcaaccagatcgacgaagactataatgggccttcactctgtccactattacaaggggctaacatactcaagaggactactaggctggatgagaccttgacttcagtnttgcaggtagcaatggcaaatcataacagcact

SEQ ID NO: 141418 - DNA, 361 bp, Glycine max
  unsure (1)..(361): unsure at all n locations
agcttcagactgctcaattgctccaggctgctgcatggaagggcaaaggtctgtatggtggtcagcagaggagcacaaaccacaaacccttgcgacaggtacagatttctgattcaaggccaactgggttaccaagttgaccaacgcatccagtttgccttcaagcttcttagtttcagatgatgcagatgggtttgtagctacctcatgcactcctctaatgattatggcatcatttctggcgctaaactgctgngagttggaggccatcttctcaattaaatttctggcttcagcaagagtcatgtctccaaaggctccaccactggcagcatctatcatacttctctccatattactg

SEQ ID NO: 141419 - DNA, 344 bp, Glycine max
tgaatctctctcaactgcttcttcttcttctttgtaccaaaagttttctgaagatgtctggctctccaaaccttgaaaacttgcgctattcatcttttcattctcttctgcctttgccaaaaagaattcgccaaggactaaccgcctgaactcttgatgtgcctctcttctcctttatacaaaagaacaaaggactaaccgcctgaattcttttgtgtctcccttatgccttgacaaagaactctgaacgacacaccctgagaattcttttgattattgccattccctaatacaaaactgtcaaaggactagccgcttgacaattgttttcgatccccattcac

SEQ ID NO: 141420 - DNA, 402 bp, Glycine max
  unsure (1)..(402): unsure at all n locations
agcttaccattataaagaagcttgtgaggaagagtttccagccaaaccaacaagttctgttattcaactcaaggctcanattgtttcatggcaagatcaagtctataacagccgtaacttttaataaataaataaataaataaataagtaaaaataaaataaaataatataattaggtcataaatttccactatataaatcaaatgttaacctagagcagcttttacaaaacacttatgtccctttctcttcttctgacgcacaagaatcctaacagagcaactggaggaggagctctagagagcaccagagacgccacaattgctaatggagaacgatcgagggactacatcgaggtaagggatgagttattcacgcttgnggattagaattaacatgtat

SEQ ID NO: 141421 - DNA, 451 bp, Glycine max
  unsure (1)..(451): unsure at all n locations
tgtaatcgattacacacatactgtaatcgattaccataggagttnttcagaanacattctcaatagtcacatctttttgtgtggttcttgaatggctatcataggcctatatatatgtgacttgagacacgaatttgaaaagagtttttcagaacaaaaaggtctgatcctcttataaagcaaaatcgcgttatcctcttacaaattccttggccaaattacttgtgattcaataaggaattatttgagtgctcaaattgttcaatctatctctttcaagagagattacttcttttcttcttctttattctgaagagggattaagagaccgagggtctcttgttgtgaaagaattctaaacacaaaggaagggtagtccttgtgtgtttagaactcgtacaagaaatttacaagatagtggaactctcaagcgggttgcttggggactgga

SEQ ID NO: 141422 - DNA, 563 bp, Glycine max
  unsure (1)..(563): unsure at all n locations
gctcgcctcactcacctcnacctntcatactccgagactcctatacatacgtagctgtaactatagtcacacgactctgctcctaagcctcgcaccgcacnntttgtttgcatgcatgcacatacaggccattcgagtcggcacccgtgattctgtatatctgcctgnatgcatgcaagcttgttttatattctcaccacttgagatgatgacaacccttgtatctagaaacacatacccatactctttccctagtcgatcactcacttaataatacatattctcgccctttgattttgagtttatgcttcacttcgaattagatcaattacttacgcgagtccttgatttaatccctatttccttccccctttggcatcgacataaagcacaagggcgccaccaatcttaaacatacatacatgaccaatctttgcaatatagtcgttgaaagaatatcttgccgactagcaaaggactgcgtatgcaccaaaatattgtccaacagtcattgagatgacggaattgtggccatcattatagtgcaaaagaactaattatcg

SEQ ID NO: 141423 - DNA, 559 bp, Glycine max
  unsure (1)..(559): unsure at all n locations
ctccctctccctctaccgctgtccgtactcgtcttgagcttgacctctatcctcactctcctatcccccctcccgccnccttgattgattcttgcgtggcgtgacctatacatactcaagctctagcatgaagacagtacctcagatggagactttcatcttgatgatactacacaattcgcgataggttttttataagcagagtggctcacgagaatctggtcctaaatgtttccccaagcgcatgcaatctctgggaatccattaccacaatagtgtcgtcgcttactactagcagactgcgcttaacactgtttcgcactgaatgtacgtcgtccctgtggacttacaatgagatgtcatgcataacgctgtgtcggtctttcacttacagtgacagagaacgcttaactcctggttcgctcgtaaacaggctcatactattccatagactctcggtgagacggactcactgcatcgtggacgggtacccttgctggctatgaaatcccatgagaggttctcctagacgggtctgcgctttaaagtgctctacatc

SEQ ID NO: 141424 - DNA, 396 bp, Glycine max
agcttgtagaattatggggtacccatcacatgtggtactaggtggcggtcgggcgatggtgcacaacaagctttccacatacacaatgcgcgcataaacccaccatcccctgttgcccacctccaactgagctcacgtactcccacgtagcccatatcctcgtttctctcaacaccgggtccccatcaatcctctcaagcttccacaacatccaagcaaaacaacattcaaacagcacaagctatcacagccaagcaaaacagagccaaggcagaaaactctgctcaacacatcaaccaaaatcacagcttttctcacgtagagaccacagtaacaattccttcgatccaattcgttaaccgctggatcgactccaaaattatactggaagtctat

SEQ ID NO: 141425 - DNA, 360 bp, Glycine max
cttacgaccacgctctctccactattttactctcaaatgatctacattcaccatcccctttgtacttacacccttccattgtctatacacaagacacattgatcttccactggtgatgaatatgcaaggctagacactccatctatccaaggagctactccaccactggctaaatatatatatggtctattcatgctactatctgcgagagtggatcatattcttgaatgctagtcttgataatcatgaatatgaatatgctgaccaatgctaatgactcacgttatggattcatttgcttcacttcgaagatagacacaaagtgtttggatgaactctcacctaatttgagatctcaat

SEQ ID NO: 141426 - DNA, 407 bp, Glycine max
  unsure (1)..(407): unsure at all n locations
agcttctatcagtgcaacaaagaccttagtttgttgatatggcaaatttcaaggctgtaggagtaattttgaaggaatgaattggcactagaagaagaaattctttaaggatgctaatcattatgtgcgggataatcctcacttgctcaagattagagcaaataaattgatataagatgtgtcattttggagcattctttggcattatcacaattcaccttatggnggccattttaatggagaaagaagtgctgccaaggttctccaagcangaattttgtggcccatgctatataaagatgcacatttgtatgtgacacaatatgacaaatgccacagaaaatgaggaatttcaagaacgaatgagatggccttgaacaacattcttgaagntgaagttttgactg

SEQ ID NO: 141427 - DNA, 287 bp, Glycine max
  unsure (1)..(287): unsure at all n locations
tatgcgtgaatctgggacctaccatggcggaagtctccacagaggccattgcctccctcgcccagaattatgaccagtcgttcaggtgcttcacttttgtggacttacagctatcacccatggtggaagaatctgaagagatcctatgatgccctctagggggaaggaaaccatacctcttctcangattctatgcctctttagctagaatttctaagatagtccatatctcggcgcaggaattacaccacagaaagcaagtcgaaaatggagagagtggagtaccg

SEQ ID NO: 141428 - DNA, 380 bp, Glycine max
  unsure (1)..(380): unsure at all n locations
agcttcggaataaagtgatgaggtacaagccctaaaggcagagcttgaaagagcccgggtagtcaaagagaagttcaagtccatagccatcanagtctgaagagagtatgatgaactaagggacgtcaatatggccaccgctgaagccttggaatgagaaaccatgaaggcccgaaaggaagaacatgaccaaaacaaagttntgaggggctttatagggcagcaatagtgagctcaagctccaaagaggtgaaaggaatcatcacggntcaaaggcatgatcttgaaggacgagctaaaggcttgccttangtcgaaaagaaatttgtcccaacagttaaagtgagactgaanggaatatgtgggccatcatcgatgag

SEQ ID NO: 141429 - DNA, 432 bp, Glycine max
  unsure (1)..(432): unsure at all n locations
tgtaatcgattgcacacatactgtaatcgattaccagaggagttnttcagaaaatattctcaacagtcacatctttttgtgtggttcttgaatggctatcataggcctatatatatgtgacttgagacatgaatttgataagagtttttcagaacaaaaaggtcttatcctcttataaagcaaaatcgttttatcctcttacaaattccttggccaaattacttgtgattcaataaggaattatttgagtgctcaaattgttcaatctatctctttcaagagagatttcttcttttcttcttcttcattctaaaaagggattaagagaccgagggtctcttgttgtgaaagaattctaaacacacaggaagggttgtccttgtgtgtttagaacttgtaaaaggaatttacaagatagtggaactctcaagc

SEQ ID NO: 141430 - DNA, 370 bp, Glycine max
  unsure (1)..(370): unsure at all n locations
agcttgcagactataccttcgaccaaacacggccgtgtttctgtctcggcccggatttaaagcgggttgcaacaccggctccgcttccctaactgtactggaggcggntgccgtggctttgtcctctatggttntctggagttttaacatgacctccgagatggaagccatttgatcttttaaggccgatagatcgaccttcatctgttcctgctcgccctcttcattatccanttttctggattgagtgttataggggtgccttggtgttttcttagttatgatgaaattcctaaagaaataaacaacggtgagtatgccaccaaaacatgagtatgcaaatggatgatcggagcacttggatccaccc

SEQ ID NO: 141431 - DNA, 458 bp, Glycine max
  unsure (1)..(458): unsure at all n locations
tcatcatgaatcaacaatgattcanaggtgttntgatgataacaatgatgacaacaaaagatgatgacaaaggtgatgaacaaaaagctcaagtgaatcaaagaacatctcaagtaaatcaagaacaagtcaagagttcaagaatcaaggagaattcacgactcaagaagaaagcctagaatcaagaatcaagactctctcaagaatcaagatcaagattcaagactcaagattcaagaatgaagaaaagactcaatcaagataagtattaaaaagttttttcaaaactttgaataacacatgagtttttgacaaaacctttaccanagagtttttactctctggtaatcaattaccagtagcaaaatgagtttgaaaaaagttttcaaactgaatttacaacgttccaaatattttcaaaaggctgtaatcgattacaatgttttggtaatcgatta

SEQ ID NO: 141432 - DNA, 349 bp, Glycine max
agcttctataaaggttcttatggactgcttgtctcatcattccagtaataccttcacccacaatattgaaaagcaagggagctaggggatccccttgcctcaaacccctagaaggattaaactccttagaagggctaccatttatcaaaattgatatcgatgctgagtggaggcaagctgatatccaagatctccattttggacaaaaacccattctgcacagcatgtaatccagaaaagaccaagaaactgaatcgtaggccttttcaaagtccaccttaagaatcatcacaggtttcttatttctccttgcttcctcaaccacttcattaaggatcagaataccatg

SEQ ID NO: 141433 - DNA, 432 bp, Glycine max
  unsure (1)..(432): unsure at all n locations
tatcaaccaaatacccacgttntcaaactcaaagtatattacaattacaaaacataaataagaaagatcttcacatctataaaaagacttaatgaacattaacagaaataaaacctaccagaacctgtaagtgaaagaaaatatacagacccatgtaaactatagaacatagatctaaccttttaagtggaaaataacataaacgtagaagtatgcaaatgaagatttaccaaatgaattcagtaatagcaactttacctgaaagtgtaaactgttaatgcagcacccaatccgccaaaacaatgggaccatgatcctctggaactctaccatgttaataacttccaaaatttcttccagttcacccagaaacatcacctctttctgactatttgttgctggccaatatttcaacaagccgcttatcacaat

SEQ ID NO: 141434 - DNA, 406 bp, Glycine max
  unsure (1)..(406): unsure at all n locations
agcttgtcaaggccctaagcatggacaagtgttgttcagtgttgagagtggtagccttgacaagtgttgtccgggttgcttctgtcaagttgtctggggtggacaccctttttgatgcaagaggctccaagaggattgggctagagctgctgaagaaggtcctaaggttctcatgaactttaggatagatttttgagcccatgggccaaggttgggtccaattatctttgtacgtattagattacgatgtcactatatttggttcttgtaattagggctccataatgtaggtagggtaccctagaaatataggatttttcagcccttgtattttagggcacctagactagttnttgtattaagggtagttttgtaatttcacatgcactaagtgaatatttaatgt

SEQ ID NO: 141435 - DNA, 451 bp, Glycine max
  unsure (1)..(451): unsure at all n locations
tntaaggccctcaaatgactggatggcaacaccccacttaaatgattatgaaagagggataaatatgtgagattcttggacaaattaaaagaaggaagtggacctgtaaagttattggaagacaagtctagataaacaagttggctgagttctgagaatgaactaggaagtgttccattaaattggcagtaagctagatcaattgtagataactgcttcatattggaaattgcacctggaagctttcctgagaaatttgtatagctaagattcatgtgatgaagagaaccatgttgtgggaagtttggcaaagaacccccaagatcttggttgtctgagatgtcaaggaccttcaacgttgatatttggaatatatcttttggaaaagaaccattcaagccacaacttcttaactctagtgtgactaaattggagaaattacaaaggattc

SEQ ID NO: 141436 - DNA, 410 bp, Glycine max
agcttgctgctattcctgtatatgtgtactgagatattttccttgagctttgatgccaaaaatgatttatttgcatgttaaaacatagatttaaccttaaatttcacccaaatcatagttttctagcaaaagttacaaataaaataagtttaaggacctttagtaaaatgaaaatttgccccaaatttggactgagagtgacaacagtatggactatttttattaaggttttgacctcaaaaatgagttttttaggtttgaaaatgtagggtagcgtataatatttgtgaaaatccgactaacagagcaccaagagcactaaacataagttaggagcgaaactgttgaaaactgagtcacaaagagatttttttaccgtagatgactctaacttggaatccaagtctctg

SEQ ID NO: 141437 - DNA, 460 bp, Glycine max
  unsure (1)..(460): unsure at all n locations
tgataaagaaattntgatagaagactttgaggccaaactattccaataaaaaatgagattcttttaacaatttaactaagtccttatttgtgattttcttgatcttatttgttgacttggaacaatgtgtgctttcatcaagtaaattcttttggcatcatcaaaacctgcacgattcacatttatgtcactcaacctctaggttttgagatcaaaaggaaggaattaatggtgtacaagttgaataaggccttgtatggtcttaaacaagcacctagagcctggaatagaaggattgactcatttttcatttagaatgaattcaccaagtacacaatggaatatgatgtatatgtgaaaaggaaaactaagggaatacttttgatttgcctatatgctgatgatttgcttgtgactggcagcaatagtgaagaaatagagaaattcaaagttgagatga

SEQ ID NO: 141438 - DNA, 411 bp, Glycine max
agcttcttcagaccatgatactctaggacctcaggaaagcaaaatgttatgaattcaacttggttgaatcaactcaattgttagatagttgtgccggtataatgcttcatagtgctcttttgcaaaccatggcataaatttgggaggggatgagtgttttggagattccccctttgtagatcacccaacaactttctttctcttcttcttcattttctcctctatgagctttgttttcttctctttttaaggcttaaggttaaagggagcattgttgattgcaaccctcttaatatgtttccttctaggttggtctaacatggtgtatgggaagaagaaagtgatgggttgaaggaattacggaagaagaaagggatcggaaaaaggggtacttagcattcccaaaaactt

SEQ ID NO: 141439 - DNA, 463 bp, Glycine max
  unsure (1)..(463): unsure at all n locations
ttgatctaccaccaccgccgccaccatcattntagttntctattatttaattttactagtactttgttttctagccgtgtatttggctatattatgacatttggataatttagtatttctttatttgcatggtttgattgaacaattatgaattatgttatatgactatgtggtttttatatatttgatctattcatgtttcttccttcatgattggcttatattcttcaatgtatgtcttgtgaatgattaatagtatatgtttgtcctatacttgttacgcactttggctttttgttgatgccaaagggggagagaaatagggattaaatcaagaactcacataagtaattaacttaatttcaagtgaagcatanactcaaaaaacacaggcggagaatttaagtgagtgttcgactaggacaaaatgtgtgtatgaatttcttgatttcagggttatcat

SEQ ID NO: 141440 - DNA, 406 bp, Glycine max
agcttgcattattgatggagaaaagggaacaaccatgaatggacaaagtaatttagctgctactaactctgtttttcacttaagcaaatcaatttctagtgatttttaatcatcgaaaatgaatcttataaaattactgcttcatcatcatttagtggtgctatttgatggcaataactaaaaacattaacggaatataagtttaaaagactaatcacaattttgtttgggaactaaaaataaaaacctgaagaaatccagacataataaacataatctaccccaacttatccaaaatacattacattctatgttctataatcccttttcctttttttaagatttttttaaaaatattatattacaaaaagtatatattgataaagcattcttttttttcaatttt

SEQ ID NO: 141441 - DNA, 388 bp, Glycine max
tcgcgatgatggtcatgatgactacgggggatgacgactcctgtgaggaacacacagctctactgagtcagagaacatctcaagttattctggatcatgtctagagttcgtgattcaaggagaattcgcgtgtccagaagaaagcctagactcaagaatctagagtctctcaagaatcaagatcacgattcatgactcatgattctagaatgatgaatagactctttcccgatcagtattaacgagtttttgtcgaactttgaatagcacatgagtgtttgacagaacctttaccagcgtagtttgactctatggcgctcaattaccagcagcacaatgagctcgaaaaaagttttcagactgaatttacaacgctccaaatattttc

SEQ ID NO: 141442 - DNA, 318 bp, Glycine max
agcttatatgcaatgtggtaccatgtcagtgaataacctcgtcgggcgcctaggagtacatgacaagacaaaccacacaataagtagtcaagtcactctcactaggtaatatcatagggagaccagtcagggtcacagtgttttgcgagaatgatccaaccatatgggatcaacataggcttaaaggagcactcaaaccgtgtaacccccaaggcctacactccgaagagttcgtcagggcctctccctcctgattcaggtccaacccagaaaaattttagcacacagactctatctatgaactgtacaaaacacact

SEQ ID NO: 141443 - DNA, 165 bp, Glycine max
tcttatccaacgctcatcttggtggagaagctccttcttccatggcttattccctagtggatggtgcctcctctcacctgatctactttgccttccgctatatctccatggcggaaaatcgccattaaaggacctcatcgaagctcatggaaccatcctacatag

SEQ ID NO: 141444 - DNA, 394 bp, Glycine max
  unsure (1)..(394): unsure at all n locations
tataaagctgtttctggttgtatttaagtcctaagctatagcttctttcctcatgtaaccctgttcagacttgttatatatatatatatatatatatatatatatatatatatatatatatatatatatatatatatatatatatgggtttgctaatgcactcacaccatttttttagtatgagtacattagcaatcaacaccaaanattttaactaaaaaatcaatcacctctcttatttttcaaaatttaatgtagggatatcctacatttgttccaagctcgacacatctgatctatatgctcgagcttgagggggagtgttgaaatatgataagttcccattggaaatgatctgttcctaattctactactgtttcaatgaaattactcg

SEQ ID NO: 141445 - DNA, 330 bp, Glycine max
tagctggtccttgtttgcttcttcacacacctctctctctctctctctcatgcactccatatatcggatcctagatacacaaacaaagaaagggctataccatatgagggatatgaatgaaagaaagtctatagcgcagtgtcatttttttggattagaaatatttccccaagctgaacgagaagcccgccatgccacggctgtagatatccgttttaatatgaaaacattcccgtggggctttcataagaacaatgagcccttcataatctatgagagaaagcacaactcatcgaagctcgatcattacctatactatcttgtttatat

SEQ ID NO: 141446 - DNA, 229 bp, Glycine max
  unsure (1)..(229): unsure at all n locations
gctttgatgccagctatgaggtatgtgcatgtttgaacagacatttatgcttcgcctatacccccctccttgttctctagcgcaagttactcctttgacaagtactgggagctggagtaaaatgatgacatgccccttagctggactgacagcgactacagtctggactatttttagtcacgacncgacctcttaaaggacctttatatgattgtaaatgcagggtagc

SEQ ID NO: 141447 - DNA, 407 bp, Glycine max
  unsure (1)..(407): unsure at all n locations
atgatataagactttgaggccaaactatatccaatatcanaatgaggaatcttttaacaatttaactaagtccttatttgtgattttcttgatcttatttggtgacttggaacaatgtgtgctttcatcacgtaaattcttttggcctcatcagaacctgcacgattcacatttatgtcactcctcctctaggttgtgagatcacaaggagggatttaaaggcgtacacgtcgaataaagccttgtatggtcttagaccagcacctacagcctggaatataaggattgactcagtttacattgacaatgacttcaccaactacacagtggaatatgatgtgtatgagaaaaggataactacgggaatacttttgatctgcctatatgcttatgatttgcttgtgact

SEQ ID NO: 141448 - DNA, 378 bp, Glycine max
agcttataccagcccaatcccccaaattttttaatccgagctgggaattctctcccgactcaagtaaaaggaccacctgcaacagaaagagcgccggcccaacgcacggctccagccgctccccggccagttaataatacagcccccgacgcgacctataaatatgcacagcacccgcccccgaaagataacttctcccctattcccatggcatactccgagttatggccttcattattggagaatcatttggtggtggccatacccgggaaggtcttccagccaccctaccccaagtggtacgacccgggtgccaagtgtgtgtaccatagtggagctcccggacacaatattgactcctgcatcccgttcaagtat

SEQ ID NO: 141449 - DNA, 457 bp, Glycine max
  unsure (1)..(457): unsure at all n locations
tccattgttgagttgttgcttcccttgtcacgctctaattcactccccacaagtaagtgcaatttcccttggttatttggctctccattgatgtgttttggtgctttagttgctcatttttttgcaaaattcgtgaagcaattcgcatctgaatccatgcttgttttgttgaattgagggtttgtgtgagaaggcattatgcctatgttgtattctgaagcaatggggcatgccacattgtccccattctcttgcaatttgagtccgaacgtgcgccccccaagtgctcggtgaagtgccccaatgatatatgaatatgattttgcacaattgggatggtgggactgttttatatatgtagagacagcataagagattcaaaatatgtgcccgaatgcaatttcaagcttatgaacccanaccttttatcttcaatgcaagaagacatactcatagc

SEQ ID NO: 141450 - DNA, 305 bp, Glycine max
agctttgatagtaagtttaattgaataaattatactcactatcacaaaaatggtcttctacgacgcacgttttacgacggttgtacaaaaaccgatgtcataagtaaagtagtgacatttttgtaaataacttaaaaattttaaagatggttcttatcaaaccagtctttgaaaaggaattaccacatcagttcttctacaaccgacgtagaatgcgaagcttaaaaatgcgaacgggctctctctcactctctattatatcctctttataatctctctcctcctaaaatctagaaaaccctaat

SEQ ID NO: 141451 - DNA, 427 bp, Glycine max
  unsure (1)..(427): unsure at all n locations
tctctgcctcggntgaaacattggcggtgacatgtgacctcatgtggccacccaaggatcttccacaagggaagctcttgctgcagaacttgcacatgtgtttcacttcttgatcttcttccattggattgatttttcaagatcacacacacgcacggatcagcaaagaaagcaaaattaaccacactttcttgatcaccaccaacacaagagaaatcgatcacaagggaaaaacagcaacaccccagatcagcatcacatcttgaaagtggttggagagaagaataataccgagaagaagaagaagagaaaccccatgtctgaaaattgcaaggtggtgagtgcaagatctaacgcagaaaacaagaggaaaagaaaagggacaagagaacgtgtagtagtagcacaaactattatatatactata

SEQ ID NO: 141452 - DNA, 394 bp, Glycine max
  unsure (1)..(394): unsure at all n locations
agctntttggagtagaaacataggaccaactcattntatttcaaaaagaaagtcgtatctagtcaaggtctgagagaccatacaagtttcctaacgatttctaattatgtgggccattaagtctatcatatgctgacaatagccgagaagcccatgaatctcttcgggggcggagtaagtgtctgccatcgccttggccttggctaacaagcggngaagttcttgactcccgttcaaggtaagagcaaaccgatccatccacatggttgcctcttggtgtaaagagtcgatcacccttcctctagcctctttttccgcgtatacttgagcatactcgtccgcgattctatgctcgtgggccgtggctagacctaactcttcttggtacttggcg

SEQ ID NO: 141453 - DNA, 335 bp, Glycine max
  unsure (1)..(335): unsure at all n locations
agctntntattttcagtagatgaagatgaattcgtggccacctcatggactcctctaaggacaataacatcatttcttgctctgaattgttgggagttggaagccatcttctcaatcaaattcctagcctcaacaggggtcatatcaccaagagctctaccactggcagcatcaatcatactcctctccatgttactaagtccctcatagaaatattgaagaaagagttgctcagaaatctggtggtgaggacaacttgcacacaatttcttgaatctttcccagtactcatacaagctctctccactaagttgcctgatgcctgaaatgtcttt

SEQ ID NO: 141454 - DNA, 439 bp, Glycine max
  unsure (1)..(439): unsure at all n locations
ntaacctcatcgtctctcacagtctttagaattgggagccaatccaatccttgtgttcggactctcagccacttatgatagccgtcgatgatcccattactgcttcccctaagctctatgtcctttcttcatgccgcatcccatgccttgcgaactccttggagtaccctcacgttgtggtcaccgaaaccccgtgcgatgaaaggcgtgatgctttcgtctgatggcactcctctcatggggtagccaagctgtcttatggtgaggacgggattataattaatacaaccccttgttccatcaagggaacatttggacatccttcgcatgaagatagaatcctgattcttccttccttctagcgagggaacaaattaatagacgcccctccatgctagccaagagttggtcccaattcgcctttcctttttcgatgcac

SEQ ID NO: 141455 - DNA, 397 bp, Glycine max
  unsure (1)..(397): unsure at all n locations
agctttaagccaattcatacgacaataactttntactcggatgtctgattgagtcccgtaatataacgaaacgctcgaaattgaatgttgaagctctaaccctattcaaacaacaataacgttttactcggatgtctgaatgagtctcgtaatatatcgacacgctcgaaattgaatgttgaagctctaagcctattcaaacaacaataacgttttactcggatgtccgattgagtgacgtaatatatcgagacggtcgaaattgaatggtgaacctatgagccaatttaaacgacaataactttttactcggatgtctgattgagtcccgtatatatcgagacgctcaaaatgaatgttgacctctgagccattcaagacaatacttttactcgat

SEQ ID NO: 141456 - DNA, 427 bp, Glycine max
taaacattcaatttcgagcgtctccatatattacgcgactcaatcagacatctgagtaaaaagttattgtcgtttgaattggctcagaggttcaacattcaattttgagcatctcgatatattacgggactcaatcagacatccgagtaaaaagttattgtcgtttgaaatggctcagagcttcaacattcaatttcgagcgtctcgatatattacgggactcaatcagacatccgagtaaaaagatattgtcgtttgaattggctcagaggttcaacatataatttggagcgtctcgatatattatgggactaaatcagacatccgagtaaaaagttattgtcgtgtgaattggctcataggttgaacattcaatttcgagcgtctcgatatattatgggactcaatcagacatccgagtaaaaag

SEQ ID NO: 141457 - DNA, 413 bp, Glycine max
  unsure (1)..(413): unsure at all n locations
agcttggttcaaccctataatccaaggaatggcaattctaatcgccaatacttcaacaacatctcatagggatgaatgactcaggcatactttaagcttatgcacggaaaatgtaattatgaaattgagatgcccgaagaaacaccatttcctagttaaccatgcattaggtaccatgttcaattattctgttttgttggtgtgtgttttttttttttttagaaatgggtttatgatcccaacatggttggctcatggtgcctaacacatgcaactaagaatgtagtgtgaagtttcacgcttccccttttttgtttntgttttgtagaggaaaacgcaaggatgagcaaacatganaacaaatggtatgcaattttgcagatcanaaagtttgttgaacgcatatgcatgat

SEQ ID NO: 141458 - DNA, 333 bp, Glycine max
tcaaccttaggccatcatttctgctccaaatcgcgaaaggagagcattcttggagtcgtgaagtgcgtggctacgagtgggacttcgaaaattcaggtttgggtggacttctttctcctttaattttcgtgggtatggggtttggggagatatgatgggtagtcttgctaggtttctgctgtgtgatgattatttgtgaagacatttgttgaaagcttgttgaaattgccatgtttggatgagttagacatacccattctgttttagggtttttgtgatgatgcttgtgatgtttatatgctgaaattgcccatggaaaactgctagagatga

SEQ ID NO: 141459 - DNA, 405 bp, Glycine max
agcttcttagtttcagatgatccagatgggtttgtagctacctcatgcactcctctaatgactatggcatcatttctggcgctaaactgctgggagttggaggccatcttctcaattaaatttctggcttcagcaggagtcatgtctccaagggctccaccactggcagcatctatcatacttctctccatattactgagtccttcataaaaatattggagaagaagctgttctgaaatctgatggtgggggcaactggcacatagtttcttatatctctcccagtactcatacaggctctctccactgagttgtctaatacctgagatattcttcctgatggctgtggtcctggaagcagggaaatttttttctaagaatactctcttaaggtcatcccagctc

SEQ ID NO: 141460 - DNA, 388 bp, Glycine max
  unsure (1)..(388): unsure at all n locations
agcttgctctatatttacattgatgcttatgggaagaggttgtatgccatttttgttttaagagtagtgtcccactggtaaaactaactttccaaatgtttgccttcgcaggaaatggccccaaggaagcttgcctcatagaggtctaggaaggacaaggcagccgaaggaactagttccgctccggagtatgacagtcaccgctttaagagcgccgtacaccagcagcgcttcgaggccatcaagggatggtcgtttctccgggagcgacgcgtccagctcaagacgttaaagaagcgctactaggaggcaacctagtaccttttaaatttctgcctgctatttgatcactctttatagtangacgcacctaggtgctcatgatcct

SEQ ID NO: 141461 - DNA, 458 bp, Glycine max
  unsure (1)..(458): unsure at all n locations
tgcctaattaacctagaattgagaganaatgattattaaacacaaaatatgaaaataataagtatttattacctatacttaacagaaaatacttataacattacaaaataaccataaattgggagagtttgatacaatttatacaagttttatacacaaaagttagtcattttcaccgactaacaactcccccaaatttacagttttgcttgtcctcaagcaaaaagagaacaactcactagtgctcgagtgacaatgacatgcagtgactatgtacaaaggtgtatgctacaaagtgactgattgcatgataagagaatggagtaaaatgccctaatcacttgtctttcacaaggtatgcagttatccaaagagaagaataaattgtaacctgaacagatagatgaagttaggaataagacagatatcaagggaagtagcttacaccatagtctcat

SEQ ID NO: 141462 - DNA, 347 bp, Glycine max
  unsure (1)..(347): unsure at all n locations
agctttactattatcttccgaacaatatatgaatgaaatgatgaaccttataattaaacaaagatactactactactaagtttctattgatgcttgtatctgagtactaaaaagaaagcctgttataatgattcaaaggcataacaataaacaacttaacaataaaccatgaactacagcagctggnggtactttaataaatctctttgtattttaaaatagtctctaaaattntatgtaaaaaagataactttacttatatttactaactaatgatataaaactaatttgctaacgatttaaactaaaacaaaaatgcgggaccttaataaatctctttgatttat

SEQ ID NO: 141463 - DNA, 398 bp, Glycine max
  unsure (1)..(398): unsure at all n locations
ntaacctcatcgtctctcacagtctttagatttgggagccaattcaatccttgtgttcggactctcagccacttatgatagccgtcgatgatcccattactgcttcccctaagctctatgtcctttcttcatgccgcatcccatgccttgcgaactccttggagtaccctcacgttgtggtcaccgaaaccccgtgcgatgaaaggcgtgatgctttcgtctgatggcactcctctcatggggtagccaagctgtcttatggtgaggacgggattataattaatacaaccccttgttccatcaagggaacatttggacatccttcgcatgaagatagaatcctgattcttccttgcttctagcgagggaacaaattaatagacgcccctccatgctag

SEQ ID NO: 141464 - DNA, 312 bp, Glycine max
  unsure (1)..(312): unsure at all n locations
agcttgtatgggtgagttataaattataatacctcagcttggttcaaaagatcatgtttactccgtcgcacgttgagcaagttttgcacagcttgcccctctatggacatcctcacccgactagctcttactctggcctgaactcgaaccaatgcctgcatgcaccttaatgtccncgctgtctgcttcctcacctgtctccccccgaacaagtgcttgaatcctcaccactggcttcaatgccctcaaagcccttcttgcctgcaatcaccacacaagtgatgtcgaaatataatgttggtctaatggtaa

SEQ ID NO: 141465 - DNA, 414 bp, Glycine max
tgttcatgtgagagctcaacactaagttgctgatgtcttcacaaagcccttaatgcttctaactctctcttcctttatccacaagttgggactcattaacatttactctccaacttgagggggtattaaagttgtatgaagaaatggagttagttacttcagatagagggtagatagactagttggtaattaggtagaatgaagttagatactaagtttgttaagctggatataaaatagtgtgtatgcaaccttatattcaataatcatcaataatattctacagatttccttgttgcacaaagctctctatcaataaattcccctttgccaagtccacattgaagaatttagagcaattgtagaatgtcgaagaacatattatgtacatacaagacacaacttataaatctc

SEQ ID NO: 141466 - DNA, 397 bp, Glycine max
  unsure (1)..(397): unsure at all n locations
agcttgctctaaatttacattgatgtttgtatttatgggaggaggttgtatgccatttttgttttaagagtagtgtcccactggtaaaactaactttccaaatgtttgccttcgcaggaaatggccccgaggaagcttgcctcanagaggtccaggaaggacaagacagccgaaggaactagttccgctccggagtatgacagtcaccgctttaggagcgctgtacaccagcagcgcttcgaggccatcaagggatggtcgtttctccgggagcgacgcgtccagctcagggacgacgagtatactgatttccaggaggaaataaggcgccgacggtgggcatcactggttactcccatggccaagtttgatccagaaatagtccttgagttttatg

SEQ ID NO: 141467 - DNA, 450 bp, Glycine max
  unsure (1)..(450): unsure at all n locations
ctgatagcagatgatatgatccttactaggagtggatcgcttgatacaggtcatagagtttggatgatgctacttccagagagggaagataagtcaggatagacaccacaagaattgccttgataagtctgagattgggtcaacatgagacccagagagaagctctctccaaagtttataaaaggccaaaagtacttatattgaaaatgaaacccatacatatagcgtatctgaatgaaaaaaatataaatagaccagggccttcanataagttagggccaaaattacgacaataaaattataaataacaaatagaacatattttgcatgggccttcaaattagtttgggccttcaacaacaattaatattcttagtagtgcctctggctttggaccttcatccttctccacttgagccgtggtaagtatgtctgttaccaatttgtgga

SEQ ID NO: 141468 - DNA, 394 bp, Glycine max
  unsure (1)..(394): unsure at all n locations
agcttcttgatatactgcagcacgattatattaatgcttcatagtattttttgacatatatattaatattgtcaagctaaaggcacaatttttgttatgctaattgataacaatgatagaaatgatcttagatacaccaagctgccttggatatgatgtttgattcgatgatgattgggtagtcagagtaaatgttagtttagagaggaagaattaactaagttaattatattaaagattaataatttgaaatgagactattaaaacatatagataataaattgtcataatgaaaagtttacgatctgtttggaatatgataaaataggataagatataccattatgataaactttaggtttatttaatatttgatgcacactanataatatta

SEQ ID NO: 141469 - DNA, 440 bp, Glycine max
ctataaggacatgcatccagtcaacacaccgctgccaattcccttatgaatatcctgaatcataaataagttcttcaaacaatagtttaagttatgactgaagtttcatatacgcaaaggcaaataataataatagtaattgagctaagttttttggaaagtagttcaaatttaaaataaaaaatattaaatccatattaaattcgtaaatttgaaacattgtaattgtacttcaagtgacgatttttttttttttttgcagcaggtcaaatcaaggctggtatctttattttgagccaaaatttcttaagcagcgtttcacccgcaaattatgcaacggcgaaccaaaactttagaactgaaaatcttgcattccaaggaacccattagccattggcctcaagacaagaactacgtattgtggctgggttgatccctac

SEQ ID NO: 141470 - DNA, 340 bp, Glycine max
agctttcagctatgtatctcattagtaatactttttcgtgctgttggatgggcaacaattgcctccttggtggtgatagtaatcactgtgctttgcaatactccactcgcaaagttacagcacaagtttcaaagcaaacttatggtgacacaagatgatagattgaaggcttgttctgaggctcttgtgaatatgaaggtgttgaagttgtatgcgtgggaaaccaattttagaagttctatagagagattaaggaatgaggagctcaaatggttgtctgcagtgcaattaagaaaggcatacaacacctttctcttttggcctctcctgagttggctct

SEQ ID NO: 141471 - DNA, 453 bp, Glycine max
ctgcttgatgagaaagaggcacagttacgccaatttataaggtaagcacgtgttggtttattcagtggtttagcatcttttggacatgcttggtgttctgattaatttggattgaagtatggaaggggggagtactggttcatcgagcaatttgcgtgaagaaactgctcgtgtgtcgaaagattcttcagagctttttccaactggcattccacaagtaggtcaaacagagattagccaagattcatttgcgggtggactggggaatattcgttcggagttgattggctccacatctggcaatgattctactacttttctatcgaatgaccgtatgagaaatggcagagctgacaatgccactctaaaaggtcatgacagctccattagaggcagacagagatatacttcattgctgctcaccctccttgtcaagcgatgttaattaattgc

SEQ ID NO: 141472 - DNA, 304 bp, Glycine max
agcttgctctaaatttacattgatgcttgtatttgtgggaggaggttatatgccatttttgttttaagagtaatgtcccactggtaaaactaactttccaaatgtttgccttcgcaggaatggccccgaggaagcttgcctcaaagaggtccaggaaggacaaggcggccgaaagaactagttccgctccggagtacgacagtcaccgctttatgagcgctgtacaccagcagcgcttcgaagccatcaagggatggtcgtttctccgggagcgacgcgtccagctcagggacgacgagtatac

SEQ ID NO: 141473 - DNA, 376 bp, Glycine max
ctgaatgctctattcaatggagttgacaagaataccttcagactgatcaacacttgcacagtggccaaagatgcgtgggagatcctgaaaaccactcatgaaggaacctccaaagtgaagatgtccagattgcaactattggccacaaaattcgaaaatctgaagatgaaggaggaagaatgtattcatgacttccacatgaacattcttgaaattgccaatgcttgcactgccttgggagagagaatgacagatgaaaagctggtgagaaagatcctcacatccttgcctaagagatttgacatgaaagtcactgcaatagaggaggcccaagacatttgcaacatgagagtagatgaactcattggttcccttc

SEQ ID NO: 141474 - DNA, 402 bp, Glycine max
  unsure (1)..(402): unsure at all n locations
agcttgctgtagtataataggaagcaccaatataaatatcttgatgcctactattgatatatagcattgaacatacattaaactagctagagagaataaaaattgctgataatagtacactccataggtagtcatgatgcgtaaaccactactgcaagaaaacactttatattatagtattagctagcaatttttgtggttggcttgatcatgcttggcctcacatgactgacaggtggcgaatccatctgcctatatagacccttccncataacttcctttnttactacttcttaagaaaatttctaataggaaacagtagaagaacattaccatgagacttccatggctgagaatgaacggtcagttaaagagacgtattgtgtaaatgtgttaaaatga

SEQ ID NO: 141475 - DNA, 391 bp, Glycine max
tgtaataaccttagatagaaatgagagattatgttcttgagttgaatccctcatgtgaggtgaaaatctttagcatgtgtcgtaaaaccatagatattttttttatgtaaagtccaatagtgactagcaaaggtgaaatccagtggtgcacctggtctagtagaagattgaagtctagtaaggaattgacaaggttgtgaaacccaatggttgctggaccagttgcgaattggttgtgttactgaaataacatctttaacggtgaggattggacgcaccccaagggtgtggtgaaccattatatagacctttgtgcactttcttctctgtctctatattttgctcttgcacaaatctaacactacttttgtataaaatactacaatttgtt

SEQ ID NO: 141476 - DNA, 378 bp, Glycine max
  unsure (1)..(378): unsure at all n locations
ntggacaaccatatataagaagtactttcagattagtcatagttgacagccactccggaagcatttcaagattgtcgcagtctgaaataatcaaggtccgtaaggagttggcagtttcttgaagccattgaggtaaggccaccagctgtggtaagccccagaatgcaacatattttaaccttaacttgaggttatgctcttcatggcgttccttccacagatctaagtccagactaacacagtctttaacagacagagattctaattcaggaaaatttataacatcctctgaccttgacttcagactatgacaggcagcaacattcaatgctttaagagcagggaacttcacccctgcaaagatagactccatattat

SEQ ID NO: 141477 - DNA, 369 bp, Glycine max
  unsure (1)..(369): unsure at all n locations
agctttacacaaagaacatagtataggttaaataaatatagctgaagatttaaatcacatagaaaacacctttaatttctagtaaacatagctaattctcccaactgctgctcgctctgcaattctattgcaatactctacatggaaaaatgaggtatattatttgtgatataaaatgacaaatcaaactaatgaagagaaacgaagaanattagatacccgagttaacaactttcacaaattaaacaatatctncttgtagacatattacatgagcatacctttgctacatctagntttccaagctgtattgctagatcanatatgtagtcagggtcaatagctacttcaagagcatcttctatcata

SEQ ID NO: 141478 - DNA, 397 bp, Glycine max
  unsure (1)..(397): unsure at all n locations
tgtccacaaanataggttnttgaagtttgtcatttcaatttctcactaagtaaaatggatcattttcaaggtccaatgccttanaatgatcacctcttaaagtaaaaaagaatcacttgataagaaagaactacgtaggtcttatttcctcatcgcaattgaggaatacgtaggagcaaagggaaacacccttgtcgactacaaaaagagaaaaatataaaaagggtgtaaaggatataaggacttaaaagggaacataaaaaatcaaggtcatgtttgcacattcgattaaagcctgccgtcccttgggacggacgtgtggngtgctaataccttccccgtgcgtaaacacaactcccgaacctttcacttannagttcgtagatcgcgtcttttc

SEQ ID NO: 141479 - DNA, 416 bp, Glycine max
agcttcaatacgagtagccacccattcactagatagtttcctaaccagtcaaaccattcccaaaatcattctgcagaataataaatgcaaaatagagttggctaaacaaaaaagatcctcataatcatttcccaattggttcttggattcccatagcactatacaaatcaataattttttaacagaaagtatactcaaattgaaacctagcaattttctcaggttaaaaaaactacacctcctagcaatggagaggattgctcctacatcaaatgcttcagctggatcggcctggattgcacgtagctcttcattggtttcacgagcaaccttatacataagccagaaattatttctaaagcattgctttccatcacaggcaacaacaaaattaaacattatacaaaaccgagaat

SEQ ID NO: 141480 - DNA, 457 bp, Glycine max
  unsure (1)..(457): unsure at all n locations
ntganagagttatcttttgacaacttctaactccttttcctgtaattnttaacacgtgtgcccttactttagtgtaagacccattaaaaactatttcacaaaaattgcatctaacttcaaaatttccaccgcctccacttagacctttaagctttgaaacacaattccataaaggtttggtgtcatcaccttgttctttaacttgattagaagtactcatctctacaattaatcaatataataaaataataaataagaacacaatggccaatttaaaataaaaaaattatgaatggttaactgttatatttaaaaactattatcaaaataggatataaaattaaaaatcataaagtattaaatgtattagtaggtaagaaagtaaagaanaataatattaaactaaaaattcttatgagcctacgaaagaagaanaaaaaattataaaaattggaaa

SEQ ID NO: 141481 - DNA, 396 bp, Glycine max
  unsure (1)..(396): unsure at all n locations
agcttcatgcttaactatgtatggaaaaacttcattactgttgttcaagacatacaagtgagcttgtaacaaatcttctacacttggagtgatcacctgcagtcctcttgaacccttaccacccactctgtcatcatgccgacactcaggaagcccaacagctttagccttctctaagtattctgaacaaaattcaatggcttcttctgcaatgtacctctcaacaatagatgcttccggacgatatagattctttgtatacccttttaagatcttcatttatcgctcaaccgggtacatccaccgtagataaacaggaccacagcatttgatttctctgaccagatgcacaatcaagtgaatcatgatgtcaaagaaagcangggaaaatacatc

SEQ ID NO: 141482 - DNA, 462 bp, Glycine max
tcaccaccaagacagtgtcttggataagaagcttagagaggatgcttcaatagaggaagagaatgagagagaaagagggaagggcgtgggaattgatgaaggagattagggagagaagttgaactttgaagtgtgtctcacaagtttctcattcatcaaagttatgagaagtgttacacatgtttctatttatagcctagcacaatggaagcttccttgggaagctaggggaagaaagcttccttgagaagctagagggggctactcacacctctccaatagctaagctcaccccatgtcaagatgcatgaaaatacaatgggaaacttccttgagaggtaaggtagcttccttaggaagcaaggaagaaagcttcctttagaagatagagaggggctactgatgcaatcctaccccacaagggcattggatagaagaatccaagtagattgggctagagat

SEQ ID NO: 141483 - DNA, 406 bp, Glycine max
  unsure (1)..(406): unsure at all n locations
agcttttttttacggttcttattaaatcccatccccttccataagctaaaatactctttcatatacagtgatatggtcagacacaaaaaaaagtggaaaatattcaagtgtaacacacattgtatttgaaaagcaacaactagctttaaagtacaaaacaagcaaaactaaaaattactacttgctagtagttgaaactccctagtaattagcattaacattggatttattcaaattcacctaaatacaacatactaattaacacgagggtagcgtattatctcaaacattaaaagtggcataaaacaaattagcaagactatnttagttcaactgctttctcaaagtcaactctaatgcattctcactgctttcgttaataaacttgggtcaatgctagatcact

SEQ ID NO: 141484 - DNA, 440 bp, Glycine max
  unsure (1)..(440): unsure at all n locations
tatcttggacctcaagtcgatgtagttgaacctcagcttgctgaactcacttcccaacccatagctgaagatgtccttgcaacaattagcacttccagtattccatataaaatatctcctttaaccacctttgcttcaacgggtgtgtctaaagaaaggattcaagaaatgttgtgccttcaacaggccaacctagaagaaaccatggaaaagagtttcctcttttaatgcatggaaacaaatttgcttatcaagaacaccttggaagcttcactcaagtccttcaacgactttgttttgttcaatatgaatatgctaatgcaacaacgactgcctccaaccgtccaaccccttctgccaccaccagctacttcttccacactcacaacttctaaaanaattgtgctgtgcctcgaccttcaccaccttagtcaccacca

SEQ ID NO: 141485 - DNA, 395 bp, Glycine max
  unsure (1)..(395): unsure at all n locations
agcttgtactcttgttggaggaacccttactcaagctatcctaaaatgaatacaacaaaccataaaaatttcatcacactcatagcaaatcagaaataaatggcgtgaatggtttatcattacagttacaacaaatcaaacacaagtggtgcacaaatcaaacatgaatggtgcgaatggtttttctttgcaactactatccacanagtgagatagaggttagggattaaacaaatcanagcacacaagtaataatgttatttgtagtgtgagaaaataacaattgaagaatgctaaggcgcgaanaaaattcaattacacttctccannaaatgagataaagcttcaagattaagaaaatacaagtgnaaaatttaaaagtataatggtatctg

SEQ ID NO: 141486 - DNA, 376 bp, Glycine max
atacgttgctcattgactctcgattgctacacagaatgaccaagatctttacggtgatctgcagaagagcatagaccacagactcttgcgacatgtgtagatttcttattcatgggaagacgatgtactacggtgaccaacggatgaaggtctccttcaggctttttattttcacttgacgaggaggaatgtgcggccacctgatggactcctctaagaacaatagcataatttcttgcactgaattgttgagagttggaagccatcttctcaatcaaattcctagcttcagcaggggtcatatcaccaagggcttcaccactggcagcatcaatcatactcctctccatgttgctaaggtcctcatagaaatatt

SEQ ID NO: 141487 - DNA, 264 bp, Glycine max
agcttagaagaattaaaaatgaaaaaaaaaactataataactaaaattggaaagacgtccacttataaggactaaaattagaaaaataaacttatagagattaaaaattaaaaaaaatgctaacttacagggacaaatacatatttaagcttaaaaataacattattctaaaattaaaatttgggctcctagttagcatcaaaacagtccatttattacaattaagatcaagccagagatacttaaataaaataaataaaaaat

SEQ ID NO: 141488 - DNA, 314 bp, Glycine max
  unsure (1)..(314): unsure at all n locations
tgttacaaatgtggtaaaccttatagaaactaaaggctgntcgagtcgtgtggttgtgccggataaacatggctttgcagcagccaacaaaggctcgcaatgacgatggagaccagtgtgatgctcgctggagatgcgtcacgcgatgtgtgcgtgaacctcacacgccaaggccctgcatggggttgcgtgcggcggtgttatgagttggctgcgcacatggagtcgtggacgatgtggtggcctttggcgatgatgatgggcattgtttacctgtgaaaataaaaagtggcaaggctcaccacggacgcctt

SEQ ID NO: 141489 - DNA, 403 bp, Glycine max
agcttaacaatccttttgatctatttcaaaatatttctatccctatcatataacttgcctcactcatatccttcattttaaagttacaagagagaaactttttcgttgagcatttttctaaattggaaattgtgatgttgagcatttttccatcttaaatctctctagtactttattgatatatgctttttgagacaagcttaacaatcctatgatctatttcagaatatttctatccctatcacaaaacttgcctcacccatatccttcatttcaaagttattagagagaaacttcttagtctcatgaagaagatcaagatcattagttgcaagcaatatatcatcaatatacaggattagaaaaataaccttactcctactgaccttcagatatatacatt

SEQ ID NO: 141490 - DNA, 450 bp, Glycine max
  unsure (1)..(450): unsure at all n locations
gtatcccaagctggacttatatacagtattctttggtctaccatatactatggctctaacctatcgacgaacttattggaagaatccctcccgactagcatatatgatcgtcttacccaccaacttctctctaagctctattagtcgttactctcttgatttacgggatgttgtgagcgccttgttctttgacttgagtagaagtactcatctctacaattaatcgatataataaaatactcaataagaacacgatgggcaatttaaaataaaaaaattatgaatggttaactgttatatttaacaactattatcaacataggatataagattatgagtcataaagtattagatgtaatagtgggtaagaaagtaaagaatgataatattaaactaaaaattcttatgagcctacgatagaagaangaaaattataaaaatcggaaagta

SEQ ID NO: 141491 - DNA, 401 bp, Glycine max
  unsure (1)..(401): unsure at all n locations
agcttccaagaatcaagatcaagattcaagactcaagattcaagaatcaagagaagacttaatcaagataagtatgaaaaggttttttaaaaaattgagtagcacatggatttttctcacaacatgtttatcaaagagtttttactctctggtaatcgattactagattgttctaatcgattaccagtagcaaaatgtttttgaaaaagttttcaactgaatttacaacgttccaattgatttcaaaaagctcttatatgttttggtaatcgattaccactgtctttgaacgttgaaattcaaattcaaatgtgaagagtcacatcctttcgcataanagctttgtgtaattgattacactgatttggtaatcgattaccagtgattgtttctgaataaat

SEQ ID NO: 141492 - DNA, 387 bp, Glycine max
tcttatccaaggctcatcttggaggcgaagctacttcttccatggcttattccctaatggaaggcgcctactctcagctcttctactttgtcttccgctgcatctacatggtggaaaatcactattaaaggacctcattgaagctcacagatccaacctgcatagagaccccacaggcaagcttccatcataaccactctatttgccctaccagggatatccaacttggacactgcactcgccaagtacatacacgacatacatcattacaatgacactatcaacatccacagcatctaagtctgatgacactatgatcatctacctgatcccgtctcgatgtcattctcaacatcaacagtatctgatctcaatgacataatcaac

SEQ ID NO: 141493 - DNA, 411 bp, Glycine max
  unsure (1)..(411): unsure at all n locations
agctttccatgaatcaacaaaatgaatagataactcacaacactattggcatccctgcctccacaaagcagaagaagtccatcagagcgtgcacttgcagttgcatacctagtcaaagattaaatggtaaaatgaaaatcgcaccatgacaagttgcaccaaatgatagccaactaatatatttaaggtaagtctacacttcacagaatcgattgtttacatcttctaatgtaagatatttaaagtattctcttgtgcttacaaaaaacaaaaagcaataatgtggtaactttgttccacaaacagtaatattaatgctaatcaaaatggccaaataagatgagattcaattcanaccctactcaagctgcagtctaactcaagttntcgtacagaanatcanaagaaaat

SEQ ID NO: 141494 - DNA, 442 bp, Glycine max
tgtagactgaatctataccataaaaaagatttgtgttcagtacaccgcttatcataattttttttttctctagccattatttttagggaggtagtttagctaactcacggattttaattctttacttgcatgatgattcatttttcctttctatacacattgttttttttgaatgatttttacatatgtattgaatcaaacatttcagaattatcatttatattaacgctatttatccgcatagtttaattggccatcgtcaaacttaaatatacggcagatatatattataactttttgtataatacatgatttttaacaaaatctttatttacattttcttatgataagggattagaactttttttttgtggacaagagatacaagtctctcattcctggaacatatataaagctgaatgaatatgaaatgccctcccgc

SEQ ID NO: 141495 - DNA, 324 bp, Glycine max
  unsure (1)..(324): unsure at all n locations
tcaagcttcaagttagaagttgaacacttttatgttagaagtgtcaaatgaggaaatctgaagcgttgtgttttctatggggaactacaaggcgctaggagtagatgggttccaatctattctctataagagcaaataagatgttggtggtgaaaccttttgtactcttattagaagtatnttttataatcccactaacattgatgattttaattatactcttattgctcttaattccaagcaagatgtgctcactaacatgaagcactttaagcgcataatgttgtgcaatggttcctacagacaatgacaagaatatgtctg

SEQ ID NO: 141496 - DNA, 379 bp, Glycine max
ctaaacgatgggctagcttaagctagccaggcaactttcatgttcttcattagagaaactagctcagaagtgtgtccctaatgatctagcttaagctagcttggccacttgcaaattgtgtacactgttctttcaatgatagctttaaatatctcttcaaagagatccttactgtagttcctacaaagagactgaacgacataaaccacctcacagctagtacactaggctcttaaaatatttctctaaagctgagtttattcaaagatcaacccaattgtgctcaaacaatgttcagaagcatgagaaacatatcatagttgtcacaaaaatcgcaaaaaacaagtaaaagaggtaattataattgatatctaactct

SEQ ID NO: 141497 - DNA, 173 bp, Glycine max
tgcttctatactttatacaagaatgaagctctgataccacttgttagacaagtggcctcacatatattaagaaggggggggggggtcccatcctagacacccgcttcattctctcctcatccttatccaaaagtatttattctattctacgcctcccatatattgatcttccc

SEQ ID NO: 141498 - DNA, 377 bp, Glycine max
tgaaggatgtaagattctgtgattcttcaatgtccaccacaatgtgatcaaactttgatgtcagtgttctgagcaccttctcaatcaccagttgttccttaatttgttctccacagcacttcatctaattggtgagtgtgagaatcttggtgaaatactcagctactgattcagtctcctccattgcaagaagctcatactgtcttctcaatgtctgaagctttaccttctttatcttttctccaaagataatccaatatttatttagatcaagatatctaaatatatattttagtaaagtaaaagatagatacaattgctttaatatattatattgttattcttattctcgaaagatgttattatcataatatatt

SEQ ID NO: 141499 - DNA, 449 bp, Glycine max
  unsure (1)..(449): unsure at all n locations
tgttcctanatgatgggctagcttaagctagcctggtaacttttaagttcttcattagaatagctagcttaaaagtctgcccctaatgatctagcttaagctagcttggtaacttccaaattctttacacttttctttcaatgatagctntaaatatctcttcaaagagatccttaatgtaattcctacaaagagactaaacaacaaaaaccacaaaaaagcaataaaactaagttcttaaaatatttctctaaagctgagtttattcaaggatcaaccaaattgtgctcaaacaaggttcagaagcatgagaaacatataatagttgcaaaaaaaattgcaaaaaacaagtaaaagtggtaattataattgattatttaactctagtaaaaaaaaaaagcattgatcgtctaaccttattttatcaatggttaaatacttaattcaat

SEQ ID NO: 141500 - DNA, 331 bp, Glycine max
agcttggtcttgatttttttctaagttctttaacaagattagaacaatatacttgtccttcatttaactgtctttgggcttggcggccacgatcaacaaagtactttcgacacctactatatgttgatttgaccaacactgttatcggtatgttgcgacaatccttcaaaaccttatttatacattttgagaggttggttgtcatgtggccatatcgacgtccttctctatcataagccatcgtccaattttcctttgaaatacgatcaatccatgttgctatggctggactcagttgaacggaattttctaaattttgattaaaaaaaat

SEQ ID NO: 141501 - DNA, 449 bp, Glycine max
tgtgaagtgccacgttagagaacagaacactcttttcttctctctgtttgaacaggctcttcttcacgagaaattattactctctctactttatcattagctcttatttcagtgtttgactttttgcgttgttgcttcgttgagtgtgcactcggttctgtttggcgtctggacaaaaaacatgggggaagaagaagaagaagaagtgagcgtcaccgctttgcatcatccaaacagcggaaacgatgatcagagcctcgaattcgatatatatcctttgagcagttactattttggatccaaagatgctgttccctccagagacctcaccttagatgatcgtgttctcaggatgaagtacaagctcgggttctttcttctcctctctgcttatttctactgcaatataaacactctctttgttctcttctttaactattctttctttc

SEQ ID NO: 141502 - DNA, 394 bp, Glycine max
  unsure (1)..(394): unsure at all n locations
agcttgtgctattcatctttntcattctcttctccctttgccaacctgaattcttttgtgtctcccttctccctttccaagagaattcaaaggaccccgcctgagaattcttttgattctttcctttcccttaaacaaaagatttcaaaggactaactgcctgagatatcttttgtttccccttacaaagattcaaaggactaaccgcctgagaattctttgtcttaacacattggagggtacatcctttgtggtacaagtagaggatacgtctacttgggttgttgaactaagaataagagagggtacatctcttgtggatcagttcaagtggagggtacatccacttggttgttcaaagagaacaagggaaggtacatcccttgtggatctt

SEQ ID NO: 141503 - DNA, 463 bp, Glycine max
  unsure (1)..(463): unsure at all n locations
tgtgctttaagcccacttaacaaaaaactgtttttataaagtaaaaaagccacactcttgacaagttctacatatgttggcaataaggtccaacatatagctctctcatttacagtaaacaaaactttaaaatttggtttaggcctcactcacccttgggttggatcaattgcaccatataaatatgtgttccccgtggactaacaaattttatttggcttttatcgttgcatttagacctttgcatgatggcgactttgatgtcatacacattacttgcgctcttttttccttacacatttgttgcatgtcttcaatctaatttgttgaatctgggaatcaggttgtaagttatgatttcaaggaaaacagatttgcgcatctacaccgatctgcgatcagctntccagaatcaaggttcttctatgccggcactcctgctacatcaaatgcanaagcagct

SEQ ID NO: 141504 - DNA, 417 bp, Glycine max
  unsure (1)..(417): unsure at all n locations
agcttgcttgtggtgcttctatggaggctggatctttgagcttcaatgaggtcctttaatggtgattttctatcatggagatgcagcaaaagacaaaggagaaaaggtgagaagaggcgccatccaataggtaataagccgtggaagaaggagcttcaccaccaagatgagccttggataagaagcttggaaggatgcttcaatggaggaaaagaaagagggagtgaaagagagatgggggagcacgaaattgaaggaataaaagagggagagaagttgaactttgagttgtgtctcacaagactctcattcatcanagttacaataagtgttacacatgtttctatttatagactangtagcttccttgagaagctctcttgagaaaacttccttgagaagtttctatgagaaaac

SEQ ID NO: 141505 - DNA, 461 bp, Glycine max
  unsure (1)..(461): unsure at all n locations
tganatgaggaagtgtggaagggtgagacttcctacttttattcgttggccacagagtggtacctggagatatgtcgcggnggtcaggagaccttggggacgtcaggtggggtgctattgcccaaaaccaagcttgaccaatcccgacccaacccgggcatagtcagtcagtgagaacctgtgatgtacctaaacaggcgagctcctggaagtcaatcgataaaagaacaaagaccacaaagcaaggaggcttgtgtggtggctggccagctgtgaatcttgagtgatatatgggatagggcctctggtaatcgattaccgagggtgggtagtcgattacaaggcttanaagtgaagacaggaagctaagatggcctctggtaatcaattaccaagagagtgtaatcgatttccaggcttannaacgagatcaggaagctaagagggcttctggtaatcga

SEQ ID NO: 141506 - DNA, 260 bp, Glycine max
  unsure (1)..(260): unsure at all n locations
tttcttctatgattcattctatgcacccatatatcgtgctgttggatggacaacaattgcattctcggtggggatactaatcactgcgctttgcaatactctcactccatagtaacaacacaagtttcaaagcaaacttatggtgacacaagatgatacagtgcgngctagttgtgatattcattagcttaggataaaatcaattccgaccgttcggtcgtgccgtaaccacgttggaaatcaaagagaggtgaaaaatg

SEQ ID NO: 141507 - DNA, 237 bp, Glycine max
  unsure (1)..(237): unsure at all n locations
tagtagaagatanacactgctagggacgaacctggcaatgaagacatgctgtctactctatatcggaaccggtgataggttcaaacctaactattttattgatgataatatctagcaggacctatggctaccatggaaggatgcagtgattgtgacactattatgaatactgatatggattgtcacaatgcacgataggttgtaatctatttggacattatcacgaagaggaattaa

SEQ ID NO: 141508 - DNA, 324 bp, Glycine max
  unsure (1)..(324): unsure at all n locations
agcttgaaattgaacaacggaagctctcgagaaaatcgagtggtcataaattttcacacagatgtccgattcggggaaataatatatcgagacgcacgaaattgaacaacggaagctctcgagaaatttgaatggtcataacatttcactcggatgttcgatccggggacataatttatcgagacgctcgaaattgaacaaccgaagctctcgacanattagaatggtcgtaacttttcacgcgaatgttcgattcgnggacataactcatctagacgctcgaaattgaacaacggaagctctcgagaaatttgaatggtcata

SEQ ID NO: 141509 - DNA, 381 bp, Glycine max
  unsure (1)..(381): unsure at all n locations
ngccgccacggagttntccgactatgctcttgtgtgttggaacaagctacaaaaggagagagcaagaaatgaagagccaatggttgatacatggacggagatgaaaaagatcatgaggaagcggtatgttccggctagttactcaagggacttgaaattcaagctccaaaaactaacccaaggcaacaagggggttgaggagtatttcaaggaaatggatgtgctcatgattcaagcaaatattgaagaagatgaggaggtaactatggctcgatttcttaatggtttgactaatgatatccgcgatattgttgagctgcaggagtttgttgaaatggatgatttgcttcacaaagcaatccaagtggagcaacaattaaa

SEQ ID NO: 141510 - DNA, 276 bp, Glycine max
agcttattggttaaaaaggcgttatttgaatcacttagataaaggtggaagttataacttcctccattattaattaatcttctttcacccactctctccatatataaacccaccctcaatgctttcaaaaagtttaaaaaataattataagaaaaatggcaacatgtaaacttccacctacctaagttcagacaaaaaacacccacacacacaaagaagttaaggaacaaattggaaccataagcattctctcttagtggagaaggagaaaataat

SEQ ID NO: 141511 - DNA, 459 bp, Glycine max
  unsure (1)..(459): unsure at all n locations
tannagttgaaaataatataaaagtcctaatacaggtccagcatgattccactcactagtacaaaactcacctactaaaatgtgtgctaaccagtgtatcatacagtggcctccattcaatagttagtgaaatctttttactatatttgttgagtagtctaactaataaatttccccatctaacctaataaacaaaaaatggcacaatcatttaagagcaagcagagacatatagagaacaagaaaactcagcatctcatctaagacaaaatgcagcagcacctaagcataatgcttattacgggacacatgagatatctcaaggcccttctgaataaggttgtgaacatcctccanagctacatcacttttttcctttatgaaattgcacaacacacataaaaagttagatttcaacccaacaaccaactccatctggatacaagccatgagtgaaaa

SEQ ID NO: 141512 - DNA, 330 bp, Glycine max
agcttgtaatcgattaaactgatatgagacatttgtctgcaagcttcaaacacttgtgtaactggttactatcagtctgtaatcgattaaaacagaagagatgtaactatagaggaaatcttctaactttagaacttttcttctaactccaacatgatgatgcatgatacacatatgaaatgatagagacaaagatgcaacacacagtacaataatcaatacaaatgtcattcaagagagttgggcatgtagaagacaataagatcaagctcttctttaagctgtaatgctaagtatacatggtgcttcccctatctctaacatgcaata

SEQ ID NO: 141513 - DNA, 457 bp, Glycine max
  unsure (1)..(457): unsure at all n locations
taatcttacaaagctctntgaaagaaggttttctatgtattgattccttcaagtatccatcttgagatacttttcttgaagaggaggaatatgcaattggagtgtatggagaaagggaactagtgctcaagcaatttcccatcagactcattattgctcctaacccaaacagcctgatatttaagtataggccaactgcaatgaaggtttatccccttggtcccaccatttttgtctttgtgggataccctaacggaactaagggatactatttctacaacacatatgaggaaaaagtatctatcactaagattggagtgttccttgagaagcaatacatctcccatggagccaatggaggaatgtagatcttggagaaatccaagtggcacataacattgatccacctacaatggaacaagaattgatgccacaaaagcattgtagatccatcttt

SEQ ID NO: 141514 - DNA, 368 bp, Glycine max
agctgtggaaagtgttgttgtcaccttctcgctaagccactctgatggcttatcgagcgtctgctatatgcaacattcctgggctaagcgcaaggaagaatccataagaagatgagctgtacaagtgcgctaagtgcacgcgcttcatcttactaagcgcaccacttgagttcatctgctaagcgagaaaagcgggctaagccaaaaatcactaacgtgcgctaagcggtccataagtgcgctaagcacacgagcacaaacaaggccgcctagttaagcctgaaatcagatcttgtgaaaggagtatggactaagattcagagctctgcatgcctagggtttctagagagagaaagtgcaagttctag

SEQ ID NO: 141515 - DNA, 377 bp, Glycine max
gctattacggacctataatactcagctgtttatccgtttttgtgcaagacatatttaaaccgatcaattgtcatttaaggcgttggaccattaacgatctcttggttttttaaaagtagtggtaaaggtagacgtttattgtatgtttccgaaggtgcatattaaccaataaaagcagagagaaccttttaaggcattggaccttaaaacggtttttagtgacttttgcggacaaaagcttcatttgagagttgattttagccttaagttcactttgggtattagtcaattcattcaaggaaacttgcaaagaaaaatgcccgactgaggttttttctttttgagattgtattcaaagatattgcgattattttatt

SEQ ID NO: 141516 - DNA, 364 bp, Glycine max
agcttagaatggccgaaagggacgagtcaagggtggtaagcatggcattaaaggataaattgaaggcttgtcataggtcaaagagaagtttgaccgaacaatcgagtggaacggaagagaatatgttgacgatcattgatcagtataaggagaaggtaaacctagctgctagtcttaggcagagactagaggatgatcatgcgaaggtattgactctacaaatggaaagggaagcaagagagagggtgatagaatcattacgctgggaagctgtgaaatggatggatagattcgctctcactctgaatgggagtcaagaagcttcagggtattagccagaaccaggcaatgacggaagtatact

SEQ ID NO: 141517 - DNA, 439 bp, Glycine max
gtctccactaagttgcctaatgcctgaaatgtcttttctgatggcagaggtcctagatgcagggaagaatttctccaagaacaccctcttaaggtcatcccagttgaaaatggacctgggagcaaggtagtatagccaatcttttgccactccctccagagaatgaggaaaagcctttagaaagatatgatcttcttgaacatcacggggcttcatggtgtaacaaacaatatggaactccttaagatgcttataaggatcttcacctgcaagaccatgaaacttgtgcagcaaatgtattagtccagccttgagaacataaggaacaccttcatcaggatattgaatgcacaagctttcataagtgaaatcaggtgcagccatctccctaagagtcctctcacgaagtggaggtagagccatgttctcagtatgaaaa

SEQ ID NO: 141518 - DNA, 396 bp, Glycine max
  unsure (1)..(396): unsure at all n locations
agcttggagaggatgcttcaatggaggaaaagaaagagggagagaaagagggaggggggagcacgaaattgaaggaagaaaaagggagagaagttgaactttgagttgtgtctcacaagactctcattcatcaaagttacaacaagtgttacacatgcttctatttatagactacgtagcttccttgagaagctntcttgagaaaactctcttgagaagcttctttgagaaaacttccttgagaagctagagcttagctacacacaaccctctcataactaagctcaccttcttgagaagcttccttaagaagattcctaaagaactaaagcttaactacacatacctctctaatagctaagctcacctcctgagatgagaactagagcttactcc

SEQ ID NO: 141519 - DNA, 139 bp, Glycine max
  unsure (1)..(139): unsure at all n locations
tcataagcatctacccattgcgtcaanagatacatgcaaagtgctacacatgctgctctttatacactgactacctaccttgatgggctttctatgaggacactaccatggaaaaccctattgtaatatctaccttgat

SEQ ID NO: 141520 - DNA, 396 bp, Glycine max
  unsure (1)..(396): unsure at all n locations
agcttcaaagaagactattgaagtgtggttcaatcaatttacaaacttttggaggcagtagacaaagatgacagctgggaaaggacaactagcagagtcattctgaggtagtcatgttgaggaacctttctgatgagcattttaaagtaaaatcagaatggtgatgttagctgagaaaggatccatacttgaagtagatccttttgatgaagatcaactattatgtctttctgaagtagcagaactgcatcaattntaatacatcttcacaacacanagcatcctgaagtagattgcttcattaaatcacagtgaaggcatagnttcttggtgtttagtggtctatcanaagttagaatgtgtaaagtcttcaatcttccattctgatgatccaca

SEQ ID NO: 141521 - DNA, 395 bp, Glycine max
tgacactatccaagactctatacaatactgaagctctggtctctacagatcttcacacagcacaagtactcttaactctctggagcttgtacctttctctctctagaaaccctagacatgcacagatatgaattctaatccatactgcccttgtaaaatctgaatatacgctcatatatgcggccttggtcctgctcgtgcgctgtacgcacttatggaccggttaacgcacattagagaatttacgattacagcgtgcctttctcgcatatcgaatgaactgaatacgcgcacttaacgagatgaagtggtgcggtcacagaacgcttaccaatcaactttttccagagtcttgctcgcacttaacccatgaatgttgcgcttatcggacactt

SEQ ID NO: 141522 - DNA, 242 bp, Glycine max
gaaccagccttcatagaaggcccacaagcaagcttccatcaaggggtaatcagagcacaagagcttcaagtaggtgctccttaaacctccattaattttttttctttaccttctcttccatttttgtgtcttcattattctccatgtatctcctcacatgtcttgttctaaatgtttttaacatgattctttagagtttccaccgattaaacttgctatagaaggtaaatttgatcttctat

SEQ ID NO: 141523 - DNA, 281 bp, Glycine max
aaagacactaagggccgctccgcggctagttttctttaaccctctacaacaacaagtatattcctttcaccattgctctctggagataggtaccttttcaaataccctcaacatttaggaaagttgtattttgcggcttaagattaccaagctagagactgtttactttgtgttttttttactcaataacttcatttttcccattttgccaaattccattctcactttggataatctgccttggttacactgaatctaattaagaatttctcaatcaatat

SEQ ID NO: 141524 - DNA, 342 bp, Glycine max
  unsure (1)..(342): unsure at all n locations
gcactaccggtacccatcgacatttctaccgcgnatgcaatctcgtcaggatgaatagaaactctaatgcacatctgtcgtgaattatcgaccgatatttttctgccgacatttcacaattctttttataacagctcgctggtcgataatggtctttttacggcagagtaagtctttcttcgtttaggcgttgcataaaaaagtatcatgtactctcgctaggtttttcgtgcgagtacaaccgacattttgtatcggccagtataacattagcccacctctgcaaataaaatatttgctaaccgtcttcatgcatatctcattcaacgatcgaatataaaa

SEQ ID NO: 141525 - DNA, 446 bp, Glycine max
  unsure (1)..(446): unsure at all n locations
ttaagtcacctgaggctgcagcttgagaggatgctttaatggaggaaataaatgagagaaggggggagcacgaaattgaaggaatgaaagagggaaagaagtggactttgaagtgtatctcataagactttcattcatcaaagttataacaagtgttacacatgcttctatttatagactaagtagcttccttgagaagctntcttgagaaaacttccttgagaagcttctttgagaaaacttccttgagaagctagagcttagctacacacacccctctcataactaagctcacctccttgagaagcttccttaagaagattcctaaagaagctagagcttagctacacatacctctttaatagctaagctcacctccttgagatgagaagctagaacttatctacacaccccctataatagctaagctcaccctcatgacaaaa

SEQ ID NO: 141526 - DNA, 110 bp, Glycine max
aataacaacgtaaaaacactttaacaataagggcaaagactctttactctatgttcacacattaggaaactattcagcagaagaatcttccatataataaatgctaaaac

SEQ ID NO: 141527 - DNA, 161 bp, Glycine max
tccgtcaacttcggctaaaatgaatttcgatcgttcggtcgtgctgtaaccacgttggaaatcaaaaaagaggtaaaataatgatataataataaaaaaaacgtctttaggtaaataaagcgaaaaataaatcggacggtttctctgtgggatttctcatt

SEQ ID NO: 141528 - DNA, 398 bp, Glycine max
agcttattggcactggtaaattcagttatgtgcttaacctctaggacaaattgatatcgagcaaccgtgaatctgttatgctctaatcgaacttgtgtagtgtgggtgagcaagacgctttaagtggtcattcactcgtaagacaagacgtagtttgtcctttcctgcgtgtgagcatcagcatcaccaactcttgcaaattgtaataaatttttaaaaaccagaaacaaggaaaaaattaaaactcaactaaaattggtttcaattttctaaaattttaaaactgaaaactaaaaaccatcctggatggaaaaaaaaaaacaaattagtgacaaagagattcaaagaaggatatcggaagaaaagaaaagcttcacataaggtgaaataagctattt

SEQ ID NO: 141529 - DNA, 425 bp, Glycine max
  unsure (1)..(425): unsure at all n locations
atcttaagtcacctgcggcatgcaagacttttcttgaccttgggcaagctntttacttgtctttcaagatcatgccttcgactcgcgactgatccctttcggttctcagagcttaagctcactactgctgccccactaagctcctcgaaacttgttatggccatgttcttcctttcgggccctcttggtttctcgttccaaggctacagcaatggccatattgatgtcccttagttcatcgtactctttccggactttgatggctgtggacttggacttctctttgactgcttgggctttttcaagttctgcctttagggtttgtacttcctcactctccttcaaagttttagtctcttcctctcttgcacctttaacttttggagccaatccaacacttgtgtcccggctctcagccacttatg

SEQ ID NO: 141530 - DNA, 224 bp, Glycine max
cgatagcactacgaacatacaccttgacaatgatcacttaaggagaaaaacaatgtgcgtcttctagaaagggcatcaactaccacatttgttactcccttcttgtatttgataacatatggaatattctctaggtactctacccattttgcatgcctctaggttaaccttctttgccctctaatctacttaagagactgatgatcactatgaaagaaaaattc

SEQ ID NO: 141531 - DNA, 274 bp, Glycine max
tattatatgacatttaacaaacctgtgtgtgatgttcttgttggaaagagtgaatctttccttcctttcatcatcacccttgttctttcaaaccacaatttcagaaaatccacctctgcccagaattatctggtggccataactcccattttacgcactcaaattaagtgattcttgagcctaaattgaatttcaaaacgagatctttcacctcgttttggaatcaccttatttggaaccctgtaagctcaattattgccattattattatttt

SEQ ID NO: 141532 - DNA, 350 bp, Glycine max
  unsure (1)..(350): unsure at all n locations
tattcttcttaccatattgctctgtattatattaatacaacctgtgctcaagtgcttacctaacgcctccgaaacatttccgtggttgattacgtgaagattttccaccgtctttcattcgttcttcgtcgttcttcggtcttcaactggtaaattcccgagattgaacttttcaattcattctatgtacccttggtggtccccacttgtntcgcgtacttntattttcatttcatttaatttctggacccccttttgacgtgctttagtcatttatttaagtcattttcttccctaatcacaaataaaataaatttccacccgatatttgaattgaacatttgttaatt

SEQ ID NO: 141533 - DNA, 404 bp, Glycine max
gagtcttgtattggtttaatcgattataactatctcataatcgattacactgttgtttgagacaatgactaattattcaagagtctctgctataatcgattaccaagtggattaatcgattatttcactctcgcttaggtgtttaaaggtgaacaagaacactttaatcaattacttagggcatctaatcgattacattgttcttgagttatttctaggagttgggatgaacactttaatcgattatttagataatctaattgattacttcattgaattaatctattaccttatagatttaatcgattacaagcggttatgactgttttctctataaatagccatcttgtgttcacatctatacactgagatatcaatagaggattctcaatacatctcgaaaa

SEQ ID NO: 141534 - DNA, 233 bp, Glycine max
tatattgaattctggttaattgaatagattatgattaataacgaacattgggtgtagtgtgattatttcttacatgcaggtacatgattcctaattgttgggagagggaaatgatgggcagcagcaccaactgaggtgagattatatttcctcttttttggctttatctttggtagtttggtaaataagtattaatattatatgtgtgaagtttaaatgtgtaaaaaataaaa

SEQ ID NO: 141535 - DNA, 275 bp, Glycine max
tgaattgttcaatttgataaaaaaacttgattattattattttttaattacaaaaaatgtcactttcatttaaataaattgtattatttttcctaagtccgatccctctgaaacaaatacttcttaaatagtcttgtttttactttactcagcttctggcaaggagatcaactggaacaagaaagggccaacctccaaacccaatttgcaattgactgagatgcatccagttctccaaaaagaattaaacagtgagcattaacaaccaaagaaaa

SEQ ID NO: 141536 - DNA, 234 bp, Glycine max
ccttgagaagagaagctagagcttagctacacacccctataatagctaagctcacctgcatgacaaaatagatgaaaatacagaaaaaaagtccctactacaaatactactcaaaaagctatgcccacacatgacctctatttatagcctaagtgcccacaaaattgacaggaaatttgaatttcaattcaaatttcacttgaacttgaaattgaatttggggagccaaacttt

SEQ ID NO: 141537 - DNA, 392 bp, Glycine max
  unsure (1)..(392): unsure at all n locations
agcttcctttgtgcaccttttgtttcgtttttttgcattcctttcatctcacacaagtaagtgacatctccatccaattttacttttccttggggtattttggtgctttatttgttattttctttgcaatgtttgtgagataaattgtttgtgaatccaagactggaatgctttggttgggggctgtaatggatggccctaggcctatcgttgatcctattgcacgattgcatgtcatgttgttctccatgactcatatntacatgcttaaacatgcgcccaccaaccgtttgataaaatgtcgtaatcaccatttcatgtgttgttttggaatttgaatgtgaaatgagctttatgcatgtccagccatcatttagaacgtatgaacaacc

SEQ ID NO: 141538 - DNA, 329 bp, Glycine max
  unsure (1)..(329): unsure at all n locations
gtcacctgcangctgcagcttatcaagggttaaagttagaatataatataaacaacaaggaaagaggggaggatatggaacatgtctatattgagttgcataaaatgcggataatgtctattaaaggggctcgtcctatctcacgcccacacaaattatagcgccttgtaagacactaatctggaccaaacaatccatgtcgaaactagagatttatagaaagcggggaagtctgagtattatatagctgggaatccgtactctaattgacctactattcttactaacactacttacctgatattaaaactttctatggctattcatac

SEQ ID NO: 141539 - DNA, 152 bp, Glycine max
tcatcgtcccgctctcctcttaatagcaaagcaaaatcaattaaatcagataatgagatctcaaatcagaagccactccaaaaagaatctacagctgaaggcaatgacattatataatgagaaacaaatcctttcttgctatgaagttgcag

SEQ ID NO: 141540 - DNA, 238 bp, Glycine max
tgatttctatctgggatatttgctattggatgaacgccccggtcttttcacaacaagcataatgtaaacctttacggatttaaaagctctataaacgggcctaggcttcaaagttttcattttgttaaggctctgggtcttttgttattaaatttataatacaaggaactatcttcatctgctcctgggctctacccatttctcattcatttgcatggttacttctttttcctaaacg

SEQ ID NO: 141541 - DNA, 277 bp, Glycine max
cccaaccataaatcaatcactcatctaaagccaccatccctaaagctgttgattttgcacaaagaagattatagacgagatccaatgtggctgatcatcctggaccagtgccagcatcagttgatgcaccatttccaggagtggatccatcttcacctcagcacgcagcagactcttccactccgatcttagagatacatatgcggccataccataccagttcctgccttaggacacttctttttacaactactccaatatggcattctaacagatg

SEQ ID NO: 141542 - DNA, 228 bp, Glycine max
actttctcggatgggattgtacaaataaattctttaggaatagatctgatcttcctaatttcatatttgcatcgatttttctgtgccttgggtttggtctatgcccccaaatcccaatggtttgggtttttttcctcatttggcctgaaaaaatatccacaccaattaaaaatttacacccttatccaactcacattgggcagcagttagaaatgcataagattttat

SEQ ID NO: 141543 - DNA, 377 bp, Glycine max
tagtcacctgcggcatgcaagctttgagccataatcctgactcaccattatctctgacccagtgtgataatgttaatccttacccttggaagcaaataagaattgtgggaaattttctttcaaagaataagagaaggaaaatttcctatgaaagctaaaaaagaaaagaaggaaaatttcccaatcaaagagtgcgagaaagcaaaaaaagaaaagaaggaaaattccccaatcaaagagtgggagaaagcaaaaagaaaagaaaggaaaattctcaatcaaagaatgggagaaaagtaaaaaggaagaagaagaaggaaagaaagctcctgatcaaggatcgaaagaaaacagaagaaatgtgcagagaggtcttt

SEQ ID NO: 141544 - DNA, 356 bp, Glycine max
  unsure (1)..(356): unsure at all n locations
ctgcagctcataagtttcaaccgcacacaagaatttctgttagtccggatgatgctacatggggaatgacaaatggtgccggattgtctgtaaanacctctacagctgattctcctccaaaccaagatgatgtgattgaggatgcacccgtgagaggcactagattgctcccacatattcatgaaagactcaatgtgtcaattcttgaacctccacgattatgggaagccaaaaacgatccccaaagggtgctgcaacggaggaaaaacctgtcctgattgagtaaaatcacacctggaacaccgttgaaaggcctaacaccaaaaagacatatgtgtgaaaagggagtttcaaac

SEQ ID NO: 141545 - DNA, 232 bp, Glycine max
ctagaagcttccattcccgagagcatcttctatataagcatttcagcctttgcttttgtgtaacttaggaaaaatgccatttcttcttctttctttcttccaaatccatttctaaagttccaagtactttctccatcatccacatctaccattaatcaccccaacaccatattggtctccattgaaaacccccccgggaggaacccttcaacgaagcagaatttcccacttg

SEQ ID NO: 141546 - DNA, 223 bp, Glycine max
acacacctagtctctttctaacttataaacagaggcgactctccattcttaaaattcgaaaaccaaaacgtttagaagctctggttatcgattaccacaagtagaaaatgttcaaacataagttgtaactcttgaaatttgaaatcttaacattttaaaacactgataatcaattactaccttctgggtatcgattaccatagagctaaggtcttgggcaatg

SEQ ID NO: 141547 - DNA, 338 bp, Glycine max
actctacacttatattcactccgtcttactacgctctcctctctatcttatcgccccacttttaatggcttcgttcgaactccttcaaatacgctggagtggacctcacccgaagtggccttgttcttgtttctacctgcacctcccttgctaacggtaccccctcagtatcctttcttgtaacatcctccatcgcatgcttgctgctcttgcctttctccatcacaggtcaacgacatccttattcacatacacctggtagccaccttgtcataacctagcccaacacttattcttgcccagcactagacatagtaactataagtctaaaacatttt

SEQ ID NO: 141548 - DNA, 318 bp, Glycine max
atctcttagtcacctgcggcatgcaagcttctgggaatgccgtggagtttacaacaatgtcaatgaacaacaaaggtaccatgtgagctgtatgagcctgaggtataatgcgaagtgaatcccctttgaaaagcggtcaacaaccacaaggagtacaatcttgccctgaaaaaaaggaagaccaatgacgaaatcaagggagaggtcctcccatggtctgaatggaactggaagagggcacaacaagcccacaatatgtttcgtttcatatttcgtgaattgacattcaatacaattagctacaaagttggcgacatc

SEQ ID NO: 141549 - DNA, 215 bp, Glycine max
  unsure (1)..(215): unsure at all n locations
tggatcaccatgaaaaaggctttcaaatggtcaccaggcaagtcaggttctttgccaagaaccttgacttaggtctttttgaccctttcaaggacgtgaaggatgattttttgcttgaccaggacaatattgttgctgatgacgacgctggaaaagaatacggtgctaatgatgccaatgtttacgctattntccattaattttattcttttctt

SEQ ID NO: 141550 - DNA, 250 bp, Glycine max
gagaaacagagaacggccgagatgtgccgaaaatcaaaaggaagcaggcttacgcgatccgtgaaaattccgtaatgtgacagaaatcgaaaggaagtgtttttcgcaatccgtgagttttcgtaacttcttcgaaagctaaaaaagagtaaatacataatccgtaaggattcgtaaccttgcggaaggaaaataagtatcgttacgaaattcgtaaagtttcggaacgttacggaaaaagaattacaaa

SEQ ID NO: 141551 - DNA, 221 bp, Glycine max
  unsure (1)..(221): unsure at all n locations
tcttctttggaggatagacatgtggaggagtaactggtttcttgaggtgtccataggtagcagttgtcctttgatctgctgcccttcattagaacttcactcttctcatttgtcaccaagcattctgactttgtgaagtttacattgaatccttcatcacacagctgactgatgctgatcaagtntgcagacagtcccttcaccaacagtaccttgtccag

SEQ ID NO: 141552 - DNA, 335 bp, Glycine max
ggaccctaatcaccgcagctgcagctagaataattgcacacagagtgtctgtcggacaggtaggaggctatggtatcacctaatcccccggaaccactggtgtcactaaattaaatctcaaatctaggtgccactcgtacataaagggagttagtggctagtttttattaaccctcttcaacaacattgttatttcctttcaccatcgcctctctggagataggtaccttttcaaataccctccacatttatgaaagttgtattttgcggcttaagattaccaagctataaactggttactttgcgttttgtttactcaataacttcattttttc

SEQ ID NO: 141553 - DNA, 344 bp, Glycine max
  unsure (1)..(344): unsure at all n locations
tttgagagcttttgttgtgcgatgactggcaagaactgagcatgaaaaaaaagccatcgtgagagcatgagatgagtctgtgagttattgtgaggttctagaggtggaggagactgttagtcggtgaatacgactaacttttgtgtttaaaacttgtgtaaattgtatcaaactcctccaatttatgggtattttgtagtgttataagttcttttagttaaagataggtaataaatacttagtaattctattntgtgtgtttaataatcattntctctcaatttcaggttaattacgcaagtttgtgatatgctgatttcaccttttagctaagccaatcttct

SEQ ID NO: 141554 - DNA, 363 bp, Glycine max
aaaatgtgaaaccacaccgcgaaatatccatccacctttgcttacccttgtctgattttggcgtgatattgatcactcctcagaatgaaacttctttatttttctactcgcaagatgacaagctgcaaatgtatgtatgcttatgcttaggaagtttaagtgcaacaattaaacaagagtttattatgttcaattttacttaaacgctttacggcaccccacagattgagagtgtgttctctatagacattaaagacattacccacgaaatttgaaatgcgaatcatcaatcccatgttcattaatgttgcgaacatggtttacaaaagattggaaaactttggagatcccaatgaacttttt

SEQ ID NO: 141555 - DNA, 206 bp, Glycine max
actgacattaacttctgcgccctttatcaatcgcggccgacaagcccattgacacgcggagatttacgtcatcttcggcgctcacaagatctgtcatactgacatttgagtgacgctgacgggcggagatacccgagaggttatccgtataaacattcttttttgctggctgtaagacgaaaagcccgataacacgcagagactaa

SEQ ID NO: 141556 - DNA, 226 bp, Glycine max
taatttaatataaataacttaacttttttcgcgttacaaagtagaagaaatttttaagatcaatgtcacgagtttgaattttgacaagaatgtttaggcactgtatgcaacaaaatataatttgacatttatgttgaaaattcaagcatcttcaagaaaattggatccttttcattcggaactattactatatgatgaatcccctttttttttaatgggttaaaaa

SEQ ID NO: 141557 - DNA, 349 bp, Glycine max
ggatccttaagtcacctgctgcatgcatgcttcgcacttgataatggagacacatgatcagcgctaagctatgacattcatggtactccgaacaaaagtggagtatggagattgccttgagggtccgtactcaggcaatcatgaaactcagctccaaactcgaaagtggaggacacacgaacagtcctaagcaataacattcatgtggctccggaaaaggatgagaaaggaagattgccttgagggtcctctcttaggcaatcatggaacacagctccaaactcaaaaatggaggacacatgaatgacaacgcaattcattcatgtggctccggaaaaagatgagaatg

SEQ ID NO: 141558 - DNA, 352 bp, Glycine max
  unsure (1)..(352): unsure at all n locations
gtcataatttaattcttatgctaaatatgattttgacccttctaaataccctaatttatgttcgtacactaataaactttttctttgcattgagttcctaataaaacaacaatttttgtatttttcccttggcactttntttagttcatgataaattagtgaatttcgtgcttactccatgataaattttttcatttgttattagtcttttttcaaaggaactaataacaaataaaaaaaactattaaggagcaaacacaaaattcgttaatttatcaaggacttgaaaaagtgtcaaggaccaaaaataatttttttgtgttatcatggagcacaaacaaagataatttac

SEQ ID NO: 141559 - DNA, 304 bp, Glycine max
tctccttctatattgtacacatggggcactgcgccccccaatgcgctagtaagaaaagataattatcccggctctcgtgtcccgaaaatgaattatatcatgcatcgcataagcatcttttcataacatcataatggacatatcctgcatttgtccgttatcatattccagcctcacattttgcatgagtcatggcattatcatgcatatgcgttcaacaaactgtttgatctgcaaaattgcgcaccatttgtattcatgtttgctcatccttgcgtttcccccacaaaacaaaaacaaaatg

SEQ ID NO: 141560 - DNA, 232 bp, Glycine max
gatttcgtgaagattttctgccatccttcgttcgttcttcgtcgttcttcggtcttcaaccggtaagttcccgaaatcgaactcttcaattcattctatgtacccttggtggtccccatttgtttcgtgtactcttattttcatttcatttactttccgtacccccttttgatgtgctttagtcattttttaaggcattgtttcccctaattaaaaataaaataattttcac

SEQ ID NO: 141561 - DNA, 209 bp, Glycine max
tatacatgcatcccatctacagccatctaaaggaaccgcatctcgcacatcatctcaaaaagaggtgtttaatacccactctctcacaaactttctgatgagtcattactacactcacagtgaggcgctccttatcatacccttatccaacaacaacgaccaacaccctcatgcaaaatcaaatatattcacagtccggcctaaagaag

SEQ ID NO: 141562 - DNA, 325 bp, Glycine max
taaataactcatacatcatgcactagcctgccacaaaacaaaaagcagtctattcacccaattcacaaaaagataaacgtgtttcattgcataatcatcatgattaagtaaaactgttctgtatgcttcaaaacatgcatattaactattcacaaaaagtataagtgtataattataaacggaaaccaaaattactaaaaatgatgtactgaaaaataataattatgataagttctaaagagcaaaatcattagggaatttaaaaattctaagaaagatcctgggtataccagatctgagcaacttctcatctatattataggaa

SEQ ID NO: 141563 - DNA, 421 bp, Glycine max
agctggcttagcacatgaagagatggcgcttatcgcaaggtttgcgctttgcggataagcaatttgaaaattttctaagtcatttctacttatctcttcacacataattttaacaaccctttttgttcattactaaacaagctgaaatcaatcacaatcacaagcaagatgacctaactacatgcaagaaataaaaatgaagatagagaagggaaagaaaagctgggttgcctcccagtaagcgcttctttaacgtcattagcttgatgcatcatcctattatctaggatccaataatgttcccacttcaaggaccttcttcttagggtttctttcctccttcacatgaactttaaaatagacattccggtcaggtggctctttatcttcatgaaataaatcaaagctgattttctaatct

SEQ ID NO: 141564 - DNA, 189 bp, Glycine max
gtgtatttgctggatgtctaaagagtaatacagagtgggttttggccgttttctagcagatcccaacggtcataatgtagatttatgtgctagagacttccagtaaaattttcgagtcgatccaacggttaatgaattggaacgaagagaaaattactgtggaatttgagtgtgaaaagctgcgatgat

SEQ ID NO: 141565 - DNA, 263 bp, Glycine max
cccctgaatgaatgaaaccatctatttgcctctccagacaaggaaaatgaaaacaagctcaatctaatagcatcctcaggcacaccaaacaatctgacagtgttgcaaatctcaatataagtggccagatgtgcatacgggtcttcattaggcagaacatgaaacaaattgtgccgaatcaactaaattaatgaatgtggataggttatattttgtgctcgaacctccaaccgcgcaatgctagtaaaaactatggcatagat

SEQ ID NO: 141566 - DNA, 316 bp, Glycine max
gtgtttttttttttatcctatcgccccatcttatactatgcgcattttatcatatattctgcggtgcccctatatgctatccttggatcaaaaaccataaaaggtccttagcttaaccacgagttccagaaatagacctagcacggtcatggtcttcagttcaatagaacaacacaggtagacgaagcgtacctgtcacggtctttagtgcaatggagaacaaccttcgatgtaacagtgcaatggagaaaagagcgcgaaagggtacacaaaaaaaaagaaagcgcgagagggtaactgagaataaggagcgcga

SEQ ID NO: 141567 - DNA, 222 bp, Glycine max
cttcctattttattctatgtataactactaccgctctcgtcctgataaaggcttaaggtagggagatccccttgctcctttccttttcaatttagtagctgaaggccacacaggtttgatgaggacaactatttctaagaatatgttcagcatctatcaagtgggaagtcataatgaggatgttaatattttgcaatatgcagaagaccactctgttttggg

SEQ ID NO: 141568 - DNA, 262 bp, Glycine max
  unsure (1)..(262): unsure at all n locations
acacatgaagagtcaataaaagcaaggcttagttttgcctttcaatatacttgtacacttatccaacaatcctttacaagccttgactctctttgaaattcttcttcttctttgtaccaaaaactttctgaagttttctggttntctaaaccttgaaaacctgggctattcaatctttcattctattctacctttgccaaaaagaatttcgcaaaggacaaaccgccgaattcttattgggatacactctcccttttccaaa

SEQ ID NO: 141569 - DNA, 427 bp, Glycine max
  unsure (1)..(427): unsure at all n locations
agcttgagcacctnttacttgattgatgggttgagccttctctagggctgtctgacaggtctatattcttcctccattattatctatgcatatagtaagcaggctgattccttttagatctaatatgtgccacccaattgcctccttctgtctcttgaggaactctatcaacctatttcttcttctgttgcaagcttactattgatcaccacaggcttggtcttgttctcttccaagaacatacttcaggtggttaggtaagatctttagctccaccttggtcttctcaggtggacttccgcttatcaattcttcaaaactggtcccccctgcaggcatattttcttcacaatctaagccttccaagcaagcccatgaattcttcttctcttcattggttagacaatctacaacattggtcaaagct

SEQ ID NO: 141570 - DNA, 292 bp, Glycine max
atatcattacagcaattaagtttaaaacacataatcataaacaaccaagagcaagtcaatataatcatcatgttcagtcatactaaacaagtattaaaagaaatactaagtattcaaatgtcataaaaatatagtcaaatacaaggcttaaaaacaaaatataattataatctaaatctattatcagagaatcaacttaattctaagtaacaaaaattagttatgaacacatacatgataactcattacttatctcaattattttagcacatcaatataattttgacaaaaa

SEQ ID NO: 141571 - DNA, 275 bp, Glycine max
acgacttaataagtcaaatatcgcgaccatggtgatgagcatgattatttattttctaggttgagtttcaggaaatcccaacccaaatgagcatgacccaaaaagcatatcttaataccctttgcattggtattgtgaaagaagagacgagttaaggacaatattcatataaatgagatttaattttttttaattaaaacccaaccaaaatactttgatattttttaagtatgtgtattaagtattcaattaacacatctttctacagtgaaaat

SEQ ID NO: 141572 - DNA, 421 bp, Glycine max
agcttagtggctacgtgtaccgccaaatctaattgcgttaacggtacagcgctcgcttcccgatctggcattgccagcgcaaattgccccccatgcagatcaatgctcgagcctgccccgtacatattgcttgcatgctggcaattgcagcatgtccaggtgcatgaggtggggtgaagccatagcgctcacccagacgagccagaaactctgcagacggtttctcggtgataccgacggttcggtcgccctgtacattagagtgtccacgtagtgggcagatacccgcaccaggcttgccaatgttacctttcatcaacagcagattgaccagttgctgtacgttctgggtaccatgttcgtgctgagtgatccccattccgtaacagattatggtgcgttcggcagcggcatatgcgtc

SEQ ID NO: 141573 - DNA, 171 bp, Glycine max
aataaagtagttgtcctttgaattggctacaagcttacggtttcaattgactgcatctcgatatactatgagacacaatcggacatccgagtaaaaagatatcatcggttgaatatgctcagagccttcgttgtcgatttttagcgtgccgatatattacgggaatcattc

SEQ ID NO: 141574 - DNA, 138 bp, Glycine max
gtacataattatgaatgaaacattctgatatattcaacatggaaactcctattataactaccgagtaatcaaaagctgagaataatcacaccttaggcttcatattctgttcatgaacattcaacatccttacagtcc

SEQ ID NO: 141575 - DNA, 224 bp, Glycine max
gaccgccaactgtacccaatgtgacgggtaccccataatcctacaagcttgagatgaggaagcgtagaagggtgaaacttcctgcttttatttgatgaccacagagtggtacctggaagatatgtcgcgggggtcatgagaccttgtggacgttcagaagggggctattgcccaaaaccaagcttgaccaatcccgacccaacccgggcatagtcagttattga

SEQ ID NO: 141576 - DNA, 373 bp, Glycine max
agtcacctgacgatgcagcttcgtcgttagaaaggatatattatatatatatatatatcagaagctaaagtgttcaccgttcaccataacacatagtaaccaagttgcggttgtagtaacagaaaatgtaacaatagagcattctattattacattagtacaaatgtacaactatagtataaaagaggccgtctatagtattaatttacaactatagacaaaaaattaaatcagacgaagtggtatcatgggagagccttttcatgtttgttcgctccttaaaaatacatagcactatttcaatctgtttctaaatttattaatataactatatatcatggaattcaacctctcttattaaagctatctggct

SEQ ID NO: 141577 - DNA, 314 bp, Glycine max
aaaattgcctgcaatacataacttgactcttgcaagagtctaagtgaagaacttagcaactattatagaaggctccatagttcacatactaaacatcattcccaaagaagagaaaaggatacaaggcctctagaggttaacattagcctcccatatttccatggaaaagataatgttgaggcctacatagattagaaaatgaaggttgagcaactctttgcttgccattatattagcgaagagagaaaagttccattgactacccttagctttcaagggtattccctctattggtggacttccctttttaagga

SEQ ID NO: 141578 - DNA, 380 bp, Glycine max
  unsure (1)..(380): unsure at all n locations
gagagaacgagagaggggggagctctatattgatgactaaaagggaagaagttgaactttgagtcgtgtctcacaagactctcattcatcaaagttaccacaagtgttacacatgcttctatttatagactaggtagcttccttgagaagctntcttgagaaaacttccttgagaagcttctttgagaaaactcctaaagaagctagagcttagctacacatacctctctaatagctaagctcacctccttgagatgagaagctagagcttagctacacaccccctataatagcttagctcacccccatgancaaaaaaacatganaatacaaaaaaaaagatccttactacaaagactactcaaaatgccccggaatac

SEQ ID NO: 141579 - DNA, 258 bp, Glycine max
tgcacaaaaaaaactaaaatgctccccaaatacattaagaaatcctaaaaactaacaaaacaaagatcctaaatgataatttctaaactatcctaattttgaatcaaaacaaggctcaatgtatcaaagtgctaggtaatcacctcaaattatatgtgaaaataaaacatatttaaccaatatcatttgtaaagcacttcaagtcttttaacaaagtgaaatttgaaataatactttcattaaaaatggtattttggg

SEQ ID NO: 141580 - DNA, 331 bp, Glycine max
acctgagctgcagctgtcgcttaggggttgtgatattttccaagtccattacctgctcggggccctttgcttgccacccctgtttaccatatgtgatggtgtatttgaactctttgtcttactaatgcgatgaatgttggaatgattaattgctcgctttcttcaaccctcacgaggatattttttcctaccagttttgaatccatcttattgtgatcttgtgaaattagtggcctgacgcatgggtgagacttttttatcattgcaatttcccaaatagttagatttttttttccgacgctcttaggttccattggcatcccttaactgg

SEQ ID NO: 141581 - DNA, 320 bp, Glycine max
atatgaattacggataatcgtcttcttccccatgggaacactacgaaaagtttctagtttgattagagttggtcactcaaatcacgactggttgctaaaacagaggctaagaatttgaatttattttgagatttcctataattcttcaagtgataaactgttacgaatttcgcacgggaaaattagttagagggatacttgttaaagacttaaaggggtcatcttgttaaatagtgggagtatggaaaaaggaagcattttgtcctgtatcacttgagagaactaaaaagtttccctgatgcgaaaggagatattcttgg

SEQ ID NO: 141582 - DNA, 418 bp, Glycine max
ctctgccggatcttaacactgagcatcaacttatataatatgagcactatttggatgacctactctaaactgcccatttctaccaaatcatttgcattatacccgcatccacgactctttttggtcacaaaatatattttactctgccagttcctctatttctttaaggcagataatattgaggacttcttagttcttgtgcaaatatgccggttgctatggtggtctgttcaagataatggtaattcttaatcagccttccatttcctatggattttacagttctttttctactgtacttgtattttaatgcatttggggaaaaaaattgcaaactggaacctatatttcgtttacatttaatcctttccacccaccatataagagatttctagtgcaatcaactgactatatggtg

SEQ ID NO: 141583 - DNA, 333 bp, Glycine max
tatttaatattcatctaggattttcttccatatgctgtagtataagaaagctgatgactcaaatctggtaaaatactataatcagctttaaaaatataaacatagccgaagtgtgatatacaaaccaaatgaagcggacagcattaatgatctctacagtgtgctttgttgccagattctccttcaaactgtcttctactaacagctttcttgagtaatcttctaattgagtacgttttccagaagcacccaaaacaccagccaacagaagcgggaagacacacaatatagagagcttctccgaaagaacagattttggtctcaaactaaagc

SEQ ID NO: 141584 - DNA, 234 bp, Glycine max
atgcaaaatctcggggccattaatatggtgatgatgagggagaaacccatgctgtgactgccattcctgtaccgccaagtttcccaccaacccaacgatatctttactcagccaataacaaactttctccttacccaccacccagttatccacaaaggccatccctaaatctaccacaaagtctgtctaccgcacttcccatgacgaacaccacctttagcacataccaaaaac

SEQ ID NO: 141585 - DNA, 226 bp, Glycine max
aagcggtacatattgctctatctatagacaaggtagcttccttgagaatctttcttagaaaacttccttgagaagcttctttgagaaaacttccttgagaagctagagcttagctatacacacccctttaataactaagattacttccttgagaaacgtccctgagaagcttctttgagaagattcctagagaagcctgagcttagctacccacacccctcttata

SEQ ID NO: 141586 - DNA, 315 bp, Glycine max
  unsure (1)..(315): unsure at all n locations
atttttaatgtaaaatttgtggcctatattaatttagtcacacatctcagntatgttcaatagttcaaaataaattatcaagatcagtactcaactctaaaacaaaaggataatcctatgttgatgttcatctatcaataaattttcctccttccaattaaagctcccatagggagaaaacaaaattcttaaaacaaagaatgttgacctttgaacatttgcggataagcttcttcttttccttcattaaagcctatcttttcgttctcatgttgaaggatctaaatggcttaaactcatttaaaaattctttct

SEQ ID NO: 141587 - DNA, 212 bp, Glycine max
cttcaagaagattgggctaaagctgctgaagaaggccctaaggttctcatgaacttcagggtagatttatgagcccgtgggccaaggttgggtccaattatctttgtacatattacactatgatgtcattatatatggcccttgtatttggggctccatattgtatgtacggtactcttgaaatataagattctttagcccttgtattatat

SEQ ID NO: 141588 - DNA, 423 bp, Glycine max
gaccttaagcaccgctgccgcaacatatactacaagaggggagacgttgtttttaaaaagaacactttgcctaatatgcaaatgattgcaagtacccatatactacaccggcctaccaaccatacccaaacataacaaggggaaaaaagctactccagaaaacactatctactgctcaaaactcacctagggtcttctacacttgagagataaagtattcattgtgtggtagagcatataatttctttccttcttaagcgttcacttaattacacgccctgtagaacgcctcgacatcgtaaattgctttatgacctggttacccttcggaaagaaagaaaatgattcctttcctaaaaagttatgacattccctgaagactaggaatcgctttagtgtacattcactccagtctactcctca

SEQ ID NO: 141589 - DNA, 348 bp, Glycine max
  unsure (1)..(348): unsure at all n locations
ccacataactggcgacaggtgcacaatattgattcatggacaaatgggttaccacgttaactaaagcatctaatttaccttcaagcttctttgtctcacttgatgaattcatggctacttcatgcactcctctaatgacaatagcatcatttctggcactgaattgctgggagttggaaaccatcttctcaattaaatttttggcttcagcacgggtcatgtctccaagggcctccccactggcagcatctatcatacttctctccatgtngttgaatccttcataaaaatattggaagagaaactgctctgaaattggtggtgacggcaactccataaaatttttaa

SEQ ID NO: 141590 - DNA, 360 bp, Glycine max
cttaatcacctgtagcatgcactcttgctataagatacttatgagcattatatatatctcgccttcttccacacatactatagcctgcttttattacactcctactagcgtcgaagtcgaggagaccttcattccttttatgcaccatggcggacaaaagtgggcagttaacttgaatggccattattgtcaatgcggaaagtaatctgcgcttctctatccatgttcacacattattgcaacttgtggttttgtgagcatgaactactaccaatatatagatgttgtttacacgaatgagcacatctttaaagcatacttcccccagtggtggcctctttggaatgaagccaccattcc

SEQ ID NO: 141591 - DNA, 392 bp, Glycine max
gcagctatggcttatattagatttctattttattaaacagcatcatctgtagaaaaatatcaatgacttaatgagattcatcctaattttaatacaagatatattccttttgctggtgcccatatgataaatagaggcgccacagtgcatatgaatcatattattttaattcaaattgtaatacgaataaaataatatattgagttaagaacaagcatagtaataaaattatgtttcttagccacagtgcctcccagttcaatcacacaaacatctgcagggcccttctttctatccacgggaatcacaacaccctcaatccaatctttaatagcatcagtgatgtgcgagaccacctattttaaaacaccaatacctcatacaaccagtct

SEQ ID NO: 141592 - DNA, 275 bp, Glycine max
ttccctactctgggctctaaatgaacagaatctgatggttctcttccgtgaatcttgttgcccaattgcaccctatcttcttggtccaaaggtcaatacatgtgtgttgagcaattctgtaaaaacgcaatgacctgggtctgtttataccaacaaaagacaaactgttatctcctcttacaaacattaaaagtgcacaaagaatgggtctttcattttattctatacacttcctatcatatttaataccttcccctctattaaaattaactctc

SEQ ID NO: 141593 - DNA, 301 bp, Glycine max
agcatgcacttgcatgaaatgaattaatcgctttatcacacacacaaaaaaaagttgccctaaatcaaaagttggtcaaaacgcacccttctgatatatatatcgaatgagacattcgactatatcgtattatcattacttagaacaagaaatgacaaacaaccatactatctatgcgattaaggcaaaacaccatactacaagtgatggaacttcatgtggagcttggaggtcttgaatcttcttcatcaatggagtcctttacttctttgaaaccatggcagtgaaatggaaaaagaag

SEQ ID NO: 141594 - DNA, 337 bp, Glycine max
ggttacacacaaaagccattcttaggaaagttccttccaataactctcctttctattaacatcatgttcctggtgtgagaatacgcttgaaggaccctaatgaagctcaaaggtgcagcctccatagaagctccacaagctagcttccatcaagtggtatcagagcacaagagcttcaagtaggggcttcttaaaccctcattaaatattttgctttaccttctcttccattgttggatcctcaattttcctcatggaactccccacatgcgctgtgcctaaagttggttacattattctttagaagtttcacccgaataacctgctctaaaaccat

SEQ ID NO: 141595 - DNA, 247 bp, Glycine max
  unsure (1)..(247): unsure at all n locations
cgccggtcttagcactgggctgcagctgtnactattgcttatatttttctgctggtatcgccctcgtgttatattctacgctttttcatcactatggagttatcacgcgattcaatttcgaattgttgatctgaactctcaaaggtctccgtttaaatatcaaattgctctttacacacgatcatgacatgtagaatgacattttaagcctatcttgatctttaggatgtcccttacactttttata

SEQ ID NO: 141596 - DNA, 323 bp, Glycine max
gtgctataaactataaaaatcaataaacggtcaacaaaaaaacatgtacaacacacagccttgaccgttcaatcaaatgaatcaaaaacaacaaattttctaccaacatctaagaatatcaaagacaaggcatttggcaggctaccaagtgacttggtaaatgggtgtgtttatatgggaatttatacgctacatattcttaatcatcataagtgagaacagatacaatgaccacatctaaagttactatgaaacaatatagttatttgaaacttaataagaataacaactccacctggtgagttatgcaatgacaaacaaat

SEQ ID NO: 141597 - DNA, 427 bp, Glycine max
gcaagcttaaccaagctacaaggaaagaccatttttctcttcctttcatggatcaaatgttggattgacatgtgggtcaagcatactattgttttcttgatggttactttggatacaactaaatagttgtttacctcaagaaccaagagacgataattttcacttatccctttggagtatatgcttatagaaatatgtcatttagattatgcaatgcacccgtcacatttcaaagatgtatgtaggccattttctccaacttggtggagaagtgtattgatgtttttatgaatgattcttcaatatttagcccatcttatgactttttgtgttgaaaatatgtatagagaccaacctaattctcaaccgggaaaagtgtcactttatggtctgagaaggcttaattcttggcgtggttatgcaaaaa

SEQ ID NO: 141598 - DNA, 357 bp, Glycine max
actccttcagctagggccatgtactctatttcagatgttgaaagagcaacaactgattgttgatttgctttccaactgattgttgtaccaaacaaagtaaacacatattctgttaaggatttccttgtgtctacatttcctgccaaatctacatctacatagcctgtgatagctgcctcgtgtgctatcttcttgtaccttaatccatctttcaaagatccatttagataccttagtgtccaccttacatcttcccagtgtgcactgacaggatcttccttgaatttgcttattatacttaccgcatgagccaagtcatacctgctgctaaccattccatacattatgctttcaaca

SEQ ID NO: 141599 - DNA, 445 bp, Glycine max
tcatgctgaagtatgtatggcaaagcttcattactattgtttacacatacaagtgagcttgtaacaaatcttctacacttggagtgctaacataaagtcctcttgaacccttaccgcccactttgtcatcatggcgagactcatgaagcccaacaggtttagccttttcaatgtgctctgaacaaaattcaatggttttttctgcaatgtacctttcaacaatagatgcttctagacgatgtagattcttggtatacccttttaagatcttcatgtatcgctcaatcgggtacatccaccgcaaataaagaagaccacaacattttgattctctgaccagatgaacaatttagtgaatcatgatgtcaaagaaagtaggaggaaaatacatctccaactggcacagtataattgcggcctcattttctatgtcatcaaacttgac

SEQ ID NO: 141600 - DNA, 388 bp, Glycine max
  unsure (1)..(388): unsure at all n locations
agctataaatagaaaagaataatgaaatattgatctaaagccnaggctgaccgctctgcagatttttcttatctcatttatattaatattgtttatatgtcaatttctttttaaaatctagaataaaatcagtgaaactcaaatcaaataccagtacttgagcattctattcaaaactctctcctatgcccatacctactgttcatgccacgcgaatagcacacattattaatacatatttagcattaagtcaattatatattcaatttacttctttaaatgattgagtgttacatcataattaagaattaattccaatatacagattgagtaaacattcttatgtgactatcttatcataaattactatttttctgcattatcctaa

SEQ ID NO: 141601 - DNA, 352 bp, Glycine max
  unsure (1)..(352): unsure at all n locations
ngnagaccattgattctgtcctccttttatgttgagatctcttattgttttattaatgcaatccggggaattcgatgaatgatgtttcctcaccatgacttaaaggtatatcccacccaaactactccctctccataacgtacctgtgatgctgcaccaaatgatgaagttaatgatgctaacactctgacataaagagtatctgctgctcttttaaactctaacgccaaataagattcgcaaagcaccttgctaaagttgcggaagaaactgtcctccgtatctgttgtatggctggccaatttgcatctcaattacttctccctgatttgaccaacaactttacctaaat

SEQ ID NO: 141602 - DNA, 392 bp, Glycine max
agcttggaattcatgctcttatagaattgattaaagggagaagaaagtgatgaccacacctggctagtaaaggttttacattgtccctccaccttgcacctcagagaatctgtgttgatttcgtccaacaaatcctcagcgtctagaacagcatctttcaactcatcaagccatgccttcactgcttcattagtgatctgtttctcctcagcatcattgagcacagcattgagttccaacagctttatcttcagctcgtccaagagagaaacattcagctttctattggcaaagaaatctcgaaactccgcagaagttatcctatccaacaagatctccacagaagcagagataagtgcctctcccaccatagcaaaagccatctcttctct

SEQ ID NO: 141603 - DNA, 447 bp, Glycine max
  unsure (1)..(447): unsure at all n locations
ctctttacgaccttaaaactaagcttggttaacagttctcactataaatactccaatgttcaccatatgtcaaataatatatgagtgcttatatttagacacccataaatttcaaacacctaattgacatctttattttctttatatttctctctcctatcaaatcatatcacttattatacatacatttctctctcttctctttatttttctctcaagatgtcacataacacatgcatgaggtatgtatattttctattcataatatataaaacaaaaacatcttggcatgccttgtttgtactaaaaaatgacaatccgaaaaggagttagtgtcctatgtgataatatcgccctgaggtaacattgcaagttgccacacttaagaataaccacaaatactagcataactttanagccaaatcatgaaatcaaatgtcaggatag

SEQ ID NO: 141604 - DNA, 434 bp, Glycine max
  unsure (1)..(434): unsure at all n locations
agctntgaacaatatacttgcgcttcatttatctgtctctgcgcttggcggtcacgctcaacaaagtactttcgacacctactgtacgttgatttgaccaatgctgttatgggaatgttgcgacaatccttcaaaaccttattgatacattctgaaaggttggttgtcatgtggccatatcgacatccttctctatcataagccatcatccatttttcctttgaaattcgatcaatccatgtggctatggctggactcagttcacgaaattnttctaaattttgatcaaaaatgtgcttgcaaggagtgtaggctgcataaaattacttatgaataacatggataagtatatatgaaaggtaaataaatgggaccatcaaatatgaaatcttacccaatgtcttcaacatgtctttttgttttcattattgaat

SEQ ID NO: 141605 - DNA, 456 bp, Glycine max
cttcaaactaagcttggatccataactcattttctcttgctggacatctcacttattcctagtggagcctacgcttaagcttggttccagccacgcttaagcttgaaaaccagtagcccattttcccctgcagatcatctcacttaggcgcaagtaactcttcgcttaagtgccgcaacctcgaaaagctttgaaaaagtagtttttcactttcaatggcttccaaatcaacccaaatggggtcctaaccatcttaaacatgtttccccacactaaatactcgaaacaacaacaatttacaagttctaaacaccttgacatgaaatctacaagaaaatgaccttaagtgttggtttatggagaactaacttcctacgcttctataacacttctaatgaaggatactccataaccaaacaagaataacaagagttaggatggactaactcctacata

SEQ ID NO: 141606 - DNA, 431 bp, Glycine max
gcttgctctgccgtaaaaaagatattatcggccagtgtttgttatataattgcgcaatgtcggctgaaaaatatccgtctgggctatttaactaccgatgtcggctattgttttttctattccacccctgaattatatttggatgatgcctattatgaaatgttcggtcggggtcatccggtcatgcttctttttgaggcctcgatctgtcgtctttcctagccggccgacgtcggctagcatatttttcgatcaatatctgtgtgaatcatgtttttttttgccaaggagggctaatgttttcttggccgacaaaatgaaaacatgcctatgttggccgaaacacaatcccgcacgaaaaaccctagccgacctacattgtaattttttcaggcaataccgaacgacgaaacttcgtcttccatgaagaa

SEQ ID NO: 141607 - DNA, 223 bp, Glycine max
agcttatccctagaggggatggacctttccttgtttttgagaggatcaataacaatgcctatatgttggacctcctaaaagagtattgagtcaacaccacttttaacacttttgatataatctcttttgaagggggagcctgtattgacgaagaggaacttaccgatttaagggtcaatcctcttcaagggggaaggaatgatgcaatccttccttgaaagga

SEQ ID NO: 141608 - DNA, 377 bp, Glycine max
  unsure (1)..(377): unsure at all n locations
tctacaagaagagatggccaagagaaccaaggatggactacttatcttaggcaaggaaggaggaagccacaaagagctgaattggaccactttagagatttttttgaatgtcttgcttagcgagaccaactcactatgctcaattccattcagaggaaataattcgcttagcgacaccaactcgctcagctagaagagaaactgtgcttattacggatgtctcgcttagtggcaaccttttgcgagtctaagttaaatttcacttagtgaaaccagctcactaagcgagtcttgcaagttataaatgtgtccaccaacgaagaaacacganttttacccctcttctctcaaaccctaacccacctcttctctaccat

SEQ ID NO: 141609 - DNA, 400 bp, Glycine max
  unsure (1)..(400): unsure at all n locations
agctnggacgaatcataaaatagtctctaaatcctattttcaagacatcattgaagactgcaaaattttgtgttgaggaacccgaggtttcaaacttcattttgtaaaaaagacaaggtaatagagtggcccacaatttggcccaactagctttttctcatcacaatcatgtttggagtaagcaaatgcaacctcatattgatgctcttatcctatctaatgtaaatatggattgtttggttgaatcaaattcagtctttgcatataaaacaacatattatgaaaatcaaagaaatattgaatggacttatacggatgttttgagaagatctaaagcctagaagcactatagttttgagccttttttttatcttatttcaattatgtcattattcttttt

SEQ ID NO: 141610 - DNA, 364 bp, Glycine max
ttaatggaatgagaaagagaaattattttatgcattgttagtaagactattttacgtataatacttaccaaaatattaattgtttcttcaaaaaaaatcctcaaaaatgatcttgtagtcaaaaagtctgcatcaagaaaagcaatgtggttaattttttatctatatatatatagctcataatgatacataattatttacacattgactataggttttgaaaaacttccataaagacaacattggtggttgtctttaagggttttccttctttgttatgtattaaaatcttcaacccttgtttactctgcattctagaaaatgccacatataattgcctatgacttaatacaggtcttggcaa

SEQ ID NO: 141611 - DNA, 420 bp, Glycine max
agcttttatctacccaagatcatacaaaagtgttacaatagaacctaacgatttctaattatatgggccataaaatctatcatgtgttgacagtaattgattatcccgtgaatttcctctggggctgaacacacttcggcgatggcctttgctttggctagtagttacgggaggtcttgacttccatttaaggtcaaggcgaacctatccatccacatggtcgcttcttgatgcaatgcatcaatcaccctccctcttgcttccttctcggcgtacgcttgtgcgaagtcttctactagtttttgctcgtgggtcaaagactggctcaactcttctttgtaatgccctattatagctagcatgctttgctctgtggcttctaaatatcgggccacactcctctcggatcttgagcaagca

SEQ ID NO: 141612 - DNA, 382 bp, Glycine max
ctttctttgtgggttgatgggttctatcgtgcagaatggtgtgatcactggatgacatattctcaattagctcagttgcttcttccggggtcttcagctttatttttcccctgttaaagcatctagcagctgcttggtttgtggtctcaacccatctatgaacatattcaattgaattggctcggaaaacccatgggtgggagttcttctcaataaacctttgaacctttccaatgcttcactcaaagattcatcagggaattgatgaaatgaacagattgtagctttcccttccatagtcttggactctatgaaagatctctttagaaacttttcaacaaactttcccccaggttttcagactattacccttaaatgagtg

SEQ ID NO: 141613 - DNA, 436 bp, Glycine max
agcttggaattgcatttgggcacctattttgtatctcctatgttgtacctacatataagaaacagtcccactctcccaattttacaaaatcatattcatatatcattggggcatttcaccgagcacttggtgggcgcatgtttggacataaattgaagagaatgggggcaatatggcatgccccattgcttcagaaaacaacacaggcctaaggccttctcacacaaatcctcaattcaacaaatcaagcatcaaagcaacccaaaactgcctcacaaatataagcacgttctcacaatttagagcatcaaaagatgaagaaaacacatcaatgggaagctaaaaacttaaggattgaatacttacttgttggagtgagtagaaacaccaaaaatgaaagcaaaatgcaaccaacagtggcttaggggagcaaaaa

SEQ ID NO: 141614 - DNA, 426 bp, Glycine max
tatgctgcaaacatctacaatagacctcctcaacctcagtttcaaaatcagccaccacagaacaattatgacctctccagcaacaggtacaatcccgggtgaaggaaccatcccaaccttagatggtcgaatccttcacaacagcagcaacaacaacaacagccttattttcataatgctgctggcccaagcagaccatacgttcctccaccaatccagcagcaacaacaacaacaacaacaaccccaaaaacagcaaacagttgaggctcctccgcaaccttcccttgaagaacttgtgaggaaaatgactatgcaaaacatgcagtttcaacaagagaccaaagcctccattcagagcttaactaatcagatgggacaatttgctacacaattaaatcaacaacagtcccaaaattctgacaga

SEQ ID NO: 141615 - DNA, 413 bp, Glycine max
  unsure (1)..(413): unsure at all n locations
cactatnngaaactcatgcttgccgcccagctcgcccaggcgagcaaggttgcttcctctataagcaacaaccttctggaggaatcttctggagggcccaagtgggcctggttgctatttgcacccccctttttactaaatgcacccccttctattatttggtaattctttttccgtaacgttacgaaacttcacgaatttcgtaatgatgcttattcttcttccgcacggttacgaatccttacggattatgtatttactcttttttagctttcgaagaagttacgaaaacttacggattgcgcaaaaacacctcttttcgacttcccccacattacggaatttcacggatcgcgcaagcctgcttccttttgaattctgagacgtctcgggacttcatttattgtgcaaca

SEQ ID NO: 141616 - DNA, 404 bp, Glycine max
tcaagctggcacaccatcgtcgttcttcccaatctcatgccgggctcatatccatgttccaacatcacacaggctaccatttatgcgaccccatatgagcgtggttgtactgggggaggctccacataagcattgctcaccacttccaatgcttgaaaggctgtctttaaagactcctttgcgccctccacatggggcatagaagaaggaaaattcaccagaatgtcttcttcccccgagactatgatcaattgtccctctaccacaaatttcaacttttggtggagcgttgaagggactacccccactgagtgaatccaggccgacctaacaagcagctataggccggatttatgtccatcacttaaaaagtaattggcagacgtggggcccattgaattgga

SEQ ID NO: 141617 - DNA, 374 bp, Glycine max
tgtcacgaaacaaagggttagctgctatcaatttcttcagtcagccagcattatgtctagtgcagattttgtttctccatacttgccagcaacaatatttttcccattcaattctttactacgcagcaagagaaatgactaagcatatagcaaattggaaaaaaataacacaacaggcgaacaccacagataacctacttgtccaatgcttctaagtacttctactttcgtatctcaaagaagatcttcatggagtatttattggcatccaacttcctaaaaccagacaaggacttatccaccttatgccactccctatttcttaccatagtcttcaaataccttatagtaaaaaaaaatcccgattattggtt

SEQ ID NO: 141618 - DNA, 423 bp, Glycine max
  unsure (1)..(423): unsure at all n locations
agctntgttacacaaattatgtgagtgtttaatttgacgaataaaagtaaatgttctttatgatttcagatcatggttagaacatgaggcctacgtcgtgtggtaggcacaggtagagctagagaccttagtcaggatgtggctgaggatgttcctcgccgtcgtaggcccactgcctcagcacgtaggcaacgggttacccaaatggctgaggatgtggctgaggatgttcctcagttgcctgaggatgttcctcagttgactgaggatgtccctgatgcgtctgatggtagcccacagaggacaggagctaccgatgctgctaagtctgatggagtggctaatgatgggacagctgctgatgatgaggggttccccggtgggccacacgatccatctggtttgataggatttgctgatcat

SEQ ID NO: 141619 - DNA, 442 bp, Glycine max
ccttcaaactcagctggctaatggtctatttcgatagatgttagaacgttctatgttgtgttttattctgatttaattgactatggaaatcttaatctttagataagaagggcttatgttgtgctttattttgttttaattgattgtggagatcttgaatctaaagaaaagatgggtttatgttgtgtttttattttgttttaattgaatgtggagatcttgaatatggagaacttgaatttagagatctcatccatgtttgcattttttttgcgtcaattaattttggtgatttttaaaccatcaaaattgtaacttgattttctaattgaatgcatgtggtttaaaaaattaccaaaaatcattttaaaatttaactaacatgtcaacacttaatagagctaacctaactgtagggaccaaaaacaatttttattttatt

SEQ ID NO: 141620 - DNA, 340 bp, Glycine max
gcttacagctgtacggacgggcttggcgacttatttaatgtattattaaacaaaaacctgcatatcttaggccataatgctattaaaatttcgagcacataaaatatgtgtgcgtgtgtgtcttccttgttgagttacgaacgagtatgattgtgtctggcctcaattttgagatactttattttcactacagaacatgttgccacaaagactgctgttcagattccaagtcatgctcataagctctgttctaagggttactgctctatttaataatcattctctgccattttttcacttaccataaaccatccttctgactacgtaaattttgatgacc

SEQ ID NO: 141621 - DNA, 334 bp, Glycine max
  unsure (1)..(334): unsure at all n locations
tgaaagtgaagaacttctaggctatgcacacagtgattgggtcggatgttcaaacgatgcagaaagtacctcgggctatgttttctcatttggaagtggcactttatcatggggtttaaagaaacaagatgtgattgctgaagctgggcatatttcagctggagcagtatcaaatcaagccatttggttgagaaattttttatctaacgttagacaggttcaaagtgaagcaaccattttgagggtcgacaacaagtcagctattgttatagctaanaatactgttcaacatggaaggactaaccacatcaatggtaagtatcatgccatttga

SEQ ID NO: 141622 - DNA, 402 bp, Glycine max
  unsure (1)..(402): unsure at all n locations
gacttcctatggtggtgagtttgttcttgactcatcttctccttgaagtggcatctccaatcatctttcttccttctccattccactgccgttgatcttcaagaagcaaagacttcattgatgaagaagatccaaggcctacaagctccacatggagctacatcatgtggtatcaagagcatcttcgtttaggtgatgttcttttgcttcctctatgtttttgttcggtcgattcaatttaattccttattcttcatcttattctccatgtatatcctccattttcttgtggtttggtgcagtttaaagtagattcaaaaaaattaaccgattaaatcttagatctacacttgttcttgcntttntatgggtcaaaatttataaatctactcttgaatcatg

SEQ ID NO: 141623 - DNA, 443 bp, Glycine max
tggaattctcataagcttgaaaactcaggtcctgcaattcatttagttggagcctcttgtggtcaccaactgcatttgagtcaaagttcaaaaactttaatgcccagtaagctttatgtcccaactcaacaagtaggtgacaagattttccataaaccaattggaagggagtaagtcctataagggctttgtatgttgttctgtatgcccataaagcttcatgtagtttttgggaccaatccttccttgattaagcaactattttttcgaagattttcttaacttccctgttagaaacttcaacatgcctattggtctgaaggtggtaaggtgaggctaccttgtgtttgacattacagtgtcaaaggacttttttgagtaggcattacaaaaatgggatcctccgtcacttattagtaccctgggtgtgccaaaccttgaga

SEQ ID NO: 141624 - DNA, 432 bp, Glycine max
  unsure (1)..(432): unsure at all n locations
agctnntatgaacctctttgctgccttacacttatcagcttcctctcttgctacaaaccaactctcctcaattttttgtcgacactcttgtattttacggtttttgagctcacactgctcttcaagtctcttagcctatccaataatatgaaacagtagcataagaaagtctcttcaagaaaagtaaatgcaactcccgaatgagtaggaaacgtataatttacaactgaaggatatagagaactcggaatgaaaggaatgttgcaccccaaaaggctaaaatgtgacaacagttataccaatggaaactaaaaaaattaatacaattgcttaaaatggaagaaaaataaggattggaagaaaaataaacatgtagagtgtgccagaaaggcattaaaaacatgattcaatagtttgaaggtgacgcaaaag

SEQ ID NO: 141625 - DNA, 450 bp, Glycine max
tactaagcttcatgggattatgggtagcagcactgcaaaagtgattctattgaccatcaacactgaccccgctattctgcacactacttttatcatcctgggactctgtgtagaaagaacattgattgatatcatatcccttccaagtgggaacattcatatttggacccacagctagcaatcttaatgtgtttgaagcactgtcatcggtgaagattgtttgtccaaaccaaggtatgaaagttatattgtgctcttgcaacaacctcatcatgttcatttttgagtgaatacgactaagatgttgtttatgagcatctatgtaagggattacctcagttgtgttgtgtaatacatatagatgtgcttgtaccagctgttggcgatccatggttacaacattgaacccctgtgtgcccctaccttgaatggtgtactcatgacgacttt

SEQ ID NO: 141626 - DNA, 462 bp, Glycine max
atcttgagtcacctgaggcatgcaagcttactttttttttttttgccaaggaagcttccttcatttaaatggtggttaggatatgataagatatgaagactctattaagtaagcttactcgtgcaaaggactctattaagtaagcttccttcaatcaatggcttactttttttttgccttgctcaatgcttcagaaagagagattgcttaaaaacatatatcgagtgtagtttacggaacgagtctaaaagcctacactgggattattgattaacaataagctagccacgcaaggtagactgattcaaagacggataccataggcattgagaattgcttatagagaagactgactactggtgcggaagatgagctgttaataaagattctcttacttacgcaattcagtctttaacagcgcttatcccgcatcctggactattcttaatgttcttactggga

SEQ ID NO: 141627 - DNA, 405 bp, Glycine max
  unsure (1)..(405): unsure at all n locations
tcgagggggtgatggggactcggtgctgagaggaacgatgataatggctacgtangagtgcgtgagctcaatttaaaggtgggcaactggggatggtgtgttcatgtttgacttgtggaagtgggagatttgatttgcaccatcgcccgatcgccacctagtaccgcatatgacgggtgccccataatccaataagcttgatgtgagaaagcgtggaagagtcagncttcttacttttgtttgttgaccacagagtggtacttggagatatgtcgcgggggtcaagagaccttggggacgtcaagtggggtgctattgcccaaaaccaagcttggcttatcccgacccaacccgggcatagtcagtcagtaagaacctgcgacgtacctaagcaggtgagctcct

SEQ ID NO: 141628 - DNA, 342 bp, Glycine max
  unsure (1)..(342): unsure at all n locations
agcttcaaaccaaagcaattcaaaatctatgtatctaanacccctcaatttaatggattttcaaggtttgagaagtgaaaatgagaatggggtaaatttggagcaaactctcacctcacacaagtctataacattaatataaacttggtcaaactggttttatgcctaaaattccatcgaatcaaaatttgactcctcaacacccaattttaccttaaaaatggcccttgttttcactttggtcactcatattcctcatttgcatagtctaagctttctcttaagtcctaaatgacatttcaaactaggattaactcactttaaccccgaataccactgaat

SEQ ID NO: 141629 - DNA, 393 bp, Glycine max
atcgtcgtctataagcacggctggaacagtggccagacgcactggtcgaacttccaatgctgatgctgtttggcatgcctaggaaacatgcatgagggcatgtctagtgtccgataggggcgccgtcaacggcgttgggtagatcgactgtgggcactcctgatggtgggttcgtcagccagagaggttgccatagctctagtggtggctgacaacattgaccggaaatgttgccaaaaaattcaaaaacaaattgtcaaaggagaaaaggtccctatagcactagaatgcggagacaattcgcaggaaaactgacgaagcagaaaggtccaccacggacagcatgtccacccgggaaacccaagacctactgtccccagtggagcacgattt

SEQ ID NO: 141630 - DNA, 279 bp, Glycine max
  unsure (1)..(279): unsure at all n locations
agcttgatgtgtagcaatcagcttcacttcttccattgntntgctaaatcttcaacctttagttgaatctgaattgattgatttctttcttcatgttttgtacctttttatagtgattctcttgcagccttgtcagatctgataaggatttttcttttggaaaatgtatattcacattcacatctctcattagtcaagtcaaacaaaattatcctaatgtaaatttgtaaagctctctgacttggtggcatgtattcctctgtagcctaagaaaaagac

SEQ ID NO: 141631 - DNA, 442 bp, Glycine max
  unsure (1)..(442): unsure at all n locations
tgttatgttntacatgttntcacccttcatatgttgtggctaatgtgtccacatttgttttgcacttttaaagtcatgaactttggtatactccttttttgagggcacataacagagcattgcaggatttggagtttagtaggagtctttgcttgtgagcgtttgtccatgagcttttgggcacttcatttagtatttcattaattggaatgtggtttccattctccattacatcccaaaggtcaatatgaatagactcaaaataagctatcatgtgttccttccagtagtcataattttctcttctaagtagtggaggcttattggtggagtactcttcttccatatctttcatttatcaagatcttcctttgtattcattagaattcttaacccaagaggcatagctcttatgccaactganatacaataagtcacacta

SEQ ID NO: 141632 - DNA, 411 bp, Glycine max
agcttgtaggattatggggtacccatcacatgtggtactaggtggcagtcgggcgatggtgcaagacaattctccatatccacaaatcacgtataaacccaccatcccctgttgtccacctccaactgagctcacgtactcccacgtagcccttatcctcgttcctctcaacaccgggtccccatcaatcctctcaagctcccacgacatccaagaaattccacatccaatcatcatggactaacaaaaccaagcaaaacagggcagaggcagaaaactctgcccaaaacacaactcaaaatcatagcttttcacatacaaataccccagtaacatttccttcgttccaatttgttaaccgttggattgactcgaaaattttactggaagtctctagtacataaatctaca

SEQ ID NO: 141633 - DNA, 438 bp, Glycine max
  unsure (1)..(438): unsure at all n locations
ntgtggatttggtcttcgccggcgaaaggatcaaactgggtctggaaaaggcaaatctgatcatcctgctntgatgaatgcgaaaattggggcaaatgaagaggatgagaatgagggagaaacccttgctatgactgccattcctacacggtcaaatttcccatcaatccaacaatgtcattactcagccaataacagtctttctcacctaatcatccacaaaagccatcgccaaatcagccacaaggcctgcctacttaccacacacccaatgcccaaacaccacctttagagcaaaccaaaaaggaattttgcatcaaaaagcctataggatttaccccaaattccagtgtcatatgctaacttgctcccatatctacttgataatgcaatggtagccataacccctgccagggttcctccacctgcatttttccg

SEQ ID NO: 141634 - DNA, 417 bp, Glycine max
agcttcccagatatggagagctaaatcctctgttggttcttccttgtaggcacttgatgtaaatacttgtatatctatttaatgatgttttatgtgttatctgtgctattagtacttcatttcagtgtgtttttgccttgatcacgtagatgtatgctttgttaagatcattcaacagtggaaactggtctgattcttagaacttgataggacagggctagtttatcatattatcacgagggatcggggtacggtaacttacttgattggatgtttgttttaatgcgattctggtcgagtttagtccaacaagaggaatctgaagacgatgcttgaccgggattaagctaaactatcatgaggaatcggtgtttagcatttcacgagacaccatagaacacatgatcattgttaagt

SEQ ID NO: 141635 - DNA, 375 bp, Glycine max
  unsure (1)..(375): unsure at all n locations
tactaagcttaacgccaaagcctaacgcaccataaagggggagnntgggtgagaatgcccatacttgctctcagaagaagacaaaaataagaaagttcccgatcaagggtcggaagaaagcaaaagaagaaaactcccaatcaaagattgggagaaagcaaaaaaagaaagaaaattcccgatcaaagatcggaagaaaacaaaagacatatgcagaaaggtctttgggccagacaatatctgaacaatacagaattgtcaccaccaaataaggaaagaaaggaaaccacgacctgaagtggtcctctcccttagattgccaaccaaaatcctgtgcgtcagggactttttcacctcgcactaaacaaaaataga

SEQ ID NO: 141636 - DNA, 434 bp, Glycine max
agcttcatgctaaactggtttctcctttggatgcctgcaaccacatcatacagattttcaactgtaagactctgaactgttagttttcatattcattttatctgttcaagtgtttatcaaaacaattgtgttataaagcattaatgttgatatatggagattttcttttttagaaagtaataatgactgacattcacacaatgaggcagagcattgacttgctatttaactttttaaaatgaggtatctttccatttcttatatttctataaccacaatacttgagaatgctatttataatataaatgattttcagatctagctatgtagagtattatataagattagttatcaattatcatactatggcatttgatgtctaactgattcaagatttctatgtcatttgacaattgagttatggaatgactttg

SEQ ID NO: 141637 - DNA, 430 bp, Glycine max
  unsure (1)..(430): unsure at all n locations
nttagccatcatgcttgtgattgctgagcacatgctattagcatatatgtagttgttcataatgtgtagctaaatttataccaaatgggaattcagcctagctgactaccaaaaaatatcctattaaaacctttaagataccgaagcatatccctagaggtttcacgtgttcagacctgtggaatactcgagcacttattatcgcgtctttcaagagataacttgtttctactagtatcaagtatttggccctgttgaagtcccgagtaccatggttattcaatcgttcaaaagatagcttagttactaccatcaagtatgtggtcctgcctaccatggttatcctatacttcaaaagatagcttgcttaccattatcatgtattcaaccaggttgagtgtgacaccctctacccatacatatatgtatt

SEQ ID NO: 141638 - DNA, 393 bp, Glycine max
  unsure (1)..(393): unsure at all n locations
agctntacatacattntggagttgtatgccattaccatggctagcacaaatggcggtactatttgcttgggaaccctatcatcattgtcattgaccattagagtctaaaagagttcatgactcaggtcattcagaccccaaagcagcaaatttacttatcctaattgttaggctacgactatagcattaagtactgtgttggttcgagcaacaagacagaaggcacactatctcatatattgtcccaaggtacctacttcactctttctattatcaattttgaattcctcgacgagctccagtggtcccttccgcaatcaccaataattcacaaattgatgaacaatataactttgcatcctgaagctcacccaaactactccattaacccat

SEQ ID NO: 141639 - DNA, 398 bp, Glycine max
  unsure (1)..(398): unsure at all n locations
agctntanacgagaaggtgaagcctgagataatctccggcgaagtacctgcaggggcagcggtcgtctgcgattatggactgaatgacgtaaggtggttggtgatgggcaacgacgacaccgtttggtgaccggttccaattatattgggagtttatcacttgcagtcgcagcagaatacaacattttctttttaaataaccttttctcagctcgtcaaaaatattttccaacaaagaaatatatatactatttctattattttacctttagaatgatgcgtggctcaacttgagagcttggcaacaaaaacaacgattccgtcccttcccgccaagcttttggtgtcctcaaacaacgttaatgtggtggtagctctgcctcttagctgtgttcact

SEQ ID NO: 141640 - DNA, 430 bp, Glycine max
  unsure (1)..(430): unsure at all n locations
ttgattncaagagaagtgaagtgaagttgatgtgcgtattatccctcctcccattgggatttggagccaccaaacaaattactcccttcactcctttaagagtcgtttctgtttctgtttcagtttcgattcttatcataatttcacactccacaatgatcaaagtccaaacaaattgcattgtatttgccactgtaagcacccactgggctcaactatttctgtattcctattctatagccttttctgtcctttcaccggctcaatttattatttttcttttttatatgtctgagttaatttatcattcttatttatttattcattcaggagcacacaataatgactaggttcactctgtgatcatgcaagaaagtaattactttcaacgcaaaaattatattaactgaaaatcatatgtgtttcgtta

SEQ ID NO: 141641 - DNA, 386 bp, Glycine max
  unsure (1)..(386): unsure at all n locations
agcttctcccccaattttctataaatagggggagaagtgaagtanaaaagggttcagccccttaggcacttctctctctctcgaaatagctgaggaaaattagttccgtggagaaaatccaagccgaggcgcttccgtaacgtttccgtgagtaattacacgaagattctcgaccgttcttcaagattcatcgttcgttcttcgttttcttcagtcttcaacgggtaagtacctcaaaccaagcttttcaattcattctatgtacccgtggtggtccacattttgtttcatgtatttttattctctttttcatttactttatgtacccccttttgacgtgcttaagccatttatttaagtcatttctcgcttaatctaaaaataaa

SEQ ID NO: 141642 - DNA, 225 bp, Glycine max
  unsure (1)..(225): unsure at all n locations
ggaaaaagatgaaggagaatgtcttctccagcctctctgcccttcttctttctgnttttcacgtggtagatgggtggctacgctgtggttgtcgtggtgccctttggttttccaccaatctcagtattttaaaggctcttggacttctcagcacacgaaggctcgctcagcgagcatgtctcgttgagcgagagtaagtgaaaatctgtttaacaagcttgggcg

SEQ ID NO: 141643 - DNA, 297 bp, Glycine max
  unsure (1)..(297): unsure at all n locations
gaccggatccttaagcaccgcagctgcagctttccgaanaaaatggattttaattgaaaaaggtggtangggcaattttggcatttaatagctttgctgggtgctccagcaaaaatgctgggtgcacctagcaacactcgattacttttaggaaaaaattgcgcttgtccaattaatttgtggctaaaattgggccagtcaaatgctcaacatcctttggttcttgttactgttttttaatgaccaaatgaagggcgggacattntntttttttcctccttccatccttctccctaa
